United States Patent Application Publication US 2005/0228172 A9 - sequence listing, part 75

SEQ ID NO: 330768 - DNA, 631 bp, Homo sapiens
tttaataggcaaaagaaagagaaaagctttctctcctgcagagaaagcggggctcccaagtgggtcttctggctacatggtgaaatgcacggggttttatacatgagcatgaggaggtggtgtctgatttacatgggggactagaggctggtcagaccagktgggccatttgcatagtatgcaaaggagatggccaccccactctaatcttttattatgcaactgggttctctacctggctggaatcatgttgtctattttactgtacccatggttgacaaagaaaaaggaagatggaacctccatgttgagtttgcctgcccccccaggtagccttttcctattggtaccgctgctggcttttctatgtctgcagcttgatttttcaggctgctgtttgttagaaaagaaatgatttgggggctgctttttattaaaacggaaaccttgccaaggactcttttatcctcactaactgcctaaataatttctttctagctccagaatatatttgtgaggtgaataatttctttctagctacagatatttgagatctgtattcatattttctctatttttcagttattttggttctaattcatatttttttctctcactctaacacactttc

SEQ ID NO: 330769 - DNA, 613 bp, Homo sapiens
ggatatgtagtctggggtaattgtctttttaacacttacaaatattcttccactctcagagcctaccttatcactctccatgacttctagtgaaaagtcagccttaattgaattttgctttcttgtacgtaatttcagtaatctcatggtgcattaaagagttgatgtttatacttggttttcaaaagcttaacaatgatatacctaggtgtgggcttctttgtgtttatttaacttagatttcatttagcatgtcacatctgtaaatttgtgttttcataaaattcaggaatttggggccattattttttcatacgtatattttctcycctatttttccatctcttctctctttggaataccaaatgcatacatctaacaatttgatatctatcagtcccatcagaatttcttcattgttttgctccaagcctttgtttttttgttttttgccttagatacttaacattgctctatctttaactttactctttgctctttttttctggagtatcaagtccacttaatatttttacaatttttattttgtcaattgtattttcagttctaaaatttcccttggttctcttatactctttctttactagggatt

SEQ ID NO: 330770 - DNA, 542 bp, Homo sapiens
ccaaaccacgagcaaagagaataaaaataaataaacaaaaatgagcacagtgtcaacgaaatgttggacaacttttagcagcctaaacatatgtatacttggagtcctccatggggcagaagcaaataagagagaaaggaggattaggaaacaaaatatttgaagaagcaatatcaaaatttatctacatttgatcatagctataaacccatagatctaaaaatcccaatgaaccccaaacacaagaaataggaagggaactgcacaaaggtaaattataataaaattgctcacatccagcaataaagacagactcttgaaagtagttatagatacattatgtgcacaggaacaaacataaggatgacagatttcttgctgaaaacactgcaactacatatgtacamaaactcttgtatataaatgttcctagaggctttatttgtaatattccaaaaccggaaacaaaccaaatgttcatcagaaggtgaatatgtaccaaactgtggtatattcatgcgatatccatgcaatggaatact

SEQ ID NO: 330771 - DNA, 627 bp, Homo sapiens
ttcttaatttcagaaaaggggaggatgtttttaattcttcacctttaaccatgatgttaattgcttccatctgtgattgtttcctttctgacttaataacttccttcaatatttgcatttatgtcaatcatctggtaaaaatttcacccaacctttatagttttccttcacttttgaaagacacttttcatgatacagaaatctagtttgtcagttattttctttcatcactttgaagatgtacttattctgggtttttttttctttatttttcttctggctacttycttttattttttggttgcaagcttgattttatttgccgtttttcttgcttaaacgtgtcttgaaactatggctttatgtctcttattagttttagaaaacactcagctattatcccatatatttttttctgactcattccactctgctcacttctttagagtctaagtacatatattttagatgtttttatgccttgtcctatacatcttttattttttcctacatttagcttaatttctgtcaatttcttccttagtgtatacagttttctatgacctaacttttattttgttaataaactctttcatattgctaaatttccaattaaatgtattgtgg

SEQ ID NO: 330772 - DNA, 526 bp, Homo sapiens
ctttagcttcatgaagagtccccagcaatcaattaacataggaagagaatatcaggcctggtttataattagttctgcataatacacaggcaccactcaaaagtggacacctggagtactgcagcacctttatgggacattcctgaagtacagatgtaaagataaatttgctcaataggcagaactttcagcagtgcagagctggttttgcacttccttggaagaagaaatggtcagatgtgtgattatatatcaaattatgtgatgtagtcaatggtttggcaagatggtcagggacttaagaggaacatgatttaaaaagtattcacaaagtcctttgaaagaagcagcaggcagcagcctacatcatgaaccaggtggaaaactttccacaagagagagwgaacttattcacacacccagaatactactacaacaataagcatctgagaaagccatcacacaaagattctttataaccaaggaactcatacacagccttcaccactgaaagcactcaaagcca

SEQ ID NO: 330773 - DNA, 526 bp, Homo sapiens
ctttagcttcatgaagagtccccagcaatcaattaacataggaagagaatatcaggcctggtttataattagttctgcataatacacaggcaccactcaaaagtggacacctggagtactgcagcacctttatgggacattcctgaagtacagatgtaaagataaatttgctcaataggcagaactttcagcagtgcagagctggttttgcacttccttggaagaagaaatggtcagatgtgtgattatatatcaaattatgtgatgtagtcaatggtttggcaagatggtcagggacttaagaggaacatgatttaaaaagtattcacaaagtcctttgaaagaagcagcaggcagcagcctacatcatgaaccaggtggaaaactttccacaagagagagtgaasttattcacacacccagaatactactacaacaataagcatctgagaaagccatcacacaaagattctttataaccaaggaactcatacacagccttcaccactgaaagcactcaaagcca

SEQ ID NO: 330774 - DNA, 566 bp, Homo sapiens
aacaacaaaaactgcaaaagatcartggaacaagttgggtctttgaaaagataaaattgataaatcactagctagattaaccaagaaaagaaaaaagattaaataaccttaattagaaataaaaatggaggcattacaactgacaccacaaaaatacagattattcaagagtactataaacacttctgtgcacacaaactagaaaatttagaagaaatggataaaattactggaaacacacaaccctagcttgaatcaggaagcaatatacatctgaaacagaccaataacaactggtgaaattgaatcatgaatttaaaaaatggccaacacaaaaagccctgggttagctggagtcacagtcaaattcttccagagattcaagaggaattggtaccaatctactgaaactatttcaacaaaggcagtatcaccctgataccaaatccaggaaaagacgcaacaggaaaaaaaaaaaagagagaaaaaagctcatgaacatagatgcaaaaatcaccacaaaatgcaaggaaaccaaatctaacaactcagaaaaaaaaattaac

SEQ ID NO: 330775 - DNA, 555 bp, Homo sapiens
aaatcaaacacaaagctagaagaaggaaagaaataacaaagatcagagcagaactgaataaaattgaaacaacaaaaactgcaaaagatcagtggaacaagttgggtctttgaaaagataaaattgataaatcactagctagattaaccaagaaaagaaaaaagattaaataaccttaattagaaataaaaatggaggcattacaactgacaccacaaaaatacagattattcaagagtactataaacacttctgtgcacacaaactagaaaatttagaagaaatggataaaattactggaaacacacaaccctagcttgaatcaggaagcaatatacatctgaaacagaccaataacaactggtgaaattgaatcatgaatttaaaaaatggccaacacaaaaagccctgggttagmtggagtcacagtcaaattcttccagagattcaagaggaattggtaccaatctactgaaactatttcaacaaaggcagtatcaccctgataccaaatccaggaaaagacgcaacaggaaaaaaaaaaaagagagaaaa

SEQ ID NO: 330776 - DNA, 566 bp, Homo sapiens
ctccttctaaaagaaaaagagaaatgcaggagtatcatagagagaaaaaatttatggttttacacagctggctttgaacatgctgttaaggtggaaaaaacaagaaaatgaattcttccctagaactcacagaaaggaatgcarccctaccaacattaggattttagccccataagaactagctcagatatccagaaagatactaaagttgtattgttttaaaccagtaagttttgggtaatttgctacagtaacaatagaaaacagatactattaaactaatatattaccttataattctccccatatatgtaatttttcagagatgtaacatcggtgtttgataaaaaagtatgcattcctgtgtgttatttgatatagttcatatatataaagacaataaataaattggttaaggcccctagaattataataattataaatttgcaaaccattatgccatttgggatataatagtatattgagcttcttgaagtattaaatttgaaacttgaaatgtaagtagaaatatttccttaaagaaataaaaactgataataaatgtt

SEQ ID NO: 330777 - DNA, 518 bp, Homo sapiens
aagttgtattgttttaaaccagtaagttttgggtaatttgctacagtaacaatagaaaacagatactattaaactaatatattaccttataattctccccatatatgtaatttttcagagatgtaacatcggtgtttgataaaaaagtatgcattcctgtgtgttatttgatatagttcatatatataaagacaataaataaattggttaaggcccctagaattataataattataaatttgcaaaccattatgccatttgggatataatagtatattgagcttcttgaagtattaaatttgaaacttgaaatgtaagtagaaatatttccttaaagaaataaaaactgataataaatgtttacctggaaataatatattactacccaattttttttgttaaatatgtgctarcaaatatctttattttagttctcagaggctgtgatgcattcatatttataatcagcattgtaagcattatttcattatgaaatcctgtttttattaatcatatca

SEQ ID NO: 330778 - DNA, 583 bp, Homo sapiens
taggaagagactccttctgtgtgagaaaaactgaagagcctttgggctttaagtgaacattggcaatggcctgccagaaccccctgttggttgttgttggtggtggttataaggaaaggctgctctgcttggaaaaagaggaggaaagagtgagaaggattttgcattgtagtttgagtgtcagcttagccatggtagaatagaacttcaataaatttctaaggttttttactctgatccctggctcccagacagcatctctatatgtacatagggcctgggtaacttcttgtcttgaagagaacacaaacctagatggcttcacaacctgctgattatatagtccttgggmcttaagggaaaatagatgttagccaggggcaagatccagtgctgtgctggctttaagtatgacccagtggtggtgatcaaaggtgtgtttgcatctccacaaccccagttccaggtggctcagcacagagagagagatactccatttgtttgggaaaaagcaagaaaaataaaaagtctctgtctggtaatttagaatattcttccagatcttatccaagaccaccaaagt

SEQ ID NO: 330779 - DNA, 579 bp, Homo sapiens
catctgcctataagcctgtaaagtcaaaagcaagttagttatttcctagatacaatgggggtacaagcactgggtaaatacacacattccaagtgggagacattggccaaaggaaagggctacaggccccatgcaagtccaaaatccaatggggcagtcaaatcttaaagatccaaaatcttttttgacttcatgtctcacacccacgtcacactgatggcaagagatgggctcccacagccttgcacagttctgcctctgtggctttccagggtacagacctcctcccagctgcttttatgggctggcattaagtgtctgtggcttttccaagcacatggtacaagctgtcagtggatctaccattctggggtckggaggatagtggccctcttctcacagctccactaggcagtgcccagtggggactctgtgtgggggctccaaacccacatttcccttctgcactgccctagcagaggttctccatgagggctccaaccttgaagcagacttctgcttggacatctacatgtttccatacattctttgaaatctacgcaggggttcccaaaccca

SEQ ID NO: 330780 - DNA, 576 bp, Homo sapiens
cattcaacaagtctctaggaagttccaaactttcccacatctttctgtcctcttccagactctccaaagtgttccagcctctgcctgtttcccagttccaaagttgctttcacattttggtctatctttagagcagcaccccactacccaataccaatttactgtattagtctgttctcacactgctaataaagacatacataagactgggtaatttataaaagaaagaggtctaatttgactcacagttccacgtggktagggaggcctcacaatcatggtggaaggcaaatgaggagcaaagtcatatcctacatggcagtggcaagagagcttgttcacggaaactcccatttgtaaaatcatcagatcttgtgagacttattcactatcacaagaacagtataggagaaaccactctcaggattcaattatctccaactggccttgcccttgacacatgtggattattacaattcaaggtgagatttgggtggggacacagccaaaccgtatcaataacacagagaagaaattcagatctgataaatttaacaacctgattaaaacacttaa

SEQ ID NO: 330781 - DNA, 575 bp, Homo sapiens
aagtccctacttaccaatagtgacatttaatgcaaatgagttaaacttcccaatcaaaggatatacagtggctgaatgaagaaacaagactcaatgatctgttgcctacaaaaaatacgcttcatctayaaagaaacacatagaattagaataaagggatgaaaacaagatattccatactgacgaaaaccaaaaatgagcaggagtagctatatttagacaaaacagatttcaagacaaaaactgtaagaagagacaaagattattatataatgataaagtggtcaattcagcaaaaggttataacaattgtaaatatacatgcacccaacacttgagcacccaaatatataaagtatatatcactagagctaaaaagatagacagacctcattaaaataatagctagagacttcaacacctcactttcagcattgggcagatcattcagacagaaaatccacaaacaaatgtcagacttaatctgcactatagaataaatggacctattagatgtttacagaacatttcatccaaaggctacagaataaatattcttctctttttcacattga

SEQ ID NO: 330782 - DNA, 548 bp, Homo sapiens
taaaatgagaaatcaataagaagaataattttggaaactatacacatacatggaaattaaacagtatgctcctgaatgaccagtgggtaaatgaataaattaagaaggaaattgaaaaatttctggaaataaatgataatggaaacataacatatcaaaacctgtactgagaaaaagcagtactgagtgaaattaacagctagaagtgactacatcaaaaagaagaaaaacttcaaatgaatagcctaagaacggatcttaaagaattagaaaagcaagaggacaccaaacccaaaattagtagaaggaaataaataataaatattggagcagaaataaatgaatttgaaatgaagaaaacaatagacatagcaatgaaacaaaaaaattggttttttgaaaagacaaaatggaaaacctttagtcagattaataaakaaaaataaataaataaaattacagatgaaagagacattaaaactgacatcacagaaattcaaaggattattagtagctacaatgagcaaatatatgccaataaattggaa

SEQ ID NO: 330783 - DNA, 547 bp, Homo sapiens
cctctttgttagatcagtttttccttcagccataggaactagaagttcacaagtgtaggactacaaggtgccaacaaacaagtgggtgatggggacaccactctaattctctcccctggtcagactaccatcaccargctcctattaaccatcaacattgtaagactgatagtctccttgcctctctgcttttgcacctaggaaaagtaaagtatgctaaaagtgattcggatgtccaaagtggctccctcactctctcctccctaccagacaccagcagcctgtggggatattccaggagactttctactgctctatcagctctctccactgtattttgcttgcttgttttttgttgtttatttttccagtaggcctcatgattcaaaatgatgtccttctttcgtctttaaatgttctgatacattctgtcacttggaatgcttcttccattcaaatggatttcttctttcctccatgtacttcaggctttctgtgttagaaacaaataaacaaacctgctaaaaagtttttaatgtggcttaat

SEQ ID NO: 330784 - DNA, 621 bp, Homo sapiens
caagggagtctcctgagaatccacccaagtgctggtgatgttgtagaactttttccttagttcagctaagagcygggttcttgttacatggccatgagagattaggcttgcagacactttgaagggtgagaaaaaaaaatggaatttactgggaaaagaggggatgaaaatgaaacaggggccctcggcaaagccagagtcctgctagctggcttccccctggcagactgaattccagtttccaccccaggagagaaggggccaggctcctcccctgcaaatgttgtgaacctcccaaggctcacccaactgcacattccttatactgcacaggccttggaagttctgtcagggagcccttcccacctggctgtctcagtgagaagagtcaacttaaatcataaaatagggccagactgctcagagctgactttggacgttagtgggcaggtgaaaaccttttgcctcctttacctcccctccctcacccctctaccaccctggccactggcagagtcatggccgacctccgccccagtctttcatacggaggagagaagatgatctgacattcaatcaggttctgtgttttgattatttgtaacagatcattttcaattg

SEQ ID NO: 330785 - DNA, 646 bp, Homo sapiens
cgtggttggaggaatttactatatctagtagcagaggaactatacacctgtttcgcatgggttaacatttttaagtgcatttctcatgtatgcagtaatgtcaaatgacacttttttaaacactcaggaagctattcagcctaagagtaaagagttaaaaacaacaaagcataagtctattttgtttttgttaagaggaagattgttgcagacagagagagctggttaacagtcttttttttttttcaktaaatgataaatgagtcaattgaaggtacagtacattttgaaggacagaaaactaagctctaaatgtcaagcttcttttgccaaattattcttccatgtttttctgtgagtaaaagtgatcagggaaccaagtgagaatagagaaattgacaaagttgagaggtgatcctgggtggttgatcatattagcacagctggcaggcctcccagagaatggtgtatacagcttagagttaggggaaatatccacctgtcattaccagagaaattatgaacatttctcccagagaagaatcagtcctgaacagacagatgtaagttccttttttggattagcctgaatatgtttaagttctggtttggttttgcaaaacaaaaatattgatgcttcactcaa

SEQ ID NO: 330786 - DNA, 646 bp, Homo sapiens
cgtggttggaggaatttactatatctagtagcagaggaactatacacctgtttcgcatgggttaacatttttaagtgcatttctcatgtatgcagtaatgtcaaatgacacttttttaaacactcaggaagctattcagcctaagagtaaagagttaaaaacaacaaagcataagtctattttgtttttgttaagaggaagattgttgcagacagagagagctggttaacagtcttttttttttttcattaaatgataaatgagtcaattgaaggtacagtacattttgaaggacagaaaactaagctctaaatgtcaagcttcttttgccaaattattcttccatgtttttctgtgagtaaaagtgatcagggaaccaagtgagaatagagaaattgacaaagttgagaggtgatcctgggtggttgatcatattagcacagctggcagkcctcccagagaatggtgtatacagcttagagttaggggaaatatccacctgtcattaccagagaaattatgaacatttctcccagagaagaatcagtcctgaacagacagatgtaagttccttttttggattagcctgaatatgtttaagttctggtttggttttgcaaaacaaaaatattgatgcttcactcaa

SEQ ID NO: 330787 - DNA, 537 bp, Homo sapiens
tgctgtgtgtggatatctgtgtgctgagtcaaagaggcttaggcttttttgttagaaacgtaattgtaataaagtaccatgtagtctcagaattctgtccaacaaggtactacttgcttaagtctataacctgtcagcttcttttccagaattatacacacatatagatcctttacacgttctaacttgagcctacactaaaattggaattcagagaaacacccaagactgctctggtatctggtacctacaaaaggaattgcatttattttctttcattgttgtgaacttcaaatctcaggacccggtagttgagatttaaaagataaaaagtttaacattactgttctaaattcattaccattcacctctcttaatctagaaacacatggaaaatagaagaatatctgataatycaaacagctttgacatactgaactgatgttagtgctatggtctgaatgtttgtgtcaccccaaaattcatatgttgaaacttaatccccaatgcagtgttatgagggagggggacatctaa

SEQ ID NO: 330788 - DNA, 595 bp, Homo sapiens
tgtgcttaactttttttcttatcaaaatctgtttccagttctttctactgatatgaccctgttctcatagctgctagtcagttttaagtcaccggtataccctgcccaaatatggtaggtctcagcttcactgtagaagatgacaatacctttctgacctctttaagtgcttcatttgatcttggggagcagttcaggcattcagaggtttttctcatgtgtttcaaccacactacacactgcatttcaagtgaaatgtgaagtgaacctcaaggtctctcaggaatccaaatggaatttgcattgagtctttgaaagaaagtgaaatcacattttctctgtgagttagctatttgaattcctgctttatataaatagtagaagctgaccctgatgtcctctaacattaaagtaaaagaggacattaagaaagagatttcactttaaaagctgtagcyggtaatgagaactaaatactacagtctgtttcattttatctttgggaatgttcaataatatttaaagaaaggtcgtgttgatgccacttatcacatcatgagattagcatatctatgactcaggtcgagctatacat

SEQ ID NO: 330789 - DNA, 516 bp, Homo sapiens
agagtacaggatggtacaagaaattgaaaggatggtttctgcctcatgaacttagtaaggttctctactacttcataaagttactgatgctttatgaagcggaaacatatatatatatatgaaccctcaattagagaaccttaggtgtgtgtatgtatatatacatgtatatatgtatggtgtgtgtgtatatatatatacctaaaataattggagaataatttcaacattatatgcaatacatgaataaagggaaatatggaaatataagctagatggctatgtttcaaaaggaattgaagarcaacatctccatagaatacagtaagttaaagaaggttgattacataggttttcatatgcattttttctaaatataagtgtcatttgtggtataaaacaaactctgttttagtgttttttattattttctggaaatataatgtattttcacattattttctgaggggtataaatttcaatacattgagcatttcatttaaaagggaccctgat

SEQ ID NO: 330790 - DNA, 581 bp, Homo sapiens
accatttcatttacatttttattgtgtggctcgttgagaaagtactaaaaatagattgcttggctttgagcctggatcgatgattcttggagttgttttcttttcttttggagtggggtgagtttatatctactgtatgatttatcagatggcagaaaaagacctcagtagaaagkctatgattacagttactatgtattacaggcagagaagcaacattttaagttattgatattactgttacagaaaaataattgtcttcaagtcacagaccacaagatcccctaacagctttcttcaattaaactgaggctttacattttaagaaatgactctaaactgtggattttgtcattctggctttggggaattaagtctttaagtaaaattgatgtggcaaagacacagaaatacacttgactttcaaataaagggatagatcttagatactctcttatgagtagacaggtgacagtgaacataagaagatgaggtgtcctaaatactgataataggtatagacagttcacagtcagccggcacctttcgcagattgggtacagcccatctacaatttctca

SEQ ID NO: 330791 - DNA, 581 bp, Homo sapiens
accatttcatttacatttttattgtgtggctcgttgagaaagtactaaaaatagattgcttggctttgagcctggatcgatgattcttggagttgttttcttttcttttggagtggggtgagtttatatctactgtatgatttatcagatggcagaaaaagacctcagtagaaaggctatgattacagttactatgtattacaggcagagaagcaacattttaagttattgatattactgttacagaaaaataattgtcttcaagtcacagaccacargatcccctaacagctttcttcaattaaactgaggctttacattttaagaaatgactctaaactgtggattttgtcattctggctttggggaattaagtctttaagtaaaattgatgtggcaaagacacagaaatacacttgactttcaaataaagggatagatcttagatactctcttatgagtagacaggtgacagtgaacataagaagatgaggtgtcctaaatactgataataggtatagacagttcacagtcagccggcacctttcgcagattgggtacagcccatctacaatttctca

SEQ ID NO: 330792 - DNA, 581 bp, Homo sapiens
accatttcatttacatttttattgtgtggctcgttgagaaagtactaaaaatagattgcttggctttgagcctggatcgatgattcttggagttgttttcttttcttttggagtggggtgagtttatatctactgtatgatttatcagatggcagaaaaagacctcagtagaaaggctatgattacagttactatgtattacaggcagagaagcaacattttaagttattgatattactgttacagaaaaataattgtcttcaagtcacagaccacaagatcccctaacagctttcttcaattaaactgaggctttacattttaagaaatgactctaaactgtggattttgtcattctggctttggggaattaagtctttaagtaaaattgatgtggcaaagacacagaaatacacttgactttcaaataaagggatagatcttagatactctcttaygagtagacaggtgacagtgaacataagaagatgaggtgtcctaaatactgataataggtatagacagttcacagtcagccggcacctttcgcagattgggtacagcccatctacaatttctca

SEQ ID NO: 330793 - DNA, 459 bp, Homo sapiens
cacaagctgactgaagagcccttgggccttaagtgaacattcacagtagactggaattactctctgtgggcctgtggcagtggtgtttgtggggaaagacttttctgcctgttaaaagagagagggaagagtggaaaggactttgtcttgtggtttgcatggcagctcagctacagtataatagcgtgccaggtagatttctaaggttcctgactcatggccctggctccttgatgacatctctggactcaactgggacctggggaacttgcttccctgaagggaaagatacaaacatgactggcttcaccacttgcttattgtagagtcctacagccttgagtgaacataggcagtattcaggtagtggttacagtgagcatttggcragacagtgctgttgttttcgcttcaggtctgacccagagaagtccccgtggttgtggccacagaggtgct

SEQ ID NO: 330794 - DNA, 524 bp, Homo sapiens
tggaaacccctccaaagaaggacaggcagaaacaggccaagactgtgaaggctacaatcaatacctaacttttcaaatgcccagacactgacaaaacattcacaagcatcaagaccatccagtaaagcacgaccacactaaatgaagtaaatatggcaccagggaccaatcctggagagacagagatacgggacctttcagtcagatcattcaaaatagctgttttgaggaaacttggaaattcaagataacacagagaaggagttcaggatcatgatagatttatttaacaaagacaytgaagtaattaaaaagaatcaagcagaaattccgagctgaaaaatgcaactgacatactaaagaatgcatcagagtctactaatggaaaaattcaccaagcagaagaaagaattagtgagcttgaagacaggctgtttgaaaatacacagtcagaggaaataaaaggaaaaaataatagaaaagaatgaggcatgcctaaaagatctagaaaatcaccccaaaag

SEQ ID NO: 330795 - DNA, 524 bp, Homo sapiens
tggaaacccctccaaagaaggacaggcagaaacaggccaagactgtgaaggctacaatcaatacctaacttttcaaatgcccagacactgacaaaacattcacaagcatcaagaccatccagtaaagcacgaccacactaaatgaagtaaatatggcaccagggaccaatcctggagagacagagatacgggacctttcagtcagatcattcaaaatagctgttttgaggaaacttggaaattcaagataacacagagaaggagttcaggatcatgatagatttatttaacaaagacattgaagtaattaaaaagaatcaagcagaaattccgagctgaaaaatgcaactgacatactaaagaatgcatcagagtctactaatggaaaaattcaycaagcagaagaaagaattagtgagcttgaagacaggctgtttgaaaatacacagtcagaggaaataaaaggaaaaaataatagaaaagaatgaggcatgcctaaaagatctagaaaatcaccccaaaag

SEQ ID NO: 330796 - DNA, 375 bp, Homo sapiens
ttttgtgtgcttgttttcatctgacaaactagaaaaaacaatccacagtgttttgtttgcttccaagaaaagaaaagaaatttcaggaaaatacaaaattcaacattatgccatcatgtaccacagggaataccttttgttctttatcaagatactttgcaaactctagattattacaaagtttacccaatagtatttttaaaggataaaggattactagatgcaggaatgaattgaatcatcatagaatagggaattaagagctgccatttattactatcaatcccaatcagtcaatctactgctgccatctaatgttggagctgtttytaaagcagatgctgagtacaggttacctctaccatttgaaaaatt

SEQ ID NO: 330797 - DNA, 303 bp, Homo sapiens
actatagcaaccattttttactattatgtggcaktcacctctccaagtactttatatattccctaaattaatcctcccaaaacctgtttatggattttcacctttgtttgacaaatggggagataggtttttaaagttatgtaaattgtacaagcttacccaaccagtaagtgggaaatacacttggaacacagatctgtctgttgtcttaaccacaactagtgtatcctgactaaaatacatatttttgcttcaactctcaatataaagtgaataagtaagaatatttttctattttgaagg

SEQ ID NO: 330798 - DNA, 588 bp, Homo sapiens
gggagtatgtacatattctaaacttagatctgatcaaataagattgcaatttttttctttgttatactgctttcctttcttaggggtatatgcccaggagtggaattgctggatcatatggtacctcttccaaactgttctccatagtggttatactaatttacactcccaccaacagtggatgaaggttgccttttctccacatcctagccagcatttgttattgcctgtcttttggataagagatattttacgtggggtgagatgatatctcattgtagttttgctttgcatttctctgatgatcaatgatattgagcaccttttcatataccagtttgccatttgtrcgtcttgttttgagaaatatctatttaggtgttttgctcattttaattgaattcacagattttttttttcctttagagttgtttgagctccttatatattctggttattgatctcttgtcagatggatagtttgaaaatattttctctcattctttgggttgtctcttcactttactagttgtttactttgctgtgcagctttttaacttgatgtaatctcatttgtacatgtttact

SEQ ID NO: 330799 - DNA, 582 bp, Homo sapiens
tgtctggcctctctgcttctaaataacccattgccaacacagtagttattgtgaaattctcttaaaatgtaagtttatctcatttctctgctcaaaaccctgaaatgacttttcactttttcagagcccatttccaagwttttgtaatagcctaaaagccctatgtgatgtggctctctgagctctccatgctccgctcctgataagtcttccctgctcattgcactccagccatacaggtctccttgttcttctttgtgtaagcctggcactctccaatttaatggagagttcttccttcttcctggaatgctcttcctcaagtgattacacacacacacaaaaacaaaagatcttatttccttaaagtctttgctgaaatcacccatctcagtgagtgttatgctgaccatatcccaccacaattcctaacacatcacctcgctctactttttattttttcaaagcacatattaccttgtataatataatctgcttatttattatggtttttattatatatctacccatattagaatatatactccaagagaacggggatctttgttatgcttactgatg

SEQ ID NO: 330800 - DNA, 551 bp, Homo sapiens
agtgttaattatgctgttatctttgtgattttggaaaattcatatattggtagaagaggcagaaaaacaggggagaaaaacttgaatgctgcaatcagacagtgctactatcttcacgttttaatatagtcattccagaaataatgtggtacagctttacattgtggatattagcaatctktgaaaaggcagtagtgaagaaaaagtgtgttctttggagaccactgtgtaataagctccaaaacttaattttaatctaattcaataaaacatatcatactcagacacaggaatataagacaatagttagaaggcactgaaaatttgtcttgggtttagagcctggtgccttaaagctcaaaataatgaaaaatttaaaaacaaactgtccttgattaatccctcatatttccaaacttgttgaggtaattacattttaaactcctgtttactcctaagtattacctattgcctccaagaatttggcttactataatatggctctgatattacttattagaggatagtgatttagaatgtattagagtatc

SEQ ID NO: 330801 - DNA, 623 bp, Homo sapiens
acccacttttacctagatgtaagcaacatttgtataattttcttttttattttattttattttaactcatatgccagccatgctcaatccttggctgggaaccatcttgggagascataagcatggcttaaatacagcagtggatgccaaatggggaagccatcagctaactgcattctttgaaacatgttaatttaagtggcacatctccatggctgccacaaaggctgtatatgatccattttaatttaacaaacatttattgtttgccaattttatttatttctttctttatttaatttatttttattatactttaagttctgggatacatgtgcagaacatgcaggtttgttacatagttatacacgtgccgtggtggtttgctgcacccatcaacctgtcatctacatttggtatttttcttaatgctatccctcccctaacccccgatcccccagtctggccccagggtgtgctgttcccctccttgtgtccatgtgttctcattgttcagctcccacttatgagtgagaacatgcggtgtttgtttttctgttcttgttttagtttgctgagaatgatggtttccagcttcatccatgtacctgcaaaggacatga

SEQ ID NO: 330802 - DNA, 652 bp, Homo sapiens
aaacagtgacaggtggataaaaaaggtcagagaataagattgtgtgagaaaactcagggcacctaaaaaacattctgaggatgctgagcaaatgaaacaatgatgggagcaccccaaagcgttttatgactgggtaggaaaaggacaaagcagaaagtaatggagaacatgcaggaatggtaatttgttcacctcaaaatcttaaccaagctcttcatgtagaaaatactttagctaataagatgaacgtttgaagaaaaggatcttccattacttgctgtaaagtagtaaaaccctcattgttttaaaggaaattmctcatgtacttttatttttctttttttaagataatttttaaaaaataatttcaacttttattttagattcagaggtacttgttcaggcttgttacctggggatattacatgctgctgaggtttggggaatgattgatcctgtctcccaggtactaagcatagtactcaatagttggtttttcagcacttgcatccctctcttcctcctccctctagtagtccccattgtctattattgccatttatgttcctgagtacccaatgttttgttcccacttatgagtgaaaacctgcagtatttggttccctgttcctgcatgaatttgattgggata

SEQ ID NO: 330803 - DNA, 598 bp, Homo sapiens
gtggaatttacatataattttattagttcttttataatgtcttyaatgttaatcattacataagatgcattttttaagggactacatttttcatgtcttaacaggataacgacatactgctcacatactcagaactttcatggctttcccacaaaattggaagctgaacttattaaatgaatcagacaaatgattgtttataaccatttattgatttcttggcttgagggtatacttggatatacttttctatttccttagagattatttccttaaaataaattcttagaagtagaattgctatatcaatgacaaagcacttttaaggctcttggtattgccaaattggcctccaaaaatgctataaaagtaagttaaaattctcagagcagtttacgagcttgccaagatatggatgttttctaattccttaatgtgaatgtggtctgtgtgtcaatatctcactctctcaaaggaccctctgaactgggctggacatgcacataagtggtcaagggggaatgggaggtgtgacaaactcaagccttggtattgacagcctgggctggggccaccaggccagccccagtgctccctg

SEQ ID NO: 330804 - DNA, 598 bp, Homo sapiens
gtggaatttacatataattttattagttcttttataatgtctttaatgttaatcattacataagatgcattttttaagggactacatttttcatgtcttaacaggataacgacatactgctcacatactcagaactttcatggctttcccacaaaattggaagctgaacttattaaatgaatcagayaaatgattgtttataaccatttattgatttcttggcttgagggtatacttggatatacttttctatttccttagagattatttccttaaaataaattcttagaagtagaattgctatatcaatgacaaagcacttttaaggctcttggtattgccaaattggcctccaaaaatgctataaaagtaagttaaaattctcagagcagtttacgagcttgccaagatatggatgttttctaattccttaatgtgaatgtggtctgtgtgtcaatatctcactctctcaaaggaccctctgaactgggctggacatgcacataagtggtcaagggggaatgggaggtgtgacaaactcaagccttggtattgacagcctgggctggggccaccaggccagccccagtgctccctg

SEQ ID NO: 330805 - DNA, 326 bp, Homo sapiens
cattgtaaattgggagatagtacttaaaaaaactaaacattcagagaatgaaaaggaatcttggatttttccaaattgctttttttttggtgggggggtggcakgaaatgaggagtgtgcaagaaatgggaatccatcatagtttacaacttggatgagaatggcatttgcatattcaaaatattttaagtaataaatattgatcaaagcaaaattataccgtaagtgtatgggagggaggagaaatgggaaggatgcatgtgcctcatgggacagtgggaggaaagagtgaaatgcctggttttttttttttttttttttgagac

SEQ ID NO: 330806 - DNA, 602 bp, Homo sapiens
aatacatcaacttaaattgcaggagtttatgtagctgctttctctgtagtttaaaaagcaatgcataaatgcatactcactatccttggaacttaataccagctcatctatagagcaccttcttaaagacgatgtactgatgtaaggttttgtaaatttctaaactgttttaaacgggatattatcttttgcaataaacttacatattttttctaggttttaagactccattactagcttgggttgatttcagttataaaatgtatgcttaagaaggacacctcaatggtcctaagggcaagtatggctttcattataattgcttctatatatttctaagggaaataaataaagagcagattcagaacttagtgtcacgatgatcacaygaagccccgcgtgtcccgtgagtgagggaggcagcatgaataaatggagagctgctcccagcctcattccatggatgtacaggcatgatttgtatcattatactcagacacctgaactctaatttatccagtacttttctttatttcccccttaatttttttccttaaaaggcaaatttatatcgccaatgtgaagaaaaacaatatcatgtt

SEQ ID NO: 330807 - DNA, 577 bp, Homo sapiens
gtaatgttattcccatccaaattttgcaatgattgctttggctgctatgtggagaagatatttgagaagtgagagaggggccgggtacggtgtcgtgcacctgtaatccctgaggtctacatggcattcaggacccaggaataaaaagacactaatgtttgctcccagtacccttccccctgccaagatctttgtcctgaatattgatggtccagtttcacattgtttcagaataaattgtcatcataagtaaatcccaatgcattctgcacattttaccagatactgccttaccatatcaaagagtaaatgacttttgaaattaaagcagattgttgactattttccctgtaatgtttctattaaaatgccagaatttattacatgtgrcctagtccattctggagaaaatgcaatttaagagacaaggtctaactaaaggaacattttgggcaaagcattttgccttggctcaaagcagaactaaaatgaaaagacagtaaaatcgcaccaaaagatcatttgcttggaagcaaataagagttttattatcataaatggctttcacaaattctta

SEQ ID NO: 330808 - DNA, 587 bp, Homo sapiens
ggcattgccacgtcttaattagtatcctctgatcagagattattcatgaggacagtgcagtgttggtgcaccaaatctatataggctggagcrcgccccccaggaggaggtttttgctctctggggaatgctagattctgtaatggatcagtagccacactggtttctccagtgaaatccaaggatctgctaattcataaaaaaaaaaaaaaaaaaaaaaaaggagtctgagaatcaccaatgattctccccaacatgcccatcgaaatacacacaggatagaatagatgtgtttattcattttgattatcttataatcagctgtttccctccctgggtactggatctgctattgactagctgtgatacctttgagaatcacttcacttcctggatcctcagtttcctctcctaaaatggccagataagttcagagtttgaggatgaggaataaccgtcctaaaatgttttgccctaggaacccactgcccttgctgcagcctagccccatctctgtcgttgaagcacggacattatcttgtctgtagaaccatgcacggaagtgttatcacgcttgggcctcaaaa

SEQ ID NO: 330809 - DNA, 565 bp, Homo sapiens
tagcatcattagtttggccaatgagtcaaccagtcaagcaaagccactttatctttacctggaggaaaacaacttcccacaaatccacttttcctagcttagaaactcccctctgtctggcacacacatgagtacctgccatggctgtgcaggagcaccttgtaaaagggactggcccatgacatgtgatgaggatgcttttccttgggacaggtatcctttattgtatttatgtgtatggctaatttgttgtgaatgtgagaagaaaatgaagtgcaacccccaatgaagagctgaaagcataagaaaagaaaccaagagagatggtttctcaacaacctggaaatgsaggctcacccacagtgccttccacccgactctcaaagggcgaagatgtagactgcagtgagagaagcaacccttcttgaaattaataattcaaggtaaaattacaaaacttaattgctccctgtcagccgcagctcatccttgtctaccgttattttgcacaaattgatttggcagccaccacattcatttttaaaggactttcttattatctata

SEQ ID NO: 330810 - DNA, 590 bp, Homo sapiens
tcaatgaactacaactaaacaaaatcaggaaagcaaataaatgaataaagagagatgtttaataaagaaacagaaaccataaaaaagaagcaaatagaaatcctggagctgaagaatacaatgactcaactgaaaagctcaaragacagcttcaacagcagactcaggcagaagaaaagaactgggaaacttaaaagacaggtcatttgaaatgatagcattagagggacaaaaagaaaaaagaataaaaaagaatgtggaaagtatacaggacttatgggacaacatcaagtgaaaataatacaggcatatgggagttaaggagaagaaaaaggggcagaaagcttcttatttttaaaaactaaaggctaacagtttaacaaatctagggaggaaaagggacatttcaattcatgaagcccaaaggtctccaaataagttaaacaccaagactcattataattaagttgttaaaactcaaaaagaaaaaatctgaaagcagcaagagaaaacctacttgtcatataatatacaaggaagcttctataagactatcagtgaatttctcagctgaaaccttgcaggccagg

SEQ ID NO: 330811 - DNA, 569 bp, Homo sapiens
tgaaccctggcctccttgccctggcagccggcccctgggggaggtggggagcccggtcttgcccgtgtgatccactttgccaagaacgaggtgggcagctaggaggcccatgtgaagactcggccwcaccccaccagtccttcacctggccagtgacttacacagtctgtactggtgccagcctgttccttgacccgtcactcctgcttcctgagccctgctctccctaggccactcaccagccctcccccagagtggagaggaagtaccgtgtgctgtgggttttggggacaggaagcaagcgctagtgggactgagccctgatggtggaggaggggagactgagggggtgctggcatcccctccacttgccagcccctgccccccatgctccagcaagccccctgcctggcagcctgggcagccccctcctgggagtcgctccctgggctgaagactaaggaagggagaacccagaagcatggcttcccagggtggggggaagtgaaaccgggctgagggagggagttagccacttcctctacccaccccaaagcccctgagtagct

SEQ ID NO: 330812 - DNA, 569 bp, Homo sapiens
tgaaccctggcctccttgccctggcagccggcccctgggggaggtggggagcccggtcttgcccgtgtgatccactttgccaagaacgaggtgggcagctaggaggcccatgtgaagactcggcctcaccccaccagtccttcacctggccagtgacttacacagtctgtactggtgccagcctgttccttgacccgtcactcctgcttcctgagccctgctctccctaggccactcaccagccctcccccagagtggagaggaagtaccgtgtgctgtgggttttggggacaggaagcaagcgctagtgggactgagccctgatggtggaggaggggagactgagggggtgctggcatcccctccacttgccagcccctgccccccatgctccagcaagccccctgcctggcagcctgggcagccccctcctgggagtcrctccctgggctgaagactaaggaagggagaacccagaagcatggcttcccagggtggggggaagtgaaaccgggctgagggagggagttagccacttcctctacccaccccaaagcccctgagtagct

SEQ ID NO: 330813 - DNA, 605 bp, Homo sapiens
gggccctcccagaattgctattcacattgggtataaagatagcagcctgcagtaagggccattataagaaacagtcatatcaaatgacccgaacttttgttttcctttttaacatcttaactgaaatagaattcatataccacaaaactcacttgtttaaagtatacaagtcaatggttttaatatagtagagytgtgcaaccatcaccacaatctgtgcttagaatattttcattgccccaatgagaaatcccccacttattagcactcacttcccatttccttccctcacctcttccccttaatcctggttgaacacgaatctactttctctctagattggtctgttctggacatttcaaatgagtggcatcatataatatgtggtctgtagtgactgacttctttcacttagcataatgttttcaaggttcagtcatgttgacatgtatacctgcatttaattcctttttatggctgaatagtattccattgcgtttaccacattttgtttatccagtttatggacaattgcttttttctgctttttggctattatgttgaatgccatttatgaacatttgtgtacaagtttttgcgaggac

SEQ ID NO: 330814 - DNA, 605 bp, Homo sapiens
gggccctcccagaattgctattcacattgggtataaagatagcagcctgcagtaagggccattataagaaacagtcatatcaaatgacccgaacttttgttttcctttttaacatcttaactgaaatagaattcatataccacaaaactcacttgtttaaagtatacaagtcaatggttttaatatagtagagctgtgcaaccatcaccacaatctgtgcttagaatattttcattgccccaatgagaaatcccccacttattagcactcacttcccatttccttccctcacctcttccccttaatcctggttgaacacgaatctactttctctctagattggtctgttctggacatttcaaatgagtggcatcatataatatgtggtctgtartgactgacttctttcacttagcataatgttttcaaggttcagtcatgttgacatgtatacctgcatttaattcctttttatggctgaatagtattccattgcgtttaccacattttgtttatccagtttatggacaattgcttttttctgctttttggctattatgttgaatgccatttatgaacatttgtgtacaagtttttgcgaggac

SEQ ID NO: 330815 - DNA, 530 bp, Homo sapiens
acagggtctcattctgtcacccaggctggaatgcagtggcattatcatagcttactgcaacctagaactcctggcctcaagagatcctcccacctcagcctcccaatgtgctgggattacaggcgtgagacatagctcaaattttttattttttatttatttaatttaattaattaattaattwatttatttatttgagagactggagtgcagtggcgcaatctcggctcactgcaagctccgcctcccgggttcacaccatcctccagcctcagcctcccgagtagctgggactacaggcacccaccaccacacccggctaatttttttttatttttagtagagacggggtttcactgtgttcgccaggatggtctcaatctcctggccttgtgatctgcccgcctcggcctcccaaagtgctgggattacaggcgtgagccactgtgcctggccccaacatagctcaaattttagaagccacaaaagggtataatgtgcctcctgccctctctctgcaggtaaccaat

SEQ ID NO: 330816 - DNA, 502 bp, Homo sapiens
ccagccatctgctgtcagaatgtcctcttgcttgggggagatcagccttttattctactcacatcttctactgattggatgaggtccaccccacaaggtggggcaatytgctttactcaaagtccaccaacttaaatgtcaatctcattcaaaaacaacctcataagaacatcccagaataatatttgaccacatatccagataccgtggccagccaagttgacacataaaattaacatcccatgtatcttaattgcagtagtggtcatgcacatctagatatgtgggaagaatgacgtggaactatactcatacatggcaccaatgtcacatatttggtttttatactgtcctatcattattcaattattcaataattattttaattacttaaaattaaacattgtttaataattattaagatagaaccatcgagggctcctacatgggagttcacttactatctttgcaacttcctgtgtgtctaaaattacttccaaaa

SEQ ID NO: 330817 - DNA, 567 bp, Homo sapiens
ccatgctcatgcactaagctacaattcctgctattgcaactggtcttgagagtgcaatagatctatctcttcagtcgaccattcttttagaccctcttcacttcgaccagcacctcagtaggtcctgaatacttactaaatgggatgacctacaaaayctttttgtgcaaggggtctgagaccttctttgctttgctcttcctgaactggatttgctacaattgtacatttccagctacctctgagcatagaagcaccaagaggaatcttactgcttattttctgccctcctagtgtgtagccatagcctcatgtcctcatggtaatcaggaaagtattaatacaatatttcttctaaaattgagatttttttatttgcctcctggtccacacacatgaagagcccagcatgcccaggtgatagctgtggtttcaacattagtggaattcttactgtgacccctagtggaagaatttcctccttagaaaccagaacttctattccagcaaggactaagtttgcaggaagaagaatcataaacattttaaatgtgtcattaagagcga

SEQ ID NO: 330818 - DNA, 580 bp, Homo sapiens
ccatgctcatgcactaagctacaattcctgctattgcaactggtcttgagagtgcaatagatctatctcttcagtcgaccattcttttagaccctcttcacttcgaccagcacctcagtaggtcctgaatacttactaaatgggatgacctacaaaacctttttgtgcaaggggtctgagaccttctttgctttgctcttcctgaactggatttgctacaattgtacatttccagctacctctgagcatagaagcaccaagaggaatcttactgcttattttctgccctcctagtgtgtagccatagcctcatgtcctcatggtaatcaggaaagtattaatacaatatttcttctaaaattgagatttttttatttgcctcctggtccacacacatgaagagcccagcatgcccaggtgatagctgtggtttcaacattagtggaattcttactgtgacccctagtggaagaatttcctccttagaaaccagaacttctattccagcaaggactaagtttkcaggaagaagaatcataaacattttaaatgtgtcattaagagcgatagtgagaggatc

SEQ ID NO: 330819 - DNA, 608 bp, Homo sapiens
tgtctcctctgacagctgatcagatggaatatccacaatgccctaagtataagctttagaggtacttggcatggaagtctaggccatcagttcatgcttcctaagtgtgctttctggccttgttcagatccaactctaaatggaccatttccatcctacaataaattgttgctgtatgtacccaagcttatgattccagtgtgtttcataatttttagctaatgatgggcaacgtttttctgaggtcctgcggttgttcagtctctactaaggcacaataacatggctggaggtgatttttcaaacagcaagccgttctctgccayagagtgcatgaccttgctccagaatgcttcaggatcctaggggtctacaccgtggcttcctatggggatctgtggggtacctctagtactatggaatctgctggggcataaggccttcacagcaggatgtctttcatcgtagcttctgtctgctgcagagctcctgcttcctcttggctccatccaaactttcagccttatgaattatcctataaatgggtcacagcagtgtgttcccatgtagtacatgctgcctccacaatctgtggatgaactaagcac

SEQ ID NO: 330820 - DNA, 576 bp, Homo sapiens
cagttatatatcacaggtgatatataatactgacagaattattataaataataattaatagaactaaaataattaagaatccacagtatatctgaaatcaggattgatgggaagaatggaagcaggtgcttcccagccastaataccataaatctgaggtcccccatggaaagccctgcctggcttcagtccacaacggggattctttttttttttttttttgagacagagtctctctctgtctcccaggctggagtgcagtggtgatctcagctcactgcagccctctgcctcctgggttcaagcaatcctcatgcctcagcctcccaagaagctgggactacagacatgagccaccacacctagctaatttttgtatttttagtagagacagagttttgccatgttggctgggctggtctcaaactcctggcctcaagtgatctgcctgcctctgcctcccaaagtacagggattacaggtgtgagccactgcacctggcccacagctgagattcttaatttctctccctaagctgaacatggtgcagaacaaggttagcactcagattttgca

SEQ ID NO: 330821 - DNA, 508 bp, Homo sapiens
cccaaacggggtgaaataaaaattttttaaaaaacacaacataccggctgggtgctgtgactcaggcctgtaatcctagccctctgggaggccaaggagggcsgatcacctgagctcaggaattcaagacgagcctgaccaacatggtgaaatcctgtatgtactaaaaatacaaaaattagccaggcatggtggtgggtgcctgtaatctcagctgctcctgaggctgaggcaggagaattgcttgaacccgggaggcggaggttgcagtgaactgagaacgggccactgcactccagcctgggcgacagaacaagactgtctcaaaaacaaaacaaaacaaaacaacaaaaaaaaaccaatgtaccaaaacgtatgggatacagcaaaggcagtgtgcagaaggaaatatttaatagtaaatgttacattaaaaaggaaggaagatctcaaataaataagctaactctctaacataagcaactaggaaaagcagaacaaattgaac

SEQ ID NO: 330822 - DNA, 508 bp, Homo sapiens
cccaaacggggtgaaataaaaattttttaaaaaacacaacataccggctgggtgctgtgactcaggcctgtaatcctagccctctgggaggccaaggagggcggatcacctgagctcaggaattcaagacgagcctgaccaacatggtgaaatcctgtmtgtactaaaaatacaaaaattagccaggcatggtggtgggtgcctgtaatctcagctgctcctgaggctgaggcaggagaattgcttgaacccgggaggcggaggttgcagtgaactgagaacgggccactgcactccagcctgggcgacagaacaagactgtctcaaaaacaaaacaaaacaaaacaacaaaaaaaaaccaatgtaccaaaacgtatgggatacagcaaaggcagtgtgcagaaggaaatatttaatagtaaatgttacattaaaaaggaaggaagatctcaaataaataagctaactctctaacataagcaactaggaaaagcagaacaaattgaac

SEQ ID NO: 330823 - DNA, 508 bp, Homo sapiens
cccaaacggggtgaaataaaaattttttaaaaaacacaacataccggctgggtgctgtgactcaggcctgtaatcctagccctctgggaggccaaggagggcggatcacctgagctcaggaattcaagacgagcctgaccaacatggtgaaatcctgtatgtactaaaaatacaaaaattagccaggcatggtggtgggtgcctgtaatctcagctgctcctgaggctgaggcaggagaattgcttgaacccgggaggcggaggttgcagtgarctgagaacgggccactgcactccagcctgggcgacagaacaagactgtctcaaaaacaaaacaaaacaaaacaacaaaaaaaaaccaatgtaccaaaacgtatgggatacagcaaaggcagtgtgcagaaggaaatatttaatagtaaatgttacattaaaaaggaaggaagatctcaaataaataagctaactctctaacataagcaactaggaaaagcagaacaaattgaac

SEQ ID NO: 330824 - DNA, 508 bp, Homo sapiens
cccaaacggggtgaaataaaaattttttaaaaaacacaacataccggctgggtgctgtgactcaggcctgtaatcctagccctctgggaggccaaggagggcggatcacctgagctcaggaattcaagacgagcctgaccaacatggtgaaatcctgtatgtactaaaaatacaaaaattagccaggcatggtggtgggtgcctgtaatctcagctgctcctgaggctgaggcaggagaattgcttgaacccgggaggcggaggttgcagtgaactgagaacgggccactgcactccagcctgggcgacagaacaagactgtctcaaaaacaaaacaaaacaaaacaacaaaaaaaaaccaatgtaccaaaacgtatgggatacagcaaaggcagtgtgcagaaggaaatatttaatagtaaatgttacattraaaaggaaggaagatctcaaataaataagctaactctctaacataagcaactaggaaaagcagaacaaattgaac

SEQ ID NO: 330825 - DNA, 251 bp, Homo sapiens
tgacatccacagttcctgcattgtccagagctataagtctctttaatgctygagttttaatgggattcattttatgctctgtttggggacccccatattctacccccttttctgtcattgtgaattatttcccacggtccatcagcataaaagtctgactagcaatgctaaatctgattactttaaaacaattttttttcttctactataggagccttgattagcataaacttgaatctttgtgttagttt

SEQ ID NO: 330826 - DNA, 251 bp, Homo sapiens
tgacatccacagttcctgcattgtccagagctataagtctctttaatgcttgagttttaatgggattcattttatgctctgtttggggacccccatattctacccccttttctgtcattgtgaattatttcccayggtccatcagcataaaagtctgactagcaatgctaaatctgattactttaaaacaattttttttcttctactataggagccttgattagcataaacttgaatctttgtgttagttt

SEQ ID NO: 330827 - DNA, 554 bp, Homo sapiens
ttgggcatgctggggttgtctctggatattgttccttggaattaggtaaatcatagagcctgaagcccaaagctgtacctcagacttactagggacctaccagaaggtacaacagatgataggtttatgtcttttatgatatttttggtactaygtataggagtcagtgctcatgaaaaaaagtgaaatgataaggaacttgtccctgaccatggcagatattgctcctcctccatagccactgccttggtaacccagcagacatcccttaactccattgggatggatgtttaagataacagtgttgctctagacctttaaaaaatcccaactgggaggaatgtatacaatttccaataccccctgctatacctggataaacacctcaggtatcctagaaattcaagtagaggagatctggaaacaagctcataattgcagaaaatggattctgcagattcagaaaatcccacctgaaggattcttctttcacccctttagcaacttcttctgtggatcatgggatcctgggctacataactgcttcaggtggg

SEQ ID NO: 330828 - DNA, 554 bp, Homo sapiens
ttgggcatgctggggttgtctctggatattgttccttggaattaggtaaatcatagagcctgaagcccaaagctgtacctcagacttactagggacctaccagaaggtacaacagatgataggtttatgtcttttatgatatttttggtactacgtataggagtcagtgctcatgaaaaaaagtgaaatgataaggaacttgtccctgaccatggcagatattgctcctcctccatagccactgccttggtaacccagcagacatcccttaactccatygggatggatgtttaagataacagtgttgctctagacctttaaaaaatcccaactgggaggaatgtatacaatttccaataccccctgctatacctggataaacacctcaggtatcctagaaattcaagtagaggagatctggaaacaagctcataattgcagaaaatggattctgcagattcagaaaatcccacctgaaggattcttctttcacccctttagcaacttcttctgtggatcatgggatcctgggctacataactgcttcaggtggg

SEQ ID NO: 330829 - DNA, 609 bp, Homo sapiens
tgtctccctggactctgacaggttggtaaccagggcacagcaaacctgtttcacagcagtcactgtcatagagacagaacttgattacaggttgccagggactgggagcaggggaaacggggagggggttgtcatttaatggctatggagtttcagttctggaagatggaaagagttctggagatggatattactgatgctagcccaacaatgtgactatacttaatgccattgtcctgtacacttgaaaatggctaagatgggcaattttatgttctctatacttaccatagtttaaaaacttcacatctttattatgatattattggatcagaaggcatcgttctattttctaattttctcagcaaatgttaataaataatcacttagagatgccattgttyacaccacatcttaacaaacagtgttttttttctagagatgagggggtctccctatgttttccaagctggtcttgaactcctagatttctgctaccctccctacttgatcttgcaaacatctaggataacggggataagtccccgcacctggtcttaactatcagtttaccaggaggtttaacagggaacttccttgaaaatgtgt

SEQ ID NO: 330830 - DNA, 574 bp, Homo sapiens
atttccatgatggtttattttccccatacctttataggtaattttggtcctgcaatgtgctagccaagtttaatgtgcagagctgaccatttgcacaatgtgactgacaygccactgcaccttgaatgtggaccttgacttgtggtgatctatgagaatctgcttctcaaaagaatgtatttgtcacccctttgatctttatcctgtctgaatacacacacttctctattgttccatggctaatctgtatgttgtctctattaactcactcttgccataagtgactaagagcacctaacacagaaataataaatacaaccagttctgaaaattaaaattagttaaatagcatagggacattatagaaaaaaatgtataactatcttaagtataaagaaaatgaagtcttcgtattttgcaaagaagctgtgtgaacgctgtgtctgcaggtttcagccccagggtgggcccctgcctttcctgtgactgagcatattgcctttctcatacctgcagtcatccagtgaagtgacaggatgggctgagctgagctgtactgttgggccaccctggg

SEQ ID NO: 330831 - DNA, 610 bp, Homo sapiens
tgttgtctctattaactcactcttgccataagtgactaagagcacctaacacagaaataataaatacaaccagttctgaaaattaaaattagttaaatagcatagggacattatagaaaaaaatgtataactatcttaagtataaagaaaatgaagtcttcgtattttgcaaagaagctgtgtgaacgctgtgtctgcaggtttcagccccagggtgggcccctgcctttcctgtgactgagcatattgcctttctcatacctgcagtcatccagygaagtgacaggatgggctgagctgagctgtactgttgggccaccctggggagatcttggttatataagatgcatttcagaggataacaataactgctaacagcaataaatgacagcagttcagctttgttcatgtagaatttctcccaaacaacccacaatgaatagacttgaaccccagagttgatctgggaacaaacctaatacagattggggaataggacccatcttcctgacccatgtaaaccgataccaaaagttgtccaacctgcacatcaaaccagcttccagataggttaaagaagtcacatcagaccatccagtcacaaatgaac

SEQ ID NO: 330832 - DNA, 450 bp, Homo sapiens
gaattgggctgtgagaagcagaagagatgcttatctgggcaaagtggatcctggcattaactagttttggggcagtgaagattgttggagacataggcagatgataccatatttttaaatcaatgtcatttacactccttggtgtgagaagagtcagattaggagtgacctggcagctttggccttaatctattagatagattctgacttactgatgttaaatgtattagcggccaagaaagttgagataaaatgaaaggagtttgttatttttgctcaattctagattgagacaccaatgaacatgcagattaagtgggcaggtttgcaagtgagtggagtttgagctcagagaaaagaaaataygcataggtattcagcagcgcttacagggtaatttatggtattaaaaccacgtgtatgaatatgcatctgcacatatttatgcct

SEQ ID NO: 330833 - DNA, 592 bp, Homo sapiens
gtgagaagagtcagattaggagtgacctggcagctttggccttaatctattagatagattctgacttactgatgttaaatgtattagcggccaagaaagttgagataaaatgaaaggagtttgttatttttgctcaattctagattgagacaccaatgaacatgcagattaagtgggcaggtttgcaagtgagtggagtttgagctcagagaaaagaaaatacgcataggtattcagcagcgcttacagggtaatttatggtattaaaaccacgtgtatgaatatgcatctgcacatatttatgcctgtgtatgcatgtagataaacatatgcatatgagtatttttcagaaaataaaagggataaaaccaataatctccrcttccaccttatgaaactacataaagaggagcaatttatatctgaagtagaacatgagcaaaataaataataaatattagggcagaaatcaataaaactgcaaacagaaaaagtgacactgaacaccaggcagaccaaaggctggttctttggaaagaacaatattgtatagttcccatatatttgaaaatttgggggttacattttcaat

SEQ ID NO: 330834 - DNA, 592 bp, Homo sapiens
gtgagaagagtcagattaggagtgacctggcagctttggccttaatctattagatagattctgacttactgatgttaaatgtattagcggccaagaaagttgagataaaatgaaaggagtttgttatttttgctcaattctagattgagacaccaatgaacatgcagattaagtgggcaggtttgcaagtgagtggagtttgagctcagagaaaagaaaatacgcataggtattcagcagcgcttacagggtaatttatggtattaaaaccacgtgtatgaatatgcatctgcacatatttatgcctgtgtatgcatgtagataaacatatgcatatgagtatttttcagaaaataaaagggataaaaccaataatctccgcttccaccttatgaaactacataaagaggagcaatttatatctgaagtagaacatgagcaaaataaataataaatattagggcagaaatcaataaaactgcaaacagaaaaagtgacactgaacaccaggcaraccaaaggctggttctttggaaagaacaatattgtatagttcccatatatttgaaaatttgggggttacattttcaat

SEQ ID NO: 330835 - DNA, 556 bp, Homo sapiens
aagacacaaggtctgaataagagaaggagaaaaacaggtattaaaggactaagaattgggaggacccaggacatccaattagagagtgcccaaggaggttcagcataattatttgcttggttggtgagtttttgggctctatccttgagtttttttatgttgtcatataccaggccagattgatttaggtaaaaacaatactcttcatttaaaaatacacagagtcctcctttttcagcggcaagtcaaggccttggcagttttggaggacaaccacagctaaagattcaacctgggcctgaacractgataaagtttgtgatatgtctgcgatgctagcagagaagtcattagaaaggctacggaaggttgtgacagaggttgaaatgcctgctattccagttctgagagcaatagtggaggcagaaagtcctaaactgacaagtaagggaattagtggaataacacttttttatcgtgtcggtttcatgaggggaacaggaagctgtttggtcccatttgcaaattgaatctagggacttaggaaaagtagtgt

SEQ ID NO: 330836 - DNA, 518 bp, Homo sapiens
atatgaggattacataaaaccaaaggcatttagaaagcagcaaatgcacaaaaagccttctcctaaacatcgcttatctgccaaaaagcagattctccagaaggaaaccaattgtcaaaaaamttattcctgagaatttttatatcagggaagattaacacaaaacaggaatcaaaaatagaagagactgggaactgatgctttatccagacaggctattacctgttcttttgaagatgcacttctgttctcatctattctctccagattgcctacacttccgaattccgtcttcgctggaaaggaaatatgaactactggatcttattgagttatttgggtaatcaccctgctatgatatcctgctgcactttaaatgaattttgtttgccttttctcttattaatcttccttttgtcagtttattttcagcaaacatttagaggacaaatggagttttcttcctttctcccaatataagcaagttcccttaaaattcaggcggcttacaaagcagc

SEQ ID NO: 330837 - DNA, 518 bp, Homo sapiens
atatgaggattacataaaaccaaaggcatttagaaagcagcaaatgcacaaaaagccttctcctaaacatcgcttatctgccaaaaagcagattctccagaaggaaaccaattgtcaaaaaaattmttcctgagaatttttatatcagggaagattaacacaaaacaggaatcaaaaatagaagagactgggaactgatgctttatccagacaggctattacctgttcttttgaagatgcacttctgttctcatctattctctccagattgcctacacttccgaattccgtcttcgctggaaaggaaatatgaactactggatcttattgagttatttgggtaatcaccctgctatgatatcctgctgcactttaaatgaattttgtttgccttttctcttattaatcttccttttgtcagtttattttcagcaaacatttagaggacaaatggagttttcttcctttctcccaatataagcaagttcccttaaaattcaggcggcttacaaagcagc

SEQ ID NO: 330838 - DNA, 578 bp, Homo sapiens
ctgggaactgatgctttatccagacaggctattacctgttcttttgaagatgcacttctgttctcatctattctctccagattgcctacacttccgaattccgtcttcgctggaaaggaaatatgaactactggatcttattgagttatttgggtaatcaccctgctatgatatcctgctgcactttaaatgaattttgtttgccttttctcttattaatcttccttttgtcagtttattttcagcaaacatttagaggacaaatggagttttcttcctttctcccaatataagcaagttcccttaaaattcaggcggcttacaaagcagcaagaaggtttgtgcacgggctatggcactgtgatttggctcccctactcaggcatcagtaaaattttgtggagccctaggctrcagcccactgatgctaatatagttggatccacttcccctgctactgagctaggctgggacagttttgggcacattagatatgtgcgatataatgattgcaaatcatttccagtttcatctgtatcaaactgctttctccatgtacataggcatcatctctgtgg

SEQ ID NO: 330839 - DNA, 576 bp, Homo sapiens
ggacagttttgggcacattagatatgtgcgatataatgattgcaaatcatttccagtttcatctgtatcaaactgctttctccatgtacataggcatcatctctgtggatctgtagtaaattgcttgatcttatagtggtaagaacaatggcataacaccattaccgaatactgacatgtatatatagcatcatgtcaataaattttatttttgatttttttagaaaggaacaatgttaaamtcacagaaatgttccaagtataggacaaagtaaccccttccctaaccgggatcatatgagagtcttttggagacctgataatcataccgtctaacattttattatatatttcctacaaacaagaatattctcctaaataatccccatacaccaatgaaatacattactccatcaactcctgaggaatatttcaaatcgtcaaaaaaaaactaaaaaatgtctctcataataaaatagttcccagtagaaacacattctctggagacaaatttgtgctaccctggtcttacctgggacacctggggacactgaactggtgctgagttactgagat

SEQ ID NO: 330840 - DNA, 576 bp, Homo sapiens
ggacagttttgggcacattagatatgtgcgatataatgattgcaaatcatttccagtttcatctgtatcaaactgctttctccatgtacataggcatcatctctgtggatctgtagtaaattgcttgatcttatagtggtaagaacaatggcataacaccattaccgaatactgacatgtatatatagcatcatgtcaataaattttatttttgatttttttagaaaggaacaatgttaaactcacagaaatgttccaagtataggacaaagtaaccccttccctaaccgggatcatatgagagtcttttggagacctgataatcataccgtctaacattttattatatatttcctacaaacaagaatattctcctaaataatccccatacaccaatgaaatacattactccatcaactcctgaggaatatttcaaatygtcaaaaaaaaactaaaaaatgtctctcataataaaatagttcccagtagaaacacattctctggagacaaatttgtgctaccctggtcttacctgggacacctggggacactgaactggtgctgagttactgagat

SEQ ID NO: 330841 - DNA, 576 bp, Homo sapiens
ggacagttttgggcacattagatatgtgcgatataatgattgcaaatcatttccagtttcatctgtatcaaactgctttctccatgtacataggcatcatctctgtggatctgtagtaaattgcttgatcttatagtggtaagaacaatggcataacaccattaccgaatactgacatgtatatatagcatcatgtcaataaattttatttttgatttttttagaaaggaacaatgttaaactcacagaaatgttccaagtataggacaaagtaaccccttccctaaccgggatcatatgagagtcttttggagacctgataatcataccgtctaacattttattatatatttcctacaaacaagaatattctcctaaataatccccatacaccaatgaaatacattactccatcaactcctgaggaatatttcaaatcgtcaaaaaaaamctaaaaaatgtctctcataataaaatagttcccagtagaaacacattctctggagacaaatttgtgctaccctggtcttacctgggacacctggggacactgaactggtgctgagttactgagat

SEQ ID NO: 330842 - DNA, 568 bp, Homo sapiens
cctttggggtgggacattattcattccaccgaccataaacatattccccaaaattgtccttctctaaagtaaaatttaaaaaaatcacgaagtatttttatgaatcaagggaggtggacaaaatcttagactcaggttcctctaacttgtgagttttatctgttggggtatgctcactccactgtctctaatgtagatttattgatgtgtagatagttttagaggatttttaaattttgtgacccagtataaacaaaacagtatctgagacaggtctcaatcaawttacagggttattctgccaaagataaggcttatggcctgtgacacagctttagaaggtcctgtaaacatgtgcccaaggtggttggattacacattggttttaagcactttagggaaacacagaaatacagggaaagacataaatcaatacatataagatatacattagtttgtcctggaaaggtgggatagcttgaagcaggggcttccaggtcataggtggattcaaagctttccttactggctactggttgaaagagttaaggtctgtctaaagagttga

SEQ ID NO: 330843 - DNA, 568 bp, Homo sapiens
cctttggggtgggacattattcattccaccgaccataaacatattccccaaaattgtccttctctaaagtaaaatttaaaaaaatcacgaagtatttttatgaatcaagggaggtggacaaaatcttagactcaggttcctctaacttgtgagttttatctgttggggtatgctcactccactgtctctaatgtagatttattgatgtgtagatagttttagaggatttttaaattttgtgacccagtataaacaaaacagtatctgagacaggtctcaatcaaattacagggttattctgccaaagataaggcttatggcctgtgacacagcyttagaaggtcctgtaaacatgtgcccaaggtggttggattacacattggttttaagcactttagggaaacacagaaatacagggaaagacataaatcaatacatataagatatacattagtttgtcctggaaaggtgggatagcttgaagcaggggcttccaggtcataggtggattcaaagctttccttactggctactggttgaaagagttaaggtctgtctaaagagttga

SEQ ID NO: 330844 - DNA, 568 bp, Homo sapiens
cctttggggtgggacattattcattccaccgaccataaacatattccccaaaattgtccttctctaaagtaaaatttaaaaaaatcacgaagtatttttatgaatcaagggaggtggacaaaatcttagactcaggttcctctaacttgtgagttttatctgttggggtatgctcactccactgtctctaatgtagatttattgatgtgtagatagttttagaggatttttaaattttgtgacccagtataaacaaaacagtatctgagacaggtctcaatcaaattacagggttattctgccaaagataaggcttatggcctgtgacacagctttagaaggtcctgtaaacatgtgcccaaggyggttggattacacattggttttaagcactttagggaaacacagaaatacagggaaagacataaatcaatacatataagatatacattagtttgtcctggaaaggtgggatagcttgaagcaggggcttccaggtcataggtggattcaaagctttccttactggctactggttgaaagagttaaggtctgtctaaagagttga

SEQ ID NO: 330845 - DNA, 575 bp, Homo sapiens
ttacacattggttttaagcactttagggaaacacagaaatacagggaaagacataaatcaatacatataagatatacattagtttgtcctggaaaggtgggatagcttgaagcaggggcttccaggtcataggtgrattcaaagctttccttactggctactggttgaaagagttaaggtctgtctaaagagttgaattcatcataaagaaatgcttgagtgtagaaaaggggatgtggaagccaaggttcttgtcatgtagatgaatcctatcagtagcagataaagtacacggtgaatgttgcttatcagagctttaaaaaatgtcagactttaaaaaagacttagtaaggggaggagattctctatagaatgaaaatttcccccacaactggcagctttgcagaaccacttcagaatatgatgaagaaatatttttaaggtaaaatatttagattttcttcagggcctattatctgtcatgttggaatatggtatcttaatgctacaaagcatctgttttgtcagtccaaagatctctgttgtaatgacaatgttggtcagttgtgtctgaa

SEQ ID NO: 330846 - DNA, 575 bp, Homo sapiens
ttacacattggttttaagcactttagggaaacacagaaatacagggaaagacataaatcaatacatataagatatacattagtttgtcctggaaaggtgggatagcttgaagcaggggcttccaggtcataggtggattcaaagctttccttactggctactggttgaaagagttaaggtctgtctaaagagttgaattcatcataaagaaatgcttgagtgtagaaaaggggatgtggaagccaaggttcttgtcatgtagatgaatcctatcagtagcagataaagtacacggtgaatgttgcttatcagagctttaaaaaatgtcagactttaaaaaagacttagtaaggggaggagattctctatagaatgmaaatttcccccacaactggcagctttgcagaaccacttcagaatatgatgaagaaatatttttaaggtaaaatatttagattttcttcagggcctattatctgtcatgttggaatatggtatcttaatgctacaaagcatctgttttgtcagtccaaagatctctgttgtaatgacaatgttggtcagttgtgtctgaa

SEQ ID NO: 330847 - DNA, 653 bp, Homo sapiens
ttagtttgggtccaccctcaatgaggatccctgtttaggcagcaaatttacactgggaggaaaggaggaaagtgaggaagagaacagaagatgaatggaaaaagacacatcaacaacctacctgactcaggataaccaaagatcaaccacatgtggaaacatggactaagttcctctgggctattccacctgagagatgaggaagctggggtatgtatacacctcatcgtgtcctcactgattgtgcgctgtctctcttgttctatttcaagctgctataacagattcattgtcactatgtaattcataaggaacagaaatttattttcttacagttctggagaatgggaaattaaagatcaagacatgggcaggttaaggtcygctttctccactttcaagatgctgcctggagttagaaatgcaaaagttctacacaggttttcatctgcacccatggtcagtgcccaaacctccatgttgttcaagggtcaactgctcattcaatctgtagctgcatctctctggaacaggatcttggcaggtgggttgcaagtaaaggaatccagaaaataacatctcaaactatgctgcactggtatgatgattatgtaaaaccaaagacctttagaaagcaccaaatgcacaaaaag

SEQ ID NO: 330848 - DNA, 653 bp, Homo sapiens
ttagtttgggtccaccctcaatgaggatccctgtttaggcagcaaatttacactgggaggaaaggaggaaagtgaggaagagaacagaagatgaatggaaaaagacacatcaacaacctacctgactcaggataaccaaagatcaaccacatgtggaaacatggactaagttcctctgggctattccacctgagagatgaggaagctggggtatgtatacacctcatcgtgtcctcactgattgtgcgctgtctctcttgttctatttcaagctgctataacagattcattgtcactatgtaattcataaggaacagaaatttattttcttacagttctggagaatgggaaattaaagatcaagacatgggcaggttaaggtccgctttctccactttcaagatgmtgcctggagttagaaatgcaaaagttctacacaggttttcatctgcacccatggtcagtgcccaaacctccatgttgttcaagggtcaactgctcattcaatctgtagctgcatctctctggaacaggatcttggcaggtgggttgcaagtaaaggaatccagaaaataacatctcaaactatgctgcactggtatgatgattatgtaaaaccaaagacctttagaaagcaccaaatgcacaaaaag

SEQ ID NO: 330849 - DNA, 593 bp, Homo sapiens
ggtgcatggcagggacatgctccatgcagtggtcaccctcagtaagagagatgaactttgggaaataatattgaatggcagaaaagaaggtagactatgaaggtgcccaaaacaagaataaggtgcagcccatttagtgtctgagtactatagagacctgtcgctcttgataattgtggatctgtgactgctgcatgcatcragaaaacacggtatcatctttgtgtatctatagtacatagtttgatcgcatactggtaagaacaatggcataacaccattacctgatacttacaaatgtatgtaccatcatgtcaataaattttatttttaattttttttacataggaacaatgttaaactcacagaaatgttgcatgtatatgacaaatacccccttccctaaccggaatcatataagagtcttttgaagacttgagaattgtaccgtctaacattttactatgtgtttcctacaaacaacaatattctcctaaataatccccatacaccaatgaaatacattagtccatcaactcctgaggaatatttcaaatcgtcaaaaagaaaccaaaaaatgttactcacaacaa

SEQ ID NO: 330850 - DNA, 593 bp, Homo sapiens
ggtgcatggcagggacatgctccatgcagtggtcaccctcagtaagagagatgaactttgggaaataatattgaatggcagaaaagaaggtagactatgaaggtgcccaaaacaagaataaggtgcagcccatttagtgtctgagtactatagagacctgtcgctcttgataattgtggatctgtgactgctgcatgcatcaagaaaacacggtatcatctttgtgtatctatagtacatagtttgatcgcatactggtaagaacaatggcataacaccattacctgatacttacaaatgtatgtaccatcatgtcaataaattttatttttaattttttttacataggaacaatgttaaactcacagaaatgttgcatgtataygacaaatacccccttccctaaccggaatcatataagagtcttttgaagacttgagaattgtaccgtctaacattttactatgtgtttcctacaaacaacaatattctcctaaataatccccatacaccaatgaaatacattagtccatcaactcctgaggaatatttcaaatcgtcaaaaagaaaccaaaaaatgttactcacaacaa

SEQ ID NO: 330851 - DNA, 593 bp, Homo sapiens
ggtgcatggcagggacatgctccatgcagtggtcaccctcagtaagagagatgaactttgggaaataatattgaatggcagaaaagaaggtagactatgaaggtgcccaaaacaagaataaggtgcagcccatttagtgtctgagtactatagagacctgtcgctcttgataattgtggatctgtgactgctgcatgcatcaagaaaacacggtatcatctttgtgtatctatagtacatagtttgatcgcatactggtaagaacaatggcataacaccattacctgatacttacaaatgtatgtaccatcatgtcaataaattttatttttaattttttttacataggaacaatgttaaactcacagaaatgttgcatgtatatgacaaatacccccttccctarccggaatcatataagagtcttttgaagacttgagaattgtaccgtctaacattttactatgtgtttcctacaaacaacaatattctcctaaataatccccatacaccaatgaaatacattagtccatcaactcctgaggaatatttcaaatcgtcaaaaagaaaccaaaaaatgttactcacaacaa

SEQ ID NO: 330852 - DNA, 573 bp, Homo sapiens
aattgtgtggacatttgtttttatgtttccaatctcaggttccagatgcgacatccagatgacccagtctccatcttccgtgtctgcatctgtaggagacagagtcaccatcacttgtcgggcgagtcagggtattagcagctggttagcctggtatcagcagaaaccagggaaagcccctaagctcctgatctatgctgcatccagtttgcaaagtggggtcccatcaaggttcagcggcagtggatctgggacagatttcactctcaccatcagcagcctgcagcctgaagattttgcaacttactattgtcaacaggctaacagtttccctyccacagtgttaccaacccgaacataaacccccagggaagcagatgtgtgaagctgggctgccccagctgctcctcctgatgcctccattggctgagagtgttgctcagatgcagccacactctgatggtgttggtagaggggtacgtgaaatcgcctctgcaccctaattcttttctctttctcagccccaactgcacagacatagcaatgcatctcctgatttgataaatacagaga

SEQ ID NO: 330853 - DNA, 416 bp, Homo sapiens
cagtgatatgtaagtttcagctccttgatagtatctgggaggcctgttcattggtttactgaaaaaacaaacaaacaaacaaacaaacaaacaaaaaactcagataagacagatgtaactatcttgagttttaagactgggggagtcaatttctatgtttatacaaaaaaacataaacattagttccatgggataatagggcctattwcaattgcattctagaaacaatattttgcaccctgagtgcctttccccactggtttctttgctctgttgggtatgacaagaatgaccaaattcctaagattaagtttcccactacaacctttcaaagccaaggatatagtagtcatgaaagctgatattagaagcaggaatctctgatcctccctcaggcaacagaatgcatcttcctc

SEQ ID NO: 330854 - DNA, 530 bp, Homo sapiens
aatctcatgggaggacttcttattgggcaactctataagaaacaagagagacaaaatgagaatttatgtaagttaaaatgattttcccccatgaggccatttaaataaattatayttaaagccacatgttgaaaacacatccagctttattttcttattaatgcaaatttacatttgcaaatattttcaatattgtaaaggttgaaaacataattatttgtccatggaatgatcaaacacctctataattaaatggagtaaacattttcttaaaaatttgtactcactgaaataaagcaatatatttgaaatgtgtgaagctatgttagaaattattggacttaaactcaacctgtgcagtttggtttgggatgttgttcactcttgtgacctgccagaagaatcttgagtcatgggtagtcactgctgttcagccttgtcctcagacagttgatatgtgtaggctgaagacgagctcagtgccatgcagagaaaccactcacctgaacccttccttgatcagccagatt

SEQ ID NO: 330855 - DNA, 530 bp, Homo sapiens
aatctcatgggaggacttcttattgggcaactctataagaaacaagagagacaaaatgagaatttatgtaagttaaaatgattttcccccatgaggccatttaaataaattatacttaaagccacatgttgaaaacrcatccagctttattttcttattaatgcaaatttacatttgcaaatattttcaatattgtaaaggttgaaaacataattatttgtccatggaatgatcaaacacctctataattaaatggagtaaacattttcttaaaaatttgtactcactgaaataaagcaatatatttgaaatgtgtgaagctatgttagaaattattggacttaaactcaacctgtgcagtttggtttgggatgttgttcactcttgtgacctgccagaagaatcttgagtcatgggtagtcactgctgttcagccttgtcctcagacagttgatatgtgtaggctgaagacgagctcagtgccatgcagagaaaccactcacctgaacccttccttgatcagccagatt

SEQ ID NO: 330856 - DNA, 530 bp, Homo sapiens
aatctcatgggaggacttcttattgggcaactctataagaaacaagagagacaaaatgagaatttatgtaagttaaaatgattttcccccatgaggccatttaaataaattatacttaaagccacatgttgaaaacacatccagctttattttcttattaatgcaaatttacatttgcaaatattttcaatattgtaaaggttgaaaacataattatttgtccatggaatgatcaaacacctctataattaaatggagtaaacattttcttaaaaatttgtactcactgaaataaagcaatatatttgaaatgtgtgaagctatgttagaaattattggacttaaactcaacctgtgcagtttggtttgggatgytgttcactcttgtgacctgccagaagaatcttgagtcatgggtagtcactgctgttcagccttgtcctcagacagttgatatgtgtaggctgaagacgagctcagtgccatgcagagaaaccactcacctgaacccttccttgatcagccagatt

SEQ ID NO: 330857 - DNA, 530 bp, Homo sapiens
aatctcatgggaggacttcttattgggcaactctataagaaacaagagagacaaaatgagaatttatgtaagttaaaatgattttcccccatgaggccatttaaataaattatacttaaagccacatgttgaaaacacatccagctttattttcttattaatgcaaatttacatttgcaaatattttcaatattgtaaaggttgaaaacataattatttgtccatggaatgatcaaacacctctataattaaatggagtaaacattttcttaaaaatttgtactcactgaaataaagcaatatatttgaaatgtgtgaagctatgttagaaattattggacttaaactcaacctgtgcagtttggtttgggatgttgttcactcttgtgacctgccagaagaatcttgagtcatgggtagtcactgctgttcagccttgtcctcagacagttgatatgtgtaggctgaagacragctcagtgccatgcagagaaaccactcacctgaacccttccttgatcagccagatt

SEQ ID NO: 330858 - DNA, 541 bp, Homo sapiens
tatgttgaatattctctaatacaacatgctttttcccttcatgaacaatttgtgttttactgagaagagtcattgtttatggtagactacagatgaatatgtactttaaacactcttagttgctttcttaattttatatctgctgctttatgcttctgtttattttcattctttccaatgtccacattctagtaaatttgaatattttaatccaagtttatatactatttaatattgcttgtatagtttagtatttttaagactcaaaaaggtttacagaaagaagaaaaagatcaacatgttattaatcatttaaagatcattttgaaatctttgacctttatattttaatgaataaaatattagtagttattagtataaaataatttatgtcttttggacttagcatccagtatttcttttttaataaagaaaataattattctcttgcaatrtactatgtttatctgggttttgaaaagtgatgtttcctaatatgagaaagccatttacagttttaaatctacaaaggcaaatggaa

SEQ ID NO: 330859 - DNA, 541 bp, Homo sapiens
tatgttgaatattctctaatacaacatgctttttcccttcatgaacaatttgtgttttactgagaagagtcattgtttatggtagactacagatgaatatgtactttaaacactcttagttgctttcttaattttatatctgctgctttatgcttctgtttattttcattctttccaatgtccacattctagtaaatttgaatattttaatccaagtttatatactatttaatattgcttgtatagtttagtatttttaagactcaaaaaggtttacagaaagaagaaaaagatcaacatgttattaatcatttaaagatcattttgaaatctttgacctttatattttaatgaataaaatattagtagttattagtataaaataatttatgtcttttggacttagcatccagtatttcttttttaataaagaaaataattattctcttgcaatgtactatgtttayctgggttttgaaaagtgatgtttcctaatatgagaaagccatttacagttttaaatctacaaaggcaaatggaa

SEQ ID NO: 330860 - DNA, 575 bp, Homo sapiens
aatttccaggtgttgccatggcaaggcgctgcgacttctggatgttgctatggcaatggtaaactgtcatggtactggtgggtatgtcttacggagargtgttttcagaatcctattcctgttttggccagcctcacatctggtccagagtgaagtcctgcctacctcttacctcaaaagtaacaagaaatctgtaataacaagttacccagaaaaaactccaaattttatttggtggttagtgacatggtacttatcaaaattacacaaactttcaagggaataaaaaaatactcagaattattataggaggtcataatgtcctccagtccaaaaattaatgaggacataacaaaaaaaggatattaaaggctggtatctcttatgaacatagacacaaaaatcataagaaaaaaatggaatccatctgtgtatctacacatttagtgaacacacgttgtaaaaagtgttacagtttttatgataagaactcttgataggtaattttaatttctgaaaaatgtatatgaactataaggtatgttggatctctttccctaacttaaaaaacattt

SEQ ID NO: 330861 - DNA, 575 bp, Homo sapiens
aatttccaggtgttgccatggcaaggcgctgcgacttctggatgttgctatggcaatggtaaactgtcatggtactggtgggtatgtcttacggagaagtgttttcagaatcctattcctgttttggccagcctcacatctggtccagagtgaagtsctgcctacctcttacctcaaaagtaacaagaaatctgtaataacaagttacccagaaaaaactccaaattttatttggtggttagtgacatggtacttatcaaaattacacaaactttcaagggaataaaaaaatactcagaattattataggaggtcataatgtcctccagtccaaaaattaatgaggacataacaaaaaaaggatattaaaggctggtatctcttatgaacatagacacaaaaatcataagaaaaaaatggaatccatctgtgtatctacacatttagtgaacacacgttgtaaaaagtgttacagtttttatgataagaactcttgataggtaattttaatttctgaaaaatgtatatgaactataaggtatgttggatctctttccctaacttaaaaaacattt

SEQ ID NO: 330862 - DNA, 575 bp, Homo sapiens
aatttccaggtgttgccatggcaaggcgctgcgacttctggatgttgctatggcaatggtaaactgtcatggtactggtgggtatgtcttacggagaagtgttttcagaatcctattcctgttttggccagcctcacatctggtccagagtgaagtcctgcctacctcttacctcaaaagtaacaagaaatctgtaataacaagttacccagaaaaaactccaaattttatttggtggttagtgacatggtacttatcaaaattacacaaactttcaagggaataaaaaaatactcagaattattataggaggtcataatgtcctccagtccaaaaattaatgaggacataacaaaaaaaggatattaaaggctggtatctcttatgaacatagacacaaaaatcataagaaaaaaatggaatccatctgtgtatctacacatttagtgaacacacgttgtaaaaagtgttacagtttttaygataagaactcttgataggtaattttaatttctgaaaaatgtatatgaactataaggtatgttggatctctttccctaacttaaaaaacattt

SEQ ID NO: 330863 - DNA, 575 bp, Homo sapiens
aatttccaggtgttgccatggcaaggcgctgcgacttctggatgttgctatggcaatggtaaactgtcatggtactggtgggtatgtcttacggagaagtgttttcagaatcctattcctgttttggccagcctcacatctggtccagagtgaagtcctgcctacctcttacctcaaaagtaacaagaaatctgtaataacaagttacccagaaaaaactccaaattttatttggtggttagtgacatggtacttatcaaaattacacaaactttcaagggaataaaaaaatactcagaattattataggaggtcataatgtcctccagtccaaaaattaatgaggacataacaaaaaaaggatattaaaggctggtatctcttatgaacatagacacaaaaatcataagaaaaaaatggaatccatctgtgtatctacacatttagtgaacacacgttgtaaaaagtgttacagtttttatgataagaactcttgataggtaattttaatttctgaaaaatktatatgaactataaggtatgttggatctctttccctaacttaaaaaacattt

SEQ ID NO: 330864 - DNA, 608 bp, Homo sapiens
gcagcaggaaggtttgtgcatgggctacagcactgtgattttgctcccctagtcaggcatcagtaaaattttgtggagccctagactgtagcccactgatgctgatgtagttggatccamttcccctgctactgagccaggctgggacatttttggcacattagagatgtgagatataacgagtgaaaatcgtgtccagtttcatctggatccaactgatttctccatgtacatgggaaattgcttgataagagattgactgtctctttcctaaaaatggtaacaagcaggctggtgtctgggtcatgatgatgtccccagtcactgataaaatgtaaaagaggaaagtgtcattgatggtgcatggcagggacatgctctgtgcagtggccgacctcactaagagagataaactttaggaaaagatactcaatgacagaaaagaaggtagactatgaaggtgcccaaaacaagaatacggtgcagcgcatttagtctctggtattaaaaagacctgtagctcttgataatggtggatgtgtgagtgctgcatgcattgaggaaacacggtatcatctctgtgtatctgtagtaaattgcttgatctt

SEQ ID NO: 330865 - DNA, 492 bp, Homo sapiens
ctctgaaacattaactgtgatgggtgcttttactcccttaaacagaatatatatatcttgaaaatgagctgtagacttaccattgttaacgccaactgaacagcttgaaatactctatttctgttttctcagggctgtggttttctggttgatggttcttttttttttttaagacggwctctcactctgctgccaggctggagtgcaatggcgccatctcggcttcaccgtaacctctgcctcccaggtttaagctattctcctgcctcagcctcccgagtagctgggactacagggggtacaccacctgtagcccagctaatttttgtatttttactacaaacggggtttcaacatgtgggccaggaaggtcttgatctcttgacctcgtgatctgcctgcctctgcctcccaaagtgctgggattacaggcatgagccaccacgcctggcctggttgatgattcttaatccaaagagttgacatgacaat

SEQ ID NO: 330866 - DNA, 492 bp, Homo sapiens
ctctgaaacattaactgtgatgggtgcttttactcccttaaacagaatatatatatcttgaaaatgagctgtagacttaccattgttaacgccaactgaacagcttgaaatactctatttctgttttctcagggctgtggttttctggttgatggttcttttttttttttaagacggactctcactctgctgccaggctggagtgcaatggcgccatctcggcttcacygtaacctctgcctcccaggtttaagctattctcctgcctcagcctcccgagtagctgggactacagggggtacaccacctgtagcccagctaatttttgtatttttactacaaacggggtttcaacatgtgggccaggaaggtcttgatctcttgacctcgtgatctgcctgcctctgcctcccaaagtgctgggattacaggcatgagccaccacgcctggcctggttgatgattcttaatccaaagagttgacatgacaat

SEQ ID NO: 330867 - DNA, 594 bp, Homo sapiens
atataattcagcaattccacttttggacatatacccaagtaatggaagacattaaattgaggagatatttgtatatccacattcagaagcaaattattcacagtagccaaatgtagaagcaactcaaatgttcacaaaggagggaactggtaatccaaatgtggtaatatacatactattccatattatttagttttaaaaagggaaattctgacacatgctacaacatggatggaactagaggacattacactaagtgaaataacccagtctcaaaaatactgagttttgatttcactgtggtatttgcagaacagtttccatttagtcacgaattaacccagtctccttccttttcttgattgtagttttcaggaataactgtagaatgttctggaactgtaacattctgagatagggcatgattggccagaayagcctgggttctgtttctgtccctactagaaacaggaattccttcaacactgtagcccagtgtgtcatgtgattctaagacataaaacccagggtgggctgcattccagggtccctcagctgcggtccttttgtgttatgcaaggtctagagtcaatc

SEQ ID NO: 330868 - DNA, 594 bp, Homo sapiens
atataattcagcaattccacttttggacatatacccaagtaatggaagacattaaattgaggagatatttgtatatccacattcagaagcaaattattcacagtagccaaatgtagaagcaactcaaatgttcacaaaggagggaactggtaatccaaatgtggtaatatacatactattccatattatttagttttaaaaagggaaattctgacacatgctacaacatggatggaactagaggacattacactaagtgaaataacccagtctcaaaaatactgagttttgatttcactgtggtatttgcagaacagtttccatttagtcacgaattaacccagtctccttccttttcttgattgtagttttcaggaataactgtagaatgttctggaactgtaacattctgagatagggcatgattggccagaacagcctgggttctgtttctgtccctactagaaacaggaattccttcaacactgtagcccagtgtgtcatgtgattctaagacataaaacccagggtgggctgcattccagggtycctcagctgcggtccttttgtgttatgcaaggtctagagtcaatc

SEQ ID NO: 330869 - DNA, 594 bp, Homo sapiens
atataattcagcaattccacttttggacatatacccaagtaatggaagacattaaattgaggagatatttgtatatccacattcagaagcaaattattcacagtagccaaatgtagaagcaactcaaatgttcacaaaggagggaactggtaatccaaatgtggtaatatacatactattccatattatttagttttaaaaagggaaattctgacacatgctacaacatggatggaactagaggacattacactaagtgaaataacccagtctcaaaaatactgagttttgatttcactgtggtatttgcagaacagtttccatttagtcacgaattaacccagtctccttccttttcttgattgtagttttcaggaataactgtagaatgttctggaactgtaacattctgagatagggcatgattggccagaacagcctgggttctgtttctgtccctactagaaacaggaattccttcaacactgtagcccagtgtgtcatgtgattctaagacataaaacccagggtgggctgcattccagggtccctcagctgyggtccttttgtgttatgcaaggtctagagtcaatc

SEQ ID NO: 330870 - DNA, 536 bp, Homo sapiens
tgtaagtccctttggggaagactgggaaaaagattaacaatgtaaatttttggcaaygtagcagcgtacttccccaagatcacccagcctccccttcacttaaggggttgtgggcctgtgaactggctcaagtctgggaattgattgagggttttagatctgtgtttcattaatttgagttagtcttttattcagttgacctagaattcttcattttttaaagaacaactaagactttggtacagcccattagctctccctgtggataccatggactacacaatgccgtgggtgtctgtgagtcaaaccattctgactgctgctttgacactgctttccactgtggtgaccacacccacctcatctttggtgattaaggacagcccatgttccctgccaccccaggattcaattatcctcattttacttaaagatcccagtccagtggctgcagttcctgctgtaacattttgcctactgagagcacaagctcaaagctcttccaggatactgggctcctctcacaatattctttc

SEQ ID NO: 330871 - DNA, 536 bp, Homo sapiens
tgtaagtccctttggggaagactgggaaaaagattaacaatgtaaatttttggcaacgtagcagcgtacttccccaagatcacccagcctccccttcacttaaggggttgtgggcctgtgaactggctcaagtctgggaattgattgagggttttagatctgtgtttcattaatttgagttartcttttattcagttgacctagaattcttcattttttaaagaacaactaagactttggtacagcccattagctctccctgtggataccatggactacacaatgccgtgggtgtctgtgagtcaaaccattctgactgctgctttgacactgctttccactgtggtgaccacacccacctcatctttggtgattaaggacagcccatgttccctgccaccccaggattcaattatcctcattttacttaaagatcccagtccagtggctgcagttcctgctgtaacattttgcctactgagagcacaagctcaaagctcttccaggatactgggctcctctcacaatattctttc

SEQ ID NO: 330872 - DNA, 536 bp, Homo sapiens
tgtaagtccctttggggaagactgggaaaaagattaacaatgtaaatttttggcaacgtagcagcgtacttccccaagatcacccagcctccccttcacttaaggggttgtgggcctgtgaactggctcaagtctgggaattgattgagggttttagatctgtgtttcattaatttgagttagtcttttattcagttgacctagaattcttcattttttaaasaacaactaagactttggtacagcccattagctctccctgtggataccatggactacacaatgccgtgggtgtctgtgagtcaaaccattctgactgctgctttgacactgctttccactgtggtgaccacacccacctcatctttggtgattaaggacagcccatgttccctgccaccccaggattcaattatcctcattttacttaaagatcccagtccagtggctgcagttcctgctgtaacattttgcctactgagagcacaagctcaaagctcttccaggatactgggctcctctcacaatattctttc

SEQ ID NO: 330873 - DNA, 536 bp, Homo sapiens
tgtaagtccctttggggaagactgggaaaaagattaacaatgtaaatttttggcaacgtagcagcgtacttccccaagatcacccagcctccccttcacttaaggggttgtgggcctgtgaactggctcaagtctgggaattgattgagggttttagatctgtgtttcattaatttgagttagtcttttattcagttgacctagaattcttcattttttaaagaacaactaagactttggtacagcccattagctctccctgtggataccatggactacacaatgccrtgggtgtctgtgagtcaaaccattctgactgctgctttgacactgctttccactgtggtgaccacacccacctcatctttggtgattaaggacagcccatgttccctgccaccccaggattcaattatcctcattttacttaaagatcccagtccagtggctgcagttcctgctgtaacattttgcctactgagagcacaagctcaaagctcttccaggatactgggctcctctcacaatattctttc

SEQ ID NO: 330874 - DNA, 544 bp, Homo sapiens
aaatttagcctaatccaactttatgttacttccaccatggtgccacacacttaatatccattcccacatatattctccagatttccttctgtataaattgcgtgtgtgtgtgtgtgtgtgtgtgtgtgtgtgtgtagaaagagagcatcaactaaaaaatcacacaattttataaatttagaaaagagagctttatttcttatataggtttgcagtctgcaaggtggccattatgacagsctgggaagtgtggcctacagccaaggccagaggcaggcatttccagggagggaaggagaggacaggaatttgagccaaatgagttggctacatatacatactcaataggatatcagaggagctatatcattttatgagaatactcataaaagaggtcctaatgaatgcatattcaataaacatgcatgttcattctggggtggagacttgacatttaaatgtattataattaggccctacacatcaaaaagtgaagcagggacatgaaggtactcagcctctgtacaggcacagcctccaaaac

SEQ ID NO: 330875 - DNA, 544 bp, Homo sapiens
aaatttagcctaatccaactttatgttacttccaccatggtgccacacacttaatatccattcccacatatattctccagatttccttctgtataaattgcgtgtgtgtgtgtgtgtgtgtgtgtgtgtgtgtgtagaaagagagcatcaactaaaaaatcacacaattttataaatttagaaaagagagctttatttcttatataggtttgcagtctgcaaggtggccattatgacagcctgggaagtgtggcctacagccaaggccagaggcaggcatttccagggagggaaggagaggacaggaatttgagccaaatgagttggctacatatacatactcaataggatatcagaggagctatatcattttatgagaatactcataaaagaggtcctaatgmatgcatattcaataaacatgcatgttcattctggggtggagacttgacatttaaatgtattataattaggccctacacatcaaaaagtgaagcagggacatgaaggtactcagcctctgtacaggcacagcctccaaaac

SEQ ID NO: 330876 - DNA, 544 bp, Homo sapiens
aaatttagcctaatccaactttatgttacttccaccatggtgccacacacttaatatccattcccacatatattctccagatttccttctgtataaattgcgtgtgtgtgtgtgtgtgtgtgtgtgtgtgtgtgtagaaagagagcatcaactaaaaaatcacacaattttataaatttagaaaagagagctttatttcttatataggtttgcagtctgcaaggtggccattatgacagcctgggaagtgtggcctacagccaaggccagaggcaggcatttccagggagggaaggagaggacaggaatttgagccaaatgagttggctacatatacatactcaataggatatcagaggagctatatcattttatgagaatactcataaaagaggtcctaatgaatgcayattcaataaacatgcatgttcattctggggtggagacttgacatttaaatgtattataattaggccctacacatcaaaaagtgaagcagggacatgaaggtactcagcctctgtacaggcacagcctccaaaac

SEQ ID NO: 330877 - DNA, 272 bp, Homo sapiens
catcacacaccacagctgccttttcttctgcctgcttatgggaaagtcccctcctctcctccattttcttctcttcctgccctatcacaccgtgcacttctccctttccttaaagaaccaccatcaactttaggaggagggaaaggggtggctctggcaggaaaagccagaatcccctctagccagcagagagagaggaatggctgcctgttttctcccccartccaaggcactaggttttggctaggttgcaggttccaagctgctctcct

SEQ ID NO: 330878 - DNA, 563 bp, Homo sapiens
ggggagcttggagctgcacaaacccaggtctggaactggctccctaccttgaaaggtgaatgatcctggcaggactcagcctcccwgggcctcagtttctttatctgtttcttgctggttggttgggtgatgtgggggctgtgtgaaaacagcttgtcaatacaagccgaaataggaatatttctccacagagtatgaaggtcaaatgagagaatacatttaaattaaatggaaaattaaaatggcaaaaaaggcaaagttgtattgaaagttccaagcttctctataaggagctttttgactatgtaagaatccggtactcgttccccctaaatataaaaaaaaaaagttgaaggaggaagaagggagagtgatgcatgatgggcgaggacttcacctgctgttgctggctttgaggatggaggaaggaggccacaaacctagaagctggagcccctagaagctagaaaaggcagggacccgattcatcccttgagcctccagaagggacatagccccgccagcaccttgactttagcccagtgagatcctcttaggacttt

SEQ ID NO: 330879 - DNA, 563 bp, Homo sapiens
ggggagcttggagctgcacaaacccaggtctggaactggctccctaccttgaaaggtgaatgatcctggcaggactcagcctccctgggcctcagtttctttatctgtttcttgctggttggttgggtgatgtgggggctgtgtgaaaacagcttgtcaatacaagccgaaataggaatatttctccacagagtatgaaggtcaaatgagagaatacatttaaattaaatggaaaattaaaatggcaaaaaaggcaaagttgtattgaaagttccaagcttctctataaggagctttttgactatgtaagaatccggtactcgttccccctaaatataaaaaaaaaaagttgaaggaggaagaagggagagtratgcatgatgggcgaggacttcacctgctgttgctggctttgaggatggaggaaggaggccacaaacctagaagctggagcccctagaagctagaaaaggcagggacccgattcatcccttgagcctccagaagggacatagccccgccagcaccttgactttagcccagtgagatcctcttaggacttt

SEQ ID NO: 330880 - DNA, 636 bp, Homo sapiens
tgaatgatcctggcaggactcagcctccctgggcctcagtttctttatctgtttcttgctggttggttgggtgatgtgggggctgtgtgaaaacagcttgtcaatacaagccgaaataggaatatttctccacagagtatgaaggtcaaatgagagaatacatttaaattaaatggaaaattaaaatggcaaaaaaggcaaagttgtattgaaagttccaagcttctctataaggagctttttgactatgtaagaatccggtactcgttccccctaaatataaaaaaaaaaagttgaaggaggaagaagggagagtgatgcatgatgggcgaggacttcacctgctgttgctggctttgaggatggaggaaggaggccacaaacctagaagctggagcccctagaagctagaaaaggcagggacccgattcatcccttgagcctccagaagggacatagccccrccagcaccttgactttagcccagtgagatcctcttaggacttttggcaaccagaactataagacagaaatggaagccactgagtctgtagctgtttgttgcagcagcaatagaaaactaatgcagagcccaagaaatcactggtgatgagatggggaagtgggctcaggagg

SEQ ID NO: 330881 - DNA, 541 bp, Homo sapiens
aacatttatatgtcaaagacacagagctgagactttagttttagatactataatttgcctaaaccaaaaaggaaggtgtaggtaaagttctagtcaagacaggatggccaggaaaaacaccttaaaccaagggacrgcttgctttgctgatttaagccaatggcttctttatcataagacttcccagtgatttagtcctccctctcttccagtgcacagagacatacccctccttacaaataaaaatgttctttatagatgtaaatttattttacaaaaatgtttcaaaataaccagatgaaaatcatccttatgccagaaagacttgtttttttttttcattactagaaatgaaacagtaagtatttgttgtattgacatacttaggcttagacctatgtttaacaagaaagcctaataatagcactgtggttagactgtagcctatttttccaaaccatcattttattattaaggaaacgaaggatcaaatacctttcattcatctgatatgatcctttaaaacacattccactaataa

SEQ ID NO: 330882 - DNA, 541 bp, Homo sapiens
aacatttatatgtcaaagacacagagctgagactttagttttagatactataatttgcctaaaccaaaaaggaaggtgtaggtaaagttctagtcaagacaggatggccaggaaaaacaccttaaaccaagggacagcttgctttgctgatttaagccaatggcttctttatcataagacttcccagtgatttagtcctccctctcttccagtgcacagagacatacccctccttacaaataaaaatgttctttatagatgkaaatttattttacaaaaatgtttcaaaataaccagatgaaaatcatccttatgccagaaagacttgtttttttttttcattactagaaatgaaacagtaagtatttgttgtattgacatacttaggcttagacctatgtttaacaagaaagcctaataatagcactgtggttagactgtagcctatttttccaaaccatcattttattattaaggaaacgaaggatcaaatacctttcattcatctgatatgatcctttaaaacacattccactaataa

SEQ ID NO: 330883 - DNA, 410 bp, Homo sapiens
gcaaggccagggtcagggcagaaccaggaccaggataaggcaaagccaaggccagggcagggcaaggccagggcaaggcaagaccagggaagggcaaggccagggtagaaaaggccagtgtagggccaggtcagggtaggagaaggccatggtagggccaaggccaaggcagggcagggctagggtagcacagggcatggccaaaaacagggcagggccataacagtggcaggactaacaacagggccagggcaagygctggaccagagcatggtggggacaatacagggccaggacagacgatggcaaggcaggtccagggccatttcatggactcggtaggcctggggtcaggccagggcagggcaaaggcaagaccagggagaaggcagggccgggccaaggcagtg

SEQ ID NO: 330884 - DNA, 546 bp, Homo sapiens
caatgcctcacatattaacatattgataaaattatactcatagaacactactggaagcaaagatagtattagttaaaatttagtgattaytgcaaatattattactattacaaacaatatagtatagacattactactactatagttatcttaaaaatctaaaataaaaattttacgtaatagcccattgtaatctctcctgctctgccctggctcagccctagtgccggctctgcccctagtcctactacatccctggccctgacccttccctggtccagccgctgccctggcccttcccatcttcaggccttaccatggccctaccctggtcctgaccctgccctggtctggtcctgaccctggccctaccccagaaaaggggtatggcagagccagggaagggccagggcaaataagggacaggacacacccaaatccaggaaagggccagggccatgacagagccagggcgagtccttggcagggccaggttccaggccagggccaggaaagggtcatggcagggtcactgtatggccaagg

SEQ ID NO: 330885 - DNA, 529 bp, Homo sapiens
ctggccaagtatttaacttctttatgcctgtttcctacatttggaaaatggggatgctttaagtacctagcacatagaattattgtgagaatcaatgcctcacatattaacatattgataaaattatactcatagaacactactggaagcaaagatagtattagttaaaatttagtgattactgcaaatattattactattacaaacaatatagtatagacattactactactayagttatcttaaaaatctaaaataaaaattttacgtaatagcccattgtaatctctcctgctctgccctggctcagccctagtgccggctctgcccctagtcctactacatccctggccctgacccttccctggtccagccgctgccctggcccttcccatcttcaggccttaccatggccctaccctggtcctgaccctgccctggtctggtcctgaccctggccctaccccagaaaaggggtatggcagagccagggaagggccagggcaaataagggacaggacacacccaa

SEQ ID NO: 330886 - DNA, 529 bp, Homo sapiens
ctggccaagtatttaacttctttatgcctgtttcctacatttggaaaatggggatgctttaagtacctagcacatagaattattgtgagaatcaatgcctcacatattaacatattgataaaattatactcatagaacactactggaagcaaagatagtattagttaaaatttagtgattactgcaaatattattactattacaaacaatatagtatagacattactactactatagttatcttaaaaatctaaaataaaaattttacgtaatagcccawtgtaatctctcctgctctgccctggctcagccctagtgccggctctgcccctagtcctactacatccctggccctgacccttccctggtccagccgctgccctggcccttcccatcttcaggccttaccatggccctaccctggtcctgaccctgccctggtctggtcctgaccctggccctaccccagaaaaggggtatggcagagccagggaagggccagggcaaataagggacaggacacacccaa

SEQ ID NO: 330887 - DNA, 529 bp, Homo sapiens
ctggccaagtatttaacttctttatgcctgtttcctacatttggaaaatggggatgctttaagtacctagcacatagaattattgtgagaatcaatgcctcacatattaacatattgataaaattatactcatagaacactactggaagcaaagatagtattagttaaaatttagtgattactgcaaatattattactattacaaacaatatagtatagacattactactactatagttatcttaaaaatctaaaataaaaattttacgtaatagcccattgtaatctctcctgctctgycctggctcagccctagtgccggctctgcccctagtcctactacatccctggccctgacccttccctggtccagccgctgccctggcccttcccatcttcaggccttaccatggccctaccctggtcctgaccctgccctggtctggtcctgaccctggccctaccccagaaaaggggtatggcagagccagggaagggccagggcaaataagggacaggacacacccaa

SEQ ID NO: 330888 - DNA, 529 bp, Homo sapiens
ctggccaagtatttaacttctttatgcctgtttcctacatttggaaaatggggatgctttaagtacctagcacatagaattattgtgagaatcaatgcctcacatattaacatattgataaaattatactcatagaacactactggaagcaaagatagtattagttaaaatttagtgattactgcaaatattattactattacaaacaatatagtatagacattactactactatagttatcttaaaaatctaaaataaaaattttacgtaatagcccattgtaatctctcctgctctgccctggctcagccctagtgccggctctgcccctagtcctactacatccctggccckgacccttccctggtccagccgctgccctggcccttcccatcttcaggccttaccatggccctaccctggtcctgaccctgccctggtctggtcctgaccctggccctaccccagaaaaggggtatggcagagccagggaagggccagggcaaataagggacaggacacacccaa

SEQ ID NO: 330889 - DNA, 332 bp, Homo sapiens
acagtgccaagacctgggcggagccagggccagggccatggccacggcctggggargaccaggttcggggcaggagcaaaacaatggcaaggacagtgcaagttcttggcacagccagggtccaggacagtgtcagggcagggccaaggcagggtctgggccatggtgagaccagcaacagggctggggctaggccagtgacaggaccagagtcagggcaagggccagagcagtgcaaggccagggtagggccaggcatttcagggtcagggccaggagagaaccagggcaaggtctcaagcagggaagggccagggccaggacaggtccag

SEQ ID NO: 330890 - DNA, 332 bp, Homo sapiens
acagtgccaagacctgggcggagccagggccagggccatggccacggcctggggaggaccaggttcggggcaggagcaaaacaatggcaaggacagtgcargttcttggcacagccagggtccaggacagtgtcagggcagggccaaggcagggtctgggccatggtgagaccagcaacagggctggggctaggccagtgacaggaccagagtcagggcaagggccagagcagtgcaaggccagggtagggccaggcatttcagggtcagggccaggagagaaccagggcaaggtctcaagcagggaagggccagggccaggacaggtccag

SEQ ID NO: 330891 - DNA, 332 bp, Homo sapiens
acagtgccaagacctgggcggagccagggccagggccatggccacggcctggggaggaccaggttcggggcaggagcaaaacaatggcaaggacagtgcaagttcttggcacagccagggtccaggacagtgtcagggcagggccaaggcagggtctgggccatggtragaccagcaacagggctggggctaggccagtgacaggaccagagtcagggcaagggccagagcagtgcaaggccagggtagggccaggcatttcagggtcagggccaggagagaaccagggcaaggtctcaagcagggaagggccagggccaggacaggtccag

SEQ ID NO: 330892 - DNA, 332 bp, Homo sapiens
acagtgccaagacctgggcggagccagggccagggccatggccacggcctggggaggaccaggttcggggcaggagcaaaacaatggcaaggacagtgcaagttcttggcacagccagggtccaggacagtgtcagggcagggccaaggcagggtctgggccatggtgagaccagcaacagggctggggctaggccagtgacaggaccagagtcagggcaagggccagagcagtgcaaggccagggtagggccaggcatttcagggtcagggccaggrgagaaccagggcaaggtctcaagcagggaagggccagggccaggacaggtccag

SEQ ID NO: 330893 - DNA, 556 bp, Homo sapiens
gcagcttccctctgcagcatgcgctcttagaaaaaaaaaaaaaaaaaagatcargtattttccaactgggcagcaacttgatgctcatttaaacctgggtttctcaaccttgccattattgacattttggcccagaatgactctcgtggggttgggtagggttggggtaggaaggaagacagacgaatatatagatttcaatattttcctttggttaaaaaattataaatatatttaagagaaaaaaagccgtacactttcatctgtaatactgtctggccttttgcttgcaatttgcagataagattttgtaaacaaattgcagcaagttggtcctccacggaaaacttaccagtagagctgaatttactttcaaattctctaaatgggtttctgagggtttgggttaatgcagtggccttgaacaggaactatccagaaagatgtcaagcaaaggtggctagagtcacactcgggtgacactactgtcaccatgcttctgcttcattcttgttctacatcttttatttgagattttaatcctctttttactatt

SEQ ID NO: 330894 - DNA, 556 bp, Homo sapiens
gcagcttccctctgcagcatgcgctcttagaaaaaaaaaaaaaaaaaagatcaagtwttttccaactgggcagcaacttgatgctcatttaaacctgggtttctcaaccttgccattattgacattttggcccagaatgactctcgtggggttgggtagggttggggtaggaaggaagacagacgaatatatagatttcaatattttcctttggttaaaaaattataaatatatttaagagaaaaaaagccgtacactttcatctgtaatactgtctggccttttgcttgcaatttgcagataagattttgtaaacaaattgcagcaagttggtcctccacggaaaacttaccagtagagctgaatttactttcaaattctctaaatgggtttctgagggtttgggttaatgcagtggccttgaacaggaactatccagaaagatgtcaagcaaaggtggctagagtcacactcgggtgacactactgtcaccatgcttctgcttcattcttgttctacatcttttatttgagattttaatcctctttttactatt

SEQ ID NO: 330895 - DNA, 585 bp, Homo sapiens
atagaacaaattcaatagcaaatatataccagcatgtccccaattcagtaaatcttaggtttttgagtgagataatatttaaatcgatttttaaaaattattacagaattaaaatatttctatcagttcgcttattcttttagccagctagctttttgccaagctttagcagatagagaaattgagccttttgataaaaagcaccaacaatgacagtggcatttctgttctttaactggtactcagtctgccattgtgacgtgtagaagagaaccttatctccccacatcaccctagtttaaaggtccaatgggagagccctaaacatttaggctgtctatccttggaggcctcttcataatcctggatttactaggatccataatcctcctggatcttatggtgcaagaggtgatgcgttctgtctctttattttttaatttcacaattaagaacagtttgaagccattttcatttcatggtcaagcggagtatgacatcagagagaaactttcatttggrggagatttgatcactctaaaatggatgtctgtgttatttacggtagttttgtaaaaattgcaa

SEQ ID NO: 330896 - DNA, 596 bp, Homo sapiens
actccctgatgatgtggagaggctgtgagcttgactgagcgttactgttcacaagtgtatctttttacttaaggattaggaactgtgtgctgacttagcccaggtgagctttgattttgccccaggtcaacatcggaaaccacgtcttttataggaaaggaacaggaaaatccagtatgagatttcacatacatatttattctcctgataagactccargttcctggtgcagttgctttcgcttccctgttaatgatttggtcgtgttacctctcctttgtgatgtaggtttttctgaaatgatgtaaataatggtctaaatcatcttccttactcagtcaataaatatttggctctagtctgtattattttctttttgctgtttaacatataactctttgttggttatttttttttctgagtgaatttcacaccacccctaagtgaaagctacatgaaggcatcaaacctagcttagtgttttcacatcattaattctaagtaacatttctgaagctacttgaaaaactaaaattttataaggtgagctactgaaaagtcattacatcaaggctttaatgtattgtcttggtaat

SEQ ID NO: 330897 - DNA, 596 bp, Homo sapiens
actccctgatgatgtggagaggctgtgagcttgactgagcgttactgttcacaagtgtatctttttacttaaggattaggaactgtgtgctgacttagcccaggtgagctttgattttgccccaggtcaacatcggaaaccacgtcttttataggaaaggaacaggaaaatccagtatgagatttcacatacatatttattctcctgataagactccaagttcctggtgcagttgctttcgcttccctgttaatgatttggtcgtgttacctctcctttgtgatgtaggtttttctraaatgatgtaaataatggtctaaatcatcttccttactcagtcaataaatatttggctctagtctgtattattttctttttgctgtttaacatataactctttgttggttatttttttttctgagtgaatttcacaccacccctaagtgaaagctacatgaaggcatcaaacctagcttagtgttttcacatcattaattctaagtaacatttctgaagctacttgaaaaactaaaattttataaggtgagctactgaaaagtcattacatcaaggctttaatgtattgtcttggtaat

SEQ ID NO: 330898 - DNA, 412 bp, Homo sapiens
agagtgctgattggtgcatttacaaaccttcagctagacacagagcattgattggtgcgtttttacagagtgctgattggtgcgtttacaaacctttagctagacacagagctgattggtgcatttataatcctctagctagatagaaaatttctccaagaccccaccccactcgacccaggaagtccaactggcttcacctctcactaggattagaggtgtgagccaccatgcctggccagcaattgtgccttttaatctgctttgcttccctaatgcagatcttggtcatgtttcctagatgcccatttgactgccttaactcatggccaataaagtggggkcagtgttgaaagcaaaccagcaactccaattgttgctggcagcaactccctgcccagctctatcctcc

SEQ ID NO: 330899 - DNA, 479 bp, Homo sapiens
tactaaagcaagcagacctcaggttggccatacatcaatggcgttcaggagacacaaaaggaaagcgtcagtggcaccctgaaatggaatccatcatccaaaatcatgtggaccatccacgactgttccatcaggagaaacacaagcatctcttcctgccttcccaagttgagcacaaagtcatgactgctatggtttggctgtttttggctccaaaccatggcagtcatggcctccgaaacgcatgttgaaaccgaatccccagtgcatcagtgttgggaggtggggcctgtgggaagttgtgtaggtcctgaggctctgccctcatgaatgaattaatgtcactataaataatgctcacragcgtgggttcgctcttctgcttttctgtcatgtgaggacctggagtttctcccctccacgggatgcagcattggagacaccatcttggcagcagagagacagggccctaagctgcc

SEQ ID NO: 330900 - DNA, 586 bp, Homo sapiens
tgcatagaacatgagatgggaagctgttggacagtttttcaattttaaaaattcagttaattaattaaatttaagaggcagggtctcaactsggtgtggtggctcacgcctgcaattccagcactttgggaggccaaggcaggcggatcacctgaggtcaggagatcaagaccagccttgtcaacatggtgaaatgccatctctactaaaaatacaaaagttagccgggcgtggtggcaggtgcctgtaatcccagctacttgggaggctgaggcaggagaatcgtttgagcccagaaggcagagattgcagtgagccaagatcatgccactgcactcctgcctgggtggcagagcaagactctgtctcacaaaaacagacaaacaaacaaacaaaaaaaacagtgtgatctgattcatgttttaacaaaatcacactgatttcaaggttggaaattggcctgttggtaaacaagggtgggagcagggaagccagtaagggctctagcgagttattcgggcaagagatgggggtggcctggaccaggttggtggcatggaggaggtggatggtggtcagattctgt

SEQ ID NO: 330901 - DNA, 586 bp, Homo sapiens
tgcatagaacatgagatgggaagctgttggacagtttttcaattttaaaaattcagttaattaattaaatttaagaggcagggtctcaactcggtgtggtggctcacgcctgcaattccagcactttgggaggccaaggcaggcggatcacctgaggtcaggagatcaagaccagccttgtcaacatggtgaaatgccatctctactaaaaatacaaaagttagccgggcgtggtggcaggtgcctgtaatcccagctacttgggaggctgaggcaggagaatygtttgagcccagaaggcagagattgcagtgagccaagatcatgccactgcactcctgcctgggtggcagagcaagactctgtctcacaaaaacagacaaacaaacaaacaaaaaaaacagtgtgatctgattcatgttttaacaaaatcacactgatttcaaggttggaaattggcctgttggtaaacaagggtgggagcagggaagccagtaagggctctagcgagttattcgggcaagagatgggggtggcctggaccaggttggtggcatggaggaggtggatggtggtcagattctgt

SEQ ID NO: 330902 - DNA, 583 bp, Homo sapiens
acagtacaattccaattccatatggtaagtgtctgaggtggggtcccaggggcagatcctaagatgcagattcacataaaactgatttactgggaagtatttcagggagcaaacagtagggaagtggggaaaggaaacatgataggaaaaaaagctcttcaagggtgagatctcaagccaactctttgagaatgtagcttagctcaattacacagagacctctggagatagtgtaggttgctgtcccattaagggcaaggaagttggagtgtttattaccttgcacctgtcagtcattggttaaggactggctctgggaagccaaattcccaggcactctctgctcccttttgcacaaaaacaaagccatttccagcagcctgaaggcagcccttccagagagaaagcactaaggaggcagtacacaagyaaatggaattgaccttgggatgtgggcagagcactgatagtacatactcaagtgtttgaacatgggttgatctctacctttatacttgccctgaaagtccatccctaggacctttcctgcgaattcattttcaaagaaatagagtatatactc

SEQ ID NO: 330903 - DNA, 582 bp, Homo sapiens
aagcactaaggaggcagtacacaagtaaatggaattgaccttgggatgtgggcagagcactgatagtacatactcaagtgtttgaacatgkgttgatctctacctttatacttgccctgaaagtccatccctaggacctttcctgcgaattcattttcaaagaaatagagtatatactctggaatttctcaatagcatagacttaatttccatagataaacacaaattaatcaatatattcctataagcaaatttagtggtaaaatgaaagccaatcttaactcttggtgttggaagaaattatatattcttctctgttatagtcacatttgcaaatctttgaaacagagcctattcaggtgttgttttggaactgttcttactatatttaggaatatcaatccctcgagaagtaagatttattaagatataacaatgtcagtcctcttataaatatgtattgaacacagaatgcagcaaaacctgaagtaggagctccacaaaacaatggtcattatggatgtaaatttgtccatgtgcatcctattctactacttgactcttatttcagtcagccaactt

SEQ ID NO: 330904 - DNA, 582 bp, Homo sapiens
aagcactaaggaggcagtacacaagtaaatggaattgaccttgggatgtgggcagagcactgatagtacatactcaagtgtttgaacatgggttgatctctacctttatacttgccctgaaagtccatccctaggacctttcctgcgaattcattttcaaagaaatagagtatatactctggaatttctcaatagcatagacttaatttccatagataaacacaaattaatcaatatattcctataagcaaatttagtggtaaaatgaaagccaatcttaactcttggtgttggaagaaattatatattcttctctgttayagtcacatttgcaaatctttgaaacagagcctattcaggtgttgttttggaactgttcttactatatttaggaatatcaatccctcgagaagtaagatttattaagatataacaatgtcagtcctcttataaatatgtattgaacacagaatgcagcaaaacctgaagtaggagctccacaaaacaatggtcattatggatgtaaatttgtccatgtgcatcctattctactacttgactcttatttcagtcagccaactt

SEQ ID NO: 330905 - DNA, 650 bp, Homo sapiens
ggttgggctagttaactgcagcaggagcatttccttaaggtacagatcgctcatgctattgtttgtggcttaagaatgcctttaagtggttttccaccmtgggtgggccaggtattccttgccctcattttggtaaagccacaactttccagcatgggcattagggccatcatgaacatgtcacagtactgcagagattttgtttatggccagttttggggccagtttatggccagatttttggggagggggggcttgttcccaacatgtcccccttctttggtttgcaaatcaataaaagcaaaggcagctttgtcacggtgagctacttctcacaggagtcaggatccacatctgcagactatgcaaagacaaacaacacagattaaaagcacaatcatcattgaaatcacagagcttccaagtgtttttatccattttaatgggttactagctgctaatttgtctgcagctcctttaagcactccagttcctggcattaaggccaggtgtgcctgggatgctttaaatatttgttcttttaattttgcaatatccaaaaacaagtttgtagagtgtccttttagatgcttttttattctttcccaaactttgatcttattaagagctattaatagtttccacaaatc

SEQ ID NO: 330906 - DNA, 650 bp, Homo sapiens
ggttgggctagttaactgcagcaggagcatttccttaaggtacagatcgctcatgctattgtttgtggcttaagaatgcctttaagtggttttccaccatgggtgggccaggtattccttgccctcattttggtaaagccacaactttccagcatgggcattagggccatcatgaacatgtcacagtactgcagagattttgtttatggccagttttggggccagtttatggccagatttttggggagggggggcttgttcccaacatgtcccccttctttggtttgcaaatcaataaaagcaaaggcagctttgtcacggtgagctacttctcacaggagtcaggatccacatctgcagactatrcaaagacaaacaacacagattaaaagcacaatcatcattgaaatcacagagcttccaagtgtttttatccattttaatgggttactagctgctaatttgtctgcagctcctttaagcactccagttcctggcattaaggccaggtgtgcctgggatgctttaaatatttgttcttttaattttgcaatatccaaaaacaagtttgtagagtgtccttttagatgcttttttattctttcccaaactttgatcttattaagagctattaatagtttccacaaatc

SEQ ID NO: 330907 - DNA, 594 bp, Homo sapiens
ataatgattccataggaatcactgtccagcacctctgcctgttctgcaaagcaatcttcctaaacaagtacgttcattatttctggccaggttctattttgtttacaaataggtttttgaaggccgtatgcctcaattataggagcagattatggtaaatactgagatcagaaagcatgtgtaactgtctcatagagtgattatatccaggcattattaccagccacaattgataaatatgcccaataagtataattgttctctgtgtcagcccttgtggaaggaatactcacagtagtkgtgataactgctatcatagctaccattaaattactcattgtgactggttgccctgctttcctcaggttttcttccaccatctgtgacagcttcttgatctgtcaggtggatggctgtgttcgacaggtgttgctcatgacagttgagactcctcagcatcagtctcaacatggctgcaaccagggggtccttgggatcctcccagcatctcttcctcacatctggctcatgataaggttttaggtgtcttgatggtattcaaattggctgttgattttggctgggagaaacaca

SEQ ID NO: 330908 - DNA, 546 bp, Homo sapiens
tagatttcatccagactaaagaagaaagctgactgacagaataagttcaagaggaattgattggcagacctgagttttgacaagagattaaaataagaggagaaacaggaaagcaagaagacattatgagaggaggatgacaaatcattggccagcttgacaacttgaggttattcgggtcttggtgaaaaaaaaaaaaatagcagaataggttttaaggaggttttgaaactacctttaattgacagaagtattatgatttcctgggaggagtgagaaggaaagccccaragaagccactgcgcaagctgccccctcctccccacggaatcagagcacaccaagagaaaaccacatggaagaggacaggcaccagctgcccaccactggctgcttgaatccattttatatttcaagtatccagatgtaaagaagcaacaagagcctaactacataagctgaccttgaactcctctttgcccctagaaaggaatcttgtcattgaagcctagagaagaactctgcaccttggaagttgatgtattg

SEQ ID NO: 330909 - DNA, 580 bp, Homo sapiens
ttatcctataatcaatgcctataactttaagtcattgaacattaaaaaccatggacttggctgggcacggtggctcacacctgtaatcccagcactttgggaggccgaggcgggtggatcacgaggtcaggatatggaggccaycctagctaacacagtggaaccctgtctctactaaaaatacaaaatattagccaggtgtggtggcaggtgcctgtagtcccagctacgtgggaggctgaggcaggagaatggtgtgaacccaggaggtggagcttgcagtgagccaaaatcatgccagtgtactccagcctgggtgacagagtgagactccatctcaaaacaaaacaaaaccatatgaaaaaccatggacttaattcagtcacactagcattttataaaatgaggtgtctgtgtagttaaaaataacatcaacagcttcttaactttaaaattacaaaatagaattatttaaaatcttccctctcttttcactctcacaaactccatatctgtgctcattttgaactctgtgagagttcaaagccatgagattggccatagactttccccaattctt

SEQ ID NO: 330910 - DNA, 580 bp, Homo sapiens
ttatcctataatcaatgcctataactttaagtcattgaacattaaaaaccatggacttggctgggcacggtggctcacacctgtaatcccagcactttgggaggccgaggcgggtggatcacgaggtcaggatatggaggccaccctagctaacacagtggaaccctgtctctactaaaaatacaaaatattagccaggtgtggtggcaggtgcctgtagtcccagctacgtgggaggctgaggcaggagaatggtgtgaacccaggaggtggagcttgcagtgagccaaaatcatgccagtgtactccagcctgggtgacagagtgagactccatctcaaaacaaaacaaaaccatatgaaaaaccatggacttaattcagtcacactagcattttataaaatgaggtgtctrtgtagttaaaaataacatcaacagcttcttaactttaaaattacaaaatagaattatttaaaatcttccctctcttttcactctcacaaactccatatctgtgctcattttgaactctgtgagagttcaaagccatgagattggccatagactttccccaattctt

SEQ ID NO: 330911 - DNA, 580 bp, Homo sapiens
ttatcctataatcaatgcctataactttaagtcattgaacattaaaaaccatggacttggctgggcacggtggctcacacctgtaatcccagcactttgggaggccgaggcgggtggatcacgaggtcaggatatggaggccaccctagctaacacagtggaaccctgtctctactaaaaatacaaaatattagccaggtgtggtggcaggtgcctgtagtcccagctacgtgggaggctgaggcaggagaatggtgtgaacccaggaggtggagcttgcagtgagccaaaatcatgccagtgtactccagcctgggtgacagagtgagactccatctcaaaacaaaacaaaaccatatgaaaaaccatggacttaattcagtcacactagcattttataaaatgaggtgtctgtgtagttaaaaataacatcaacagcttcttaactttaaaattacaaaatagaattatttaaaatcttccctctcttttcactctcacaractccatatctgtgctcattttgaactctgtgagagttcaaagccatgagattggccatagactttccccaattctt

SEQ ID NO: 330912 - DNA, 601 bp, Homo sapiens
ctagaattccaaaacccttaaatatctgttatttcacttaagccagacaacagcactgtgaagcaggtaatgctgtgtccgtatgggtgaatgaggaaacacagcccagctgggttaagtgacatcagcacagcacactaagagaattgtgcagacaagaccccagccctccaaagctgggtgcctcatattcccacagcccaatgtagactcactcttataagggctcaagcttaaatttaaaactacttttcatgtatgagtatcaaataaaattaaatcatctgaattatgtttactgctttttctttcttttttgtttggcttggtttggttctagtggttgcccaagagtttgcattatacacttttttttttgcaactaacctaagttcactttcaaatattactgcatgggtggtaccttataacagagtattcacaattccatcctccaatcccttgtaacrtggctgtcattctttcccttacccatcagctatacctacccaatacattattgctataattattttggacagttatctactagctcagatatgattaagaaaaataaagattttattttaccttcatttat

SEQ ID NO: 330913 - DNA, 581 bp, Homo sapiens
atattaattacagttattttaaatttatgatctgatgattccaaaagttctgccatagctgagtctagttccagtacttgctttttctcttcaggttgtgatttttctkgccttttagtataatttgtagtttttctgttgaaagttgtacataaggtatctggtaataggagctaaggtgggtagatcttcagtgtgaggtgttatgtttatcaggctaggagttaggctgtttcatgtttgctatagctgtaggtgtcagaggctaaaattttctctagtgtccttgtttttgatgttactgttgtctttggctttctctaaaaacttcttcttaactagagtctgagctttgcagtacattcagctgtaatctcattattatccaggagccctgttgatgtgatagtaaagtatgtagggaggaaaagcgttctattctcctgtggttaggtctcaggctttggtgagcctgtgttctggtgcttttactttgggtaatttttcttcccccacatcaaataagactctgctgaacgtattctccttctggataggcctttgttaatagagaatgctct

SEQ ID NO: 330914 - DNA, 578 bp, Homo sapiens
tctgctgaacgtattctccttctggataggcctttgttaatagagaatgctctgggtttatccccaaataattatttttcctcaccccctgcccaaacacaggggtttttttctctgattttcgccatgagaacctggtaggactgcttaaggtacaaacccacacaagctgcagttttaaattctcaggctattctacacacagcctctagcagttccttgaagctgctgtttaagtgttcctaccagctactggctccagcgacttatgctttagcaaaaccaatcgcaatcttcacttgcctgtctctccaatttatccagtagcagtttatcctgagacctcaattttctcatgatgttttgattttcagtgtgtagcttttttcttgctgtgaaggtagaactgatgacttgcaaactatttatgtgttgaagaataaaccakaagtcctcaattatacctacatataatgtaaatcatattttgtttagttattttggaccacatcctgtaattcttctaggtaatactatagagaacaacagttcaattttaatgctggagtgcttagtga

SEQ ID NO: 330915 - DNA, 568 bp, Homo sapiens
tgatgttttgattttcagtgtgtagcttttttcttgctgtgaaggtagaactgatgacttgcaaactatttatgtgttgaagaataaaccataagtcctcaattatacctacatataatgtaaatcatattttgtttagttattttggaccacatcctgtaattcttctaggtaatactatrgagaacaacagttcaattttaatgctggagtgcttagtgaactacaacttgctgtcacaaaatactttccagaataggtctaaatcaatatcatataaaattgtcctttaaaagaatgaaacaataatacaaattattgtctatatacaaacagattacgtcaaggaatgtataaggcagtcatacaaattatagtaaggaaatatggcttttaaaatagctggttgacatctgacctttgacaaggttgacataaagaagcaatggggaaaggactccccatggtgctgggataactgataaccacatgcagaagattgaaactagaccctttccttacactatatacaaaattcaactccagatggattgaagacttaaatgta

SEQ ID NO: 330916 - DNA, 578 bp, Homo sapiens
tctgctgaacgtattctccttctggataggcctttgttaatagagaatgctctgggtttatccccaaataattatttttcctcaccccctgcccaaacacaggggtttttttctctgattttcgccatgagaacctggtaggactgcttaaggtacaaacccacacaagctgcagttttaaattctcaggctattctacacacagcctctagcagttccttgaagctgctgtttaagtgttcctaccagctactggctccagcgacttatgctttagcaaaaccaatcgcaatcttcacttgcctgtctctccaatttatccagtagcagtttatcctgagacctcaattttctcatgatgttttgattttcagtgtgtagcttttttcttgctgtgaaggtagaactgatgacttgcaaactatttatgtgttgaagaataaaccataagtcctcaattatacctacatataatgtaaatcatattttgtttagttattttggaccacatcctgtaattcttctaggtaatactatagagaacmacagttcaattttaatgctggagtgcttagtga

SEQ ID NO: 330917 - DNA, 611 bp, Homo sapiens
gaatactacacagccataaaaaagaatgagataatgtcctttgaaactccaacatgtatggagttagaggccattgtcctaagcaagcaaacacagaaatagaaaaccaaataccacatattcttacctataagtgggagctaaacattgggcacacatggacacaaagaagggaacaatagacactgtggcctactcgaagatggagggaaggaagatagtgaggatttaaaaactacctatcaggtggtatgcttatcacttggatgatgaaataatctgtacactaaaccctcatgacactcaatttacctatataacaaatctgcacatttatcccgagcctaaaataaaagtttaaaaaatacaaataaaaatcttattttaactaaatcttatttaaaaaaataggttgagcaaagaaagtaggaatcaaaacacaacctataaaatgaccagtccttaaaaaaataccttaataaatgcctatcatgtaccttcaatatactaaatagataacatgtttttttctgactyctaaaagctttgtgaggtatgacaattatcacttttttatagatggcagaattgaggcccagacaggttaagta

SEQ ID NO: 330918 - DNA, 569 bp, Homo sapiens
caccagttacataaaaaccttaagctgtcatctgacaaacgtcactgtgattataagctgtacccagtcrttagggaaaagcactaggcaaagtccaagtttgtggacttgccgtattcacacataaagaaagatgtaaaaaagaattgatttgtaaagaataatgcttaaactattttttaaataacagtaataatgtaaattcccaagcacatgagggactgaggtttatgtgcctctgctgatctctcactggcatcgtggatgtgggttacaggatggccagtgctttatcttcaaaggcaaggccctgctatccagatgcttcctgggaaggatttgcggtcctaaaggaccttagtgcctcattcaggtatttcccacctagaggttggcctgtggaattactgatgctgttcatttttttagctgtatgagcattttgtttctgaatctagatccacctcttcctctcactctgtatgttgtactcattttcagctataatgttgcatttgtttcatagtataataaaatatcacccaagaaatctaacagtacagttgtta

SEQ ID NO: 330919 - DNA, 569 bp, Homo sapiens
caccagttacataaaaaccttaagctgtcatctgacaaacgtcactgtgattataagctgtacccagtcattagggaaaagcactaggmaaagtccaagtttgtggacttgccgtattcacacataaagaaagatgtaaaaaagaattgatttgtaaagaataatgcttaaactattttttaaataacagtaataatgtaaattcccaagcacatgagggactgaggtttatgtgcctctgctgatctctcactggcatcgtggatgtgggttacaggatggccagtgctttatcttcaaaggcaaggccctgctatccagatgcttcctgggaaggatttgcggtcctaaaggaccttagtgcctcattcaggtatttcccacctagaggttggcctgtggaattactgatgctgttcatttttttagctgtatgagcattttgtttctgaatctagatccacctcttcctctcactctgtatgttgtactcattttcagctataatgttgcatttgtttcatagtataataaaatatcacccaagaaatctaacagtacagttgtta

SEQ ID NO: 330920 - DNA, 615 bp, Homo sapiens
tcaagcttctctcccttctccccacaaatactttcttttcagcatttccactagaaaggaaacagtgaaagctcattcaattgctttttccattgctctctagaggttcagtgggaaagaccacagactcactcactaaaaactccaacatttaccagcaaaatcctatgcagtcttgagtragacaagggagtgggcaaacccctctcccatccatccctagaatgggatacagatttcctcaaagataagtttacagccatcaagcaccctgctactgaatgtgtcattaattgctgagatctaaggatatgaacaacatcctggagaaatgaagaatgttcctatagagacccatttcaacaccatagaaaaagggaaataggggaaggggtactgaaagaggaaaaagaaatgctaaaagaatccaaatagttatgtatagccttaaaaaatacagaaagcttactaattcttttttaaaagctcacaaaagagattattcaggtgttcaaatgagaaattatgagttatgatgagtggatgaaaatttagcctgtagaatttgaaaaaaaaagacaaaagtaaaaatattacaaagaaaagctacacata

SEQ ID NO: 330921 - DNA, 428 bp, Homo sapiens
agtccctaaaccagcagcctcagtaacacctggaatgtgtgaaaaatgtgaattatggggccctattccagaccaattgaaccagaaacttgtgggctggacccagtaatgtgtgttttaagagactctcctgatgattctgaaacatgctgaagtttaagaaccactgtcacagagttaagcttccaggccttggtgttaaacagctccctctttaatctttgctctgccattatgactatstaactttggacaaatttctgaattttaaccttttttgctaatctggaaaatgaagataataattttccattcttcattggacttgtttcaatagtaaatgagattgaaaataattgcaaagccttttagtacagcctctagaaaattgacttatcgagtccccacctaaaggctagagtgaggat

SEQ ID NO: 330922 - DNA, 592 bp, Homo sapiens
ctctggccatgtaaataagctccttaccaggtctaacctagcttcagtggctaagcaggtctgccaagcctgctcactatgtgcacttaacccaggaaacaaaatacctcctctaatacaaccagtgcagaggagaggaacttatctaggggaagactggcaattagactttacacatatgccagcttacagaggacataagtttttgttagtgctaatagatacctttactggttgggtcaaagcttatcctcccagaatggagaagtctaatgaggttataaagtttctcttaaaataaataatcccttgttctcactcataggtgggaattgaacaatgataacacatggacacaggaaggggaacatcacacaccagggactgtggtggggtggggggaggggggtgggatagctttaggagatatacctaatgctaaatgacaagttaatgggtgcagcacaccaacatggcacatgtatacatatgtaacaaacctgcacgtwgtgcacatgcatcctaaaacttaaagtataataataattaaaaaaaaaaaaaagaaacaatcccccggtttgggttacctcag

SEQ ID NO: 330923 - DNA, 591 bp, Homo sapiens
ttttttcaggtgaacttaagcagattctagaatgcttaaatacgttttgctgttacctgaaatcaatttgttccaagtctcttttatagtctcttwcattcattttataaaccatgcaagcacaaattcaagacaatatttaccttttatcttatgagaagagtttaacaagtttcttaaggataacttccatttatgaactttagaattattggtaaagtagtcaactatgtacttataattacaactatgtacttataattagtttgctttataaacttaaaaatatatagaatgaagttaatttagaagtgctgctttttttctaggctcatattttctagagtacaacactttcacttctgcattagttgttggaagagagatatctttctgaatctatctatgtatgatgctgacaatggatactttatctcaggtcttatgtacctgtataatattaagaaagtgattttaaaatttatcctcagtgtatggttgaaaataaatgtaaccactcattatatcgctttttaagtgatctttaaaacttttgtttacaaaaatctctcactaaattgtgtaaaatat

SEQ ID NO: 330924 - DNA, 591 bp, Homo sapiens
ttttttcaggtgaacttaagcagattctagaatgcttaaatacgttttgctgttacctgaaatcaatttgttccaagtctcttttatagtctctttcattcattttataaaccatgcaagcacaaattcaagacaatatttaccttttatcttatgagaagagtttaacaagtttcttaaggataacttccatttatgaactttagaattattggtaaagtagtcaactatgtacttataattacaactatgtacttataattagtttgctttataaacttaaaaatatatagaatgaagttaatttagaagtgctgctttttttctaggctcatattttctagagtacaacactttcacttctgcattagttgttggaagagagatatctttctgaatctatctatgtatgatgctgacaatggatactttatctcaggtcttatgtacctgtataatattaagaaagtgattttaaaatttatcctcagtgtatggttgaaaataaatgtaaccactcattatatcgctttttaagtgatctttaaaactttygtttacaaaaatctctcactaaattgtgtaaaatat

SEQ ID NO: 330925 - DNA, 580 bp, Homo sapiens
ggaacaagctgatgacttacgaaggtcagggaaggacctgccagcatcttttcaattcatgtgtgcaggcattccacagattactaagtgcactgtcacttttacagggaagtgtcagatattagcctcagctaaggaggcagaagctcattgtagcagaytgatctttggagacaaatctgtgcttatctaattcatttcagaaagctctccaatattccaaaaagcacaaatcaggtcaaggaaaatgtgaattgactctgaaggaaaagcacaaagagagtagagctttacaagtgaaaggagtggtgaggtttctgtatccccaaaacataggagtaaaggagcttatgggtgttttgtaggcataagtgtagaagcattacagagagagactaagagcccgtacctatgcctgcacaggccaaatgtgcctcgggtggccctaagcagaaaacaaagttaccatttctcccttttaagggcttgccattgcatcatcagttgggcctggctctctttcctcctcctttctgaggcttgagggagaggaaagtccttcctgcctggggcgcccaga

SEQ ID NO: 330926 - DNA, 580 bp, Homo sapiens
ggaacaagctgatgacttacgaaggtcagggaaggacctgccagcatcttttcaattcatgtgtgcaggcattccacagattactaagtgcactgtcacttttacagggaagtgtcagatattagcctcagctaaggaggcagaagctcattgtagcagattgatctktggagacaaatctgtgcttatctaattcatttcagaaagctctccaatattccaaaaagcacaaatcaggtcaaggaaaatgtgaattgactctgaaggaaaagcacaaagagagtagagctttacaagtgaaaggagtggtgaggtttctgtatccccaaaacataggagtaaaggagcttatgggtgttttgtaggcataagtgtagaagcattacagagagagactaagagcccgtacctatgcctgcacaggccaaatgtgcctcgggtggccctaagcagaaaacaaagttaccatttctcccttttaagggcttgccattgcatcatcagttgggcctggctctctttcctcctcctttctgaggcttgagggagaggaaagtccttcctgcctggggcgcccaga

SEQ ID NO: 330927 - DNA, 563 bp, Homo sapiens
taaaatttgcagacttggtgccagaactgagttgcttatgacaaaagagagaatttcggaataaaggagggaagggtgatgaagtgttgagtaactacagcagaactgaaggaggaggaaagcattgtctcatggggagctattttaaataaaacttgctgcaygttgtaaattctctttttccacccctcgtcttccccttcacctcctctgtcttcaatacagtttatattactcataaataaaatcagtttgtttggttagggatgtgacaaaaggctgtgtggcctcaagatgggctcatgagcccagactgcttatgggagatgcgatgtatctgaatattgaaggacatgagtctcctcaatcctctcccatctgttgaagatcaggagaaaacacaagtttgatctatttaacggacacattgttagcttggactctccagaatactcttaatttacttaaacttctgcagagaagatgtggtaggctggataatgtccggcaaagatatcagattctagcccttggagcctagaactgtggccttacatgaaaaa

SEQ ID NO: 330928 - DNA, 420 bp, Homo sapiens
aagcacttatcctgagccctttaataaatgttatctaagaataattatgaaaggaaaaatcttcaagtccacattaattggtatttttggatggaattaaaataataaaacataaagggcttcaatagtgtctcatgtaatttcactgacactgcacaatccaaattttcttggaacctgttacatgcaccatcataaacaaaccagaaggggtacgcttggagaaaatgcttttcttaaatcttttttgctttgctttaaaattttttcttaaattacatcytaatgctgggtagagcaggtgtatggcccatgctgatagcctactagaggtttagaaactctcaatgtttcttagggcttttcatctaagagaaacatttggttaagacagtggttcatcatgggtgatggactgat

SEQ ID NO: 330929 - DNA, 550 bp, Homo sapiens
ttacatggataaattgcgtgttgctgaggcttggtgtacaaatgatcccgtcaccgaggtaatgagtgtaataccggatagataagcctccaacccacctctgctctaccctccccacctcaagaagtcaccactgtctattgttctcacctttgtgtccatgtgtattcaatacttaactcccacttttaagagagatcatgcagtatttggatttctgttcctgcatgagttcacttaggataatggccttcaggtgcatccacattgctgcgaagtacatgakttcatcctttttatggttgcatagtattctgtggtgtgtgtataccacattctctttatctagtccgctgtcgatgggcttcttggttgattccatgtttagtatatatgatgataacagtataaggatggaggaggaaatggagctatagtgaatcaaatttgctatatttaataaagattaagtcagtgttaacctgtagtagattatgatgagttaataatgcatagtagggccaggcgcggtggctcacgtctgtaatcc

SEQ ID NO: 330930 - DNA, 594 bp, Homo sapiens
ctctttctttccttcaaaaagaggcagtaggacattgtggtcagagtgtagcctttgaatctgggttacttgggyttgaattccaggatgccagttaccagctgtgtcactctggacaagttgcttaacttctgtgtatctcagtttccttatccatagaattgggataatcacaatccatatcttctaggttgttttaagagttaaaagtgtcactgtaataaagaatttagagcagtgcctggcacttagtaagggctcactaaatattagatattattatcattattattttgagacatagtctcactctgttgcccaggctggagggcagtgtgtgaacatggctcactgcagcctcgtactcctgggctcaagcgatcctctcaccttagcctcccaagtagctgggattacaagtatccccgtctaatttttgctttttttttttctgcagagatggggtttcaccatgttgcccaggctggtcttgaactcctgagtcaagtgatcagcctgtcttggcctcccaaagtgttgggattacaggcatgagccactgcacctggccagatattactatttatttacaac

SEQ ID NO: 330931 - DNA, 596 bp, Homo sapiens
aggataacagcaatgttcaggaaacaagagagataaccttaaactctgaccactggtgagccaggcagaacagagccatatttctcttctttcaaaagcaaataggagaaatatcgctgaattctttttctcagcaaggaacatccctgagaaagagaatgcatccctgagggtaggcctctaaaatggccgcttcgcggggcggccgtcttttatggtcgaagctgtagggatgaaataagccccagtctcccttagcactcccaggcttattaggatgaggaaattcccgcctaataaattttggtcagttgggttgtctgctttcaaaccctggctcctgataagatgttattaatgacaatgcatgcccaaaacttcagtaacaattttaattttgccccggtcctgtggtcctgtgatctcaccctgccwccatttgccttgtgatattctattaccttgtgaagcatgtgacctgtgtgacccacaccctatttgtataatccctccccttttgaaaatcactaataaaaacttgctggttttaaggctcagggggcatcacggaacctgccgacatgtgatgtctcccc

SEQ ID NO: 330932 - DNA, 596 bp, Homo sapiens
aggataacagcaatgttcaggaaacaagagagataaccttaaactctgaccactggtgagccaggcagaacagagccatatttctcttctttcaaaagcaaataggagaaatatcgctgaattctttttctcagcaaggaacatccctgagaaagagaatgcatccctgagggtaggcctctaaaatggccgcttcgcggggcggccgtcttttatggtcgaagctgtagggatgaaataagccccagtctcccttagcactcccaggcttattaggatgaggaaattcccgcctaataaattttggtcagttgggttgtctgctttcaaaccctggctcctgataagatgttattaatgacaatgcatgcccaaaacttcagtaacaattttaattttgccccggtcctgtggtcctgtgatctcaccctgccaccatttgccttgtgatattctattaccttgtgaagcatgtgacctgtgtgacccacaccctatttgtatamtccctccccttttgaaaatcactaataaaaacttgctggttttaaggctcagggggcatcacggaacctgccgacatgtgatgtctcccc

SEQ ID NO: 330933 - DNA, 594 bp, Homo sapiens
ctctttctttccttcaaaaagaggcagtaggacattgtggtcagagtgtagcctttgaatctgggttacttgggcttgaattccaggatgccagttaccagctgtgtcactctggacaagttgcttaacttctgtgtatctcagtttccttatccatagaattgggataatcacaatccatatcttctaggttgttttaagagttaaaagtgtcactgtaataaagaatttagagcagtgcctggcacttagtaagggctcactaaatattagatattattatcattattattttgagacatagtctcactctgttgcccaggctggagggcagtgtgtgaacatggctcactgcagcctcgtactcctgggctcaagcgatcctctcaccttagcctcccaagtagctgggattacaagtatccccgtctaatttttgctttttttttttctgcagagatggggtttcaccatgttgcccwggctggtcttgaactcctgagtcaagtgatcagcctgtcttggcctcccaaagtgttgggattacaggcatgagccactgcacctggccagatattactatttatttacaac

SEQ ID NO: 330934 - DNA, 611 bp, Homo sapiens
ctgataagagaaggggaaggagakaatggaggaaatgaaagaggcaatactgaaagagatcatagctgtgacattttcacaattggtgaaagacaaaaccttggttttagaaattgcaatgggtttcaagcagaattgacacagccaaaactgaaccctcagggtgaaactgcaaagaaaccaaagacaaaaagtgaaaaggctagaataaagctatcaattagttatgaagtgacactaatcagactgatagcagacaatactaacagcagaagaaaataactcaataacatctttgaagtgctaagggaaaagaactgccattagaaaattttaaatgtggccaaactatcattaaagaatagggtaatataaagacattttcagacaaaactgaaggagaaaatttctcaatgttctttcttactgacaatatatagaactatattgcagcttagtgaaatcaatacaattttatgctctaaacctgtagcttaaaaaaaaaaacaaaaaaagtttctataattctctccatttatgcacagcatcactatttattagaagccaataaggtaccaccgaatactttttgacgatagagatgatgattc

SEQ ID NO: 330935 - DNA, 611 bp, Homo sapiens
ctgataagagaaggggaaggagagaatggaggaaatgaaagaggcaatactgaaagagatcatagctgtgacattttcacaattggtgaaagacaaaaccttggttttagaaattgcaatgggtttcaagcagaattgacacagccaaaactgaaccctcagggtgaaactgcaaagaaaccaaagacaaaaagtgaaaaggctagaataaagctatcaattagttatgaagtgacactaatcagactgatagcagacaatactaacagcagaagaaaataactcaataacatctttgaagtgctaagggaaaagaactgccattagaaaattttaaatgtggccaaactatcattaaagaatagggtaatataaagacattttcagacaaaactgaaggagaaaatttctcaatgttctttcttactgacaatatatagwactatattgcagcttagtgaaatcaatacaattttatgctctaaacctgtagcttaaaaaaaaaaacaaaaaaagtttctataattctctccatttatgcacagcatcactatttattagaagccaataaggtaccaccgaatactttttgacgatagagatgatgattc

SEQ ID NO: 330936 - DNA, 459 bp, Homo sapiens
caaaattatttcacagaattcagtccagagagcttgaatagtctcacctttcaagrcgaaaatctcaaacctaaaatctatgctcaagaaatgtagattggtaggccaaaaacggtttagatcaacttttcattaaaaaaaaaaatcttaaaagttcaatactccaattcaattctctcccaccctctattccacacgcaccaaagagtcacagttttttgggttttgccatgtatttcagcctatgggactaaccaagactcttatcagtctggaatttctatcattctaacaccacccccacagctttagctcctcctcctaaataccttagcactttctttgtggtttaagttactgctctcctacttccaacagagggtgaaaaaatgattgctcatcttgctttcaatgaccacaagaaatattaaattcttctggcccaaaagaacatttccc

SEQ ID NO: 330937 - DNA, 459 bp, Homo sapiens
caaaattatttcacagaattcagtccagagagcttgaatagtctcacctttcaaggcgaaaatctcaaacctaaaatctatgctcaagaaatgtagattggtaggccaaaaacggtttagatcaacttttcattaaaaaaaaaaatcttaaaagttcaatactccaattcaattctctcccaccctctatyccacacgcaccaaagagtcacagttttttgggttttgccatgtatttcagcctatgggactaaccaagactcttatcagtctggaatttctatcattctaacaccacccccacagctttagctcctcctcctaaataccttagcactttctttgtggtttaagttactgctctcctacttccaacagagggtgaaaaaatgattgctcatcttgctttcaatgaccacaagaaatattaaattcttctggcccaaaagaacatttccc

SEQ ID NO: 330938 - DNA, 614 bp, Homo sapiens
atgttggccaggatgatctcgatctcttgacgtcctgaaccgcccgccttggcctcccaaagtgctgggattacaagcgtgagccaccatgcctggcctgtagtttgtttttaaagataaaacttgtttgctataaactatatattcttaactgcacagctaaatttttacttctgtatgtaacctatgtaactaccacacagaccaagatacagaacattttcatcactccagaaagttccctcatgcctcctcactcactcacctcaatgataatcactactctgacttttatcatctttgaygatatttgcctgtctttcactttatgtatgtggaatcacatagtatatacacttttgtgtctggtttctcttttccaacagaatgcttttgagatttatccatactattgtaaatatcagttctttctttttttattgctgagtagtgttccattttatgaatacactacaatttgcttttgtagtcctctgttgttggatatttgtagcatttctagtttttggctattatgactaaagctgcaaagaacggtctttcatgtgccttttggttgatatatgaactcatttctcttggatatacaccta

SEQ ID NO: 330939 - DNA, 622 bp, Homo sapiens
cctgaattccaaagtgaggaaggtataataagacatatccaaccatgcattcccataatggcctgacctagtttttttcaggttaactttggaatgcccttggctgagagaaggggtccattcagtttatcagggggcttagaatgtgatttttgttttacaacataaaagcttctttggaaaaggatagagtttcctgagggatagagaagttgctaagctgagaaataagtgtgtttyagggaggtggggacacttgcaagagaagctagtcatcatgaaggaaacatgcaagggaacacgaagcatatgaaagcccaatgcctgaaaacattctcccttgtgcaataaaaggaacatctaaactcattaactttcaaccattgtccctcctaccatgcaatacccttttgggaatctctaacctttcagaaaagtacttcataaatatagactttgctctgtgtataatggtagaactgggggagagatgggtctactctgccccattttccttcctttgaaaaaccttatgagcaaccacttaatagtaaatattctcttgtcatggtagtacatcctttgccagaaaagttggctacagcacttgccctcagcctga

SEQ ID NO: 330940 - DNA, 456 bp, Homo sapiens
tttacaagagggcttaaaagaggaactaaataaacagagataaattatgttaacaaaaggaagatttaatattgcaaccttttaattttctcttcagtaatataataagaccagtaaaatcagaaaaaaacccaaaatttttcatggaacacaaaaaatggatactaaaattcttagaagagtaatgtgcaagcatacccttatcaattttggaaaagaccaaacgataactttcctgccaaatataaaaatgtaacataaagattttataattaaaacagtatggtatttgtcagaaatgggtgaataaacaaatggaaaagagagcgtatgtgggaatttagtacacgataaggtaacattttgaatggaaaggacaaacttacataaaastatgggaccatgggataaccacttgagaaaaagctaagctgattttacatagccatttgtagc

SEQ ID NO: 330941 - DNA, 379 bp, Homo sapiens
caaacaatcttactagagacaatgagaaatattttctaatagtaaagggtcaaaacatcagagaagatataaatttataagtgattatacgtctaacaacatagtatcaaaatacatgaagcaatgagagaattgaaagaatagatgatttagcaattatagtctggagatttcagtagtcctctaaacgtaattaatagaactactagacagaaaatcagtaagaatttggaagataagaaaaccactgtcaaacaacttgacstgttgacacatatagaatactctacccaacaagattagaatatacattcttgttgttgtatgtctaataatttttgattgattgctgcacattttgtataaaacagtaaagcct

SEQ ID NO: 330942 - DNA, 633 bp, Homo sapiens
catgtacaggatgtgcaggtctgttacataggtaaaggtgtgccatggtggtttgctgcacctatcaacccgtcacctaggtattaagtccagcatgcattagctcttttccctaatgttctcmctgcccccacctccaccaccctcctggacaagccccagtgagtgctgttcccctccctgtgtccatatgttcacattgctcagctcccacttatgagaacctgcagagttttgttctcaggtcttagaggaatgctagttttaaggtaaaattttgtgcactactcttttccctgttactccagtttccttttcgttgcccccagttgtctttttcctctttgttttaccttagcagtgttttttcctttctccatgtccccttgtcattactctactttccctgcttttttatacaccacagatggctggctgcatattctcttccttttggccttgccaatgtgggatttctaaaacaattgatcatgtttcatagcatgttcataataatcattaaaatatcactttcctttactctccattctacatgtagctgagataaatgctatttaacctatgccccaggaattcaatctaattgcaatgcagagggagacatatagcagg

SEQ ID NO: 330943 - DNA, 633 bp, Homo sapiens
catgtacaggatgtgcaggtctgttacataggtaaaggtgtgccatggtggtttgctgcacctatcaacccgtcacctaggtattaagtccagcatgcattagctcttttccctaatgttctcactgcccccacctccaccaccctcctggacaagccccagtgagtgctgttcccctccctgtgtccatatgttcacattgctcagctcccacttatgagaacctgcagagttttgttctcaggtcttagaggaatgctagttttaaggtaaaattttgtgcactactcttttccctgttactccagtttccttttcgttgcccccagttgtctttttcctctttgttttaccttagcagtgttttttcctttctccatgtccccttgtcattactctactttccctgcttttttatacaccacagatggctggctgcatattctcttccttttggccttgccaatgtgggatttctaaaacaaytgatcatgtttcatagcatgttcataataatcattaaaatatcactttcctttactctccattctacatgtagctgagataaatgctatttaacctatgccccaggaattcaatctaattgcaatgcagagggagacatatagcagg

SEQ ID NO: 330944 - DNA, 611 bp, Homo sapiens
acactgaccacactacagactttcaattcataagcatgttggtaaataagatgtgcttcacttgcaaatgatcgaatgctggctgagctaaatttaaaaacccaaatcaaaaacaaaccaacaaaaactcccaccatgccgctgattgaatgtgttaaagtctgcagaaataaatccacaactgagttttcttaggaaatagaatacttcttcagctactgagagaatatgaataagggtttgaaataagaggaaatgtggtatakcaatcagccataacttccacaatttggatagtattttagaattattttaaaatctttaatctcatttgattcttgccaacatcctgagatgaattttattattttacaaatgaaaacctgagactccaaaaggtttagtaacactttggggattatgcaaggtaaataaaccttaggagaaatttaacaagatacttgtagttagaaggaagtaaaatatttaactcaacttctttgtttgtttgtttgttttctgagacgaagacttgctctgttgccaggctggagtgcagtggtgctatctcagctcactgcaacctctatctcctgggttcaagggattcc

SEQ ID NO: 330945 - DNA, 471 bp, Homo sapiens
atctatcacagagcccctgcttcagaaactgtaggaaaagccaccattgttaccattgatattgttcactgattaaattattagatgtataaaaagctgttgaacttacagtcagttagtttctatgtattaagttatgatatgagtttcattttcattagtgcttatytaatccttatgaaatattttattaaatttgtagtcttcagactactttcaatgcttaattaacagttaaccatgaaatatcccaaaattttgttgtaaaatgtcagcacgtagcatgtatttatcaattagaaacattttaaacccaaaaagatataccacagctatttcagttcgccttgcagtcaaatgtatacactaacataaatagttacatacagaacgtttaactactagacatgacacagaaaggtaagatgtgtgtgtatatatatacatataaatatatatatatataaaagc

SEQ ID NO: 330946 - DNA, 644 bp, Homo sapiens
attgcaacacgcatactaaggtgatccattggaaactgtaaatgccccgggggacttcgtttttcatcctcccccacccccaccctgccgcacctggcagggaaagttcagctggttttaatgcagtgctattataaaaacaagttactgtytggggtatgagtgaggctgtgtgtgtttgtgcctatgtatgtgtgtggctgtgtgttcccaactaaatacatattgcgcgtctcccctctcgcggttagcagtcagtagcagtttggaggagtttgttttggtccaaatgagaaattaagtgcggataagtaaactaagctgccagagggcgacaagatgttgagtgaattgcttttagatgaaacaaattaaggaaacgagggaagacaatctgcttctcgcattattagacacgcttggagttcaggggaaagtggcatatttttgaaatgctaatttcttaagcagaaggaatgcaccttatttactgctctatgtgaacagaataaaaatatagggcgggggatgctgttgtatagatctttaagatatttcttaattgtaacagaagagaacctcttttttcttttgcttggaaaaaaattcagcattagagaggatgttttttagaaattctaaag

SEQ ID NO: 330947 - DNA, 577 bp, Homo sapiens
gagctttcatccctttggtttttaaatagaagtactatttatcatctgtcttatgcattcaccctttctgttactatagattctctctttacatcttagtatttattgagtttacatgtgttaatatatattttcccttccgccactaagtatattgtttttgtttgtgtctttcccagtaacctgccactcagccactgcaggagtcctctgagccagttttcattctttctgataaatctgatatggctggttggccagacaatcacaagccattccattgctcagatttattcctgaaagaaaataaaaaggcatcgatccaagatcactggcacatcttaaaagccttgactccaaggccaaacctttccacagagaagtccctcttaccctttttctttctttcttttcccctcttgaccaaggaaggaaggtggaccactgctatttaaaaaatgctagtgaggcaatgaattgtgctctttctaagtactcttggaagcytgattagagccaccttgagattaatggctatgcacagtgcatattttagacaataaattgaattaggatg

SEQ ID NO: 330948 - DNA, 406 bp, Homo sapiens
gatagtttgctcagaacaatgcataccaacatggcacatgtcatgtatacatttgtagcaaacctgcacattgtgcacatgtaccctagaacttaaagtataataataataataataaaagataagccmcaataatcaagtgggtttcatgccggagatgcagggatggtttagcatacgcaagtcaatgaatgtgatacaccacataaacagaattaaaaacaaaaaccacatgatcatctcaatagatgaaaaacaagtatttgacaaaatccagcattctttatggttaaaacccccagcaaaatcggcactgaagggacataccttaaggtaataaaagccatctatgacacactcacagccaacattatactgaatggggaaaagttgaaagcattccccc

SEQ ID NO: 330949 - DNA, 571 bp, Homo sapiens
ctgtggactctgagttaatgctgaaatgagttaagactttgggggactgttggggaggcataattggttccaaaatgtgaggatgtgagattggggaggggtcaagggcagaacgatatagtttggctctgtgtccccacccaaatctcatcttgaattcccacatgttgtgggagggacctggtgggagataactcagtcatgggggcaagtcttccccatgttgttctcatgatcgtgaataagtctcatgagatctgatggttttaaaaagagtagttcctgtgcacaagctctctctstttgcctgctgccatccatgtaagacgtgacttgctcttccttgctttctgccatgattgtgaggcttccctagccacgtggaactgtaagtgcaattaaacttctttctttttcaaattgcccagtgtcaggtatgtctttatcagcagtgtgaaaatggactaatacatctaccatatacaatatacaaaaaccaactttatctggaataaagacttaaatggaagacccaaaacaatgacactactagaagaaaacattggagaaa

SEQ ID NO: 330950 - DNA, 525 bp, Homo sapiens
cacaacacttcaaaaaacacacaaaaaatgtaaatatgacacccaaaggaacacagtaatattccagtaaccaaccccaaagaaatggaaatctgtggattgtatgagaagagttcaataaaattttttaaggaagctcagcaagctaaaagaaaacacagatagaaaacagcaaaatcagaaaaaaatacaaaacaaaagagcaagttcaataaatagatagaaatataaaaaatgaacyaatcagaaattctagaactgaagaacaatgaatgaaattttaaaaattcaagagaaagtgccaacagtagattttatcaatcaaaagaaggaatccgtgtactcagagataagtaatatgaaaatattaagttaagtgagaaaaaagataaaataatgaaaagaaatgaagaaagcctatgggatgtatgtgacactatcattagagctgactttctcatcatatgatagccaggagaagaaagacaaaagaggagaaagcttatttaaataaatatggctaaa

SEQ ID NO: 330951 - DNA, 601 bp, Homo sapiens
tctttctcctgaatccctagtcaagcactcagaagacacaagcaagaaaaaaaaaaggaaataaaccataaaccaaaaaaaaattgctttactccaatacatacaatcatttccactgctttttttgtcccttcatagctgatgtcagtgagttttaaaatatataacagcatagtgctgctagaatgaaaacaaaattttacacttctcttgatttcctggtgaaaattgctttcaacattgaacgagctgtaaaatattctcttttccgcatttgcaacacagataattgtccttggtggatcactagattttttcttattcctgatgactgaaatttcttagtcaggctaaaagatcactgtttgttctatagtatttagcaaaattcgctttttctgtgattattgaatcttaacaatggcggtttcctttctctcccttcttttccttcttgttcattttaagtctcttctcaaattatatgttttgaaagataatttcagcatctaagtttttcattttagcaggtggtggaatgaccctacaactaatgaataaaaattrcatatgattacctttaagattatgaacataaaaa

SEQ ID NO: 330952 - DNA, 607 bp, Homo sapiens
taatgatcagtgatgttgagcactttttcatatacttgttggctgcttgtatgtcttcttttgagaagtgtttgttcatgtcctttgcccattttttaatgggatttcttgttttttgcctgttgaattgtttaaattcttcatagatttttgatattagacctctstcagatagatagtttgtgagtattttctcccattctggaaactgtctgtttaccttgttgatagtttcttttgctgtgcaaaagctccttagtttattaagtccttcttgtcaatttttgtttttattgcaattgctttgggggacccagtcatacattgtttgccatggccaatgtccagaatggtatttcttaggttttcttctatgatttttatagtttgaggtcttatatttaagtctttaattcatcatgagttaatttttgtatacggtgaaatgtaggggtctggtttcatttttctgtatatggctagccatttattcaagcaccacttattaaataaggagtcctttccccatcacttattattgttgattttgtcaaacatcaaatgtttgcagatgtgggacttcatttctgggttttctatcctgttc

SEQ ID NO: 330953 - DNA, 607 bp, Homo sapiens
taatgatcagtgatgttgagcactttttcatatacttgttggctgcttgtatgtcttcttttgagaagtgtttgttcatgtcctttgcccattttttaatgggatttcttgttttttgcctgttgaattgtttaaattcttcatagatttttgatattagacctctctcagatagatagtttgtgagtattttctcccattctggaaactgtctgtttaccttgttgatagtttcttttgctgtgcaaaagctccttagtttattaagtccttcttgtcaatttttgtttttattgcaattgctttgggggacccagtcatacattgtttgccatggccaatgtccagaatggtatttcttaggttttcttctatgatttttatagtttgaggtcttatatttaagtctttaattcatcatgagttaatttttgtatayggtgaaatgtaggggtctggtttcatttttctgtatatggctagccatttattcaagcaccacttattaaataaggagtcctttccccatcacttattattgttgattttgtcaaacatcaaatgtttgcagatgtgggacttcatttctgggttttctatcctgttc

SEQ ID NO: 330954 - DNA, 627 bp, Homo sapiens
gctgtttggaatagtataatggcacgtaagtcattatgtaagttcacagatggtagttttgatattagcattgtgtgcagagagggcaaatccctatctacagtgtctattccagtgaagamaaaacgttgtcttttccatgatttcagctgtttaatgtaatcaacctgccaccaggtagctggttgattatgctgtggaaagatgacatatctggactcactgttggtatctgctgctggcagattaagcaaccagcagtgctgatagccaggtgggccttggtgaggggaagcccgtgttgctgagcccaagcctaaccttcatccttgccaccactgctaggactttgttcatgagtccattgggtgacgagagggatggctagagaaagaggctgctggtatcaaaggaacaggtaattctatcctcttggttgttaaaatccacctctgtagaggcgaccctttaggaagcacttgcatgggaatcaaatatcttcatagtttttgcctacttaaagagggctattcacatacctcttcccaacattctctcgccaccaattttccaatcatattccttccaagtctcttaacatgcagccaaaccattgtccacagttca

SEQ ID NO: 330955 - DNA, 579 bp, Homo sapiens
gactgtgggaagacaaactaattgggaatatttagtacaatgctgaaggctgggtgggtatattgaccaacaagggatactgaggcatataagcaataacaatcgtaaaaagtcattagctcctgaaggtaggagcaaggggaagaagtggtgttactagagcccagtgagaggaggtgtattaaagagatcacttaataggagccatagtcaaagagcatcttggacactgataaaacccagaaatgagtgagtaaataaataatctgttctgctttcctccagtgctctwgtcagctgtcattattgttctttgttcaaatccatctgcaaggcagaaggcaggatgtagttcataatagtcagtcatccaagatcagggaatagaaggtcaagaaagttaaccatccaccaccattatgtactatgatgcaaaatcatccagagaaggccaataggaaaaaggagtgggttgatgtagtgttgacatgcttgtgtacaggagtatatgagttcagtaagtatatgttcccattaagtcatttatttttagtatatttcagaaagaggagacctgac

SEQ ID NO: 330956 - DNA, 648 bp, Homo sapiens
tttctggctgtccttggggatattcctttcttcagatacccgcaatgctttctgtgggttgaggtagagataggtgtcctgccaggcaacccaagatgatggggaaactatttrtccaacttaatattacctttttaagttagaaactgtgagtcagaggaaaactttctgcgctcttggtgatgggtaaacttggaagagaggcgtcatggatatggtagtccaactctcttagcatcttttaggttttttatttctctgtaccataggaattgtctcctcatatttgagtatttaacttctaggatattgctagtgataatgtctacattgcacatttgatttcggttttctgtgggaaggagtgagacactttgcctctatattacaatttcagaacaagtagtcctctttattacatattccttttcaatatggtgagcaagtagcacttttattgtatatatttataaggtacagtgtgatttttgacatataaatgccttgaataataaataaatcaagctaacacagaagtttaatattatgaattcttcccctaattactgctctaatagaatccataaaagtttacaaaattgaatttttattcagttcaaaatactctctaattgattttggagtttt

SEQ ID NO: 330957 - DNA, 648 bp, Homo sapiens
tttctggctgtccttggggatattcctttcttcagatacccgcaatgctttctgtgggttgaggtagagataggtgtcctgccaggcaacccaagatgatggggaaactatttgtccaacttaatattacctttttaagttagaaactgtgagtcagaggaaaactttctgcgctcttggtgatgggtaaacttggaagagaggcgtcatggatatggtagtccaactctcttagcatcttttaggttttttatttctctgtaccataggaattgtctcctcatatttgagtatttaacttctaggatattgctagtgataatgtctacattgcacatttgatttcggttttctgtgggaaggagtgagacactttgcctctatattacaatttcagaacaagtagtcctctttattacatattccttttcaatatggtgagcaagtagcacttttattgtatatatttataaggtacagtgtgatttttgacatataaatgccttgaataataaataaatcaagctaacacagaagtttaatattatgaattcttcccctaattactgctctaatagaatcmataaaagtttacaaaattgaatttttattcagttcaaaatactctctaattgattttggagtttt

SEQ ID NO: 330958 - DNA, 540 bp, Homo sapiens
gtgataacatgctgccccatctgagttctcactttcataggaatgctcttaaagttccaccattaatcaaagtacatgtgttctatggcacatagttacatgtattcctattatactgattgtttttaatcagcaatatatgtccaatctaccaaatgtttttccttcatgcatcaagatattcatacatttaatatgyttcctaaagtttagatatcattgcattactgaaatgtattctatgtgactatgaaatttatttttctactagattgctccattttaattgtgattttttatttggaatgtttgaatcaattttggtgttagattactacactatatattactttcatgtgctctcttcgtcaactttcagtccaacataaagaggatttaaaaaatacaagaagattttcaacttttgccatcaggtggaataatgtaaatgacatgttgatcacatttacatttctaaatttgtatttacattttgtccatattatcttaggcttccttgtgatttattctgttgaagtt

SEQ ID NO: 330959 - DNA, 500 bp, Homo sapiens
ttttgaatttgtgaatgaatttgtactactcttattgcaaattgtattgtgatctttgaatttgcatgtcatcataaaggttttgtagtatttgtaaaatgtctttccactgacactagcattatttggcagtattgtttttgcattcttcaaattaataataatgcttaattacctgtaaacaaatttttctttattgtcttagataattgtgaactagtgttctgctctaaagctacttctttgatgcactatctgcatagacatagatacctcatamcatctgtagccagtttccccaatatatttattttatgtctatcactaaatgctaagttttgattatcataatttttgctgatcaaagataatatatgttttctcaaatctccatttctgtgcatgtccggtagctggcagcctgttgcttctctatagtttttataattttagtgtaatttggtgactgatgtccattttcaaagatacacattactcag

SEQ ID NO: 330960 - DNA, 593 bp, Homo sapiens
tttatctggctgtctggtatttactgtcaatttgatggggagttaggaaatccccatattgccaaggtggcagaggtggggaactgaacgtagaaacaacacctaaactgcattagtgggaataggagagattagagaagaaccttgttttgaatgacttttctgcataggtctttcatatttctgtacatctaaggataaatacttagtttgctccagactgtttttttttcaaagattttcatataaacaartatccttgaaagatagagatgcttccctccctagagctgattttcttatattctaggctaataatgtctctctccagagaagaatgatgggataagttttgacaggatcctcttctataatagtggtgcttgctaatattggtgctcttctcctgtatcatggcctcactcactaaccatctgttgctagagtattaaatgaatattgcttggcataccacaaaaaatctttcccaaactcaatcctttaaaattcccctaatacactaatttgtgctgtaataaagccaaactttgtgtataacacacacacacactcacgcacacatacacttgcac

SEQ ID NO: 330961 - DNA, 590 bp, Homo sapiens
tcaaatcttgaggaaggagtaaaatacagaattaggaaagtaagtgacagagtccagctatatcatatctcacagaggaccaggaattgaatactttctgaatggaaggacctcatccatagtacaaaatacacgtgtcatttgcaataatgggtgcagaaaccagaatggtcagggctgacggcagaagaacttttgaaccagatttacttcaggaagcaaaattgggggatttcccaaagaaatcacagacaatgaaaatctacctgcagatgtgaagaagtagcaagcaaggccactgtggcctcagcacacgcatacagagaaatctcttgaaaattgctacttcataaaattgttcttgcttaatcatggaaaagaaaataaaagtaacatggccataatcaacaaaagtgtgataagaaaacgtgtgtgaatgtaaatgagcatcaaattttaccagcaaatgaagagcattgactagaaattgttgcyaagcagcaagtgacggtaatcaaacatttgcaatcaaatagacaactgagcaaaacaaaatataattaagtccaccctcgataaagaaaaaacaa

SEQ ID NO: 330962 - DNA, 571 bp, Homo sapiens
agatattaaatcattttatcaagacttaagtattaaatcagcrtgctaatatttcatgaatagcttcatacattaaaaaacaatataaagttcaaaatagaccaaatgcaaattaaccaataaaactgggatgtgaaatcagtggagaaaaagatggaacattcaatgaatcctacttgtaatcccgagtagctatccacaaaacaaacaaaaacacaaaataaaaattgatatatttcacctcatatttgtggataaattacaaatggatgagtgaagtgacgtaaatgaaaatcattagcattaaaatattagaaaacatggaggaaaatattttataaacctagattaagcaaagctgctgtaactatgataagagttaaaaaaaagtaattactgaataagaaaatgaataaagtaagaatgtgaatgacaaacaggtaaaattattaacaatgccatccacaaacatagacaaatctccacactacatatcctactattaatttagataaatatgaataaaagaaatgaatagaacaaaaatgaatgtttcaaacaaataagttca

SEQ ID NO: 330963 - DNA, 499 bp, Homo sapiens
gattccatattttggctattgtgaatagccaaaaatgttcaataaacatgggtttgcagatgtgtctttggtacattaattttccctagattgagcatattcccagtaataaaattcctgggttacatggcttttctatttttatttctttgagaaacccccatacagttttacattcttgctgtactaatttatattcccaccaatggtgtaggagaattcaccttttccacatcccacccagcatcaattccctgtcttttataaagaagccatcttacctgagtgatatgatatttcattgtggttttgatttccatttatctgaatattaataatgtgtaacattttttgtgtacttgtaggtcatttgtatgcctcctttgagaartgtgtattcaatcttttgcccattttaaaatcagaatatttttctattaatttatttgagcttcttatattctgggtattaataacttgtcagacatagtttgcaaat

SEQ ID NO: 330964 - DNA, 637 bp, Homo sapiens
ttatattatcaatcactaattttttttttcttayccagtggcactggccagggatttcattattatgttgactaaaagtggtgaaagtgggcatctttgtttttcattatcacaggaaaagatgtctatttgataaaaatacctttaagtttcctaaaaatttctattctaaattctccatcagatgatttacatataattctttcattaagattggtcaatggtttcttgctttgtctatttagagacttcatagctctctatttgctcttgtttcttgtagatgtatttatgtctttgtattgaagaattagttatttcagtattttctgtgttaaaagaaaaacgttagctgaattaaatttaaaggagtttatttgagcaatgtaagattcaataacttggaagtccccagaatcacagcagattcagagagactccagggatgcctagtggtcagaacaaatttacagacaaaaagagggacgtgatgtacagaaataagagatgaggtacagaaacagctggattggttacaggttggcatttaccttatttgaacacagtttgaacactcagcagtgtatgactggttgaagtatggcttctgggattggctaagtctcagctattgtta

SEQ ID NO: 330965 - DNA, 445 bp, Homo sapiens
atgtatttaatgtggatcattttatcttttccatgataagtcgtggaatgcagaatctttagtaacagaagctttaaggactcaagaaagacaaggtggctgtcctggttctccaygagtccatgtttgatgttggacttatgccctcttgcataccagttgtttctccattttaggtgcatagcactgataacatgggttatcataggtaatttgacatatactatggagttcattcaaattgtacatctaaacaatttcaatatcagctgatttaacatgaaaatctggaaaagtgttttcttggtatttaatttttgttctccttgggttagtagttttataaaccagtcagtcttttccttgaagttccagttcaaaggatatgattttaaaattattagaaacctgtattcaagatagatttttagagtcctttccatcc

SEQ ID NO: 330966 - DNA, 528 bp, Homo sapiens
ggtcacccacctaatgccagccgtagctctcctgtgtgaggtgtctgttgacccctgctgggaggtgtctccccatcaggaggcacgggggtcagggacccacttgaggaggcagtctgtcccttagcagagctccagcgctgtgctgggagatctgctgctctcttcaaagcttgcagacaggaacatttaagtctgctgaagcggctcccacagacaccccttcccccgggtgctctgtcccagggagatgggagttttatctattagcccctgactgtggctgctgtctttctttcagtgatgccctgccaagagagsaggaatctagagaggcagtctgactacagtggctttgtggtgctgcagtgcactctgcctagtcctaacttcccagtggtgttgtttacactgtgaggggaaaaccacctactcaagcctcagtaacggcggatgcccctacccccaccaagcttgagtgttccaggccgacttcccactgctgtgctggcagcaagaatttcaagc

SEQ ID NO: 330967 - DNA, 528 bp, Homo sapiens
ggtcacccacctaatgccagccgtagctctcctgtgtgaggtgtctgttgacccctgctgggaggtgtctccccatcaggaggcacgggggtcagggacccacttgaggaggcagtctgtcccttagcagagctccagcgctgtgctgggagatctgctgctctcttcaaagcttgcagacaggaacatttaagtctgctgaagcggctcccacagacaccccttcccccgggtgctctgtcccagggagatgggagttttatctattagcccctgactgtggctgctgtctttctttcagtgatgccctgccaagagaggaggaatctagagaggcagtctgactacagtggctttgtggtgctgcagtgcactctgcctagtcctaacttcccagtggtgttgtttacactgtgaggggaaaaccacctactcaagcctcagtaacggcggatgcccctmcccccaccaagcttgagtgttccaggccgacttcccactgctgtgctggcagcaagaatttcaagc

SEQ ID NO: 330968 - DNA, 528 bp, Homo sapiens
gcggatgcccctacccccaccaagcttgagtgttccaggccgacttcccactgctgtgctggcagcaaraatttcaagccagtggattttagcttttttgggctccatggcggtaggatctgctgagcaagaccacttggatccctggcttcagcctcttttccaggtgagtgaagggttttctctcaactggtgttccactggagtacgaaaaaaaaaaaaaaaaaaaaacaaaacaaaacaaaaaaaaacctcctgcagctagcgctagctcggtgtctgcccaaacagctgcccagttgtacgcttgaaacccagggccctggtggtataggcacttgagggaatctcttcgtctgctcgttgcgaagatcgtaggaaaagcatagtatctgggctggatagcactgtccgtcacggcacagtccctcatggctttccttgactaggggagggggttccctgaccccttgcactttctgggtgaggcaatgccccaccctgcttctgctggccctccatgggctg

SEQ ID NO: 330969 - DNA, 528 bp, Homo sapiens
gcggatgcccctacccccaccaagcttgagtgttccaggccgacttcccactgctgtgctggcagcaagaatttcaagccagtggattttagcttttttgggctccatggcggtaggatctgctgagcaagaccacttggatccctggcttcagcctcttttccaggtgagtgaagggttttctctcaactggtgttccactggagtacgaaaaaaaaaaaaaaaaaaaaamaaaacaaaacaaaaaaaaacctcctgcagctagcgctagctcggtgtctgcccaaacagctgcccagttgtacgcttgaaacccagggccctggtggtataggcacttgagggaatctcttcgtctgctcgttgcgaagatcgtaggaaaagcatagtatctgggctggatagcactgtccgtcacggcacagtccctcatggctttccttgactaggggagggggttccctgaccccttgcactttctgggtgaggcaatgccccaccctgcttctgctggccctccatgggctg

SEQ ID NO: 330970 - DNA, 528 bp, Homo sapiens
gcggatgcccctacccccaccaagcttgagtgttccaggccgacttcccactgctgtgctggcagcaagaatttcaagccagtggattttagcttttttgggctccatggcggtaggatctgctgagcaagaccacttggatccctggcttcagcctcttttccaggtgagtgaagggttttctctcaactggtgttccactggagtacgaaaaaaaaaaaaaaaaaaaaacaaaacaaaamaaaaaaaaacctcctgcagctagcgctagctcggtgtctgcccaaacagctgcccagttgtacgcttgaaacccagggccctggtggtataggcacttgagggaatctcttcgtctgctcgttgcgaagatcgtaggaaaagcatagtatctgggctggatagcactgtccgtcacggcacagtccctcatggctttccttgactaggggagggggttccctgaccccttgcactttctgggtgaggcaatgccccaccctgcttctgctggccctccatgggctg

SEQ ID NO: 330971 - DNA, 589 bp, Homo sapiens
agcactgtccgtcacggcacagtccctcatggctttccttgactaggggagggggttccctgaccccttgcactttctgggtgaggcaatgccccaycctgcttctgctggccctccatgggctgcacctactgtctagccagtcccagtgagataaactgggtacctcagttggatgcagaaatcacctgccttctacattggtgtcgctgggcactgcagaccagagctgttcctattcggccatcttgcctgggaaaatttttacaaaattaaaatgttaaaattattttgcacatcaccagaaagcttgtgttatctgatggaagcatttgtgttatgtaattaaactgaagtgtcaatatcattttaattgtattcattcttcccacacggtgaactttagcattgactatctagcaagaacctccggagtgagttttatactagaatcaaattaactttaattattttgtcaaagtctcttataattgtaatttccttgatgcatcaaatttgaagataacgatttagatgccactgaaggaaaactgttgaaatagaaaatttttattttatattgtttatt

SEQ ID NO: 330972 - DNA, 589 bp, Homo sapiens
agcactgtccgtcacggcacagtccctcatggctttccttgactaggggagggggttccctgaccccttgcactttctgggtgaggcaatgccccaccctgcttctgctggccctccatgggctgcacctactgtctagccagtcccagtgagataaactgrgtacctcagttggatgcagaaatcacctgccttctacattggtgtcgctgggcactgcagaccagagctgttcctattcggccatcttgcctgggaaaatttttacaaaattaaaatgttaaaattattttgcacatcaccagaaagcttgtgttatctgatggaagcatttgtgttatgtaattaaactgaagtgtcaatatcattttaattgtattcattcttcccacacggtgaactttagcattgactatctagcaagaacctccggagtgagttttatactagaatcaaattaactttaattattttgtcaaagtctcttataattgtaatttccttgatgcatcaaatttgaagataacgatttagatgccactgaaggaaaactgttgaaatagaaaatttttattttatattgtttatt

SEQ ID NO: 330973 - DNA, 589 bp, Homo sapiens
agcactgtccgtcacggcacagtccctcatggctttccttgactaggggagggggttccctgaccccttgcactttctgggtgaggcaatgccccaccctgcttctgctggccctccatgggctgcacctactgtctagccagtcccagtgagataaactgggtacctcagttggatgcagaaatcacctgccttctacattggtgtcgctgggcrctgcagaccagagctgttcctattcggccatcttgcctgggaaaatttttacaaaattaaaatgttaaaattattttgcacatcaccagaaagcttgtgttatctgatggaagcatttgtgttatgtaattaaactgaagtgtcaatatcattttaattgtattcattcttcccacacggtgaactttagcattgactatctagcaagaacctccggagtgagttttatactagaatcaaattaactttaattattttgtcaaagtctcttataattgtaatttccttgatgcatcaaatttgaagataacgatttagatgccactgaaggaaaactgttgaaatagaaaatttttattttatattgtttatt

SEQ ID NO: 330974 - DNA, 611 bp, Homo sapiens
agcattaaaattaataaattgaagattctgagttactctttattatatatagtgagccacaatgaatttgaataataagtatgtgtattagtttgttcttgcattgctgtaaagtaacagctgatactcattaatttataaagtaaaaaggtttaactagctcatggttctgcaggatgtaccatgaagtatatttgggaagacttcaggaagattccagtcatggctgaaggcaaagcaggagcaggcgtctcacatggcaggagcctgagcaagagagagtgagagggtggtgctacacacttttaaagaaccaaatctcacaagaactcaggattatgagaagagcaccaagaagatggtgctaaaccattcatgagaaacccacccccatgatttaattatctccccccaagccccaccttcaatattaggaacaacaatctgatatacagcttgggcagggacacagatccaaaccatatcagtatgttagaaaaacttaagaaataataagaaaccagcaatatttagggagtatcaaatctaatatgttctctgtttacattagyaactttgaaaagtaaagagaaagagtgacatggtgagaa

SEQ ID NO: 330975 - DNA, 590 bp, Homo sapiens
acaaaaataaattcaaagtaaattaaaaacttaaatgtaagacctgaacatgtaaaacgattaagagaaaatggggtgaaatctccatgacatttgtcttgacaatgatttattagacactaaaaacacaggccgcaaaaacaaaaacaaatgaaacatcaaactaaaaatcttctacacagcaaaggaaataccagtgaatgaaaaggcaactaatggaatgggaaaatatatttataaactatatatctaatgagggattaggggtatccaaaaaataaaataaattcctggaactcaatattaaaaatccaaataatccaattaaagcaatgggcaaagggctcgaaaagtcacttcttcaaataaacatgaaaatgcaaaccaggtatatgaaargatgctgaacattttattcatcagggaaatacaaataaaaaccacaatgaaattattaactcacatctgcttggatggccattatcaaataattagaaaataacaagtgttagtgatgatgtggggataccagagaccttgtacgctgttagtaggaatgtaaaatagagtagtcattaaagaggataaac

SEQ ID NO: 330976 - DNA, 420 bp, Homo sapiens
atgattccattcgactccattcagtgattccatttgagtccatttgatgattccattcgagtccatttgatgattccattcttttccatttgatgatgattccattagggtccattcaatgattccattcgagtccattggttaatgcctttcgagtctttttgatcactacattcgagtccattcaatgattctattcgattccattccatgatgattccattcgagttcattcgatgattgcattcgagtccatttgatgattccatatgattccattcgacaatgattccattcgtgtccatttgatgattccattcatttcctatcgatgaagattccattcragtgtattcgatgattccattcaaatccattcgatgatgattccattccagtccattcgatcattccacttga

SEQ ID NO: 330977 - DNA, 547 bp, Homo sapiens
gcagctgcaaactctactggctcacatgcccctacaagaaggcataactggtgtgtttccttttaaatcaaacacctcctataggtactttggcagctcttctaagtctctaaaagcagaagggggcagagaaaggaccacccacacagttaggtttatttgtacagcatgatccttacagygggctgtaaaggacagctcctccccacacactcctcatacaggtggctcctcctgccctctgttctggggacttcatcatcaatgcaaactgtgtcattagtgtgaacaaccagagtcctgtccttattaccccatcatttaacttggtgatggcaatttattgagcgcccataacatggaaggtgctataaaatttaataaattttgaaatgatggaaagtgcatcgtgtaaatgcatccagatgggttcctggaaaggccgaaaagatttttacagacatgaaaatgaaacagttatattttatctcatataaatggcaaagggggggtgtggactcaaaatgtatgactattaattgagtat

SEQ ID NO: 330978 - DNA, 547 bp, Homo sapiens
gcagctgcaaactctactggctcacatgcccctacaagaaggcataactggtgtgtttccttttaaatcaaacacctcctataggtactttggcagctcttctaagtctctaaaagcagaagggggcagagaaaggaccacccacacagttaggtttatttgtacagcatgatccttacagcgggctgtaaaggacagctcctccccacacactcctcatacaggtggctcctcctgccctctgttctggggacttcatcatcaatgcaaactgtgtcattagtgtgaacaaccagagtcctgtccttattaccccatcatttaacttggtgatggcaatttattgagcgcccataacatggaaggtgctataaaatttaataaattttgaaatgatggaaagtgcatcgtgtaaatgmatccagatgggttcctggaaaggccgaaaagatttttacagacatgaaaatgaaacagttatattttatctcatataaatggcaaagggggggtgtggactcaaaatgtatgactattaattgagtat

SEQ ID NO: 330979 - DNA, 610 bp, Homo sapiens
tgaagacaccaaatgttagaatgcctataaaaatcccactacatctgtccttataaaaatagaaatacctttgaagttcatattttgggaaatatcacctcaacagcagagcatgggcaatggctgctgggcaagtgttggactttcgcacagctcatcatgcaaacctgtgatgacatcattgcatttatgcyctaaaactagatttcaggtcttaagctggcttaaattatctcttgaaaaatggagattatatacagctttgaaaaatagggaatttttttccccagaagacatggcatgtgattgccaaaaaaacacataaccatctttggttaagaggtgacaccatctttctgagcattgctctaaatacaagaaaggtcagagtgctgcaggtgtattacaactatgagaatccataattactttcattctctttaaagaaaagcaaaagttaccagcatattgagaaggcacataattttactatttctatttctgttgaaactgaggattacgtgttggatacagcacctacaacctgcattgtttttcttcattgtttcattgaactttttggacctaaaaatatactactgagtgggta

SEQ ID NO: 330980 - DNA, 582 bp, Homo sapiens
tgtttcgcagccacataccagcatctggaagctactgtaacttctgcggtacaattctctcattttgcagatgaaaaaattcaggtgcagagagaggaagtgtcttttccacagccacagggtgtatttgtgactgggacagtcatttcatgactcacagacaagtattctttttactttattattataggaaattcgccttatagtttagttttgttttattaagtctttattgctattggcttcagatttagttatcacttatagaatcccttctgagtgccaggcattgtattttctattttcacttagcagacatttatatagtgcttatyggaagcaagacactgtgctaagtgcccgacaaataagaagtcatataatcctaacagtaaccctcagagatgagaacaattgttatcccctattttaaaaataaggaaaactagctgagtgcggtggctcatgcatgtggtcccagctactcggcaggctgaggcaagaagattgtttgagccaaggagtttaaggctgcagagagctatgattgtgccactgcattccagcctgcacagagtacag

SEQ ID NO: 330981 - DNA, 515 bp, Homo sapiens
taagtaatttacctactatcattataatatatttgggttttcatctttaagctcaaagcaaggaatggacatcatggtttctttactatagaacatggaacctctttctgtcaatgtgtctcyaaatctaaagaagttattaaaaggggaaaaaaatgtaatctttcttaggaacttgtggtagttttgtgtattagtccattttcacactgctgataaagacatacccaagactgggtaatttacaaaagaaagaggtttgacggagtcacagttccacatggctaaggaggcctcacgatcatggctgaaggtgaaaggcacatctcacatggcagcagacaagagaagagagtgagaatcagtgaaagcagtttcccctcataaaaccatcagatcttgtgagatggattcactaccacaagaacagtatggaggaaaccacccccatgattatctcccactggctacctcccacaacacttgggaattatgggagctacaattcaagatga

SEQ ID NO: 330982 - DNA, 515 bp, Homo sapiens
taagtaatttacctactatcattataatatatttgggttttcatctttaagctcaaagcaaggaatggacatcatggtttctttactatagaacatggaacctctttctgtcaatgtgtctctaaatctaaagaagttattaaaaggggaaaaaaatgtaatctttcttaggaacttgtggtagttttgtgtattagtccattttcacactgctgataaagacatacccaagactgggtaatttrcaaaagaaagaggtttgacggagtcacagttccacatggctaaggaggcctcacgatcatggctgaaggtgaaaggcacatctcacatggcagcagacaagagaagagagtgagaatcagtgaaagcagtttcccctcataaaaccatcagatcttgtgagatggattcactaccacaagaacagtatggaggaaaccacccccatgattatctcccactggctacctcccacaacacttgggaattatgggagctacaattcaagatga

SEQ ID NO: 330983 - DNA, 551 bp, Homo sapiens
gcattctacaattcccctggtgttggttaactgtcttggcacaaggtgaggaatgatttaccactgacttcttggtaactttgccatgagaagacagcattgtcttaagtaccagtgcatagattagatcaagcattgattatgaatttaggtagatctgggttcaactcgttcaaccatttctacctctatgacactgctcaagcccctttttctcagtttcttatatactcttatacaaatgtagaaaacaatawgacttctacttaaaagtatggtatatgttaaaataattagattaatctgtgtaggcttacatcagtttcccaatataggaacaatttaatttaggaacaattaaatttaatctgtgtaggcttacatctgtttcccaatctaggaacaattggcaatttgggtcagataactgtggcctctacctgctagatgctagtggcaccaaaccttcccagtcgtgacaaccaaaagtgtctctggacagtgcaaactgtacccaaagaggcaaaattgcccccatttctccattgaga

SEQ ID NO: 330984 - DNA, 502 bp, Homo sapiens
atggcatcttttacttgacagattgcttgccatgactcactcagcacttctataagttcaataaatacaaccaagtgaaaattgcaaagaaagaaagtatacgtatgttctccagatggaattctgctactatagaatcgctaatatagtccaggcrcaggcaatttaatctggaagacacccagacaatacggaaacactgactctgttaacaggtagaatcagctcagaatctctgagaccataccacacacagaaagtttcttaacagaaatcattgattttattactgtgttcttagagattataatatcatgagtactattaatagttttcttgccaatgttgttttcagcaaagttctatgatctaccacaattaaacaatggggaacttactaagtagctaccataaagccgtcaatatccaatttattaatagtctcaagtgtcattcattcggtcaaatatttacttattgactatagctttttgctcttttg

SEQ ID NO: 330985 - DNA, 589 bp, Homo sapiens
ggagaaacatgtgcaggtttgttacaaacatatatgtgttatgctgatgtttggggtctgactggacctatcaccctgatagtgagcatagtatacaataggtagttgtttagctcttgccccctccttctcccctcttgtattcccaagtgtcyattgttcccatctttatgtccatgtgtacttaatgtttaactcttgcttataattgagaacatgtattatttctgttcctgcattaatttgcttaaaataatggccttctgctgcatctgtgttgctacaaacaacatgactttgttatttttttaatcactgcatagtattacatggtatacacgtactaaattttattgatctagtccaccattgatgagcaccttcattgattctatttttttgttgctgttatgaataatgccacgatgaacatacaagtgcatgtgtctttttggcagagctatttattctcctttcaatatatacccaataatgggattgctgagttgaatggtagttcagctcagtcctttgagaaatttccaaacttctttccacagtggttaaattaatttacgtttccatcaat

SEQ ID NO: 330986 - DNA, 590 bp, Homo sapiens
tagtttgacatgtgattttcctattggatgcattttttttccttacttgatttctctgactaggacatccagtattatgttgaatcagagtgatragagtggatatccttgtcttgttccagttctcaagaggaatgtttccagcttttgttggaatgattatgatattggctgtgagtttgatgtaaataccttttattattttgaagtgtgttccttcaattcctagttgctcaaggtttttttgtttttgtgtttttatcatgaagaggtgttgaattttatccaaaacttttaatgcatttattaacatgatcatatggtttttgtttgtaattctgtttatgtggtaaatcacaattactgatttgaaaaatgtagaaccaacattgcactccaggaataaagcctgcttgatcatggtgaattaactttttgatgtgctactggattcagtttgctagcattttgttgagaattttggggtctatgtttatcaccaatattgacccaaagttttattttttcatagggtctctgccacatttttgtaggaaaataatgctggcttcatagaacaagttagagaa

SEQ ID NO: 330987 - DNA, 590 bp, Homo sapiens
tagtttgacatgtgattttcctattggatgcattttttttccttacttgatttctctgactaggacatccagtattatgttgaatcagagtgatgagagtggatatccttgtcttgttccagttctcaagaggaatgtttccagcttttgttggaatgwttatgatattggctgtgagtttgatgtaaataccttttattattttgaagtgtgttccttcaattcctagttgctcaaggtttttttgtttttgtgtttttatcatgaagaggtgttgaattttatccaaaacttttaatgcatttattaacatgatcatatggtttttgtttgtaattctgtttatgtggtaaatcacaattactgatttgaaaaatgtagaaccaacattgcactccaggaataaagcctgcttgatcatggtgaattaactttttgatgtgctactggattcagtttgctagcattttgttgagaattttggggtctatgtttatcaccaatattgacccaaagttttattttttcatagggtctctgccacatttttgtaggaaaataatgctggcttcatagaacaagttagagaa

SEQ ID NO: 330988 - DNA, 639 bp, Homo sapiens
tggctaggttcttgccctgggtttcacaggaaatgtataatggcagaatatttttggtgttgtgatttttgctgtttaagactaatgtaggagacacttaagagtaatggctggtagataggcttttactcagccagatattttgtatttcagtgaagtcacagtagtgctccattttggtggtggggaagaggggtaacctccttgccagatctgctcccaggttttagggagcctactcccatcattggcactgcctgcatttcctttcttaggtgttccaggcttcagggctccctcagacagaagctgtggctggcagactggccacacctttcctaaaccagccctacagagtgaggcataccctgctcccatgccagcccaggaacccaagtctcacccctcacagtgttctgagagtgaaggctcctccctagcttgagtgccggctacagatctcattttggcactcctgagctatgtactgcagccctggggctttgggactgggcccagagctctgtcttctggctcttaaggtcatgccctggctgtgctgrgggacacaaaatgttttcaggccaccaggaaagcactcaggcagggctgccagcaaagcaaccaaggtggatggca

SEQ ID NO: 330989 - DNA, 610 bp, Homo sapiens
aggaaaataaatcagaaaaaaaatgatgaaaacagaataagagatattttcataattttactgagcaaataaaatacttgtgaaatttatgaataatgatgaaacaacaacagatgaaaagtaagataatagacttgacattcttaggttaattatctaaaccataattggcaatgaacaaaaggaatttagagtttgaagacctcacatctcctcaacagaaaagatagaatatgctgtgtttcaacaatagtgcttcctacactcaatttttatcatgtaactrctagtttcctatcccattagattataagctttttgaagataaagaatgggtacaatagtttcttatgttagccaacaaaggtaataatgaattaaacaaatactgacctttttgatttgatatttctgggatatcctgtggattctctatgtccttgaatctaccatattaaatagtacttgtattatttaatagaatcttggtttgtaattattaaatgtgttatattccagaatggttggttcaaatttagtcttacttagttttaagaattacactttaggaactatattcaaattgaaatgtatgcaagggaaataaatg

SEQ ID NO: 330990 - DNA, 608 bp, Homo sapiens
caaataatttcttatttgacacaaacttattttattattgtttaaaattaataatttagattgtaaatttgamaatcatgaacagttcaggtaagagataatcttaccctatattaagcaagtgttttcaagtataaaggagatatatgtaaatacaagtttgtcatagaggggcatttagcttgcagatatgtctatttgtggaaatagtcattcagtttttatagaagaataacacaggcaataacaacattaaatcatataattgttactctgttttatttacatttttatttaagctgaggttcttaagtctgacatttggtatccttttgtttgataagccttctgtagcaaggtttttaattgctagggtcctcatgctgaaacctatgcagagatgttttaacctgtcaatataaaattgtctcttttttgtggaataagacctctcaaccttcagtatacactacaaggccaaatatctatggagaatgagacttaaagctacttacttatttttcagtagatgacactcaaagtctgccacacaaccagaaaaattgaggctgaagagtctacatttgttacagaggcatcaaatcata

SEQ ID NO: 330991 - DNA, 437 bp, Homo sapiens
gtctgctattgtaagctttatctgagactaatggactgcaatgtgagttatgagccctcaaytgaaggttttgctagaatatgagacttaactttcttgccacaaaggttacatgatatgtgaacattataaaaatatgtgtgtatgaacacatgactattggctgataaccttggcttcttttctgattgagtaaagaaaaaagaaagcacctcatatagtaataaaaaagtttataagttttactcatcaataacagaaaacatctttttttttggaaaataaatgaatttagttgattacttaaaatcaaaagcttgagaaatttggcattattttttaattatatgaatatttatttaaacaagtccggaaatactattcattcatatttttgcatccctggtttttagtgcctaaaaactgagaattttgtc

SEQ ID NO: 330992 - DNA, 636 bp, Homo sapiens
taactatatacaaaacgaggtaaaaaatgaataaataattttactctcrttagacataaccattttgatgtctgtagtgtttatcaagtctgaccgctttaatgaccttaaggtaaaggtttcgacagtgtactgtaattgactaacacgcataatagtagaagagcaaagcaaggggtagaagtagcattcaaaatcgctaaatataatattttttatcctaaaaacaacatacttcttatatagtgggctgcagttaaagaggatttagggatattctctgttttgaaataaaattggaaaaaaaattagagtgaccattgaaaaggtcaggataatggcttttttgaattgtatatattttacaaagtggaaagtcaggaagacattaatagtgatacaataaatttgttattgagaatggtctacataaaatttataaccatgaaaaatagcattttttaatgacagattgaataaatgtgttagatgttaaggacatatttatcatgctctaaaaaaagtttaatttaaatatttttacatatttacatatttctttctcaattgaattttagcataaaactgaattatacgtaatatagagagaaggaattcatttgagggcaggagagg

SEQ ID NO: 330993 - DNA, 636 bp, Homo sapiens
taactatatacaaaacgaggtaaaaaatgaataaataattttactctcattagacataaccattttgatgtctgtagtgtttatcaagtctgaccgctttaatgaccttaaggtaaaggtttcgacagtgtactgtaattgactaacacgcataatagtagaagagcaaagcaaggggtagaagtagcattcaaaatcgctaaatataatattttttatcctaaaaacaacatacttcttatatagtgggctgcagttaaagaggatttagggatattctctgttttgaaataaaattggaaaaaaaattagartgaccattgaaaaggtcaggataatggcttttttgaattgtatatattttacaaagtggaaagtcaggaagacattaatagtgatacaataaatttgttattgagaatggtctacataaaatttataaccatgaaaaatagcattttttaatgacagattgaataaatgtgttagatgttaaggacatatttatcatgctctaaaaaaagtttaatttaaatatttttacatatttacatatttctttctcaattgaattttagcataaaactgaattatacgtaatatagagagaaggaattcatttgagggcaggagagg

SEQ ID NO: 330994 - DNA, 595 bp, Homo sapiens
aggacagctttgactgtacctagctctactgggctgctgataaagacatacccaagaccgggcaatttacaaaagaaataagtttaatgtactcwtagttccacgtggctggggaggcctcacaatcatgatagaaggtaaaagtcacgtctcacatggtggcacacaagagaagaatgagagccaagagaaaggagcttataaaactgtcagatcttctgtgacttattcattaccaggagaacagtatgggggaaaccgcccccatgattcagttatctcccactgggtccctcccacaatccaatggaattatgggagctacattattatatttttgcttatagtccattgttcaaacaaagcaagccacaaaaccgaggcacaagtcaaaggaaatgaggaggaaagggattatattcaactctttactgagaagcactgcaaagtcacatggctacaggcttttatatattaaacatttattgctattacaaagagagagtaaaaatttgagaataacttaacaggcaacaatttccccccaaatagaataatttagaggcaaagatacaaattaagtaattatcgtgat

SEQ ID NO: 330995 - DNA, 628 bp, Homo sapiens
agtaatttgccgggaagctacatcatcaatattaaatggataatacattaagtataaaataatagttttattatactgcttaatattttcatagttttctacaaaactatgtagagtttgaggttagatagcaggtattatgcatgtaatacagtctaaatttgtgggattayttatatatactgaacatacaaaatgtgatattttgatatatgtgtacattttgaaatgactaccacaatcaagctaattaacatgtccatcaccacaaatactaacctttttttgtttagtgagcacacttgagatctactctccttacaaatttcaagtatgcaatacacttggatgatttaaatgttttattttctctttaaataacagcacctcttctagatgaaatttatatggctccttgaatataagttattatattataaaagcttaatacaattattaactttaatgaaaataatgatatcattaaaatagacaataccttttatataatttttctcttatttaatgcttaattgaaaataaaataaaacaacatgcatggatagaatttgatgatgattcaacaatctatttattaagtcatttattatttcagcatgttgtttca

SEQ ID NO: 330996 - DNA, 628 bp, Homo sapiens
agtaatttgccgggaagctacatcatcaatattaaatggataatacattaagtataaaataatagttttattatactgcttaatattttcatagttttctacaaaactatgtagagtttgaggttagatagcaggtattatgcatgtaatacagtctaaatttgtgggattatttatatatactgaacatacaaaatgtgatattttgatatatgtgtacattttgaaatgactaccacaatcaagctaattaacatgtccatcaccacaaatactaacctttttttgtttagtgagcacacttgagatctactctccttacaaatttcaagtatgcaatacacttggatgatttaaatgttttattttctmtttaaataacagcacctcttctagatgaaatttatatggctccttgaatataagttattatattataaaagcttaatacaattattaactttaatgaaaataatgatatcattaaaatagacaataccttttatataatttttctcttatttaatgcttaattgaaaataaaataaaacaacatgcatggatagaatttgatgatgattcaacaatctatttattaagtcatttattatttcagcatgttgtttca

SEQ ID NO: 330997 - DNA, 595 bp, Homo sapiens
aggacagctttgactgtacctagctctactgggctgctgataaagacatacccaagaccgggcaatttacaaaagaaataagtttaatgtactcttagttccacgtggctggggaggcctcacaatcatgatagaaggtaaaagtcacgtctcacatggtggcacacaagagaagaatgagagccaagagaaaggagcttataaaactgtcagatcttctgtgacttattcattaccaggagaacagtatgggggaaaccgcccccatgattcagttatctcccactgggtccctcccacaatmcaatggaattatgggagctacattattatatttttgcttatagtccattgttcaaacaaagcaagccacaaaaccgaggcacaagtcaaaggaaatgaggaggaaagggattatattcaactctttactgagaagcactgcaaagtcacatggctacaggcttttatatattaaacatttattgctattacaaagagagagtaaaaatttgagaataacttaacaggcaacaatttccccccaaatagaataatttagaggcaaagatacaaattaagtaattatcgtgat

SEQ ID NO: 330998 - DNA, 578 bp, Homo sapiens
tctaattaaaaagaaaaaaaatattcttgcaatcaaaaaaagttgtcctctgtgtcttaaacagtgatttttcaaccaggggcaattttatacccatgaagctatttggctaaatttaaagacatttgtctgtgtcacaatggacatggagtgcgtagatgctacttgaatctagtgagccgagaccaggaatgctgctgaacatcctacagtatgcaggataggcccctatggcaaataattatttggctgaaaaatctcaatagtgccaagtttgagaaaccctggtctaaggtaaatgatatgcttataccttgccaataattgcaagtaggagaaagatatggtcttaaatataaacctatctgagtgggattaactctcttacatcatgagaaagcrggagatgtggccacaaaaacaccgagttcagctttgccagaaatgattattgttcaataggcatctactacaatacttttccatctttactttttgagtatgtataatttttctatgtttttatggtttaaaatatgtacactctatgctgtaatcatttccatagttgtttttgg

SEQ ID NO: 330999 - DNA, 578 bp, Homo sapiens
tctaattaaaaagaaaaaaaatattcttgcaatcaaaaaaagttgtcctctgtgtcttaaacagtgatttttcaaccaggggcaattttatacccatgaagctatttggctaaatttaaagacatttgtctgtgtcacaatggacatggagtgcgtagatgctacttgaatctagtgagccgagaccaggaatgctgctgaacatcctacagtatgcaggataggcccctatggcaaataattatttggctgaaaaatctcaatagtgccaagtttgagaaaccctggtctaaggtaaatgatatgcttataccttgccaataattgcaagtaggagaaagatatggtcttaaatataaacctatctgagtgggattaactctcttacatcatgagaaagcaggagatgtggccacaaaaacaccgagttcagctttgccagaaatgattattgttcaataggcatctactacaatacttttccatctttactttttgagtatrtataatttttctatgtttttatggtttaaaatatgtacactctatgctgtaatcatttccatagttgtttttgg

SEQ ID NO: 331000 - DNA, 549 bp, Homo sapiens
aaggagagcacttgctgcctgtggaagagcaagagagggagagaaaccaatagtgaacaagatttcagccaaatgtttgaggrgttcgctcaatgtcgtgtttgagctagcgtaggaagaagctgcagacactgaggttcctactctctgggatcttctctgcagacctttttggatccagtgagaaagattgtgaaaaaagattgcttctcttagaagtaaaagcctggggagaggcttttcctgtcagaaggacaggaagtttttcccataaccttgttccccacagaataaaggcaaatggcctgctgtagcaaagaagaaagataaaaaatgtaccccactacccctgaagaggatcaaggcattctctaccttctagacttgagatagaaggcagagtctggctgcctgccaagcgtactcgctataaggagaatgggcaacattactgaacaagcttcattcccaacacccaaggatttagggctacctaaaactcacacttcagtgggaaaggggaaacaattccgaccaagagaacattaa

SEQ ID NO: 331001 - DNA, 606 bp, Homo sapiens
ttaactatttaagagcttacatcctccatgtatatatgtatgtatacacagatggtcggcaacttaccatagtttcataagctttagactccatccatgagttttttttttaactttatgatggcataaaaatggtatgtattgagcagaaattttactccagtattcaataaattacatgagatattcaacacttaactataaaatagtctttctgttggatgtttttgtccaaycataggctaatgtaagtgttctgagtacatttaaggtagtataaactaagccatgatgtttggtcagttaggtgtactaaatgcattttcaacttaaaatattttcaacttgtaatggatttattaggaggaaccctgttgtaagtcgaagagcatctgtacatgtatatgtctatatctcctttgcaaatgactacattcatatggttattgtataactaaccttactatctttggtcagttactttcccacatttggaaaggggagggagcattctgtaagggattgccccctgtgatgaatgactctatgctctcctgttggcaacaatcctcagccttaggttgtgttgaatgcataaacgtgcac

SEQ ID NO: 331002 - DNA, 595 bp, Homo sapiens
aggacagctttgactgtacctagctctactgggctgctgataaagacatacccaagaccgggcaatttacaaaagaaataagtttaatgtactcttagttccacgtggctggggaggcctcacaatcatgatagaaggtaaaagtcacgtctcacatggtggcacacaagagaagaatgagagccaagagaaaggagcttataaaactgtcagatcttctgtgacttattcattaccaggagaacagtatgggggaaaccgcccccatgattcagttatctcccactgggtccctcccacaatccaatggaattatgggagctacattattatatttttgcttatagtccattgttcaaacaaagcaagccacaaaaccgaggcacaagtcaaaggaaatgaggaggaaagggattatattcaactctttactgagaagcactgcaaagtcacatggctacagrcttttatatattaaacatttattgctattacaaagagagagtaaaaatttgagaataacttaacaggcaacaatttccccccaaatagaataatttagaggcaaagatacaaattaagtaattatcgtgat

SEQ ID NO: 331003 - DNA, 610 bp, Homo sapiens
gcagcctttaataagctcatagattatgcatggctgccattttaacaaggttttatgtaatggttcagatcccattaggaaaataaaagacaatttatcttattcttgttaatttgagaattgagaagaaattttggctgattgcttttctaggatatgtcattccttacatgagatttaaaacttttgtatattgagaaatgtaaaccattcactatttagtttccttatctcatcactccaaaatatattacctatgtcacatctctaattaatcacaataaaatgggattgataaagtaagcattatttgatggttctacctacagcacagaagatttttctatctattcaatttttctgtaatttcctaaggcaaatatcttctgtagaatacattaggaatcaagcaaataatcacacattttgaaatgtacactctagtttaaatgactataaaatattttagggtagtgcttctttaaaaatgtcaataaaaggrataattccttcatatcatacacttttttatgaaaatttttaaattttattcccagtttgtttgaaaatttctcatttgaaaaacgaaggttgtgaaacttagtgttct

SEQ ID NO: 331004 - DNA, 598 bp, Homo sapiens
ctggtctcaaactcctagactcaagtgatccacccacctcagcctccccaagtattgggattacaggcatgagccactgcacccagcctgcatttattcttgatactttacaattcatgaggaagatttacaccaaccttcacttttccctcttccagctgagcctggcgaaatcttgctaaggccgtcctaccagcgatataaaagataaaagactccattagatcctgctcatacagacttctcattacccatgttcctgtatggggtagatctgcttatgaccatatttaatgtcattcatatataaataytgtaattaagaaaccacagaatagttagggatttccatgttctcaggagtaggaattatgaggcaatttgtattcctgaacacccaagaatctattttacttacactacacataaggactgtgggaaactctacttatcagaccactgtgataagcaatacatccaggtgttaaaagactaacatcatggtgtgttccctggctgtcactctcacaacccctgcaccaaccacaggtgaacaaatgttcatccagtgtttaagttctggaaactgtgagaaaac

SEQ ID NO: 331005 - DNA, 628 bp, Homo sapiens
tggcaaatacccacggcaggggccgtgagggggcaggggttcattcggagaagttaaacttggactcccggagctcatgcttggaggcgctttggaaccgtttaccattcatttttcctctcagggacagcatttgccacccagtggaaacagtgtgaaattacaggacattttttgccgtggggagagcaaattaaggtcaatggaatgattttcttttttttgccagaagttgagagagaggacattagttagaatttcccagaaaacatttttaatgtgttgcaggccatctgaacaatcccaaagaagctcttayagaaaaaaggctaaaggagagtggaagatgtgaagtctatgcataaatgttcgattctcctattttttgaaaccttgtaggatgactgcccctctccgcctctctatgcatctaggcctggctttgtgggcatggggctggggtagctgcaggggactccctgctcagaagggccctgtgcctggggttgtaagctctgtggctgctgtcttgaaattcataacaattttatctttaaatttgtattttgtaagggaagtctgatgggactgtaggcatgcatgggggacttggagcctgggccacaag

SEQ ID NO: 331006 - DNA, 501 bp, Homo sapiens
atcttggcctcatcacaaaaactctgcctagactcctcatttttcctcttgccccataccaatccccaaaagaatctaattttctaaaacaaggaaagaaggatatgaaagagaagcaaagacagataactttttcctaaagaccctgatcttaacttgtttaaagtttgtccaaaaagaatcttgggatcatgagacatccttggttaaaaagggcctcagaggtgttctggtccaacaactcagctaatttaacacccctaatgttgactgaggccttatgggtaatagtcataattattatgtatttatacccattggggagtcaagaaggatttagggtaactggaatcacaataacaatagctcccaactagcattctgatgttttytacaacatctcaacccagcagtttaatagtgcaaacatacatacccaagcattaaatgcccttccatatgtggacctgtctgactagagtcagaacctcaggaccctcc

SEQ ID NO: 331007 - DNA, 605 bp, Homo sapiens
ccaaggctagaccattagaatctgattttgaatcaaacttgaataaagcatttttaacttccacttaatataaacatgatgttttgcctctgctcaaactcagatctttcttttctttcaaaagtcttcatggattaactctcaatagccctattcacaaatattcaacacttgagcatctgagaacaccatgtcctatgatgcgtatggatacaagtttactataaggcttcattacacaaatttagatttgtyttattacaatgccaattctttaagagactggagtctttcctttcctttgtgcctaccctaaaaattacttaatggggaaggagggagcaagtgagaaaagaaggcaagtcagtgtgatactctgggtttttgacagctatcatcattcttcccctgctccctagaaagataaaaaccagcactcctgaaacaccttcattattcccaaggctaaagactgtccaggaacagagtgtcagggtttcaaggttgggggagaattggttggaatagccttctggttcctcctcacagagctaacctgtaatttttttaaaaaactcaagactccatagttcctttatatgttt

SEQ ID NO: 331008 - DNA, 582 bp, Homo sapiens
gtaagcagtttcataggaagactcagagacaaagcctaaaataccaactctcaagagaccagaggacaggagtgctgtgtcactcaacaaagccacatccactgaagaccaaggaccaggagtacagggctccatggggaagggcaacttagaaagttttggatttgctgcagatttgttgacttttcaagagggcactgatgtattcggtccctctctctgasagagaagacaccccctctcctacttgataactgaatgatgccatagttactacctgatgtgcagttccttcaaatagagaggaagtacactggccacaatctctgaacaacagacatagaggactggcttacaggggaagctaaatttttcactttatcatggagcactaaacctctgctattgtatttggcaacagaaatgaggatcaagattaaacaatgagtgctgagtctcaatccgtttggggaacctgctatagtagcggaggtttcggtaatttttaaacgtaatgcataaagattgattctgagaagatattgtgtgttgcactcttaaagatactaaaaaatgaagcat

SEQ ID NO: 331009 - DNA, 582 bp, Homo sapiens
gtaagcagtttcataggaagactcagagacaaagcctaaaataccaactctcaagagaccagaggacaggagtgctgtgtcactcaacaaagccacatccactgaagaccaaggaccaggagtacagggctccatggggaagggcaacttagaaagttttggatttgctgcagatttgttgacttttcaagagggcactgatgtattcggtccctctctctgagagagaagacaccccctctcctacttgataactgaatgatgccatagttactacctgatgtgcagttccttcaaatagagaggaagtacactggccacaatctctgaacaacagacatagaggactggcttacaggggaagctaaatttttcactttatcatggagcactaaacctctgctattgtatttggcaacagaaatgaggatcaagattaaacaatgagtgctgagtctcaatccrtttggggaacctgctatagtagcggaggtttcggtaatttttaaacgtaatgcataaagattgattctgagaagatattgtgtgttgcactcttaaagatactaaaaaatgaagcat

SEQ ID NO: 331010 - DNA, 567 bp, Homo sapiens
tgtccatcaacagatgaatggaagaacaaaacgtggtgtaacttcacaacagtattctattcagccataagaaagaatgaaatcctgtcatttgcagccaacatggattagcctgtaggacatacttaaagtgaaaaaagccaggcacagaaagacaaatactacatgattgcactcatgtggaatccaaaaaagcagatcttacagaagtagagagtagaatcatgattactagaggtgaggaagggtagcagggaggagagataggaaaagtcaatcaagagggacaaagttgcagttaagaggaatgaagtatggcattcaatwtcgcacagggtgactatagttaataatgataataaattgtatatttaaaatagctagaagagaggatttggaatgtcctcaccatcgagaaatgataaatttctaagataatggatatgctaattatgctaattttattactgtacattatatacatgtatcaaaacatgccactgtataccataaatgtacaattttttttctttttgagacaaagtctcattctgtcgcccaggctgg

SEQ ID NO: 331011 - DNA, 576 bp, Homo sapiens
aacctctttgcttcacagattactcagtcccagatattctttatagccatgcaaaacagacaaacacatcagtattcaaaacattcactagctaccttgcttataattctatcataattatgtattttatagtttcattttccttgatctttatactttcttttctcaccaaaagtggtattaaattttcattaaatttaaaaacagtttaaaattataatattaaaaacttatatgttaagaaagacacatttttcaaattttcaatttttttttctccaatgcatgagtaaaacattcagcttacatatgggggcatctctccgagaacttagaatttcagagtatcargtagtaaaatgttgaaaagttttgaacataatctgctaatttaactgataagggaatggtagccaaaatatcaaagtgagtgaaacacagttatataattaatacatggcaagactcaaatttgcttttctgaccataagttcaatattctgttctttggtattgtttaatgcttcctagaaactttcttcagatagaaggtatttctttgatctcccatttcta

SEQ ID NO: 331012 - DNA, 587 bp, Homo sapiens
cttagaattttgtcatatttgaatcaaaatcctctccaaggattacaacatcagaaattattttagaatgtttcagatactgtgtatagcatacgttatctgtcattcaatccataagatatcaaaatgaagtaaataacattagttttgctttcattttataggtgagagtgtggagaggttaaatgctccattcaatgctgtacagcttgtaagtttactgccataatttgaaccaagaccggttgctgctgtctttgagctattctgtctccccwctaaaaaggcagaaaacctcctgtaaaaaaagggaagactgttctaaaatttctaaattgcatttaactacacagaatctttaggctcttctaggaattacgacaaaatgccaaagaaaagctggaaattgtaaataaaccatgctgagcttagggacaggtcgtgagataagtaataaattcttatttaaagtctaattttgacacacacttaccttatactcttcgtatcatcccctgcaatccacctcaccattacaagagaatggactgtctcttgcggagtcataatatgaaacttccctatgc

SEQ ID NO: 331013 - DNA, 622 bp, Homo sapiens
tttccgtgtctctgaagaaccctgacaaatacaaaatctctaaagataacctgaaatttgaataatagcaaagtgcacgtagatccttccactggaaagaggtgagatggctctgggacatagtacaggatctgggaggcatgttgaccaagactcacagaagatgggactgatttttttggactttgagttatgaaaatggctacattttttgaaacttactatttatttacaattctatgattcatttcttttatgcctcaatgatatggtttagctttttgtcccyatccaaatctcatccccaaatttaatccccacctgtcgagggagagacctggtgggaggggattggataatagaatcaggcttcccccttgctgttctcatgacagtgagggaattctcacaagatttgatggtttagaagtgtggcactttcgcccgcactcctgttgctgccatgtaagacatgccttgcttccccttcaccttctgccgtgattgtaagttttctgaggcttcctcagccatgtggaactgtaagtcaattttattaaacctcttttttaaataaattacctagtcttggacagtacttcatagcagtgtgagaactgac

SEQ ID NO: 331014 - DNA, 605 bp, Homo sapiens
ggtagagaaaaaacggcctatcactgggagagagaaaagaaaaactgttgaagtcaagattctaaactgttgctaatagaaatgactaaccactggaggaagggaagagaattctgtgccatgtaagctctaacatagayacaaggcaacatctggatgacctgggtagaaaaagagatgaatgctgagaaaatttaaccccaggtgcacaggacttacctaagactgcggtcaaagacaattgagatatctctatattccccactatcagcctagcaagcactgagtaataataagcaaaaaataaagtattactatgtgacagggcaagacaatggatataaacttcctctgaggagaaaacttacaaggacaccttaaaccagagggatgggaggggggaagtatgaataatttaaaattatatgctctgaagacatcatcttaatcacagagcatcactggagaactttgaagccagtagaatgttaaagataaccatgttaaaatcaaagcaaaaaaaaaaaacaataatttttaaaaactcaacttgagataaaattgtttccaatctcttctaccatgtgtgcaagtacatgtgtgtg

SEQ ID NO: 331015 - DNA, 622 bp, Homo sapiens
catgcccacagcagggtggagcaccaagcagcgtgttggaatccctgattctaggactaaagtcttagatggcatttctggacctgccctgggccagacgggagcccacttcccagaaggtgagtcccaggccaggcagcattcaggacaagctaacttaagagaccttgggccttaaggaaatattggcagtattctggaagtactctttgtgacctggggtggtggtgactctggggtgaggctcccctgccattggaaaaaaacagggaagagtgggaaggactgcatcttgtggttggagtaccagctcagctgcaatacaatagaataccaggtagacttctacaatttttgactctagtccctgactactggactgtacttctggactcacccaggacctggtggacctcgccatcctgaagggaatgacacragccttgctgcctttaatatctactgatagtcgagtctcagggccttgagctaacataggtggtggcctgggagtggttacagcaggccttgggcaagacttagtgctgtgttggcttcagatcagactcagcacagttatagtgatggtggccacaggggtgcttgtgtcactccatcccca

SEQ ID NO: 331016 - DNA, 592 bp, Homo sapiens
tttcaataaagtttccaagaccattcaatgtggaaggaatagtcttatgactggatcaattacacacatatatgcaaattaaacccattttttaaaagatacctgatacgctttggctatttcccgacccaaatctcttcttgaattgttgctcccacaattcccacaagttatgggagaaaccctgtgagagataattgaatcatgsaggtggttttcctcatactgttctcatggtagtgaataagtctcatgagatctgatggttttataagaagtttccccttttgcttggccctcagtcttactgccaccaagtaagacatggcttttgccttccaccatgatcatgagaactccccagccacatggaactgtgagttcattaaacctcttttactttatgaagatcccagtgtcagatatgtctttctcagcagcatgaaaacaaactaatacaataaattggtaccagataatggggtgctgcttgtaaagatacctgaaaatgtggaagtgactttggaactgggtaacaggaagaggctggaacagttttaagggctcagaagaagactggaaaatgtgggaa

SEQ ID NO: 331017 - DNA, 578 bp, Homo sapiens
atccaggaaaacatggcctcaacaaatgaactaaataaggcattagggaccaatccttgagaaacagaaataagtgacatttcccatagataattcaaaatagctgttttgaggaaactcaaagaaatgtatgataatacaggaaaggaattcagaatcctatcagataawtttaataaacagattgaaataattaaatataatcaagcagaaattctaaagctgaaaaatgcaatttgcatactagaaaaagaattagagtccttgaatagaagaattgatcaagcaaaagaaagaattagtgaacttgaagataggttatttgaaaatacacagtcgaagagaccaaaagaaaaagaataaaaagcaatgaagcatgcctacagcatgtagaaaatagcttcaaaagggcagatctgcaacttattggccttaaagaggaggtagagaaagagataggagtagaaagttcattcaaagggataataacagagaacttcccaaatctagagtaagatatcaatatcaaagtacaagaacactacagaataccaagcagatttagcttgaaaaagcat

SEQ ID NO: 331018 - DNA, 574 bp, Homo sapiens
attatagaaaaagtcccaacccctgacctacaatgtacttttattccttcaactacctaatctctacttacattcagatcgagatgcattagttctacatgaaaacaaaagaatatgcatactgcccattgaaatggggttaccaccacttctctaagcaagcctttttttcctgaacagtcatactctttaagcatacatttattctatagaaatttcctgtttatttttctgtctttgctgtattctcctttgtaagagatacttttcaattttctatctgcatcacaaaaacctagagcatagcaagcagataatattgtttgcagacttgaaatggcaggaatmgtgctggcaaatgaagatcccaccattgttatctgcctaaagtcaaagggatgacaaagtagtaggaaaaatgttgtgattacaatttcttacaatacagccttataatggcactagttgaaataacgagtaaaaaaacaatggaagttaataaagagaaaaaatctgattaccagaaagtaagtctgtcaggaaagttttgttctaagaggaaaaaatagatttg

SEQ ID NO: 331019 - DNA, 612 bp, Homo sapiens
ttccacaactggtactgtgatgattctgtgacttttatgtcagtgtcatctgtttggtgtgtgggmtaaggagctagggagcgggcatctttggctatacttacttgcatggtctatgtaagtgataaaagtgtctgaatctaaaaaggccattgtgtttttactggctgaatcagtcaggccttgaccttggccttgtctgaagtgtgcttcccagaacctcagccaccgctcctcttctcatggaagcaactacactgacattgattttgctgtgatgctgagagggattaaatttcccagatacccctgttttcagataactgtaaagaaaagctatcaaccagtgcagacagcctggctctcaaatccgaaactcgtgtgtatccctctttgaatcagtttattctcatgcttaccttatcgaaggtcccttcactcgactagaaagccatgtgtgtgatcaggagctcacccagcctccactccccatgtctctctgaggcatcatgggaagatgggcaaaacacaccttttctttctttgccgactcttggcttctaattgtcctttctctgagaccgtgcattgcagttacggaaattgccctga

SEQ ID NO: 331020 - DNA, 612 bp, Homo sapiens
ttccacaactggtactgtgatgattctgtgacttttatgtcagtgtcatctgtttggtgtgtgggctaaggagctagggagcgggcatctttggctatacttacttgcatggtctatgtaagtgataaaagtgtctgaatctaaaaaggccattgtgtttttactggctgaatcagtcaggccttgaccttggccttgtctgaagtgtgcttcccagaacctcagccaccgctcctcttctcatggaagcaactacactgacattgattttgctgtgatgctgagagggattaaatttcccagatacccctgttttcagataactgtaaagaaaagctatcaaccagtgcagacagcctggctctcaaatccgaaactcgtgtgtatccctctttgaatcagtttrttctcatgcttaccttatcgaaggtcccttcactcgactagaaagccatgtgtgtgatcaggagctcacccagcctccactccccatgtctctctgaggcatcatgggaagatgggcaaaacacaccttttctttctttgccgactcttggcttctaattgtcctttctctgagaccgtgcattgcagttacggaaattgccctga

SEQ ID NO: 331021 - DNA, 621 bp, Homo sapiens
aaatttcctcatgtcatgttaaggaaattattggttttgaatttttgcttttgaatcattgcttttgaatttttcagaatctaaatagtagggcatttgccacttcctctaatatatttgtctcaaagatgaaaaaacaattctgatccatagtagtgaagtcatttaaataacaaggttgtttctaattgtattatatacttatttacattccaagtttatttccccaaatttgaaagtgacatataattacacataattttaaaacttttgaaaaatttaataacatgttaactgaaagatgtagaaagtaaatctaatatagattaaaaaayacaaatctggagaaacataatcagttacaagagaagtaaagaaagtacacggcacagaattaagcctgtgatttaaactagctgcaaagtcaggatccaaattcctgttatgcaacaaatcagctgtaaacttgagaaaaatattttttctttctctgccctatgtcattcatttgtaaaatcatctatctgccaggaatgtagtaaagattaaattaattatgagatataaattacttagaaaaacacatagcacatattaaataatgattaaaggttatctgtt

SEQ ID NO: 331022 - DNA, 598 bp, Homo sapiens
tctttttatatttctgtgagaatagactggtggctatccgtatatgaaagagcctaaggtggtcactttcccagcaagtggctggatggtggcctagaagaatagtgccgtggtgaggggtcagccttagtgcttattgctatcaggttggctgtttggcaatggaaatagctagattatccatgaaaagtgagaatcctctctgttgggcccattcatattttccatgtctactacagtgaccacttcttttgcgtgcctattgtgttaattctgaagcagtcaacggcagaggctgatggatgtcaacctaccagtcattttgtctagttggttatttaattcaacawctgagacaaaatgttctttggtatctgttaatatgttataaaaagatcatcatagtttgtgcccactcccatgtgtctatcttcatgcctctaaccctgagttctttgcctcatattttccaatccttttctttctaagcctctgaacaactagccaggccttaccctctggccgtaaggccatagacttgctaataccatggtccttttttgtgtgtataaagtacatgataagatgctgctcctga

SEQ ID NO: 331023 - DNA, 406 bp, Homo sapiens
tgcacccattttcttattaagactcataaaataaaaagaagtatatagcctaatgtaatattgatggtggtggcagcccatctgtagcagctgctgccataatgcctgctgcagtgagggaggtttggccagggctgtctactctgtggagcctgtgggagccaggaacaggcaggagccatgccaccttctgagttaaaggggcaggatccctgccctcctgggagcagccatagctgcccagctgcagctgcagacccaggcattcttgtggtctcyggggcccaggaagttcccttgcccccagtctcggaagtgcctgctcctgttgcctggcctctccctgcacctggtgtccactccagttttggagcaaagtggtggccgagcccaggcactgttgcta

SEQ ID NO: 331024 - DNA, 576 bp, Homo sapiens
tgtgacattctctttgaggctttgtagttcttggaatmtccaagcctctggcgccaccatgttctccttgtccagccatgggtgccctcagtggaagtcacatgcaatacatatggcccagccacggccatgcatggagctggcacttgtgctcatacctggaactgcctgccctgccgcagcagtcagagtgccttgctgtgtgcagtggctggaccccacgctcattcacccacacacccctctccactctgtgcctggctcgcacttggcagatgtgggatctggactggtaatgggaactgagcttagcctgtcgggccaagtgggtgggatgagcccactgggcatgagcaatacttaggcagaaggtgcagctggccacagaggtttccagctggagaagcggcaccctatgtatcctgtgacaatctttcccttcctctgttcacttttaactcccttctaacaaagtgattagcaagtcttccaccacaaagttagattataattcaggaatgccttcaattttctcattttcttgctgtgtactcatttcttcctccatcaatagtg

SEQ ID NO: 331025 - DNA, 576 bp, Homo sapiens
tgtgacattctctttgaggctttgtagttcttggaatctccaagcctctggcgccaccatgttctccttgtccagccatgggtgycctcagtggaagtcacatgcaatacatatggcccagccacggccatgcatggagctggcacttgtgctcatacctggaactgcctgccctgccgcagcagtcagagtgccttgctgtgtgcagtggctggaccccacgctcattcacccacacacccctctccactctgtgcctggctcgcacttggcagatgtgggatctggactggtaatgggaactgagcttagcctgtcgggccaagtgggtgggatgagcccactgggcatgagcaatacttaggcagaaggtgcagctggccacagaggtttccagctggagaagcggcaccctatgtatcctgtgacaatctttcccttcctctgttcacttttaactcccttctaacaaagtgattagcaagtcttccaccacaaagttagattataattcaggaatgccttcaattttctcattttcttgctgtgtactcatttcttcctccatcaatagtg

SEQ ID NO: 331026 - DNA, 583 bp, Homo sapiens
aacctgaagatgtgactgaattactgcaatctcaggataacaatttaatcactgaggaattgcttcttatgaatgagccacaaaaatgtttctttgagatgaaatctactcctggtgaagatgctgtgaacattgctgaacatgatgcatttagaatattacacaacttatttgataagcagtggtaggatttgagaggattgactccagtgttgaaaaaagttctactrtgggtaaaatgccatcaaacagcgtggcattttacaaaaaaaaaaaccaagggaaaaaaaacagtcaatcgatgcagctgacttcattgttgtcttattgtatgaaattgccacagccaccccaaccctcagcaactaccatcttgatcagccagcagccactgaaatccagtcaaaagcttccctcaacaaaaagactatgacttgctgaaggctcagacaatagcatattttagtaacaagtatttttgaattaagtactttttttactattgacaaagtagtaaaaatgtagtggtagactacattatagtgcaaatataacctttatatgaactggaaaacaaaaaata

SEQ ID NO: 331027 - DNA, 617 bp, Homo sapiens
gtaacttaggtacttatcgctaaacaaaataagtccgtttgaaaaggctacctaccatataattctaacaataagacattttggaaaaagcaaaactgtggagacaggagaaagatcaggaatttgtaaggttggagagaagggagggatgaataggtagatcacagaggatttttaagacagtgaaactactctccatgattaaaaagaaaaaagtggtggaaaaatgtcattataaattgttccaaacccacagaatgcacaattccaagaatgaaccctaatgtaaagtacagattttgagtgataatgatgtgtcaatataggttcwttaattgtaacaattgtagcactctgttgagggatgttgttaagggcggagaccctgtgtgtgtggaaggcagggaatatatgggaaatctttaccttcctctccaacttgaatcacaagcaattatgcatgaaatttgagaacataaagagaatataaagtcacattatgatacctcctgccaattgcagatataatgaacatgaaatgtccaatattaaatttgtttttgaatgtcttttatttggatattgttttgcatttcctctactccatttaagccaaa

SEQ ID NO: 331028 - DNA, 632 bp, Homo sapiens
ctcatttaccattctgaagtatttagggcccttgagaattatgccaaatctacgctgcctrtcctgtagaaatggaacaacaaagcctgaatgacagcacgtctgtttatagcctggtttcctgagtatgttgagtccacagctgagacttaagcagctgagactgcttagaaaaaaaaaattatttcataatattacctctcattgaccatgtatcaggtcacccaagagctctgatggagacgtacaaggggattaatgatgttttcatgcctattaacacaacatccattctgcagcccatggatcaaaaagacattttatattcgattattcttgtttaagaaatacattttgtaagattatagctgccacagatactgattcctctgatggatctgggaaaagtaaattgaaaacctcctggacagaatttatcattgtagatgcctttaattgtaattatgtaattacaattgtaattacatttgtaattcatgggaggaagtcaaaatatctacattaacaggcatttggaagaagttgactccagccttcgctgatgactttgagggatcaggacttcaagggaagacaaaactacatatgtggcagaaatagcaagttagtta

SEQ ID NO: 331029 - DNA, 612 bp, Homo sapiens
ctgttctcgtgatagtgagtgagttctcacatctcatggttttgtatttggaagttcctccttttttttcttttccatgttgccttgtaaataaggtgcctgcttccccttccaccataattgtaaatttcctgagtccaccccagccatgcagaattgtgagtcaattcaaccacctttgtttgtaaacatgtccagaacatgtcacagactttcccagcagcccctcccatcacaggcccagaggggtagaagggaaaaatcgttttgtgggcagggcccagggccctgctgctgtgttcagcctcaggacttggtgctctatatcccagctgctccagctccagccatgactaaaaggggccatggcacagctcaggccattgcttcagagggtgcaaaccccaagccttgatggctttcacatgatgacggcctgtgggtgcacagaagtcaagaattgaggtttggaaaaccctgcctggatttcagaggttatatcraaacacctggatgtccaggccaaagtttactgcagggacagagtcttcatggagaacctctgctagggcagtgtagaagggaaatatggggttggagcccccacacaga

SEQ ID NO: 331030 - DNA, 582 bp, Homo sapiens
cccttctgccatgattgtaagtttcttgaggcctccccagccatgaggaactgtgagccaattaaacctcatttgtttatattaatacattaccyagtctcaaatatttctttatagcagtgtgacaacagactaatacagatccaagacagtgtgcatagggatgaaaatagttcagtgaaacacaaaagagagtagtcaaaaagacactgtcatatatgagcatctgcagtatgacatagacagaagtttatgttgctgaagaacatatactgttcatgaatgagacagagaaaacaagtttacccaccagattggaaaaaaaagtaaatggtattacaatctcaattgttgatggtatgtggaacaatgggagtatgcacacactgctgagaataaattggtattgcatttagaaaatcaatttggcattacattatctcataaaattaaatggacacatactttattatccagcaatagcatttcttggaagatagtcttgtacagagaaagccatgtactatctgtattgtccacaataaaaaaagaaataataaccagggaataacatgggaaaat

SEQ ID NO: 331031 - DNA, 627 bp, Homo sapiens
tgtctatatagtgaaacttcctaaaagatacagatagtgtctttctctagagcgaagagatttgtttgctggacacaagtaaaaaagttggttttcctctgaggcaaatgttgggcaggtttgagtgtatcgcctgatagaagattggcattttctgaaactgaaattctttgtatttgagaaaaacattgcaagggcttcatccagccagaccaatctgaatcattgtcatgagacccgagaggcacagagagcaagagcaaacatgaaactcatggcatctgttttgctttgaattaaaaaacaacaacaaaaaatcacttttatatctgatgtctgatgcaggggacttgggttagctctgaaagaagaataaaatctcagcctatgtagtttgtgacacctactatgtagcaggcatatttttaggcattagagaacatgagtgaataaaatagaaaatgatttctgctttactaaaatttgcactctagggatgcaaaattgtaatttctagggttaaaaaatttaaaaaaataattaaaataaataaaatacaaagtaagtaaatatttaaaatyttaacaaaacaaaattaagcctggggccaaattttgtatatggtag

SEQ ID NO: 331032 - DNA, 596 bp, Homo sapiens
tttctagggttaaaaaatttaaaaaaataattaaaataaataaaatacaaagtaagtaaatatttaaaatcttaacaaaacaaaattaagcctggggccaaattttgtatatggtagttgcctgagaaaatgtaacagtgggctaaggctggaaagatgctctttagtacacaacgatggtaaatacattatgagtgcagtctaaaatgaataaattagtgtatattttgtagccgactagagaccccttgtaggctcatattttgaaattattggtcataatgaagataaaaaaatggtaatcatttgtgtttcagggaaagtggtgtaattacaattgtagcattcactgtagaaaggggctaatataacattttaaaaataattgttagtctgaagttgacggaatcaggaaactagacagcgtagccacraagataaaactctggtcttgaaaatgagtagtatagaaactgataacatgaatgagagaggaaaacttatcaagaaggaacttcccttctagtttaggcaccttgagtttgagatgacagaaagaccaccaagtgtaagggctcatgagacagttgaaaatt

SEQ ID NO: 331033 - DNA, 606 bp, Homo sapiens
agcaaaatttattcttctgtatgtgtaatgttccaatgttaaaactaataataatagtatttaactataaktttctttattttcaacaagtcctttatttgttatcattgctgagtttggcagaatatttatgatgttctttcattcgttcagcttatatgaataagtggataaaatgatgagatcactcagtatgagcagggactatcacactggaatagcaatacaaatatttggtatctttgggaaaaaatctatttccacttcaatttttagatttttgatatagggataataataaaactggctataaacttatctaaaattgtataattgatttataagcaagtgggaaaaaaaagagaccgggagaatataatttaaagtttcaggactatctaaatagttgggaggaattcttcgctgtattgtttggtttagcatcaccaccttactgtatgaagcagtaacataaaaatgtatatgtttatctaaagtacatgtaaatccccaagtctctatctctccaacctaattctgtctaggtttatgaataacctctgagttcattagaaactactgatgtgtgcaaaataatttgatagt

SEQ ID NO: 331034 - DNA, 606 bp, Homo sapiens
agcaaaatttattcttctgtatgtgtaatgttccaatgttaaaactaataataatagtatttaactataattttctttattttcaacaagtcctttatttgttatcattgctgagtttggcagaatatttatgatgttctttcattcgttcagcttatatgaataagtggataaaatgatgagatcactcagtatgagcagggactatcacactggaatagcaatacaaatatttggtatctttgggaaaaaatctatttccacttcaatttttagatttttgatatagggataataataaaactggctataaacttatctaaaattgtataattgatttataagcaagtgggaaaaaaaagagaccgggagaatataatttaaagtttcaggactatctaaatagttgggaggaattcttcgctgtattgtttggtttagcatcaccaccttactrtatgaagcagtaacataaaaatgtatatgtttatctaaagtacatgtaaatccccaagtctctatctctccaacctaattctgtctaggtttatgaataacctctgagttcattagaaactactgatgtgtgcaaaataatttgatagt

SEQ ID NO: 331035 - DNA, 606 bp, Homo sapiens
agcaaaatttattcttctgtatgtgtaatgttccaatgttaaaactaataataatagtatttaactataattttctttattttcaacaagtcctttatttgttatcattgctgagtttggcagaatatttatgatgttctttcattcgttcagcttatatgaataagtggataaaatgatgagatcactcagtatgagcagggactatcacactggaatagcaatacaaatatttggtatctttgggaaaaaatctatttccacttcaatttttagatttttgatatagggataataataaaactggctataaacttatctaaaattgtataattgatttataagcaagtgggaaaaaaaagagaccgggagaatataatttaaagtttcaggactatctaaatagttgggaggaattcttcgctgtattgtttggtttagcatcaccaccttactgtatgaagcagtaacataaaaawgtatatgtttatctaaagtacatgtaaatccccaagtctctatctctccaacctaattctgtctaggtttatgaataacctctgagttcattagaaactactgatgtgtgcaaaataatttgatagt

SEQ ID NO: 331036 - DNA, 612 bp, Homo sapiens
acaagttagcataaaatttcaaggactgtcaatcaattctggatgtaaactattgccctatggtggcagtaagaaatataactcctgaattttatttctgtgaagatggagatggatgcagtaagaaatataactgctgaattttatttctgtgaagatggagatggatgctttatgtattattaggactaaaatgctagattttgaagcatgtgacaccacttaaaactaaaatattctaacaaactacaaactcccaataaattgggagttgagtatattctaarcactatctttgtgtgcaggtttttatttaattcttaaaatatctccatatccttggtattattatcacaatgtctaaatgaaaagaaagaaagaagggaaggataaaaaatgagggaagggataggcttaacagcatacaaaagaatcatggcataattgcaatataattcgttacatgaattaaaaatgcatattaattattcctggttgtatgttgcctaaaatatcactgttaactgtaatacacaatgtaagcaaatgcatatgtctatgttttttaagaattatagtgaacattctcatgtaaactccaacattaattgg

SEQ ID NO: 331037 - DNA, 616 bp, Homo sapiens
ggcataattgcaatataattcgttacatgaattaaaaatgcatattaattattcctggttgtatgttgcctaaaatatcactgttaactgtaatacacaatgtaagcaaatgcatatgtctatgttttttaagaattatagtgaacattctcatgtaaactccaacattaattggaaaatcctattttttaataaaaataggttttattcttgtatgatgtaaattataagtactttttttctctaccattactttcctcaatactaacctcatttcaacaaatacytgtattttccttccctttcatcagttacatatttcaactatagacagctagagtatataatgaacaaatataaatcagtttatgcttgaactgagacactttgtatgataagaagcaattttgttttcatttcattaaaataatatagataataatcaatataaacaagcttggtcagtactgaaatatccttccatgtcactcacttaggtttgctcagtcacagtgatctttccaaactttaaatcaaagattatcttttatgcatcaccactgtcacaggtatgcatgtacttaattcttaaatctccatactgtaacctagtatt

SEQ ID NO: 331038 - DNA, 567 bp, Homo sapiens
tgcttccacattttcaggtatctttataacaatgcccacttctctgtaccaattttctgtattagtccattcttgcattgctataaggaaatacctgacactgagaggtttaattggttcatggttccgtatggctgtacagaaagcatgatgctggcatctactcctcttctggggagatcttaaacaactyataatcatgatggaaagcaaagtggaagcaagatgtctcatacagtatgagcaagagaaagagagagggggtggagatgccacacacttttaaacaaacagatttcatgataactctatcatgagcacagcaccaaaaggatggtgccaaatcattcatgaaggatccaccctcatgattcaatcacctcccaccagaccccacctccaacatttaggattacaatttaacatgagatttggaaggggcaacagatccaaaccatatcaccatattacaaataccttgaaaacaatacatattcaataagtatttgttattgaatttccaagtattttgcttagagagtgtattcattcttgcattgctataaa

SEQ ID NO: 331039 - DNA, 567 bp, Homo sapiens
tgcttccacattttcaggtatctttataacaatgcccacttctctgtaccaattttctgtattagtccattcttgcattgctataaggaaatacctgacactgagaggtttaattggttcatggttccgtatggctgtacagaaagcatgatgctggcatctactcctcttctggggagatcttaaacaactcataatcatgatggaaagcaaagtggaagcaagatgtctcatacagtatgagcaagagaaagagagagggggtggagatgccacacacttttaaacaamcagatttcatgataactctatcatgagcacagcaccaaaaggatggtgccaaatcattcatgaaggatccaccctcatgattcaatcacctcccaccagaccccacctccaacatttaggattacaatttaacatgagatttggaaggggcaacagatccaaaccatatcaccatattacaaataccttgaaaacaatacatattcaataagtatttgttattgaatttccaagtattttgcttagagagtgtattcattcttgcattgctataaa

SEQ ID NO: 331040 - DNA, 602 bp, Homo sapiens
aaagcatatgaaacataaagattcaccaaagtaatcagaagagaaaagaggagagatactagaaggctatgtacacaaggaaaagacaaagaggaaggttaccctaagggaaaggaagaacgataaaagttggagaaattatatatttatgtaagatctccaaaaaggactcttaatgtttctgctaataaccaacatttattacatatcatccaaattcaactcaaatttacatgatcccatttaaaacagatcttcaataatgaataagtgagtttcaatataattaactcaagagctttaagttaagaagtttttatgtatcttctgctgattgacacgtctcatgaaaataatgaatgtgtaccaggaatgcctcataagtctgttgattttttttaaactcaaggtgtcatcagagtaaagtttagtttttttttttttaagaagtagtttgactctagataatcttttattttttgtttgtaatagtctaaaagcagaacagaccamcttgagccaactgtgagccacaagggacctatcagaatctattagtagcaatcactatttcaaatttgagaagagtgatcagtttttac

SEQ ID NO: 331041 - DNA, 500 bp, Homo sapiens
ctatgaaaatggccaaagttggaaatacagaccttgaaaaaaatgaacacagatatatgcaaaaagtgggggagagaacactcatacttaaaggcttatagaataaatgtttttcatagtagcccaaatgacataacccaaatatccatccatcaacaggacgagacaaaggataaattgagttatatacaaatacatttgtgcacatgtaccctaaaacttaaagtataayaaaaaataaaataaaataaaaaataaaattgagacttaccatttgaaaaaaaaaaaaggaattagaggacaagtctattccaaatatactaagtaacatttatgaaaatcttatgtaacccaattctgagcaatgtatgattcccttttctctttcgtaaaactaaatgaaagctaaaaaaaaaaaatacattggaatactactgaatcatcaaaggcggggaaacactacttactttatttccaacaacctgggtgattctaaacaa

SEQ ID NO: 331042 - DNA, 586 bp, Homo sapiens
cttagttttacactcatgtccatacaatttaatatgtatgacatcccctggggtttaggcataagttcatagttttaagtggaaggtatgagaattcataaggcaaagggaggacaaagtgaaaagaatgaccagaaatggtaaacatatatctggaataagactcatatacatttcttaggcaagtgaggccagtttttatagggatgtctagtcacaaagtatactacggaggcttcagaactaagacggtacattctctgcaatgattaggacaaggagaataatcaaagyatgaggcttcccagattttgctaatctcttatccatgcagcagggaaaagtgctttttcagttcaagctttttgatgtgtgggtttttcttttaagtagctgttctggaccagaggtagcctaacaaggaggatatacaaccacaaaatttactgtttacattgacctaacaaaaatgaaggagaagtagtatgtgggagtttctagtatctcagacacgagtaagctcaggtgatattttaatattgcattttggtggcatacagatgatggggcaaaggaaaaaaaatca

SEQ ID NO: 331043 - DNA, 537 bp, Homo sapiens
gaatcttggaaaaagcaatattggatggattttaaaaatagattttgtgaggtacagttgacatgtgaacacataaaatcaatgttcctatttatttcacttagcactattactttgagattcatccttgatgttgtatatggaaatagtttattcaattttattcctgaataatgttccacgtatggaattgccaaagattttgttcatcacccatcccactgctgacagaaatttgagatggccccaattttgcctgttaaacagatcaaaatgttttgaatattcatgtacaacttttgtatgaacggatgtttacatttctcttccaatatttctactcttcttctctgagagctggacagctgggtcacataatgggtrtgtatttaaatttctaagaaactgacaaactgttttccaacatagttgtaccatttcacattttcgccaacagtctatgagagtttcattgctctacttttgacaatatttggtataatcaatcactttaattttagttatttcaataagtat

SEQ ID NO: 331044 - DNA, 587 bp, Homo sapiens
ttggaattgcttcctaaacgtccccactggcatttccatttcaaatttgtatacaagaatagacagatgaaaagtaataaatctgaagtggtgaaaattccatcattctgataaacagatggaaaagayactatacgatgggtggataatttccaatatgtccttaattactcaaagtgtggtttatggaccagcaacatcagcagcatctggaaacatgttagaaatgccaaatcccagtctctagctcagaacaactgagtcagaatcttgtattttaataaaattttcaggtgctgcatacacaataaagtttaaaaagtgctgcttaaattccattatatgggtgaactatttctttacagtttagaataatcgtgctaaaaatgccctctcacttaagcaagggcatgcatagaattatgatgtctcctaaggtgcaatttcagaatcattatttatactaaggattggaatccaggcaggctgagatctaactatttgaataaccagtcagccactataccatgattgcttttataaagctttagtttctaaattgtcaaactatcacatgtatcaaaacc

SEQ ID NO: 331045 - DNA, 554 bp, Homo sapiens
tttcatataaacagccctgttatcctgcttgaatgaactttttgatgttttcacatttcatctgattgagaagtcacacatattccatgaaacaatctaaaattttaattgaaccattgaaccactcattacagtaagaaaattttgttatatttaagatgattgatcatctgtattaatcaatttcatgttccagattttttttttttttgagacagagtcttgctttgtcacccaagctggagtgcaatggcatgatctcagctgactgcaacctccacctcccagattkaagtgacgcttctgctgcttctgcctcagcctcctgagtagctgagactacaggcacgcaccaccatgctcgcctaatttttgtatttttagtagagaaagggttttgctatgttggccaggctggtcttgaactcctgacctcaggtgatctgcctgcctcagcctcccaaagtgctaggatccagatatttttctaagaactgcatatgcatgaaatctgagttatttctgacactgatgagttataaactattattgac

SEQ ID NO: 331046 - DNA, 556 bp, Homo sapiens
atattttttcctggtactcattttgactcattttttaggctcaaagaggtcacatctaggatttttctagtggtggaccttcacccttgcagacagcactgaaggatccatgaccatccacagaatcacacgggactaatttctctgccatgagaaatagtcatgcatacttgtttgctaccagttctgggagttcaggccatttgatctcagcaaagtagccctccgcagctccaaactaaagcaattcttcacacagtgtctagtcaccttaaaattcttttgcaggagtgaaatcttcagtgcagtacatttacatatatatatgcacacccacatatatatatacccacatacacgcgcgcgcacacacacacacacacacacacacacacacacacatatatatatwtatttatttatttattttttccagagagagggtctagttttgttgcccagactggagtatggtgatgcaatcaaagctcggtgtagccttcaattcctgggctcaatcaaccctcttgcctcaagctcttgagtacctagaact

SEQ ID NO: 331047 - DNA, 556 bp, Homo sapiens
atattttttcctggtactcattttgactcattttttaggctcaaagaggtcacatctaggatttttctagtggtggaccttcacccttgcagacagcactgaaggatccatgaccatccacagaatcacacgggactaatttctctgccatgagaaatagtcatgcatacttgtttgctaccagttctgggagttcaggccatttgatctcagcaaagtagccctccgcagctccaaactaaagcaattcttcacacagtgtctagtcaccttaaaattcttttgcaggagtgaaatcttcagtgcagtacatttacatatatatatgcacacccacatatatatatacccacatacacgcgcgcgcacacacacacacacacacacacacacacacacacatatatatatttatttatttatttattttttccagagagagggtctagttttgttgccsagactggagtatggtgatgcaatcaaagctcggtgtagccttcaattcctgggctcaatcaaccctcttgcctcaagctcttgagtacctagaact

SEQ ID NO: 331048 - DNA, 584 bp, Homo sapiens
cctttcttctgcttgatgaatttggctatttatacttgtttgtgcttcacaaagttctcatgctttgtttttcagctccatcaggtcatttatgttcttgtctaaactgtttattacagttagcaactcatctaacattttttcaagattcttagcttccttgcattgggttagaacatactcctttagctcagaggagtttattattatcaaccttctgaagcctagttctgtcaattcatcaaactcattctctgtctagttttgtttccttgctggcaaggaattgtgatcctttgcagaagaagaggcgttctggtttttgaaaatttcagccttttttcactggtttctttccatctttgtggatttatctacctttggcctttggcgtaggtgaccttcggatggggtctctgartgggcgtcctttttgttgatgttgatgctattcctttctgtttggtagttttccttctaaaggtcaggcgactctgctgcaggtctgctagagtttgctggaggtccactcctgaccctgtttgtctggatatcaccagcggaggctgcagaacagaaaagat

SEQ ID NO: 331049 - DNA, 651 bp, Homo sapiens
gatgcattcagccaattcaaggttacaaattgttcatttgttagcttgtcagaagaaatgaagataaaactcaactaattgttccggattttatttctataaaacctgattcagctttctgatgttataaacaatgtatagatgattggtttcccttatgatgtacgagtaaattttagcttcactkttatacaaaactaaatgtttttgttatttatggattttctactgagattacctaccagtgttacatctttggagccgaagagatgtaccacttgagtgtgcaattccaaaatctcttcaaatttttcttactactcttttataaaattattatttgattacaggacttttttttttttttttgagatggagtctccttctgtcacccaggctggaatgcagtggcatgatcttggctcactgcaacctccactcccgggttcaagcgattctcctgcctcagccatcccgagtagctgggactacaggcatgtgccaccacgctcagctaattttttgttttgtatttttagtacagatgaggtttcaccatgttggccaggctggtctcgatctcttgacctcaggtgatccgcccgtcttggcctcccaaagtgctaggattataggcatgaactgctgtgc

SEQ ID NO: 331050 - DNA, 577 bp, Homo sapiens
attagctattcgaaaaatataacatatatatttatttttgtatggatggtcagatcttaatctctgctgtgtttaattcagatttatttttctattttaaataaattatagctttaaaaattgaagacttctctctatatatttacttatatatatagacttctctctatgtatatttttctgatcacatgaccatcctttcatctcttgagtacctgcttttctgaatttgatgtttattatttatayttattacttattttcattatttacaaatatataacactggcttatatattttaaaattttgtataaaaggtatgacatcgtatatacctcctgaattttttcacgttatgtttttgaaatttgttcctgttgatatctgtatctctagtttattaattgtgatatgccagagtataaacagaacatcatttgtccatttgaattttacagaatatttagattaattctaatttttaaatgttgaaaaatgcagcaatattcttataaatgtcacactgtgcagatgtattaaagctatatatagtatctactagtagtaaaatcacta

SEQ ID NO: 331051 - DNA, 576 bp, Homo sapiens
aatattcataagctggcagctacccatggctgcgatatatttgaagaatgaaaataaaagcttatagaaaagtccaacctgattatcataaaactgaagtacgaacttttttccagagctcatgtacaaccagtgtgtttactgtatttgaaacagcctgttttattttgttatttcccaatttttattcaccattaatataaagtggttttatacaatatatgytgttcattttgttggcacctctactatatcattctatttgcttgtaggtggtcataaataggaaaatattttttctgttcttagaagtacctccacattcctacttatcacccacttctttatttgatgtctgacgatattctactgtcacctaaatttttgatttataattttgcatttattaaaatcattttttataatgtatcaaaataaatatttattatgggaagaaaattattttgtaaatgaagttttcattcatctcttgttataaatatatatatatatatatatatatatatatatatatatcacgagattaatagaataatgacttttgtgaaaaagcac

SEQ ID NO: 331052 - DNA, 603 bp, Homo sapiens
gttctttcaatatttgttttgcagtaaagattttattttagcccataagggaaagaaagaattagtaagtttcctaatatgcccataggagtcattaaggtggttaataccatagcataccccacctacaaataaaaagtttacttaattaattattttcagtccctaaccaatgaccatctragttagtggtccccaatctttttggtacaagggaccgatttcgtggaggacaatttttccatgaatgggtttgggggttatggttttgggatgatacttttccatctcagatcatcaggcattagattctcataagaagtgcacagcctagagcccttgcatgcacagttcacaatagggttcgctgtcttctaagaatctaatgccacagctgatctgacaggaggcagagctcaggcggaaatgctggctcacctgttacctcctgcgtgggtctggttcctaacaggcccttgagcgataccagtccgaggtctgggaattgggtacccctgagctaagtgattcctataaacaaataaagcaaacaacaaatacacacatgcgtattgtaaatattaaaaggaatatggaattaaa

SEQ ID NO: 331053 - DNA, 599 bp, Homo sapiens
catggtacatcaagctcctgatgacttgtcttcttatctatatggtataggcatgtcataccacatgtaatttatgagccaggtgtaatgaattagtgtcagtactcagaatataatgtagtattccatatttctgtatatgtgtacatattgtcaatgccatctcattttcctttccatctgcatttttttaaataaaacttacccattcttcaacacytgattctcattagtaggttcttcctcctctattcagctagagatctcctctgacttacaatggtttgattcgtaattttttgacataaagatggtgcaaatgcaatatgcattcagtacactcccaggcttggaatgaggttatgtccatataaacctttattaatttgaaaatattatcagtggaaatacactttcaatttacaacattttcaattcccaatgagtttatcggattgtaaccccagtgtaaaccaaggtgcatctctatagattattctataatagtatatttcaattatatgtactttattctgttagtatcacgttttctgagaacacattttatttcaaatgaattttagttaaaacctctttga

SEQ ID NO: 331054 - DNA, 599 bp, Homo sapiens
catggtacatcaagctcctgatgacttgtcttcttatctatatggtataggcatgtcataccacatgtaatttatgagccaggtgtaatgaattagtgtcagtactcagaatataatgtagtattccatatttctgtatatgtgtacatattgtcaatgccatctcattttcctttccatctgcatttttttaaataaaacttacccattcttcaacacctgattctcattagtaggttcttcctcctctattcagctagagatctcctctgacttacaatggtttgattcgtaattttttgacataaagatggtgcaaatgcaatatgcattcagtacactcccaggcttggaatsaggttatgtccatataaacctttattaatttgaaaatattatcagtggaaatacactttcaatttacaacattttcaattcccaatgagtttatcggattgtaaccccagtgtaaaccaaggtgcatctctatagattattctataatagtatatttcaattatatgtactttattctgttagtatcacgttttctgagaacacattttatttcaaatgaattttagttaaaacctctttga

SEQ ID NO: 331055 - DNA, 600 bp, Homo sapiens
ttgttcccattggtttcaaatgacttctttatttctgtcttaatttcattatttagccagtagtcattcaggagaaggttgttcagttttcatgtagttgtgcagttttgagtkagttttcattttgtcattttttaagtgagcagcttttgttagaaccagatcagcctattaaaatgtccaaataatgttcaagaatgaggatagtgacttgtaatggtcatggtcacatcttttgtatgtaagaattttaagaaaaataatggtagatttgttccttgtttttacacataaggcaaatttctcataaactttctcagaaagtttaattgaaggagtcaatatacaggtaaaggaaacagaaaattagcgtgaaaacaatttgtctgagataaattttgggtgtagagatgatacaggcaggtaggcgagcccccagattgaggaaagaatacaagactgggccggtggtgttgaacggcaatcttttatggaactgcaactgctccttttggagcaaggataactcataggcagtgtgccctgaactgcacttctaggctatgggcaaagtatttatatctacttagacccactttc

SEQ ID NO: 331056 - DNA, 644 bp, Homo sapiens
tacaataaatacctatccgttcaatgcccaggcacagacaaacatccataagcacragaccatccaggaaaatgtaacctcaccaaatgacataaatgaggcaccagggatcaatcctggagaaacagagatatgtgaactttcatagagagaattcaaaatagctgttttgaggaaactgaattaagaattctattagataaatttaacaaagagaatgaaataactaaaaaattgagcagaaattctagagttggaaaatgcagttaacatagtgaagaatgcatcagagtctcttaatagcacaactgatgaagcagaagaaagaattatcaagtttgaagcaggctatttgaaaatacagccaggggaaaaaaagaaaaaagaatgaaaacagtgaagcatacttgaaagagctagaaaatagcctcaaaagggcaaatctagcattattggccttaaaggggaggcagagatacacaggtaggaagcttattcaaaaggataatgacagaggatttcccaaacattaataacaatggccacgatttggaaacaactcatttgtccatcaataggtgaatggataaagcaaatgaggtacatatacacaatagactactattcagccattaaaaaaatta

SEQ ID NO: 331057 - DNA, 644 bp, Homo sapiens
tacaataaatacctatccgttcaatgcccaggcacagacaaacatccataagcacgagaccatccaggaaaatgtaacctcaccaaatgacataaatgaggcaccagggatcaatcctggagaaacagagatatgtgaactttcatagagagaattcaaaatagctgttttgaggaaactgaattaagaattctattagataaatttaacaaagagaatgaaataactaaaaaattgagcagaaattctagagttggaaaatgcagttaacatagtgaagaatgcatcagagtctcttaatagcacaaytgatgaagcagaagaaagaattatcaagtttgaagcaggctatttgaaaatacagccaggggaaaaaaagaaaaaagaatgaaaacagtgaagcatacttgaaagagctagaaaatagcctcaaaagggcaaatctagcattattggccttaaaggggaggcagagatacacaggtaggaagcttattcaaaaggataatgacagaggatttcccaaacattaataacaatggccacgatttggaaacaactcatttgtccatcaataggtgaatggataaagcaaatgaggtacatatacacaatagactactattcagccattaaaaaaatta

SEQ ID NO: 331058 - DNA, 617 bp, Homo sapiens
ccctattgtttgttattgttaactttgtcaaagatgagattattttaagtgtgtggctttatttctggattctctaagctgttatattgttctatgtgtctgtttctgtaccactaccaggtcgttttggttactgtagccttgtagtataatttgaattcaggtaatgtgatacttccagcttctttctttttgcttccgattgctttggttatcaggcttcttttctgttccacatgaacttcagaattttttttctaattctgcgaagaatgatataggtgttttgataaggaagagcattgaatctttaaaytgctttgggcagtaaggaaattttaacgatattgactcttcctgtctatgaacatgcaatgtttttccatttgtttgtgacatctctgattcctttcagcagtgttttgaaattctcgttgtagagatctttcacctccctggctagctgtattcctacctattgtattctctttgtggtaattgtaaatgggattgcattcttgatttggctgtggacttagacattattggtttatagaaatattgctgatgtttgtacatatcttttgtaccctgaaacatagctgaagttgtgtatc

SEQ ID NO: 331059 - DNA, 634 bp, Homo sapiens
ctggtcagtatttgattaattgtttggctcacaggttgattagtcagcctctgctacaggtatgtctcatattctaatgctattttatggcttcctaattattaaaataattttctttcttttatacaacttatgttttattcatactgattgacaaataatttaccttatttaattttgtatgacattttgtcaagacctctctgtacttcataaaccttcagcagtatgaaaaatttgtattgtgagaccatggctagtataaataacttttatgtgtacatttaaatcaagtaaatwaggagaaccattattgccaaggaaatggattctgaaatgcaatagaaaaaatatttctctacctatcaaaagttagatttagacttgattgttttgtgtagatatgtggtatacatacatattatatatactgtattatatatcatatgtaaatataaaacatatataatatatacatacttcacaaattagttcattacaaaacatttggaaaatataaagaaaatattaatattttaggtacctgtatctaatcctgctttaattcttactggaagtgcggcattgggagaataattaatcccttataacattaaaatggaaatgatactag

SEQ ID NO: 331060 - DNA, 608 bp, Homo sapiens
gattgttttgtgtagatatgtggtatacatacatattatatatactgtattatatatcatatgtaaatataaaacatatataatatatacatacttcacaaattagttcattacaaaacatttggaaaatataaagaaaatattaatattttaggtacctgtatctaatcctgctttaattcttactggaagtgcggcattgggagaataattaatcccttataacattaaaatggaaatgatactagtacatcgctcatgtaactactaagaggcatacattaatattttaatacttgtgcacccaaataataattattaaaatttccttttaaaaattcctgtcattaaaaattacattttgattatattaggacaatctcaagataaattgagttagtttcctctttatattttttctatttttttatagtttctgtttcttattcttttccttacatatgctaaggtctttcatagaagctattaatttatttgckatatcagttgttagcaaagattatatattttaaaatcatattgtttaataaaaagcttaaatatttataagtatgtggtaatttattcttacatatatatttatgtgt

SEQ ID NO: 331061 - DNA, 610 bp, Homo sapiens
taatgatcaataattgctatatataccagttaaaaagaaggcaggcacatatactgtgatatgtaactactggtaatatagaacaatgtcctcagtggactgttaagaaataagaactaattgctcaacagtataaatagtaaaattttatttctgtaaataataagcatttatgtgcatctgtgcttgtgtttctgcttttctatgtgrttttcaatacattttaaaggatgattttaaaaggcacgtattgtcaccgtttgctgatggaaagtttggaatagaacatagcatgatttctgcctcttggtagctttactctgtctaatgccctcctcttaagtgtgagtggaacctgcggcttgtttccaaccaacagaatataataaaagtgatgagatatatgtaattatgtgcctgtgttactctttataatagcatataaaaggtcatgtctgatttatccatagtagctaagcatagcagctaagcatactacactgtgtatgcatactacagtgtagtatgcatagcagctaagcatactacactgcagtgcatgtaggaggttctcaatttattgaaagagtggataaataacaagcactgt

SEQ ID NO: 331062 - DNA, 641 bp, Homo sapiens
tagaacatagcatgatttctgcctcttggtagctttactctgtctaatgcmctcctcttaagtgtgagtggaacctgcggcttgtttccaaccaacagaatataataaaagtgatgagatatatgtaattatgtgcctgtgttactctttataatagcatataaaaggtcatgtctgatttatccatagtagctaagcatagcagctaagcatactacactgtgtatgcatactacagtgtagtatgcatagcagctaagcatactacactgcagtgcatgtaggaggttctcaatttattgaaagagtggataaataacaagcactgtttgactaaataaatgttattgaaaaatttttagcttttagccttgtgaagaggctgttttcctcactggctttaaataatcaaaataatcaagctgccgtgtagtgaacttccccttggagaggaccacatgtcaaaaaactaaaggcaccatctagccacagtcagcaagtaactggggcaggcatgctggtatcctgcaataaactacaagttaccacaagccatgtgagcttgggaagagatcaaaaaatggaaaaagagtagatgagtctaaacatgcaaggcatgtgaaggtcatgtatttaagctt

SEQ ID NO: 331063 - DNA, 641 bp, Homo sapiens
tagaacatagcatgatttctgcctcttggtagctttactctgtctaatgccctcctcttaagtgtgagtggaacctgcggcttgtttccaaccaacagaatataataaaagtgatgagatatatgtaattatgtgcctgtgttactctttataatagcatataaaaggtcatgtctgatttatccatagtagctaagcatagcagctaagcatactacactgtgtatgcatactacagtgtagtatgcatagcagctaagcatactacactgcagtgcatgtaggaggttctcaatttattgaaagagtgrataaataacaagcactgtttgactaaataaatgttattgaaaaatttttagcttttagccttgtgaagaggctgttttcctcactggctttaaataatcaaaataatcaagctgccgtgtagtgaacttccccttggagaggaccacatgtcaaaaaactaaaggcaccatctagccacagtcagcaagtaactggggcaggcatgctggtatcctgcaataaactacaagttaccacaagccatgtgagcttgggaagagatcaaaaaatggaaaaagagtagatgagtctaaacatgcaaggcatgtgaaggtcatgtatttaagctt

SEQ ID NO: 331064 - DNA, 560 bp, Homo sapiens
cgctttttttctgagacttgtttcttagtgaagtcttactattctaatatttacaaagggccaattaaaaacatattatgactaaggctttctcttgataatctacagtggcaattatgcccaaaatacataaacaaaaatgatttttatacatggcgttctatagtagttaacatatttatatttctaacccaagataacttaataatattgtagatgcgctgctctaaaacctgaaccatggtaagataagaaatcaaccttgctctgttggtgtgctgcacccatcaactcgtcatttaacatgtatacatatgtaactaacatgcacgttgtgcacatgtaccctaaaacctaaagtacaaaaaaaaagaaacataaagagaaaatgcttttcaawattgtaataaaagaaagaaaagatgtgcacaggctgttaacagaggattccttggtgcagtgggacgaggatggggtaattaactttatcaacacatctcccaaatgttcaaaaatgtataataaagaaaataaaaaaggaaatcaaccttgctgtactt

SEQ ID NO: 331065 - DNA, 447 bp, Homo sapiens
ataactcacagttatgtaagtgtgtactagttcagctgatgaattgtcagctgaactgctgttctcaaccgttcagctgatgaattgtcatccgggagacaaaactcattatttctttgttgttgttgttgttcttatcaaaatctactcactgtgcataagtgccttacttgctaacatatggatagacactactatccaaaaccaattttaatgttgcacaactccatgggttgcaaagggatatttttcttttaaataaaatctatttagagaatggggcaaccattttatcttagaaaaaaggttgtaaattatttctctgtgctattattttggaaaaycataatgttttctctgtctttagaattcagaacacatagtgaggggtaaaaagttggatggaaaaaaaaagagtgtgctagaaagtttccactttatcattac

SEQ ID NO: 331066 - DNA, 599 bp, Homo sapiens
cagtggctttttcatgcataacacattgctcattttccaagaaaagtacaggaaaggttaacagaagtggaaaatagttttagaaatagggttattttagcggcaatccaatataaacaaatagtaatgcggttaatagtgagaactttattcttgtgctgactagaaacttctgttctgtttatattgtcagcctaaagaaatcctcacgagattttatagcccatttccagctagtcgaacagaatattttcaggtagaaatattacaatggaatgcttcagttttaagtttcaaataagcaaataaaagatatgtggggagaatattctgaatctaayggtgagtgtattctgaagccaaataataattaaggattaaagtattgtcacgttagcttaagctgtcagtaaatagttaataagtgataatgtcacatgatccttggggtgttgcttcatcagccagatacctctgtggccagtggcacctttgcctgagtattgtttgtgactgctgggctcattctgcccccttgtctgggcatgctgcactcagctgaagctactggcctgaatctcacacctgccaagggcaag

SEQ ID NO: 331067 - DNA, 524 bp, Homo sapiens
tgcattgcaaatcttttcaagttgagtcctggaagtggtaatcatcacttaaactcaacaactataggagtgaaaaaaacttaatctcatgggtttgtggagctacagaaggctgaaaatgtaatattttgaagagcagataatattccacgtgtttggaagaagggagagcatgtactggggacacctagtagtcagccataagatattctatcctaaccaaaatttcctaaaaaatactttggttctcagatttacagatcttactttcatattttataatacacgtgccttaaatacaattaaaaacagttaaggaataggcttacccataatttcaacctttgaatttaccaagtattttctattccatcatgtattttcatttaaaaaaaatgtgtaacattgttatgaaaggttattaacattctggttatacatgaaaatagtttatggtcattgtccatttttattgcatttactcatcatactgatagataaatyatatttcctgtgtttaattg

SEQ ID NO: 331068 - DNA, 541 bp, Homo sapiens
cttaggtttccagaaacagaaatgaagaaatcatcaatctctcaaggagaagtctcagtaatcaagtcaagtgagacaaggctgatatatataaaatataaaggtatattaggttaaaataattgctgatctgaaacaattgcataaaaacactactttattatttatgaggatgaatgttytgcataacatagcttgccattggggtatagatagacaaattcaccctttaagaaataatactcaaattaaataaataacttatctaaatgatgtaatataggacaatgaacaatgagacagaagtaaaatatcactgtctttaaactttcagccttctaacttaaaaaacaagtattcctcatatcttcaaggtgttcaacaaataatttgcttcccctcatctgatataaggcccagtcttcaaaatatagttaacattgtttgaaatagtatatagtaatactgggaatactattttcctagcacatttattgattagacatgtgttccccattgatacataatgtgactgttaaaa

SEQ ID NO: 331069 - DNA, 614 bp, Homo sapiens
ctaatgatgccattataaggcagaaaaggaattcattgttcatacaatagatgtctttttgaaaacatctgtcaaaaaggacattttgaaaacagtcgtttaatcgccaaaggaattgtcatttaaagataatctgatataaatctcacttaaagaggatatggtataatctcattcaaaataaaataattactactgttgcacattacatttttaacagtgaatctcttgttacagaaaaagttaagaactcaacataaggaattaatgtagtacattaacaacttctaaaattatatttagggatgtcatttcatggtattacaatatttgtactacaaaagaaataaaattattgtgttttaattagaaatttgattatcttttgtgcttgctaaagaacaacatgatcaaatgtttttggtcaatatgtatgaaaakatctgtaagactgaattctttccacaaggcacacactcaaaaaagaaagaacacctgtcttagcctaaatttttctcatagaagagcttgaaaatatattatcttagggagctaaagtgcagaatatggggagtataatgggaaaagtggaaaagcaaacacaagaatgctat

SEQ ID NO: 331070 - DNA, 538 bp, Homo sapiens
aaacttattaattgtttatttttggaattttttaatttaatatgtttggactgcagttgactgccagtaactgaaaccccaaaagtgaaactgtggataawtgtggactactgtgtagaagtagcctgtgtggtgttaatggacaatagaatatatttttaaaactgtggtatagccacatattaagatgtttctggaggagagagaaacagtgacttgacattggcaatgctacccaatggtaagaggaatttacttctctctgaatattctcatcaaaagcatggatgtgatcctgacacaagtgacgataagcaagtttggaaaaatttttggagttttgatcaattcaccatgtttcatttggttctgaatctcactatttaaatgaatttgtgaatattttggaaatgtagaaatccataattaatccccataagcaaaacagaggctgcttgttgaaatcagccttcacattctctctttttcaacattctgtgcagatataataaaatgtccttgcatttgtatgatgttt

SEQ ID NO: 331071 - DNA, 474 bp, Homo sapiens
ctaaacaaagatttgaagatcaacgataaattaacttgatatatttgcagtggccaatccatgtctgtggggactggacacatcaatcagtgcaacattgagaatccctgttcttcatcccccacaggaccagtcacataatatatggggcccagttcaagatgacaatgaggagtccctaattcaaaaagcattacaacaacttttgactctctgttgtagtctctctctctcttgcaagctgttaccacgttttttatttgctgtttaatgccattcattttctcagtcatgaggacactcatggggtgagagcagaacttcacaggcaactgagaccctgtcctgagttgagcacaagtggtgtatgtacccaaccctgactctccctatstccacacccagacccccgctacgagtggagatggccatgggttattgggttggagagaaaaagcaggtagctgagaactt

SEQ ID NO: 331072 - DNA, 474 bp, Homo sapiens
ctaaacaaagatttgaagatcaacgataaattaacttgatatatttgcagtggccaatccatgtctgtggggactggacacatcaatcagtgcaacattgagaatccctgttcttcatcccccacaggaccagtcacataatatatggggcccagttcaagatgacaatgaggagtccctaattcaaaaagcattacaacaacttttgactctctgttgtagtctctctctctcttgcaagctgttaccacgttttttatttgctgtttaatgccattcattttctcagtcatgaggacactcatggggtgagagcagaacttcacaggcaactgagaccctgtcctgagttgagcacaagtggtgtatgtacccaaccctgactctccctatctccacacccagayccccgctacgagtggagatggccatgggttattgggttggagagaaaaagcaggtagctgagaactt

SEQ ID NO: 331073 - DNA, 524 bp, Homo sapiens
tgacatgtgaactgttcattttgtataaatatatgtgctaacaattattgagatagaatttatatacaataaaattcactcatttaaggcatacagttcaatggtttttagtgcacatatagagttgtgcaaataccatcatccaatttcagaacatttttgtcattttaaacagaagctccatgcccattatcatgcactatacatacttcccatgtccttagttttaggcaactactcatctattttctgtctctatagatttgtctaatttgaaaatgtcatataaattgtatcattaaaaatgtttggcatatttcrcttagtattatttttaaaggttcattcatgctgtagcatgcatcagtacttcattccttttattattacaatagttttcttccgtacgtatataccacattttgtttatccattcatcagatgatggacctttgggtttacaccttttagttatgaacaatgctgctatgaatattcaggtacagacataccttgttttattg

SEQ ID NO: 331074 - DNA, 524 bp, Homo sapiens
tgacatgtgaactgttcattttgtataaatatatgtgctaacaattattgagatagaatttatatacaataaaattcactcatttaaggcatacagttcaatggtttttagtgcacatatagagttgtgcaaataccatcatccaatttcagaacatttttgtcattttaaacagaagctccatgcccattatcatgcactatacatacttcccatgtccttagttttaggcaactactcatctattttctgtctctatagatttgtctaatttgaaaatgtcatataaattgtatcattaaaaatgtttggcatatttcacttagtattatttttaaaggttcattcatgctgtagcatgcatcagtacttcattccttttattattacaatagttttcttccgtaygtatataccacattttgtttatccattcatcagatgatggacctttgggtttacaccttttagttatgaacaatgctgctatgaatattcaggtacagacataccttgttttattg

SEQ ID NO: 331075 - DNA, 525 bp, Homo sapiens
caccagcaagagaccagagggtaggaggaaagagaagtcagtgtattttcctccctgccctgggccatgttttctggaaggttctgtctcctttagacaacaactcctgttctcacagcttcacagcttcagttttcactgggctcccacaaacagtatttccttcccgttggctctaggagtggcaaaaacttctccttcctgatgatctccargtgtctagtttacttcttgtttcccttaacactccaacaggtgtgaaaataaaattcagggaagtctgttgaaccacatgagttggattcagcttcctgacaggaccctgactgctgtaaggggagtactttccaaaaaaacaaacttttgagttttcagaaaacaatcatcttccaggcactcaaacattgggaatgtctaatttcacacttggtccacctaggacaggccgtgtggctgtgtgtgatgagcactggaaagggagtggagaaactctttgtgacctcagataaggccctcacaccatcc

SEQ ID NO: 331076 - DNA, 543 bp, Homo sapiens
tttgagtatccctttaatttcgtagaatcattttcttctccacattactaaacccagcattttgtacaagtaaatttggaattattttagcatggcttgaaatcttaaaaytacagactgcacttgtatgatgctctgtcagctgcttcgaaaggaaggctctgtcaactgctattactattaaattttctctctgtttaataatttagcaaagtaacacgttcacagggtaaaaatctgagtagaatagaaagactcataatgaaacatagcagtcctcactcatcctttttctacactgagttttctggagacagtaggtttttctgccattctgttctttcctctcactgtatgattttactttttcttgatcaatcaaattctgttaattttatgctaaggaagagtttagttcatttaaactactctctcctaatatttatgcctggtatttgacttaccctattagttatcattgtactattaatacaataaactgaaacctatgtgtcgtcacgtcttatttactcaatatctctt

SEQ ID NO: 331077 - DNA, 403 bp, Homo sapiens
gccaacaaatttagcaaaatttcaggatacaaaaatcagcaaaaattaattacatttctatagactaaccattaactatcacaaataagaaaacaattttatctataatacatgaaaaaggataaaatagcataagaataaacttaagagggcaaaaaacatgtaacttaaaactacaaaacattcttgaaagagaaaaaaggcacaaataaataagaaaaacactttacattcatggaacatcaataaaatgtccatactatccaaagtaatctacagattcaatacaatccataycaaaattccaaagatatttttacaaaaattgaaaaaacaatgctggaatttatatggcaccaaaggatgccaaatagccaaaacattcttgagaaagaatacaaaa

SEQ ID NO: 331078 - DNA, 576 bp, Homo sapiens
gtttgtacagactaaacaaaaggaaaaagttgtatatgtgtggctgcattccaaaaaaaagtgatgttattactttagatcattttgttaaacgtttggaacatttcaagaagtaatgctatgcaagtttcaacatagcacattctcaaaatgaaaaacacttcagggaatttggtaataaggtgataacaagatgatgaggtgctaaagaagttagtttctgctttgawttttttttagtccattatccttattgatgtcttataacacttcgatctatatactgaccttttattctgactgctaccttcactgtgcctatcacacatttttgggagatggcgatatattatgaaaagttgaaagtgcccccaaaagcattaaatcaaatgctataaaattgagtgctgacatttttcaaaagtgcaaaaagtacaatagtgagagtttcagagtgtcgaatattaccatggaaggaaactggccctgggagaattaaatctgagtatagaaaatgaggcaactttaatatttgacacaaaaggttgttttcttactttttgctaatggaatata

SEQ ID NO: 331079 - DNA, 586 bp, Homo sapiens
tttcagagtgtcgaatattaccatggaaggaaactggccctgggagaattaaatctgagtatagaaaatgaggcaactttaatatttgayacaaaaggttgttttcttactttttgctaatggaatataattaagcattaattgctcttattctcctttgaatcagacattcaaagggcaggtaggtcaggatactgtctggctcatttattagaaaagcatgcaaacagttgacctagaaacacattgacagaacaagggcctactagtgggacagcatctgcaggcataagcaccagttagatattaatataagctccaaatatgtaagtacactacttttctccagggacatgctacagtttcacttctttatgttgagcatggaatataatgagaatatatccagaccattaagtgactaaaactgagaaaggccttaactaaaagaggaaagaggaataaaaggtgttttttttttttttttttttggctttgaaaatagaatggagggattcccaggcaagatagccaaataggaaaagctccagtctgcagctcccactgagaccaaagcagaaggcca

SEQ ID NO: 331080 - DNA, 586 bp, Homo sapiens
tttcagagtgtcgaatattaccatggaaggaaactggccctgggagaattaaatctgagtatagaaaatgaggcaactttaatatttgacacaaaaggttgttttcttactttttgctaatggaatataattaagcattaattgctcttattctcctttgaatcagacattcaaagggcaggtaggtcaggatactgtctggctcatttattagaaaagcatgcaaacagttgacctagaaacacattgacagaacaagggcctactagtgggacagcatctgcaggcataagcaccagttagatattaatataagctccaaatatgtaagtacactacttttctccagrgacatgctacagtttcacttctttatgttgagcatggaatataatgagaatatatccagaccattaagtgactaaaactgagaaaggccttaactaaaagaggaaagaggaataaaaggtgttttttttttttttttttttggctttgaaaatagaatggagggattcccaggcaagatagccaaataggaaaagctccagtctgcagctcccactgagaccaaagcagaaggcca

SEQ ID NO: 331081 - DNA, 586 bp, Homo sapiens
tttcagagtgtcgaatattaccatggaaggaaactggccctgggagaattaaatctgagtatagaaaatgaggcaactttaatatttgacacaaaaggttgttttcttactttttgctaatggaatataattaagcattaattgctcttattctcctttgaatcagacattcaaagggcaggtaggtcaggatactgtctggctcatttattagaaaagcatgcaaacagttgacctagaaacacattgacagaacaagggcctactagtgggacagcatctgcaggcataagcaccagttagatattaatataagctccaaatatgtaagtacactacttttctccagggacatgctacagtttcacttctttatgttgagcatggaatataatgagaatatatccagaccattaagtgactaaaactgagaaaggccttaactaaaagaggaaagaggaataaaaggtgttttktttttttttttttttggctttgaaaatagaatggagggattcccaggcaagatagccaaataggaaaagctccagtctgcagctcccactgagaccaaagcagaaggcca

SEQ ID NO: 331082 - DNA, 517 bp, Homo sapiens
cacattggcagttaggttttaacatgtgattctagrgggcacataaacactcagtctatagcaatagtgtacaagaagaaaaaatctaatgttagcagggcctagatcatatagggccttgggaacatggaaagatttttaacttttatttccagatgccttaggaaaccgttgaaaggcttgaaaagggctagtgacttttgtgtatctgtttaaactattctgatggtattatctctaacagattttataagactattggagtggtcctgacaaaagataattatgcctaggacaagggcaatggcagtggggatgtagataagtggacaaattttaaatctcttctggagatataatattcagaacttgctgggaagagtgtgaaaagggtagaaccaagaacaacatcaggttttctttgtctgaactatagtgtagatggtggtgccatgaaaaagaatagaggcataacagcttcttttgtaggaaaccgtttattatattgggaggtaaa

SEQ ID NO: 331083 - DNA, 536 bp, Homo sapiens
gttttgtgcttaaagagcacacttgtcaaaacagtgaaaggttcacttttccaggtgtgtgatcaatatacaaagatgtcagagatcctcrgtgagaggaaggtcatcctttggatgcagagtcttgtaacagtggatcacttatcttagctaatagacagatctgctaatagtttgtagaatgtgaaaacaaacagaaatacacctatgctatgtgacagctctattgatacaccttgcaacttttagcttccaccataacatacacaaagataatcaccctctgggacctaaataagaagaaatactcaggaaaaaaaattaaagacacccttaggagcagagactcagtcttttaaaaagaacaatatctcaaatacagagttagtttgacctgttacgggtcatggagatgctttgctcttcctagaattaaacatgtttctgctctctaaaagtacatccacatgaaaacagcacgtattagtataaatgtaaagcaatattgctgggcatctctcacactgtcctcccac

SEQ ID NO: 331084 - DNA, 536 bp, Homo sapiens
gttttgtgcttaaagagcacacttgtcaaaacagtgaaaggttcacttttccaggtgtgtgatcaatatacaaagatgtcagagatcctcagtgagaggaaggtcatcctttggatgcagagtcttgtaacagtggatcacttatcttagctaatagacagatctgctaatagtttgtagaatgtgaaaacaaacagaaatacacctatgctatgtgacagctctattgatacaccttgcaacttttagcttccaccataacatacacaaagataatcaccctctgggacctaaataagaagaaatactcaggaaaaaaaattaaagacacccttaggagcagagactcagtcttttaaaaagaacaatatctcaaatacagagttagtttgacctgttaygggtcatggagatgctttgctcttcctagaattaaacatgtttctgctctctaaaagtacatccacatgaaaacagcacgtattagtataaatgtaaagcaatattgctgggcatctctcacactgtcctcccac

SEQ ID NO: 331085 - DNA, 565 bp, Homo sapiens
gggttagaacttcaatatatgaatttggagggaacacaattcaacccctaacaacaattagttaacatggctttattttcttttttagttattatttggtaatgtttacactaaaatgcaaacacatcagctcaaaaaaaatttcaaagtaatcaatcagcaagtttttctgagtgtctatttttctgctaaatattattagatattgttagagctaaaaaagagatgtaaaaaaggaccattttctaaaacagtctatctccccacctagtagaagtgacaaaactagccaacaatrgcaacctcttttacacagaaaaacacattaaaacacatccaattacagaaccaaacatcctacatcttttccacataatctgacaacaacctataatattttttgttgttactttttctacaggcatattttgaatcaatgttccttggccatattcctgcaaatgttcaaattcataagaaagcaggtcctgtttatgggttcaggggctgcattctagaccttcaagtaaacaacaaagaattcttcatcatcgatgaagcacga

SEQ ID NO: 331086 - DNA, 565 bp, Homo sapiens
gggttagaacttcaatatatgaatttggagggaacacaattcaacccctaacaacaattagttaacatggctttattttcttttttagttattatttggtaatgtttacactaaaatgcaaacacatcagctcaaaaaaaatttcaaagtaatcaatcagcaagtttttctgagtgtctatttttctgctaaatattattagatattgttagagctaaaaaagagatgtaaaaaaggaccattttctaaaacagtctatctccccacctagtagaagtgacaaaactagccaacaatagcaacctcttttacacagaaaaacacattaaaacacatccaattacagaaccaaacatcytacatcttttccacataatctgacaacaacctataatattttttgttgttactttttctacaggcatattttgaatcaatgttccttggccatattcctgcaaatgttcaaattcataagaaagcaggtcctgtttatgggttcaggggctgcattctagaccttcaagtaaacaacaaagaattcttcatcatcgatgaagcacga

SEQ ID NO: 331087 - DNA, 651 bp, Homo sapiens
ttgcaacttatttgttactgattttattttagattgcttcctggtgacacgcagaaagatacctgaatctcatcagtgatatgttttcaaattacattttagtgtaggttaatttaggaatatttttgtagattgttagtagcattaaaagcttgttgatgtttttagtatcaaatcaagaaactgaccttgatctgtgttatacctggcatataaaaagctcccagttagatggataaacagaagaacaaataagtgaatgcatgtgtgaataaatgggtgaatcattaacagaaatctaaggattgactatcacaggtcatgcctggacattgcctgctaaacagcagtcatgtgtaggataagcagagccatggaaacagactatgcacagtaagctgggggctttaggggagactaaacttctgattctggggaaagtgcatataaagagtagaacactatatgtaaaggctatagggaaatatgaacaatgatgatccagggatgtaatcaatatcaggctagcagagattcctayacatgtaatagagaatagaatatggaattctgagacaagtgaatttttaaatacatgtaaattggcatttgtatagccaggatacctatccgccagcaatcaggatccag

SEQ ID NO: 331088 - DNA, 622 bp, Homo sapiens
actggattagaggaaaggctcttctcaggaaataacattgaggctgaaactgaatgatgagaaggcgtcagccatgagagtatcatacaaaagagaaagaaggttctaggccaagcwcaaaggaactaaatggggagcaaacacagactgtatgcaaattaaaaagaccagaaccatagcttcgaattcccccaaaagcagaggttataccacaggtttagttacaagcaatttattggaggcagtcccaaggagcaagggaaagactcgggacaggaagacagggcagagggaaaagccggcattaagcagagttgtagagtccctacttcgaggattctattctgctgggacatcctgagtagcctacagattatctgcaagaagtgttcacctaaaggcagaagcaattatctgctgacttccagccacgttggttgagagtttcccccgtggggcattgactctgctccttcagactgtgttttcacaagggtagaagaaatggtttgctgtttatggtgagaagttgtcagagtgcagtgagtctgagttcccagggaactgtcagcatagttacattaaaagtcagttggagccgtggtgatgtggcatggcacac

SEQ ID NO: 331089 - DNA, 622 bp, Homo sapiens
actggattagaggaaaggctcttctcaggaaataacattgaggctgaaactgaatgatgagaaggcgtcagccatgagagtatcatacaaaagagaaagaaggttctaggccaagcacaaaggaactaaatggggagcaaacacagactgtatgcaaattaaaaagaccagaaccatagcttcgaattcccccaaaagcagaggttataccacaggtttagttacaagcaatttattggaggcagtcccaaggagcaagggaaagactcgggacaggaagacagggcagagggaaaagccggcattaagcagagttgtagagtccctacttcgaggattctattctgctgggacatcctgagtagcctacagattatctgcaagaagtgttcacctaaaggcagaagcaattatctgctgacttccagccacgttggttgagagttycccccgtggggcattgactctgctccttcagactgtgttttcacaagggtagaagaaatggtttgctgtttatggtgagaagttgtcagagtgcagtgagtctgagttcccagggaactgtcagcatagttacattaaaagtcagttggagccgtggtgatgtggcatggcacac

SEQ ID NO: 331090 - DNA, 622 bp, Homo sapiens
actggattagaggaaaggctcttctcaggaaataacattgaggctgaaactgaatgatgagaaggcgtcagccatgagagtatcatacaaaagagaaagaaggttctaggccaagcacaaaggaactaaatggggagcaaacacagactgtatgcaaattaaaaagaccagaaccatagcttcgaattcccccaaaagcagaggttataccacaggtttagttacaagcaatttattggaggcagtcccaaggagcaagggaaagactcgggacaggaagacagggcagagggaaaagccggcattaagcagagttgtagagtccctacttcgaggattctattctgctgggacatcctgagtagcctacagattatctgcaagaagtgttcacctaaaggcagaagcaattatctgctgacttccagccacgttggttgagagtttcccccrtggggcattgactctgctccttcagactgtgttttcacaagggtagaagaaatggtttgctgtttatggtgagaagttgtcagagtgcagtgagtctgagttcccagggaactgtcagcatagttacattaaaagtcagttggagccgtggtgatgtggcatggcacac

SEQ ID NO: 331091 - DNA, 431 bp, Homo sapiens
tgaacaacttcaagattagctacttcctttttgttcttttcagaaagagataacttgattttagatattagaggttgaaagtagctgcaggttttttcaattaaaagttctagtgtgtctcttctttttaatgcaaaaggytaaatcagtttcaggaaaatgctgacacagtattaagataaatcatgtcctgtctttaaaaatcctatagaatagtcaacttgtctaagtctcaaggataacaatagcttcctatatgtgattaaactagcaaacaattccttgtcgcttgacctgcatttttttcttgtttctattttactttaattagattgaaaacaactaatataaaccaagattttctaacccatgttacactttaatgtagataaaatatatgccaaatatttgaccctattctataagtaatg

SEQ ID NO: 331092 - DNA, 575 bp, Homo sapiens
atttcatagctatttcatgcgtggtaattgcatttataagagaaagagtatatatgcatttaagcctaaaaagrattctgccacaccatgtccccatacacatggggatctttctatttagataagtacaatggataaaagcttttagtgcaaactttactgttttgttgatatgtaagtagctgctctagtactttgaatttgtaaggtatttgagtcaaagtttatttttcttcagtagcctctccctctctccaccaaccagcattgtaatccagaggttttcttaattataataaaagcctaattatgtttatgttatttttaaaataagttatattgataacttattcctacactactgaaaatagttactagcatgtccatggatacatcaaataatatatgtctataaatgaactcattatattctccctcgactttctaaatttatatattcttcagtttcaagaatggcaccaaaatctactcagctagacaaaccagaaaccaatcatcaagttagatatttttctccctgaaatagggggaggttcccagatggacaaatagga

SEQ ID NO: 331093 - DNA, 575 bp, Homo sapiens
atttcatagctatttcatgcgtggtaattgcatttataagagaaagagtatatatgcatttaagcctaaaaaggattctgccacaccatgtccccatacacatggggatctttctatttagataagtacaatggataaaagcttttagtgcaaactttactgttttgttgatatgtaagtagctgctctagtactttgaatttgtaaggtatttgagtcaaagtttatttttcttcagtagcctctccctctctccaccaaccagcattgtaatccagaggttttcttaattataataaaagcctaattatgtttatgttatttttaaaataagttatattgataacttattcctacactactgaaaatagttactagcatgtccatggatacatcaaataatatatgyctataaatgaactcattatattctccctcgactttctaaatttatatattcttcagtttcaagaatggcaccaaaatctactcagctagacaaaccagaaaccaatcatcaagttagatatttttctccctgaaatagggggaggttcccagatggacaaatagga

SEQ ID NO: 331094 - DNA, 585 bp, Homo sapiens
caattattaatgcattattttattttttcacccacaataccctacaccttatccttctttcccaacccacttctctttgtaccagatttcatcatatttgtcttattccaccattaactgattcagacacaactaattacatgtttcatttattcttacctccttttcctaatatataatgagcagctgatcaatgccaagtactgtgctggrcacattctcacacatatctcatttaatgtatttagataatggccatgtttactatgttagctccccttttgggcttcatgttctccgagtctgctcccttggaagcaaaactttaatttcatttcataagaactagagggtcacaaggccagagatatggaaaagatatctctttctggaaaggagatcctgatgcacttgctggggaagaaattttggtcatttttctttaccaatgaagtttattttttgtaaagtgaaccatgcctgtcagagagagaaagaaagaaggaagagggaagagagaaggcgagagattataccgtatattccatttttctttgcaaaatgcctacaagattaaattggaca

SEQ ID NO: 331095 - DNA, 585 bp, Homo sapiens
caattattaatgcattattttattttttcacccacaataccctacaccttatccttctttcccaacccacttctctttgtaccagatttcatcatatttgtcttattccaccattaactgattcagacacaactaattacatgtttcatttattcttacctccttttcctaatatataatgagcagctgatcaatgccaagtactgtgctggacacattctcacacatatctcatttaatgtatttagataatggccatgtttactatgttagctccccttttgggcttcatgttctccgagtctgctcccttggaagcaaaactttaatttcatttcataagaactagagggtcacaaggccagagatatggaaaagatatctctttctggaaaggagatcctgatgcacttgctggggaagaaattttggtcatttttctttaccaatgaagtttattttttgtaaagtgaaccatgcctgtcagagagagaaagaaagaaggaagagggaagagagaaggcgagagattataccrtatattccatttttctttgcaaaatgcctacaagattaaattggaca

SEQ ID NO: 331096 - DNA, 552 bp, Homo sapiens
cttccctggttagatgtgatgttggctgttggtttgggatggatagtctctgtcatgttaaggaagcagccttctggttttgtttatcagcactcatattaggaatgggagttatattttacttaatgcctattgtccagttgttgaggtgatgtattatttgcttttaattttcycttttgccctttagatatgatttatgttcagttaattgattgcctaatattgagatatcctcagataaattcatattgaccatgtcatggtagacttaatataccattaaattctgtttgggaaaaaaaatctatttgcaaaaaaatctatttgctggggttatatagaattttgcagttattttactaagactagctttttctcaatatgcattgttaggttagtgaaagagggtttcactgacttcacagagggaatgagttgcctctgtctttttttattttttttgagacagagtcacactgtgtcgcccaggctggagtgcggtggtgccacctcagctcactgcaacttccgcctcccgggttcaagcag

SEQ ID NO: 331097 - DNA, 539 bp, Homo sapiens
ccattgactcctggatttcattgtttcagatgaaaattaaccatcattctttttgttgttgtattaaagataatgttttctttcctttggctacttataagattttctcttttaactctaaagattttatctatagtttgactaggatatgcctagttgtagtttttttctttgtatttatccctcttggggtttttaagattaggaatctgtgggttgatatctttcatcaattttggaaaattgtcagccattacatcttcaaatatttcttccccaatttcacctctcttctttttctrgtgtatcacttaaatttacatttgatcatttgatattgtctcacagtcctctgacagcctgttctgtacttttttttaattttaaaaagaaatcatacagttgtgagaaattattaatagatatcctttggaccctttacctagtttcccccagtgataacatcttgcagaattacagtatatcacaaccaggatactgtccttgataaaatccatcaatcttgttcagatgttcct

SEQ ID NO: 331098 - DNA, 539 bp, Homo sapiens
ccattgactcctggatttcattgtttcagatgaaaattaaccatcattctttttgttgttgtattaaagataatgttttctttcctttggctacttataagattttctcttttaactctaaagattttatctatagtttgactaggatatgcctagttgtagtttttttctttgtatttatccctcttggggtttttaagattaggaatctgtgggttgatatctttcatcaattttggaaaattgtcagccattacatcttcaaatatttcttccccaatttcacctctcttctttttctggtgtatcacttaaatttacatttgatcatttgatattgtctcacagtcctctgacagcctgttctgtacttttttttaattttaaaaagaaatcatacagttgtgagaaattattaatagatatcctttggaycctttacctagtttcccccagtgataacatcttgcagaattacagtatatcacaaccaggatactgtccttgataaaatccatcaatcttgttcagatgttcct

SEQ ID NO: 331099 - DNA, 561 bp, Homo sapiens
cacatctctcaggaataggcctgcccgagtatccctgccttgctcagccataggctgggagcagcctgtgggaggcatagccttggcacagatggggtggcgggtcccgagcacagtgtctggggtctctggcaatcacgctcccacagtggaaggttggagggcctggcagtgggctaagagggctgtggcccagtcctctccacagcctgccaccagctcggcgcctagccagtcccagcaaagtcagttcccaaggtggtgagactgtgggagggaaacagccatccccacacaggcctccctgcaggcctcragggaaggtcacccaggacaaccagctccacagcagagggaggatctgtgaggcactttcatgtcaataggggttgcatgtcctcagaggaaatcaaaccgtgaaatcatttccaacacaaaagcccatttattttaacaagggaaaaaaacagtggctccaaacagccctcagacatgatgggtaccctgtggacgtctgtgatgccttgtggtccattcacagttcctggtaggcacagagcg

SEQ ID NO: 331100 - DNA, 565 bp, Homo sapiens
caggtccttcctagcaccctctgagatgcccagtgtttcccccggtaataaacccaaattgttatctgaaggtgtgttcctggtggtctctggctggaggatgctgatagaattgcaggttcatggaatttcaactgagactctcactacctttgactggaacctttgactcagaaacagtgcatgcatctgagacccacttgtgtctctacctggatgaggtgccactcacccttggctgggaactacgttcatgctgaattgaactccaggatttcactgaagattttactgttgcatttatcttattttcttaagaataggtcccaytttggacatttggttttttgatcagaattctattgttctttggtgaaaatgttttctagtaactaacatctgctggcctaatgccctatctatctgcttgtgtactatcttgaatgttgtttgtccactgggagaggatgggaataggtcccataaatttgtccttgagctagccctaagggtgaagtggtaaagtggtcagtcagttacttcttggagacacgctgtgcccgag

SEQ ID NO: 331101 - DNA, 563 bp, Homo sapiens
gatggacaagactggtggggctgagcttgggaccagtgccaaggtctgtgcagccaggcttcggccccagcccagggaccgcaccctgctgtgaaccgtccagrccagctggcgaggatgacggggcagaactggaaaggtaagatttgggcccatcctggaaccagggttgggggtccacattgggtttggacatcacacctgaaacctcaccccccagccccgagtttgatcttggaagacctccttgcctggggcagctcagggccaagggtgctgacacagaaggggtcctgggctgaacaggccccacagctggtgctccgttctccaagtttggggaaggcaggccagggctcacccgctgggaggaggcagtggaccaaaggcctgttggcttctcgctgctgcggccaccaatgccactattctgaccaccgaggctaccctcagaagacctgctggagctcagggagagctgtcggtgatttaggggatggtccccgcagggtttgggcagtggtgggtcactccccggggagctaggccacccactccctaca

SEQ ID NO: 331102 - DNA, 563 bp, Homo sapiens
gatggacaagactggtggggctgagcttgggaccagtgccaaggtctgtgcagccaggcttcggccccagcccagggaccgcaccctgctgtgaaccgtccagaccagctggcgaggatgacggggcagaactggaaaggtaagatttgggcccatcctggaaccagggttgggggtccacattgggtttggacatcacacctgaaacctcaccccccagccccgagtttgatcttggaagacctccttgcctggggcagctcagggccaagggtgctgacacagaaggrgtcctgggctgaacaggccccacagctggtgctccgttctccaagtttggggaaggcaggccagggctcacccgctgggaggaggcagtggaccaaaggcctgttggcttctcgctgctgcggccaccaatgccactattctgaccaccgaggctaccctcagaagacctgctggagctcagggagagctgtcggtgatttaggggatggtccccgcagggtttgggcagtggtgggtcactccccggggagctaggccacccactccctaca

SEQ ID NO: 331103 - DNA, 551 bp, Homo sapiens
aggtaaatgactttcccaaggctagacagttagttaggaggcagagccaggacttgaatccatcactgatttgacacccagctcaagacttccaattacactacgtggttacctaattgtcaacctagtaactcagctctatactggcagaatacaaaattattttataatatcctcatcatgatctataaggcagagaaaaatggcttctccgcagaagaaggaaaatactggaacttggtatctgctatttgtttaattagctgatatggacagcatcattaaaaatcatgcttgagacatgccagtgaatagacagaaaaacataatcccacttccaaaatgaggagaaaggaaccatggtgcttcagcatattaaagaatgcagccctgagcacacttgytctcttagcaactactctgctactcatgataaaatctccactgttgttacagtcactatattggaaaactgcaaggtggagaagagaacattttctcccctctccacgtggctctttggaatatcaaaatggaggaaagtggttttt

SEQ ID NO: 331104 - DNA, 503 bp, Homo sapiens
gcaatggtaaatgacagcagtgatacaacatcctggtttaaaatgtaatcccaaaggccagaagaggcataaatcatacattcctaggtaatctgaattcatcttttgggaacattgtattacactcaatgcactgtactggccttctgtgactatgatgtcaaaaatccagggacgtgatgtgcaaattaatttagagattttgaatataytgacatctgcaaaaagagtatttctactctgaaaattagaattggaaaattttactgccaagtgtaatgttccatttggaataatttcagagattattaaaaagaggggagaaagtaactaatgagcccttcaaatggaacattacacttggcactaaatttgccaaaatgaaatgactaggccaggtcaggtgtgtcgatatccatgtgttcatgaaaacagtgctgtttgcgtgtactaaaaaaaatttctccatttcctacatatgaaaatgttttgaatttatacag

SEQ ID NO: 331105 - DNA, 570 bp, Homo sapiens
tactttgcttaatcatgtaaagtaraaaaagaagttatctttcaattaaatttgtatggttttaattttttactatagaaataaagtacacagtttttcttttttttttaaaagtcaagtaacacagggagttgtaaaataaaagccaagtctccttctctttcctaatgaactctcttccacttcagatttttatgcatattcacgtatcaataaatgcatatactttctaaaaatcatattttaaaaactatcgtgcatcttggtgtttttcactttacaatgatgtatctttgagatctttgcacattaacacatgagacgttggtgtttctaacagttacagagaatgcaaagtcaccctgcaaaaggattccaaaatgtacaaaaattcacactttcaacagcacatttctctctaacactcagatgactgctcaaaaattttaacctctcacaatctaaaagatgaaagtgtatctcattgctattttattttttccgttatgagtatatttaggcattttttcacatgtctactgaaagaaatggctaaaaaaaatttccttt

SEQ ID NO: 331106 - DNA, 583 bp, Homo sapiens
aatgtctagtctgaaaggtagtggggtagaggatttcttaagctttttttttttttttttggagatggagtctcgctctgtcacccaggctgwagtacagtggcacgatcttggctcactgcaacctccacctccctgattcaagcaattctctgcctcagcctcctgagtagctgggattacaggcacccgccaccacgcttggctaatttttgtatttttagtagaggcagggtttcgccatcttggccaggctggtcttgaactcctgacctggtgatccatccacctcggcctcccaaagtgctgagattacaggggtgagccactgcgcccagccatgttaagcattttgagttgtatttgaatccctttcaatctgagagctgcaggatacccctgttcagttatcctgttcagttttgttattatcctgttcagttttgttattaataccaattttgttggtctgttaacctatacacacattcacataactgcctaacaaattgcagctatttattatattaatatcaattttgttattctgatgacctatacatgcagtaacataactacctaa

SEQ ID NO: 331107 - DNA, 495 bp, Homo sapiens
ttcttatcaaattataaccaccatagacatacattaaatgtcatattggcaaaaagtagtgttatttcctctagtctctgggtccctactttatttgtatccctaaaatcactttcagaaccataagttgtttcctgacttgagtcagcaactgaactgcaagaggactcttaaaagaggagrggggtgcaccagttggcattctgtctcagcgtcagactcttcaccttagaacatgaaaactttctctgcactaggtagataggtatcagctgaactgggcggtgcccttttcattttttcccctcactgctttttactttcccatctccttgtacctcacatgtgtacagtagccataatgaaggccatgtagatacgacatgaaagagccaggagggagctcaggccagcttcccaagctattcattagcaattatcctatgttgaaatactacccacataaacatttcttcattagcaaataaactagtt

SEQ ID NO: 331108 - DNA, 648 bp, Homo sapiens
aaattaagctgtgctacgttgtctcatcaaacttactagaagggtcatgcaacgtggattacataagaacataacccaaaaatcccaacatagagagcactgtgaaattcctgaacttggccaataccctataaattttagaagatggatcttcccactagcaagtctatacttgytcctgaaataaattaatagccccctcattacatatctccttccattttacacaaagaacttaaggtcccagaataggttaaaaaaatgttttacaatcactacctagatgggcaccagggatatagccgagactgaccccaagaatgagcaggaactcacctcagtggtgcagaaactcctgcagcagatccaagataaatttcagaccatgtctgaccagatcattgggagaactgatgatatgagtagttgcactgatgatctggaaaagaacatcgcagatctcatgacacaggctggggtggaagaactggaaagtaaaaacaagatacctgccacacaagaggtgaaggttgctaataatttatactgaaatctggaacaccatttttccaagccaagagaagattgaatgggtttttgcagctaactactatgtgtatacaggttttataaaaagtgtgcattctt

SEQ ID NO: 331109 - DNA, 543 bp, Homo sapiens
tagggggtgatgattctggccaaactaggggtgtgtgttgcaagacaggaaagcatctgcaagtccagctggagatcctacaacctcgaccaatgattattttggtttcctatttcaaacactggctccaggtctgtggcttttgttttttaatgagaatgtcagagcccagaggccctttggtccaatgcagttgggtgggcagtggctggggcacacacgcagagcagagctgtccagtagtggacagcaccttgttgagactcttccagctctcctggggaggaggtgcaaaatagacctggcgttttgtgcctgaagcaccatttgctttatattgaagtgatagctcagtaggcagctgtttttaaaattttcccttcaccatgcatgttttaaagggaaacttttggctttgatttctttaataaaaatctggyggtaaccgttccagaaacccattatgaagttgtttttttccggcaatgacaattgtgatcattgtgcacctcaggccagtgtccaggtgggctcttgaccaag

SEQ ID NO: 331110 - DNA, 521 bp, Homo sapiens
ccatggcctgggcaacagattagtgtcccctttgattaaggccacgtggccttgttggctggtgggtgcagggttcataaggaaaggggtggcaatatggggcaccagcttctctagttctgagaacacctgcagccaggaggtttcttttcccatcctaggactcttcatcattttggcgcagacataaacatcagtctccaaacagtgagccattgtccattcctctgttccttcatcyatttttgtcatagagcatcatagtgcataactgtacagctccctcagaaacaggtgggtgatccaaagaacctgggatctaatgaatacattgaatttatgattacaaaaaaccttcccacaaaaacaaacaaacaacaaaaaaaaaacacaactccagttccatagagcttccctggtgagttccaccaaagaagaaatgatactcattctatacaaatacttctagaaaattgaagagaatggaatttctcctaactcattctttgaagccagcatta

SEQ ID NO: 331111 - DNA, 572 bp, Homo sapiens
gctcttgtcaaggtttccaacaattctcatattgttaagtccaatggtccatttttttgccctcatcttatttcatgtsatagcaggatttgacagggctggctacctctgagttctagcaatattctcctttcccagcttctgggatgctgcactcacacagtttttcacttacttcttatttagaatctcttcttctttcttctgtttccacaaaagatgctgtcagttcccatatccataataatacctgggtgtcaatgatgcagaattgcaattccttcatatcaataatcatgttttgcaattatttatttatttttcttcttttttatccttaaaatgtcagttccaatagtcatatgactttgtaaatttggtcactaaaaggtgaaataaacaggttcacattctgaaaattagtaaattacagagccagaaatgggtcatctaactttctaattccagagttgttgctactgtatgtcactctgcctctcataaaacaactattagaggggatttctgtgtctgaccataacagagtaacttgaagcagaccagcacttctg

SEQ ID NO: 331112 - DNA, 622 bp, Homo sapiens
gccaacatagctaggagttaagtggcaaaaatccctgagagaaggaaaccacataaaataagctcaatacttggtggttttcccctcaaggtatttgcccaatgcttaaactgtacaagtcaagagtgtaagaagcaaagaagaatcattgaataatggagcagagttttagcattgctatcagactgaaaaaccaaaaaaaaaaaaaaaaaaaattagagttcaggacccaccaaagacgagaacttctgaaaacacccaggtccttgattggaacacacgtaaggctaccaaggaatggtgacaaaacagaggtagaccctagcaaagactgcaactgagtctcataaaaggtcttccccagtcacattgaagtatttcaccttaraagtatctcatcctacagtagttgcccacctgaggaaagggtgattcatcatctttggtagaagataacactactcagaacatccctaatgttttatattaaatgttttctatttaaccaaaattgttagggatatcaaaagttatgaccaatagaaaaaatataattggtatacacccaaagaagttgaaaatattagagctaaacaacaacacatagcttttcacataattg

SEQ ID NO: 331113 - DNA, 582 bp, Homo sapiens
actaactggtaattttcatgtattttttgagctccttgttaaatagttggtaacttgaactcagcatgaagagaakagaggtagcaaatgccagttaacagaaccattttatttccttcagaaaattagcttatcactaggtctaaaatgtgggtaagtggagtcacagaaatagaggaaagagggaatgaaacagaagtaaaatttgaaaagataatggccaaaattttttaaatcagataaaaaacttctagccatagatttaagtgcgtatagtgcagtaaacaacaataaaacacacctagccatatcatagcaaatatgaaggaaaccaaagacaaagatctaaaaatcacccagcatggaaaaaaagatctatctgaaaagaagcaaaattatgacaaatgacttctccatagaaacaaaagaaggccaaaaacttgaaatgatagctgatatggtttagctgtgtcccacccaaatttcatcttgaattgtaactcccaccattcccacatgtcatgggaggaaactggtgggaggtaattgaatcatgggggcaggtcattcccatgctgttct

SEQ ID NO: 331114 - DNA, 582 bp, Homo sapiens
actaactggtaattttcatgtattttttgagctccttgttaaatagttggtaacttgaactcagcatgaagagaagagaggtagcaaatgccagttaacagaaccattttatttccttcagaaaattagcttatcactaggtctaaaatgtgggtaagtggagtcacagaaatagaggaaagagggaatgaaacagaagtaaaatttgaaaagataatggccaaaattttttaaatcagataaaaaacttctagccatagatttaagtgcgtatagtgcagtaaacaacaataaaacacacctagccatatcatagcaaatatgaaggaaaccaaagacaaagatctaaaaatcacccagcatggaaaaaaagatctatctgaaaagaagcaaaattatgacaaatgacttctccatagaaacaaaagaaggccaaaaacttgaaatgatagctgatatggtttagctrtgtcccacccaaatttcatcttgaattgtaactcccaccattcccacatgtcatgggaggaaactggtgggaggtaattgaatcatgggggcaggtcattcccatgctgttct

SEQ ID NO: 331115 - DNA, 501 bp, Homo sapiens
ataacccagtcgtccgggagccttggttactgctttgtttggtcttgagcctacaacctaaaccatctgccaagagatctagaaggaatcacacacacactagtgccttggcagaaaggcttctctgcctgcctacatcagtctcagcagtgaacctaaaagctgccctgtggctgggattcacccctgatcagttgagctcccatctcagaagtggttacacaagaacccaggggaagactcacccatatctcacagctcaggagtctgagcctccctgatgggcttgcccaactctgtcccagagcaaatcccaagggtgcccagccttagctctkgtccctctcgatgctgtcagagaactatctcctctgtactgagacctggtgggagagccatacctgtctgggacaatgatgctggctctctagcctccatctcacagcagatcccaaggggacccggtcccagctctgatttttcctgctgcaatgaaagaat

SEQ ID NO: 331116 - DNA, 562 bp, Homo sapiens
aaggaacccaacaaaaccaaaagtggattctttgaaaagatcaataaaatggataaacttctagccaggctaaacaagaatcaaagtgagagacacacatttgtagggtgagaaatgaaagaggggaaatgactactgatcccaaggatataaaaagagtgatacaggaatattatgaacaactctatgaccacaaatttgataacttagataaaatgcacttctttaaaaaatgcagaagatgcggtgagaaaatgacttgagaattaaaatggggaaaatcaacatagtctaaaaactgtaagatggaaattctgtcatgatacaatccaaaaaaaattagcacataactaacgaaataattaattatcatctacagtaagaatgggattattacaagagggaaatgatgagctcattaagagtaagtaacattggaatagtggctagttattttttccaataatrtatgtaacataactacgtaaggaaaaagaagtaagaatgttttggcctatatgtcttaattttttaagtgacataatgtcttaggaatactaga

SEQ ID NO: 331117 - DNA, 535 bp, Homo sapiens
gttaaataatttttgaaaagggagccaagattatttgatgaaagaagggacagttttcccaacaaatgatgtttattggaaaaatgcatattcatatgcaaaagaatgaagttgaactcttacctcatgccatatacaaaaattaaatcaaaagggattaaagacctaaacataatgctaaaactacaaaactcttagaagaaatagcaaatgcatcatgttgttgaatttggcaatgacttcttgggtatgacaccgaaaagacaggcaaatagagagcaaaaatagataaactggactacatcaaaattaaaaacttctgttcaccaaaggacacaatcaatagagtaaaaaagtaattaatgggatgagagaaaatgtttgtaaaccatacacctaataagaagttaatatccagaacatacaaakaattcctacaactcaatgataaagaagacaaccaatctgattaagaaatgttcaaagaacttgaatagacattattaaaagcagatacaaaatggccaacaagcct

SEQ ID NO: 331118 - DNA, 576 bp, Homo sapiens
tggcccagggctgcagtcatctgaaggcttgactgggactagatggtgcactctatggctgttggccggaggcytcggtttcttatcctgggggtgtctatgtagggctgcttgagtgtcctcacaacatggcacccacctccccctggatcagtgatgagagagtaagagagaaaagaagatgcagtggcttgtatgacctagttttaaaagtcacacaccatcacctctgcccacatttatttgttaaaaatgagtcactgagtcctgctttcatttaacaagaagataattagggtttactttttgaagactgtcaaagagtttgtggacatttgtgtttgtaaaagacccaaagatgcagaaggaccactcacagtgcctgactgtgagaaagtgtttcctctctctacttttttgtgcccctcctggtacaatagtgcacgccaagaaggcactacagaaaattcatttctgtgatatctttggtaaacctcatgctagttatactaatccagatcatctgtgtgcatcatcaccagaagcacatagtaattttggttccagttgtgtgtt

SEQ ID NO: 331119 - DNA, 487 bp, Homo sapiens
atggctttaactctttaaaactcttttaaacccaagccagttcaattccttttagtacatctcactcaaattttttttattttactcaagaagtatttacatttgaacctagaacaacacggaactgaggggcaccaactcatcatgcagttgaaaatccatgttataacttttgactcccccaaaacttaactactaaaaatctggcattgacttgaagccttgctgatgatatagtcaattaacacatattttatatgtattatagactgtattcttcaataaaaaaggtagagaaaagaaaagttcattaagaaaatcataaggaagaaaaaatacatttacagtagtgtactgtatttatcaataccataagtttatgtcatctgtttacaagwtgaattatctgcctgaagcgaagagcaaccacagcttcagacctcagtctatggtatatatcaagcaattcgcctttttcttgtactgt

SEQ ID NO: 331120 - DNA, 362 bp, Homo sapiens
catgttagtaagaaaataaataaatacatatatatacatacatgcagattttgaacactgctgaagaataaagaaaaaggatgatgatctacagggtgaatgarccgtgggtaaggggtgaggtagctaaataataagctatgggatagctaaatccctctctcttgaaagaagctattgaaagaaggactacctgagaggtttgatctgagaaattcggtaaacatttcaggcacagggagtaataagtataaaagcctaaagaagtggaaaagagagcaatgtagtgagagccctggtgaccaaagggtagagtgctatgagttttgataattaagaatataaggcataaagaagactgt

SEQ ID NO: 331121 - DNA, 488 bp, Homo sapiens
tttcaaacatagcttaacactaagcttatcactttctaactgaaaattgatttggtgatgtatagattagattcacttagtgttagacccttgctgcataaaaagtaaagggcattcaatattggtttaaaaacataatttkattcccaaatttaaaatgcccagaggtgggcagcacagggctctatagcagttccacaaagttgtcagggaccaaggattctataacttttattccaccatgtgttaaggtaactttttaagaaccagccatcataaagtcattccagctgggcgcagtggctcacgcctgtaatcctagcactttggaaggcagaggtgggcggatcacaaggtcaggagatcaagaccatcttggctaatgcggtgaaaccccatctctgctaaaaatacaaaaattagccgggcatagtgatgggcccctgtagtcccagctacttgggaggctgaggcaggagaatggcgtg

SEQ ID NO: 331122 - DNA, 451 bp, Homo sapiens
cagtgcttcagctaatcacaacttgattaacacctggaacttttctaattagcatattgaatgtcagaaaaaggttttcatggagcacttagtagttaattagttaacatgtggaaggttaaaaatgggctctcattagtgaaattaaaaatattcaaggtatgtgggatggttaaaatattttaaaacactctacacttaggtgaacagcatataagactctagcaagtcctgtattctctacctttgaggataacacacaaagctttatctgtaaacattccggtgttyaggtattgaaagaagattcctcattgcctgatgataaccatatggataaaaggatcccatctctcaaatattgtactatcttctttaagtaaattgtctatgtgtgattgggtcacctaaaagtacagagcactgggacttcatgtacttcaaaagactg

SEQ ID NO: 331123 - DNA, 607 bp, Homo sapiens
ctagccattctgcatcttcctgtgggcatctacagtatgtaggtgacttgtcaagagagcagctccctggtctgcttcagggactcatcacaactggccatctgagaaatgccattgtcatttttaggttggcaagtgccttcccttctcatgctgctcatgtggtgacaacattcaaataatctaatttcagtaaaacgtggagctactagagcagttttaaataggaattcactaccgatttgctgtgctttgcttttycctggatgttatagcccctgccctgacctctgtgacttgggaaaatgaatatcatttctcccccttaatcatcacacagtctccaaataaaaatagtggctcctcagaggagacaacatgcaattagatgtctgcagttttgcatattctgagcaagcaatttaaaatgtcaaatagtgagcagtttctttgtgcttcataaaaagactcccccgattcccccagacaacccatttgcagaattgctagtaaatcaacataatttgttttccctgagactatgttttgccagggaaacctccttcaaaactgctgaagctgctgcaattatataaaattatcgcat

SEQ ID NO: 331124 - DNA, 608 bp, Homo sapiens
caagaggcatctttctcacctcatcctgaacatggaggaatttggcttggttaaatagtctggaggcagctaggagcagggaaaatgggggttttcatagcaactggggcgagaaactcaacaaagagccgtggtttctagtaactacctcatgaacactaccaagaggcaagctctctaacttcacaggacacatcatctgtagacactttcaactagctcacatgttccctcagcactccatgtgcccgcacccccaccttgccctcactgtgactggggccctacatccattcctacagatgatgtgtgcagacttctgcagatcatgcacaggcacatgctgacagctggctcaactctgctagtttgagagaaagcccttaaccttaatgacttcaagggacttctctggggaaaataaatgggggaccattagtgcccagcctggcatttcargatcaagagaaggcatacaatactaagattcccctttccccaactaagaagcaataaaagaaatggagcgggtgcatccatagataaggtctgtgagattcccagaattcctaatcagtcagactggtgtttcactcccaaagccagcc

SEQ ID NO: 331125 - DNA, 608 bp, Homo sapiens
caagaggcatctttctcacctcatcctgaacatggaggaatttggcttggttaaatagtctggaggcagctaggagcagggaaaatgggggttttcatagcaactggggcgagaaactcaacaaagagccgtggtttctagtaactacctcatgaacactaccaagaggcaagctctctaacttcacaggacacatcatctgtagacactttcaactagctcacatgttccctcagcactccatgtgcccgcacccccaccttgccctcactgtgactggggccctacatccattcctacagatgatgtgtgcagacttctgcagatcatgcacaggcacatgctgacagctggctcaactctgctagtttgagagaaagcccttaaccttaatgacttcaagggacttctctggggaaaataaatgggggaccattagtgcccagcctggcatttcaagatcaagagaaggcatacaatactaagattcccctttccccaactaagaagcaataaaagaaatggagygggtgcatccatagataaggtctgtgagattcccagaattcctaatcagtcagactggtgtttcactcccaaagccagcc

SEQ ID NO: 331126 - DNA, 618 bp, Homo sapiens
ctgtttccatctctttggcaggttggaaatgcatttcttacttaacctgcatgtgaaggactttctgaagcatcactttccagcttttgatggcttgataaggatttcctgtcacttaaatgtatttttggtctaatagcataatactttaaaaaatagtatatgtaaaattgtatgatgattttacgaagagtacaggaggctgcaattaaagagacaaggaattttttwaaaaatcctgaaaatccaatgtacatttataatacaaattggactactactggccctaagatctcatgtaatgcattgaatccaaattcaatttagcatgtctcacaatttccctgtaaagggtcaaaaccaatgactgataaactccctgaacaagtaaaatctatttcctataagaagagatttttttcttatgattgtaccaataacattttctatggcattggcattgacagtctacaggatattttcacagatattattaatttttattccatttaattttcaaaatggccctgtgaattaggttaacctgcattttaaatataaggggaaactgatgctctgggagggattatatgtctgatatcacacaactaataagag

SEQ ID NO: 331127 - DNA, 618 bp, Homo sapiens
ctgtttccatctctttggcaggttggaaatgcatttcttacttaacctgcatgtgaaggactttctgaagcatcactttccagcttttgatggcttgataaggatttcctgtcacttaaatgtatttttggtctaatagcataatactttaaaaaatagtatatgtaaaattgtatgatgattttacgaagagtacaggaggctgcaattaaagagacaaggaatttttttaaaaatcctgaaaatccaatgtacatttataatacaaattggactactactggccctaagatctcatgtaatgcattgaatccaaattcaatttagcatgtctcacaatttccctgtaaagggtcaaaaccaatgactgataaactccctgaacaagtaaaatctatttcctataagaagagatktttttcttatgattgtaccaataacattttctatggcattggcattgacagtctacaggatattttcacagatattattaatttttattccatttaattttcaaaatggccctgtgaattaggttaacctgcattttaaatataaggggaaactgatgctctgggagggattatatgtctgatatcacacaactaataagag

SEQ ID NO: 331128 - DNA, 627 bp, Homo sapiens
gttctctttttagcaatatcttccccccagagtagagactttgattctcctaaatgctgctgaagaacctatgtggaaaagccaaattacttttattctataaagcctatctctttgatggaggttcccttccttctgctactgcctctgaattcctactgtttgtggcagaataactttagattatattagaaattatataatgaagcatgcatgttaataacttagagataactaytttcaagccagcaaaggaaaaaaaggggaatgggaatggggacatagaacacttgattaattcaaccaaagaatggaaaagaaaataaatatgtagcaaagaaaaagaacgattgaacaacaagagactaaattgtcatttacaaacaatatgatcggctatgtagaaaattcaagagaatctggatataagaaaatcatgtattccattagaattaatctattggaactaagaatggggcttagcaaaggtactgaattcaagatcaaccgaatttatgcaatgcattcttacatactaatgtgtcaatacaaaaagataaaggaaaaaaataataatcacaatagaagaaaaaagtcaggcacttaaaagtaaacccaacaaagcat

SEQ ID NO: 331129 - DNA, 572 bp, Homo sapiens
ttcaataaataccatccatcatcaccaaaacataggggcaatgtcttctacagagtagctggcatgcaagaaatgttgataagaaagccacaatggaggaagcaccatactacaaatccagagaacctaggtctccattctgacagatacacgtgactcagccaaccaacttcatttcactttggtcatatctgtagcattgtatttattcacttattggagtgcattcgatccatttatacctgtgtctctycctaacacatatcctctaaggggagggatcactatttctttctgataggactacagttggtgcttcataagcatttgctggaataaagttgttttgaagggttttagttggattgggtaaggagtatatttaactgggtattgataataagaaactaaactaagatcagttacaggaatattgcaataatccagatgagggatgataggaaaccaagctatagggagattgaagtggagataaaggaactaattgtgtagataaatttatgttacaagtgacaagaattggtaagtaatttagttgcaaggaaagagtc

SEQ ID NO: 331130 - DNA, 494 bp, Homo sapiens
gaaggaaaagatattggtgacatttagctatgtttactgtagraaaatccaataaaaagaattaatttgtttacctgtgttgtcaaacgggtcatgctggtatttctagtctcaatatattttaagtatgttagcagtaggttgctgaaaggtcacagaagtcccacagttaattaatagaatcttccaccagtcacacaaaagagaggctagacctggagttcagtctcattatgacaaataaccaagcaagaaatttcacagctagtacacaaacctctttactgatttattcagccactcagcagtaatttattattaaacttaatctactcaaaatgttcatgcacatagtaaataaggcctctatactcacatatgaagcaaacttaaatcaaattacataccacctgtggaatttccatttcagataaagatagcaaactcatcaaagaaaagtgtgtgttgatgggtaggaagtttcttagatttca

SEQ ID NO: 331131 - DNA, 610 bp, Homo sapiens
cagtctcattatgacaaataaccaagcaagaaatttcacagctagtacacaaacctctttactgatttattcagccactcagcagtaatttattattaaacttaatctactcaaaatgttcatgcacatagtaaataaggcctctatactcacatatgaagcaaacttaaatcaaattacataccacctgtggaatttccatttcagataaagatagcaaactcatcaaagaaaagtgtgtgttgatgggtaggaagtttcttagatttcatcagatgaagaaaggatgattgaatacttatgtccacattctttcatgataattattttcaagggccagtagagcgtggctcccagttgaacatagcattgttgtggccacactratatagacttacaatgtctcacaatgaagagcccaaaaggtaaaaattctgtcactaaaaacaactgcagaagccaggaggaatttccattaactataaaacgtggtagacacaaagtagcagaaatgtaagatgaacaagactagacatttaatgtacaatatgagaaccataattaataaaattgtactgtatttgggaattttcttgaatacattttaact

SEQ ID NO: 331132 - DNA, 527 bp, Homo sapiens
tggtaatgttatggttttaatttgtattttcctaataagtaatgatgttgagtatcttttcatgagcttattggcatttatataccttcttcggtaaagtgtgtgttcaaattttctacttatttataagggattgtttgttttyttattactgaattgtaagagtttctgtttttttaatatattctggctatgtattttaaaatcactgttttacagagttattgtactattccacatctgtgacagcagtatatgagagtgctaattccactacatcctcatcaacattttatatagtcagtcttctcagttttagacattctaataggaatatgtgtgtgtatttcattccttttttagagtagcttttacagaaaactattacagaaaaattgataaaatgatacagagattttccacatgtccagtttctcctattattaacatcttgcattaggtatggtaaatttcttacaatcaatgagtcaatattaatatataaccattaactaaagtccatattt

SEQ ID NO: 331133 - DNA, 565 bp, Homo sapiens
aaaactttttggtataaagaacatttccaggaacttgaacgctatctgaagaggaaatattacacctaatttatacccaggttttttttctcttttcaaaggaaggctcaacagaggattctatagtgaaattgaattattgacagggaagttaagtaaatgaagtgttataagactattgcctaaaggtatcactcacttcatccttttagagaggtagcactggcatgaagcatgcacttggcagtaagacagatcaagttccaagtctgacctttagcaccttttagttctgtgacccaacacagcctaattgaaccacccaaaktgaagtttccatatatcaaagatgaaaatagtaattaccctgacccccagtagggccattgtgatgattaaatttaaacatatatgtaaaacacaggtgcacagtaaatagcaggattccttttggtaagagcagcagaacataaagatttactagtaaacagatgccatatcaaggacagatttcatatccattcatgtttctgatagttaatcaaattctaccaagatacaaatt

SEQ ID NO: 331134 - DNA, 538 bp, Homo sapiens
attagagttgcttatgggtcactggagctacttttatgttctgaatggtgataaatgattttccagtgctctttgatatcttgccctttttatagagtgttgattttctctttccctgacttctctgtgttctctaaaaataaacactaccacctgagtgaaggcacatgagaatacctgtgccccttgaaaactaaaagcacaaatacagagggacaatatgagttatgattacatttattccacaaattattmattcgatgaatatgtattgacttcttactagatgcctggtgttatatttgtctctggtgataaagggtaaattacaaagcctttgcacccacagaagttaatgcaactaaggaggaagacaatatgcaggaatacatatagataagtaaaatactcttctggtagtgtcagaggcattctaaccagagcgactccattttgagtgaacactaggaaaatgaggctgaaacttgctgggctaaatttccagaaaattaggcattcctagcttctagatgtttat

SEQ ID NO: 331135 - DNA, 450 bp, Homo sapiens
tattgaaccatatttgacagtgggtgtagcctttttccctctcccaggaagttaggcttcccttgcttgaagaacttgaaatgcctatttttaagggactgtttatcctcctcagagggatcatagcctctaaacctatagctagacttatgtaccaattggccccagaggatgaattacgaagtatgaacaactggtactttaatacacaccaaagtaattgcattattttttcaatttctatagacagaagcctggggaacactatgtggaaatgggtcctaagggtattgggttcasttggaaagaaaataatatttgatgaggttgaatttattgacgtgagaatctcatttgcatctattagctcaaatggcaaggagaggttccaaagtttactgctgactggcatatggatccaaatgaagtctgcataggaaaactgaaatg

SEQ ID NO: 331136 - DNA, 596 bp, Homo sapiens
tccagtgagactggcttcataaatgaagaaaagatacagtattttttcagaaaaaacaaatgctgaatttgccactaccaagccagcactacaagaactgctaaaagaagctctaaatcttgaaacaaatcctcaaaatatatcaaaacagaacctcttaaagcataaatctcataggacctatgtaacaacacaataaaaaaaagaaaaaaaacacaagatattcaggcaacaatagcacatttaatagaatagtaccacacatctcaatactaactttgaatgtaaagagcctaaatgctgtacttaaagatacagaatggcagactggaaaataattcaacaaccaagtatctactgccttcaagagactcacctaacaaacaaagattcacataaacttaaggcaaaggggtgaaaaaagacattccattcagatggacaccaaaagtgagcaggagtagctattcttctatcataaaaaacaaactgtaaaacaasagtggttaatttttgcagtggctgctgctggttgtaattttccacgtttagtacttccttcaggagctcttgcaaggcaggctgggtggtgacaa

SEQ ID NO: 331137 - DNA, 575 bp, Homo sapiens
tcaaatcaagaactcaaacatttttataatagccgccaaaaaattattagaaatatacctacccaaggaggtgaaagacctttacaaggaaaactcaaacactgctgaaagaaatcacagacaatacaaacaaatagaaacacatcctatgctcattgatgagtagaatcaatattgtraaaatgaccatactgccaaaagcaatctatgaattcaatgcaattcccatcaaaattccaccatcattcttcacagaattagaaatgacaatcttaaaatttaaatggaactaaaaaagagcctgcatagccaaagcaaagctaagcaaaaagaacaaatctggacacagtacattatctgacttcaaactatgctataaggccgtagtcaccaaaacagcatggtactggtataaaaataggcaaataaaccactggaacagaatagagaactcagaaatagggtcaaatccagccaactgatcctcaacaaaacaagcaaaaacattaagtggggaaaggacaccctattcaacacatggtgctgggataactggcaagccacatgtaaaagaa

SEQ ID NO: 331138 - DNA, 566 bp, Homo sapiens
gcaagtacaagcctttgtttagcaagcctgacccagggaaactgtcctctctacagcaggcttggtgcacagccagggcactgcaattttctggagagagttgcagtcaagaactcaggtacgtttgggccagccaggtttatacacgtctgccttcctagtctaggtgtctccatgggaagtatmattaatggaggacttaactgaggcattctttactatctggactctgcctttctatttctagccattttccttctccctcccactgccttttccctggactgaagtccagaaggaggcaagggctttttgttatgcagtgaggcaattcctcccatctgtgctgagtcacctgactgattcttttccattgccaatccatgctggggggaatggaatattagggaggcagcttagcattttgcctatttttggcactgacatagtaagtgaattagagcttgattgttagtttcaatttggtctattgtctttgaccaccttgacagttgattgctcgaccagatggagctcacagtttatgcatgatttcatttatctaa

SEQ ID NO: 331139 - DNA, 566 bp, Homo sapiens
gcaagtacaagcctttgtttagcaagcctgacccagggaaactgtcctctctacagcaggcttggtgcacagccagggcactgcaattttctggagagagttgcagtcaagaactcaggtacgtttgggccagccaggtttatacacgtctgccttcctagtctaggtgtctccatgggaagtataattaatggaggacttaactgaggcattctttwctatctggactctgcctttctatttctagccattttccttctccctcccactgccttttccctggactgaagtccagaaggaggcaagggctttttgttatgcagtgaggcaattcctcccatctgtgctgagtcacctgactgattcttttccattgccaatccatgctggggggaatggaatattagggaggcagcttagcattttgcctatttttggcactgacatagtaagtgaattagagcttgattgttagtttcaatttggtctattgtctttgaccaccttgacagttgattgctcgaccagatggagctcacagtttatgcatgatttcatttatctaa

SEQ ID NO: 331140 - DNA, 637 bp, Homo sapiens
atacaatggactttgaggatttagggggaacggtgcgagttggatgagggataaaagactatgaattgggtacagtgtatactgctctggggataggtgcacacaaatctcacatattactactaaagaaattactcatgtaatcaaactccacctgttccccaaaaacttatggaaaaaaataaataataaacaaaaaaactaacaacagaaggaaattacttccacataataacagccatacatgaaaagtctaaagctaacatcatacttaacagtaaaaaactgaaarcttcccctaaggtcaggaacaggcaagaatgtccactttcacttctatgtagcataatacaagtcctagccaaagcaattaaaaataaataaataaatggtatctaaatcagaaaagtagaagttaaatgacatgtttgtaaatgccataatattatatgtggaaaactaagcacccaattaaaaaaactgtaagaattaataaataaatttgcaaatttgcaagatataaaatcaaaaatgtaaatcatttctatacattcacaacaaactatccaagagggaaattgagaaaaactgcattcatagtagtatcaaaaatagtcttccattccattagaagaaa

SEQ ID NO: 331141 - DNA, 637 bp, Homo sapiens
atacaatggactttgaggatttagggggaacggtgcgagttggatgagggataaaagactatgaattgggtacagtgtatactgctctggggataggtgcacacaaatctcacatattactactaaagaaattactcatgtaatcaaactccacctgttccccaaaaacttatggaaaaaaataaataataaacaaaaaaactaacaacagaaggaaattacttccacataataacagccatacatgaaaagtctaaagctaacatcatacttaacagtaaaaaactgaaagcttcccctaaggtcaggaacaggcaagaatgtccactttmacttctatgtagcataatacaagtcctagccaaagcaattaaaaataaataaataaatggtatctaaatcagaaaagtagaagttaaatgacatgtttgtaaatgccataatattatatgtggaaaactaagcacccaattaaaaaaactgtaagaattaataaataaatttgcaaatttgcaagatataaaatcaaaaatgtaaatcatttctatacattcacaacaaactatccaagagggaaattgagaaaaactgcattcatagtagtatcaaaaatagtcttccattccattagaagaaa

SEQ ID NO: 331142 - DNA, 584 bp, Homo sapiens
atttcttccttgtagtatcttgtgaagtgtagccagtcatgacaagcaaaggttggtaacattctattttttaacttcttctgttgtctattactgcattgctacattatttgcttataacactattgtagctcactatttaccaaaggttttgtcactacattatacatatttcattcttcaatcattcaattatagcttktgctcttcttgccaaataataagcaattgattattttatagaagcattgcctatctgtataccaatttctacatcctcaagggtaagccgagttatgctgtagtaataaaaaattcaaaatcttagtgacttgtagcagcaaaaatgtattcttttttttttcttttctttttttttttttttttttttgagatggagtcttgctctgtggcccaagctgaagtgcaatggtgtgatctcagctcactgcaacctctgcctcccgggttcacaccattctcctgcctcagcctccatagtagctgggactacaggcgcccgccaccacgcccagctaattttttatgtttttagtacagacagggtttcaccgtgttagaca

SEQ ID NO: 331143 - DNA, 584 bp, Homo sapiens
atttcttccttgtagtatcttgtgaagtgtagccagtcatgacaagcaaaggttggtaacattctattttttaacttcttctgttgtctattactgcattgctacattatttgcttataacactattgtagctcactatttaccaaaggttttgtcactacattatacatatttcattcttcaatcattcaattatagcttgtgctcttcttgccaaataataagcaattgattattttatagaagcattgcctatctgtataccaatttctacatcctcaagggtaagccgagttatgctgtagtaataaaaaattcaaaatcttagtgacttgtagcagcaaaaatgtattcttttttttttcttttctttttttttttttttttttttgagatggagtcttgctctgtggcccaagctgaagtgcaatggygtgatctcagctcactgcaacctctgcctcccgggttcacaccattctcctgcctcagcctccatagtagctgggactacaggcgcccgccaccacgcccagctaattttttatgtttttagtacagacagggtttcaccgtgttagaca

SEQ ID NO: 331144 - DNA, 610 bp, Homo sapiens
gctgttctgacgttcagctcatcttgtggccattaatttagtgcctgttgtggctgaagtgagtgctgttgtccgcttctcacctctatttagggtggtctaattcatattgctgagcttctacttaagtgttatttttaagttttctgatacactttttaaattgaataggtgaacaggagaagcaatctccatatgtcttagtgcaggatgaagagcatctcctttccacatttagagaggaggacagctaaggagtaaagaaggcacattctcagtttggggttgagagtttgtgattcaagatatgtagtattctgccaaatctagaaaaaaatatataaaatataaggaaagaacatgcaaaacacaaatatttcatttttaaaaaagcctacaagagtttctgagctaaagctaaatttctcattatcaaacatcaccttaaggaggagtgttgaacatttttaaagggaatgaatatggggcagacatcaggttccatgtagacctggagccagactgttaataccataaggcatggcgaagtcacaattcaattaaacaaaatgctsattacactaatatttaataaattagcttattaaac

SEQ ID NO: 331145 - DNA, 618 bp, Homo sapiens
tttggtcaaacttctatgatttcctcctagtctactcccaaagatttttttttaaatctagaattccataagtttataccagggaagtaggacacttttctagtagatatatatgcctgtagctttggaacacttttatagtcatttaaatttattttcttataaaaatatattaaaaattaggctacttagtcttactgataaattttagataaatggttaatcttatctcaggcccatgccagttctataattatattctgtaatttacattatatttaggaagaaaaaaataattcctcctcctgtgatatggaaggcctctgatcttagsctgctgtattagtctgttctcacactgctatgaagaaatacctgagactcagtaacttataaaggaaagaggtttaattgactcacagttccaaatggctggggtggtctcaggaaacttacaatcatggtggaagggaaggggaagcaaacacatccttcttcacatggcttcaatagaaggaagtgccaagcaaagggggacgtcccttataaaatgatctgatcttgtgagaactcattcactatcatgagaacatcatgggggaaactgtccgtacgatt

SEQ ID NO: 331146 - DNA, 554 bp, Homo sapiens
aataacttactacctctttctggctttgccaatttctttctgtattagtttatrcacattaagtatgcaatgttgttactcagctatataccttctaaattgcatgaaatctcttgagagtcctgatctagaatatttgagtaatatgtataaattgattttgacatgtagctaattgacacaaatcagtatgtcacatttgtaggtacctgattatggaggtaattatctcaacttctctaatgcacagttcttttagtgtgcacatatatttctaaaatgcttaactgtagccatagtctctgttgttttgctttacaggcattcatatacgttaaagatataaaaataattaaagaaaatcacttatatctccctcatctttattcttacattggaatacacagtctgttaactttttgagggatcaggcttatttatttttttcttgattcaagttttcacaattttggaactagtgcttggatagcgggcctcaggactctgcctagtgctctattctcacaaagaatagtagccaaaaaatatattgt

SEQ ID NO: 331147 - DNA, 540 bp, Homo sapiens
gtattggcaaagatacaactctgtataaattgcataaaaacagggcacttcaaaatttgctttactcattaatttaaacttgcattaagcaatttacatgtatgccattttcacccttgctatttccaygttttaattagcttaatttaactagaatctctagataggtcacatctctcaagtttaataaaacagagtaaaatgggcttaatagaaattcataaacgatcagtgttttacagtaatacataatttatatcttgtcaatgcccagtgcatcttgtaatattcaagtaaatagaagaactactagtgtaacatatgatagccttattagcatatctttcaaaattaagtagtaatctgctgctgttagagttggttctatggtataatgtataagtatactgctctatttatataattgtacagtacatcagtacatatatatagcagtcttctacatatataatatataattaatatatattaattataattattgtatatattgctatgggacctgaagttggttgactt

SEQ ID NO: 331148 - DNA, 611 bp, Homo sapiens
catcaacaaaatgatttttttggcaactttaatstaacatttgattaattaaaggtaggatgaggatcataccaatgaaagacagttatcagtgagaaaaaccacagttcttaacatctaaatatattaccttcattatgctagtgtggctattgcctcaacgtttttatgaaaattaacagttatttcagaaaaaaaatacctgaaaattcaaggtgatagataacatggtttactgaaaaaacaaaacaaaacatcaaaaaccaatatgtagacatctgaagaaggtggaagggaaaggagagcttatatatttaataaaactaatttctatattagtgtaagaaattaaatcatattgtacatcccaaccaaattttaaacaaagctagcatgtgacatgccatgttttgctcaaatactatttaactagtgtggccttctcaaccataataattaaaatgcctcctcctgactaaaagttctcttttcttttttgcctacattacttttataacatgtatcaccatgtgaaatctttcatgctttaattgcttatttatttactgtttgcctcccctcctcctcacacccacactgacaaggtgaaa

SEQ ID NO: 331149 - DNA, 611 bp, Homo sapiens
catcaacaaaatgatttttttggcaactttaatgtaacatttgattaattaaaggtaggatgaggatcataccaatgaaagacagttatcagtgagaaaaaccacagttcttaacatctaaatatattaccttcattatgctagtgtggctattgcctcaacgtttttatgaaaattaacagttatttcagaaaaaaaatacctgaaaattcaaggtgatagataacatggtttactgaaaaaacaaaacaaaacatcaaaaaccaatatgtagacatctgaagaaggtggaagggaaaggagagcttatatatttaatwaaactaatttctatattagtgtaagaaattaaatcatattgtacatcccaaccaaattttaaacaaagctagcatgtgacatgccatgttttgctcaaatactatttaactagtgtggccttctcaaccataataattaaaatgcctcctcctgactaaaagttctcttttcttttttgcctacattacttttataacatgtatcaccatgtgaaatctttcatgctttaattgcttatttatttactgtttgcctcccctcctcctcacacccacactgacaaggtgaaa

SEQ ID NO: 331150 - DNA, 537 bp, Homo sapiens
gggtatgaaaatgcccactccaggtatgaacagaagcaaaacagctctatagcctgagggttgtctttgatttagagtcacagtttcaagctattcaaagcaaaagtccacagaaacttggggagaggagcatgggaccaatgcaagggaatcttaggcaagtagatgaaacatcaacaaggtttactgaaaatggatttcatcttgaaaaggaaaagaagtattaagtcatgcagaccatctaaatagrgagagaaaatcaatcttgatttaatctatatgaagaagcaattgaccagatgaaagcaaaggtttagaggtgagaataactggaaaataatgggaatactcccagtttggtaaatgatatgaaagaacatttaatagagctcctgcaattcttgagtatacctggggtggaagcatgtcctttattcctatattctgtttccttaaactctgtacctgcaactattgagatactaagaatatatatgggaaatgtgagaatacttcatatataataaacatatatct

SEQ ID NO: 331151 - DNA, 506 bp, Homo sapiens
aagaaaagttattcttatagccaaagagtggagaaaacccaaatattcatcaatggatgtattgataaattttcatatatccatgtgatattatacagtcataataaaataaagtattaattcatactacaacatagtaaaccataaaagtattattcttagtaaagcaaaccacaccgatatatcacagattgcataattgtgattcartttattagaagtgttcataattgacaaattcatagagataaaagttagattagtgtttgccatgggctggggaaaggtgaaataggagttactgctaaaaggtatgaggtttcttttggggtgataaaaacattctgaaattagtgtaatggttacatgttttactaaatattctaaaaaccacttaattttatactttaaaatactttttttttggtgcaaatttggctttgggaagtgctttggagcttcctcttggtccaaccactgagctggttatcgctggttgtcaaata

SEQ ID NO: 331152 - DNA, 507 bp, Homo sapiens
atcaaccttgtgccatgtagtggctagaaagctcttgagttccctttctttcacttaactttttcctctctttctttcccttccctctctctgatgccatacctgtaaaatatggctgcyatgcagaggcttgcatatcttcctctattttattttctgtctgatttcactattctattacttttatactggtattaagataaaaacaactgtttagaggcaatcattttttatgaactgatgagcttttattgacatctagactctatggctagagttctgaaataaaaactaaaaaatatttgtttatctgagcatgtatgtatttatgaaaacattcatgtatttgttaggtgttgtggcccaatgtaccaaactggcttaattaaagagtatgcataaattaagtcaaatggttcccatgttcaaataagtttaaataagtaaagtaaaatcttaaataaataagctggcttcaaagttattgataaaataatattaggaaag

SEQ ID NO: 331153 - DNA, 507 bp, Homo sapiens
atcaaccttgtgccatgtagtggctagaaagctcttgagttccctttctttcacttaactttttcctctctttctttcccttccctctctctgatgccatacctgtaaaatatggctgctatgcagaggcttgcatatcttcctctattttattttctgtctgatttmactattctattacttttatactggtattaagataaaaacaactgtttagaggcaatcattttttatgaactgatgagcttttattgacatctagactctatggctagagttctgaaataaaaactaaaaaatatttgtttatctgagcatgtatgtatttatgaaaacattcatgtatttgttaggtgttgtggcccaatgtaccaaactggcttaattaaagagtatgcataaattaagtcaaatggttcccatgttcaaataagtttaaataagtaaagtaaaatcttaaataaataagctggcttcaaagttattgataaaataatattaggaaag

SEQ ID NO: 331154 - DNA, 507 bp, Homo sapiens
atcaaccttgtgccatgtagtggctagaaagctcttgagttccctttctttcacttaactttttcctctctttctttcccttccctctctctgatgccatacctgtaaaatatggctgctatgcagaggcttgcatatcttcctctattttattttctgtctgatttcactattctattacttttatactggtattaagataaaaacaactgtttagaggcaatcattttttatgaactgatgagcttttattgacatctagactctatggctagagttctgaaataaaaactaaaaaatatttgtttatctgagcatgtatrtatttatgaaaacattcatgtatttgttaggtgttgtggcccaatgtaccaaactggcttaattaaagagtatgcataaattaagtcaaatggttcccatgttcaaataagtttaaataagtaaagtaaaatcttaaataaataagctggcttcaaagttattgataaaataatattaggaaag

SEQ ID NO: 331155 - DNA, 507 bp, Homo sapiens
atcaaccttgtgccatgtagtggctagaaagctcttgagttccctttctttcacttaactttttcctctctttctttcccttccctctctctgatgccatacctgtaaaatatggctgctatgcagaggcttgcatatcttcctctattttattttctgtctgatttcactattctattacttttatactggtattaagataaaaacaactgtttagaggcaatcattttttatgaactgatgagcttttattgacatctagactctatggctagagttctgaaataaaaactaaaaaatatttgtttatctgagcatgtatgtatttatgaaaacattcatgtatttgttaggtgttgtggcccaatgtaccaaactggcttaattaaagagtatgcataaattargtcaaatggttcccatgttcaaataagtttaaataagtaaagtaaaatcttaaataaataagctggcttcaaagttattgataaaataatattaggaaag

SEQ ID NO: 331156 - DNA, 503 bp, Homo sapiens
aactatatttaatttatggcagtatagttatttgcataagttcattaagagtctgttttctttcataacaagattccattggagacactggttattttagcaargatttgacttaaatgacctactttctgatataaacagactgctttaagggctcgaagttgacttgcagtgtcaattaaagtcccttgggaagaacttgcctcacaccttgtctacacagtccttgtacagggtttcctaaactttggtaagtaaaggatgcccctttctgacagtcccaggaaccccgttgtcttagaacctcaagaggagaggaatatattcaatccatacaagtatttgcaggcacagataaatccatggctgggctcaaggcttaagaagtctaatcagagatttcttatggaacaaagttctgacaaagccaatttttaaagcagcctatatgacaaataatttttttttgcattttatgaaaatacttaggccaagtataatac

SEQ ID NO: 331157 - DNA, 503 bp, Homo sapiens
aactatatttaatttatggcagtatagttatttgcataagttcattaagagtctgttttctttcataacaagattccattggagacactggttattttagcaaagatttgacttaaatgacstactttctgatataaacagactgctttaagggctcgaagttgacttgcagtgtcaattaaagtcccttgggaagaacttgcctcacaccttgtctacacagtccttgtacagggtttcctaaactttggtaagtaaaggatgcccctttctgacagtcccaggaaccccgttgtcttagaacctcaagaggagaggaatatattcaatccatacaagtatttgcaggcacagataaatccatggctgggctcaaggcttaagaagtctaatcagagatttcttatggaacaaagttctgacaaagccaatttttaaagcagcctatatgacaaataatttttttttgcattttatgaaaatacttaggccaagtataatac

SEQ ID NO: 331158 - DNA, 438 bp, Homo sapiens
ccaaaatttcctggactgttactcagaatagggaggggtagctgtcattcagagattttctgggttcctaaatagatatgttcttaaggttctctatacttagtaggagtgcagagacttgggaacacagatagaagtgtagactctcttgggagctgtggaatcaattaacatctgaatgatacagtaggagaaattgtaaagaactgcaaataatccttccacactggaaactgtctgtgagcaaagactttattgctcttgaatacaacagaagaagcattctcaggttaaacctccgatttggttctctctctgcccaatgcataattttgttgagtcagaaaaaaagtattttwaaaaaattaaattagtaatacaatttattttgcctgatttaatttagtaggatgctataacaatcctgacaatatagac

SEQ ID NO: 331159 - DNA, 632 bp, Homo sapiens
gtcagccagcatcgctaccgggttatgttttctttgcccttacttacagcagtttacccatgggaggtactattctcttcacaacacacttcaccatcatcacctgttttttctatgttcttctagtaattagcacttgaaatctctgtcttagagaacagtttttgaacagcattttaaagaaggtctctgctattagagttctgaatcttggagttaattgagcaatagcagtataatcattaagcatcttattgtgtctmatgtcagctcttagaagatgaggaatttattttaggattttgaaggctgggtctatatttttctacttttcttctagctaattcgaacttacctcatatttgtgttaatttctacaacataccaatgttgttacctgtgagaattactctagaaggttggtaacagtttaaaatatttcactgaatctctatgagtgtttaacaaatagttgtgggaaggtcctttgaggcttccaaaccagttgtcattttgaatcagaaatcccagattataaaatttcaaaaataatatatttattatatctgactgtaaatactgatgaagttagctttataactgctctgcgaggcagaatttcattttaagtg

SEQ ID NO: 331160 - DNA, 475 bp, Homo sapiens
gattttagtatgggaagtatcaaggacctcaattaggaaatatctgaatcattttcatcaagggagttaagtctgaccaagatttgaaatcaaactgaataaaattctaattatacctttgctatttagtacctataagggacttactcacactagaaattatgagtgatcattatgtgaaataatgtttgaaaatcctttagtatagattctagcacctagtgagcagcaagatatgatactatgttatctgtatgtgtgtgtctgcatgcgtgtgtgtgcatttctacgtctttgaaatacgagtgatttgcaaagcataaccaataagcagtgtttaacaartagagtttaacaaatacagtgcacggacatgcacaatcaaaatgcaatctagaagacttgagagtcaattcacaattatcatcaccaataatggctatgaggagtaaaggacaggtgaattagtagatag

SEQ ID NO: 331161 - DNA, 475 bp, Homo sapiens
gattttagtatgggaagtatcaaggacctcaattaggaaatatctgaatcattttcatcaagggagttaagtctgaccaagatttgaaatcaaactgaataaaattctaattatacctttgctatttagtacctataagggacttactcacactagaaattatgagtgatcattatgtgaaataatgtttgaaaatcctttagtatagattctagcacctagtgagcagcaagatatgatactatgttatctgtatgtgtgtgtctgcatgcgtgtgtgtgcatttctacgtctttgaaatacgagtgatttgcaaagcataaccaataagcagtgtttaacaagtagagtttaacaaatacagtgcacsgacatgcacaatcaaaatgcaatctagaagacttgagagtcaattcacaattatcatcaccaataatggctatgaggagtaaaggacaggtgaattagtagatag

SEQ ID NO: 331162 - DNA, 576 bp, Homo sapiens
taaaccaactctgttgaagcagaggcactcattgagtgttcaattctaatcatgaacgtagttactatmtcaactataaaagatttgttctctactttaacattttaagattaaaacaaattggattaagggttaagacactgacattcatgatcttttttgctgcctaaatgtttaaacaggaagagaccttggtaaattctacatctttgaaatacaagtgatttgtgaagcatgaccagtaagcagtgtttaacaaatagagattaacaaatagagtctgggatactggtggggtcttgcagtttgtaaagtaatcctgaggcaatctttaactaccagagtaaaaagaaaataggaactcaaacattgatttcacatttaataaatctaaaatatatggttaatatttccactcattaaattacatttgtagatttgtagaaatcattagagctctagaggttgtatatgtgccacaaggactgtgaggtctcttgtcttggttagcatatattagctcaatacactttatctcagtttatctttttatcacatcattcatgtgctattatt

SEQ ID NO: 331163 - DNA, 608 bp, Homo sapiens
gtagctctctcaagattcctccataaacaaatggcaccacaaggtagatagctttcataagaacttcagaccaaccagataaaaataggagttagttacctttcccttaaaatgttgaaaacaaaatcccctaggatttccttgtttatttcctaacctcagtatttttgttatctttcttgactgtattcttcttctctgtctccttcaagttggtatttacataaattttcacccccactacactccagctttccaataacagaccttgctttgcattctttcttccttgcttcacccaagctgttccttcattagtagttccatgagtctaacctagatctctgagtccatgatattcattcacccagttcatagcaaaatatcacaaccctatttttgcttgctggttatatcctctctttcctttagaagcttctagattctcctaaatgtttatgctatttcaggttcaagggcatttacgttatcactcagaagccctttaggttttctctctaaacttcamcaagaacttccttcaacttcaatgttttcaaaagagctgtatatgcttccaccctaacataaccaaggacagtttcatg

SEQ ID NO: 331164 - DNA, 582 bp, Homo sapiens
tctaaactataatatgtaaattcaggattgacatatcattccctttaattatgcatttctgacctttatatccacttgattcctaataaattttaatcagagacatattacttacccaagctttgtttatttgaactatttagctgtataaaattagcacaagaaaagataaatttgartaacttaaaaatagcatactagggattaggataactaacttttgagcattgtgccaaggactttgctaagaggatcacacaaattattttatataaccttaaaagccactgttatctcctttttagagacctgtaaacttagatttggtgaggtcaggtattaatatttccagagctatgcagctaattagaccaatgtcaacattgtgtctctagattgatattcttaatgccattctcttcttgtgtcttactgaatcaccctgtgttgcacatctgggcctttcattcaacatccattgataacacttattccaaaagctattacaattaggtgggccagtataatacaactattataactttccttgccttcatgctttccccacactgatcttctaaa

SEQ ID NO: 331165 - DNA, 593 bp, Homo sapiens
ttcttttttggtttcatatgaattttagaataatggtttctaattcattggaaagtratgtgtatgatttgacaggaataacatggaatctgtaaattgcttttggcaggatggccattttaacaatattggttcctgctatccatgagcatagaatatttttccatttgtttgtgatgtctcttatttttttccagtagtgttttgtaattctcattgtagagatccttcaccttggttatctgtattcctaggtattttattctttttgtggctactgtgaataaaattgcattcttcatttggctctcagcttggacattatggatgtatagaaatgcaattaatttttgtacattgatttggtatcctaaaacttttctgaagccatttatcagttctaggaggcttttggcagagtccatagcattttctaagtctagaataatatcttctttgaaagagattgcttgacttcctcccttattatctggatgacttttatttctttctcttgcctggttgccctggctaagacttccagtacggtgatgaataggagtagtggaatttgacattcttgtcttgttcca

SEQ ID NO: 331166 - DNA, 593 bp, Homo sapiens
ttcttttttggtttcatatgaattttagaataatggtttctaattcattggaaagtaatgtktatgatttgacaggaataacatggaatctgtaaattgcttttggcaggatggccattttaacaatattggttcctgctatccatgagcatagaatatttttccatttgtttgtgatgtctcttatttttttccagtagtgttttgtaattctcattgtagagatccttcaccttggttatctgtattcctaggtattttattctttttgtggctactgtgaataaaattgcattcttcatttggctctcagcttggacattatggatgtatagaaatgcaattaatttttgtacattgatttggtatcctaaaacttttctgaagccatttatcagttctaggaggcttttggcagagtccatagcattttctaagtctagaataatatcttctttgaaagagattgcttgacttcctcccttattatctggatgacttttatttctttctcttgcctggttgccctggctaagacttccagtacggtgatgaataggagtagtggaatttgacattcttgtcttgttcca

SEQ ID NO: 331167 - DNA, 593 bp, Homo sapiens
ttcttttttggtttcatatgaattttagaataatggtttctaattcattggaaagtaatgtgtatgatttgacaggaataacatggaatctgtaaattgcttttggcaggatggccattttaacaatattggttcctgctatccatgagcatagaatatttttccatttgtttgtgatgtctcttatttttttccagtagtgttttgtaattctcattgtagagatccttcaccttggttatctgtattcctaggtattttattctttttgyggctactgtgaataaaattgcattcttcatttggctctcagcttggacattatggatgtatagaaatgcaattaatttttgtacattgatttggtatcctaaaacttttctgaagccatttatcagttctaggaggcttttggcagagtccatagcattttctaagtctagaataatatcttctttgaaagagattgcttgacttcctcccttattatctggatgacttttatttctttctcttgcctggttgccctggctaagacttccagtacggtgatgaataggagtagtggaatttgacattcttgtcttgttcca

SEQ ID NO: 331168 - DNA, 593 bp, Homo sapiens
ttcttttttggtttcatatgaattttagaataatggtttctaattcattggaaagtaatgtgtatgatttgacaggaataacatggaatctgtaaattgcttttggcaggatggccattttaacaatattggttcctgctatccatgagcatagaatatttttccatttgtttgtgatgtctcttatttttttccagtagtgttttgtaattctcattgtagagatccttcaccttggttatctgtattcctaggtattttattctttttgtggctactgtgaataaaattgcattcttcatttggctctcagcttggacattatggatgtatagaaatgcaattaatttttgtacattgatttggtatcctaaaacttttctgaagccatttatcagttctaggaggcttttggcagagtccatagcattttctaagtctagaataatatcttctttgaaagagattgcttgacttcctcccttattatctggatgacttttatttctttctcttgcctggttgccctggctragacttccagtacggtgatgaataggagtagtggaatttgacattcttgtcttgttcca

SEQ ID NO: 331169 - DNA, 444 bp, Homo sapiens
agactaacataagaacaactttccaaaatcactaattcattgcttattcatttgagcatattttaatcttmtctctctctctacatatgcattttttctgcagttgaaattttgtatattttcatagtctacatgtattcttgttaatacctgaaagttttacaaatgtttttcttaggataattcttttgaatactattcataaattacatgtgtgagcttttattattttaagcaaactcaccatgtgtcagtacttggaattttccatatttctgctaattttattatattcttaagggaaaatatgtatgagtttttctgaacagcctggcctttacagaagcatttatcatgaaaattattctgtcattgtaacatttgtttctcaaacaatcacagaacaacatatgtaactataccattgaattttaaagtgttcat

SEQ ID NO: 331170 - DNA, 444 bp, Homo sapiens
agactaacataagaacaactttccaaaatcactaattcattgcttattcatttgagcatattttaatcttctctctctctctacatatgcattttttctgcagttgaaattttgtatattttcatagtctacrtgtattcttgttaatacctgaaagttttacaaatgtttttcttaggataattcttttgaatactattcataaattacatgtgtgagcttttattattttaagcaaactcaccatgtgtcagtacttggaattttccatatttctgctaattttattatattcttaagggaaaatatgtatgagtttttctgaacagcctggcctttacagaagcatttatcatgaaaattattctgtcattgtaacatttgtttctcaaacaatcacagaacaacatatgtaactataccattgaattttaaagtgttcat

SEQ ID NO: 331171 - DNA, 444 bp, Homo sapiens
agactaacataagaacaactttccaaaatcactaattcattgcttattcatttgagcatattttaatcttctctctctctctacatatgcattttttctgcagttgaaattttgtatattttcatagtctacatgtattcttgttaatayctgaaagttttacaaatgtttttcttaggataattcttttgaatactattcataaattacatgtgtgagcttttattattttaagcaaactcaccatgtgtcagtacttggaattttccatatttctgctaattttattatattcttaagggaaaatatgtatgagtttttctgaacagcctggcctttacagaagcatttatcatgaaaattattctgtcattgtaacatttgtttctcaaacaatcacagaacaacatatgtaactataccattgaattttaaagtgttcat

SEQ ID NO: 331172 - DNA, 444 bp, Homo sapiens
agactaacataagaacaactttccaaaatcactaattcattgcttattcatttgagcatattttaatcttctctctctctctacatatgcattttttctgcagttgaaattttgtatattttcatagtctacatgtattcttgttaatacctgaaagttttacaaatgtttttcttaggataattcttttgaatactattcataaattacatgtrtgagcttttattattttaagcaaactcaccatgtgtcagtacttggaattttccatatttctgctaattttattatattcttaagggaaaatatgtatgagtttttctgaacagcctggcctttacagaagcatttatcatgaaaattattctgtcattgtaacatttgtttctcaaacaatcacagaacaacatatgtaactataccattgaattttaaagtgttcat

SEQ ID NO: 331173 - DNA, 568 bp, Homo sapiens
ctgcaattcatggatattttgtttcatatttaaattattttttctcttcacttttcagctgggaaagtctctaccaacacattttcaaactcactgattctttgctcagccatttccagtgtagtgattatcagatcaaaggaattcttcatttctgtcacagtgttttgatttttagctcttccatttgattttacctacattgctcattgcccatctattcttgcatattgtccactttttccataaaagtctccaatatattagccacaattattttaaattttcagtctggtaatwctaaaatctctgccatgtataagtttggttacaatgctgctttgtctcttcagactgttatttttgtattttgtttttgtttttgctgtttatcctaacttttaattttttgttgaaagctgaatataatgtttgataaatgaaactgaaataaacagatctctcatgtaaggacttacgtttatctaagtcattgtttgctgtttttgtaggagtaagaggttaaaattttctctaatgccctggtttttgcctcttatgtcctctt

SEQ ID NO: 331174 - DNA, 524 bp, Homo sapiens
aatttgggtatttatttccccccttaatcaattaggatcaggtaaaataagatcccttcagggaaaccctttattaatgacaaaagaatgctctgggtgtatttcaaaatggttactcccccctcacctcctgttgcaagcattaggacatattgtcttttatcatcaccctgataaacaggtctagctcctggagatagarctcatgaatgtttgtaggtacctgctaaggtgtggcacctatgaactatgtctcaagctagattacactccatctccagcaattaatcaattaccctgcaagtgtttctcccagtctctggcctggtatctcccagctgcaccttctcctctctgtgcattttgattctctgtagtcacctgtctctaaattctaggactgaagctattaagaggtgttgattttcaatctgttagcttttctctcatgagaatggagtgaagagattctgtccaagatggccgaataggaacagctccagtctacatctcccagcgtgagc

SEQ ID NO: 331175 - DNA, 439 bp, Homo sapiens
tgatgttgcagctccagttttcaagcagtctggagtggaatcccctcttcctcagaagatgtcagtctttttcttyttaaggccttcagctgattggaggaggtccgcccatattatggaaaggtataagcttacctgaaagtccacagatttaaatgttatcctcatctaaaaattactttcacagaatatctagactggtatttgaccaaatatttggataccttggcctagccaagctgacttataaaataaaccatcaaaagaagcaaccttaatttttctctgccatacagtctaacaggtctgcaggtttcatggttttaggagattggcaattattgttgatcattactctgcacatcacagacaatgcacatgtgtgtgcacatatgtaggtgcatgcctctgtgcatttgtccttctcatttgcccaaaa

SEQ ID NO: 331176 - DNA, 559 bp, Homo sapiens
aattttattatttctttttagttggtcatttcaattttgtcttataacaatgttttaatgaattcaatatgtctcctcccaagttctttaagtgtttctaatatatttatttaacatattgatgaaggtagttgaaaactagttatttaatttttttctctgtattcacagtaaagtttcactttgccctactaagtttagaaaagcaaaatgatcatttgttttacatctcttttcagtgaaagatgtgtatgagacacacttccattcaatgggaggtagaaataaatcaataaatggaggcttctaatatttttttaaatagacacactaaactgaattctctttttaggtgtgtctatgttgcttctttacccaccaccattttattctaactgaatgcagacaacctacctgagtgtacaatagtcatcttgcaargatgaaaataaaagcctcctgataatagtggcacagcagaaattagaaggatctagatttctaatcacattgtcagccacgacttcagtggtagtatataacaaaaagtcacctcttt

SEQ ID NO: 331177 - DNA, 559 bp, Homo sapiens
aattttattatttctttttagttggtcatttcaattttgtcttataacaatgttttaatgaattcaatatgtctcctcccaagttctttaagtgtttctaatatatttatttaacatattgatgaaggtagttgaaaactagttatttaatttttttctctgtattcacagtaaagtttcactttgccctactaagtttagaaaagcaaaatgatcatttgttttacatctcttttcagtgaaagatgtgtatgagacacacttccattcaatgggaggtagaaataaatcaataaatggaggcttctaatatttttttaaatagacacactaaactgaattctctttttaggtgtgtctatgttgcttctttacccaccaccattttattctaactgaatgcagacaacctacctgagtgtacaatagtcatcttgcaaagatgaaaataaaagcctcytgataatagtggcacagcagaaattagaaggatctagatttctaatcacattgtcagccacgacttcagtggtagtatataacaaaaagtcacctcttt

SEQ ID NO: 331178 - DNA, 589 bp, Homo sapiens
atgtgccatgtaatgatgtttcagtcaataactgaccacatatatgactatgtttccttaagattataactgaccatatatatgactatggttccctaagtttgtaatggagctgaaaaattcctgctgtttagtgatattttagccttcgtgatgtgacagtaaaatgcattactcacatgtctgtgatgttggtataagtaaacctaccgtgctgccagttgtataaaagtatagcacrtctaactttgtacagtatatagtatttgataatgatgataaattagtatgttactggtttatatgttcactagtttatgcttttcattgttattttagcatgtacttcttctatatagaaaaaaaaaggaagttacttgtaaaacagcctcaagcaggaccttcaggaggtattccagaaaaaggcactgttatcttagaagatgacagctccatttgtgtttgtgccccttaataccttcctgtggaactagatgtggaagacagtgatgatcatgactctgtgtagacctagactaatgtgtgtgtttgtgtcttttttaacaaaaatttaaaagtttaaaaaatt

SEQ ID NO: 331179 - DNA, 540 bp, Homo sapiens
actaaaaaagttagcaaaggttaatttactagtgaagaaatataaatattttgtattaatttagtatagcatagctatacagtatttatagtctacaatactgttcagtaatatccaaggtcttcacattcactcaccactcactcactgattcacccaaagsagctactagtgctatatgctcttttcatggtaagggacctatacaaatgtaccatttttgaccatttatattgcatttttactctactctttctatgtgtagatatgtttagatacacaagtatttaccattattttacagttgcctacagcattcaatacagtaaaaagctgcacaggtttgtagcctaagagaaacagtctatagcctatagcctggatgtgcagtaggctatatataccatctaggtttgtgttaatatattctatgatgtccacacaaaaatgaaatctcctaatgatgcatttctcagaatgtatccccattattaagcgatacatgtctgtatttatgagtatttgaaaacaattgtaata

SEQ ID NO: 331180 - DNA, 540 bp, Homo sapiens
actaaaaaagttagcaaaggttaatttactagtgaagaaatataaatattttgtattaatttagtatagcatagctatacagtatttatagtctacaatactgttcagtaatatccaaggtcttcacattcactcaccactcactcactgattcacccaaaggagctactagtgctatatgctcttttcatggtaagggacctatacaaatgtaccatttttgaccatttatattgcatttttactctactctttctatgtgtagatatgtttagatacacaagtatttaccattattttacagttgcctacagcattcaatacagtaaaaagctgcacaggtttgtagcctargagaaacagtctatagcctatagcctggatgtgcagtaggctatatataccatctaggtttgtgttaatatattctatgatgtccacacaaaaatgaaatctcctaatgatgcatttctcagaatgtatccccattattaagcgatacatgtctgtatttatgagtatttgaaaacaattgtaata

SEQ ID NO: 331181 - DNA, 633 bp, Homo sapiens
tcttagcaatgttcatttaggtcccttcatatctttttatgaattggcagcttagttctttatatcccttaataatgtttaattatatgaatgtcccacagaatctttatccattcactttctgaagaacatcttgatggtttccacgttttgatgattatggataaagctcctataaatattagtgtgtaaggttttgtgtgagtgtaatttttaactcatttaggtgaatacctagacacatggttcctatacttatatggtaaggtttagcttttaaaaaactgccaaaatatgtttcaaagttactgtactcttttgcatttctaccagcartagataagaattcttgttgctgcacattctggtcagcatttgggtttgtcaaatgttttggtttttaaacattctaataggtctgtagtaatagcctaaagttttaatctgtaattcaataatggcatataatgtttagcatcttttgatatgcttatttgctaactgtatatcttttttgaggtgtctgtttatatattttgctcatttattattttttttaaatatatattgtccattcttgttatattttagaaacacagacacaagtcttttatcagaaaaaggttttgtgaa

SEQ ID NO: 331182 - DNA, 626 bp, Homo sapiens
agaaactaaccaaagttagtttttcatctgaaaaattatatgtttcagtattctaaaacacacttttccaggattctctagggtgttcaatttatgagttatttatatattttaaacactacattttcccaataacactggtaatatatggtatttggaccaaatgattttgaaatgcagataacagactcactggtcataatgaaaagctataggaactatcatatcatccctgccacatgctcaaattgtctcagcctaagttatatagacttaatgtttgcatacgtgaggaatattccctatacttatctcttatactrgaattgtcatccagataataattatcaatccaaaatcatttgaagatcaaaataactgaatgggttccctagctgtgttggtggtatatccacctaccttttattttgatattgtggctcccatgtgatagttttttcatatgttgtgcataagtaccattgagcctatttgacgtccttttcttcctcttgaaaaagggttactctaagctgacaagagggctgtttatcactacatagtttggagaaatcctttttaagtttttctgctggaaactactcagtttaatcaggattctcatg

SEQ ID NO: 331183 - DNA, 626 bp, Homo sapiens
tcttttttaatatctcagtatttcattctttctcattgctcagtagtattttattataagagttrccatatatggccgggcatagtggctcatacctgtaatcccagcactttgggagaccaatgcgggcagattgctggaggccaggagttcaagactagcctgaccaacatggtgaaaccccatctctactaaaaatacaaaaattagtcaggcgtggtggcaggctgcctgtaatctcatctactcaggaggctgaggcaggagaatcgcttgaagctgggaggcagagattgcagtaagccgagattgagccattgcactccagccttggcaacaagagcaaaactctgtccccaaacaccaccccgccaacacacacacgaaaataattaccacagtgaatttgtttttagtttttggcaattatgaataatctgtcaataataattgacttacaagtttttatgtaggcatatttttcttggctaataccaggagtattggactgttggatcacatgctaagagcacatttaatttcacaagaaaccaccaagccctttttcaaaggggctgttctattttgcattgccaccagcattgcatgagacttccacatgcttc

SEQ ID NO: 331184 - DNA, 626 bp, Homo sapiens
tcttttttaatatctcagtatttcattctttctcattgctcagtagtattttattataagagttgccatatatggccgggcayagtggctcatacctgtaatcccagcactttgggagaccaatgcgggcagattgctggaggccaggagttcaagactagcctgaccaacatggtgaaaccccatctctactaaaaatacaaaaattagtcaggcgtggtggcaggctgcctgtaatctcatctactcaggaggctgaggcaggagaatcgcttgaagctgggaggcagagattgcagtaagccgagattgagccattgcactccagccttggcaacaagagcaaaactctgtccccaaacaccaccccgccaacacacacacgaaaataattaccacagtgaatttgtttttagtttttggcaattatgaataatctgtcaataataattgacttacaagtttttatgtaggcatatttttcttggctaataccaggagtattggactgttggatcacatgctaagagcacatttaatttcacaagaaaccaccaagccctttttcaaaggggctgttctattttgcattgccaccagcattgcatgagacttccacatgcttc

SEQ ID NO: 331185 - DNA, 626 bp, Homo sapiens
tcttttttaatatctcagtatttcattctttctcattgctcagtagtattttattataagagttgccatatatggccgggcatagtggctcatacctgtaatcccagcactttgggagaccaatgcgggcagattgctggaggccaggagttcaagactagcctgaccaacatggtgaaaccccatctctactaaaaatacaaaaattagtcaggcgtggtggcaggctgcctgtaatctcatctactcaggaggctgaggcaggagaatcgcttgaagctgggaggcagagattgcagtaagccgagattgagccattgcactccagccttggcarcaagagcaaaactctgtccccaaacaccaccccgccaacacacacacgaaaataattaccacagtgaatttgtttttagtttttggcaattatgaataatctgtcaataataattgacttacaagtttttatgtaggcatatttttcttggctaataccaggagtattggactgttggatcacatgctaagagcacatttaatttcacaagaaaccaccaagccctttttcaaaggggctgttctattttgcattgccaccagcattgcatgagacttccacatgcttc

SEQ ID NO: 331186 - DNA, 626 bp, Homo sapiens
tcttttttaatatctcagtatttcattctttctcattgctcagtagtattttattataagagttgccatatatggccgggcatagtggctcatacctgtaatcccagcactttgggagaccaatgcgggcagattgctggaggccaggagttcaagactagcctgaccaacatggtgaaaccccatctctactaaaaatacaaaaattagtcaggcgtggtggcaggctgcctgtaatctcatctactcaggaggctgaggcaggagaatcgcttgaagctgggaggcagagattgcagtaagccgagattgagccattgcactccagccttggcaacaagagcaaaactctgtccccaaacaccaccccgccaacacacacacraaaataattaccacagtgaatttgtttttagtttttggcaattatgaataatctgtcaataataattgacttacaagtttttatgtaggcatatttttcttggctaataccaggagtattggactgttggatcacatgctaagagcacatttaatttcacaagaaaccaccaagccctttttcaaaggggctgttctattttgcattgccaccagcattgcatgagacttccacatgcttc

SEQ ID NO: 331187 - DNA, 558 bp, Homo sapiens
tgtcccttgctacatggcttctcctgaggagaggggaaaagagcactcactatgtgtatcactctacttgcaaataggcaaacactctcagccacaaataccccagtctgcctaagaaacaatcaagacagatcccatcatcacttccatccttgttctatcaactaccacaagaaatacaaaactgccaagatattactcattgcccatcactccccttcctaagtagctctgcacattcctaatctgctacatgcgtcctgtttcaagttcaattatactcaatgccaatatgattaaaatgtactatatcttaaccttttttctcactgttcctttcaactgctgccactaactgaaatccaaatctctcttgagaatattgcttttggtgaagacctcccaagtggctgtattttgttttgttttcygcgtccccaccactcttacatgggaatgagcttgcaatcaggcagctacattccttaacccttattgccaatcccagaccattgtcttagccacatcagtccttcaaaacactcagtatatcattag

SEQ ID NO: 331188 - DNA, 644 bp, Homo sapiens
tttcttcctcttgaaaaagggttactctaagctgacaagagggctgtttatcactacatagtttggagaaatcctttttaagtttttctgctggaaactactcagtttaatcaggattctcatgaactctggaaattatattatgtttactacatttactgcatatctttttgtttcatcctgcgattcctgcaatttcataaaaacaaactattcccttttgatgatattcataggtattattttacccagtcccaactcccaaatgacataatatttactttatattgtcttccaagaaagcaattttgagcagaatttaatttgagagttttcttcacgattacctcaaattgtcagagacattttaggttaacaatgcatttcaaaacttcataaattataatacatactgtgatgaaccactgaaacatcagaagaaaaaaaatcacacttaaacattttaatccccaaactacagtattacaaactcgagtatatccattaatcaaacattttgatatttttataattcagtkttaacataaaggtgatcagtcattttcagatctaataacatatattaaaaggtagaaagcatatttaaaacaaaacataatttttatacttaagtggttaatacc

SEQ ID NO: 331189 - DNA, 660 bp, Homo sapiens
ctacttattttcttatttctgtgtattgattttatatcctaacgctttactgaattcacttactctaacagttaattgttagggtctaaggttttctatatgaaaaatcttgtcacctgtcatcagaaacaatgtcgcatctttgcataaagaaacaaaactgaaggcataattccacctgatcttaaatctactataatttgataataatcaagagcctggtgctgcacaaaaacagacataggtaaattaaacaaaatagaaagcccgagaatatgccaacaaatttatcgttaatcgatactcgacaaaggtgacatgacaagaacgcacaatgggaaaragatagttttttcaataaatggttttggtgaaattggatatctacgtgcaaaagaatgaaagtggacccttatttcacaccatatgcaaaaatcaactcaaaatggattcaagacttaaacataagacctgaattctaaaactattagaaaaaaaaaaaagagaaaacagagaaaaagcttgacattggtctttaccaagatttctctggatataacccaaaagtacaggcaacaaaatcaaaacatacaagtagtattacatcaaactaagatgcttctgcacagcaaaagaaacaatcaatagaatgaaaaggca

SEQ ID NO: 331190 - DNA, 581 bp, Homo sapiens
cagtaattattagagggttactgagataactaagattagaggtgacaacattgaaaagtaaaaaaaagcgcaaaataaaagttgacattccacggtagctttcttctggggcttcccagtactaaacatggggcaaaattgtgataatgcatgttttgcccccaaaacaggctgcttatgtatttgggtttcaatccttgatcttactatttgttttacatttttttctcgttactttttctctcttcagccaatcaattgtttatttgtgagttactcacacttttattattgtttatttgtttctctatttgtttcctgtggatgccataacaaattataacaaatgtcatggcttaaaaacaatagaaatttattctcacagctctggaggccagaacagtttcrcatgattcaaaatcaaggtgccaacaggaccttaatccttgaaggcccgttagagaatttatttcttgcctcttccagcttctggcgactgttgatgtttatttatttgtggctgcatcactgcaatctctgcctctgtgaacatagcacctcttcttgttttgtgcataaaa

SEQ ID NO: 331191 - DNA, 640 bp, Homo sapiens
atggtgggaagggtacgagctgtaaagaggaaggtggaagttgataaatgcgaacttgggacacaatttgactgaactgtagtgcagatccttagaaagcaggagagcactggttacctctagcaggttgccracgcttcagaaagaactaggagacaaagcaaagttactttatagaaatttaatttaactaacttcatgactttgcctacagccagctgtaatcacatccattcatgtccatgcaaaattaaggacatcccaagactattatcaaaaaggtaagagatagcaagtgttggagaggacatggagtaacaggagcccttgcacgccgatggtggaaatattcaattggtacagccattatggaaaatagcatggagcttcctcaaaaatgtaaaaatagaactgccacacgatccagcaattccacttctgggtgtatatccaaagtaaatgaaatcagtatgtcaaagagagatcttcactcccatgttcactgaagcattattcacaatagccaagatatggaatcaacctaagtgtccatcagcagatgaataatgtggtatatatacacaatggaatactattcaacctcaaaaaagaagcaaattctgtcgtttgggacaacata

SEQ ID NO: 331192 - DNA, 640 bp, Homo sapiens
atggtgggaagggtacgagctgtaaagaggaaggtggaagttgataaatgcgaacttgggacacaatttgactgaactgtagtgcagatccttagaaagcaggagagcactggttacctctagcaggttgccgacgcttcagaaagaactaggagacaaagcaaagttackttatagaaatttaatttaactaacttcatgactttgcctacagccagctgtaatcacatccattcatgtccatgcaaaattaaggacatcccaagactattatcaaaaaggtaagagatagcaagtgttggagaggacatggagtaacaggagcccttgcacgccgatggtggaaatattcaattggtacagccattatggaaaatagcatggagcttcctcaaaaatgtaaaaatagaactgccacacgatccagcaattccacttctgggtgtatatccaaagtaaatgaaatcagtatgtcaaagagagatcttcactcccatgttcactgaagcattattcacaatagccaagatatggaatcaacctaagtgtccatcagcagatgaataatgtggtatatatacacaatggaatactattcaacctcaaaaaagaagcaaattctgtcgtttgggacaacata

SEQ ID NO: 331193 - DNA, 548 bp, Homo sapiens
cacaccctggtgttattcaaaggcttctggactggacccagcctctgacagcctgctctgggtgttggtaaaagatccccagctatcctattgcaaaacttttcttctttttcttttccttttttttgagacagagtttcactcttattgcccaggctggagtacaatggcgagatctcggctcactgcaacctccgcctcccaggttcaagtgattctcctgmctcagcctcccgagtagctgggactacaggggccggccaccatgcctggctaatttttgcagttttagtagagacagggtttctccatgttggccaggctagtcttgtactcctgacctcaggtgttccacccgcctcggcctcccaaagtgctgggattacaggcgtgagccaccacgccaggccaaaactttccttctttttctatcagcggtcgttatatctcttattctctctgtgtgtcaaatgtgtggtaatttttacagcctagggaagaagtaatccgttaggcaaaatcaggaaatgctataataaccatggata

SEQ ID NO: 331194 - DNA, 548 bp, Homo sapiens
cacaccctggtgttattcaaaggcttctggactggacccagcctctgacagcctgctctgggtgttggtaaaagatccccagctatcctattgcaaaacttttcttctttttcttttccttttttttgagacagagtttcactcttattgcccaggctggagtacaatggcgagatctcggctcactgcaacctccgcctcccaggttcaagtgattctcctgactcagcctcccgagtagctgggactacaggsgccggccaccatgcctggctaatttttgcagttttagtagagacagggtttctccatgttggccaggctagtcttgtactcctgacctcaggtgttccacccgcctcggcctcccaaagtgctgggattacaggcgtgagccaccacgccaggccaaaactttccttctttttctatcagcggtcgttatatctcttattctctctgtgtgtcaaatgtgtggtaatttttacagcctagggaagaagtaatccgttaggcaaaatcaggaaatgctataataaccatggata

SEQ ID NO: 331195 - DNA, 581 bp, Homo sapiens
tgctggtcctctgtggtacactgcagcttcccaatttttcctttttgcmcctttctactggaaaccaggcttcatgctgctcctgtgaatgagaaaattctgccttcaacaattaggagtaatatgtcctccgcagccaaattgtggtcccagtactgtcccatcagcagggaaatccccattaggtccccatggccccttaaggcaactactctgtctctgattaagacagtacttaattagtaaagggattttaagtccagaagttaactggaaccatttttctcagggtaaatgctttagcacaggccataatagcaggcaatctaccacattccctccattagaggggccttgcctttcccaagatgcattttttttagggaggcacgcaggtcacacaagtctagaaagtcaaagggaaatcgtaagcagaggactagagctaccagggtgagcatgactagcccccaaagcttagtttctctggtgccatggcttggagggtcatgcctacaaccatgggcagcacatttaaaagggtgccgggacccaggaaccagggagggaaaatagttgag

SEQ ID NO: 331196 - DNA, 618 bp, Homo sapiens
tttggagcaaggccctgccatcttctgcagataactactctccttttgagagacagctcttggtctgttactgggctttggtggaaactgaatgtttggccgggcatggcggctcatgcctgtaatcccagcactttcggaggctgagacgggcrgatcacaaggtcaggagattgagaccatcctggctaacatggtgaaaccccatctctactaaaaatacaaaaaaaaaaatcagctgggcgtggtagcaggcgcctgtagtcccagctatttgggaggctgaggcaggagaatggcatgaacccaggaggcggagcttgcagtgagccgagatctcgccactgcactccagcctgggcgacagagcgagactccgtctcaaaaaaaaaaaaaaagaaagaaactgaatgtttcactatgggtcatcaagtcaccatgtgacctgaactgcccgtcatgaactgggtgctttgtgacccatctagccataaagtgggttgtgcacagcagcattccatcatcaaatggaagtggtatatatgtaactggtctccagcaggtcccaaaggcacaagtaagttacatgagaaggtggctcaaatccccatggtctcc

SEQ ID NO: 331197 - DNA, 618 bp, Homo sapiens
tttggagcaaggccctgccatcttctgcagataactactctccttttgagagacagctcttggtctgttactgggctttggtggaaactgaatgtttggccgggcatggcggctcatgcctgtaatcccagcactttcggaggctgagacgggcggatcacaaggtcaggagattgagaccatcctggctaacatggtgaaaccccatctctactaaaaatacaaaaaaaaaaatcagctgggcgtggtagcaggcgcctgtagtcccagctatttgggaggctgaggcaggagaatggcatgaacccrggaggcggagcttgcagtgagccgagatctcgccactgcactccagcctgggcgacagagcgagactccgtctcaaaaaaaaaaaaaaagaaagaaactgaatgtttcactatgggtcatcaagtcaccatgtgacctgaactgcccgtcatgaactgggtgctttgtgacccatctagccataaagtgggttgtgcacagcagcattccatcatcaaatggaagtggtatatatgtaactggtctccagcaggtcccaaaggcacaagtaagttacatgagaaggtggctcaaatccccatggtctcc

SEQ ID NO: 331198 - DNA, 618 bp, Homo sapiens
tttggagcaaggccctgccatcttctgcagataactactctccttttgagagacagctcttggtctgttactgggctttggtggaaactgaatgtttggccgggcatggcggctcatgcctgtaatcccagcactttcggaggctgagacgggcggatcacaaggtcaggagattgagaccatcctggctaacatggtgaaaccccatctctactaaaaatacaaaaaaaaaaatcagctgggcgtggtagcaggcgcctgtagtcccagctatttgggaggctgaggcaggagaatggcatgaacccaggaggcggagcttgcagtgagccgagatctcgccactgcactccagcctgggcgacagagcragactccgtctcaaaaaaaaaaaaaaagaaagaaactgaatgtttcactatgggtcatcaagtcaccatgtgacctgaactgcccgtcatgaactgggtgctttgtgacccatctagccataaagtgggttgtgcacagcagcattccatcatcaaatggaagtggtatatatgtaactggtctccagcaggtcccaaaggcacaagtaagttacatgagaaggtggctcaaatccccatggtctcc

SEQ ID NO: 331199 - DNA, 623 bp, Homo sapiens
cctctgctgtgcagttctggagtctcaatgtttgttcatacagaggtgattaggcccagagaatattgtgttacaacatgcaggctcaaactggactaacttgatacagaaagcyaatttcaacacttacagttagaaatatctcttttcactgggaatctacttggaaaatgcaattgagatggtttttaaaaatggaatcagaacccaaaacgaattgagatggttttttaaaatggaatcggaaatgtctagtttctattcaatacttttagtgttttaaactgctatttctatttttctgatcacatactcagctgcctaattgtttcacaatggtaataccaattatcctcttgtcttccagaaagaacacagggctgttgtccctaccctggggagcaggcaggttaacattaaaagaaacttccagatcctcttcatccatttctcttaaagcccagatcctgttgccagttctatgaaaccaacaacatgcattttcttttttcagtcccacccaaaacaccaaaatcccaaaatcttttccatgttaaatgccacttcaccatacaaagcatggggaagggagggatttgaaggaaaaacagaaaattcctatt

SEQ ID NO: 331200 - DNA, 623 bp, Homo sapiens
cctctgctgtgcagttctggagtctcaatgtttgttcatacagaggtgattaggcccagagaatattgtgttacaacatgcaggctcaaactggactaacttgatacagaaagctaatttcaacacttacagttagaaatatctcttttcactgggaatctacttggaaaatgcaattgagatggtttttaaaaatggaatcagaacccaaaacgaattgagatggttttttaaaatggaatcrgaaatgtctagtttctattcaatacttttagtgttttaaactgctatttctatttttctgatcacatactcagctgcctaattgtttcacaatggtaataccaattatcctcttgtcttccagaaagaacacagggctgttgtccctaccctggggagcaggcaggttaacattaaaagaaacttccagatcctcttcatccatttctcttaaagcccagatcctgttgccagttctatgaaaccaacaacatgcattttcttttttcagtcccacccaaaacaccaaaatcccaaaatcttttccatgttaaatgccacttcaccatacaaagcatggggaagggagggatttgaaggaaaaacagaaaattcctatt

SEQ ID NO: 331201 - DNA, 623 bp, Homo sapiens
cctctgctgtgcagttctggagtctcaatgtttgttcatacagaggtgattaggcccagagaatattgtgttacaacatgcaggctcaaactggactaacttgatacagaaagctaatttcaacacttacagttagaaatatctcttttcactgggaatctacttggaaaatgcaattgagatggtttttaaaaatggaatcagaacccaaaacgaattgagatggttttttaaaatggaatcggaaatgtctagtttctawtcaatacttttagtgttttaaactgctatttctatttttctgatcacatactcagctgcctaattgtttcacaatggtaataccaattatcctcttgtcttccagaaagaacacagggctgttgtccctaccctggggagcaggcaggttaacattaaaagaaacttccagatcctcttcatccatttctcttaaagcccagatcctgttgccagttctatgaaaccaacaacatgcattttcttttttcagtcccacccaaaacaccaaaatcccaaaatcttttccatgttaaatgccacttcaccatacaaagcatggggaagggagggatttgaaggaaaaacagaaaattcctatt

SEQ ID NO: 331202 - DNA, 589 bp, Homo sapiens
ccatatttatgtccatgagcacccagtgtttagctctcgcttataagtgagaacatgtggtatttgcttttctgttcctgcgttaatttgcttaggatgrttgtctccagcttcctccatgttgctgcaaaggacgtaatttcattcttttttatgaccgcgtagtatcccatggtgtatatgtacctcattttctttatccaattctcagttgatagacatctagatcgtttccatgtcttcactattgtgaatagtgctgcaatgaacatacaagtgcatgtgtctttttgatagaaagtttttttttaatgtatacccagtaatgggattgctgagttgaacagtagttctgttttaaattctttaagaaatctccaaactgctttccacactggctgaactaatttacattcccaccaacaatgtattcccttttctttagccttgccagcatctgatgttatttgactttttaaaaatagccattctgactggtgggagatggtatctcattgtgattttgatttgcgtttctctgatgattagtgatgttgagcattttttgatatgttttttggccactcgt

SEQ ID NO: 331203 - DNA, 589 bp, Homo sapiens
ccatatttatgtccatgagcacccagtgtttagctctcgcttataagtgagaacatgtggtatttgcttttctgttcctgcgttaatttgcttaggatggttgtctccagcttcctccatgttgctgcaaaggacgtaatttcattcttttttatgaccgcgtagtatcccatggtgtatatgtacctcattttctttatccaattctcagttgatagacatctagatcgtttccatgtcttcactattgtgaatagtgctgcaatgaacatacaagtgcatgtgtctttttgatagaaagtttttttttaatgtatacccagtaatgggattgctgagttgaacagtagttctgttttaaattctttaagaaatctccaaactgctttccacactggctgaactaatttacattcccaccaacaatgtattcccttttctttagccttgccagcatctgatgttatttgactttttaaaaatagccattctgactggtgggagatggtatctcattgtgattttgatttgcgtttctctgatgattagtgatgttgagcattttttsatatgttttttggccactcgt

SEQ ID NO: 331204 - DNA, 617 bp, Homo sapiens
ggtgagtttttagagttctttgtatatttttgataacagtccttttctatgtgttttgcaaagatttgctcctagtttgtgtctttttttwaaattccttaaacagtgatgttttgcacagaagtttctaattttaatgatgtacatcttacccattttttcttttatgcttttggtgtggtagctaagaattcaggccaaatccaaggtcacctatattttctccaacgtgatcttcggttttatagtttgcatcatatattctattccattttgagtaagttctgtgagaggcataaggtctatgtctagattcattttttttctctttttgtatgtggatgtccagacgtttcaacatcatttgttgaaaagaccatcctttttccattgaattgtatttgctcctttatcaaagatcagttgactatatttgtctgagtctatttctagcctctcttttccattccattgatctattcgtctattcttctgccaatacttcaatgtcttagaacattcttttaatcagagaatctttctccactttttttccaaaatttgtccccttctgatttccaataatttcttaaactccctagcagcacctcacaaaa

SEQ ID NO: 331205 - DNA, 521 bp, Homo sapiens
tagtatttgaaggctagcatgtagttgtttgataacaaggatttttccccctcagaagcatagtttaaagctgtcagccttaatgaaataactttagatatgccttgcctgccaatttttccctttttaatagtatagtagtaacactgtgggattgtcaaaataatagtctgatgagaagtgttagcaaagaaagccaaatggcgcattgcttgtcttacactgtagcctctgtgtggtgtagaaaagccaggatgtggtcagatcactgtgggatgaggttgactcacccattcattattcyggatgagcagaaaatatgcctctcaccccatgcctgctctgccttgccttgcctttccttttcattcccttcctttttcttcccacacatggtcaaaggctttgattttttctgaatattagacaacaaaacaaacaaagcagcaaagacacttacctgttctgtctttaacagagtgtttggtggctccctgcaaagggaagctaagagagaccca

SEQ ID NO: 331206 - DNA, 553 bp, Homo sapiens
acttctggattgaatggtagttctacttttatttatttaaggaatctccatactgttttccacagtggttkttctagtttacattcccaccagcagtataaagtgttcccttttcaccacatccacaccaacatctattttttgttatttttaaattatcagtggcctattctctttaagtgtagtagtgatagactaatcatagattcaaggcttgaagcaatgtcatgagaccaaccattctacctcccacttttaagcaggttagcactttctattccccctttatacatgtttgcatcagaaaggaagatatttgatatgaaagaggaagattgtgaattgaagtagaggagaagaacatggcagtgatcacaatgccatgcatttggagatggccttgccctattgagcttaagtgcacttcaggtatcatctatgaaagaggaaaagggaggagaatgtgtaggaattggggagggagaatacttatcttcagcaccactttagaaccaaaaattcactctgacaagatagaagtaaatgcaaaacc

SEQ ID NO: 331207 - DNA, 538 bp, Homo sapiens
ccaggcaaacagggtctggagtggaactccagcaaactccaacagacctgcagctgagggacctgactgttagaaggaaaactaacaaacagaaaggaatagcgtcaacatcaacaaaaaggtcatctacaccaaaaccccatctgtaggtcaccaacatcaaagaccaaaggtatataaaaccacaaagattkggagaaaccagaggagaaaagctgaaaattcaaaaaatcagagcgcctcttctcctccaaaggatcgcagctcctcaccagcaacagaacaaagctggatggagaatgactttgacgagttgacagaagtaggcttcagaaggtcggtaataacaaacatctccaagtgaaagtaggatgtttgaacccattgtaaggaagctaaaaaccttgaaaaaagattagaggaatggctaattagaataaacagtgtagagaagatcttaaatgacctgatggagctgaaaaccgtggcatgaggatttcatgatgcatgcggaagtttcaatagccgattcaattag

SEQ ID NO: 331208 - DNA, 551 bp, Homo sapiens
aaatatggcaagttatcatctaagaataaaaactccaagtcaggttttttcttattactactcatttattttattcttaaactttggctaacaaagtacagctgcattctggggattctgggatggcaaaggcaacacttccaaaaatgtctttgcaaggaactagaagtaaattacggcattctttatgagctgggtgtatttgactgcagaaaaaaatgttttgcaggcctcttgttgcccctggcattcctgttgtgaataatcggttggtgcactcccctgttctctttcttctccagaaaaaggaagtgttttccttaccaccatactgggtagatgcaaggcacaaagaacacactgtattcttcatggggaaaattaaagtcgacttaagcatatgtcctgccctcayacaaggccagccagaaaatttgcagtatggtcacgggcattgcttattccctacacgaggtaaaatagaagctttaactgcctttcaagagctagctccccttgcaataaaaataacaacccctcatattggcata

SEQ ID NO: 331209 - DNA, 493 bp, Homo sapiens
accataacaatgaaacatgcctcatatacaagttatgactttaccccttaactcccattcaaaaagaagtatactggaatgcatatgtgtaagagtgacataatataatggtgacttcagctctcctgtaaatttttaaataactaattcgttaacttcattattaccattattagcaacaatcttcttaaaatatgtcttacaactgaaagtagcatgctccagtgttccatgtgttctgacactggcctgctagactrgagcatgtggttcagggcactctcacaaatacagataaaagatttgtgccctgattgtggattatcttaaggaagaaataaacgtcttgaaaggtgaagctacaaagttaaatacataaagcgcagcaggaaggtgattagttttcacattggcatcacaactatccattcttctttttatcttatgttgaaaggccatatcaaagtgtgggcccagggaagaaaggatacat

SEQ ID NO: 331210 - DNA, 410 bp, Homo sapiens
ctattcacctgttgatggacgacatttgggttgtttccagttaggactattatgaagaaatctgctaggaacattcatatacatatctttgtatgcacatatattttctttttttcttgcctgaatagctagacatggtgtgcttgaattatatagtagacataaatttaatttttagtttattctttaaataaaatttaaatcatttttaaacaaacttttttagaataatttttgatttataggaaaatcatgaggatagtatatagagttcctatataccccataccccgtttccccarttatcgacatcttaggttcttatggtacctttgtaccataagaatactgctcatgtctaggtattcaggcaagagaaaaggaaatatatgtgcatacaaagacatgta

SEQ ID NO: 331211 - DNA, 585 bp, Homo sapiens
attatcattgggagtaagcacagctccattgatttcatgaaacaaaacaaaattaaattgcatagaaactcaaagacatggtaaatatgggttttgagtctaatagacctgagtttgaaacctggctctattatttactagttttctagctgtgtggccttagactaacttcctcacctgtgaattgagtgtaatataccagactcaaagtgttacacaaagcttgcactgtgaagtgtgtggaatattaaccttgggtgcacaatataggaggcaccaaagaacttagtaatcaagacaaataatattatatttcaatcttttttwaaaaaaaaatcaaatttaatgcagaactccacaaagcagaaaacatcaatttttaaaataaagacaagatcaaattctgcatgtggatgacttggcttcccttggccctctctaatcctggccctgaatgttaaggaagttaaacaaggtaataagtgaagtaactttggcgtagtccttgccttgaatattcagttataaactatgacattgaggaaatggccctttagtcttggtaaaaaaaaatccatagtgaat

SEQ ID NO: 331212 - DNA, 600 bp, Homo sapiens
atggccctttagtcttggtaaaaaaaaatccatagtgaataatgttcaaatacaaagaaacctaatctatttattgctctttgtttttaattcttaattacatacatagtatataagtatattattggtaaggttagcacccctttaaaactagaatttttctaagcatttatatgcataggtatatatgtatagaatacatatgatagtaatttttttctttttttatgaaactggtatcttgatatacaaacatatctacaagttggcttttgtttcattcaacactatgccttatcaatgcctcatcattgtaaattattgcatagagtttcataatatggatatactgcagtttgttcatttagtccccccgttgatatttatttagagttgtttacagtttatcaatattatacacagtgcttcagtgaacatttttatacctgcacgtagttttttttytaatttagctactgagaagtagaattgctgaattttataggatatgaaccctgatttcatttaaattgttaatgtttaactgccttagtggccattccaattgatggtcccactagaagggcatgacagtacttg

SEQ ID NO: 331213 - DNA, 308 bp, Homo sapiens
ggttccattgaaggcacacactgaggggtctcacttgggttcagataaatgttgtcatggtcccacaccctttaggttagctaccagtacatcataagctcacgtttgtttgtttcccaaacatctgttccaaacagtgtgagttgactgaactctagttgacagtcactatcaaccctgattggcagtcatatttgtttgyttctgtgcatttggcataatgccccttaccctgtagggactgataagaatccctaaagctttcaagttgggagtgaagaagggggacctatttatcccccttcatc

SEQ ID NO: 331214 - DNA, 308 bp, Homo sapiens
ggttccattgaaggcacacactgaggggtctcacttgggttcagataaatgttgtcatggtcccacaccctttaggttagctaccagtacatcataagctcacgtttgtttgtttcccaaacatctgttccaaacagtgtgagttgactgaactctagttgacagtcactatcaaccctgattggcagtcatatttgtttgcttctgtgcatttggcataatgccccttaccctgtagggactgataagaatccctawagctttcaagttgggagtgaagaagggggacctatttatcccccttcatc

SEQ ID NO: 331215 - DNA, 584 bp, Homo sapiens
  misc_feature (1)...(584): n = A,T,C or G
tattatataaatattcacgtttttttttntactgtcatttatttaatttttttgtagaaataggatcttgctttgttgcccaggttggtcttgaactcctggcttcaagcagtcctcccaccttggcctcccaaagtgctgggattacagacatgaaccacaactcccagcctagttttgaaacattttagaccattacatgcttgtgtattcccacctaatctattgctggagggggtgaggctaaaatctatttaagggatttattaattaaaaatataaaatgtcttgaatcaacaacacttgcatcaaaatgscctaatgtgtgctttttaatgtgaatgacgaacgagtgttttcttctactttgttgatttattgcttttcatagggcctgtgctagctcctgtatgtttccgatatcatttgttcagacactgctctgaggccctagattattgttctggttttgtaatgtgccattatttttttagttattttaaagtgtactttgaaactttttaaaagcttccatttaaataaatacgtagtaatctaacactctgtttgggattgatgttata

SEQ ID NO: 331216 - DNA, 553 bp, Homo sapiens
atcatggtgggttttttttgtttttttttgtttgtttgttttgttttgtttttagatttttggtggacagagcagaaagatttccttgataacaactaagccagtgttggcagatgggaggctctggcttatgtttcattaacagtattaagctatcagttaactttgttatcaaagttagatgatgaataaggaggccaggagtggtggctcatgcctgtaatcccagcattatgggaggctgaggcgggtggataacttgaggctaggagtttgagaccaccctggccaacatgttgaaaacycgtctctactaagaatacaaaaatttgccgggcatggtggtgcatgcctgtaatcccagatacttgggaggctgaggcaggagaatcgcttgaacccagcaggcataggttgcagtgagctgagatagcatcactacactccagcctgggtgacagagcaagactccatctgaaaaagaaaaagaaagaaaaaaaaagatgatgaataaggagagtttgcaagttgaaatactcttaatcagcaaaag

SEQ ID NO: 331217 - DNA, 580 bp, Homo sapiens
tgtggttctttatggcagcccttttgtgtagtaagggagatatgtaaatctagtgtttttaagtcaaagcaaaattttattcagaaggcacatttttataaaatgtggtaacagatataatattttatgtctcaaagttgaacaatgtattaactcttcaaaaatgaattaaaaaattgcagtagtcttatttatttcctgttcataagctctagtttttttaacttatatttttaactgacacataattattatacagagttatggagtatagtgatattgtgatattgtgtacagtgatcagatcagggcaattaacatattcatcatctcacacttttattattttttgattagaaatatttaatatcctcttkctaactacttgaatctatcttttctggccttaaactattttatattaatattttattaatgcaaattaatataagcttctatattatttaaacttatatatatattatttgaacataaacacaaacctatttacaattaattattaacaatgtcactggctctagacaaattatacatacaaataaaatttaatgaattatgc

SEQ ID NO: 331218 - DNA, 580 bp, Homo sapiens
tgtggttctttatggcagcccttttgtgtagtaagggagatatgtaaatctagtgtttttaagtcaaagcaaaattttattcagaaggcacatttttataaaatgtggtaacagatataatattttatgtctcaaagttgaacaatgtattaactcttcaaaaatgaattaaaaaattgcagtagtcttatttatttcctgttcataagctctagtttttttaacttatatttttaactgacacataattattatacagagttatggagtatagtgatattgtgatattgtgtacagtgatcagatcagggcaattaacatattcatcatctcacacttttattattttttgattagaaatatttaatatcctcttgctaactacttgaatctatcttttctggccttaaactattttatattaatattttattaatgcaaattaatataagcttctatattatttaaacttatatatatattatttgamcataaacacaaacctatttacaattaattattaacaatgtcactggctctagacaaattatacatacaaataaaatttaatgaattatgc

SEQ ID NO: 331219 - DNA, 580 bp, Homo sapiens
tgtggttctttatggcagcccttttgtgtagtaagggagatatgtaaatctagtgtttttaagtcaaagcaaaattttattcagaaggcacatttttataaaatgtggtaacagatataatattttatgtctcaaagttgaacaatgtattaactcttcaaaaatgaattaaaaaattgcagtagtcttatttatttcctgttcataagctctagtttttttaacttatatttttaactgacacataattattatacagagttatggagtatagtgatattgtgatattgtgtacagtgatcagatcagggcaattaacatattcatcatctcacacttttattattttttgattagaaatatttaatatcctcttgctaactacttgaatctatcttttctggccttaaactattttatattaatattttattaatgcaaattaatataagcttctatattatttaaacttatatatatattatttgaacataaacrcaaacctatttacaattaattattaacaatgtcactggctctagacaaattatacatacaaataaaatttaatgaattatgc

SEQ ID NO: 331220 - DNA, 561 bp, Homo sapiens
tatggtgaatttgtttctgaaatacctagtacagctatggaattatttacaatctatatgttgtcctgtaaaatttgttgaaaatttagtggcagatgattgattatcctatctgaaagtcaacttttttttatgtattaatgtgagtttaataatattggaattagggagttttccaggagaaggaggtttaatgtatatatgtaaggtggagttagagaatgtgcattattttaccatgggtacccctgcacacattttgctgtgggaatagagaacraaagctagtttgaatatagcaggtgtatacaaagataaatttgtattaattctgaaactttaaagaaccaaacttaaacctgtacattcagataaatctttcagaattcaattcacctcttctctgaatccttctctgcctgccagttagcagatacctcatctgtatttagacatctctgtgtgcatattatagtcctgagcaaactgaattataattattgtttctcttttctgtctctctctctgactaaacaaagccttcatcctagtgcttacacc

SEQ ID NO: 331221 - DNA, 560 bp, Homo sapiens
tctgccccaaaatagaagatccttgctttttttagagacctaaaaggaaaaattactcttaaatcaatgattgttccatcaagcattattgtgtggtagttaccatgtggtatatcaaagaattataatatatactccctcctgttttcaaggaacttgcaatcyagctaatgagccttaccaagtttaccagaacatgctatattatttggaaaatgttaagtagcccaggaaaaacaaatatcctttgatggcaaaattagcctaaacattgtgaaactccctaacacaatcatggcaaatatgaagaagttacagccatacacatgtcctaattttacaaaatatatataaaaacataatacttaatatttgaggaatagcatcatagttaacaaaaaagtttttttcaaaatatcaggattttccaatacagcatttataagaacacaattattttggtggattaatgacccaggagtaataaatagttctttatagatccaaaacattttatagtcctaaatcagtgtttggaaaactatggcttatgtgaaaaa

SEQ ID NO: 331222 - DNA, 570 bp, Homo sapiens
catggtgtcttctgagaattatattgtgtctggccctcataattgtttttagggataaaagctcttgattattatttaggaactcccagattgccacttactgtgtgccaacacttttcccattgacaggggtgtgacccattaattctatcttttctcctttgatttctgcgtcctatatttaaagccatgaactcatggggagattgactatagagaccacagccagatcttataggacaatagatctctgtcacacaacctctgcagtcagcctaggaagccaaacaagacctctgtgacaatcagctccaaattagcgaccagggcttgagtaaaaacggctaactttcctggttgttgcccccatttccaacttagcatcagagaaaacaaaatacacaactctaaacagtcacataagttggccggctcctgttagatagcccatctccagcttccccatgccaacatcttggattcwgggaatgcttaaagccttcgctttttatttttcacctttagaacttccccactctcctgcctgccattgtgtctttgtcaaactaa

SEQ ID NO: 331223 - DNA, 669 bp, Homo sapiens
aactgtaccagtctaactagcagtgactgcaaatcagctccacactgttttcctaatttagtgtcttagttcatacctacctttatttgttaagtacttgctttataatgcagttttagaaattgtgtcttggtctgaaaaggttgatgtttgaktctcttttatgtcgttgttacttcagggctgaggttgtgttttgtctccttataatcacagggactggcattcagtctgagttccacctcaagtgaccatactcaatggccgcattttgaaactaactgcctgattactttggatttaggaaattacttttttggtttttttcctggtgccttctattactaactgccctcttaacttaggggtgtggctaaattttaaacatttagatctgattatctgtttttcctttatggatatgtataattttgcactgattttaaaaccaacactttagggtttgctctttaattgttgccatttccattcctattttctagtttagattctcaggcaactctgaatatctgctacctaaacagtgacatttttctggccattcttcactccacaaatatttgcctgtgcaataaaaggcttcaacttgactttaaatatcctaagaccctgtattcttgcagagaattggtccattacttctcaact

SEQ ID NO: 331224 - DNA, 669 bp, Homo sapiens
aactgtaccagtctaactagcagtgactgcaaatcagctccacactgttttcctaatttagtgtcttagttcatacctacctttatttgttaagtacttgctttataatgcagttttagaaattgtgtcttggtctgaaaaggttgatgtttgattctcttttatgtcgttgttacttcagggctgaggttgtgttttgtctccttataatcacagggactggcattcagtctgagttccacctcaagtgaccatactcaatggccgcattttgaaactaactgcctgattactttggatttaggaaattacttttttggtttttttcctggtgccttctattactaactgccctcttaacttagrggtgtggctaaattttaaacatttagatctgattatctgtttttcctttatggatatgtataattttgcactgattttaaaaccaacactttagggtttgctctttaattgttgccatttccattcctattttctagtttagattctcaggcaactctgaatatctgctacctaaacagtgacatttttctggccattcttcactccacaaatatttgcctgtgcaataaaaggcttcaacttgactttaaatatcctaagaccctgtattcttgcagagaattggtccattacttctcaact

SEQ ID NO: 331225 - DNA, 555 bp, Homo sapiens
aaattatgcatccgacaaagattttrtatccagaatctataaggaacttaaataattcaacaagtaaaaaacaaatagccctattaaaaactgagcaaagaacatgaacagatacttctcaaaagaagacatacaagcaaccaacaaagatgaaaaatgctcatcattgttattcataggagaaatgcaaatcaaaatacaatgagatgtcatatcataccagtcagaatggctgttattaaaaagtcaaaaagcaacagatgatggcaaagatgctggagcaaagggaatgcttaggcactgttggtgggaatgtaaattcagccactgtggaaggcagtttggagatttctcaaagaactgaaaacggagctaccattcgatccaccaagccctttactgggtatatatgcaaaggaaatgagatcattataccaaaaagaaacgtgcactcgtatgttcgttgaagcaatattcacaatagcaaagacgtggaatcaacctagatgctcagcaatggtggattggatacagacaatgtgctacatttacacc

SEQ ID NO: 331226 - DNA, 555 bp, Homo sapiens
aaattatgcatccgacaaagattttatatccagaatctataaggaacttaaataattcaacaagtaaaaaacaaatagccctattaaaaactgagcaaagaacatgaacagatacttctcaaaagaagacatacaagcaaccaacaaagatgaaaaatgctcatcattgttattcataggagaaatgcaaatcaaaatacaatgagatgtcatatcataccagtcagaatggctgttattaaaaagtcaaaaagcaacagatgatggcaaagatgctggagcaaagggaatgcttaggcactgttggtgggaatgtaaattcagccactgtggaaggcagtttggagatttctcaaagaactgaaaacggagctaccattcgatccaccaagccctttactgggtatatatgcaaaggaaatgagatcattataccaaaaagaaacgtgcactcgtatgttcgttgaagcaatattcacaatagcaaagacgtggaatcaacctagatgctcagcaatgstggattggatacagacaatgtgctacatttacacc

SEQ ID NO: 331227 - DNA, 647 bp, Homo sapiens
gttttactggtgcatgtaaatcattacttagatgccaagagcacacaggagaaatttcactcaggaaagacatatcaactttgactgtaacttagaaattatacagtagaattttgctaataactatatataactatatataaatatatatatataactatatatatataactctctctmtatatatataactatatatataaagttttgtaaaggtggaagtagcagagagtgttctattatctggcccaatgtaaaaagcatgtacttaaaaaaaacttgagcttcccatgctgggaacagtaacagtgaagagggaaaaagagagagagaaagagtgaactccatgggaggtgtcacataagagcctccttcttcatatttgttccaaatttgtccaaagttcactttgctattcttttttttttttttggtcataaagtgattttagaccttaaagactaatataaatttaaattaatagtaattttatattacttttattttgcctgactcaagcatctctaggagaataagaaaaaaatataatttaggccttaattttctaaagatgtgtaaagacttagtatcagaagcagccagatttgaagcaacatgaaataagaataactaaatataggagggag

SEQ ID NO: 331228 - DNA, 647 bp, Homo sapiens
gttttactggtgcatgtaaatcattacttagatgccaagagcacacaggagaaatttcactcaggaaagacatatcaactttgactgtaacttagaaattatacagtagaattttgctaataactatatataactatatataaatatatatatataactatatatatataactctctctctatatatataactatatatataaagttttgtaaaggtggaagtagcagagagtgttctattatctggcccaatgtaaaaagcatgtacttaaaaaaaacttgagcttcccatgctgggaacagtaacagtgaagagggaaaaagagagagagaaagagtgaactccatgggaggtgtcacataagagcctccttcttcatatttgttccaaatttgtccaaagttcactttgctattcttttttttttttttggtcataaagtrattttagaccttaaagactaatataaatttaaattaatagtaattttatattacttttattttgcctgactcaagcatctctaggagaataagaaaaaaatataatttaggccttaattttctaaagatgtgtaaagacttagtatcagaagcagccagatttgaagcaacatgaaataagaataactaaatataggagggag

SEQ ID NO: 331229 - DNA, 592 bp, Homo sapiens
tatggtactaagttactttgttgtgttctataggttcacactctgagatctgagtgacagaaaagtactacttgcacctgtaattgcttttcagaaaatgaagaattcatttaaaaacatttgtccagagctagagctgaatgattctgtttttgtttttactttcagctaagattaaaatgactttgaatgtaataaaactcctttaatattatacatctcaatgcatgactttaaagccatgttcaaagtaatgaataaacattaaagaatatagacaataaagcagtggaaatgtggaacagtagcaatatcattatgctctagctttagtctttgagaaaacataaaatagaaaatactgtacaagttattcagaaaacctaaataaaactttattttcatgtatcttagaaattttaaaattcaatatctaatattttgatcatttcagctattatatatttatatctttacatctatttgtagtgcaatggcatggattaggtrtaaataaagaaaaatattaaaaagtggtgttagtaatttaaaatttttattttgctgaataataaaattacatatgtaggca

SEQ ID NO: 331230 - DNA, 550 bp, Homo sapiens
acatttttcaatattataatggcactccatctatttctcattgatgaaatggggatactaacagtgttgttttggggattggatgagttaatattttaaagcattttcaacaggataagtagttatatgagaactacacaattcatgactaaattcaaatttgttctgcatttttctaggcattaaagatataatagtgaataaagcaaagtcagacagatgctaaagaaagraagtaggcgatgcatgaacacaggcattaatcaaaaagcaatgaaggtatggtaaaggacagaggacctttggcattgccattgttatttgtccagggcagcgggaaatgtttaatcatgtagtgcttgaaaagagatatgccagatgtgagagggccactcaaatatctgtttcgtgagctttctgggcagagaaagggaaattggagcaagactgaaggactgaagaataacaatgagagctgcatggctggaaaatagcaccatgaggaaaatccaagagaagtgaggttataaatggaccaaaccacgtgagg

SEQ ID NO: 331231 - DNA, 576 bp, Homo sapiens
tgttttgtttactgtagccctgaaacgtaatttgaagctgagtagcatgatgtctccagctttgttcatttgcttagaattgctttggttatttgggcaatagaatacaaagtttaaaaattataaaccaaatgatagaaagaataaaaacaaacttttctctgattttatacaatatgtatttccttaattagaagacaaaataagagttgtcatttttgtatatctaaaagactgaataacatatttgtagtattattattgttagaatactgttctttgcatattaaaattattgtaaaaaatgcttcctaaaaacttcagggatacctatttaatctcatctgaaaatggctatttagtggacaatttgttttgtctgaaaaatatgtcacaattgsaatataaaataatggacagcaaaatagatattgatttgaatggtataggccaaaaaagctttcctgaatttgctttatacaacttattgcttactaatagcatatcgtaagtgttagaaaggttcataacattaaatctaaaataaatcaaaatattttaaagtaaatctgggaa

SEQ ID NO: 331232 - DNA, 305 bp, Homo sapiens
tatgtgaatggtgcaattgtgtgcgtgttttagttatgaattcagtactatgctttattttattaatttgccttccatcttgcaaacagatactaacacaaggccttgggtacaggtagttatttggaaggtaatacaagaggccagaatacaaaggcgggaacagtgccagtawtgcagataaagctgataaagtactcatcattgagttagccagcagtgtggttatgtcaagtattaagctaatctctctcaaatccaagtccactattgcatactagagtgggactccactataatagtgg

SEQ ID NO: 331233 - DNA, 502 bp, Homo sapiens
tctgctcaaacttgtataaaacattcatcaggatagatcccattattagcataaaacatatcttaataaatataaaataacaaaaattattaaaagtaagttttcagaaaacaatggaaatgaaatggaaataaaaaacaaaaatacagctagataataccaaaatacttgaaagtgaacaacatacttctaaataacacatggatcaaagatgtctcattttttaaatgatgaaataaatgaaaataaaaaaawtaaaaaaaattgtgggatccagtgaaaggggtacagaaaaatttatagaattaaatgtatagaatacaaacaaagaatagctaaaatcaataatctaagcttcaatcttatgaagaaaagtacttgactgtcctccacaaaatagagatgacacaaattaccagaatcagaaatgaaagacgaccactgtcttagtccattttcatactgctatgaagtaatgcctgacactggataattcataaag

SEQ ID NO: 331234 - DNA, 502 bp, Homo sapiens
tctgctcaaacttgtataaaacattcatcaggatagatcccattattagcataaaacatatcttaataaatataaaataacaaaaattattaaaagtaagttttcagaaaacaatggaaatgaaatggaaataaaaaacaaaaatacagctagataataccaaaatacttgaaagtgaacaacatacttctaaataacacatggatcaaagatgtctcattttttaaatgatgaaataaatgaaaataaaaaaaawaaaaaaaattgtgggatccagtgaaaggggtacagaaaaatttatagaattaaatgtatagaatacaaacaaagaatagctaaaatcaataatctaagcttcaatcttatgaagaaaagtacttgactgtcctccacaaaatagagatgacacaaattaccagaatcagaaatgaaagacgaccactgtcttagtccattttcatactgctatgaagtaatgcctgacactggataattcataaag

SEQ ID NO: 331235 - DNA, 551 bp, Homo sapiens
tggcagcgtgcttagttctgcctttcattaggaatgcattttttagttatagtaaaagttactggtcaagaaacatttgggaaagtgatccatcatcaactattgaaattatcacactttcctcactgcactgcaatgtcaactttggcataaataatctaatggaatatatgtgcttctggactcttactgcgtattcatctcttagtctgtattcctgccaaatctgcccaataaatattaatattgatagagttcaagagcgtagtataaatgtttccattttattctagcaaactgccatggctactcttgggcataagtttttccttacttatttagaattttttttttaactgtgatcttatctcccaaagaactcctaggattttgactgagattgtttggacktatagattaacatggggggataatctattataactaatatatagctattagttatatctttaaaatatttagtctgtcaacctttgaatataattttcttccattaagttaggtctcctttaatatctttcacaaatgtc

SEQ ID NO: 331236 - DNA, 618 bp, Homo sapiens
agtgtttgggagagtaggagaggggggcaacttttgtgccttcagcacccaacaaaatgctgtcagctaatacttgcttagtcatgtgtatatgtttcttgaaacttctcagccttcacctaaaaattcaccctttaaatattactttataatccagcttatgggtagttggttctcgaataaaatgatattttgctggaaaaaaggaatcgaatttatgcagactcaatgctctattttaacgtgaatggtgtttttcatacactgactttcatggtactctcaaggttgcagtattacattcccctacaaattttgttttatcattaaagcccagaatatctaaatgagaaaagtatactttctgcaaagaattgcagacatttcagttaaaagtcaatccagtgagtgcaaacattcacaaaaggaactaaaatgcggaaatatccaaaatacatgtcaaagaaaacatgaggattatggacaaccaaaatcaatcttttcaagcacaaaacagtccttctaaaaagacttagattccgtgtgcggtccatagtcktaggcttgaatagaatgttctttcaattttggggctgcaatcatttactgaagcattta

SEQ ID NO: 331237 - DNA, 443 bp, Homo sapiens
aaatgattttggttttttaaagtgatatttgttagcttgtacaatcatttcacttctaaaatgaccaaataagaaaagagtctgaacattttgctctcatatagccaaaaaaattctgaaaagaaccaggaggcaggatactctaaaggaactatgtgatcatgatggtgaacctcccgatgtctctccgtccccmttgcattggccctgactcagtggttcagtgaatgctacctggctggtggtagggacaagcaggacagatatgactaattgtcttcaggaaatgtcttataaaacaagaaacagacttaattactgaaactaatctgggagtctcgaggcttactagccagctgaagggccctgtcagaggtgttgtcaacctgtgcatttacaggaatagtccgtgccgcccccaccccccaagaaaaaattgtaaa

SEQ ID NO: 331238 - DNA, 506 bp, Homo sapiens
gtgcatagcagttagtaggcttggygagacaaagatttttcttcatcatacaagtgccggtcacaagagagacctctcttccccattggccaagtcaacattatttgttgccaaatgactgctcacaagcaaagactcacctatcaccatgacacatcccttacttgctggtgaagtatcacagtattttttttccttaagatttttctatttttttcatgcatgttggatacagcttcagaagatttaatattagacatttttatctccaaaatgaaaggaccacttatttgcacttctgtcttttatttttccttctttatattccctcagggtcatattttacttcctcctgattcatattggtattgattccattggccttattcagaatattttgtttcattttataccatttattctatcttgtatagaaagtccgtgttctttctcttatgatagaaaatagaaaaaaaaattgcaaagatggtttgtcaccttcagtc

SEQ ID NO: 331239 - DNA, 609 bp, Homo sapiens
ggaggctttggttagacacatgaaatataraaggctggaagattaactcattactgacttagggatttgcaacataagtgaagtccagtggtcttggttatgccagagcatctccttcaaataaaggatgaattattacatctcacccctttcaccactaagaataaacacagtgtctttatgcttctttaggatctgggaattctaatgggagataaagaagtattgcagcaggagagctctctgctgtagctgtctgcttgtaccatataacccagctcatgacgttagaccctatgtcttcagaggtaccttcggagggaaatttcgctatgtgaatattgggcaattttcccaaaatacaatcagaatctagaagtataggttttaaagcaaggcaatgccatgtgtggtagagagtgccaaacatgtctgacatgccgctcagactgattagaaatgagcacctgactatgggacatgtggtcaagtcatctcatcatgggtttcatcaaacccacagtcttgtaaagtctgctggctcaacaacaatcaactctaagacagaaatgttatattcagctttgagcatgagcaaagtcctttacc

SEQ ID NO: 331240 - DNA, 581 bp, Homo sapiens
atgacttgttcagggattaccatcctgttttcgmtttaattcagggattaccatcctcattgagtttcactgagggaggctgggtgacttcctgaacatcatgacttgtaagttttcattagtatttgtaagttagtctgtttgcaggaaatgaatacattttgttatagcacacataatattgatatgtccatatcagtataaaaggatggagatagagaaaaatttaatcagccttttataagagactttgctagtttttttcctgcttaattgtttgacttaagggggaaaaatacacatagaatattaaatgcaagtttattaatgatttaattatttaaagaaaaaaatctagacactgcttttttaaggctataataaagggggttaaagtaagttagcattcatttgcggttgagtgattgccaaaagcacgaagcttaggtaggaaagaaaaaaagtcaggtagcttagaataagaataaaggaaattatgaaacatggtttcaaaattgactaaaaagcgatttagtcatacaaaattatcttaaattagaactaatagcaaagcagtgaaa

SEQ ID NO: 331241 - DNA, 531 bp, Homo sapiens
agaactgctgccccacaaatcagtatgtaggagtgacagttaattcagctgatgttatgagttgtatctattcatcaggctacatttaggacttaggacccctgatataaatagtgagaattttacgagagaatgagcagaagcagtggagcaaggacctaagattagtttgaatgaactatatttgttatataagtgacattctagaaggctctttttaagagacaattgagttttttattctcttccttaacatgatgttactgtacttgtcactgttttagattagcaattattttataaggaattgacaaaagactacattatttaatacamtgcataaccttcagcagatgaagcaaggtgaatacaatgtaaaactaaaagcatagtcttttttatttttgccttaagatcaacataagcattataatggagtccacgaattatgcatgaactttttcataatgcagtaattgtttccatgctttgctgtgctgcagtgttttaagctgcagatgatattatctg

SEQ ID NO: 331242 - DNA, 528 bp, Homo sapiens
tgctttcagttgggtgagatagaaagtcatttctaagaaaaagtggagataaaaggattgctgtaccccgtttggtatctttaaaaatttcagagatttttaaycgaaataaaaggtatggaattttaggggtgccaacttcatttttttttcttgctacaaggatccgtttttggatgaatatatcaaatttatatatataaatcataatttctattttgattttataaaatcctagtatagctcttatctactctctcaatatgatattgactattccattataaatattatgctcaagtgatgctgaatggacagaaattgaaagtattgataaaagaatcagtaccacattcttacaagaagattgactatattctctctatgttgatgtaggaatttctagttttagggtttctcagttgactcaactactgctgcagtggcagtatatctcacccaactgaaagtaaccccgatctaaataaaactaaattaactgcagtggcagtaaatatttacaaatca

SEQ ID NO: 331243 - DNA, 528 bp, Homo sapiens
tgctttcagttgggtgagatagaaagtcatttctaagaaaaagtggagataaaaggattgctgtaccccgtttggtatctttaaaaatttcagagatttttaaccgaaataaaaggtatggaattttaggggtgccaacttcatttttttttcttgctacaaggatccgtttttggatgaatatatcaaatttatatatataaatcataatttctaytttgattttataaaatcctagtatagctcttatctactctctcaatatgatattgactattccattataaatattatgctcaagtgatgctgaatggacagaaattgaaagtattgataaaagaatcagtaccacattcttacaagaagattgactatattctctctatgttgatgtaggaatttctagttttagggtttctcagttgactcaactactgctgcagtggcagtatatctcacccaactgaaagtaaccccgatctaaataaaactaaattaactgcagtggcagtaaatatttacaaatca

SEQ ID NO: 331244 - DNA, 544 bp, Homo sapiens
gaattacaggctcaatggattaacttttctaatctggctgagtagaagaagaagtgtaactgaacaagtaaacaggaaaattaaataatggaaagaataagaataacaaaaagatagcagtaacaataataatgttaaataataatataagcgactgacatctctttccaagtgcaaaattgtcagtgttcggtgtctaaattgataatttgacatgtagagcaactcagttcatggtgatggagcgaatgatgtagaattgatgtgaaagaccacagattttaggaaagcawgggacagaaagtccagaacataaactcttaataattaggcacattgaaagtcgcttaaattgtactaggatttgttggggagtggaaaactggttaccattgtcttcaaagaccagaggtcaaaggatgttaccgaagtcaatgagtcaccattctgtaagaaactgtggtaccatacttgtccattcaaagaatgcaatgtttccttacaaatattactgtgggtttataaaataaggcaaaattaatta

SEQ ID NO: 331245 - DNA, 544 bp, Homo sapiens
gaattacaggctcaatggattaacttttctaatctggctgagtagaagaagaagtgtaactgaacaagtaaacaggaaaattaaataatggaaagaataagaataacaaaaagatagcagtaacaataataatgttaaataataatataagcgactgacatctctttccaagtgcaaaattgtcagtgttcggtgtctaaattgataatttgacatgtagagcaactcagttcatggtgatggagcgaatgatgtagaattgatgtgaaagaccacagattttaggaaagcaagggacagaaagtccagaacataaactcttaataattaggcacattgaaagtcgcttaaattgtactaggatttgttggggagtggaaaactggttaccattgtcttcaaagaccagaggtcaaaggatgttaccgaagtcaatgagtcaccattctgtaagaaactgtggtaccatacttgtccattcaaagaatgcaaygtttccttacaaatattactgtgggtttataaaataaggcaaaattaatta

SEQ ID NO: 331246 - DNA, 563 bp, Homo sapiens
aatggacatatacatttacttcaatttttcaatgttacaataatgctgctgttagatttattgtatatgtttcaatcacatgctcaaaattttctctaggatacaagcttagcaatgtctttacttgcttgatatttctgagttgttctccaaagtgattctaatttacaacttcatcaaaaaagtaatagattttctgctcctctacactcttgggaaaaaatgttattttaaagctttaaaagatttgccttcttaaatgtttcaaatgtatcactttgtgaattagtgtctatttcctgattactagggaagataaatattgtatgtatgcttactggtatcatatttctccatctataaattgtgtatttatatattttgcttaaatttaaattgagttatatrccttttatattagtttgtctaagttctttatatgtttgaaaagcaactctttgttcattagtatcgcaagtattgtctgatttgtcatgtatctttttaaagacatctctaaatgaatggaactttccttttaatacaagaaaactaagtttaac

SEQ ID NO: 331247 - DNA, 480 bp, Homo sapiens
atgacagggttaatttaaaaattcctgtgtggcctagcatattggctggtcatgaaatatttatttcatttattctaaatcatagaattgtagccagwcacaaatattcctttaaattttgcatatttataactgattttattgtgccctttattattgaaggatagcctagctgaatctaaaatccttgacttacatttctctttctttgactattttgtaaatattattttcttgctttctggcataaaatgttgctgtcagaaatctgatgacaatctgattttcttactcttaggagaaacttgggaagatttactgagtccgtgtcttactgttgaatatcatgggctgatttctcatttacacattctgccttcttgtatgtaggctcaattattttcagcaaagttttagataattattctcttaagtgcatattgtgtcctatttctctgcttttctgttttggggactcca

SEQ ID NO: 331248 - DNA, 480 bp, Homo sapiens
atgacagggttaatttaaaaattcctgtgtggcctagcatattggctggtcatgaaatatttatttcatttattctaaatcatagaattgtagccagtcacaaatattcctttaaattttgcatatttataactgattttattgtgccctttattattgaaggatagcctagctgaatctaaaatccttgacttacatttytctttctttgactattttgtaaatattattttcttgctttctggcataaaatgttgctgtcagaaatctgatgacaatctgattttcttactcttaggagaaacttgggaagatttactgagtccgtgtcttactgttgaatatcatgggctgatttctcatttacacattctgccttcttgtatgtaggctcaattattttcagcaaagttttagataattattctcttaagtgcatattgtgtcctatttctctgcttttctgttttggggactcca

SEQ ID NO: 331249 - DNA, 480 bp, Homo sapiens
atgacagggttaatttaaaaattcctgtgtggcctagcatattggctggtcatgaaatatttatttcatttattctaaatcatagaattgtagccagtcacaaatattcctttaaattttgcatatttataactgattttattgtgccctttattattgaaggatagcctagctgaatctaaaatccttgacttacatttctctttctttgrctattttgtaaatattattttcttgctttctggcataaaatgttgctgtcagaaatctgatgacaatctgattttcttactcttaggagaaacttgggaagatttactgagtccgtgtcttactgttgaatatcatgggctgatttctcatttacacattctgccttcttgtatgtaggctcaattattttcagcaaagttttagataattattctcttaagtgcatattgtgtcctatttctctgcttttctgttttggggactcca

SEQ ID NO: 331250 - DNA, 579 bp, Homo sapiens
aaagctcacttcaactcacatcttttatttgttaccagtaagatcccartggagtttatctttttattatctatgagacacagttatgattaattgcctccttgcgtttttgccaagtatgctcgccttggctagcatctgaatctttccttaagatcccagtacctctctgtcaaattgagtgtgaggttattactatctccagctagcttacatacattataaagagattcatttgcattgcagaattttagcaaaaagtctccaaagtactttaccctcccttacaaccatttcattagtgcacagtcccaaaggcaacctcaccaactttaggaagatgagacctctttattttatatcctcataagttcacccaaattaccaaggttagtggagtgattcgccaattactttcaaggaactttgagtatccagaatttaatattttattttggaactaaaacttttattttagatctttctgtagaactagccacattgcctcatgtgaaatcaaaccacggatgaacacctttttaagtgaaatgttagtttattatttctgtttcctaacgt

SEQ ID NO: 331251 - DNA, 618 bp, Homo sapiens
gatactcattagggataactgcaaggaagaaactgtacttgataccacagcgctaataatgaaacctggtgcgaagagcacttgtcctataaagatagaatgtgaccggaggcttgtgctaggaattcttacctaactgggaggatgtcaaagcttcgaaaagtgctcctaaatatgcagaaggtaggtgtgggggctaaaaggcatcattttcctgcagtgaatactggatctgagaaaacgtgtgcaaatgaaagaaatgctttttttcttcctttatcttactgtgctccattgtgtgtgtgtgtgtgtgtgtgtgtgtgtgtgtgtgtgtgttggaagaaaagttactttaaaatttaaggaatatatagattaaggaatatatcaacatataggttamtgcaatagattgagaatccagaaatatattaatatgtgctttaacttggaaaaattgcgaaacattatgctaagtaaataaagtgagacacaaaaggtcgcatattatatgagtccatttgtataaagtgtccagaacagggaaatccttagagacagaaagcaaattagtggttgccagagtcaaggaggaagtttggagagcgagtacttaat

SEQ ID NO: 331252 - DNA, 577 bp, Homo sapiens
accctgtggtatttatttcagtgagggcctgttgcttatgctgtaatgtgagtctgcaactcagtgaagattattgtattgatgacacgggcgagactactattgaaaaggtataatatatgtgtaattgggttttcagatagagaaagaagaggaggaaaataatggaagtattctttgtagatacagggactaaaaatttgtaaaaactcatgaaagatatcaacttacagattcgtaaagatctacaaacccttactaggataaataaaaatatatttatacgtaggtacaacattgaatataatacagaccatagacatatgcccccaaaaagtagcagctgaaaatcttttctagacatatggtattttctataactgctctaagtttctcctattttctgaattcacttttattcctattctcatgctcctttaacacttggttcttaagaactcatgctactctgatgacttctaaattggatgatagtaagtgaattacagtggtgaggagaacaacaaggttataaaattatgaagaaasacatcaatcctcaacaaaacacatatct

SEQ ID NO: 331253 - DNA, 566 bp, Homo sapiens
ggtgcaatgcactaccctcatattcaagttaaagaaatacttactctgagtctcatccccagtctaccaaggatttccagaaactgccyacctttcatagggtctcctctaagttaggaactcattcaatctccattctcatatgaacttgtgtacattttagtgttaagcacaaggtgcgttacttagagtctttagcttgtttttttgattaatgaaacttttttctggaccccagagggcctatattcttatctatgatacatctatgctttcaaagaaatttcctattagatttccatctggaggtcagtttatgaaattactgctaaggttatattctgatacctcgatgatatttgaattcaaatagtccatatgctttaaagaaatatcatgttttgcactaaggtcaagagcaacttgtaagttaacctatcccaatgtttaaacaggagaactaatcagtgtgacatttatttgctctatgtgagaatgtatagattaaatatcacttgtagaagtagcaagcaaactttcatgctaaggttttgcattatgtgtag

SEQ ID NO: 331254 - DNA, 608 bp, Homo sapiens
aatttacttttatgtattgtaccagctggagtgttttagttacaagtaaaggaaaagagactcacattggcttatacaataagaccattttttacctttcatgccaagaagtgtccttgtaaggtgaactccagctgtaggaygcatctgagacatgatagaatgtctgtttggagatttgggagaaagagttcattgctcttaagcaggaagcgatttctctggatattgccctgcctctaggatgaactgcctaatgtggaggcagcctttttgagctggaacgatgggaatgagagtagataaagtaacagagccaggctcttgatgatactagtgtacctcagatgcccattcctaagcctgtcatttctgtggagagggcagtgatcttaactgtgtcttaacctattcataatgcactccataaactggtgaaggtctcacctttctctcagccactgtgtgagaagaaaatctgagctcttctatgaaagggaaggaggggaaataagtacatagtgggcagcagtatgcaccagaggtgccaaactaaggttgaaggcccaacttttctgacccaaagttcctgtgattttataatacct

SEQ ID NO: 331255 - DNA, 328 bp, Homo sapiens
cagccaacaagagctagaaggtcagtgtggtcagagcatggcaaatggggtrgggaagtggaagatcaggctaaaccccacccttggaagggcttaggaagaaagagttgggtcatctcagcttgtccccagagcagccaacattccgaaccagtggcccttttggggggtctcaacctgggtgtgccctgaaccctgccagacctgcattcctgggacctggctagacaacactgttccaaagtataagtgatgtacagtcaatgaggagcatcaacaccgaatacagtgtgtggacctggcttgaatcctcatttgaataaaccaa

SEQ ID NO: 331256 - DNA, 632 bp, Homo sapiens
caagggatcctccaacctcagcctcccaaggaactgggactgcaggtgcacaccaccacacccggataatttttatttttttgtttcttgtaaaaacaaggtcttgctatattgctcaggcttggtcttgaactcctgggctcaagtgatcctcccacctcggcctcccaaagtgttgagattacaggtgtgagccccacacccagctgagaattcttttaagtaatgctgatttatcaatactttagatggaataagacacaatactgtgatggaaaaataaggataaagatagtttgagttaaaatgtaactctgagaagttagattctgaaaaatgtcrgatatatagtattttgcttgtatttcattttttatatgcacaaaagtctaaaagaactttttcaatacttatgaaataaacattttaagtgataaagcattatatcaacctaattaacaacacattttcttctgtcattcataaaataatggtgcattttacaattgaatggtgtctcaaacttgatggtcgttgtagctgtagagaagggtgagatgattgaaagagcataaaataagtggagcagaagatccagaggaaaatctctagaaacattaccaggtaatttg

SEQ ID NO: 331257 - DNA, 545 bp, Homo sapiens
aaaggctttcttccaataaatagttccaagaggaaagggagccttttattcttgctgatctgctctgtcttcttgtttggcttgcttataaatgtaggcttaactgcaggcaccacaatttattaattcatttaactaaaaaccaactatttgttaggtactgtattggtccaacaatcaaaaaacwttaacaaacatatttatagggattactatttgccaagcattattccaagtgactaaaccatgctaacttgtgcagtcctcataagaaccccaagaagaaggtactgtcactatgcctgttttacagatggggaaactgaggttcagagcaattaattcatttggccaagtaataagagccaggattctaaccaaggctctggcttggagttgttgctcaagattacttcaccatgctgtctccccttgcagccagtgcctgcttacaaagaagttctagattcatggggaagacaacgaagaagcaagaaacaacaaatcggattgaattgttttgtacactgctgtatccccagcac

SEQ ID NO: 331258 - DNA, 632 bp, Homo sapiens
caagggatcctccaacctcagcctcccaaggaactgggactgcaggtgcacaccaccacacccggataatttttatttttttgtttcttgtaaaaacaaggtcttgctatattgctcaggcttggtcttgaactcctgggctcaagtgatcctcccacctcggcctcccaaagtgttgagattacaggtgtgagccccacacccagctgagaattcttttaagtaatgctgatttatcaatactttagatggaataagacacaatactgtgatggaaaaataaggataaagatagtttgagttaaaatgtaactctgagaagttagattctgaaaaatgtcagatatatagtattttgcttgtatttcattttttatatgcacaaaagtctaaaagaactttttcaatacttatgaaataaacattttaagtgataaagcattatatcaacctaattaacaacayattttcttctgtcattcataaaataatggtgcattttacaattgaatggtgtctcaaacttgatggtcgttgtagctgtagagaagggtgagatgattgaaagagcataaaataagtggagcagaagatccagaggaaaatctctagaaacattaccaggtaatttg

SEQ ID NO: 331259 - DNA, 545 bp, Homo sapiens
aaaggctttcttccaataaatagttccaagaggaaagggagccttttattcttgctgatctgctctgtcttcttgtttggcttgcttataaatgtaggcttaactgcaggcaccacaatttattaattcatttaactaaaaaccaactatttgttaggtactgtattggtccaacaatcaaaaaacattaacaaacatatttatagggattactatttgccaagcattattccaagtgactaaaccatgctaacttgtgcagtcctcataagaaccccaagaagaaggtactgtcactatgcctgttttacagatggggaaactgaggttcagagcaattaattcatttggccaagtaataagagccaggattctaaccaaggctctggcttggagttgttgctcaagattacttcaccatgctgtctccccttgcagccagtgcctgcttacaaagaagttctagattcatggggaagacaacraagaagcaagaaacaacaaatcggattgaattgttttgtacactgctgtatccccagcac

SEQ ID NO: 331260 - DNA, 553 bp, Homo sapiens
tctggcttggagttgttgctcaagattacttcaccatgctgtctccccttgcagccagtgcctgcttacaaagaagttctagattcatggggaagacaacgaagaagcaagaaacaacaaatcggattgaattgttttgtacactgctgtatccccagcacctaaaacagtacccaagtgcataagcagggactgcataattatttgtggaatgttgttgcaataaatactatgaagtaaactgattggatgagatgagagactgtcacgggaacctacttaattcatatgcagtggtgagggagggcgtctctgacagatgacatttaagctaagacctaaaggatgaaaacaagggaaccatgaaaagagtgtggaagagcattcaggcagagggaccagtatggtaagaggccctgaggtcaggggatcctggcagatgtgaggaatggaaggagccggtgtgtgggarcggggtgtgcacaggcagctgtggaatgagatgaagcaagttgtgagcacaagctggattatgcagggccttaggtcatta

SEQ ID NO: 331261 - DNA, 582 bp, Homo sapiens
tggggaagactggaagatgtagaggcatatggagcrtggctcctgtctccaaacactagccttgaatgtgcacattgttgtttgcactaccaaaaagtaaagaaacctattttccttttttttgtttttttctttttttaagacaaggtctcactctgtcgcccaagctagggtgcagtggcgtgatcacagctcactgcagctttgacctcccagattcaagtgatcctcccacctcagcctcctgagtagttgggaccacaggtgtgtgccaccactcctagctaatattttaaaatttttgtctatagagatggagtctccctatgttgcccaggctaggcttgaactcctggcctcaagtgatcctcctgccttggcctcctaaagtgctgggattacagacacacccagcctagaacctatttttataaataggtggcagtagtctacagaagtttccttttaaaaagtgtgtttgttcccaatccatctgtcataaagttacactaaaagagcacaaagggaaaatagcaggacacaaaattgaatgagtaaggtgaggattataataaaaaatac

SEQ ID NO: 331262 - DNA, 607 bp, Homo sapiens
cataacatgtaaactattcccaatgaatggtttagaaactcgtaaagccaaactggcactttctagggatgaagtgacggacctaccgcgactagggagaccaggctgtggttctaggtgtttagctctcccagtttgtctgtcctgaaatarcctgaaacaaaattcaacccagtgtcactgctccccaaaatttacaatcttattggctaataagactggcccagcatgaaacaatggtaataagtgcagattgtggccaagatgacaggtaatagagttgtgtcaaaatacaggggctgacgtgggtcagaggagacagggaaggctcctgggaaagttggacttgaattggcactgagtccttccctcgtttggattcagatggggtttgagtcctagattcaccaggacttactttgagcaggtatataagatctctgaacatcagcattctcatctacaagatggggaaaatagtaacaatgtcctaggctttttgcgagcattaaatgacataaagtacctagcgattaagtggtcagtaatgttagatcatccattacttccatggctacaaagaattccctctttctgggactggctc

SEQ ID NO: 331263 - DNA, 550 bp, Homo sapiens
gatggcctttagagatgacctgaattgaagcaaaggggacaggcctttgtaacccctcawcaaccagccattggatgcacagggcaggcacatcaactcgggtaagtcagtttcctttgataaaaagtcattcttgcagaggaattcagctgtgagccatcagcgggctaaagtcctggcagctggggaatgagtgcttcaaccctaaaagggggttctgggtggcacagcctagcacatgctctataatgacaaccatctttctgtcacctggctttgtctctcctgagctccagactccatcgacattcaactgcctactgcagatttcccttttggcaacatgtgagatacaataaaacatatacaaaatttaatgctcatcaccaccttctacagctctactccctctttagggttctctgtattagtctgtgttcacgctgctgataaagacatacctgagactgggaagaaaaagaggtttaattggatttacagttccacatggctgagggggcctcagaatcatggcaggaggcgaaaggcc

SEQ ID NO: 331264 - DNA, 633 bp, Homo sapiens
tctaaggacaaaaagaaaactgcaacgaaatcttaaatttgacgagtgagtttgttgttgatgacgcaattatgaaatattttgaatttcttgcaggactgagcaaatgtattcttgagaacccaggttttcattgtgggagaagagaggtagaaatgtcaaatgtgaggacgaaagaaaagaaacgctgtagttttagaatggaattgagccatcattagtatgaatcaagattattatttcttagttcttgccacagaaaagacctagaagcaattaaatctctgtacaaagagcacacctactacacctactatccagatttcagtttctgaataccattctccactacacaagagaagtgaactgattacagggcagagacaggcaaggtaaaaaggaagmccttataccagagagtaaagaagtgttcaaaaactggtgggtactatcaaaaggacacaagatcccttgacacaggagcttcaaagagctctcatggccaagtatagtatcatttaaatcttaaaatgaattatgatcggaatagattataacactggataaacaaaatcattcatgaacccatgctgatactagaaatttatttttaaaaagatgaggcaaaggaga

SEQ ID NO: 331265 - DNA, 628 bp, Homo sapiens
ctaaaaactgaggagttgtgagacatgtgatgcgttactatacaaggtggtggactgctgtttcccaacaatctctaggaaggcttggagattatgtggacacactggggcctcggatggtttcctgaattccatttttactctgatttcttcctgtttcttctactttatcatcgttttcttaccgagactctctcctacattaaagttgcctcttcattaatttcattctagatttttggcttttccttgtacttttcttctgctctgtctctttgctttctttctacccatcaaaggttaacaaataataataatsgtaacaataataacaacaataatagaaaaccagtcaaacagctaccatgattggacatttactgtgcagtaacagatgttatctcgtaacagccatggttagtgggtatgagtctaacagatctggaaaagaaaatgaagctcaggtaggcaaagtgatttgcctcatgtccaggcagtagctgacagtagagttgggatttagacatagattggttgctctaactcatctgtgccctgtgcttaacctagatgttaaactaatgactcatataaaataaaataataacatccacttgttaaacatgcc

SEQ ID NO: 331266 - DNA, 538 bp, Homo sapiens
aataatagaaaaccagtcaaacagctaccatgattggacatttrctgtgcagtaacagatgttatctcgtaacagccatggttagtgggtatgagtctaacagatctggaaaagaaaatgaagctcaggtaggcaaagtgatttgcctcatgtccaggcagtagctgacagtagagttgggatttagacatagattggttgctctaactcatctgtgccctgtgcttaacctagatgttaaactaatgactcatataaaataaaataataacatccacttgttaaacatgccagagagtctacttaaattctctcatttatgaaatgggtacattctccaattctaccaataagaaatttcaggttgtttaaatattttatctaaggtcaaataactaggaactggcagagttaagtcaaattagctttaccagactgtaagccacgtatatattttttcactatgttagtgtttacccgtttttggaggcctaatcttttccaagaaatcatctccatagtagactttcttttttag

SEQ ID NO: 331267 - DNA, 573 bp, Homo sapiens
gctttggcaccaaagagattcaacaaatacatttcatcacactgaccctgtactaagagcaactttatgtggataacctcatgggaatggaagttgagaaagagctatttcaaggctgccaatgccttaatctctgctctgttcaaaatgcaaacttgctgctttttatgctcacagtagtaaaacaaatctgtgggattttttaatcctcagcatgggaaggtagagagaaaagtgaacaaggggaatcccacaaaaaatatctacagtcacaatagagaaaagataatgagcagtaaaacaccttcttaaaaaaaaagaaaaaggaaaaggaaaaaaattatataggaaattcacccaacctcaattataggagggcaaaaaatagcttttatttgaagcaccaacactcacttctttgttacagaaaactagagcaacactcggcagacttggaggctcctaagttatcagggaactgtttcctgggaatatgttcacccgttccatgcagcctgcttcataaaggcagaatgartagtgcaaataaattctgtaaaacagatgagtgtt

SEQ ID NO: 331268 - DNA, 634 bp, Homo sapiens
agtaaaaaaaatataaaatgcggtgtaaatatttgggtcaaaagcttgacaagggcaatgccacatttttctttcgttttgttaatagttcgttgcttttcttagcacagtaatttcaatggacaagcagttaggtgaaaaagtatcgatttccctcacttactaggggaattctgctctaattaaatggcagagctaaaagttggcctttgccaaccagattttagtgccagttaaactcctagtgggttttgagtggcccatgggtctgtattaccaagccaaaactcctcttgagtttcagcatctctgccccttctcacccacccccaaccactacagctcctttccgtrgccgcctctgaattgcagtgggtaatttttctgagtctcagtgaagatataagcagactcattttgctgcttttactttgaagtctcaactttgtagatttgctatcaaatctgtagttagatatgggttctcaggggtaggggataaggagggtaattagttgagttttaatttttttctttttgagttacatttccaggcatatagacaataaaatccttgcaaacaaagtctaagactcttttgtatggtcacgagtggacataaagtataactttt

SEQ ID NO: 331269 - DNA, 594 bp, Homo sapiens
ctcttgctagcatgctttataagtttcaattattattaacagtgctgattgggcaaaaagtatgcccaatctatgaactaagcagctgcctcgttgaggtgaggtttggtgccaaagctctgcccagcagagatggtgatgattaactcgataggaatttgatctgaagagttgactgtcgagagcaagggcagagagaggctgagaggcacagggaaaagtggaggcacagagatctgctggtccaatataatggaagggcatgacaaaggaaccagtaattctaatagctgaaattgaagtgtgtattatgtgtcagtcactattccaagtgcattttacgtatagtaactcrcttccaagttcacaataaccttctgatgaggaacagagaggttaattaatttgcccaaggtaacacagacaggaagtgggaaggctgagctataaacccaagtaatctggctctggagtccaaactcttatcattataccccactgcttatcaatggaatacatataaatacatatatgttttttatgtatgtatgtgtatatgcatatatgtatgtgtgtaagtttatatgtatacgc

SEQ ID NO: 331270 - DNA, 652 bp, Homo sapiens
tctggtgggttcttggtcttgctgactttaagaatgaagccacagacccttgtggtgagtgttacagttcttagagatggcctgtccagagtttgttccttcagatgttcagatgtgtccagagttccttccttctggtgggtttgtggtcttgctggcttcaggagtgaagctgcagacctttgtggtgagtgttacagctcataaaggtagtgtggacccaaagggtgagcagcagcaagatttattgcgaagagcaaaagaataaagcttccacaacatggarggtgaccccagcggattgccacacgtgctctggtggcaagcttttattcccttatttggtcccgcccacttcctgctgattggtccattttacagagtgctgattggtctgcttttacagagtgctgattggtgcatttacaaacctttagctagacacagagtgctgattggtgcgtttttacagaggggctgactgctgcgtttacaattctttagctagacagaagagttcttgaagtccctatccgacccagaagcccagccggcttcacctctcactaccatattgggagatggggcctaataagaagtgattgggccatgaagatacaccccacatgaatgaatgaatgttatgtgcagg

SEQ ID NO: 331271 - DNA, 428 bp, Homo sapiens
aaggactctgggtaaactatgccaggaaacttaaaaatcctggctgccttggtctccatcccaagatggccaaataggaacagctccggtctgcagctcccagcgtgatggacacagaagatgggtgatttctgcatttccaactgaggtacctggttcatctcattgtgactggttggacagtgggtgcagcccacggagggtgagcsaaagcagagtggggtgttgccttacctgggaagcacaagggattgggggatttccctttcctagctaagggaagctgtgacagactgtacctggaaaaatgagacacttccgcccaaatactatgcttttcccacagtcttagcaaccagcaggccaggagattctctcccgtgcctggcttggtgggtcccacacccacagagccttgttcactgcta

SEQ ID NO: 331272 - DNA, 488 bp, Homo sapiens
taattattttaaaagatttttcctcaattgcagcgtatggggtgggatggaggttggggtagatagtgtaagacaaaggtggcagtgtcaggggatctaaaacaaagaaaccttcaaaacaataataacaacacacacacaaaacaaaaaagtaaatgtctcctgggctctgcctcaaaggtaaataaatgktcctgagtattgagaaaattcttccgagtcttgcacatgtggatttgttcagtatattctgaatctgtacttgtttctttattctttttttaattatactttaagttttagggtacatgtgtacaacgtgcaggttagttacatatgtatacatgtgacccaaggcatttgaaaaacagagcttgaaatattcattgatagttgggtgacatgtgtacattctacttaaagatgagtgtcagcccctcccaggaggctactctggtggcctagaaaatgaattaactgaaaagtta

SEQ ID NO: 331273 - DNA, 488 bp, Homo sapiens
taattattttaaaagatttttcctcaattgcagcgtatggggtgggatggaggttggggtagatagtgtaagacaaaggtggcagtgtcaggggatctaaaacaaagaaaccttcaaaacaataataacaacacacacacaaaacaaaaaagtaaatgtctcctgggctctgcctcaaaggtaaataaatgttcctgagtattgagaaaattcttccgagtcttgcacaygtggatttgttcagtatattctgaatctgtacttgtttctttattctttttttaattatactttaagttttagggtacatgtgtacaacgtgcaggttagttacatatgtatacatgtgacccaaggcatttgaaaaacagagcttgaaatattcattgatagttgggtgacatgtgtacattctacttaaagatgagtgtcagcccctcccaggaggctactctggtggcctagaaaatgaattaactgaaaagtta

SEQ ID NO: 331274 - DNA, 488 bp, Homo sapiens
taattattttaaaagatttttcctcaattgcagcgtatggggtgggatggaggttggggtagatagtgtaagacaaaggtggcagtgtcaggggatctaaaacaaagaaaccttcaaaacaataataacaacacacacacaaaacaaaaaagtaaatgtctcctgggctctgcctcaaaggtaaataaatgttcctgagtattgagaaaattcttccgagtcttgcacatgyggatttgttcagtatattctgaatctgtacttgtttctttattctttttttaattatactttaagttttagggtacatgtgtacaacgtgcaggttagttacatatgtatacatgtgacccaaggcatttgaaaaacagagcttgaaatattcattgatagttgggtgacatgtgtacattctacttaaagatgagtgtcagcccctcccaggaggctactctggtggcctagaaaatgaattaactgaaaagtta

SEQ ID NO: 331275 - DNA, 596 bp, Homo sapiens
gtgagttccaacccaagaggataactgcggtcayagaggagggcaggatcttggaaacccctaccatgctgaaaattatctcttcagatgtgtgttttggggcactgtccctggaaaggatctgcactgggggaggggcaatgggaatatttcaataattccacacctggcacagttcttctattgtatgcagactgtatatatacattctgcccctatcatcccagtcacctgccctgtaagaatctattcatttctctatttttccataaaacagctccaatgactctagcttttctgagctatgaacttcttcactctgatattcagaatcacatttgtagcagcctgcattagcctctcatgatggtacctcacagacgcatactatattgatgccgtttctcaactgtcatttcagattcttgactgtaaagggtcatgttttatttttcttcctatttcctggagtttgctcagagttttttgcgtttattttaaaagtttgatgctttgtaatttgtttccatgcttgatttgcagacaattgatatcatgaattgttccctgaaatcaaagccagtttttgtgacagc

SEQ ID NO: 331276 - DNA, 545 bp, Homo sapiens
gcctcatttcccatgagctcctggcttctgctactgttttttgtttccttttctctttcatggtacggtattagccctttcagaaagagtgcagaataggacaccagcaagcattcagccccactatctgtgtatgttttgaagwgaggttcacccctgaggaaccagaggccaggaatagccattaaccccaaaaggacacttcctgaccctttgtgtccaactccctgccccacctcagaggataagaacatcacaacccactcccaagatgagcacacatacaaccaagggaaccaggcgtggttcagctagccacttgcccagaaaaggttttctctaaaacgtatctgttaaagaggtcttgaggtcaagaaaatgtaggagacaacaacgtttcacagggaaggatttcattatcactgttggtggttcatttcatggtttttccttattatgtgaaagataccacaagtaaaatgggttaaattttataatggggctgaaagaaaaaacaacaacagcaaaaactaacccatggacaa

SEQ ID NO: 331277 - DNA, 554 bp, Homo sapiens
ttttatggctagttgtgatttttgccttatgataagttcctagagatggaatttctgggtaaaagtgtttggatgttttcagtttttgttcatcataaagrcaaaaaagcatatctccttgatttaatatgctgcttcttgacactagtggatttaaatgtgaatactgtttattaggtccttatatatcttcttttgtgatttacttgtacatggcttatgtttatctttcaattggtgtgtttccttctaattgattggtagacgtcttttatattttaagatattaatactttgtcacatagcttacagtattgtttttgatatatagagacatttaatattatttaaatctatccaccagtcttttcattctgtatccaattttgtgttcatgtttaatagactttccaaactgaaaattatataaatattttgttatacacttgtcagttctctaacgcttttttatatttaactttaaaaaatcatttgttatctctgtcttagtgaatagtacattgaggatacattttaaattgatgaatttggca

SEQ ID NO: 331278 - DNA, 554 bp, Homo sapiens
ttttatggctagttgtgatttttgccttatgataagttcctagagatggaatttctgggtaaaagtgtttggatgttttcagtttttgttcatcataaagacaaaaaagcatatctccttgatttaatatgctgcttcttgacactagtggatttaaatgtgaatactgtttattaggtccttatatatcttcttttgtgatttacttgtacatggcttatgtttatctttcaattggtgtgtttccttctaattgattggtagacrtcttttatattttaagatattaatactttgtcacatagcttacagtattgtttttgatatatagagacatttaatattatttaaatctatccaccagtcttttcattctgtatccaattttgtgttcatgtttaatagactttccaaactgaaaattatataaatattttgttatacacttgtcagttctctaacgcttttttatatttaactttaaaaaatcatttgttatctctgtcttagtgaatagtacattgaggatacattttaaattgatgaatttggca

SEQ ID NO: 331279 - DNA, 554 bp, Homo sapiens
ttttatggctagttgtgatttttgccttatgataagttcctagagatggaatttctgggtaaaagtgtttggatgttttcagtttttgttcatcataaagacaaaaaagcatatctccttgatttaatatgctgcttcttgacactagtggatttaaatgtgaatactgtttattaggtccttatatatcttcttttgtgatttacttgtacatggcttatgtttatctttcaattggtgtgtttccttctaattgattggtagacgtcttttatattttaagatattaatactttgtcacatagcttacagtattgtttttgatatatagagacatttaatattatttaaatctatccaccagtcttttcattctgtatccaattttgtgttcatgtttaatagactttccaaactgaaaattatataaatattttgttatacacttgtcagttctytaacgcttttttatatttaactttaaaaaatcatttgttatctctgtcttagtgaatagtacattgaggatacattttaaattgatgaatttggca

SEQ ID NO: 331280 - DNA, 575 bp, Homo sapiens
aaatgctcaatatttaccttgtatttttcctgctccagtcctgaatcagccacttctccaagaaacccttttagtggagaatggtatttagaaaccaaaatctgggtgccaggtgtgctcattactattgaggtattgctgctttccagcattctcattggacagagctagcaaatatatgtaaacacacatacacacaagygcacacacatttttaaaggtcagaatccgatggcaatgccagcatccaggtgtccacccactgcatgcaacagaaggactttggcagaattactttgggagggcaggaggcaggagagaagccagtaactttccttggcatagtgaggaatattccttgaaacagagccagcttgatttgggaagtaactgttctgggagccttgaagtctgaaaaggtgaatctggaatccatttagagtgtctgtggcattgaaaaatgtgattagtgatgtggagagccaggttgagaaacagaatgttgagcaaaggaaaataatcagaaaaaaaatgttgaccgcttaaaagtaaaggcaacagagatccattgaaga

SEQ ID NO: 331281 - DNA, 591 bp, Homo sapiens
tgtaaacacacatacacacaagtgcacacacatttttaaaggtcagaatccgatggcaatgccagcatccaggtgtccacccactgcatgcaacagaaggactttggcagaattactttgggagggcaggaggcaggagagaagccagtaactttccttggcatagtgaggaatattccttgaaacagagccagcttgatttgggaagtaactgttctgggagccttgaagtctgaaaaggtgaatctggaatccatttagagtgtctgtggcattgaaaaatgtgattagtgatgtggagagccaggttgagaaacagaatgttgagcaaaggaaaataatcagaaaaaaaatgttgaccgcttaaaagtaaaggcaacagagatccattgaagaacaaaccatatgaagtagaacagaaataatacagagaggcataaaagcacactattttgtcctaaaaaagatctgaatttgggtacttaaagaagtccagggctatccrcaaaacagtaaatatagaccaatgcatacaaataaaattttcaactaccagtactacaactactatgattactgctagctgtacat

SEQ ID NO: 331282 - DNA, 610 bp, Homo sapiens
gcatcttcctaaattgattctgagtcctataactaatttcagcatgtgggcctagaactcagttctgcaatttcttgaaatgggcagtttatcccraagcatttgctttgatttcagaaatagaaagtgaaaagaaaaaatgattcataggggaagttaagaaatgataagattagagtcagtcatgcaacataaaattacagaaatctaagaattgaacttgattttggatgtgatctaagctagtggttgaaatctttttaactgtgtaaacgtttatacaaatgaaatttactcagaggccctatgtgtgaatcaggaagcatcaaagctgctctgctgaagcagtcggccctgggcccctcttcctggttttctgtgctctgttgaagggctcagtttagaagccatcgattttcttcaaaatgctttatttagctacaggatccttgttcaagttatgccttacatagaggcccagtgccaacaacagataaaggagtcattgctctgtggaagcatttgggagttttggggctcatttctcctgccacacagttttaagtggacctgagagaaggggttccatctagcacagttaggaaagctt

SEQ ID NO: 331283 - DNA, 610 bp, Homo sapiens
gcatcttcctaaattgattctgagtcctataactaatttcagcatgtgggcctagaactcagttctgcaatttcttgaaatgggcagtttatcccaaagcatttgctttgatttcagaaatagaaartgaaaagaaaaaatgattcataggggaagttaagaaatgataagattagagtcagtcatgcaacataaaattacagaaatctaagaattgaacttgattttggatgtgatctaagctagtggttgaaatctttttaactgtgtaaacgtttatacaaatgaaatttactcagaggccctatgtgtgaatcaggaagcatcaaagctgctctgctgaagcagtcggccctgggcccctcttcctggttttctgtgctctgttgaagggctcagtttagaagccatcgattttcttcaaaatgctttatttagctacaggatccttgttcaagttatgccttacatagaggcccagtgccaacaacagataaaggagtcattgctctgtggaagcatttgggagttttggggctcatttctcctgccacacagttttaagtggacctgagagaaggggttccatctagcacagttaggaaagctt

SEQ ID NO: 331284 - DNA, 610 bp, Homo sapiens
gcatcttcctaaattgattctgagtcctataactaatttcagcatgtgggcctagaactcagttctgcaatttcttgaaatgggcagtttatcccaaagcatttgctttgatttcagaaatagaaagtgaaaagaaaaaatgattcataggggaagttaagaaatgataagattagagtcagtcatgcaacataaaattacagaaatctaagaattgaacttgattttggatgtgatctaagctagtggttgaaatctttttaactgtgtaaacgtttatacaaatgaaatttactcagaggccctatgtgtgaatcaggaagcatcaaagctgctctgctgaagcagtcggccctgggcccctcttcctggttttctgtgctctgttgaagggctcagtttagaagccatcgattttcttcaaaatgctttatttagctacaggatccttgttcaagttatgccttacatagaggcccagtgccaacaacagataaaggagtcattgctctgtggaagcatttgggagttttggggctcatttctcctgccacacagttttaagtggmcctgagagaaggggttccatctagcacagttaggaaagctt

SEQ ID NO: 331285 - DNA, 533 bp, Homo sapiens
cattgttagatcttagcaatcttctcttgtgtagtcatcaggtaggggctagaggtcatcactragatttttcactgaccaatgaatgggcctcacctgggcccaaacacttaaccagctagaattgtggaaaagtcttgaacctgtttaagaaagttttagcttcttcacagttgtacagtccatcaaaaataaataaatcagtatattttagaattttcagattaggagtttttgactttcacaatagtcacccaatgcccttttagcaccccagatggagacattttgaactaatccaatattggaattacattaaacagtttaggagagtctgtgagtacagtagcagcggagcagggtgttactgctttttaaaaatatctcaaaggtccacatgtgtaataatatttactcttgttttaagcattctttcctgggtctctgtggagttgtgagctttgagacacaaaagaaggaaaagagaagtaaacagtttctacagcaagtagaagactaataattctgaaacc

SEQ ID NO: 331286 - DNA, 536 bp, Homo sapiens
tctcctctacacatgttcactagaagcattgctacctgcaaactgcacattgtacatcatcttttaaggtaactatagctcagagtccatttattgaagagttgttgtttattgaacccctttcaagttcaataaacagtacactgggctgtgatttgttatgaagtgtgagaagtctaccactgtcattaatgcatgctagcaggagatgatgttgtaaaattttatcctacacactttgcttttttcgctgagttttctttactcctttaatgctttcttcttatttaagttgctattgaactgcctatcagctagttatcaaggcggcccaataacattgttagatcttagcaatcttctcttgtgtagtcatcaggtaggggctagaggtcatcactgagatttttcactgaccaatgaatgggcctcacctgggcccaaacacttaaccagcyagaattgtggaaaagtcttgaacctgtttaagaaagttttagcttcttcacagttgtacagtccatcaaaaataaata

SEQ ID NO: 331287 - DNA, 533 bp, Homo sapiens
cattgttagatcttagcaatcttctcttgtgtagtcatcaggtaggggctagaggtcatcactgagatttttcactgaccaatgaatgggcctcacctgggcccaaacacttaaccagctagaattgtggaaaagtcttgaacctgtttaagaaagttttagcttcttcacagttgtacagtccatcaaaaataaataaatcagtatattttagaattttcagattaggagtttttgactttcacaatagtcacccaatgcccttttagcaccccagatggagacattttgaactaatccaatattggaattacattaaacagtttaggagagtctgtgagtayagtagcagcggagcagggtgttactgctttttaaaaatatctcaaaggtccacatgtgtaataatatttactcttgttttaagcattctttcctgggtctctgtggagttgtgagctttgagacacaaaagaaggaaaagagaagtaaacagtttctacagcaagtagaagactaataattctgaaacc

SEQ ID NO: 331288 - DNA, 486 bp, Homo sapiens
ggattacaggcgggagccaccatgcctggccagcactcataccttcctatagagaatataacataattattttgtttgctgactccccgctacccgaccacctgctgrtcccaattttgcttgccatctcctcataacacagggtgctgtttgcttcctttattaccctttgttgctccactggcctgtctctaccgagggccattttgtacaatgtagacattgattagatatttgctgaatgaccatgcagtaaatgcatgcattccattattattttcttgtgctcttcccagtgatacccaaaattgtgttgacctttatatgtgacttcaatacagaagccagtgaatttaggaaaaagtcagtttctcttacttcctttctctggcttatagctggtaatttggtttccattatcttatgagtcaggtttagatgactttgctctaaattcatttctttccatttgcccacactgaagca

SEQ ID NO: 331289 - DNA, 548 bp, Homo sapiens
cagtagcatcttaaatatttcattactaatttttacaytggatatgggtttgagatatatagtctttattacaatatagatgtattcatgaatccctatttggcaattttttaaagattgaagttaaatttaactgaatgccttttcaatatcaattaagataattgtagaacttttttttctcttgactgagaatataattaattaatcaattttgaatactaagttaccttgccatcttatataaatcttacttggctttttttttttttttaatggaatgtcgctctgtcgccaaggctggagtgcagtggcacaatcttggctcactgcaacctctgcctcccaggttcaaacaattctcctgcctcagcctcccgagtagctaggactacaggcacacgccaccacgcccagctaattttttgtatttttaatagagacagggcttcaccatgttagccaggatcgtctcgatctcctgacctcgtgatctgcccaccttggcctcccaaagtgctaggattccaggtgtgagccatagcacc

SEQ ID NO: 331290 - DNA, 531 bp, Homo sapiens
gtatattctgagtaataggatgctgggttgaatcataggtctgttttaagttctttaagaaaactccaaactgctttcattatctccatgttttcaatgaggaaagtgagacatagataaataacttgcccaaggccacacagctaatctgaagtgyactgagattcacccagaggaaggctgcctccagtcccagggctcagggccctcccagtgtggaaagctacttaggcgtcattgtacttgttgtttatttgctataactgcagaggactctccacaccctccccactccgccagtcaattacattgttctcatttcctcagtaaactgtaattttcttttagggagggtccttcttatattgaccttgctgatattgatttgttgaatatgcaaagtgaaattcttgtgatttttctaaccatggacttatatacttttgtgtttatcaaatgtgtatctcacatacatcatgctgtcccagagttttctgtttcctttgatttattttatacaagggagtgaaa

SEQ ID NO: 331291 - DNA, 452 bp, Homo sapiens
atttaaactgcttgctggtctgagtaacatgataaaatattgtgccatcccactcaggacctgaatcattcatttgtccagcagtatccatactgtatacaccacctgcaggttagtcacttagtcatctcagttgtcagggtatcacagtgcttgtattcaaataaaccttattttactcactaatgctgccaacatgcaagagtactgatgttgccatattgtcctattttattattagttattgttgttagtctcttactgtggataatttatttaagttaaactttatcctaagtatctatgtttaagaaaaaacatagtacatatagggtttggataatctatggtttcaggcatctactgggagtcttggaaggggaatactctgtgtgtgtgtgtgtgtgtgtgtgtrtgtgtgtgtgtgtgtgtgtgtatgtgtgtgtgtgtgt

SEQ ID NO: 331292 - DNA, 473 bp, Homo sapiens
agtagtgacgatccttgaagttgagtggtggtacatgactgttaattatgctatcatattgaccttgtgtacgtttgaaagtttccgtaataaaaagtcactgaaggccaggcgcggtggctcatgcctgtaatcccagcactttgggaggccgaggtggggggatcaaggttggtcaggagtttsagaccaggctggccaacacggtgaaaccctgtctctactaaagatacaaaaacaaacaaacaaacaaacaaaaaaaaaaacaaattagctgggtgtggtggcacgtgcctgtaattccagctattagagaggctgaggcaggagaatcacttgaatccgggaggcagaggttgcagtgagccgagatggcaccattgcactcagactgggtgaaagggcaagactttgtctcaaaaaaaaaaaaagttactgaaagaaaaggtactattgtgcaaggaacaggtctg

SEQ ID NO: 331293 - DNA, 473 bp, Homo sapiens
agtagtgacgatccttgaagttgagtggtggtacatgactgttaattatgctatcatattgaccttgtgtacgtttgaaagtttccgtaataaaaagtcactgaaggccaggcgcggtggctcatgcctgtaatcccagcactttgggaggccgaggtggggggatcaaggttggtcaggagtttcagaccaggctggccaacacggtgaaaccctgtctctactaaagatacaaaaacaaacaaacaaacaaacaaaaaaaaaaacaaattarctgggtgtggtggcacgtgcctgtaattccagctattagagaggctgaggcaggagaatcacttgaatccgggaggcagaggttgcagtgagccgagatggcaccattgcactcagactgggtgaaagggcaagactttgtctcaaaaaaaaaaaaagttactgaaagaaaaggtactattgtgcaaggaacaggtctg

SEQ ID NO: 331294 - DNA, 521 bp, Homo sapiens
tactgtgccttgttcgcattgtgttcacctgatgtatatttatttccttatagcttgactctactctcaccagcatttaagatccatgagagcaaatattttgttgtttcctattgtmtccccaagatccaaaccagtgcaaagaataggatctcaatagatatttgatacataagtaaatgaatgaatgagagtctttctgacctcaattaacagtcatatattacagggaaaaaaagacgcaaacaagcacaggattaatcataacctattttgccaagtatgagcattttaaaaattgctaactaataatgactgattttctaaatcaaagaaatctttaacactaaaaaccatcaagaatctattatatcagaaacaaatgcatatatttagctgttccagaaattcaatgtatttttcgtattttctttcatgctagtaaatatttcagcaaggaaatcactgctccagatacattggctgtcaacccttatctgggccacaccacaatgctaact

SEQ ID NO: 331295 - DNA, 609 bp, Homo sapiens
cactgggcaagagatcgggatacagaagcctgtcacactggccctctgccstcgcgataaggcagagggtcaattgagctgattaatacacaagccgtcagcagatggcaaaactgaaagatcttggtaacacatgcccacttgagctgtgggagttgcagacacccatccctagactctgctatgggggctgcagcccaaaagcattcgccctggcctctgtacctgcccatctgcatgcttcccctaggggtttgagctgtggggtgaccaagcaggcgagtcacacccctgttgcacatcctgcaatgggaatcagggaactcttccatttcaattttccctgctgctggggctgtaaagctcctgagagctcgctgttgagcccataaaaaagaatgagttcacatcttttgttggaacgtaggtggagttggaggccattatccttagcaaactaatgcaggaatggaaaagcaaatactgcatgttctcacttataagtgggagctaaatgatgagaactcatgaacacaaagaagggaacagcagacactgggatctacttgagcgtagagggtggaaggaaggagaggagcagaaaaatag

SEQ ID NO: 331296 - DNA, 576 bp, Homo sapiens
aagcatattattggctacatgactgctgggtctatttagcagtttaagattttgcataaatttcaccaaaactaggactggggaaatacggcagggaccgaatatatgcctggtggatgcatattgattttagagggacctagtgggttctgacagttatytacgaagtaggatttagacctggggtgcatcttgagtccttcctttaattcgtacaataataccatcatcataaagctacattcataatttcaatatattactaaataatttacatctcacacagataagtttccgatttcaatgaatctcttttgatcttttgactcattcaatgattgcatttttgagatcctatgtatcccatgcactaaaactgaatgttaaaattttggaatactgcctggtttagaatcccaaggaaatttagacacatgcaattcattaattcactcaaaaaatagttcagtgtggtgggcaatctatcagacattcagcctatatagaataaagtattcatagtcattgctttatggaatttacagtctattgtgtattcatgtggatggggagaca

SEQ ID NO: 331297 - DNA, 582 bp, Homo sapiens
ccttctgggcaggggagattagaggaggcttatcattaataggaaggggagctatagggaggctaggatatgggggtaagctgagaggtcctcctgtgggatgtaaattgcaagctttgcattatttgtgtattctccttcaatgaaaagaaagcttggacataaggtatttcattccatttgccttccctcttacagaaaaggtcaagtggcaggatagtattgtaatttattcttcctcagttggccatttttccctgtcagagagataatattggggccaggccatagtgcagaaaaaaatgagctgtctctttttcagggtttgtgggtcaaattggtcccaatggcttaggatgcatttcaagggtgarcctgttgatgcctgagtgtttctcatctgaaagacaaaactgcctgtggttttttttgttttgtttctcccccacccaagaacctgcaatggttccaggaccctgctgattggaatagttgtgctcaccgacacaccagcagaaacactagttttcctcccagaccacaaggaggaccaaggaaggtcagatttagtggcccttaccg

SEQ ID NO: 331298 - DNA, 591 bp, Homo sapiens
aaccacttgtatctttcctaagaaaactaaaaggcaaaaccattaagaataaaaataactccaacaatttattaacagataggcaatataaaaaatcacattgtaagacccaattgcatgttgtcttcaaggtactcatctcacgtgcaatgattcttacaggttaaaggtaaagggatggaaaaagatctatcaaacaaatggaaaacaaaaaagagcaggggttgctattctcmtttcagacaaaacaaaacttaaaccaacaatgatctaaaagaacaaagaataccattatttgataatgacattacttgataaagcatccaattcaagaagaattaactgtcctaaatatttttggccaggtgtggtggctcatgcctgtaatcccagcactttgggaggccaaggtgggtggatcatgaggtcaggagttcaagaccagcctggccaacatggtgaaactccacctctactaaaaaaaaaaaaaaaattagccaggcgtggcggcccatgcctgtaattccagctactcaggaggctgagacaggagaatcgcttgaacctgggaggcggaggttgtggtgagcc

SEQ ID NO: 331299 - DNA, 579 bp, Homo sapiens
tcaaaccatttttatttcactttcgtgctctgtcttgttccttcctgttagtagctggaataagtcctaagtcctaagccacgtcctagcaggatgatctttagggaacagaaatgagataactaggctgtgagtccttgccaggatcaaggcagaccagtgagcacctagtgaatttactggaagtggcaaagagaaggagaaaggcccagacttcctggctcctgcttgtctcctcatcctctttctgttccctaagaaccaaccacgttgctcttcctcctgcccctttccaggccaggcttgtgcccatctgagggcttttccactcgcttttcttcactggggaatgctttttgccagtttttgtcatgcctgtcttcttatcattcatgtcccactsaaacttagaggtgagcaccctgtgatagtaccctcactgccaactctctctttgccatttaatttcatttattttgtcaacaactttttttttcttttaaagatggggtctttctcttcctctgtcacccagactggagtccagcagtggcaagatcatagctcactgtaacctca

SEQ ID NO: 331300 - DNA, 498 bp, Homo sapiens
tgcttatgtcactcctcccccaaccccaggcagtacaacttgtagctctaaaagagaccccttccttccacttgaggggaggaaagagtaaagaggactttgtcttgcaacttggataccacctcagccacagaaggatagggcaccgggcagagttgtgaagcccccattcaagaccctakctcacggacaacatttctaaacacaccctggcacagaagggaaactgctgccttgaaaggaaggacccagtcctggcaagatttatcactagatgactaaagatcccttgggtcctgaataatataatcagcagcagtaaccagttagtacacgctgtgggccttgggtgagactctgagatgtgctaggttcaggtgtgactcagtacatttacagttgtggtagctatgaggagaaacccccttctgcttgagaaaagcaaaaagaagagtaaaggtgactttgtcttgagcttagataccagcttggctgcag

SEQ ID NO: 331301 - DNA, 568 bp, Homo sapiens
ttaaggttcaaacatggatagcaaacgggatagaaattattgaataaatcagtgcagttttrtatttattaggactgaaaaatcttacccggtgttcttctgaattcttggagttgtctcagtctcagtttaataaagcctttttcttaaggattttagtattattttattatgttaccccattgttaacaatcataggtagtaattaaaatgctttgtataggagaagattttccttttccagtttagtgtatatgctaacataaatcttaaaattaagttatttgacttaatttgaagcatataaaaatgtctttggaagttgttagtagtactggtgtttttttaagtatgtaaggcacccagacatctcacttctctagctttctctgacattctcctctagacataatgaaattactccctcatctgttttcccatagcagtttaaccacagaactccagcatagcattttatttaattgtactgtattgtagtaatttgtttacatgtcatctcatagactatgagctttatgagggcagatcttgtttttacacagcattt

SEQ ID NO: 331302 - DNA, 587 bp, Homo sapiens
aagtaaaccctttttatttataaattacagttatttctttataacaatgtaaaatggactaatacaggaaggaaattggtgttgagggatgggacattgctataaaaatacttgaaaatgtggaagcagccttgaaactgggtaatgggcagaggttacacaagtttggagggctcagaagaagaaagaaagacaagggaaaatttggaacttcttaaagacttgttaagttggttgtgaccaaaatgctgatggacagtgaaggctaggctgatgaggtctcacatggaaattagaaacttaatgagaaccgaagcaaaggtcaccttgttatgccctagcaaagaacttggctacattatgtacatgtcctagggatttctaagcagggagtattcaagatgtagcccagctgcttctaacagcctatgatcaagtatgggagcaaatgaatgacttaaggttggaacttacatttaaaagggaaacagggcataaaagtttggaaaatttgcaaccagsctgcgttagagaaggaaagaggattttcaagacagaaatccaagagggttgcagaacaaccactt

SEQ ID NO: 331303 - DNA, 602 bp, Homo sapiens
cctctcttgccatatgacacacctgctccctttccaccttccaccttgagaaaaagctccctgacacctcaccagaagacmagcagatgcttgtcccatgcatgaaccgtaagacaaataaaacaattttctttataaatcacccagtctcaggttttcctttacagcagtgcaaaatggacttgctatggacttgcaatacagggtcttgctatgttgaccggattgtttttgaacaatcttaatctccagcaatcctgttgcctcagcctcctaagtagctgggattagaaacatgagccaacatgcctagtggtttatatatttttatattgtatatccatcaatgatttgtatagttataggtattcttaatacttttgcttattttttaactttatatgaaaattaaaaatgatttatacaacaccaatttacaatattacagttttctgtatttgtatatttaccttctccagtgagttttatactttcatatgctttcatgttgttatttaacatccttttgtatcaactcaaaggactccctttagcatttctggtaaggcaagtttaatggtgataaactgcctcagtatttg

SEQ ID NO: 331304 - DNA, 486 bp, Homo sapiens
actacaatctctgcctcccaggctcaagccatgcttttacttcagcctcccaagtagctgggaccacaggcacaaaccaccatgcccagctaatttttgtgttttttgtagagacagggtctcattctgttgcccaggctggtctcaaattcctgagctcaagcaatctgtccacctcagtctcccaaagtgctgggattacaggcttgagccacctcacccaacccccttgggctggcttaaytctttcttctctttattgggctatataattttaaattacctttctttgagtttgctgtttcttccttctgcttcatcaagtctgttaaaaccttctattggatttttagtttaattattatattcttcaccttcaaaattaatgttagttttctttttttggtttttatctctttgttgatattctcattgtgctcatttatgattttcctgatttcattcagttgtctggatatgttgtct

SEQ ID NO: 331305 - DNA, 567 bp, Homo sapiens
atctaaagatacaaaactcactgctaataggaagcacatggaaaaacataaacattataacactataattatggcatgtaaactattcttaagcagaaagactaaatgatgaatcaatcaaaaataactacaacttttcaagacatagtacaataagacataaagacaaacaacaagaagttagaaagcgggaaggtaaagtgtagagtttttactttattaggtttctttttgcctattagttcatttgtttatgcaatcaatgttaagttctcatcagtttaaaataatgggttatgagacagtatttgyaagtcttacagtaacctcaaatcaaaagacttacaatggacacagaaaacaaaaagcaaaaaaaaaaacaccatcagagaaaatcaccttcactaaaaggaaggcaaaaaggaagaaaagaaggccagaaaacaataacaaaatggcaggattaaatccctatttatcaacaataacattaattgtaaatgggctaaactcatcaatcaaaagatgaagagtggctgaaaggattaaaaaaaaaaacaagattcc

SEQ ID NO: 331306 - DNA, 572 bp, Homo sapiens
atgatcttatatttggaaaaacctataggctccactaaaaaaactattagaactgataaacaaattcagtaaagttgaggaatataaattcaacatacaaaaatcagtggcatttctatatgccaacagtgaacactctaaaatagaaatttaaaaattaatcgcattgacaatagggataaaataaaacatctaggaattaacttaaccaaagaagtgaaagttctctacaataaaaactataaaacattgatgaaagaaattgaagaagacaccaaaaaagtgaaaagatattccatgttcatggatgggaataattaaaattgttaaaatgtctatactccccaaagcaatctacagattcaatgcaatccctatcaaaacaccaatgacattcttcacagtaagaaaaaaaaattctaaaattcatatggaagcacaaaagacccagaataaccraagctatcctcagcaaaaagaacaaaaccagaagaatcacattacctgactccaaattaaactgcagagctatagtaaccaaaacaacatgatactgccataaaaacagaccc

SEQ ID NO: 331307 - DNA, 484 bp, Homo sapiens
caaaatggtatactattcacccgttaaaaaaatgaatgagatcctattatttgcaaaaacattaatgaaactggagttcattatgttaagtgaaataagtcaggaatagaaacacaaacattttatgttttcacttacttgtgggatgtaaaaatcaaaacagttgaacacatasagatataagtatgctacctgagactgggaagggtggtggggggtctggaggagaggtagggatggttaatgggcacattttaaaaagctagaaagaatgaataatacctagcatttgatagcacaacagggtgactacagtcaaaataatttaattgtacattttttaaaaactaaaagagtataactggattgcttagaacatgaaggataaatgtttgagaagatgaatactccattttccattatgtgattattacacattgcatgcctgtatcaaaacatctcatgtaccttataaatatacata

SEQ ID NO: 331308 - DNA, 586 bp, Homo sapiens
acaccctatacttcctgatttcaaagtatattacaaagctatagaagttaaaacttatggcacttgcataaaaacagacatataaactagtggaatcaagtagagggccaagaaataaactcatatgtgtatgatcaactaatatctgacaagcgtgacaagaawagacagtgagataaaggatagtgtcttcaaaaaatggtgttgagaatactggatactcacatgcaaaagactgaaactaggtccttactttatacacaaagatcaactcaaagtagattagaaacctgaatataagacctggaaccttaaaacatttttagaagaaaatacagggggaaagttcctcaagattggttatggcaacaatttgtttgatatgacaccaaaagcaacagcagcaaaaaaaaaaaaagaaaagaaaagaaaaaataagtgttactctagcaaactaaaaagtttctgaacagcaaaggaaacaatcaacagagtgaaaatgcaacctacagaatggtcaaaaatatttgaaaaccatatgcctgataaagggttaatatctaaaatatataaggaactcatacgg

SEQ ID NO: 331309 - DNA, 586 bp, Homo sapiens
acaccctatacttcctgatttcaaagtatattacaaagctatagaagttaaaacttatggcacttgcataaaaacagacatataaactagtggaatcaagtagagggccaagaaataaactcatatgtgtatgatcaactaatatctgacaagcgtgacaagaaaagacagtgagataaaggatagtgtcttcaaaaaatggtgttgagaatactggatactcacatgcaaaagactgaaactaggtccttactttatacacaaagatcaactcaaagtagattagaaacctgaatataagacctggaaccttaaaacatttttagaagaaaatacagggggaaagttcctcaagattggttatggcracaatttgtttgatatgacaccaaaagcaacagcagcaaaaaaaaaaaaagaaaagaaaagaaaaaataagtgttactctagcaaactaaaaagtttctgaacagcaaaggaaacaatcaacagagtgaaaatgcaacctacagaatggtcaaaaatatttgaaaaccatatgcctgataaagggttaatatctaaaatatataaggaactcatacgg

SEQ ID NO: 331310 - DNA, 537 bp, Homo sapiens
gacaccaaaacaacctaagtgcctgtcaacagatgaatggaaaaagaaattgtggtatgtgtatacgacggaatattattcagccataaaaaaggaagaaaccctgtatttgcaacaacatggataaaccttgatggcattatgctaaataaaagtcaaacagagaaatacaaatactgtataatctcacatatatgtggaacctaaaaaagtcaaacttatagaaacaaaataaaatggtggttagcaggggttaggaagtcagggaaatggggcacattggtcaaaggsaacacagactataattaacaatactacattgtgtatctgaaatttgccaagagagtagatattaaacgttctcaccacaaaaaaaatgataactaggtaaagtaatagatatgttaactgactttattgtggtcttttcacaatatatacatacatcaaatcatcacattgtacaccttaaattcacacaattttatttgtcaattatatctcaatacagctgaaaaaaataaaaataaatcccaa

SEQ ID NO: 331311 - DNA, 552 bp, Homo sapiens
gtggggctctgtacaacaggaattactgtgcttaatgcctcctctgtgttaagyaccatgcatgtattatctaaatccaatcttacaacaatctttattttaaatataaataaaaaggggatttgtgaaaggaattaaaaacttgcctgaaacccatgtcctttccaattactccctatgggtttcaagatgaagtaaagtgcctataggagcagaaactgtataaacaggattgctacacctttaagttttgagtaacttcctggaactgacactcaatacagcaacattcctttcagctgacagtatttcacaatgcatttactttacttttgttttcttttaatattcataaaagtcttatgccttccctttccactgtaagaacctgatatgcacttcacttgggacaaagctcagactgtgctttctgcatatcaccaccagacacgatgttccaaattaactttcacgttctataatttccattgtaaaaactatagacttgaaatataaaattataattacatacataacccttctgtgtaccaa

SEQ ID NO: 331312 - DNA, 638 bp, Homo sapiens
ctcttttggttactatagctctgtagtataatttgaagtcaagtaatgtgattccttgagttgtgttctttttgttcaggatagttttggttattctgggccttttgtgtttccatataaattttaggattgatttttctctttctgtgaaggwtgtcattggtagtttgatagagattgtatagaatctgaagattgctttgggtagtatagacattttaacaatattgattcttccaatctatgaacatggaatatctttccattttttgtgtcctcttcagtttctttcatcaatgttttatagttttcattgaagagatttttcacttcttcagttaaattaattcctaagaatttaatttcatttgtagctcttgtaaatgggattactttcttgatttctttttcagattcttctctgttggcatatagaagtgctactgatttttggatgttgattttttatctggcaactttaatttatttatcacttctaatagtgttttatgttggaatctttaggtttttccatatataagaccacatcatccacaaacaaggataatttgacttttcctttccaatttggttgccctttacttttttctcttgtctaattgctctagctaggagtt

SEQ ID NO: 331313 - DNA, 638 bp, Homo sapiens
ctcttttggttactatagctctgtagtataatttgaagtcaagtaatgtgattccttgagttgtgttctttttgttcaggatagttttggttattctgggccttttgtgtttccatataaattttaggattgatttttctctttctgtgaaggatgtcattggtagtttgatagagattgtatagaatctgaagattgctttgggtagtatagacattttaacaatattgattcttccaatctatgaacatggaatatctttccattttttgtgtcctcttcagtttctttcatcaatgttttatagttttcattgaagagatttttcacttcttcagttaaattaattcctaagaatttaatttcatttgtagctcttgtaaatgggattactttcttgatttctttttcagattcttctctgttggcatatagaagtgctactgatttttggatgttgattttktatctggcaactttaatttatttatcacttctaatagtgttttatgttggaatctttaggtttttccatatataagaccacatcatccacaaacaaggataatttgacttttcctttccaatttggttgccctttacttttttctcttgtctaattgctctagctaggagtt

SEQ ID NO: 331314 - DNA, 607 bp, Homo sapiens
tgactctatcataaaatgcgtgcctttatacaagtcagtttacttgttagactaaatctcttactgagcttctggctattattctacatccattccactccatcttgcctaatgctgacatctagtggatggatacacttagacttcatattatagaatgaaaaaycttatttcacctatttctgttgggccatgtgcaatggatataataaattaggagaccaatactgttccttacatggaagtgaaacacaataaaatagtattagatcagattgtcatggtatctttgaatctgattcaaagattactggcactcttccatgattccagccattaaatgttaaaaaaacctctattacaggaggtaggaaaaggaagagtttaaccaccaatgcaaattactgtcagagccacatatttagaccatgaaagcacagaaacacatcctgctacaatggtttgcatcaagtacagacaaagagtatgagaagggctagtacaaaggctcaaggcaagtaatacagaagtttctggaatggaatatgatggaaatatgcaaaacaactcaaaatgacctattttataaggacttactatgaaagtt

SEQ ID NO: 331315 - DNA, 642 bp, Homo sapiens
tgtaggcactggggatatcatgttgagtaagacaaagaccatgaactcaaggggtatatgttctagatggagagagagcacataaacaaataaagacatcacacaacaaataatagatgctatgatcactgagtaagaggttggagagtaactaggcatgtgggagggcagttttagataaattatcctaaaaagtcctgaccagcccctctatgagcaagtgaatttgaatagagatgaaaataaggtgagggagcaggtcatgcaaatatctaagggagaatattctaggtagagggaatagcaagtacaaaggcactgarggaggaacaagcttgaagtaactaagtaacagcaggaaggtgagtggagcagcctcagcatgagcaacgtattcaggagaaactgaatacatggccggtggcagatgctgtagggtcatattatcaatgacaaattgcatacattttatgcttagtgggatgagacctgactgtagtattttaatcaggggagagacatgatctcattgaaagatgtacatgatcactctggctttttctaggggcaggaggaatccatagtcaagagtagggggtagaaagaacagatatgaattgctctggtgaagaagatggggtt

SEQ ID NO: 331316 - DNA, 576 bp, Homo sapiens
gtctttatggtagaacaacttttattcctttgggcgtatactcaataatgggattcctgggtcaaatgttaattctgttttaagttctttgggaaataaccaaactgcttttcacaatggataaactaatttacatttccaccagtagttcataagcattcccttttgtccacaacyttaccagcatctgttattttttcacgtttaataatagccattcgactgaagtgagatgatatctcattatgattttgattttgatttctctaataattagtgaagtaaaaataataagagccatctatgaaaaacccatggccaacatcatactgaatggacaaaaactggaggcaatcccattgaacaccagaacaagacaaggatgccaactctcaccactcctattcagcacagtgctggaaatcctagccagagcaataaggcaagagaaaaatataaaagcatctaaataggaagagaagaagtcaaactatatctgtttacagtatttttgaaaatgtctttgggttactcgtggaaatacaaactgtgtgacttttgacaagaaaattcaca

SEQ ID NO: 331317 - DNA, 576 bp, Homo sapiens
gtctttatggtagaacaacttttattcctttgggcgtatactcaataatgggattcctgggtcaaatgttaattctgttttaagttctttgggaaataaccaaactgcttttcacaatggataaactaatttacatttccaccagtagttcataagcattcccttttgtccacaaccttaccagcatctgttattttttcacgtttaataatagccattcgactgaagtgagatgatatctcattatgattttgattttgatttctctaataattagtgaagtaaaaataataagagccatctatgaaaaacccatggccaacatcatactgaatggacaaaaactggaggcaatcccattgaacaccagaacaagacaaggatgccaactctcaccactcctattcagcacagtgctggaaatcctagccagagcaataaggsaagagaaaaatataaaagcatctaaataggaagagaagaagtcaaactatatctgtttacagtatttttgaaaatgtctttgggttactcgtggaaatacaaactgtgtgacttttgacaagaaaattcaca

SEQ ID NO: 331318 - DNA, 379 bp, Homo sapiens
gacaacagaaggagagcacactaaaataattatcatttgttttaataagctttttatttagayagaaagtaaatttactaggatcttaccatctctggggtcagtgatttactgtcttgtagttgataccaagctttaatgaggcttcacagcattatgacttggaattctcactggtaagaggaatattctcaggtgtgtcctctaagagccacaccctactgttttaggattaggctttcacaagccacgactaggcattacatctaacaagcgtcaagaggaagtagttagaactcagcctctctcgctagattacccagatttaaattctggctctaccacttactagcgtgtgaccttggacagacaagacaaa

SEQ ID NO: 331319 - DNA, 645 bp, Homo sapiens
tcctttcaactagatagctccatgttcagatactttggtgtctcccttcagagtaaaatccatttatcaaagctggacttcaaggacattcataaactggcctcaactgcctttcacaggtttgtattcctccaactcattggccaaatatgcttttcaaatcagactatatattcaatgtcccccttgcctgatggcttcattctgactcctgaacttttacccacattaataatgtttaagatttgttatacawataatacatgagtgcattcatttattcaccattatcattttccactaaatacacattaattcactgcatgctttgcccaaggtcctaggcattatctttttcttttatttaatatcttccttctcacactagtgcagtagccagtgggtaccgatctcagttgccaccagtagagtccacaccaccattatattttgcctcctttggctataagcttcctgttttttcacaacaaccaactattttcttggcacgggcagactgttctcatcctggacaaatgactctgtagaagagcagaggaaatagcagtgattcacagagtaaccaggctgagccctgaggcacagcaactttctaataataatattgccaatatttatttatcc

SEQ ID NO: 331320 - DNA, 545 bp, Homo sapiens
aacatgatgaaattccgtctctattaaaataacaaaaattagycaggcatggtggcactcacctgtactcccagttaatctggaggctgaggaaggagaatcgcttgaactgggaaggcagagggtgcagtgtgccaagatcacgccactgcactccagcctgagcggcaaagcaagactctgtctaaaaaaaaatatgtgaatagatagataccagagagctcaagctctcttcttttgcgtgcagtaaggcaccaagggaaggccatgtgaggacataagatggcagccatttataagccagtaacagagctcttaccagaaaacccagaagaaactgatgttggacttccagaaagtatatttatgttgtctaagccactgagtctatgagcttttgttatggcagcccaagaaaactaatacaaagaagataatctagaacacatccagtaaacacacacacacaaacaaacacaaacaagcagacagacccagacacaaacatacacacacacacacacacacacacacacacacacacg

SEQ ID NO: 331321 - DNA, 556 bp, Homo sapiens
ggatcactgaagtcaggagtttgagaccagcctggccaacatgatgaaattccgtctctattaaaataacaaaaattagccaggcatggtggcactcacctgtactcccagttaatctggaggctgaggaaggagaatcgcttgaactgggaaggcagagggtgcagtgtgccaagatcacgccactgcactccagcctgagcgrcaaagcaagactctgtctaaaaaaaaatatgtgaatagatagataccagagagctcaagctctcttcttttgcgtgcagtaaggcaccaagggaaggccatgtgaggacataagatggcagccatttataagccagtaacagagctcttaccagaaaacccagaagaaactgatgttggacttccagaaagtatatttatgttgtctaagccactgagtctatgagcttttgttatggcagcccaagaaaactaatacaaagaagataatctagaacacatccagtaaacacacacacacaaacaaacacaaacaagcagacagacccagacacaaacatacacacacaca

SEQ ID NO: 331322 - DNA, 527 bp, Homo sapiens
tttatcatcctttagatctccagaataaaaacaggcttgattctataagtttctcatattgtctccaagattttggcaacatgtccaattaacctctttttactcaagctattattttctgttaacacaatcagtttatttctccattcagcaattcttaaaatgtaatacttactttacttacttatggatttatatctgccatcattccctacatattcattctcccatttgcttttattttctacttactaacctgcattcattctccaaaaaccrtgtgctgcctgcaaatccaacacaacttttgaaaaacttagaatgccagaaattttctgccactaaacctgcaaaggaaaacctgttcattccatatgataacataacaaaacaaaacaaaacaaaacaaaacctatccactgagaagtaaggaatttctagaagaggaagcaatagtcagtgtatcagagggaggtatcaaataagatgaggtctgaaatcatgctttgaactctccagaaggagaa

SEQ ID NO: 331323 - DNA, 622 bp, Homo sapiens
ataccagctaagatttctggcacctacagtgggcctggaaccatgctccgaatcccacatgcttttggtcatgtcacatagtcacatatcatatattatgactggtgctttgtgagtttaaaaaggataatgtcacccaaattacaaaatttatttgtgaaataccatagtttcttcttagaagcacagttcatcatttcaaaattacctgatatctgtgaagtattttgtgttgagcaaataaattatttcattatcattcaagatgtagcaggagccacaaaattacaatagaatatttcgagttgtaagcattagtctttaattcacatccccttcccatattgcaacgttgtaaaasagtaagagatagttatcagataatggttgtccacactttaaaaaaaaaaaggataaaaaaatgaaatttggtagcagagggggaaattgatgccatttgtaaggataattgccagagctattttacaactatgagttttctgttttctatttgtatcacaaaaccacagctctttgaataatgtttttagatacttctatgtatgtaagtatgtcttttccccacaaagcattcattttcctccctcatctgggagcccaa

SEQ ID NO: 331324 - DNA, 530 bp, Homo sapiens
gcattaatgaactatttcaggcactactttcaattaattgtaactattttttcaactgattcacctgcctagaaagttagagaaaaactggagccaatgagatatgaaaatgtgttattacctgggcttttacttttgtaaaaatattaaagtgccacatgagaaatatacacctttcattttctattgtgaatgaatatttctttattttgtcaagaggtcacaggcctctttttcctaaaatatgaccaaaaaaaggaaatcaaatcaatttgacacttacatggcaactttaatactggaatatgattgcttctttgtctatcttttgcatgtagaatgagaaaagcaaataaatcttgtaaataactttttcatccccttcatccaaattgatggaaatatgaacaaacatttagggaaawatggatgaatagtatggcatttgaaaagataatctagcaaacaggatttcttactcctcactgacaaaggtgaacatgctctaagacatctgcttcccccttgac

SEQ ID NO: 331325 - DNA, 535 bp, Homo sapiens
gaagccaaggtagtagagggattcaaggggaatgcccaacagtgttaaatgcagcagaaaatcaagaaataagggatgaaaagtgtgctttggttttsgtcatatagaggccattggtggcatttaccatagcattttcaatatataagtgggtggaaatgctgtacttctgtaggcttgaggaggaaatgagaagtcaggaaaaggagagggtaaatgtacatgactttctctaaaagctcaaccgagtagggaaaaagaaaaagagtagttggtagagagacaggaagcagggtgatagtactcatatcacttggtgtattctattatgcaagtctagactgatggatacacatgtcaatatactttatatttttgataactatgtacataaactatccaaatgttccttttaagttattgttaaaatgtcactcagtcatattttaagcatgctgcctgagttgtcatcacttaatcaaagtaataaatatatcaagatattactggagttcaatgaattgagtcatatgcc

SEQ ID NO: 331326 - DNA, 535 bp, Homo sapiens
gaagccaaggtagtagagggattcaaggggaatgcccaacagtgttaaatgcagcagaaaatcaagaaataagggatgaaaagtgtgctttggttttcgtcatatagaggccattggtggcatttaccatagcattttcaatatataagtgggtggaaatgctgtacttctgtaggcttgaggaggaaatgagaagtcaggaaaaggagagggtaaatgtacatgactttctctaaaagctcaaccgagtagggaaaaagaaaaagagtagttggtagagagacaggaagcagggtgatagtactcatatcacttggtgtattctattatgcaagtctagactgatggatacacatgtcaatatactttatatttttgataactatgtacataaactatccaartgttccttttaagttattgttaaaatgtcactcagtcatattttaagcatgctgcctgagttgtcatcacttaatcaaagtaataaatatatcaagatattactggagttcaatgaattgagtcatatgcc

SEQ ID NO: 331327 - DNA, 622 bp, Homo sapiens
atgtttgcttttctgtggaaggtgacattatcaggagtaaattgaatcatggtacatgaatcagtaaattctgatgttttgttttgtttgtagtttttgctggtgattacctgtttttaaaaaattgagatacaatgcacataccatacaattcacctttttamagagtacaatttagtggttttcaaaaagctgtgcagccatcatcactatgtaattcaggaatgttttcatcaccctgaaaaagaaatttcataccttttagctttcattaccccattctcctcaaaatacagcatctgaaaccattactttctatatttatgagtgtgcctattctgaacatttcctataaatggaatcatattatatgtgtctgtttatatctggcttttttcatttagcataatgttttctagactcagagcttgtatctgtactttatcccttttattgcccagtgattgtatcgacatatcaggttttgtttattcatccatcagttaatggacatttggattgtttctactttttgactatattattaataatattgctattagcatttaggtacaagtttttggggatatggatgttctcaattctcttgagtatataccta

SEQ ID NO: 331328 - DNA, 567 bp, Homo sapiens
gccctggatattatcatgaacaaagcagagtctttgtccttgtaaagcttggagtatgggaggagacaatctaaacaacaaacaaaaatagatgataaaacccttctcttttaacaaaggcctaacctgaatgcaatgaaagagagctacactgggaaaactatttagaaagactgctcaaggaaggctctaagaggaggtgacatttaaaaagagacttgaaagatagaaatcagccctgtaaagagccaggaaaagggaattccaggcagaaaggatgatggtatgtgaaatggtccttatgtggaaaacagagtatcatgtttagggaagtaaagaagsccagagaaagcaagtgagtagaaagagggcaatggctgagacaagcaagggttccatcctagagctcttgtgggtctttggattttatctaagacttatattgagaaacccttaaagcactttaaagaagggggaatcatgatccagtgttgcgtagcaaacgggttgtaaggaaagagaacttttaggagacagttgtggcagttaaggcaaaatataatggtg

SEQ ID NO: 331329 - DNA, 404 bp, Homo sapiens
tgacaaaagttcttttgaaattcttcccagaaaaataacataggtctatatagaaagtttataaatatagataaatacatcaataagaaaagtttagaatgtatcaagagaactttcatttggcaatttggctgattagatttcacaagytgtctggttttgctgagcttatcctagagaggaataaaacatcaaattgcagaaacttttatggaagataattcagaaagctgtgaatttttaatgacaaatctatttttgaaatttgctagcctgtttttgagatttgctagcctgttttaacctcttgcattcagcattactattctttaaacttcgtatgattattgcatattgcatattattgcatattatcaaagttctggttagtcttggttttgtac

SEQ ID NO: 331330 - DNA, 591 bp, Homo sapiens
atgaaccttgtaaactgataattcttgtgtcagctggaagtttaaagcttcctgagtttaaggaagttagttcaaatttctgaaaggaatttttttttcctctgagtgtgaaagtcaaaccagacatttgaatataaacttaatctcaaaatgcatgaaaataatggagtrtgttaggtgtttatggttaaaaatatcgcacaattaaaggcaggctaccttgccactaggtaaattagtcatgcaataggtttaatctacttagaaatagcactgtgaggaagaaaataaaattaattcagctgatagtgtcagatcatggaaagaaaagaaaaaaacagcttactcttgccaaaaacatattgctaactttgttcaggttgcagcttttgtgtttcatttaggtttcagcttgtcccaggaggtgttgctatactgtgaaggtgttaggcagtgtagtaatggaacaggagataaaatggaaggcacataaaatgtctcatcatttggaccttcctggagaaacatagcttgaatttctgagtggtcagcttgacattttaaagcagtgagaagttgtgtcattatttc

SEQ ID NO: 331331 - DNA, 591 bp, Homo sapiens
atgaaccttgtaaactgataattcttgtgtcagctggaagtttaaagcttcctgagtttaaggaagttagttcaaatttctgaaaggaatttttttttcctctgagtgtgaaagtcaaaccagacatttgaatataaacttaatctcaaaatgcatgaaaataatggagtgtgttaggtgtttatggttaaaaatatygcacaattaaaggcaggctaccttgccactaggtaaattagtcatgcaataggtttaatctacttagaaatagcactgtgaggaagaaaataaaattaattcagctgatagtgtcagatcatggaaagaaaagaaaaaaacagcttactcttgccaaaaacatattgctaactttgttcaggttgcagcttttgtgtttcatttaggtttcagcttgtcccaggaggtgttgctatactgtgaaggtgttaggcagtgtagtaatggaacaggagataaaatggaaggcacataaaatgtctcatcatttggaccttcctggagaaacatagcttgaatttctgagtggtcagcttgacattttaaagcagtgagaagttgtgtcattatttc

SEQ ID NO: 331332 - DNA, 575 bp, Homo sapiens
tagttttgtttttaattttttcaggaatctccatactgttttctatagtggctgtactattttacattcccaccaagagtataatagaygagggttccaatttctccacatctttgtcaatatttttaataacacccaccctaacaggtatgaagtgatattttattgtggttttgatttgcatttccctgacgattagcaatgttgagcactttttcatatacctgttggccatttgtatgtctttatggaatttatagaatagacatttaaagaaatgtctattcaagtcctttgcccatttttaaaatcaggttatttggttttctgtttgttttgtttttgctactgaattatagaagttaagtgtctagatttgatattcaatgagatatcttctaggaaaatgatttttatctgtttaaaaatacttttgttggcaccatttaaatgaatattgggaaatatttttcttctgtcaagaaatgttggtattagaagtatcaataaaacaaaattaagttctttgctaatttttgtaaattaagtgatggtgttagctccattatacctcc

SEQ ID NO: 331333 - DNA, 560 bp, Homo sapiens
ctaaatgaatgctccctttagagaaactytgacaccaactgttctgtgttttgaataacttagagagaataagattccaggtcagtaatgagcaacccatgactcagttttgcaatcttcccatattttccatgtgatgaagaacctattttcaggatacaattagaaaattgctctggattattacaaaccttaacatattggtgactaagaagtgcctgcaatttttttcactgacactaaatggataatctaggttgaatgaatatatccactctcacaaaagcccaaataaagctatccccatgttgaattttttaaggtggcctgtaaacaagtttatttttctcgaattggtctaaataaaaaagaaaattgccctttctggcactggctcatgacatacagccttgtaggacacatgcatattccagatcttacccagctgcctcatactgaggtaagacctttaaccactgatggtgcctagggtctgttgggtgaaatgttgcttgcagctttttttggaaaatggtgggatatatctgacattgtttgaa

SEQ ID NO: 331334 - DNA, 487 bp, Homo sapiens
ctccttgaaatacaatttctgattgatctctgcctatcctaccacaggtctcagtagcaggcaggtgcttttgtagttcagggatgctgccatctttctgtaattgttggttataactcctgcaaggatatatgtaggattgaatatgacaaatagtggctggtgtgtaggttggaatatgtaattctgggatagagtgaggaaaaagcccacagattaattcatactatatttttaaacatttgagaggtgaaaagttttttgtgaaaactaaccaaatgagaaggtcttatttaaatctttttaaaccctttgccaatttttttttcttaaaaagcaacagaaatgagatagtaagtggtaagctaggaggatcgttgactcttaacaaaaaagattcaagttcatatgaaaattggtttaatggtaatgatggctttcactataatgcaragtagtgtagtgtacagtaaaatattaataacta

SEQ ID NO: 331335 - DNA, 555 bp, Homo sapiens
aagattgagaagcagtagtagcaggtattagggacctctgagctacttgctyatacagtatacttgggcttcctcaactagcataagaaggctgcagggaaggaaaatataccaaggaaatgctgttgtgtacatttttgatatgttgaattagataacacctagttcatgatgcacggtttgggctacattgtcattccgagtcctatggcccagtacacagtcttaaccaaagttcattagcaagtaaggagtggcttttcaaatggagattagttattgttagaaaactgcatgtctttactataaaaccacgagggatctacacactgaggcttccattgacagagatgtcatacagcatctccatttgccacagacatttccaaaaatcattgcatctgctgaatcttagagtcaaaagtagagggagctttcatcatggcagggtatgatgtagatccttttcttgccccaggctgctctcaaaatggacagcctgtggattacctagtatatgcaccacagaagtatacccaaatatggtctatgttg

SEQ ID NO: 331336 - DNA, 574 bp, Homo sapiens
cctataaagaccttaaatttttaatgttttaattgtttttaatttaaaaatgtcttttcttaggttcctacagacagaaaccttttttctgtatcaggtagtatttacagattctaaggattaggacctgacgtcctcgggggactatttttccacatgagttcaatagtcttgaataaatatcatttatatctcttttcttcttttctctatgttctgaaattttacaatttaagatgcaaaaatatgtggtctaatatcatagttttagagaattargaaggtaaattcatcctagagtttggatcaaacaaataatatttagaaggaatatatcataaggtgataactttgtatgtcggtatatatgtaagtgtgggtgtgtgtaaatcattaaatttccatatatataccatataattttctacctgaaatgttgtgagttaaatcaaaaaatgtaaattattcctacatatcattaatattataaattcaggaccatagttatttatatatttatttttaaaattctggttgaagcatttggtgaaacagttccagaattgagtttttt

SEQ ID NO: 331337 - DNA, 559 bp, Homo sapiens
tgggtataaatgtcttcctgtttcagtattttcagagagctccataactaacacttttgcaagaaataacttctgagttattctgctcttttctttcccagcagtgaaacacatggaaataatcatgttgattaaatattacaagtagaactagagaatttcattgcctcaaatctgaactaggaatgggaagttattttcttattttaaggttcttatgctacaaaagcaataaatatacacctgattttttggtaatgcattcaaactayggaaagtgatctagggaaaacatgattgaggccaggtgcgttggctcctgcctgtaattccaagactttgggaggctgaggcaggtggatcacttgagatcaggagtttgagaccagtctggccaacatactgaaaccctgtctctactaaaaatacaaaaattagttgggcatggtggcacacacctgtattcctggctacttgagaggctgaggcacaagaatcgcttgaacttggaaggcggaattgcagtgagccaaaatcatgccactgcactccagcctgg

SEQ ID NO: 331338 - DNA, 559 bp, Homo sapiens
tgggtataaatgtcttcctgtttcagtattttcagagagctccataactaacacttttgcaagaaataacttctgagttattctgctcttttctttcccagcagtgaaacacatggaaataatcatgttgattaaatattacaagtagaactagagaatttcattgcctcaaatctgaactaggaatgggaagttattttcttattttaaggttcttatgctacaaaagcaataaatatacacctgattttttggtaatgcattcaaactatggaaagtgatctagggaaaacatgattgaggccaggtgcrttggctcctgcctgtaattccaagactttgggaggctgaggcaggtggatcacttgagatcaggagtttgagaccagtctggccaacatactgaaaccctgtctctactaaaaatacaaaaattagttgggcatggtggcacacacctgtattcctggctacttgagaggctgaggcacaagaatcgcttgaacttggaaggcggaattgcagtgagccaaaatcatgccactgcactccagcctgg

SEQ ID NO: 331339 - DNA, 578 bp, Homo sapiens
gaggaagaaaaatccttaagtgacaggtattccacgagacagagaaatgatctctcatacaacatttcaaaggggttaagagccaacccacttctgggtgatactcattctcggcagggcaagaggcaagatttttatgtgtaagatttgtyttttggcatattctagaaagatttctttaatgtcttactcattctttcagtctttccagaagattgcactctccaagatgaacatagtttttaattaatactcaatagctgtgataattctggagctacttgaactataaaagtggctccattttcacattggagacaggaattatctccttcattaaaggctttactttgatggctttggtagctttctcagtcctgatagggtaagcctcaatcaggcctgtagaggtcgagtcagttgttgtatctaacgacaaaggaagggggtataatgaggcatgtttgacttcttatcccatcgtggctgggaactcagttgtaaggtttttctggggttctgttggccacaagtaggtccacttagtcagtggcagagggacttaggattttattttt

SEQ ID NO: 331340 - DNA, 578 bp, Homo sapiens
gaggaagaaaaatccttaagtgacaggtattccacgagacagagaaatgatctctcatacaacatttcaaaggggttaagagccaacccacttctgggtgatactcattctcggcagggcaagaggcaagatttttatgtgtaagatttgtcttttggcatattctagaaagatttctttaatgtcttactcattctttcagtctttccagaagattgcactctccaagatgaacatagtttttaattaatactcaatagctgtgataattctggagctacttgaactayaaaagtggctccattttcacattggagacaggaattatctccttcattaaaggctttactttgatggctttggtagctttctcagtcctgatagggtaagcctcaatcaggcctgtagaggtcgagtcagttgttgtatctaacgacaaaggaagggggtataatgaggcatgtttgacttcttatcccatcgtggctgggaactcagttgtaaggtttttctggggttctgttggccacaagtaggtccacttagtcagtggcagagggacttaggattttattttt

SEQ ID NO: 331341 - DNA, 593 bp, Homo sapiens
gttatttccctaagaagtttgaagaatttctcaactgtcttccaatgggtattgttgttttacaaaatttcaaggccatattgatttattaaacttatgagtaatttgatattttttaacctgttacttataaaattatttccttatccaaagaccgactaacctcatttgaatatatattaactttattcttttgagtgaattttgattgtgacatgattaatctttctgaatctagatgtagtttttcttttataggaacagtatctttttcttcgtgtatcaccactgagctggggagttggggatagggccatggtattttaatatattaaaatgccattaaagctctctttttgagattcagctatttttttaaattaagtattgctctggttgctgtaagctttttgttagtttccagaattctgaaagctaattctkgtcatttttgtcagtttattgcttttgtgaagggacagacttttggaattccctactccatttttgatgactctcttatattgtatttttgtgtaatttttctcatcccatgtatttgattcttttcagaaactctatgaatgtgttgg

SEQ ID NO: 331342 - DNA, 471 bp, Homo sapiens
acttgtaaatcaatataaacaaacacaaatacaaaaactaataaagagattttaataaaactatcaaagatggataatgcccaaatgaccaataaatgtataatagcatgtaagcattaacaagctaaattgtgatatcatttcacaaccaagcatttrgcacacattaagaagtctgataatataaactattgagaaagatttggagaaattgtaactatcgtttacttctacggaagtttgattcaagctttaaaaaaaattctaattacctggaaatatttaaactcaatgacacaagtaattctactcgtagatatatatggcagcaaaatcttgtacaaattcaccaagatagggaagcaaagattttttaatatcaaaataaaagaaaccacaaatccatcaacaatataatgcagaaataaattagggttgtattagtccattctaatgctgctaacaaagaca

SEQ ID NO: 331343 - DNA, 600 bp, Homo sapiens
aatccaaaaaggaagagctatggatgggattggtgaggggtaccaagtaaatgatgatgttcatttcctaactgactgatgagtacatagttgtttgttgtattgtgattctttttccttatatgtattttataagaattattttgtatctactcaacattaaatagaaagttccaaaacaaacaaaaggtatagcatatacatattttcttttaattggcctcaaacttgtgaagtctacaacatgatttccattattatcttctaccaatggaaagagggtgtgttggtttcctgtggctactgtaacaaattaccacaaatttggtcacttaaaacaacaaaaatttattctcacagctctggaggccagaagtccaaagttaaggtgccggcaagatcccatttcctctgcagcctctgggggacactatgtcttgctttgtstagcttctggtgactgttaccattccttggaagtttgtggccacattattccaatgtctgtcttagtcttcatatcatcttgtgtgtctgtcactttgtctgtttaaggatacacaatgatcttaaacacaatcatattttgccatatacagt

SEQ ID NO: 331344 - DNA, 487 bp, Homo sapiens
tggttgttacagaagaaacagggcactaatacaaatgccagtctttcaaagaaccattctctgatgaccctatctggtaaaaggtcagctctgccttaccaccaccattcccagcacctccattattctgccacatagatctattgtctgtttcctaygttacacatattgcagtgtgtaatttcttactattgtaagctccaagtgagcagaaatctcactggtcttcataatgtttacatctctagcccctagagaaatgccacacacagatgggcattgaatggatatatatttaaatgactaaatgactaactgcaataaataaaacatttaattttttatcaagtctagaactgtgttaatggattttgttagaattaaaataatttgggtttctccatcccttaaatttgacaacaaatctgttcaagtgttaaatttagaatagtccatgaaacaaatatacaagtgtttgacaaggact

SEQ ID NO: 331345 - DNA, 487 bp, Homo sapiens
tggttgttacagaagaaacagggcactaatacaaatgccagtctttcaaagaaccattctctgatgaccctatctggtaaaaggtcagctctgccttaccaccaccattcccagcacctccattattctgccacatagatctattgtctgtttcctacgttacacatattgcagtgtgtaatttcttactattgtaagctccaagtgagcagaaatctcactggtcttcataatgtttacatctctagcccctagagaaatgccacacacagatgggcattgaatggatatatatttaaatgactaaatgactaactgcaataaataaaacatttaattttttatcaagtctagaactgtgttaatggattttgttagaattaaaataatttgggtttctccatcccttaaatttgacaacaaatctgttcaagygttaaatttagaatagtccatgaaacaaatatacaagtgtttgacaaggact

SEQ ID NO: 331346 - DNA, 620 bp, Homo sapiens
atttattgggatcatctacatagacaatcttctattgtatgaatagagacattattaaatttcttttgaatctgtatgcctatccattcttttttatgacttactgcacttttagcacaatgttaaatagaagtggtaagagtggacatccttgattgttttgatcacagcaaaaatatacagtttttttgtctttcaacagaatgttagttttaggttatttgtagatttctctgtatcagatttaggacattgtcttctatttgaatgtgctgagagtttatattaaattgacgttgaacttcatcaaattttttttctgttatcaattaatatatttaaattggtttttgggttaaattgattgaaattttaatattaaaaccggtctcaaattatgtaaacaaataccatttttggatgatgtatttctgtctggctctcctctctctctctcctcatttctctctctctytctctccttctctctcttctcccatctctcctcccccacttcctgtcatgaattataaagtgttctctacttttcaattatgtaggattttgtagcactggtgttatttttctttaaatatctgacataattcacctgtgaaacc

SEQ ID NO: 331347 - DNA, 665 bp, Homo sapiens
tgaaaaagtagccttctgtacagatttctattcttagctatctgttagggtacaaatgagaaaatattctgtatatagttcttaytgcattttcacttgacaataatgagaaatatatatattaagtgatatatatatgtgtatatatatgtatatatatgtgtatatatatatgtgtgtgtgtgtgtgtgtatgtatgtatatatatatatatatatatcacttaatctggaaactttctaatggattgttaccagagcaaatttccatactggtttctattataatacatgttgtttgatttttactaggtctgctcagattttttttctccaaacaagcttaaacattcctccttatctcaatagaataaaaatttctacagactaagcaccattttctttctgttctgtaggtgtgactgctgcttcaattggttagttctacttgctaacaataaaaagtacccaagctcatatgggctttttttattgtttatgtaaacgtcacccatatgatgaaacatcccatatgtttcatcaaatgggtgatgaaaccctcaaaagcactctacttttatctgttctcaagtactgcacatagcttgagcacagtctgacagtataatttgaggcataacaagtgctttcaattagaggatttaa

SEQ ID NO: 331348 - DNA, 576 bp, Homo sapiens
tatggtttataggaatcagatatgatgatcccctcagaatactttcaccacctaacaattccagtcytgaggtttgaaatatgctgctattaaggtaaccataacagccattatttatacgccacactgtcatctcaaagaaatacacacagttctactcagaaagtatgacttccattttactgttttcgaagagaagaatataaattcaggattatgattggcttttacctataagaaagcaatgcaaatgggcatagttagggcctccagaactaaaaactttaatttcctgtatttacacagtaatgcaacatagaggatgtcagttagcactttatgaaatttatagagtaatcataataatgttcttaaattaatggaactgaaatccaccatacagaaaattaataatttggtgtgaactttctggcatccctgattttcttcagtggtgagacatgaaaatgacagaactggaaaatacttgctttttgaagtcagattatattactaataagtcatttgcctcccatgagctcagaaagactgagaagacttatggccctcaaagag

SEQ ID NO: 331349 - DNA, 588 bp, Homo sapiens
ttaagtggtctggatacaagatcaaacaagccacaacatttccttaagccaaagcctaatacgtgtcaaggatctagctcttttcaatgctataaaakctcaaagagttgaagaagctgcagaagaaaacttgtggccagcagagtttggttcctgaggtataaggaaagaagccatctccataacataaaagtgcaaggcaaagcagcaagtgttgaaaagctgcagcaagttatctaaaggacctagttaagatcattgatgaggtggctatattaaagaacagattttcaatgtagacaaaacagtcttacattgtaaaaagattccatctaggactttcatagctagagaggagaagtcaatgcctgacttcaaatcttcaaatgacaggcagactctgttactaagggttagtgcagctggtgacttgaagttaagccagtgctcatttgttattccaaaaatcctagggcccttaaaaattatgctgtctattctgccagtgccctataaaatgaacaacacagcatggatgatgacacatttgttcatggcatggtttaatgaatattttaaatccattgt

SEQ ID NO: 331350 - DNA, 616 bp, Homo sapiens
gtgtattttctgtgaaatgaagaaaataatggcacttacagggctttatgggaattaaataagttaattcatacaaagtgcttaggaaggatagaaatattacataagcatgggctrttatattattgtaatgtaattcaggccatattttaagtatctttataagccatctcaattttcttttagactactaaatcaatttctgttcatggaactctcatatcacattgtaagaatcaatctccctctacaaaaatgtaagacctaaggacaaaaagtgtgttttattcatctttatattcccagatcataatgcaggcttagcaaacagcacatgctcaacattttttcattgaacaaatgaatgaatgaaaaaaattgctttacggaagatacagaagtccacctgctcttaggtcatgtcactttttttttaatactttaagttctagggtacatgtgcacaacgtgcaggtttgttacatatgtatacatgtgccgtgttggtttgctacacccattaactcatcatttacattaggtatttctccaaatgctatccctcccccaacccccaccccacgacaggccctggtgtgtgatgtttcctgccctg

SEQ ID NO: 331351 - DNA, 616 bp, Homo sapiens
gtgtattttctgtgaaatgaagaaaataatggcacttacagggctttatgggaattaaataagttaattcatacaaagtgcttaggaaggatagaaatattacataagcatgggctgttatattattgtaatgtaattcaggccatattttaagtatctttataagccatctcaattttcttttagactactaaatcaatttctgttcatggaactctcatatcacattgtaagaatcaatctccctctacaaaaatgtaagacctaaggacaaaaagtgtgttttattcatctttatattcccagatcatartgcaggcttagcaaacagcacatgctcaacattttttcattgaacaaatgaatgaatgaaaaaaattgctttacggaagatacagaagtccacctgctcttaggtcatgtcactttttttttaatactttaagttctagggtacatgtgcacaacgtgcaggtttgttacatatgtatacatgtgccgtgttggtttgctacacccattaactcatcatttacattaggtatttctccaaatgctatccctcccccaacccccaccccacgacaggccctggtgtgtgatgtttcctgccctg

SEQ ID NO: 331352 - DNA, 599 bp, Homo sapiens
gggtgcctgtggtcccagctgctctggaggctgaggcaggagaatggcatgaacccggtaggcagagtttgcagtgaaccaagatcacaccactgcactccagcctgggcaacagagcgagactccttctcaaaataaaaaaaaaaaaagaaaagaaaaaaatacmtaaataacaagaaaaagaaaacatatagtgctcttatttgcatttttggttcacagtgaaaaatcaatacggggtctgtcttttctttcaagaactccaatgcttcctacttcaaagcgtatcatctaagttattgcctttcataaagacacaaaaatgagacattaatttgtgcagcatgaattgaatttctgaaggaaatacatggggagtgtgtttgaggagaaactatagaggccaatgtagtaaaacacgcctccctgcattggtgttatgaatcatcacactcagccaatgtgggtagactgtgcctcatttcatcatgtctgtagaccatgccagatgaccttaaagaagcatcacatgtttctttgcatatacagcctcatctaaccataaagaaataattaaaacaagcaacaaataaaaattg

SEQ ID NO: 331353 - DNA, 599 bp, Homo sapiens
gggtgcctgtggtcccagctgctctggaggctgaggcaggagaatggcatgaacccggtaggcagagtttgcagtgaaccaagatcacaccactgcactccagcctgggcaacagagcgagactccttctcaaaataaaaaaaaaaaaagaaaagaaaaaaatacctaaataacaagaaaaagaaaacatatagtgctcttatttgcatttttggttcacagtgaaaaatcaatacggkgtctgtcttttctttcaagaactccaatgcttcctacttcaaagcgtatcatctaagttattgcctttcataaagacacaaaaatgagacattaatttgtgcagcatgaattgaatttctgaaggaaatacatggggagtgtgtttgaggagaaactatagaggccaatgtagtaaaacacgcctccctgcattggtgttatgaatcatcacactcagccaatgtgggtagactgtgcctcatttcatcatgtctgtagaccatgccagatgaccttaaagaagcatcacatgtttctttgcatatacagcctcatctaaccataaagaaataattaaaacaagcaacaaataaaaattg

SEQ ID NO: 331354 - DNA, 584 bp, Homo sapiens
gcaagggttataactatgccgggtcagacccaggcaaggaaatttgctcccaaaggcagtggaaagctatcagggagacttcagcagaagactggcttgtctttggataatgagactatggatttttttttcttaatttctgatttttaaaaatctctataaygagcaagtactatttatataatttttaaattgtgtaaaccattcatcttaataagaaataaatacaatacactatttatcaaataggtccttttgggaaagaaggtcacggatttaaatatccttagaattatcgagaaagcaaacccaccatttaaaaagggaaaagggcaacataatgcctttggctcattgtatcaatagggcctgaggatctataaggaggcttagcccagctcatgtgcagaccaggctctgactccttcaacataacgttctcagagattagtatcttgatgacgtcagcgaagcaagctgaaaggaaggttagagacctcttcagtggttttcaaacattttttaaaaagggacttttttttctttttcaagtgcaatcttaaacataaaataggtaaaagatt

SEQ ID NO: 331355 - DNA, 584 bp, Homo sapiens
gcaagggttataactatgccgggtcagacccaggcaaggaaatttgctcccaaaggcagtggaaagctatcagggagacttcagcagaagactggcttgtctttggataatgagactatggatttttttttcttaatttctgatttttaaaaatctctataatgagcaagtactatttatataatttttaaattgtgtaaaccattcatcttaataagaaataaatacaatacactatttatcarataggtccttttgggaaagaaggtcacggatttaaatatccttagaattatcgagaaagcaaacccaccatttaaaaagggaaaagggcaacataatgcctttggctcattgtatcaatagggcctgaggatctataaggaggcttagcccagctcatgtgcagaccaggctctgactccttcaacataacgttctcagagattagtatcttgatgacgtcagcgaagcaagctgaaaggaaggttagagacctcttcagtggttttcaaacattttttaaaaagggacttttttttctttttcaagtgcaatcttaaacataaaataggtaaaagatt

SEQ ID NO: 331356 - DNA, 597 bp, Homo sapiens
gaacactgcggtttagacatttccccgactcctctagttttgctttcagctcacatttttttctttcttaagttttttcctctgtttaattgacatataataattatacaaatttatgggatacatagtgtttcaattcatataatgtgtagtgatcataacagggtaattagcatatccatcatctttaatatttatcatttctttgtgttaggaacattcaatatcctccttccagctatttgaaactatatattattgttaactctagtcatcctacagtgctatagaacactagaactaattcctcctagctagctgtcattttgccactttagcaaatggctccctttccctcccttccccctacccttcccagcctccagtattctctgttctactttttgcttctatgagatcagcttttcttagcttccacctatgaccagcagctgacattttttgagggcctaatacataccagacattcagaatacaaagatgagcaaaagctcacccacakgtgggagacaaacacatcaagaaacagtgacaatccatgtaactattgaaaacagagaatcagaagaaagggaa

SEQ ID NO: 331357 - DNA, 524 bp, Homo sapiens
atcttttaatgtgcttattggctatttatatatcgtttttggaggaagatctattcaaatcctttttccatttttaaattagatgtttctttttattgttgagttgtaaaaagttctttaaatattctagatactagacccttatcacatatgtgatttgaaaatatattctccattatctgsgttgtcttttaattttattgatggtgtcctttgaagcataaaagtttttaattttgatggcatccaatttctttttctgttgcttatgccattggtgttatttctaagaaaccatatctaatccaatgtcacaaaaaattaattttggttcttacatttaaatttatgatctgttgcaaattaatttttgtatatcatgtgaagtagggagaacaacttcattctattgcatgtgggtatccagttgtctcagcatcatttgatgaaaagactgcttttcttattaaattggcactcttggcaaaaatcaattaattataaatgctagggttttttcctag

SEQ ID NO: 331358 - DNA, 587 bp, Homo sapiens
agcccttcaaagacccctgcaaatgtctcattcctcagtttttccatttaagtttcttggtcaacctctcgttagccccaactggtaatggcacctcagacagctgtaatattaaacatttgctgccaattgttttcaacaagtatcttgaagataacactattcatacagagtgagttctgaatcaagtcaaataaamacaagccctgagaatggagcttttcagcaagctttcagacaagccaaatagtggaaattctctggggatcaggctttaggaaaactccaaacctattttttcccttccagtggctgataggctactggttttcacagcaatcataactgtaatcctgatggttttcaaggctactatggctggggaagaggaaagaattataaattttaaagtgctataaatctaattgttcttacaaagtttcaattatttttcttaaataaacactcctcagattgttgtaagcctttagttatttctagagttcttcaaaagttgattttgacaggttttttgttggtttggttggttggttttatttgtttatttgtttgtttgcaagtgttct

SEQ ID NO: 331359 - DNA, 601 bp, Homo sapiens
attccatcagccagacagaaagctctgtcaaaaccttgatgtataacctttcaaaacgtttcccaactgtgtcaaatgcacacaagcatacrcacagaaacacacacacagatacatttatattatctatatactaaaaattaaaattataaaattacagataataaattgttataaataaggaatcatgctgtatataacctttggtgatcttttcttactctgtatgggaacattctttccatatcaaaatgttcatctacaatattatttttaatggaccactttaatttttttatatagagctgccatcttttattcaaccaatccctcactgtacgacatttagattttttcataaattatttgctattatataaaacacaatgatgaatatcaaaaagataaaatattctcaccagtactgattacaatctcaggataaatttcttgatagggccaagtatgtgtttgtgatgcatataaggccaagtgggcttcccagctccagcattagccaagagccatttacctgagctctcctataaacaaaccagacttctctaaataatatgggtatacatatgtaacaaacttgcac

SEQ ID NO: 331360 - DNA, 618 bp, Homo sapiens
cattttgggactctaagtccagtgctgtctcttttcttaacatcataatgtgtcgcttcatgttttagtctgttttgtgcttctacaacaaaatatctaagattgggtaatttataagaaatgaaaattgttttcttactgttctggaggcatggaagtccaaatcaaggtgccagcatttgatctagagagggccttccggctttgtcctcacatggcagaagggcaagcttgctgaacgctgcatgaagtctcttttagaagggccttaatcaaattctcgaggaagcagccctcatgacctaatcaccccttaaaggccccacctcttagaactatcacattgacaacacctggattttggaagggacaaattcawaccatagcatcctaactttttcacttacagtcagcccagagggagcaaaatgacactttctaaaacactgtcccttcagttcctccacaaaggaaggctaagagaaaagacaggattgggctaaccattagcctggttgcaaataacatcaatgataacactaacacagcaggaataaccacagcgttaaaaaccactaacttttaccgagcactaggtgccaggcactgagctaagta

SEQ ID NO: 331361 - DNA, 522 bp, Homo sapiens
atattgtccaacattgcatctctgagatttatccatgtggttgtgtgtcattatactttgttcttttatattgctgtgtggtattcccttgcagaaatacaacacaacttatccattctacggttgataaaattttggtggattccaattttatggctattaaaaagactgtttctttgaccatttttgtacatgccttctggtatacacattccttttggatgtgtaagtcagtgctgaattactgggtcactgaatatacatgcattcaccttgatgacatacggtcaattttagccattttggtggatttgtagtatgtttcattgtgtttttaatttgcatttccatgataataaatgatgtaggtcatctttcaaatatttattgtccatctggttatygtcttttgtaatgtgttggtacaagttttctgtccacttaaaaaacaattaggctgccatctctaacatggttttagtttcaggttttccacataagtattttataaaaatcacgtga

SEQ ID NO: 331362 - DNA, 509 bp, Homo sapiens
tcacttctgacaggccagtttggatcttaatcacagctcccaaagttttagttaacatagcttcatccatgaacttaatcagcaggctctccactctaacatttcaaccattgatcaaacaacagccactaaatcatagagagccctggttgatccctgaaaactatgcccatgcttgatgctgggccattgatggaaactattttgtactgccttttaaccacttatttaccagttttatttcaaccagattgtctcagaataactcatgtaagacctgattttattttaaaaatgcaaaaatttggaagcatataatataatagaatttttcttcattctttccctaatttcacttctctcctcaaaggtactcactagatagatttttttttctttctggagcttttaaatttgcattttgcatctctctctctctctgtctctgtctctctgtgtgtgtgtgtgtgtgtgtgtgcgcgygcgcatatgtgtgtgtgtactgttag

SEQ ID NO: 331363 - DNA, 509 bp, Homo sapiens
tcacttctgacaggccagtttggatcttaatcacagctcccaaagttttagttaacatagcttcatccatgaacttaatcagcaggctctccactctaacatttcaaccattgatcaaacaacagccactaaatcatagagagccctggttgatccctgaaaactatgcccatgcttgatgctgggccattgatggaaactattttgtactgccttttaaccacttatttaccagttttatttcaaccagattgtctcagaataactcatgtaagacctgattttattttaaaaatgcaaaaatttggaagcatataatataatagaatttttcttcattctttccctaatttcacttctctcctcaaaggtactcactagatagatttttttttctttctggagcttttaaatttgcattttgcatctctctctctctctgtctctgtctctctgtgtgtgtgtgtgtgtgtgtgtgcgcgcgygcatatgtgtgtgtgtactgttag

SEQ ID NO: 331364 - DNA, 562 bp, Homo sapiens
tgactggtcagtctgaatttgtgaaatacactaaaatacagagaattrtagcttaaagtatattttaatttccatctattaaataaggaatgtgattcaaatgccaacttgcatgccatgggaaacagtataacattacttgaaagtagattggttaattaaagatgtaacactagggcaaccactaaagattcttttaaagaggtataaaatttaggtaatacatgagtagctatatttattcatcacatttcttgttcttttacatgaagatgtatacaaaacttttaaaatatttttaacttgctcctccaaactcattatatttatacttccatttgcttcacaactagttttatcaaagagaacagaaagaaaaaaattcagcacaaaaacaaagaaaaagaaaaaattcagcacaggctcagttgaataactgaaatgtccaaattagtgggacctgagctaaaatggttgtacaggtaataataaagaattatgttctgcatttcttgtcttggtcagctgcattacaggtaattagtgacggtgttctggggtg

SEQ ID NO: 331365 - DNA, 575 bp, Homo sapiens
atacacgcaaagaatttggcaaatgtaaatgtcctctgacatttacttggtagtaaacataagcatccaacttcctcagcttcgtttgcttcattactcaaagtatactctttcctctgtctttttcttatccagtttaaaaatttccattaaattactttatattttttaaaaaatgtcagaacactggggaaaatgacaggactctaagttcagcaagaattttatatcagtaacttgcctaatgtaaaaaccrgaaaggaggaaagtaaagtgggggaaaaaacatttaaagttgaatccttatacccaaaggaaatggagttttaagtcacagaatttgcctctatgtcacaacttcagtgcttagcgaggatcccttccttgctaacatcttgaactttttcatttctgtgttcatcagggatggctgatgtttataaaaagaattctcaagcttgctcgaataaagaggaaggtaatttcaggttacaagaaacacctggtttaagaagaacatgaactttggaataagacagaattgagtttgaatcctgtcgctaccagttactaac

SEQ ID NO: 331366 - DNA, 574 bp, Homo sapiens
ttgtttattggatactgagtttggatactgagtcttcatgaagatggaaatgaaaagttgataggaatggaaaatacttctgtgtccggaattggttccttcctgtgggtgtttggtctcacttcaagaatgaagctgcggacacttacggtgagtgttacagttcttaaagatggtgtgtctagagtttgttccttcagatgttcagatgtgtccagagtttcttcctkctggtaggttcgtggtctcgcttgacatcaggagtgaagccgcagaccttcgcagtgagtgttacagctcttaaaggtggtgcatctggagttgtttgttcctcctggtgggttcgtggtctcgctgacttcaggagtgaagcctcagacctccacagtgagtgtgacaactcataaaggtagtgcagacccaaagagtgagcagcagcaagatttattgtgaagagccaaagaacaaagcttccacagtgtggaaggtgacctgagtgggttgccgctgctggctcaagtggccagcttttagtgccttatttggccccacccacatcctgccaattggtgca

SEQ ID NO: 331367 - DNA, 574 bp, Homo sapiens
ttgtttattggatactgagtttggatactgagtcttcatgaagatggaaatgaaaagttgataggaatggaaaatacttctgtgtccggaattggttccttcctgtgggtgtttggtctcacttcaagaatgaagctgcggacacttacggtgagtgttacagttcttaaagatggtgtgtctagagtttgttccttcagatgttcagatgtgtccagagtttcttcctgctggtaggttcgtggtctcgcttgacatcaggagtgaagccgcagaccttcgcagtgagtgttacagctcttaaaggtggtgcrtctggagttgtttgttcctcctggtgggttcgtggtctcgctgacttcaggagtgaagcctcagacctccacagtgagtgtgacaactcataaaggtagtgcagacccaaagagtgagcagcagcaagatttattgtgaagagccaaagaacaaagcttccacagtgtggaaggtgacctgagtgggttgccgctgctggctcaagtggccagcttttagtgccttatttggccccacccacatcctgccaattggtgca

SEQ ID NO: 331368 - DNA, 552 bp, Homo sapiens
atttactagtgaagaaaagccctggtcatgattcctatatcttcccaataccctgaaaaagaaaaaccagaaaatcaattgtttaaggctcaagtttgcatacttgcctcctagaattcaattaaaaaaaaaaaaacaacttagagcgacatagaagatggcaaatatgggccttatacacatatgcatacacacccacatgtgcatacatacatacatatgttccaattttcagcctttccccaactgtaacagtaagaatttctaagatcattgggaccatttcaatatgacatatactrtcaacgtgaatttgtcactcaggaaagcgcttggactaaagtaaacttttctaccatttttggaaaaaatggtcaaatgaacagcatagataagatagcaggaggtatgcatagctttttaaaatcaaactgttttaaagtgattggtacaacccaagcaccagcccctggcctataaagaatgtgctaagtgcaaatgatttttatctcttagcagctccagtgggaccttgcagtccttttaaagtca

SEQ ID NO: 331369 - DNA, 586 bp, Homo sapiens
gagctaaggaggcagaaatccttgcttaatattacagagaaattatgacaagctgtgaaaagttccataggtttttggtgcactcaaatctttcctttaggaccaacttctatgaaaatatactacgcctggaattygccctgtcaaagccagacatatttttttaattgagtcttgctttgagagtagtgaatttttttcatctgtaatttgctttttatgtgaagggagagatgttctgtttctcttctttgggggggttgtcatattcctgtaaaaacaatcaatgttggatcatttatctcctgctccatcaagctgtgatgtgggatgtaagtatgtgtatgttcacaatagagatttttcattgctatattttatagtcatattattggcaagtggccctcattcattttccagaccattttgaacccgatgacaactctttagtctttgtttgttaactgtgtcctgcctgtccaccttttcatgtagtaattgctttcaaggaataaaacagaaatggagtattgctttgtttaatatttttcaaatcaaatacatcatagcacaaccatctgtaaaa

SEQ ID NO: 331370 - DNA, 586 bp, Homo sapiens
gagctaaggaggcagaaatccttgcttaatattacagagaaattatgacaagctgtgaaaagttccataggtttttggtgcactcaaatctttcctttaggaccaacttctatgaaaatatactacgcctggaatttgccctgtcaaagccagacatatttttttaattgagtcttgctttgaragtagtgaatttttttcatctgtaatttgctttttatgtgaagggagagatgttctgtttctcttctttgggggggttgtcatattcctgtaaaaacaatcaatgttggatcatttatctcctgctccatcaagctgtgatgtgggatgtaagtatgtgtatgttcacaatagagatttttcattgctatattttatagtcatattattggcaagtggccctcattcattttccagaccattttgaacccgatgacaactctttagtctttgtttgttaactgtgtcctgcctgtccaccttttcatgtagtaattgctttcaaggaataaaacagaaatggagtattgctttgtttaatatttttcaaatcaaatacatcatagcacaaccatctgtaaaa

SEQ ID NO: 331371 - DNA, 586 bp, Homo sapiens
gagctaaggaggcagaaatccttgcttaatattacagagaaattatgacaagctgtgaaaagttccataggtttttggtgcactcaaatctttcctttaggaccaacttctatgaaaatatactacgcctggaatttgccctgtcaaagccagacatatttttttaattgagtcttgctttgagagtagtgaatttttttcatctgtaatttgctttttatgtgaagggagagatgttctgtttctcttctttgggggggttgtcatattcctgtaaaaacaatcaatgttggatcatttatctcctgctccatcaagctgtgatgtgggatgtaagtatgtgtatgttcacaatakagatttttcattgctatattttatagtcatattattggcaagtggccctcattcattttccagaccattttgaacccgatgacaactctttagtctttgtttgttaactgtgtcctgcctgtccaccttttcatgtagtaattgctttcaaggaataaaacagaaatggagtattgctttgtttaatatttttcaaatcaaatacatcatagcacaaccatctgtaaaa

SEQ ID NO: 331372 - DNA, 506 bp, Homo sapiens
tatcctcactggcagaatatgaaagggagttctcaggggcctctctgataagggcactactcccattcttggagactctaccctcatgatctaatcaatttccaaagccttacctgcaaatgccatcattttgtgggttaggatttcaacatatgtttttttgtgtgggacataaacattcattccattgcattccatccttaaccccccaccccaaattcatgctcttctacatgcaaaatacattcattccatcccaacagccccaaaagttgtaactcattcgrgcatgaactctaaaattcaaagtctcacctaaatatctaaatcagacataagtgagacttgaggtataattcatcctgaggcaaaatcattctccacctgtgaacctgtgaaatcaaacaagttatgtgcttccaaaatccactggtgggacaaggataggatagacattctcattccaaagggataaataggaaaggaggaaggggtgttagtaccaa

SEQ ID NO: 331373 - DNA, 557 bp, Homo sapiens
tcaaaagatgagtaaaatatatattttaaaaatttccccgtttccttttttttaaaaaaagaggctcatgtcttattttttcataagtaaaatttatttcaacattagccttaattcactatgttatatgctaaggtgaagcaggaagctcatattggttaactgatgactggggaaaatgatttaaggatattggcagtgttaatagggataacggagatgaagttttgcatgctattggaggttcatagaattttacaagttgagatacagctcacatatcataaaatccacctttttagtgtacaattcaatgttttttagcattttcacaaagttgtacaaccatcaccactatctaatttcacaacatagtcttcacccccaaaagaaacccaatacctttaggcggtcactcttcattctccctacccccatcccctggcaaccgtcagtctactttctctctccrtgaatttgcctattctggacatttcatataaattgaatcttgtcatatatgtccttttatgtctgacttctttcacacagcatac

SEQ ID NO: 331374 - DNA, 563 bp, Homo sapiens
tttgtcaataatttttttttcgtgaactgttgaaacttgcaggctagatgagaggaaatcacataaaaactcaagccatctttaaaaatcaaaagtgcaataaaaagaaactggtcaacagctattatgtgaaatgaaggaaagtcaaaagagagtagtttaaaagaagacatgaattgtagccttgactttggttaacacttgacatatttccattagcacatcatttcatttttcagcagatgggcctcttggttacaagtttcacaatccaatccaaccagcaaaagaacaagtgaaagaaatggtagggcagagccatttactggctcacatacaagcatgggggtatatttggttcagctgtggctagatctaggcacctaaakgaagaacatgttcccccttacccctattcctcagctcctctttttctgtaggttggcttcactttcaggcaggcttttcagatcctatgggaagatagttactagcacttccagtttatgtctattggtttagctatcccagtggaaagagagcaacccattcccaatagtttc

SEQ ID NO: 331375 - DNA, 440 bp, Homo sapiens
cttggcttccaggttatgggacagcccctctcactgaacttggacttgtatggatactctccttcctgtgaacagaacttgccttctgaaatcagacgtcttgggggagagaatgtggtggtcatctgttggctaccaagcctttcttcctgtgagagttgcttttaaaataggtaggatttgggggagtaacttgcgggaacagaaagctgcaaaaaagccagcaaagcttggccaamaacctagggtttaaaagaaatgtgaaaatttcattgcatgctctacaactcctttttactaacccctagcataattcatgcattcttctgcctgcttggcccctatggggattttgtaattcctggtttagaggatagacaaatggcagcccagactattcactcattcattcatccatcaatccatccatccatccatct

SEQ ID NO: 331376 - DNA, 470 bp, Homo sapiens
gcctttcttcctgtgagagttgcttttaaaataggtaggatttgggggagtaacttgcgggaacagaaagctgcaaaaaagccagcaaagcttggccaacaacctagggtttaaaagaaatgtgaaaatttcattgcatgctctacaactcctttttactaacccctagcataattcatgcattcttctgcctgcttggcccctrtggggattttgtaattcctggtttagaggatagacaaatggcagcccagactattcactcattcattcatccatcaatccatccatccatccatctatcccttaacaaaagtttacttagtgccttctctatgctaggcactgtgttacatgttgaagatgaaactgcaagcattatcaagtctctgttgtccaggaatttagagtctggtccaaaagataagcattactcttagcaattctactgagtgggtgcataataagaa

SEQ ID NO: 331377 - DNA, 641 bp, Homo sapiens
ttgaggtacctctttaggaaggagatcatgcatgtcttatctcaacggcttttctgataattcgagccgtgtgcctgttccgagattgggagtttcttcttgggcggttctggggacagcatgattggttatatgttggaaatgaaataatctcccacttgtacagttttgctatcacagattttcaagcaattgctcctctgtatgaatacagaaaaacataaatagcttttaggtttgttttgcaacagattaggcaccctcgatctttttccttggtgtrtgcacatgcacgtgcctttatgtgtgtgagtgcgtgtgtgtgagtgcgtgtgtgtgtgtgtgtgaggggggcagcagagaaaacacattgccatgggaagagtgcacaggacagggaattcgaaattccaaattagaatcttggctctgtttgtcttccagctatccatgtaaccctgagcaaatcatcccaatgcccgagattcaatttcttcatgtgtaaaatggaaataacaataataataataattcccacctacttcatcaaaacactgtattgaaaatatgaacaaatgctttatacatatgagaagacaattattagaattactgcttctctctctctgggtagtcattca

SEQ ID NO: 331378 - DNA, 535 bp, Homo sapiens
ttatttctgaccttctgaatgggaagactgacacataccccaaaatgaaacatgccaattagtaaaataactgcaagttgtaacattatgcagggcctagtatatgtgagagggctttgggctttagtctgagtatgatgggtaggttatgtaaagttctgggcaagggartgttgagatcaggtatagtttaaagactataattttgctacctggtaaagaatagattgggcagaatagaatagccagtaagtgaaatacaagaggctcaacatcattagtcattagagaatgcacatcgaaactataatgagataccacagtgagatatcacttcacatccactaggaagactgtaatcaaaatgacaggtgtagtaagtgttggcaagggtgtggaggaattgctagtgagaatgtaaaatagtgcagtcactttggaaaacaggcaattcatcaaaacggtaaacacagagttaaccatatgacctaccaattctactcctatgtatatatccaggacaattaaaaatatg

SEQ ID NO: 331379 - DNA, 515 bp, Homo sapiens
ggagaccaatgagaacatgtgttacgtgactgccctctcttcttgctttaggtcagaactggccaggccatggaactgctctaggggaatgartgtgccaaatatataagtactagcagtcaggattccctccatgtctccttctgtacctcatgtaccagccccacaaaatgacttgccatttctctgagcgagccatgcactttctttctacttacctttgctgaggtgtgactatgctttcttttctttttctctctactaggaaaaaaaatcaccagttctacaagcttagttcatattcccccttgaaactctccttggttgcctggccctataatacgtcattccaattttctgtaagcccttgacatgtggcttgtgcctctgcaagatctcagccatatagcatttcaaagactcgctttgaattctctctttctctatctccttctctcccttcctcccttttatctttcttgctttcctttctctctttctctccaactcctgtc

SEQ ID NO: 331380 - DNA, 502 bp, Homo sapiens
aaactaagacaagctcagcttgggttatgacagatgacacaaatactagaattgtttgctataaagctatggttgtcagtgggaaagtctccrtataattgcttattagtcatagatacacctggaagtttattccgttacttatttctcattcattcattcaacacatactgagcattacttagggcctaacactgggaatacaaagataagattttgtcctttagttcaaggaatttataatctaagagaaagcacagacagatatacaaatagctacatgtgtatttattgagcgcttaactctgttccaataactcttcaaaccatgctcagtgaatttcctcaattttcaccactacctaaatgaaatcagtagtattattattatcccttcatgcagatgaggagactgaggcacagagaggttactttgtccatggttacttagccagtaagtggtagaactaggaatcaagacaaggcactctgtctccagagt

SEQ ID NO: 331381 - DNA, 651 bp, Homo sapiens
acacaaatactagaattgtttgctataaagctatggttgtcagtgggaaagtctccgtataattgcttattagtcatagatacacctggaagtttattccgttacttatttctcattcattcattcaacacatactgagcattacttagggcctaacactgggaatacaaagataagattttgtcctttagttcaaggaatttataatctaagagaaagcacagacagatatacaaatagctacatgtgtatttattgagcgcttaactctgttccaataactcttcaaaccatgctcagtgaatttcctcaattttcaccaytacctaaatgaaatcagtagtattattattatcccttcatgcagatgaggagactgaggcacagagaggttactttgtccatggttacttagccagtaagtggtagaactaggaatcaagacaaggcactctgtctccagagtccaagctcctaatctctattttctgctgcatcaaagagtacatcaaagaacagtaggttccaggacaggattcataaaggaagaagtggtaagctctaatgtgggaagggattagaaaagaggagtttcaggaaagacattggaactcaaaaaattatttcattttaagagaaagtccaataagg

SEQ ID NO: 331382 - DNA, 533 bp, Homo sapiens
ttgtggatgacagaaaggtgaataaaagtgcatgcatgggactttggaagaaggtagtctcaaatgcctttttaagagagattatattgtcacttctctgacagtgtggaagataaaactgagggtgcagcactcttcttgggaggaagagccctgctttgaccttgacatctgttggtgcatttagcaaaacttattttaaacaactcctaagaattttattcaatgtaaaacttctatatgtatctggatggaaatactgatctacccttgattcattttatccatcacctatcttaycttatcccacctcacactatatcttatcttatcttatcttatcttatccatctagtcttgtcttgtctttctgtctgtctgtctgtctatctgtttcatacatcatccatccatctggttatgtccataggatgtaaatgataaagaactttctgccctcaagttgctcctaagcttggagggagacattccaatagacaaaacaagaggaccaaagtattcatgggatgctt

SEQ ID NO: 331383 - DNA, 391 bp, Homo sapiens
ctaagaattttattcaatgtaaaacttctatatgtatctggatggaaatactgatctacccttgattcattttatccatcacctatcttaccttatcccacctcacactatatcttatcttatcttatcttatcttatccatctagtcttgtcttgtctttctgtctgtctgtctgtctatctgtttcatacatcatccatccatctggttatgtccataggrtgtaaatgataaagaactttctgccctcaagttgctcctaagcttggagggagacattccaatagacaaaacaagaggaccaaagtattcatgggatgctttaatgcagcacagagggtatccactgcagattggcagtggaccgagaaggcttccgaagggttagta

SEQ ID NO: 331384 - DNA, 535 bp, Homo sapiens
taggtttccaaattttactatttaaaaaaaaaatggttgaacatcccctcatgtttgtgcaagtctgtgatcttttctttaagataaattcctgggagtggaatttgtgatacccaaaaggaataaacattactgaagcttctgatctatttaatgggtttctgttgggatacattgcttcccctaaaatgctctttcaaattctggttggaaatatgtgatgctatggttctttctctctctaagcaataggatctctcatcagttcccccataagatgtacattctcggtcgggcgcggtggctcctgcatataatcccagctctttgggaggccgaggcaggtagatcacgaggtcaggagattgagaccatcctggccaacatgatgaaaccttgtctctactaaaaatacaaaaattacctgggcatgatggtgcatgcctgtagtcccagctactygggaggctgaggcaggagaatcgcttgaatccaggaggcagaggttgtagtgagcaaagatcacaccattgca

SEQ ID NO: 331385 - DNA, 535 bp, Homo sapiens
taggtttccaaattttactatttaaaaaaaaaatggttgaacatcccctcatgtttgtgcaagtctgtgatcttttctttaagataaattcctgggagtggaatttgtgatacccaaaaggaataaacattactgaagcttctgatctatttaatgggtttctgttgggatacattgcttcccctaaaatgctctttcaaattctggttggaaatatgtgatgctatggttctttctctctctaagcaataggatctctcatcagttcccccataagatgtacattctcggtcgggcgcggtggctcctgcatataatcccagctctttgggaggccgaggcaggtagatcacgaggtcaggagattgagaccatcctggccaacatgatgaaaccttgtctctactaaaaatacaaaaattacctgggcatgatggtgcatgcctgtagtcccagctacttgggaggctgaggcaggagaatcgcttgaatccaggaggcrgaggttgtagtgagcaaagatcacaccattgca

SEQ ID NO: 331386 - DNA, 589 bp, Homo sapiens
gatatatatttttttcaggctgaattcattattggtctgactagtggtgtcatagccattgatgagaccttgagaccacacaccctaagtttttacatctctgyttttatttttactttttagaactagcatcttgctctgtcacccaggctggagttcagcagcgtgatatggctcactgcagcttcaaactcctggcttcaagcaattctcccatctcagcctcccaagtagccaggactacaggcatgtgccaccatacttacctaattttttaaatttttatggaaatagagtctcactttgttgcccaggctggtctcaaactcctggcctcaagcgatcctccgacctcagcctcccgaagcactgtgattacagacataagccactgtgcctagcctcacctctgtttctaagtataattctctgaaagtccaattctaatgaaataaacatagaaacctgccagtcccatggcctgccacatgactgtacctttagagaaaaatggcaaaaatttaaggaaaaaaactgcccactccacacacatactgagatttgtcttttaggcagaagttataaggtt

SEQ ID NO: 331387 - DNA, 589 bp, Homo sapiens
gatatatatttttttcaggctgaattcattattggtctgactagtggtgtcatagccattgatgagaccttgagaccacacaccctaagtttttacatctctgcttttatttttactttttagaactagcatcttgctctgtcacccaggctggagttcagcagcgtgatatggctcactgcagcttcaaactcctggcttcaagcaattctcccatctcagcctcccaagtagccaggactacaggcatgtgccaccatacttacctaattttttaaatttttayggaaatagagtctcactttgttgcccaggctggtctcaaactcctggcctcaagcgatcctccgacctcagcctcccgaagcactgtgattacagacataagccactgtgcctagcctcacctctgtttctaagtataattctctgaaagtccaattctaatgaaataaacatagaaacctgccagtcccatggcctgccacatgactgtacctttagagaaaaatggcaaaaatttaaggaaaaaaactgcccactccacacacatactgagatttgtcttttaggcagaagttataaggtt

SEQ ID NO: 331388 - DNA, 589 bp, Homo sapiens
gatatatatttttttcaggctgaattcattattggtctgactagtggtgtcatagccattgatgagaccttgagaccacacaccctaagtttttacatctctgcttttatttttactttttagaactagcatcttgctctgtcacccaggctggagttcagcagcgtgatatggctcactgcagcttcaaactcctggcttcaagcaattctcccatctcagcctcccaagtagccaggactacaggcatgtgccaccatacttacctaattttttaaatttttatggaaatagagtctcactttgttgcccaggctggtctcaaactcctggcctcaagcgatcctccgacctcagcctcccgaagcrctgtgattacagacataagccactgtgcctagcctcacctctgtttctaagtataattctctgaaagtccaattctaatgaaataaacatagaaacctgccagtcccatggcctgccacatgactgtacctttagagaaaaatggcaaaaatttaaggaaaaaaactgcccactccacacacatactgagatttgtcttttaggcagaagttataaggtt

SEQ ID NO: 331389 - DNA, 636 bp, Homo sapiens
tgcaatgttgtctaccacataagtttctacaacctaccaagaaatttccattttctaaatttccttcttttgaggatccttcgagcacttctttcacacttcgtaccttccagttagtgctgttttttttttgcttctttcctaagctgcattctctcctagttttgttgttggtacagaactgtctgtccgattgcctcttctctgaggctgccaagccatgggattgggcaagtttctaagcttggccctttagaattggatttttagaaaatcatacttaaaaacagagatgagaaatcttaaagtgtgtggtctcaaggtttcatcaatggctrtgacactactagccagtccaataatgaatcaagccaagagacaatatcaatatacagtgtatttaaaatgttcactcagttggtgaatcattattgataacacattttaaagccattttttactgagtgtttaccaggtgccaggtgttgtgctaagtgctctgcatgcatgacttacatcactgtcacatttccctcagaggaaggtaatattttcctcattcttccttgacatatgaagaaactgagcctcagagaagtgaagagacttaccttctcaaggtctcacagctaaaag

SEQ ID NO: 331390 - DNA, 632 bp, Homo sapiens
aaaattgggcacaatctaaatttcctctaggtcacccagaaagcacagtgatagtcaatatttctcatggcccttaaatgattcttccatttattcctgcagaaggttgaggaagtcataactgcctcctaagcaaggtatctgatgtttctgtgttggcaaaccccctggtattattcactcattcttcctctgtgttttaccttcccacctggctaaatttcattcactgcctgtttatgggcaaagcattaggggtctcaactgagtatgcctgaagtcagttaagacagatgggcatataatggtcctcccgcagaagtggcctagaagactgagtgcttcactctgtgtgtgaagagtgggacatggaaagcttcaaaaaaaggagcgttgcaggatttcacatgaaaagggaaaatgagttgttsatatctataacacagcatgagattgaagatttttagcttgctggatttactaaggctcctatgtgatcccatcctggatgaccttgtatatgccatcactcatgggatccttttcagaagtcacgataaatttcagtaaacaaggttatgggagcactggcactaaaaggttccatgtatttatgatgtgtaacatgctgt

SEQ ID NO: 331391 - DNA, 625 bp, Homo sapiens
ttcacatgaaaagggaaaatgagttgttgatatctataacacagcatgagattgaagatttttagcttgctggatttactaaggctcctatgtgatcccatcctggatgaccttgtatatgccatcactcatgggatccttttcagaagtcaygataaatttcagtaaacaaggttatgggagcactggcactaaaaggttccatgtatttatgatgtgtaacatgctgtgacatgggtgttgtcaaaagcactggacaggaatattgcatattgcctataataaccacttacaaggaaaaacctttataaatttctggattgtcaagcaagtagactttattgcaaataacaaattcatttctgtaataacaattttgttaaaccctcatggaaattgaattataatgtagataattatgagagaatgagctgtttggaaaaacttagcacatccctgtctttgaaggaaacaaaacatcacctaactgatcgatgttttaacttctcactttagcacatccacttgcttataatgagggttactgccagtaaattcacgccctgcttcaaatctgctctggtgcatgtttcatcttaaaatagaaccccacagtctataaatc

SEQ ID NO: 331392 - DNA, 625 bp, Homo sapiens
ttcacatgaaaagggaaaatgagttgttgatatctataacacagcatgagattgaagatttttagcttgctggatttactaaggctcctatgtgatcccatcctggatgaccttgtatatgccatcactcatgggatccttttcagaagtcacgataaatttcagtaaacaaggttatgggagcactggcactaaaaggttccatgtatttatgatgtgtaacatgctgtgacatgggtgttgtcaaaagcactggacaggaatattgcatattgcctataataaccacttacaaggaaaaacctttataaatttctggattgtcaagcaagtagactttattgcaaataacaaattcatttctgtaataacaattttgttaaaccctcatggaaattgaattataatgtagrtaattatgagagaatgagctgtttggaaaaacttagcacatccctgtctttgaaggaaacaaaacatcacctaactgatcgatgttttaacttctcactttagcacatccacttgcttataatgagggttactgccagtaaattcacgccctgcttcaaatctgctctggtgcatgtttcatcttaaaatagaaccccacagtctataaatc

SEQ ID NO: 331393 - DNA, 511 bp, Homo sapiens
tcacctaactgatcgatgttttaacttctcactttagcacatccacttgcttataatgagggttactgccagtaaattcacgccctgcttcaaatctgctctggtgcatgtttcatcttaaaatagaaccccacagtctataaatccttatacttttttcttgataactcttaaagttgtggtcagaattaagtaagtcagtaatgtgaactacctgtatcaataatycagttaggaaagatcatttatcctccctgtagattatctgcaaaaatggcctcccacaattccattcatctttaacacacatgccatctttcccaccaagaggtgtagtctatttctccagcccttaagcctaggctggactcatgactctctttgatcaataaaatggagcagaagggatgttatgtgacatatattaatatttctgggcctataccttaagagacgtggcaggttctgcatttggcctcctgggatcctgccttcatgtcaagaagcttgg

SEQ ID NO: 331394 - DNA, 576 bp, Homo sapiens
ttgtgcaaatgtcaactcatgagggcggcctcagctgacagccaatagagccctctcccagcctcccaccccgttattctggatgtcccttacccttaatttgtttcttgtcatataaaacattaatctgcttgtcattccccctctgaaaggtcaactctctgggaagcaggaacttcatcattcaggtggtcaaggaaggcctctctgaagaggtgacatatgagcagggacctcagtgatccctgaaagacacaagggatgaagctggaggaagagcagtcctgccaggacagaagcacaaagaccatgagacaggacccagcttggcaattctgtacaacaacaagggaaaagttttctaataattttctagtaattctaaaatgttggcttgttttcttcccagaaaacaaacaagcttctctttcagatgcagtttattatttttcatagttagrtgaagactttgtattcttatagatttgcattcaaaagaatgtcctctgatcatggacatggaaagatacgtggggccagtagaaatattgtgaaagacagtacttctgggaaaaa

SEQ ID NO: 331395 - DNA, 284 bp, Homo sapiens
caggcccatctatcacctaatgtacaggaaaagatatcataaactattttgccccaaggtgacagcaacttaatacgctaccttctccacagatgtttccattacaattttattttgctgaaaaacttattaaggatctgccatgaaccaggctttctsttcactgattacatttgtcttattcagtaattcataacaaagtgagactactaggtttaggtttgggatggagacacaggtactttgaaaaaaatacatatttttaattactttattttctgttc

SEQ ID NO: 331396 - DNA, 614 bp, Homo sapiens
gaagcaagttactaggtccatccttcctaagagaagaggattacacaagaccatgaaggcaagatgcagggaccattaaaagccaagcatccttcaaggagtatcctcacttcacaggggcttctatgtgttcagagaccaaacttaaagccagactgtcttatgacagagttataagtacagaaactgatgatgcagttaaatccctttagggagggaagggttttccaaaacctagttagctccagaattttcatatattaggggattgtggtcaacagtctttagagggtgaaaacttgatttgtcttaaagttgcatttacctaggaagcacattctttttacttagcttgttgatgagctattgaggggtargtatagtaaaaggacattatgatgtcattagatcttttccaagccgcatgtgtgccagcatcagaactttttgaatcgtaacacaaaagccacacctttctttgtctaaaggaagattgatcttagacccaggtcttcctatccaagccaatgagggcactcttacctggcaccactgcttaggaacataagtgcctttgaacctgtaggaattatagctagtgttcagagtagaca

SEQ ID NO: 331397 - DNA, 593 bp, Homo sapiens
aaggtgctttattctaaaaaatagtttcacttttttttgagaagtatctatagaaggaactattatttattatgttttagggccttttttccactacatagaggggtacaatctagattttgcatgtttgctatttactctcaaataagtacctctattttcctttccatataaaagacaatgtcagattgtccctggagaacaataggcactggcaagtagcctgaagatctccttcacgtgcatgtttcccaggtggaggaccaacgcagaagtggagagtaaatcaccaataggggattggttttggcaacatgagaatttgctcagcttgattcaagttgtgtatgtgccaagttcactcaaacacaacacataacctgccatctagatattaagccaggatatgtgatgtacagagaaatattatatgtcagcagagagctctgctacaaaacttctttccatcaccaaaataacaatagaaaaattcatgctttttcwattgcacatcagtggtcctgatcttcaaaattgtaataaatcttccttaatgttaattcccaagctaattatgaacaacctgagcacaa

SEQ ID NO: 331398 - DNA, 582 bp, Homo sapiens
atgccatttttttaatgtgagaaaagtcagtgtaatttccgttgaacaagaaaatgataaaaccgacagagttaagaaatgtagaaaggcttttttgtttggttgttggttttttaatatgcagcaaaaccaaaatcagggaaagaataatttgcagctcatttgcacacagtgaattagtggtaaagcagacaaytgtgcatgggtttctgattcctactgtgtctgtgaacaagtttacaaaattcctatttcacagcatgagtagagttgagtatcaatgcacaagtttacctaagagcagaatgctactaatcctatatttcctgtttcttagaccttctcacaccgttgatttcaagcctatagttaggtttaaaatggcttatatcttcagataaattcagggtagtgtgaaggcttagacctcaaatcaggattaatgtcctcaaaaggaagaatattaaggaggtttagggtccaagaatatgttgagaaaaagttaactaaaatatatatgtctcagctcatagtcatcttatttctgctgtcttgttaaacatcatttgtgtggaggttgag

SEQ ID NO: 331399 - DNA, 595 bp, Homo sapiens
tctataaattcttagacctcctcagtcatttgacaagtctttgttgcacatccattttgtgttaggtaccagctaagtaatggggcacaaagatgaaaaacaaacaaacgtgtggtttctgccctgatggagttgacaaaccaatgtgacagccagacatcgatcatataatctcaaagacttttgtttaatttttaactttgtatagtatgtattttttggctaagcaagtactataaagatcagttgcaaatatttgagtcctctcatgtactttaatatggattttttgaaaatatttataaatatattattcagaaaaaattctagatgtaaaaattttattagattttgttttgaggcaagagaaaggcattttatcttctggtaaaattccattgcatcttatatgcaatgaataacagtggtgatgcaattaatgatgaaagcaacaacaaaaagcaatgacccataatctgccttttaaaaccactctgttgagatatgactaacayacaaaaagcttcacatatttaatgtacacaatttggtgcacttggagataaatgtgaaatgaggaaaccaagaactgtac

SEQ ID NO: 331400 - DNA, 550 bp, Homo sapiens
atgtagattgtttccaggtcttgatcccatactccgtaaataygctccaattcagcaagaatcaagttgggaagagtatttggctgtcttttggatttattattttgagattcatttattcttctcaaataacataataatcccatgaaaaacttcaggtttgatatatgtggaaagattagtgcattgcctgttaggtggacattcagtaggttcccgatatcaatgcagttatcagtatttcctcctgcatgtcagctgtatttgatttgcatacctgaattactaatatttgtatgtgaccagtatttcaaaatggttgagaataaaagtaccttatactctaaaaatgtaattgtagatatgtgaaataatcattccttattttgataacaatttatataaaaatcttctttacaattgatgatacttaccaaaaagtaaagttgcaatgggaatgctgtggtattctcgaatcttatgctatatttctccttgtggttatgaaggaagatatttcccagcatcacttgcactaaggttgaggtta

SEQ ID NO: 331401 - DNA, 576 bp, Homo sapiens
gtttatatttttgtcattgttgcttatcacaacaaagaaaccacaaaaagaattaccaattatggacctgctaaaaatgtccagtaggaaagatgcctatcgagcttgaaaatcattccttctgcatatagcacaaaaggaaaagaaaaaaaataccaggttaacaaaatgaaatatagaaataaactggtagtagagttaatgataaaatagttactgatatattatgtgaggcaagaaattaacaaatctgactccctaatattctgtttttcctctcactatctgctgaggaaataatcytaattttggaggcctgttagattcgaagtggtgagatggttatttctgagttctcatctattttgaaaaaatgttgacaccgttaatattgcacttttatttaaactttctcaacacttgatgcccagggaaatattttatcaatagcttgaattcttagaacacttctaagtctcctttactttttattccacatctctctgaccactgaattttggagtttataaggactctgtcctgtgcattttctccacacacactcattgacatgat

SEQ ID NO: 331402 - DNA, 601 bp, Homo sapiens
gaaattaacaaatctgactccctaatattctgtttttcctctcactatctgctgaggaaataatcttaattttggaggcctgttagattcgaagtggtgagatggttatttctgagttctcatctattttgaaaaaatgttgacaccgttaatattgcacttttatttaaactttctcaacacttgatgcccagggaaatattttatcaatagcttgaattcttagaacacttctaagtctcctttactttttattccacatctctctgaccactgaattttggagtttataaggactctgtcctgtgcattttctccacacacactcattgacatgatggtctttataaattccagggtctaaatgtactcaataaaatagtttttttttcccaaagtgcatttccctttgtgttagtggattacataattggttttataaattaagacaaacatattttattaaagtaacataaattmctaaaaaaaacacaagaatagtttaattgaattattgtacttcatcaaatttatttttttcttgctttgaagtaaaaagaaaacagttgacaacataaaagacaatgtttgaaaatcataa

SEQ ID NO: 331403 - DNA, 566 bp, Homo sapiens
aagcatgtgggaattggaacctacatacattgatggtaggaatgtaaaatgatgccattgttgtgtacaatagttgcacagttcctgaaaagacaaacagacgtactatatgccccagcaattctactcctaggtatatgccaaggcaaattaaaaaataaattcacgcaaaaacatgtacacaaatgtttatagcagttttattcataatagccaaaaagttaaaatgatgttcttcgattgatgattgaataaacaatgtggtatatccatataatagaatattatttagacacaaaaggaataaatacctgctgyaaaatggatacatctggaaaacaatatgttagctgaaagaagctgatagaagagacatgtatgatcccattaatatgaaatgctcaaaataagcaaatccacagagatacatcatagattaatggtacacagaggctatggaaagagtggaatggacagtgattacaaatattttctgggtctgtctattaagctgataaaagtgttctaagattatatagcgctgggggtcaaacaattttttggat

SEQ ID NO: 331404 - DNA, 622 bp, Homo sapiens
gagtatgctgaaatatgtagctaccatttccttagaaaaattgggggtagagtagattgaggggtgaagggtcaggagtttaatttcaatgtgtaaaatattattacatttttattgctgtgtaaaaaactgctgacaacttagaacaccaaccattcattacctcacagtttgggtaaatcagaagtctgggcttgacttagcaggaatctctgctcagggtctcaaagggcagaaatcaaggagtcacccacactgaggtctcatatggagctcagtgtctttttaaaagtttacccaggttgttggcagkattctgttccttgaagttggagaaatgagttcatgctttcttgcttgctgttaatcagagattgttcgcagctcctgtaggccacatgctgttgttccacgcaggtgttcctctctataacataacagttctttgttcaaggccagcaggagactccccctagtcagctaccaaggaatcttctataaagtaacataatcatgaagtgactatcctagcaccttgataacataacataacataacctaatcaagagagaagtcattctattatgctcacaggtacctacacagtcatagggagagaatt

SEQ ID NO: 331405 - DNA, 551 bp, Homo sapiens
aaaaccgtcttgctttgtctgttaaaaacatctaggcacccatcgtagacaatgttagtattaccaggataaccatttattgtaatattgcaggtcaaaatcaatgatacctcacattagtttttcattgtgatgggaagttattaatgagtagctgctaaagtgccaacctgataataagtggatccctcttccatccaaaaaaatagaaaaattaaagaagaaaatgaaaaaggaaacgaaagaaatatatctattatggaacccagaaaattctggaattgatgagcttgatgatttgtcctatgaatatgtacatgagcagatgaataccatgtcttgtcatttgttgttcaattaaaggagcacatctgaggttcaagtatcaaggaaatatgctttgaatggcagttgttcatactttgtcatttaacactcagctgtcattggtgtcagactcatttcactactctmtatgataagaaaatagtttcatcaatccttgcccttgcctgtgtaatattcaatatttgaaatataatacaccatcc

SEQ ID NO: 331406 - DNA, 586 bp, Homo sapiens
cccatttcatagtttggagaagaccaagcaaaacaattcaatctctggacatttggaaaggctttattacaatgaattcagccaaaaagagagtcatcgaagtaggcctctgtgacacttttgtcagagttctttcagtgactgtggataacagagaaaaaaatagatgaagttttctcccaggctatcctgcytgtgcaggctgcattccccagtacattgtccagaaataaatcttccctccaggttttcgccattcttgctcactgagtagttcagcactcgggacacactttggatggctaagtgtcctttcaatatccatggctatgagttaatttaataggtatttctatataacgttgccttggccatatctttcatggtatgacattgtccagtgataggatttaaaatgtatttgtaggtcaggcatggtggttcacacctgtaatcccaatatttggggttattgagatgggaggaacagttagggccaggagcttgaaaccagccaggacatagagattccatctttacagaaaataaaaacaaattagccagatgtggtggcacacagctgtag

SEQ ID NO: 331407 - DNA, 617 bp, Homo sapiens
caacataatactgaatgggcaaaaactggaaccatttcccttaaaaactagaacacggtaagaatgccctctctcatcacttctattcaatatattaatactactggaagtcatagccagaacaaccaggcaaaagaaagagaaaaaaaggcatccaaataggaaaagaagaagttaagctacctgttttctgattatataattttattcctaaaaaactttcaagattctgccaaagcctcctacaactgctaaacaacgtcggtaaaaattttcaggatacaaaatcaacgtacaaagtcagtagcataacatttatactaccaatactagtagaccataaggcccaggctcagagccaaatctagaacacaatcctatttacaatagccacaagaaaatgaaatacgtaggaatacagctaaccaaggagggaaaggtctctacaaggagaactgcaaaatgctgataaaggaaatcagagacaacacaaataaatgggaaaacattccatgttcatggattggaagaatctgtattattacaatggtgaycctgcccaaagccatttacagattcaacaatattattgtccaactaccaagaatattcttcaa

SEQ ID NO: 331408 - DNA, 610 bp, Homo sapiens
ggaggtaaacattgaacacacatgggcataaacatggggattatagatactgtagactactatagaagttagaaggagagagaagaaatggacggaaaaaccaccgattgggtactctgctcactctctgggtgatggcttccctaccccaaacctcagcaacctgcattatacccatgtaacaaacctgcgcttatgtacctgtatytaaataaaagtttaattaaaaaaaagttaaattaagaacaaatgttaaaataagaaatatcgaaaactcagcagtgcctgaaatgtttaaacatttaccacttgatacaagaataaataaataactttggtattaaaaagtttatgcaatgcccaaatttgtttgaaaaagtattttatcttatattaatggtttctgcaaggtatttttgttcattactctctcaaataatgttcatttcttttaagaattcttagtacttcattgtttttttcaatgattgctggtatcccagaaagattatttttaattctgcatattcccacaggggaacagtcatatattggtgtagcacttatgtctgtagatccctagaggaataaatgctgataaagcctggaa

SEQ ID NO: 331409 - DNA, 578 bp, Homo sapiens
aaatgtaatacaaaatgaatgtaattttattaaaaatactgttttactaacaaaagtggataaaaacaatacattttaaaattattcacacgacatttactataaagtcctttgatgtttacttaaggttcatatcttcaaggatcgaacattataccgtaccacaataacctataccaattttctaatttgaaaaaatcttatagcagcttcacatatatatggatataattttgccctccatctgctatgactattttgtttaaaaattgtatgatcataaatcaggttatctttcactagtcactagtgaggttattggcaawttggtccctatagtcctgtcctagtttctgccctatggttatttgctatatgtagtatttcaagtctgatgtgttttttgattgttttactttctctcccctccctcctttcttcctttattctttctttttttccttgttttccttttactcgtccattctcccttctccctcctcttccctcttctcatccctcttctccccttttcttttctttagcatattgttaaccaaataatatattgaagtcag

SEQ ID NO: 331410 - DNA, 578 bp, Homo sapiens
gtcagcagagctggcaacccagccccagtacttcaagctgtcccaggcctgaaggtggggcttcatcgggggaacccacccttttccacccagaagcctgtctgcctccagctgccatcaacctgccataccaatgcccaggctgttggtgctatgggatgcctgcaggcctgtgccaatctactcgcaaacctgccttggcctcctccccatgctccttggtgcccaaagtctagacgggaccaaggcagcaggakgctggcatgtcagtgctgcctgagccagtgcacacctgaccgggttatgacagcagccaggctcagccacaactttgctccaatatcggggtggacaccgggagcagagagaggccaggcagcaggagcaggcacttttaagcctgcagaggtaagagtgattctggccccccaagagtggaaaggtgcttgggtccccagcaatggctgggcagctgcagctgcacctaggaaggcggggctcctccccctccaactcagaaggggatgaggcttccacctgttccaggctcctgccagctctgtagagtgtggggcctg

SEQ ID NO: 331411 - DNA, 597 bp, Homo sapiens
tcgggggaacccacccttttccacccagaagcctgtctgcctccagctgccatcaacctgccataccaatgcccaggctgttggtgctatgggatgcctgcaggcctgtgccaatctactcgcaaacctgccttggcctcctccccatgctccttggtgcccaaagtctagacgggaccaaggcagcaggaggctggcatgtcagtgctgcctgagccagtgcacacctgaccgggttatgacagcagccaggctcagccacaactttgctccaatatcggggtggacaccgggagcagagagaggccaggcagcaggagcaggcacttttaagcctgcagrggtaagagtgattctggccccccaagagtggaaaggtgcttgggtccccagcaatggctgggcagctgcagctgcacctaggaaggcggggctcctccccctccaactcagaaggggatgaggcttccacctgttccaggctcctgccagctctgtagagtgtggggcctgggccatttctcccttactgtagacaacgtcatggcagcagccaccactaccattagtaccttaaatgatttttagtacagtcaa

SEQ ID NO: 331412 - DNA, 597 bp, Homo sapiens
tcgggggaacccacccttttccacccagaagcctgtctgcctccagctgccatcaacctgccataccaatgcccaggctgttggtgctatgggatgcctgcaggcctgtgccaatctactcgcaaacctgccttggcctcctccccatgctccttggtgcccaaagtctagacgggaccaaggcagcaggaggctggcatgtcagtgctgcctgagccagtgcacacctgaccgggttatgacagcagccaggctcagccacaactttgctccaatatcggggtggacaccgggagcagagagaggccaggcagcaggagcaggcacttttaagcctgcagaggtaagagtgattctggccccccaagagtggaaaggtgcttgggtccccagcaatggctgggcagctgcagctgcacctaggaaggcggggctcctccccctccaactcagaaggggatgaggcttccacctgttccaggctcctgccagctctgtagagtgtggggcctgggccatktctcccttactgtagacaacgtcatggcagcagccaccactaccattagtaccttaaatgatttttagtacagtcaa

SEQ ID NO: 331413 - DNA, 549 bp, Homo sapiens
gccatatccattaaatgaagctaaaataacctgagaggggcgtggtcaaggattggaagactcaatatttaacaatcttctcaaaattgttctayagatcaagtcaattcaaattaaatcctaacaggcttttctgaagaaacatatgagcttattttcaactgtacacagtatgctatagaactatagtaactgaaaaaattacaaaaataagaacaacttaggatgacttaacataaagctaaagcagtcaagcagtgtgttttggtataaggaaaaaaatatagattcattagactcagatctgaacagggcccagaaagagatctatacttatttagtcaactcgttttcaatataggttagttccatatcttggtgtattagtctgttctcatgctgctaataaagacataccaaagactgagtaatctacaaaggaaagaggattaaaggacttacagttccacatggctggggagaccttacaatcatggcggaaggaaaaggagaagtacaagcatgtctcgtatggtgtcaggcaagaga

SEQ ID NO: 331414 - DNA, 600 bp, Homo sapiens
tggcaaattatgttgaagaccttgacatatgctataacctttcaccccatttacagtattagaaatatctcaggaaaccaaatggagctattagcctaaatgtttgtatatacaaccctcttataagttaaaagttgctttgtcaaaatataataacgagaaacagcagcacactgctagtttcttgtgaatagcatactttacacgttttactaaggtgggaactgttaaaacattttactaattcctcagagttttcttctttttttttctcaccaaattcagcttagatatcaataaatactaagcataaggcatattcatgggccatgtcttctactttttygctttaatatagaattaaagcttcccagaatataaagtaatttatttcaggcagctgaataagtgcctttgtatgtagttccagagcagataaaaacaaagtactttctaaagccaagttgttgaacagcatgggatgctaagcatataaagagtgattgcaaaaatattctgaagcaggatctcattgcagctatttcttctaccctcttactgtgtttgcttactgcatttttcctctgagtgacattttct

SEQ ID NO: 331415 - DNA, 600 bp, Homo sapiens
tggcaaattatgttgaagaccttgacatatgctataacctttcaccccatttacagtattagaaatatctcaggaaaccaaatggagctattagcctaaatgtttgtatatacaaccctcttataagttaaaagttgctttgtcaaaatataataacgagaaacagcagcacactgctagtttcttgtgaatagcatactttacacgttttactaaggtgggaactgttaaaacattttactaattcctcagagttttcttctttttttttctcaccaaattcagcttagatatcaataaatactaagcataaggcatattcatgggccatgtcttctactttttcgctttaatatagaattaaagcttcccagaatataaagtaatttatttcargcagctgaataagtgcctttgtatgtagttccagagcagataaaaacaaagtactttctaaagccaagttgttgaacagcatgggatgctaagcatataaagagtgattgcaaaaatattctgaagcaggatctcattgcagctatttcttctaccctcttactgtgtttgcttactgcatttttcctctgagtgacattttct

SEQ ID NO: 331416 - DNA, 600 bp, Homo sapiens
tggcaaattatgttgaagaccttgacatatgctataacctttcaccccatttacagtattagaaatatctcaggaaaccaaatggagctattagcctaaatgtttgtatatacaaccctcttataagttaaaagttgctttgtcaaaatataataacgagaaacagcagcacactgctagtttcttgtgaatagcatactttacacgttttactaaggtgggaactgttaaaacattttactaattcctcagagttttcttctttttttttctcaccaaattcagcttagatatcaataaatactaagcataaggcatattcatgggccatgtcttctactttttcgctttaatatagaattaaagcttcccagaatataaagtaatttatttcaggcagctgaataagtgcctttgtatgyagttccagagcagataaaaacaaagtactttctaaagccaagttgttgaacagcatgggatgctaagcatataaagagtgattgcaaaaatattctgaagcaggatctcattgcagctatttcttctaccctcttactgtgtttgcttactgcatttttcctctgagtgacattttct

SEQ ID NO: 331417 - DNA, 600 bp, Homo sapiens
tggcaaattatgttgaagaccttgacatatgctataacctttcaccccatttacagtattagaaatatctcaggaaaccaaatggagctattagcctaaatgtttgtatatacaaccctcttataagttaaaagttgctttgtcaaaatataataacgagaaacagcagcacactgctagtttcttgtgaatagcatactttacacgttttactaaggtgggaactgttaaaacattttactaattcctcagagttttcttctttttttttctcaccaaattcagcttagatatcaataaatactaagcataaggcatattcatgggccatgtcttctactttttcgctttaatatagaattaaagcttcccagaatataaagtaatttatttcaggcagctgaataagtgcctttgtatgtagttccagagcagataaaaacaaagtactttctaaagccaagttgttgaacagcatgggatgctaagcatataaagagtgattgcaaaaatattctgaagcaggatctcattgcagctatttcttctaccctcttactgygtttgcttactgcatttttcctctgagtgacattttct

SEQ ID NO: 331418 - DNA, 621 bp, Homo sapiens
tctctacacatttctcttagattgtcttttaaagccttaaactatgaataatagctattttaagagcctttgtgagttaaattaatctttgctataatttctagcttgttcctaatgacggatatttttaatggcattgagtaagatttttctgtgtcttggtatgttgagtgatttttgaaactaaacatgaggtctcttgactctgactagttagaacttgaagtctgatagcaacatacaagatctgaaaattgctcaatttacaactttctgatggattattgcctagctttgtggagtttttctacactcatgctcaaattcaggaaaggctcaatgataaccaaatkaagtcagtatttagtaaaagctaaaagacacttaatttctatttgtggagctattttcctgcataatttctttctctttgaatactccattccaccaatcccatctaactaagcctcaacagaatctgttccctttgttatcaactaagcaggaccactctgctcctcttgggttcatctctcctgtgattaagtctggaaagtgacataaggtggaacactggagcaatctgagggttcaccttactgatatcccttatttaattga

SEQ ID NO: 331419 - DNA, 604 bp, Homo sapiens
ttggattcctttgcctacttttctgtttggatcactaaagaatcttccctaccgccatcagaattgcttcagctgtttgatactctgtcaacatctggaaaggagagaacggaaaagagggaaatacaaaaggtacaatttgaactcaaaagacagtattctatttatttatttatttatttatttatttttccatgattttatgaataatttcaacttttattttagattcagggggtacatgtgcaggtttgttacctaggtatattgcrtgatgctgaggttagggtacaaataatcttgtcacccaggaaataagcatagtacccaaaacatagtttttcagcctttgtctccctcctactgtgtcccctgtaatagttcccagagtctcttgttctcatctttatgtctctacgtaaccagtatttagctcctacttataagtgagaacatgtggtattgggtttactgttcctgctttaagttacttaggataatgacttctagctgcatccatgttgctgccaaggacttgatttcattctttctatcagttgcatggtattccatagtgtatatgtaccgcattttctgtatccag

SEQ ID NO: 331420 - DNA, 566 bp, Homo sapiens
tgtaaattaaccatggttttcatctaagatttctaaaacatagccccagttaattatcaagtacttataatatgatattgaaggtattttattaaatatctataaatggaacatcagcaactaaagagcagggaatacattttatacatatctacatccaaaatatccagtaaagccacattatctgggcttcaggaatatgtgtttatgtgatttagatttttatttatctgtcgtttctgcataatttgattattagccaatttgcatgtatacattatgccataattacttttctctcaaatccctaggatatttattaaacaattaattattaacatgtcatactactgcacaactcctcatctattgtagtagtgtttgatttcaatgatagatactgaaaaaactacattccaaattttgatttgtctcwacacaaacataaatagtactttgggaacaaagtttctcagctacacataaatacttttagaactctgacatttcatcttgtgtaaacatttcacaaatccttcacctgatcctttagatcattctgtagc

SEQ ID NO: 331421 - DNA, 523 bp, Homo sapiens
gagtggctctctacctccagtgactgagtgaccagcagggccttagatttaagatttactcatagtacatttcayagtctgctcctcctccagaaactttcaccatgcagattgattgagagacatgtaaatcatttatgcaaactacacaggtaatcagaatgtatcatactagtgtcactgcacccctgctgctatgcttaagaaaagaaaaatagactccaatggactgacttacacaaagtttctctgttaaggaaaaaaaaaaagacattttaaattttattttgagtttttaattgctttgcttttgttttaattttaattttaatttatcaatctctctctctttctctatctctttcctctctctttccctctctgtaaactagctatctgtatgaccattttccatgcaaagtatttaaaaaaatagactacatttcaaaactgtcatgaccagaaatattatccaggagaacggagtgagagatttcctttttaaacaaaacaaaaccttgtg

SEQ ID NO: 331422 - DNA, 597 bp, Homo sapiens
gttggggattaagttacaatgtgagttttggaggagacacatattcaaaccatagcagtcacgaatctstgaataccacgctttccaaagtcttctattaaaatcgcagttaggattgtaaaactctaaagattcatcaagttctttattgccctcttaagctgaaatggactgacatcagagaataataatgtgagtaatattaaaaataaactgttcaaaatttattcagaaactgtgctgaagtggccagaggcattgccaacagcttttatgaacatgagatctataaatagcagatgatagaatttaacctatatattattattattagatctgtcatgagattttcaattactgctcccaaaacaacatccatgcagaacactaaggatgatctattacattggagtctggtgaaacttaatacaaacattccattctcaagtgaaaggctcactgcatacttccatgttcaatgctgatggcaggactcacattcatgaggagctgcagagaaaatattttttgggggttttacataattagggttattgaaacaaatattgttaaaccttagaataggggctaatatac

SEQ ID NO: 331423 - DNA, 621 bp, Homo sapiens
ttgctgtaaataagtaatttttgttgtaaatgaattataatttgctctattccagaaaaatgtctgcattcacaataacatcatagttatgtatatttaaatcttaacaatccaagttcaaattaactatagccatgtgtcccttaacaatgggcatatgttctgagaaatgcatccttgagcaatttgtcattgtgcagactttatagagtgtgcttacacaaatctagatggtttagcccattggtccccaacccttttggcaccaaggaccagtttaccacttttgtggaagacaaattttctacatcagtcagaggctggggggatgtgatgggtggtggggttggaatgatttagtcaggcattagttagattctcataaggagcatacaccctggatcyattgcatgcgcgcttcacaatagggttcgaagttctaggaggagataatgccaggctgatctgacagaaggcagaactcaggcagtaatgttcactcacccaccactcacctcctgatgtgtggcatgtttcctgacaggccatgaaccagtacttgtccccagcctgggagtggggacccatggtgtagtctactacacactgtataataggcta

SEQ ID NO: 331424 - DNA, 565 bp, Homo sapiens
ataataataatattagaaacaaattgactacagaagaaaaccaaaaaataaattggagtacgtaaaaattaagaaattaaaaaatcaaaacawattcataaaaaatatcacattaagtgagttctggttctcaaatggaaggataaagggagggtggcttcaatctccctcacagaaaacaaaaacaaacacacaactttgagatctatactagcaacaatccagagctccagtgtgaggaagaaacagtttctggggccataaagaagtggaaaatctctgagcacgtggtagggaattagacttccacatctgtgatgcccctccgtccttattgtcggagcacaaagcatgtgaaaactctcccaccgacttagtttctacactggaaaaaataagactgatgtggtcagccaactgcattaccatcttggtttcactggtagaaaaccagtctttgctttaagtcatgggtagcattgtgattgtctgaagggagaaatattcctaaggacaggcagagacaaatcgaggaggtgggattatcatcctcagctccagaaac

SEQ ID NO: 331425 - DNA, 565 bp, Homo sapiens
ataataataatattagaaacaaattgactacagaagaaaaccaaaaaataaattggagtacgtaaaaattaagaaattaaaaaatcaaaacaaattcataaaaaatatcacattaagtgagttctggttctcaaatggaaggataaagggagggtggcttcaatcwccctcacagaaaacaaaaacaaacacacaactttgagatctatactagcaacaatccagagctccagtgtgaggaagaaacagtttctggggccataaagaagtggaaaatctctgagcacgtggtagggaattagacttccacatctgtgatgcccctccgtccttattgtcggagcacaaagcatgtgaaaactctcccaccgacttagtttctacactggaaaaaataagactgatgtggtcagccaactgcattaccatcttggtttcactggtagaaaaccagtctttgctttaagtcatgggtagcattgtgattgtctgaagggagaaatattcctaaggacaggcagagacaaatcgaggaggtgggattatcatcctcagctccagaaac

SEQ ID NO: 331426 - DNA, 566 bp, Homo sapiens
taactacagcaaaaaaaatcctataacagatttactaaaaatagacagccacaaattaaaacatactatcagagataatgacttgaccacaaagwaaaacagtaagaaaggaataaagagagaagaagtctcaaaccatcagaaaacacgcaagaaaatggcagtagggagtccttatttataaataataatactgaatataaatggtctcaattcttcaaccacatgaagtggttgaatggataaagaaataagacccaacaatatgttgccttcaagaaatcctcttcacctataaaaatatacatagattgaaagtgaagagtagaaaaagatatttcatacaactggaaaccaaagaagagcagaagtagctctactaatatcagataaaatttacaacaattacaggctgcaaaaaaagcaagaagggtaactatataatgataaatggatcaattcagcatgttgataaaacaattataaatatctgtgcacccaactctacagctctcaagtatataaaggaaatattcataaatctaaaggaacagaaaaaaatgcaa

SEQ ID NO: 331427 - DNA, 581 bp, Homo sapiens
aaaagttggtttcttgaaaacataaaatttacaaaccttttgctagctaaaaagaaaatgagataagaaccaagtaaaataaatccaaaataaaaaggtgacataaaaactgaaattttagaaatataaagaatcattagagaccattatgcacaaatgtaagccaaaaaattgaaatacctagaagaaatgaataaattcttggacacatacaactcatcaatattgaaacatgaataaacagaacacctcaacaaaccaataatgagtaacaagattgaaggcataataaaaactctctcatcaaagagaagcccaagacctaaagaattagctgttgaattctaccaaagatttacgaataactaatgacagtcctactcaaactcttcaaaaaagaaaaaactagaagaggagagaatatttacaaacttaatctacacggcagcattaccctgacactaaaaccagacaaagacacaacaataaaggaamactagaagccattgtcactgatgaatatagagacaaaagtccttaacaaaattctagcaaaccagattcaataacacattaaaaaa

SEQ ID NO: 331428 - DNA, 591 bp, Homo sapiens
accacctataagttatgggtagaacaatcaatcaccacatttaaaacatggttggaaatgatgtcccaamcagcaagaccccttgtgacataggatgatcagtctgatgtggatggatatgtcctcattattgggaataagatgcttttgaatcaaggctgttctgaacccactgcgtcaaaacctcgggaaggattatagcaattctgtaccttcattccagaaaaaagttcaatgctatttagaagaataaaaccaaatctagaacataagaaggaaaaatatatgaagcacaccatccaattcgaaacagggtgtgaaaataaagaaaaacaacccctaatcagaaaaaagcagttaattaaataatacaccaatgataaaaatctgtaaataagaatattcatagtggtattataaatatatgaaaagctattctatatgggtatacgctatatcaatatatatcagtagcctgaaatctccctggagagcaaaatccatgtttgactacctactcaggtttccacctgaatgtttaatagacatcatacatttaatatgtcaaaattcaatttatggtttctcacc

SEQ ID NO: 331429 - DNA, 591 bp, Homo sapiens
accacctataagttatgggtagaacaatcaatcaccacatttaaaacatggttggaaatgatgtcccaaccagcaagaccccttgtgacataggatgatcagtctgatgtggatggatatktcctcattattgggaataagatgcttttgaatcaaggctgttctgaacccactgcgtcaaaacctcgggaaggattatagcaattctgtaccttcattccagaaaaaagttcaatgctatttagaagaataaaaccaaatctagaacataagaaggaaaaatatatgaagcacaccatccaattcgaaacagggtgtgaaaataaagaaaaacaacccctaatcagaaaaaagcagttaattaaataatacaccaatgataaaaatctgtaaataagaatattcatagtggtattataaatatatgaaaagctattctatatgggtatacgctatatcaatatatatcagtagcctgaaatctccctggagagcaaaatccatgtttgactacctactcaggtttccacctgaatgtttaatagacatcatacatttaatatgtcaaaattcaatttatggtttctcacc

SEQ ID NO: 331430 - DNA, 591 bp, Homo sapiens
accacctataagttatgggtagaacaatcaatcaccacatttaaaacatggttggaaatgatgtcccaaccagcaagaccccttgtgacataggatgatcagtctgatgtggatggatatgkcctcattattgggaataagatgcttttgaatcaaggctgttctgaacccactgcgtcaaaacctcgggaaggattatagcaattctgtaccttcattccagaaaaaagttcaatgctatttagaagaataaaaccaaatctagaacataagaaggaaaaatatatgaagcacaccatccaattcgaaacagggtgtgaaaataaagaaaaacaacccctaatcagaaaaaagcagttaattaaataatacaccaatgataaaaatctgtaaataagaatattcatagtggtattataaatatatgaaaagctattctatatgggtatacgctatatcaatatatatcagtagcctgaaatctccctggagagcaaaatccatgtttgactacctactcaggtttccacctgaatgtttaatagacatcatacatttaatatgtcaaaattcaatttatggtttctcacc

SEQ ID NO: 331431 - DNA, 557 bp, Homo sapiens
gccccaaaaaacaacattgtgatggggcgggtggtcattgaggcttggatgagattttttggttggcaatagtttacatattatcacacattcattgcagtacagtaacactgactctgtagaaagaggagaataactctctgtgtgcgttatgctgtggaacctgccatagtaaccaaaactcagtaccttagcagtgaaaccaggtacatactgtcaacaataatgtttgtgtaatgcaacactgacaacctggaatggcctaatccatttctctatgtgtaaraagcaaaatgatcaatcattaacacaggtagccttcaagggctatgttcccagggtgttggctaggtgtcaatcatgtctctgcccaggctttcttggaaaacgaaaggaccaagcaaacaaacctgaagtgttaactttttccttcacagatccctaaattaatgagtctagaatgagaagatatgtattacttactctcttaattaaattatttattattttaaacatctgtattaagctgctggggttgcataaaaaaataccacaga

SEQ ID NO: 331432 - DNA, 423 bp, Homo sapiens
aattaacatgtctattataaccagatattaaaggacaacagagccaaagaaaaataaataatattgttacaaaggacaattgatagtgtcttttgattacaaatcatgrgattctgtgctttcttaaaatggacatgggaaaagttgttccattaggacattgatcaaataaaaatgtgtttgcttttactaaaaagaaaagcagaggaactgaactctagtataatttgtctgactacaatgggacagtatggcttttcagaaagacttctaaattagcttgattaatttacacacagtgcgtttgaattcttcctagatttgtgtgttatctgcatttgtgctttttatatgaaacttctcaagtgaaatgaataatattttctcttagattgtgaactgcttgaaatttccatttaaatt

SEQ ID NO: 331433 - DNA, 423 bp, Homo sapiens
aattaacatgtctattataaccagatattaaaggacaacagagccaaagaaaaataaataatattgttacaaaggacaattgatagtgtcttttgattacaaatcatgagattctgtgctttcttaaaatggacatgggaaaagttgttccattaggacattgatcaaataaaaatgtgtttgcttttaytaaaaagaaaagcagaggaactgaactctagtataatttgtctgactacaatgggacagtatggcttttcagaaagacttctaaattagcttgattaatttacacacagtgcgtttgaattcttcctagatttgtgtgttatctgcatttgtgctttttatatgaaacttctcaagtgaaatgaataatattttctcttagattgtgaactgcttgaaatttccatttaaatt

SEQ ID NO: 331434 - DNA, 658 bp, Homo sapiens
gggtaaggagtgtaaaaatcctctgaaaattgatgagaatccttagatgtaagagatcacctttggaaaataatgtttcctactgaaccatggtcaggtctctcatggaagaaagggagctctgaacatggttaagaattatctatgcatattaagaaaaagagttcagagaacagtagagtctactccataacttttataagaataataagtaaatgtgaatactataactaaaatcaggtactatacaaagtacagagacatagatatgrgtatcaagtctagaaattaattaaggcaacagaattatatataatataccagctaaaaatgctccttcacatgtgtgccttagacaaataccattatgtttgaatatatctctgttactttattataaggaaactctcagtatatttgttgttggcaaaagtgtgtgcttcttaaaatatgaatgtaggaagccaatatatggaatagtaaaaattatctcaaaaattataagatgcggttatgatcaaatcagatgaattcttggtataaaattgtagctcacctaaatctgaaaagtgacacttcttcagtgttaaaacagtagcaccctccccaatatatgttcacaatgactcgatgtgttccaataaatatacaaagaata

SEQ ID NO: 331435 - DNA, 443 bp, Homo sapiens
atccccttgctgcccaccttccgcgggacccctggatgctgccacgttcccacccacaccactgccgcttgctctctgcccttcaggcctgggggtcgctccccttccactcaccacctgagttttctctctggtccggctccttggctttcctccgaagcaggggcttttctgagcctgggccttgctatggtagctgggttgggacccccgtggccaacggggtaagaggaggaaaggtgtaattaaacactagtttcttctccagaaatgctaatcgggaaaagcaattaaaagcracttttttttcccttagtaatctgtgttaagagctggtaatgaagtttagggccgttgtgactcaatatttcagcttcaccgactcaagtcaaaacaatccgagcccaggagtttgccagcagctgagctgggcccgggcagca

SEQ ID NO: 331436 - DNA, 567 bp, Homo sapiens
ccattcttttgttattactcttaaaggaatatttgacctttaaaattatttatatgtattacttttataaaaacaaaatatgattagataaaaaagctgaatttgcttggtcaactgtaagtgaaaaaaatgagtaaaatgtagtttttaaattatgccaggtactaagacygatactcaatttgtgcctataaaccaaaaataaaattctaagctccccatctgactgagggtccttcactcagccaagggcattccaaagctaacctgaaaaactagttcaggccatgatgggacatggggggttgaacatgcctcattataccctcctccctttggaattcaggcccagctgaccagcattaacatcaaaacagagaccttaagactgacagaaatgataggaaacatttacaatctattatttctgaagcccactatctggaggcttcatctgcatgataaaaccctggtctcaacaatcacttaatcttaacccagacagtcccttctactgattttcatgtttttagataataactctttcaaccaattgccagtcagaaa

SEQ ID NO: 331437 - DNA, 601 bp, Homo sapiens
tgatcctcccacctcagcctcccgagtagctagggctgcaggcacacaccactatgcctgggttttttgtttgtttgtagagatggggtttcaccatgttgcccaggctggtctcaatctccygggctcaagcgatctgcccacctcagcctcccaaagtgctgggattacaggtgtgagctacagcccactcagcctcctaaagtgctgggattatgggtgtgagctacagaggcccagccagaccaaggttcttgttatgcagatgaagcctccaggtagcagctttcagagaacatagatggtaaatgtctcttttcagatcttaaaggtgacaaactcatttaatctcctctagatcccagaaagacctagaaagggaaggcttggccacattaatggagatatctctacagatgcaaattccccccacaagagacagttttgcagggtaatttcaaaatatgtcaaagaaatatatttttggggtaaaatatttctatcgccttcagggtctgctgtcatgtgatgctacaccagaatcagtttggaatttgctatcttatgtgccactctttgtggcaacaaagtctattttatc

SEQ ID NO: 331438 - DNA, 625 bp, Homo sapiens
actgctactacaatcaaaatgaggtctgcttttgattctggaaagactgcattcacttgtggtgacattccaatcagcgcacagttagtgaccacagatataacactcatcgtttcaaaagccaactaaaagaaaaaagaatggaaattaaaaattgcaatgactgcttccatatttcctcatccttttycatgttatctaaaaatcaaggaaaatgtcttaccctagttctaaacattccaagtacattttaaatttttttctctgtcatggtatgatttttttagctgaaaaaaaagccatactgttaggcagtattttagatacttttggcatgaatatcccaaagcagtatgttctatcttcctaattggaggcagccctggacctgaattgggaatactgttaaagttactctactcacatctaaggggaatctaaagtagggctgccagggaaaaatgtttcacattaaaaaacaggtaagatttcaaacagaacttatgttgtgaaaccatccttctactttgacatcacacaccacatctgactcagctataaccagctttataatcaaggcaccagtgataaatggtgatccttttctagcatcatttagcaaatc

SEQ ID NO: 331439 - DNA, 592 bp, Homo sapiens
gcaggaggatttggtcctttggctggggtttgccatcctttggtatagattgtatagaaagactgaaaactctatttaatcagttaattaactcatatgaatttgttaaaagatgagaaagcatcacaaaatgtgtgcctcaataacataatgactaggactcttctctggagtttaaaaggaattctctggcagtgtcttcaggccctatgccctggtggtcaccctgagaagacgtcttcagggcagggctgtgtctatgacccagctcaccttgctccactccaaccaagctccattcctagtgtgctgaggatccacacagggaatgacagggaaccactwatatcacaaaaggcctaggcctctgggctgcctgcatgggtgactttccaagatcagtcgagtgaacaaggagttggtcttaaaagatgtacagcaaacccttgaagctttgctgaaaaaacaactcacaaaaagcagattaacaggagaaaagatgtgatatggattcagttaatgagaactcagggaagtgaccagcagttaattgttttcttctttggtaggtctggactttaggcagacaagg

SEQ ID NO: 331440 - DNA, 533 bp, Homo sapiens
cagaagaatgaaactagacccctctctatcaccacaaacaaaagtcaactcaaaatggattaaagatctaaacataagacccaaaactataaaactactagaagaaaacataggggaaatactacaggacattggtctaagcaaagttcccaccattttatggctaggacctaaaaagcacaggcaacaaaaccaaaaatagacaactgtgactatattaaagaaaaaagtttctgcacagcaaaggaaacaacacagtgaagagacaatctgttgaatgggagaaaagatctgcagactaytcatctgacaaggaactaatacctagaataccagaatatacaaggaactcaaacaataccaaaaatacaaataatcccattaaagtaggcaaaagacatgaatagacatttctctaaagaagacatttacatagccacaggtatatgaaaaaatactcaacaccactcatcatcagggacatgcaaatcaaagccacaatgagatatcatcctactccaaatagaattgct

SEQ ID NO: 331441 - DNA, 534 bp, Homo sapiens
agttgtcttcagcagaagagtttgaaccctttaatctgctgtcctggaagtggaagtcttggcttgtgttcatagttaatgtgtcactttgaggatgtgtagttttggaggaaatgtatagtagtggttctgcctagctgagatgggtactgtagagagttccatataattacaccttgactacccattacccactaacakttttctttttctgtcttttttttttttagtagttatattcagtccagttgtctgcttctatagatttaaccccgagctatcctttcctcttcattgtcattgttcagaccagtatcagctttttctagactcctttaatggccccctaactggcctcccacactctaggctgactctttgtgatctgtaatagctccctaccgactacatcagttctctgctcataatgaattggtgactcccattgtatgttagacaaagcccatttcctttgtaatctgggaccctagttggataccagctcattcccacccttctttcctcctacacaaa

SEQ ID NO: 331442 - DNA, 534 bp, Homo sapiens
agttgtcttcagcagaagagtttgaaccctttaatctgctgtcctggaagtggaagtcttggcttgtgttcatagttaatgtgtcactttgaggatgtgtagttttggaggaaatgtatagtagtggttctgcctagctgagatgggtactgtagagagttccatataattacaccttgactacccattacccactaacagttttctttttctgtcttttttttttttagtagttatattcagtccagttgtctgcttctatagatttaaccccgagctatcctttcctcttcattgtcattgttcagaccagtatcagctttttctagactmctttaatggccccctaactggcctcccacactctaggctgactctttgtgatctgtaatagctccctaccgactacatcagttctctgctcataatgaattggtgactcccattgtatgttagacaaagcccatttcctttgtaatctgggaccctagttggataccagctcattcccacccttctttcctcctacacaaa

SEQ ID NO: 331443 - DNA, 587 bp, Homo sapiens
gagtgtctagttggtgtgaggcactgaggactgctgttgagytcattgaaggcaggtgtttatggatgtatctgtggtaaaaaaggaacttggttataagttgaaaatggtcttgataggccattgactctttatttattcattcaaaccaatgaacaaattcgctatattattccctaggaagaagtcaaagccttaactttatgggacataaatatgttttaggggccagacgcagtggctcacgcctggaatcccagcactttgggaggctgaggtgggcagatcacaagttcaggagttcgagaccagcctggccaatatggtgaaaccccgtctctactaaaaataaaaaaatttagctgggcgtggtggcacacgcctgtagtcccaactactcaggaggctgaggcaggagaatcacttgaatccaggaggcagaggttgcagtgagccgagatcgtgccactgcagtctagtctgggcgacagagcaagactccgtctcacaaaaaaaaaaagatgatttaaattatttttattagttgtatgacaatatcagctgtcatttatcaagtactttccttg

SEQ ID NO: 331444 - DNA, 393 bp, Homo sapiens
gtttgtttggaatcctagtttaattattcattgttttacctgtgattttgggataaatatatatgataaagtaaaagtctttttaaaataaagtttttaattttaagatagttttagattacaraaaagttaacaagctagaactgatagttcccatatacaccatagctagtttcccctacttttaacatctaacactggtatggtacacttgttataattagtgaacaactattaatattattaactaaagttcatgctttattcagatttccttagtttttatctgataagactcatcttgtatatttcctgctgcggtcctagactcagccatttttccaaggagctctggttcctttgttttggacaatggtattagaaaccaagatc

SEQ ID NO: 331445 - DNA, 393 bp, Homo sapiens
gtttgtttggaatcctagtttaattattcattgttttacctgtgattttgggataaatatatatgataaagtaaaagtctttttaaaataaagtttttaattttaagatagttttagattacagaaaagttaacaagctagaactgatagttcccatatacaccatagctagtttcccctacttttaacatctaacactggtatggtacacttgttataattagtgaacaactattaatattattaactaaagttcatgctttattcagatttccttagtttttatctgataagactcatcttstatatttcctgctgcggtcctagactcagccatttttccaaggagctctggttcctttgttttggacaatggtattagaaaccaagatc

SEQ ID NO: 331446 - DNA, 596 bp, Homo sapiens
ctacctaggaagaacaacttggagaaatatatctgagtagccattgatgcagcttttattcacgtaaacagacacacacacacacaatagcttgatgtgtgcatatacacatgcttcaggatgtggactttggtgtcaggctgtctggttgtgagtcccagctcccctgtttgctactgcaagatattggacagtctatttaatctctttcacctaagttttctctttggtaaaatggtagcattaaagtttcttcttcaaggggtgaggattaattcacataaaaatgtacactgggctacagtgtacatttgcatgtggtaaatcattagcaaatgatagctggtgttattttgatattactgtttatttattatrtatatttatatgatcatactttacattttttaccttacaatgtgtcaggaaatctctccatgttaataaatatagttgggtctgtatctcagtattaatggttctattgtattcttgtaccagactttagccaatttcttgttgatggacattgaaatattaagttgttttttgccataaatgcataaataaaaatctgtaatgaacttttacatgca

SEQ ID NO: 331447 - DNA, 623 bp, Homo sapiens
aaaagcaataatcacaaacacacaacgagaaactgtactttaccaaaaattaaaaatttgtcttcaacacattatgttaagtaaatgaaaaagcacatcatacactggggaaaatatctgcaatatatgtattatatttgacaattaacttgtgtattgaatatgtaaagaatacatgaaactcaataatgaaaagatggtgcaacaaaaatgagcataaaactttaacagaatgttcacaaatagtatgctaataaacacatgaagagatgttcaacatcattagttgccagggaaatgcaaactaaaatcacaatgaaatatcaatgcatctatcagaatggctaaaaaaactaaaaactgacaatggcaaatatttgcaaggatttagracaactggaactctcaatcattgctggttgaagtttatgtaaaatgttaaaaccactctataaaacagttagaaaatttcttataaagttaaatatatacttatcataagactcagtcattccactaaagtatttacccaagagaaataaagacatatgcacatgagaaatgggtacaagaatgttcactgctgcctcattcataacggtaaaaatatggaaacaacccaa

SEQ ID NO: 331448 - DNA, 580 bp, Homo sapiens
cctttgtttttcaaaaaatataatcctccctcttattcttgcgcatccccagggagaagcaaagagcagtcaaaatatgaatgggactgtccttttcagcaggtagggtaagaggggaataaaaatcagaaaaataagatataacatttcttgtactcagtgctataaaataatttaatccttgctatatgcatataaggtaaacacacatatatgatcgttcattgtcaaatggttctgcaatgcgacagtcttgaggctgtggtgcttgggcactgggggtaagtccccaracccgactacctgaggtggtggtgagtactgaggaagaagctaaaaatcacaccaaaacctggggattacattgagccttctccaccacagttccagggctcatgtagagaaaccactagagagaggggcagtttgtccctgtttgtccttgtttttcacgtgtcttcaaatttctaacaatggcacaggcaaatgcagagtgaaaataaactcggcaagtatttatcaaacgatacttgtgatagggtacagagaccctatcacaaagagtttacaatcttttaca

SEQ ID NO: 331449 - DNA, 553 bp, Homo sapiens
aaattaatgaggtgaggcatcattctcatacrtttgagaattcactgatcaaacttaagaacaaaaatgatctattgttttatgttttaacactctttcaaaatgtaggtcatgtccataaatgcaaatgactatgtagaaagtaatatgctactgctgctaaccgttttgagggcacagggtattcatgtgcttctagaatcatcaggatttgcagaagggcaataggaagtggcacactgggagtgattgagaattctagtgctctaatgagtgagggatcacagttgatatcagtggaatcattaataaatataaagtttgtatttggtactttttaaagaaataatttcaaattgaaagaagcattttaaacaacttggaatgttacatttacttttgtgttttacttttatcaggaatgtttaaataatctacaaagtatcctaagccaagaaactttttaagagtttaagctgaagaagcgtttttaaaatacaaaagactaataagtatgtgattatggtccaagtgaaagttaatttgtcaattg

SEQ ID NO: 331450 - DNA, 574 bp, Homo sapiens
attaagggaacatatataatgtttgccattaataaagtgaaaaatgtataaataagtgctccatgattaggcttattcaacacagcatggccccaaacaatactgttttataattacacctttttataaaaagaaaggaggatgataagaaattttccaagggccaaggggaccctggcattattcttccacctaactaaacttgtctatactaagaaaaacttcttaaacaccaataccaaatatatttccatgtttttcaaaagagtttgaggaaacccagwgtaattaatgactctatattaggaaacatgcttcccatgaacagcttcctttccttataatttagttcaagtttactcctcaaacctcttgagcttctactccttctactagtccttccttaccagaaacacagtcttctgcatcccttccttatcaacgtacttaccagacactccctgaaggacccagtcccattggaacaactcataacagggtatcctattgccaacctaaaatgaaaaaacagactactcactctctttctctcaggaaggtaacaaatagagaa

SEQ ID NO: 331451 - DNA, 595 bp, Homo sapiens
gtcatatatggcctttattatgttgtggtacattaatacataatttattgagagattttatcacaaaatgatattgcattttgtcaaattcttttgctgtgtctattgatatgatatataattttttatctttcattctgctaatgtgacatatgacattgattgaattgcataaakcaaatcattcttacatcccagggataaatctcacttgtacatggtgtatgatcctttttatgtgttgctgaatattgtttgctcatattttgtttaggattgtttgttcatcaatattaattggggatattggtcccagttttccgttaggctccttggaacatggtgaaagactggaaacattttctctaaaatcagaaataagaacaagttacctacttttgtcatttttatttaatatagtactaaacgtcctagccaccattatataataagataaagaaataaaagccatccaagttgaaaattacaaagtgaaatttgttttcaggagatacgatattctatatagaaaaccatcaattttccacaaaaaagctgttataactaataaattaagcaaatttgcatgatacaa

SEQ ID NO: 331452 - DNA, 622 bp, Homo sapiens
actaactctttaccaacaaattctaaccaaaatgaaatctttgaaatactaggtattctatgtattgattttaaagaagcttgggccgggcrcggtggctcacgcctgtaatcccagcactttgggaggccgaggtgggcggatcacgaggtcaggagatcgagaccatcccggctaaaacggtgaaaccccgtctctactaaaaatacaaaaaattagccgggcgtagtggcgggcgcctgtagtcccagctacttgggaggctgaggcaggagaatggcgtgaacccgggaggcggagcttgcagtgagccgagatcccgccactgcactccagcctgggcgacagagcgagactccgtctcaaaaaaaaaaaaaaaaaaaaaaaagaagctcaatgtgatgcaagaaaaagctaaaatcaacacaaagaaatcaggaaaacaattcaggacatgaaagaagagaaaaatattatgaaaaaaacagaacatctggaaataaaaaaaaagtaggagttacaaaatacagttaaaatctttaacaataggctaaaccaaatagaaaaaagtattacagagctgaaacacaggtcatttgaattagctcggtcagaagaaata

SEQ ID NO: 331453 - DNA, 622 bp, Homo sapiens
actaactctttaccaacaaattctaaccaaaatgaaatctttgaaatactaggtattctatgtattgattttaaagaagcttgggccgggcgcggtggctcacgcctgtaatcccagcactttgggaggccgaggtgggcggatcacgaggtcaggagatcgagaccatcccggctaaaacggtgaaaccccgtctctactaaaaatacaaaaaattagccgggcgtagtggcgggcgcctgtagtcccagctacttgggaggctgaggcaggagaatrgcgtgaacccgggaggcggagcttgcagtgagccgagatcccgccactgcactccagcctgggcgacagagcgagactccgtctcaaaaaaaaaaaaaaaaaaaaaaaagaagctcaatgtgatgcaagaaaaagctaaaatcaacacaaagaaatcaggaaaacaattcaggacatgaaagaagagaaaaatattatgaaaaaaacagaacatctggaaataaaaaaaaagtaggagttacaaaatacagttaaaatctttaacaataggctaaaccaaatagaaaaaagtattacagagctgaaacacaggtcatttgaattagctcggtcagaagaaata

SEQ ID NO: 331454 - DNA, 609 bp, Homo sapiens
aaatccacacatttgtggccaggcgaatcttgacaaaggtgtcaaaaacacacaatgggggaaaggacagtttcttcaacaaatggtgttaggaaaactgtatatccacaggcagaagaacaaaaataaacccttatctcacaccttatacaaaaactgattcaaaataaatgaaagacttcaatgtaagtccaaaagcagttaaattactagacaaaagcctagagggtacactccattacattggtcttggcaaaaattttttatatgaccctaaaagcacaataaacaaaagtaaaaatagatamatgagattatataaaactaaaaagcttctgcacagcaagggacgacatcaaagaaatgaagataaaatctagagaatgagaaaaatatttgtaaatcatacatttataagaggttagtatccaaaagatataaagaactcaaacaacccaatagcaagaaaacaaataacccgattttttaaaatggtcaaaaatcttgaggagatgtttctccaaagaagacaaacaaatagtcaatagatatatgaaaaggtgctaaacatcactaatcatcagggaaatgcaaattaaaaccacaatg

SEQ ID NO: 331455 - DNA, 575 bp, Homo sapiens
agagagaaaaatataacactaaattcccacagaaaaatgttaaagagatctcaatttaacaacctaacctcataactaaaagaactacagaaccaagagaaactcagtgccaaggccagaagacaagaaataaccaaaatctgtactgaactgaaagagactgagatataaaaaaaaatttaatagatcaatgaatccaggagttggtatttataaaataattaataaaatagactgctagctaaactaataaagaataagagatagaagatccgaataaacayaattagaaatgacaaagggaatattaccactgaacccacagaagtacaaataatcatcagagaaaattatgaacacctatatgaacacaaactagaaaatcttgaagacatgaataaattcctattcacatacacttttctgagactaagtcaggaagaaattaaatccttgaacatgccaataatgagcttcaaaattgaatcagtaataaataaactagcaaccaaaaaaactccaagaccagatgaatttttagctgcattctaccacatgtacaaagaagggatggt

SEQ ID NO: 331456 - DNA, 580 bp, Homo sapiens
atcaaagaaggtaaaagcaaaaagttccatccaaaggagagtaatttcaaatattgaaggaacattagcctgtagatatgagaaagaatcttcacaagaactccagcaactcaaaaagccagattcccttcttaccttagaacaaccataatgctttcccatcaatggatcttaatcagactgaaatggctgaaatgacagacatagaatttggaatatggatagaaatgaagatcactgagattcaggagaaagtgaaaacccaattcaaggaatctaaggaatacaataaaatgatacaggagctaaaagaggaaatagtcattttaagataaaatcaaactgatctgatagaactgaaaaactaacttcaagaatttcataatrtaattgccaatattaacagcagaatcaaccaagctgaggaaagaatctcggagctcgaaaattggccttctgaaataagtcattcaaaaaaaaaataaagaaaaagcaataaagaaaaacacaacttttgagcaatatgaatttatgtaaagatgacaaatctatgactcattgacatccttgaaagagaggg

SEQ ID NO: 331457 - DNA, 353 bp, Homo sapiens
tcctggtttaaactttcatgcaggtatacatattacatgaattgcttctgtggtaagagtcagtacaatgcttgtatttgaatttattttaggcaraaagaggccacttgtcctaactatggaagcactaaaggtaatatttccttactggaccccagtcctaaattacctacttttatccaaattaggcttattttaagatatttcaaaaagtaaacatgtaaaatggtgaaatacacatgttatgtctgatgttaggctttacctggatttttaatcccgtaagacaagaaatgtgaatatcagaatgacttggaagatttgatccagtcacataatctggtccaataatt

SEQ ID NO: 331458 - DNA, 558 bp, Homo sapiens
aaaaaagttacatcactggcctgcaagagacagagattttagagctctgacctcaccagattcaagcttttaattgccttatctctggagctataaagataatgagtgttggcagtaagagtcacccttatttgcatcaactgcagaggcatagctgccagctcccttcctagggcacgcgattcacctcagtgcttacattccccatcaagacgcactttggctgcttggacttatgaaattccttttaaatattttaattagttactgtaaattgttctatataacccataaaaggaacctccatgacagagctcgtgaagcaggtaatgaatcycaaaatagtgtttgcacaatgggagcatgtcttccctctgggctattcctttagatatccatgaatttgcctttataggagggaccatgtgggattagcacaggagaaaagcattaatttccttcccaagataaatatttctgtaataggttatatcatgtttttattcctgctttctcccatctttagtacagatattttggacatgctaaaaatgacca

SEQ ID NO: 331459 - DNA, 551 bp, Homo sapiens
cattttccatttcaggaattccttgtcattttaattttagtaaatatttcttctttcccacaaaatagggaaagagatgctmttagggacatagtgttttcatagtttaataatggacctttagattaaattcaccttgttatttatcatagccttcactagaaactcaagctttagcatataattttatgaattccttctgttccccatatctctaagtatctcctaaaaggcctcaaacctccacccttttaggccctcccctcactttcactgtgttctctggaatgcattaccttgtatcatcttcagttccttgatctcttggtattcaataatatattttttcctcctcagcaacatacactcagcattgtaactttgtcacatattcttcaagttctctatccgaagcttcccgttctaacagccacctctgattgtacgtcactcagtccagaatttttacttcagcaatgaaatgttcaagtcattgatcccactgccatgatagtctccatctccccctttatgtccttattagtttagac

SEQ ID NO: 331460 - DNA, 551 bp, Homo sapiens
cattttccatttcaggaattccttgtcattttaattttagtaaatatttcttctttcccacaaaatagggaaagagatgctcttagggacatagtgttttcatagtttaataatggacctttagattaaattcaccttgttatttatcatagccttcactagaaactcaagctttagcatataattttatgaattccttctgttccccatatctctaagtatctcctaaaaggcctcaaacctccacccttttaggccctcccmtcactttcactgtgttctctggaatgcattaccttgtatcatcttcagttccttgatctcttggtattcaataatatattttttcctcctcagcaacatacactcagcattgtaactttgtcacatattcttcaagttctctatccgaagcttcccgttctaacagccacctctgattgtacgtcactcagtccagaatttttacttcagcaatgaaatgttcaagtcattgatcccactgccatgatagtctccatctccccctttatgtccttattagtttagac

SEQ ID NO: 331461 - DNA, 601 bp, Homo sapiens
gattgtttgaccataaaattttattttccaggaggagtatttcatcacagatatttattagaatcttgactatatggtgataataaaaagtagactaaatttagccagttttattattgttttcaaattctctacaaataacgtaccccttggttcaggggtaatcatttccagaaccctayctttgacatttgatgtatcactgataattagtgctgcttttaattttaatttttacgtctaagaaatagttctctaaccctaaaacgaagatttttctcctatattttcttctagaagccttatagtgtttgcttttaaagttaagtctgattcatttcaaattaatttctcatatttgtaagataagagtcagagttcattttcttccatatgaaaattcagttgttccagcatcattgttgaaaaatacaagattttagtattgaacacattggaacttttgttaaaaatcagttgaccatatacatgtagttctatttatgaactttattgaacaatattattctcctctttgatttatataattttttctttattctgttactgtggtgaattgtgttgtttcaaatgttgaacc

SEQ ID NO: 331462 - DNA, 536 bp, Homo sapiens
tggggctaattttgtacatatttataccacttagctgttagttaattagcaagataatcataattatcctcccagaatatcttaaaaactcattgaggaaagaatttatgtatttagctttcctaacccaagaatacctcctttattwgttaaggatatgggagctgataaaagagatataccctgaaatttcagaggcttacatacaagcttatatctcacttacaaatatctcaagcagggattgtgatcattaggcatctcttctccaaatcacaacccaggagtccagtcactttccatttgtgactctgccatcttcaaccccactttccaagatcactgtgtcagataaaatcaagctggaaggggctttaccagaaatcactattcacattctgtcagctagtctgagtcacatgggtatacctaactgcaagggagactgagaattggagtctagctgtgtgttctgcagaagagaaatggtaatcagtttgccatttctgccacatctcccatagtatggttgctcc

SEQ ID NO: 331463 - DNA, 536 bp, Homo sapiens
tggggctaattttgtacatatttataccacttagctgttagttaattagcaagataatcataattatcctcccagaatatcttaaaaactcattgaggaaagaatttatgtatttagctttcctaacccaagaatacctcctttattagttaaggatatgggagctgataaaagagatataccctgaaatttcagaggcttacatacaagcttatatstcacttacaaatatctcaagcagggattgtgatcattaggcatctcttctccaaatcacaacccaggagtccagtcactttccatttgtgactctgccatcttcaaccccactttccaagatcactgtgtcagataaaatcaagctggaaggggctttaccagaaatcactattcacattctgtcagctagtctgagtcacatgggtatacctaactgcaagggagactgagaattggagtctagctgtgtgttctgcagaagagaaatggtaatcagtttgccatttctgccacatctcccatagtatggttgctcc

SEQ ID NO: 331464 - DNA, 569 bp, Homo sapiens
acaggccatttccaagttctgttgagtatttccatctctatatgctactggcatctgaaattcaaaatatcccaaaattaacttcctatactttatgtacttctcattcccaatccttaatctttccattctagtctttatctctattaatgctacaagttgttccaaaacatcaagtctagaaactttgagtcattagtgcttctcactcactcactttacttttccaatcactcaccaagttstatatattctatttctgtgtatgtttcatattcatatccatctatacatttccactgccacaattatgtattgcttagactatttgcaatctcttcagccatctcacttacatctgttttctttccaaatataagtcaaaagggtcctgctttaaaaaaaatcaaacaaattatttaagaatgcctcaccatctggactcactgtatcattctagcctcatatttcttgaaatcccataacagtctctacttttgcattcttataaaaaattcagtctacattgagcctcccttgatctttcatgtttctgtacatttgccatg

SEQ ID NO: 331465 - DNA, 646 bp, Homo sapiens
aaaaactccagaaaaggatgtgattaaaataaaagcaggagyccatacatatgaactgagactcaagataacggtcaaggaggcaggctcaacaatttataacataggaatgaaacaatacaagttagatgctaagattgcaagtcttaagtacctcctgcagtaagttaggcttgatctgtgaacaagcgtagcaatgaggcctacaggtggagggaaaagtagggcaagctctggggaatgagggctacagatgctagtatgagagacattgcttcataccaccaccatttttgtgtctctcattacttctcaaaagtcatgctatgtgcagtcaaattgtactgtcattgattcccagttatgaacaataactttccctactgtgtcctgtaatactgtgctcttttgtgcattctgtgtcctttgctctatctttctaaaatgctctctctcttgcattatacacacatgtggtggttttaaacatgtctccaaattctttgacatgtctgccacaggaagtgaaatctaactttctttcttgtgaatatggcctagcctcagtgacttacttattttgagacagagtctccttctgttggccaggctggagtgcagtggcacaatcttggctcactgcaac

SEQ ID NO: 331466 - DNA, 591 bp, Homo sapiens
tcttgctttggctttcagcttggatcttgttggtgtatagaaatgctactgatttttgttgtacattgatttcatatcctgaaaatttcctctatttgtttatcagatctaggaactttgaggccgaaactatgggtttttctaggtatagaatcatatcatctgcaaacagagatagtttgacttatactgtctttctatttgaatgccttttatttctttttcttgccttactgctctggctaggaattccagtacaatgtggcatccttgtcttgttctggttcccaaggggaatgcttctagcttttgcccattcaggatgatgttggctataggcttataatagatggctcttattattttgaggtgtgttccttcaatgcctactttgttaagggttttttagttgaagggatgctgaattttattgaaagtcttttctgcatctgttgagagcttctgcacagcaaaagaaastatcaacacagtacactgacaagttacagcagggagaaaatatatgcagactgtgtatctgacaaaggtctaatatcccaaatctgtaaggaacttaaacaaatttacaag

SEQ ID NO: 331467 - DNA, 632 bp, Homo sapiens
ctaaattttaataagccactgataaaaacacataccagaataaggcaaatttcaaaaggggggaaatgatgtgattacaaataactctttyatgattgtgataagaaggttgggataactgatctgcaaagcatatgtgagtatctttaaaatggttattcaagaacatttgtaaactatgcatacaaataaaaaccaattacaacctccatccaaatgatgtgtaaaactccatcattaaaatttaatttactttaaccattatttttagatccatcttaacattttggacagaataaggaaaggaagtttatgttttaaaactatataaaatatctaccttattttttcttatatagaatacaccattgccttaattaatgcagagcaatgggtggtttcgagttccagaaatattgtaacagtttctggtaaatgtgcatctgacttatccaggaggtaactgaattggaagcacataatactgatttaattatatattaacttagatttgtttcttatcagcagatgctatatttttatttaattatctataacattgatatgcaatattttaagaaatagatccaagttacagcactcattaagttgatctgtggcccttctcacct

SEQ ID NO: 331468 - DNA, 629 bp, Homo sapiens
ctacctctattctaggaatgaatcctggaattgaataagcctgtcctaagccaataatctttgctagaagccarcttctagcaaaaggtgagaatacagcattttgcatacttttgctctaggttggaggctgcgtttagcctatgaggaagtgttctctatctaggtcagactagctcacaaaggcattatacaagtgtttgaagccacatcctcacagaatgaagattattctttgattgatcattgcctctgagcatacacttcttctggtgactttgtgggaattgagaattgtctagcaaagaacaaaattctgtgttcctcggttacctcataacaaggcatcctaatttcacctttttcatttcccctaaataagcttaatttcatccctctatacccaggctcttacttcctgtttggtatatcctttcctgattgctttcagaaacatctttgccatcacttctacttttcatctaaatgcccttggaactttcctttttctacttcaatatgaagtagatttctcccttccctgaatcccataagccttttattgcaattcaaacattatagcttgtgtgatacttactgctgtatcatttttcctttaccacacagct

SEQ ID NO: 331469 - DNA, 600 bp, Homo sapiens
tgcagaatggtctccgttatggaagcaacataaatctgatagctgcatagactaagggcagaaccaacaatgaaatatacatattaatccctgaatcattttctgaaataaaatgttagagtgttttatctttaatcataactgggaaattttaatatattaagttcaatggacaacaagtgaatgcagaaatagcaagctatattacaggtgtgtttttaacagtcaacagtttggaaggaaaacaggaaacycttactgctggtctactgttgatgtatgtcattatttttacaaacaaggaagactgtagctagtttatttgacctattgtctaggtaagaccacatgtcttaactgctccattcgaaatttctcccaaagaagatattgctttgtctcacgcaactcttcacattataccatgtcaatctgatggcttgatttattgtatttctcaccactcttatttttgctatctagttttacagaaatacaattatcatttaaattatagatttattgcctaaacactggaaaataaatttaaagccattaaaaacacagaagcaaaaactgtattatttaacagtagttaaa

SEQ ID NO: 331470 - DNA, 619 bp, Homo sapiens
atgaaatcataaaatttggggctggaagtgatcttagggatcrtgcaatatgttgccttaatttatacagaagtaaactgagcctttgaaaagtcaaatcttaaatccttaggagtttttttcctaactgaagtacagtgtggctagtctgaacagctgaggtgatgaataaaggcaatttttaatggctttctttttgcctcctctaaatgattttcttcttttgggcagatgttccctattcctggaacatttgtatccatgaggaaaggaggctatccctactatccatgtcatagctaggaattgtagcatcacactaatatgagaaagaacctcttagttacaaatttcaaagtaatcagggtcttgatacccttagacaacttcttaaacctttaacgctgagagagctgagtaactgaacaacagagcttgcccaacatctgagaatttacctgaagtgaacattgaatataaaaatatggctttataaggaatttctgccagatttgaaacagtccttgttgaatgacagggatttcaaatgattaagagaatggcactgaattcccacctttgacttctacttgttttagttgaacttctatcaagcttt

SEQ ID NO: 331471 - DNA, 551 bp, Homo sapiens
acaagtgattaaacttgagctgttttaggcacagcattgctatttcatcttactgtaaaaaataaggaacatttctgagtcattgcagtcttggaatgtaataccaaaaaatgagaaccagatcasaaacagtgaggccaagtacatcattactgagtgagtaatgtgaacaacttacataaactgtggctaaaactgaatttttagcagatgaccataaccttttgattgcatcacgaacagttaaaagctctttaatctgcatgttgtccttcaggaaagaaaaactcatcaatccaattcataatctttaagacctgcatttttttcattaagagttaaccctatttttcccctgattattttttccctgtagccagcagtgggtgcaacttaagagaataagctggggtccaagtatgtttcttctattgactgtatagggaaagcatgttataggtaatggagccttccttgctttatagcacagtggagtgtcccactccaaaactttagctaatgaaacagttcatgtctttcttttaaaaacc

SEQ ID NO: 331472 - DNA, 551 bp, Homo sapiens
acaagtgattaaacttgagctgttttaggcacagcattgctatttcatcttactgtaaaaaataaggaacatttctgagtcattgcagtcttggaatgtaataccaaaaaatgagaaccagatcagaaacagtgaggccaagtacatcattactgagtgagtaatgtgaacaacttacataaactgtggctaaaactgartttttagcagatgaccataaccttttgattgcatcacgaacagttaaaagctctttaatctgcatgttgtccttcaggaaagaaaaactcatcaatccaattcataatctttaagacctgcatttttttcattaagagttaaccctatttttcccctgattattttttccctgtagccagcagtgggtgcaacttaagagaataagctggggtccaagtatgtttcttctattgactgtatagggaaagcatgttataggtaatggagccttccttgctttatagcacagtggagtgtcccactccaaaactttagctaatgaaacagttcatgtctttcttttaaaaacc

SEQ ID NO: 331473 - DNA, 420 bp, Homo sapiens
ctcttctcttctcatcatatggtctcatggttatatctgaaaccctgacattattaaaaactgctaatataataatatcagttttgctcatcctcctcatcagtatcatctactactttgcaatttcactccttatggtattcaatctttaatgaatttttgataccactaargacctacaatccatttgattctcctactatttttattttgcattactgttatcacatttgacttctttacttatctgtcctgaattccatggcccataaataatcactcaaaggaatttttccatggcccataaataatcactcaaaagaatctatcttcagtatccttacattttgtcttggtttggtatactcatctcacaaaagctcatcagtatctaaattaaactatttacctacttctttc

SEQ ID NO: 331474 - DNA, 604 bp, Homo sapiens
tcttgaaaaaaactctacgtaattttgatatccatgaacagaatctttttaatatcctggcttttcagctctttgaatttctttctttcatttattttatcctcttctcttctcatcatatggtctcatggttatatctgaaaccctgacattattaaaaactgctaatataataatatcagttttgctcatcctcctcatcagtatcatctactactttgcaatttcactccttatggtattcaatctttaatgaatttttgataccactaaggacctacaatccatttgattctcctactatttttattttgcattactgttatcacatttgacttctttacttatctgtcctgaattccatggcccataaataatcactcraaggaatttttccatggcccataaataatcactcaaaagaatctatcttcagtatccttacattttgtcttggtttggtatactcatctcacaaaagctcatcagtatctaaattaaactatttacctacttctttcaagcctcagctcagctcaatttggctgagtgtcccccacctcaaaatcatgctaatggtcttactttaaattagatatcattg

SEQ ID NO: 331475 - DNA, 418 bp, Homo sapiens
cagatgcagcccctcaaccttggacttctcagtctctagaactgtaagaaataaatctgtgttmtttagaaattacccagtctcacatattctgttacagcagcacagagtcaagtaagaaatgtgtttataatagtgtggcagtttttaaaaatggttacaatttttttgtatcttcttgcatctagaagtagagtttatgtccctttttctgagtctgagaatccttgtgctctttcaaccagtagaggcaaaagaagggatgttctatgacttccaagactaggctacaaaaggtcttgcagtctctgtcgagttttcttgagatgatctgagggaggctaacctccatataagaagtgtgactattctgagattgccatgccagagtagctacctgaaggcattgaaggaggca

SEQ ID NO: 331476 - DNA, 516 bp, Homo sapiens
tccccaggaagaaacagagaccttgtctgtcctaatccaccatttcatcaccattgcctaggaccatgccacagacataacagatgcccaatgaatatttctgaatgtctaagtgattgaaccagtacttcaattttgacattttaatacatctataaataattgagtgatctgaatgcctaaatttggctaagaggataggttatatggcaamgtgctgatctatttgagtactctctcaataaatgctttcagttgtcatcagcacagttctcattcatctttgatttaagcatttgtcattgtgccccattgtagaatagcataatacaatgcatacatgcctcaccaatctgacacatctaaggtcacactgttagtagtacttgaatattgctatttccaacttctcattttctcattcagaaactccaatgccttaacacttcccaccccttcagcaacaaaaaggatcttatatgcacttcaatatcagtttgaactgtaattacccac

SEQ ID NO: 331477 - DNA, 567 bp, Homo sapiens
cccaggagcatagattcaaattactcttaatrtacattcttattaaaagcagttaccagtgaatttccaaagagaaagaagaggcagttcctgaggtctttaccaagaatttacattacatttatataagctattcattggctatacattgttaagttataaggtgtaggttgtagtatcaggtgtggcattattggttaatttatagctacttctggcaactacaagcagtttgcaagagatgaatacatggctcaaagaggggaaaccaggacagaattgttctctcgttttaacatctctctgaacctggtaatttaggaggactcgcattacttagataaaagttcttttctcatttccccccttttgatcaaaaatctttcttcttgaaagcattgatgaacaaaatctgagtgtcaaggtatccctcatcactgggaaggctcgatcctcgatcgtcctgtcaaagtggttgatctatagctgctgtcatctctacatgttgtagtagcatgaatttacttttctcagaagtaaaacagatgcatagtagaagtattctat

SEQ ID NO: 331478 - DNA, 567 bp, Homo sapiens
cccaggagcatagattcaaattactcttaatatacattcttattaaaagcagttaccagtgaatttccaaagagaaagaagaggcagttcctgaggtctttaccaagaatttacattacatttatataagctattcattggctatacattgttaagttataaggtgtaggttgtagtatcaggtgtggcattattggttaatttatagctacttctggcaactacaagcagtttgcaagagatgaatacatggctcaaagaggggaaaccaggacagaattgttctctcgttttaacatctctctgaacctggtaatttagraggactcgcattacttagataaaagttcttttctcatttccccccttttgatcaaaaatctttcttcttgaaagcattgatgaacaaaatctgagtgtcaaggtatccctcatcactgggaaggctcgatcctcgatcgtcctgtcaaagtggttgatctatagctgctgtcatctctacatgttgtagtagcatgaatttacttttctcagaagtaaaacagatgcatagtagaagtattctat

SEQ ID NO: 331479 - DNA, 599 bp, Homo sapiens
tgaattcctttcttctcaacgtccctgtattagtctgttttcacactactaataaagacatatcttagactgggtaatttataaagaaaagaggtttgattgagtcacagttccacatggctggggaggcctcaggaaacttaaatcatggcagaaggcacctcttcacagggcatcaggagagagaatgagtgcccagygaagggggaagtcccttataaaaccatcaggtaaaatgagaactaacccactatcatgagaacaggatgggggaaactgcccccatgattcaattatctccacctgatccttcctgcaacatgtggggattatggcaaccacaattcaagatgagatttgggtggggacccagccaaaccatatcagttcctcaaatattctggggctcccacacctgttggaaagtgatatttttttattttctgcatgggctgaacctttgaaaggcaattatgtagacaacatacaaggccattctctccaatatgctttttatcagctccatgaagtcaaccacaattcctcaaaactatctggtcatatctgaaaatacgccattccagtaatgccttggtaaa

SEQ ID NO: 331480 - DNA, 640 bp, Homo sapiens
tgtttaaaatatactccatcaagaaaagtagttttaaagggcaaaacatttaatgtgttaatgagttttcctacttatcctgacatttgatatcttctgatggcttttgatatgcccatttagttttccctgctaatctttaacactcccttccctagggcaatcattcattcaaccataagcatctgatccttgatccctgaacagaacagcaacatttgtaatttaagtcaaggccatcactttgaattccctgcagccacttctctagactacaggcttccttcaaagaatacctcttgtctacctcatggcttctcatacctacctctgtattaattttatatgtcatttcttttgcatcaacaattaggaatttttataggtacttatcagaatactagctgtcttgttttctaaatttaattgcaagactttaaagcatgggagctgaaatcttaatgtctctttatatgatgcctgcaaggatgtaattaatatttgcaaggcatgatgacaatcattaacactaycactaaaaagaagcaagtcacctgtagcaacacaatcaccaagtgaataattgtgaaagaatattaatggcctgactactttatcgaccaaatattctgtcctaatg

SEQ ID NO: 331481 - DNA, 508 bp, Homo sapiens
agaaatgtctttgttaaaaggtactctgtatacttaaaaggaatagtaaacattttatatgataagagttgccttgcagcagcaactctcaaggttattcttcagtgctgaaatcttgactggaatgatgacaatcagagggtttgctagttcagctaaaagcagcttctgctgccccacagaagctccttgggtcttcttagcttgtagtttattgctttctgagttcaaacatttttaagctggagaaataacagctgagatttttcaggcactcatgagagctttctattttaatgctgaggcatttgaaggccactcaaggggtccacccatccttctcctccctagagrcaatgtcatagatatgagagcctgacagtccagtctctaagaactactgggtgcatggggatgacccacagtgttaattaggagagcaaagtttggtgcatcactctgaaacctcaatggggagtaagagttccactccagatgactgatcatc

SEQ ID NO: 331482 - DNA, 524 bp, Homo sapiens
catatatcttttatcctttgctaaagagattccttcttgaaacttgaattgacaccattcctttcctagtattcttgctccaaacactcagacctaggcagggttaactcttctctctttttttgtacctctgctgccctgttattctagcactcactgtaatrttacaatttttgataaaattagctaggacatagggagaactcctataacccagcaaacagcacaaagcaacttactatatttcctcatatttgacaacactagtgttattcacaggagctagtcctgtattccttttgtcctcttatcccatatagagatatcatagagtatcaatggatactatatgttagagaacaaatactccctcagcatgacaaattgttgtaatcttatctgcccttatagatgctgcttccctcctctactcaaaatgtccctaatgtcttggagatatcctatatatcctttaccctctgctaaagaaatttcctcttggagaaatttgaattgacactatt

SEQ ID NO: 331483 - DNA, 524 bp, Homo sapiens
catatatcttttatcctttgctaaagagattccttcttgaaacttgaattgacaccattcctttcctagtattcttgctccaaacactcagacctaggcagggttaactcttctctctttttttgtacctctgctgccctgttattctagcactcactgtaatgttacaatttttgataaaattagctaggacatagggagaactcctataacccagcaaacagcacaaagcaacttactatatttcctcatatttgacaacactagtgttattcacaggagctagtcctgtattccttttgtcctcttatcccatatagagatatcatagagtatcaatggatactatatgttagagaacaaatactccctcagcatgacaaattgttgtaatyttatctgcccttatagatgctgcttccctcctctactcaaaatgtccctaatgtcttggagatatcctatatatcctttaccctctgctaaagaaatttcctcttggagaaatttgaattgacactatt

SEQ ID NO: 331484 - DNA, 646 bp, Homo sapiens
tgacaggcattgtcataatcaaaaaaatgataactcagcaatcttatgtatattaacaggaagatgcacatcttatatttagagaatctcatgacactcaatattaattgaatgcaattattctccaaatatagtcagattttcaattcctcagcctacaacagtttttgactgtcacaactgggagggaggtgttactggcattcagtaggtggagaccagggatgctgctagatgtgctacaaaacccagggcaggctcctaccacaaagaattacctggttcgaaatagtgctgtggctaacaaatctttatttaagattaatatgatagtgcagtggaaagattactgattagaaatcaaagaaagagaattctagtttaagtgaaatatgatgaggtttctcacatacataatgaagatactaccacatatgctacctaattgatggcgttatggtgaaaactaaataacatcatacatgtaaaatgatcctgtaaaccaaataaagtatcaaaatgaattgaaacacagtgtgaatcctttgagtttaaggaaaccaagatagaaatctgawaatattatctgtgtaggtggttttcacatagaatatgtaaagattttaagtaagttatttaaacccaa

SEQ ID NO: 331485 - DNA, 605 bp, Homo sapiens
acataggcctaagcattcaatatcattagttattattattttctcctattctaaaaacagaactgaaacaatatctaaaaccaggagctagatatcagtagttaagaccattcacccagtttgcattaatcattcaatgctgcctaagaaaattttgtatgctgtttttttttttttaagtctatctgttttttaaatgtaatgtgctaatacacaaagtaatttaaaaaaaacacagtggcacataaagaacacatatgttgattaaaactgaattgcctcaaaaccttgcccaagatcaacatagggaaacaaggatttttttatagttaatgtaacaractataaaaatatgactttaataacaacctattccaaattctaatttttccctttctagtccccagtctgcttcttcacaaaatgtcaatgttactaatttaaaattttactaattcaatcagagttccagtcactaataaggacatgagagggtaggatggtctaggactgaggcaatatatttctattctatctataatcatagtcactaataggggaaaatatataataagacaattgatggatggcatttttcaatgagt

SEQ ID NO: 331486 - DNA, 615 bp, Homo sapiens
ccttgcccaagatcaacatagggaaacaaggatttttttatagttaatgtaacagactataaaaatatgactttaataacaacctattccaaattctaatttttccctttctagtccccagtctgcttcttcacaaaatgtcaatgttactaatttaaaattttactaattcaatcagagtkccagtcactaataaggacatgagagggtaggatggtctaggactgaggcaatatatttctattctatctataatcatagtcactaataggggaaaatatataataagacaattgatggatggcatttttcaatgagtaaaattggaagtatgcaattcagattctttaataataatttgatgccttctttggagcacaaaacattaggaaaaagatgtctttggctaagtgcctcatacaacatagcaccgcatacaacaaataatttcaaacctccacacctccatgaagtcttttgggactgtgaaaaacccaaccacactactttaggttgttcagtacaataatcatctcagactaattagttatggccattgtcagtggttacatactgctaaattcagctgaaactataggtcaagcttattaaatg

SEQ ID NO: 331487 - DNA, 615 bp, Homo sapiens
ccttgcccaagatcaacatagggaaacaaggatttttttatagttaatgtaacagactataaaaatatgactttaataacaacctattccaaattctaatttttccctttctagtccccagtctgcttcttcacaaaatgtcaatgttactaatttaaaattttactaattcaatcagagttccagtcactaataaggacatgagagggtaggatggtctaggactgaggcaatatatttctattctatctataatcatagtcactaataggggaaaatatataataagacaattgatggatggcatttttcaatgagtaaaattggaagtatgcaattcagattctttaataataatttgatgccttctttggagcacaaaacattaggaaaaagatgtctttggctaagtgcctcatacaacatagcaccgcatayaacaaataatttcaaacctccacacctccatgaagtcttttgggactgtgaaaaacccaaccacactactttaggttgttcagtacaataatcatctcagactaattagttatggccattgtcagtggttacatactgctaaattcagctgaaactataggtcaagcttattaaatg

SEQ ID NO: 331488 - DNA, 627 bp, Homo sapiens
tttagtagattaatttctcacaatttttatacaagttgcttaatacttgagttttgtcctgtactttctttttcatattggcattctacttaagacaaaatttatgtttcttcctccttatcattttgaccaccacacaacattctctttcatttaaaaagaaaaaaaaaaaattcctctctcaactttcacattttcttttttctttctttcctttatttatttattttttttcagaggtaaagtctggagtgcaatagtgttataactcacygtgaccttgaactcctgggttcaagtgatcctcctgcctcagtctaccaagtattcaggattgttgatatgcactgtcatgtccaactcatttttacaatttttctgaagatgtggtctcactatattgcccaggcttgtctcaagttccttgactcaagcgatcctcctgccttggccttccaaagcatagggattataagcatgaaccaccatgcctagctctccatcttactttctctatatatcctttatataaaattgtatctcatatctagtagttttaatcatatatgtatatatatattaattacaatgttaactcttagttatcctaatttccagtggaaaccc

SEQ ID NO: 331489 - DNA, 570 bp, Homo sapiens
cattaatctgctgaagtttttattattcaatgatttagggaatttttcacataatggaataattagtaacaacacaagcagtcatggcataaaagagtaatgagaactaacattgtcaaactcttacatggtgttaggtcctatatttaatacaactttacatttatagtatcatttgtaaatttatgactcattcttccaacagtggtgaggttggtttatctaaacttaaaagatgcagagmccaagacccagggagtaacttggctacgatcacacaactatgaagttttataaataacccagattctacaccaagaagtctgactcaagagctcatagtgtcagtaggggggtgtagtcgtatatatgctgtctgtatgtttctcctagtttgtttaaaaaacacttacatgtactccttttccagaaaaagaagtttagcatactttgtttctttttctgattatctaaaccaagtaaatctaagacaagttagaatacaaatgccaaaaaaaaaaaaaaaaaaaaaaaaacaaaaaacccacaactagagcaagaaatactgat

SEQ ID NO: 331490 - DNA, 570 bp, Homo sapiens
cattaatctgctgaagtttttattattcaatgatttagggaatttttcacataatggaataattagtaacaacacaagcagtcatggcataaaagagtaatgagaactaacattgtcaaactcttacatggtgttaggtcctatatttaatacaactttacatttatagtatcatttgtaaatttatgactcattcttccaacagtggtgaggttggtttatctaaacttaaaagatgcagagaccaagacccagggagtaacttggctacgatcacacaactatgaagttttataaataacccagattctacaccaagaagtctgactcaagagctcatagtgtcagtaggggggkgtagtcgtatatatgctgtctgtatgtttctcctagtttgtttaaaaaacacttacatgtactccttttccagaaaaagaagtttagcatactttgtttctttttctgattatctaaaccaagtaaatctaagacaagttagaatacaaatgccaaaaaaaaaaaaaaaaaaaaaaaaacaaaaaacccacaactagagcaagaaatactgat

SEQ ID NO: 331491 - DNA, 620 bp, Homo sapiens
agcaggagaaacataattcatctctgctctctttattctactctcatatcatggcaaagaagcaaacaaaaagtatagccccccaccctcaaaaattataataatcacccatatagagaagagctttgttaacrcatgtagtctttttagaaccatcgaatttctgggaactagctttgaaagtagaagttaaaaatgattttgcaatacttatgaatgattgtcttacttcccttttgttagcattctgctggcaaaaagccagaaaacagttgtttaattacccaggacaacaaaaacatataacctcttagataagctgttactgtattttagcagcaataatactagggtcaaaagtaacaaagaaaattaatcttcaaataagcaaacctcaaaagaacagctttgtgtattgagaataattaataacttgtttaggaaaatgttactgaaatgtggtttttggaaaaggaattgacactcttcagaggttagagatcctagtatttaacaagctaccatttggtggacagctggctggctaccctgtaggcatggtaaaagtttgttcacatgttattatgcaacgtttagacaatatcttaatgataccatgt

SEQ ID NO: 331492 - DNA, 598 bp, Homo sapiens
ttacaaaacagcccaaaggaaaagctgacatagctttttagattatatctcattcttctttttcttttctgtgcagcctttcttttacagcacagttgaatctctaaatacccractactttgcattgttaggtcacctcttaggttagcccgagaaagcctgagaaaagttccacaggaaagatgcactatttaacggaattcaatctctcccaatagatttgaatcactaacataaatgtatgaatgtagattatatctctgtaatgaggcctgaatcattctcagttacttcaaaggactgaaattctaccttccttttttagctgcaataatcaggtcttaatgggttcctttattaattgtttctttgctaggattgaaaaggacagtacaagcttcagattagagtggtacctactaattctcaaaggctgtttttctcttttatctaacttctggaaggcatactttatttctatgcccttaaacatatctgctactatcaggctagctctgtattgagagaaatagatgcagccttttgttacgtgtgatgtcttgagaaatgattgaggctttttaaaacaagaccatg

SEQ ID NO: 331493 - DNA, 598 bp, Homo sapiens
ttacaaaacagcccaaaggaaaagctgacatagctttttagattatatctcattcttctttttcttttctgtgcagcctttcttttacagcacagttgaatctctaaatacccgactactttgcattgttaggtcacctcttargttagcccgagaaagcctgagaaaagttccacaggaaagatgcactatttaacggaattcaatctctcccaatagatttgaatcactaacataaatgtatgaatgtagattatatctctgtaatgaggcctgaatcattctcagttacttcaaaggactgaaattctaccttccttttttagctgcaataatcaggtcttaatgggttcctttattaattgtttctttgctaggattgaaaaggacagtacaagcttcagattagagtggtacctactaattctcaaaggctgtttttctcttttatctaacttctggaaggcatactttatttctatgcccttaaacatatctgctactatcaggctagctctgtattgagagaaatagatgcagccttttgttacgtgtgatgtcttgagaaatgattgaggctttttaaaacaagaccatg

SEQ ID NO: 331494 - DNA, 598 bp, Homo sapiens
ttacaaaacagcccaaaggaaaagctgacatagctttttagattatatctcattcttctttttcttttctgtgcagcctttcttttacagcacagttgaatctctaaatacccgactactttgcattgttaggtcacctcttaggttagcccgagaaagcctgagaaaagttccacaggaaagatgcactatttaacggaattcaatctctcccaatagatttgaatcactaacataaatgtatgaatgtagattatatctctgtaatgaggcctgaatcattctcagttacttcaaaggactgaaattctaccttccttttttagctgcaataatcaggtcttaatgggttcctttattaattgtttctttgctaggattgaaaaggacagtacaagcttcagattagagtggtacctactaattctcaaaggctgtttttctcttttatcyaacttctggaaggcatactttatttctatgcccttaaacatatctgctactatcaggctagctctgtattgagagaaatagatgcagccttttgttacgtgtgatgtcttgagaaatgattgaggctttttaaaacaagaccatg

SEQ ID NO: 331495 - DNA, 630 bp, Homo sapiens
gaatatcagcttttaattaaggtgacttttgaccacagcactctttaaacaaaaaaaagtttttgtttcaaaactcttatcagattttagccaggacaaacagctgatattcctggcttttgaamattttttttttttaatcaatgatcccctttcgagcaactcatcaaaaccaataagacttaaccaaagttataacttaacccaggatgcatgaggcatcttcaaagaagtgaaaagccgttctcacaacatccaaaaccactcccaaaacagctcaaggaaaggtagcttcactagctgcaaatggaatccaacccacattaatgtccagccatgttttctataatctcagcttctcatctgagcacctatgcatgaaggctcaaaagccccatatgcctcataaatggaaaaaagacaggcagtcaaacgttcatggaagggaagaggatccataacaaataggtacttctaaaagtgaataattatacaaacaatttcaaacaaatgggatttattcccttaccagtaattgaacccaggctgcagtagtaaaagtgctgaatcccagccactagatcacagcgggaagtgttgttgctgttgtcgttttattttgttttttaa

SEQ ID NO: 331496 - DNA, 540 bp, Homo sapiens
aggctgtgtcatgggcatgcgtcctcaatcttcgcaaaataaacttcataaattaactgagacatttctcagatatttggtgctcacaacaggaatattattcctattctgacattgttccacttttcttctattctagatttaaatttatttcccttttctgaaaagaagaaacatgtgcattgtgaatttcctaaaacctctctgcctaagagatgcatggaagccaagggaacaagtaragagggatgagttgagctcacacgggtagaaggagaaggagcagttgaaggagtaagggagaaagcctctgaagtcttttttaatatttcaaatatctttttgtttacctcttgaatggaggcaattttttgcatgatttctttcagaagtttttaaagccaagtgctggtcagtgcttctgcttcccaataaataaaaaaaaagttatttctttaaaaagacatttttaggtgccattggaagtctccaatttgtctggttctaaaaccagctatttacaatggtgtacacaaacaa

SEQ ID NO: 331497 - DNA, 603 bp, Homo sapiens
agttcttgatgtcagcccctttcctagatctactgttggcaaaaatcctatctgctgtatttcattacaaactaaaatctcatgggaattcttggagggttcactttacgttgttgttcaataatccatatggaaagagtcttagaaatactgaagcattttgctttgactcttccttaatttaaaagttattccattttgtaactaatgcctcttttccacgtttaaatatcttataaacactgtcatcaggttctggagctttactattctcttgcccctgacagctataataacctcttcaaaacaaaagaartaaataattcataacctggaaaatggacctctgagtaattgagttattcgtgtatatttgaatagatattaggaattattagaccacattctattttaagggatcattatgatatatagaaataaatgtacattatatgactcagagaccaagtaacagttacttaaacttaggagtacaacctttccatgaaaggctatttctccttaactgagagttttatgaaaatttggctacaaaactacttgggaatttatctgtttaatcatgatgcatattgattagca

SEQ ID NO: 331498 - DNA, 596 bp, Homo sapiens
atatcatggctacagttcttgatgtcagcccctttcctagatctactgttggcaaaaatcctatctgctgtatttcattacaaactaaaatctcatgggaattcttggagggttcactttacgttgttgttcaataatccatatggaaagagtcttagaaatactgaagcattttgctttgactcttccttaatttaaaagttattccattttgtaactaatgcctcttttccacgtttaaatatcttataaacactgtcatcaggttctggagctttactattctcttgcccctgacagctataataacctcttcaaaacaaaagaaataaataattcataacctggaaaatggacctctgagtaattgagttattygtgtatatttgaatagatattaggaattattagaccacattctattttaagggatcattatgatatatagaaataaatgtacattatatgactcagagaccaagtaacagttacttaaacttaggagtacaacctttccatgaaaggctatttctccttaactgagagttttatgaaaatttggctacaaaactacttgggaatttatctgtttaatc

SEQ ID NO: 331499 - DNA, 512 bp, Homo sapiens
tgagcctgggaggtcaaggctgcagtgagccatgatggcaccactacacttcatcctgggtgacagagtgaggaaaaaaaaaaaaaaaggatgtatcagataatttacttttagctgaatattaataagagtagactaacatttatatacggatttctatgtgcaaggtacactctttgaattggccatcttattaaagtcttacttaatcttcctgacattatagcgattactattagaattcccattttacagatgaagaatttgaggtcaakggggagattttttttttttttgcccaggtcacagagccctccaaagtcaggtttcatattaagcctattttattctaaaatctgtgcttgacatgattatatcaaaccgccttttcccaggagagaatttaacagaatacaaggaagctaaacatttccaacaccatgatatttgtctttcttttcgggtctgtgctctctgattcctttatgctgctgttactgtcacctgttaac

SEQ ID NO: 331500 - DNA, 512 bp, Homo sapiens
tgagcctgggaggtcaaggctgcagtgagccatgatggcaccactacacttcatcctgggtgacagagtgaggaaaaaaaaaaaaaaaggatgtatcagataatttacttttagctgaatattaataagagtagactaacatttatatacggatttctatgtgcaaggtacactctttgaattggccatcttattaaagtcttacttaatcttcctgacattatagcgattactattagaattcccattttacagatgaagaatttgaggtcaaggkggagattttttttttttttgcccaggtcacagagccctccaaagtcaggtttcatattaagcctattttattctaaaatctgtgcttgacatgattatatcaaaccgccttttcccaggagagaatttaacagaatacaaggaagctaaacatttccaacaccatgatatttgtctttcttttcgggtctgtgctctctgattcctttatgctgctgttactgtcacctgttaac

SEQ ID NO: 331501 - DNA, 549 bp, Homo sapiens
catgacaacataaaaagtcagtacattgtatctaaaattgatacatctactttagaagccaagagaaaaatggaaattagataattaataggattaccctcctaaaataaaaatctcagaataacattctccaataaagaccctctgcttttgtggtacatttgttctctatgtgatgcaatacatatacgcttatccttggcatacacaatggctcaagccttttagcagttgattatgtgcagtgttataccccaatgagagcctcctaacaagatctgaagtcagcaaagtcaaattatcatcttgtacttcttttgcaccatctaagcacctttggagagtgcttatatttaatttatgtgccagtaaagttttgaggattgctactaggtaatgctattaacttgcatatttttgcataaaagattttggaagaaaaagttatattggcacacagggaatgggatagcattgcaaaaatcacatgcatattsaaagataatgacatatgatattctgaatcctacagggaaatcaattcttaat

SEQ ID NO: 331502 - DNA, 567 bp, Homo sapiens
cataaattttcaaaaacttatagtcttcattctaaaattcattcattgaaacttttattgtaaacatatttacactagatcacctagtatcttatttttaaatgtgctgaattttgcatattcatctttttatgtgcttcattaaatctttaaattgtagacatatatcttataggagttcttgtgaataattagaaacaatgcagaaatcttgcttcctttgttctaattctcatatcttcttttctgaatgactactttaatctcccagatattctttgagcctgcagtctcataatactctgtgttccatgttcccaacagagttgtatttctaaaataataatatgawcaagtcactttcaggtgtaaattttaaaagaatctttccaatacctatgcaataaagttaaaaatatttgactttgttaacaaaaaaaaaagatattatatattctatctaacgttccagcctcatgttctacctcttccttttcaataaagttttctaatggcagttgaaaatatttcaaagtgaaacagtatagatttgagaacagtaggtga

SEQ ID NO: 331503 - DNA, 585 bp, Homo sapiens
atcacatgtattatgatagtcaattgttatagaatatagaataaagagtatagaataccaaattacatataatacatatgatactgtattgtagaaaataatgtagaataatttggtacagaaaatctaagtttatgattaktatctgttacttgctagctacatgactttgaaccaactactgtctctctgagtctcaatttccttgtctaaaaatagatataataataactaaattatcctataaggctcatgttcagctcaaatactataaaaggaacatagatgaaaggattttgaaaaactttcaaaaggtacttttaaaatgcttagttgtattactattgtaaccactaaaaccaagcaagaattaatgggtaaagctataagcaataatttatgtatagacctttaaaggttagaagtcttctatgcaaatgttagtccctggacttacatcaatgaaagtattcaaatattgcatagatgactatttgattgggctatcacggaagaaatgtaggcatcagatgagtgtccacaagttttgaaaacattttttccttaatcatacttttttgaaaa

SEQ ID NO: 331504 - DNA, 576 bp, Homo sapiens
aggtcactaaacacacacacaaaataagagaaatatatagaagtatagtagagaaaaaagcaatgagaaacaaaagtgaagaggtaaatatgaccaagatcatattatgtcttatatactgtattatggtaagacatttgtgtttgaaacrataaataatggatgccattggaaaatttaaaaatctagagtacaaaaatattatataataattattgtgttagtttgccaaagctaccatgacaaagtactacaaactgggtggattaaacaacagaaatttgttgtcttacagttctggaggctagaaatatgaaatcaatgtattggcagggttaatttataaagggtgtgagaaaaaaataagttttatgcctttcccctagtttctagtggttacctataaatctctggtgtttcttgactgtagatgtgtcaccccatctctgctttcatgctcacatagtgttttccctgtgtgcatgtatgcgtccatatttccccattttgtaaggataccagtcataatgaattaggggctcgccctactccaatatgccctcatcttaattaatt

SEQ ID NO: 331505 - DNA, 501 bp, Homo sapiens
ttgtagaattattgataaaaaaaggaatgttgtagaagaaagtttgaataaagatcatgtgcttagctttaatatacctgtgagacatcccagtcaacacggtaaakggaccagaaaacatgaatcaaaatctcaggttagagattgtacatttggaactcgggaaaatcaagatggtaagtgacactgtgagcaactaaaagaagtaaagggaaaaagaatattggaaatagtaatatttaaaagttggtttaagaaaaaaataaaacccataataactcagaataagtaaagacagaagtaacagataatgggattctagaaaccaacgaaggatagtgttaataaaaagaaggaaaaagtggtcagtagtgtcaacagtaacagatttctagtaacagaaaattatcctgtggaaatcattggtgactttagcatgggcaatttggtgaagtatagcaaagacgcattatgtgtgcatcacacctacttgaattcagt

SEQ ID NO: 331506 - DNA, 349 bp, Homo sapiens
attgcaaagaagtttaaattttttccatggaaggttcaataatttgagtctataaaacaaactgataacagaccaggttaacagraaaagaaggcatacaaacttattaacatgaatatatgtgcatggggtaatacaaaatatgaaaactcaaaggggccagatagtttacacttttatatcatcttgagattacaggaaacttaggggcttggatcatggtaagacaggttatgtgagggagagaaaaggcatggctagtgaaggctgtcttatgcagatgaagcctctaaggtagcagcactcagaaagagtagatggtagcctgttgtaacagtttctctgccag

SEQ ID NO: 331507 - DNA, 562 bp, Homo sapiens
tttggtgctaggaggtctatttaagctcatttaggacctgagattgtcccggcaggtacatgagtccaggagagaaatccaagcagggagaagaagaaaggaggagaagggaaggaagggaggagaagcagaggagcaggaaaggaggaaaggaaggaggagtaggagaaggaggaagaagaagaagaaaaaaagtcaatggcctattagaaaggattcttagataaaagcaagttttctttgcagtatttgtatgccttccgttgcttttggccataaggacagtgctctgctggtgaattcattttctagatgcagcaagagcaggtatgctatgcttatgtcagagcaggtgattgggtgagaaggataagcagaaagattttgaaactgactctcaggcttctctgtctttgctagctggagctaactcatcttggaataattagttcttttaataaaagtaatgacyataaaaatagaatttattctaatttaatagatgtaatagatattatttatgtaaatgggttttgatgtctctactgttttcaacttcttc

SEQ ID NO: 331508 - DNA, 556 bp, Homo sapiens
tattgagggaggtgaagatgaggaagagggagatagaaatctctactttaatttggtatgcacttgtggtgtccctataggtggtgttgatatggacaggaggcagggaaatactgggtagaagagggctgatctcctacaaaggccccaccctcaagcctggaaacctgccgcyttaagtaagaacaggcattcctgttttcatgaccaaaagttgtcttttggcctgccacgcccctctatcctgtacccataaaaaccccaaacccctggctccatgaggagatgaacagaagaacagaaaaatggcagaatggcacggcctagaggagttcagctggggaggttggagaggagattggccgctggatggccaaactccaggaaaagattatcttctcactcccatcccccttccagctccccaaccatcccactgagagccacttccaccactcaataaaacacttgcagttatccttcaagtccgtgtgtgacctgattcttcctggacaccagacaaggacctgggtaccaagaggtcactgagctagtt

SEQ ID NO: 331509 - DNA, 556 bp, Homo sapiens
tattgagggaggtgaagatgaggaagagggagatagaaatctctactttaatttggtatgcacttgtggtgtccctataggtggtgttgatatggacaggaggcagggaaatactgggtagaagagggctgatctcctacaaaggccccaccctcaagcctggaaacctgccgccttaagtaagaacaggcattcctgttttcatgaccaaaagttgtcttttggcctgccacgcccctctatcctgtacccataaaaaccccaaacccctggctccatgaggagatgaacagaagaacagaaaaatggcagaatggcacggcytagaggagttcagctggggaggttggagaggagattggccgctggatggccaaactccaggaaaagattatcttctcactcccatcccccttccagctccccaaccatcccactgagagccacttccaccactcaataaaacacttgcagttatccttcaagtccgtgtgtgacctgattcttcctggacaccagacaaggacctgggtaccaagaggtcactgagctagtt

SEQ ID NO: 331510 - DNA, 523 bp, Homo sapiens
ggcctttctctgcttaggcaacacataatgaagcctcgcaaaagcgatttgatgttgttttctgaattctgtgctacctcctgagttgtgaaagacttacttggcccgaacctttctcttgcttcctcttttctcatcgctaacatgacttgtaaaagtaactttaaagaaaaggatcctgttgccatgctgtatccttgctggatcacacacgaggtgtttagatgaagctttatgccctacgggcctgtctgccctgtacaaacattacagtgcccatgaggctctgtaatattagaagsgctgataccaattttggaacctggttaaaccctgggggagatccaagaccatgagttctttttggcaggccaggccacctgctcacaaacaagaaacatgcagggggtttgcaaccaactattcagaaagaaaataaagttatggatgccagaagcttcataaattactacacaatctcaggaaagggggagttaagaggctaggaagcggacaactgcaa

SEQ ID NO: 331511 - DNA, 558 bp, Homo sapiens
ataaacatgagggaaaagaccttggaattatgtttgcaatgtagctctgctacttcctagctatttccgactccctgagactggtgcattcataaaagggttaacagtaactatataataggagagcaataaggtttacatgagctaatccttttagaatggcttctacaaggcaagaactgaatagatcttcaccaggytctaagctcctcttgatcagggaggctataatattcaattatccatattcataattcctggtatataatgggtcctaattaaggtacttttgcaatgtaagagaactattgttttagttttttattgctgtataggaaagtaccataaatgtagcagttaaaaaagaaacaaacacatgcacattttttacctctccattatataggacaaaagtctgaagatggcatggctgcattcttttcaatgtctcacaaagtaaatagtaagcttcaatatcaaggcatcttctctggagcttgaggaaactatttctaactcacaagatagaggcagatttcatttttgtgtgtgtgattt

SEQ ID NO: 331512 - DNA, 518 bp, Homo sapiens
acccacatcaaaatgttagaaaaatctcaaattaacaacgtaacctcataactagaactagaagaactaaagagatcagaaaaaatgaaccccaaaactagmagaagacaacagataaccaaaatcagagctgaattaaaggaaattgagatgtgaaaaaccataaaaaagatcaatgaatccatgagttggttctttgagagtaataataaaatacatagattgttatctacactaattaagaaaaaagagaagatccaaataaacacaattagaaatgacagaggagacattaactctgaccccacaaaaattcaaaaaaatccttggagaccactacaaacacctcttctatgatacgcgctggaaaaaatagataaaattcctggaaacatacaacctcccaagattcaaccagaaagaaattgaataccaaaatgagttctgaaattgaatgagtaataaagtgcctaccaactagaaaaatctcgagaccagacacattcacagtggaattc

SEQ ID NO: 331513 - DNA, 596 bp, Homo sapiens
cgaccaacagcttgaactgtgcacttggaaaagtcaaagccactcaatgccagcctgggaaagtggctatgggagctgtaccctgcagagtcacagaggtggagcttcccaaggccttgggagctcacccattgcatcagcgtgccctggatgtgagacatggagtcaaaggagatcattttggagctttaagaattaatgagctccctgctgggttttggacttggatggggcctgcagccctttgttttggtcaatttctcccatttggaatggaaacatttaaccaatgcctgtatccccattgtatcttggaagtaactaacttgttttgtttattttactggctcataggcaaaagggacttgctttgtctcagatgasaccttggacttggacttttgaatcaatgcaggaatgagttaagactatggggggctgttgggagggcatgattggttttgatatgtgaaaaggacatgagatttgggagggaccaaggcagaatgaaatagttgagcactgtgtttccaccaaaatctcatcttgaattgtaatccccacaagataagtgagggacctggtgcagagtgatt

SEQ ID NO: 331514 - DNA, 557 bp, Homo sapiens
tcaacatcagtgattatcagagaaatgcaaatcaaaactacaatgacaaatcatctcacccaagttaaaatggcttttacccaaaggacaggcaataaaaaatgctggcaaggatgtggagaaacgggaaccctcatagactgttgtaagaatctaaattagtacaagaaatatggagcattccagtgctcagcatatactcgaaagaaagaaaatcattatatcaaagagatatctccatccctatgcagatatctattgcagcactattcacaatagccaatgtttggaagcaacctatgtctccatcaacagacaaatggaaagaaagtgtgttacatatacatgatgtagtactactcagccatagaaatgaatgagatactttcattttcaacaacatgaatggaactgaaggacattatgtaaagtgaaataagycaaacacagaaagacaaaattatcctgttctcacttacttgtgggagctaaaaattgaaacaattgaactcatggatatagagagaataaggatggttaccagcagctgggaaggg

SEQ ID NO: 331515 - DNA, 557 bp, Homo sapiens
tcaacatcagtgattatcagagaaatgcaaatcaaaactacaatgacaaatcatctcacccaagttaaaatggcttttacccaaaggacaggcaataaaaaatgctggcaaggatgtggagaaacgggaaccctcatagactgttgtaagaatctaaattagtacaagaaatatggagcattccagtgctcagcatatactcgaaagaaagaaaatcattatatcaaagagatatctccatccctatgcagatatctattgcagcactattcacaatagccaatgtttggaagcaacctatgtctccatcaacagacaaatggaaagaaagtgtgttacatatacatgatgtagtactactcagccatagaaatgaatgagatactttcattttcaacaacatgaatggaactgaaggacattatgtaaagtgaaataagtcaaacacagaaagacaaaattatcctgttctcacttayttgtgggagctaaaaattgaaacaattgaactcatggatatagagagaataaggatggttaccagcagctgggaaggg

SEQ ID NO: 331516 - DNA, 550 bp, Homo sapiens
gtgtttcatatcagtcaggacaagctaggtaaggctgtggtatcaatcaaataaaattttcagcagctaaacacattaacaccttatttttatttatgctacatatctaatgtgagtctggaggggaaaagtactaattctcatagtttatcaggattatgacgtaagaaagggtccatttcaatatatgcgttcaccatcagctatacggggcagaaagaaggtggcaaagtaaaattaattttgaaatttctgggcagaattgacactcacatttctcaccatgaaaaatgatagagacatgcctaacttcaaaggrggtgtagaaatgtaatagtatcctgtggatggacagaagagaagaaaatgccagaggactgacatatgagaatatatatgtgaacccgggaggcagagcttgcagtaagccgagatcgcgccactgcactccagcctgggcgacagagtgagactctgtctcaaaaaaaaaaaaaaaaaaagaaacaaaacaaaacaaaaaagagtgtatatgagtagtaccaatgtgaaa

SEQ ID NO: 331517 - DNA, 559 bp, Homo sapiens
ataaatgcttccctctccccagaatatcagatcctagtccctggaatgtataaatgttaccatataagtataaaagtttttgcagttataattaaggatctggatattgggagatcatcctggatcataagggtgggccccaaacaggattgcatgtgtccttattagagggagtgagagaattttcacacaaatacacactcacccayacagaagaagtgatgtgaaaatggagtagggaaggattccaagatactggccttgaagtgtggagtgatgtcgtcacaagaccaggagtacctgcaattgctagaagaggtaaagagtggattctcccctcgagcctccagaggacactctgctgacaccttgctaataactcagtggtactgatatcagacttctggcttccagagctgtgaaataataaatttcttttttttttttcagccccagtttgtgttaatttagacatcatatgcaaaatagatttttaacattgcatagactctctgattattcaaataacttataaaaataattagaagtctgctattct

SEQ ID NO: 331518 - DNA, 616 bp, Homo sapiens
aacaaaacaaaaaatattcaaatttaataatggaatacaattttaattaaaagaaaacacaaacttttaataaaacatttgcctgtacttcaggcaaaattaaagacatttggtgatggtaattagtattattgatcccaattctccatttctccttgtgttcacagcctttgttcatgtaattttgtagttttyccactggaagtggaatttacttccctcccttctgatgatgggcctaactgtgtacttgttttaaccattaataggtatgaggaaaaggcagcagtgtgtaatcactaagtccaagccttaagaggcatccatattccattttgcttttcttaagcttcttccatccctatgagattttcagtgcactagaatccatgcctctcatttacatctaatacctggtttattcaatggttcagatagcataataaacatgtggggcagatgtggacccaaactgcagcttgaaatattgtccagctaagcccagccttttcaaccagacccctgattaacctaccagcacatgatcacaaatcaataaccactttaaatcaatgagtttctaggtgaactcttacgtggcacttttgtggcaata

SEQ ID NO: 331519 - DNA, 559 bp, Homo sapiens
aaggaactccatttttattttaagcattaatataaagcaccttttcactcttcttccactcacattgcttccactcacctcctctacatcctctcctttccactacccttccactcactcctgccttccaaaacatattcccttcctaaaggatttagtcccttgccaaagaagaaactcactcggcataagacatagggataatctccactattgtgcacactgtggttgaaaatgaagtctttggctgatgagtgtgtgtagatgtattactaatgtgacttctgtagctgtcatataatagctattatgaactagcagacccagaaaattacatggtgtaattgctatttgaatttatatttaatttccagtggaaaatgtggtccagtcaatagtctcaagtttatcagtcaatgaaatcgtaaaatacctctaacttatttactccattcataaaattgaaataaaaacaactattktacaacaatgctcttagaattggaagtacgctaccttcaaataagtaaaaagctttatcattaaatagcatgcagta

SEQ ID NO: 331520 - DNA, 614 bp, Homo sapiens
aggaaacagtgaagttccatgaggcactatgtgaaagttacactctcaatagtttctttcctttcaatgtattttgacaaattacagtgtacacatgccaggttaaaatgatttatggattatattagctagattaagctaaataaatctcccagaatggctaatgactttaaaacatttctgtaagaaaacagtctattaaagtagtatcaataatgcagacacaataaacaatgaaaaaacatgggtatgacatttaacataacctagtaaaaattcttaatcatgaaacaaaaccatgattcttttaattatatctgacaactggtgggtgacagatggaaaaaaattagtttatcagrcatagggattagcattcattattttttaaaataaattgcactctatcttgttgatttctgaggtagtaatgctctgaacttcttacaattttcaacaatctatttcatgtctgtcttaagaatttatactttgagtatccttacatttataaaacttacataagggtaaccacttatatatacaatttattttaacatatattttgaaattgtggttaaaaattgttttggaagagaggtctgtaatttttc

SEQ ID NO: 331521 - DNA, 604 bp, Homo sapiens
aagcttaactgctgtgataaagagatgctaaaatgcagtgcctaaaaaaagacagaagtgggcttatttatttatttatttattttggttttggttttggtttgctctccccgcaccccgcataacaaaattcagagggaattattcaaggctgtgagtcagctctttttttgagatttttcgggacccaggttccttctttttgcgtcagcattacctaggttgtttccctcactcttacagtcagaacagacttagtagggccgtattcaaagacagcccattaaaaaaaaaaaaagggggaaacaacacccaaatcttttaaaggcaagacacagaagttacacactacatttctgttcaaatactcatgaactaactagacgtgaaaactaactagatggtcacagcaagctacaggggaggttcagaaatgaaacactagctggaaagtcatgagcctatctaactctcagatagaagaatatggtctaagttactaaaakaaagaaaagatgaacggataataaggaaaattaactgtctccaggacaaggagcattttaaaaacacatcgtgatcaccatcttattctgtttcctat

SEQ ID NO: 331522 - DNA, 458 bp, Homo sapiens
gattttaacatcacttttaatgctctatttgaaattttaaaaaatgatatacatgatagcattaatccagttttttattaacaataatattacatttccctgtcattaaagataacggaaaatgtattactcttgttgtagtaatattaatattctagctagatgagtctatttaaatctagcatgaaactggcactctggctgattaatatccactgatcatttctgatgctgacaatatatgttaacacattatataattttttcaaaatctttatttttctttggatatatttattaaataagagtaacatttgaagaatcagtaactaataattatccctatcctacaattttccttaggagtatatcatgcacataattsagccatggcattttctgtgagatatttgatactgtggagccctaagcatgcattttaacaatgcgagcaaata

SEQ ID NO: 331523 - DNA, 578 bp, Homo sapiens
atttctgttgcatatacatatgaaaacacttgcattctgcaaaactgtctatacagtattgcagctagtctgtaaatgtcaatattaaaaagcctatgtcaatttccttattcctaatatttaatcaaatatctgcagtttactaactatcaaataaattttagctgggcataaatttattattgagttagagtttctatcttatatacttctgtatatagaaaatrttaaataaaaattctgaggtagaaacatcaatatgattgaacactcctcttaaaaatggagtagtacagttactttggaatgaaatcagtaaaaatctattaatattggacaaattatgtcatacttatttttaaaacatatctgaactcacaagacttaaagaagttaagcaaatacaaaagggaagttaaagcagagtggttaaaactgaagccataacttttcttatttcttaacaacaatcccaggaacataaaagtgtagagatgaatgactccacagagaatagaattctggtacatggacccgtggaagaagacatccctcaacatacattgttgttatctgac

SEQ ID NO: 331524 - DNA, 481 bp, Homo sapiens
agccaccatgcccagccttttattggtttctatttgcatggaatatcttttatttatctctttattttcagtatatgtgtgtctttgtaatgaagtgtgcttcttgtaggcaacagagtgttaggtcttttgtttgtttttactcattcagctactctgtcttttgagtgaagagtttagtccatttacatcgtatgttattattgataagtaatgacttactaccaccattttgttatttgtgttctaattgttttgttgtatgttctttcttccttccttcctgtcttacgttttgtgaagatgattttctctggtggtatattttaatttcttgctttttatattttatgtatctgttgtaggttttttgatttgaggttaccatgaggctggcaaaataacaaaacattatgttaagctggtgacagcttaaccctgactgcamaaaccaatagacaagcaaagagaaaattaataa

SEQ ID NO: 331525 - DNA, 508 bp, Homo sapiens
ataggggagcctggaaagaccttattcagagagtgacttttgaataatcacgtgagagaaatgagagaactggccatgcagatgtaagtaaaaagagaaatccaacagagaaagtaacaaytgcctcaagaaagagtctatgggcagtgttgaagaaaccttactgaggtgaatgagttagaagtgaagaagaaagggaagtgagaaccatatgtggaggtatgatcataattagaaagttaggccagatgcagtggctcaggtctggaatcccatcaatttgggaggccaagatgggtgggtcgcttgagctcaggagttagagatcagcctgggcaacatggtaaaaccccatatctgccaaaaacacaaaaaaaatcagctgagcatagtggtatgcccctgatcccactatgggagggaggctgagatgggaggatcacttgagcccagggggcagaggttgcagtgagctgagatcatgccactgaactccagcttgggtgac

SEQ ID NO: 331526 - DNA, 568 bp, Homo sapiens
ccatcgaacggaatcgaatagaatcatcgaatgaactcaaatggaatcatcattgaatggaatcgaatcatcaacgaatggaattgaatggaatcatagaatggaatccaatgtaatcatcatcgaatggaatcatcatcaaatgaaatcaaatggaatcatcgtatggactccagcggaatcatcatcgactggaatwgaatagaagcaccgaatgaaatcaaatggaattatcatcaaacggacccatatggaatcatcattgaattgactcatatggaatcatcgccgaatggattccaatggaataatcatggaatggattcgaatggaaacatcatctaattgaatcaaatagaatcatcatggaattgaatcgaattgctcaccgacgcatggaatcaaatggaatcatcgaatggaatcgaatggaatcatcatcgaatggaatgaaatggaatcatccaatggacgagaagtgaatcatcattgaatggaatcgaatagaatcatcaagtgaaatccaatggaatcatcatcgaatagaatcgaattgaatcaacatcaa

SEQ ID NO: 331527 - DNA, 568 bp, Homo sapiens
ccatcgaacggaatcgaatagaatcatcgaatgaactcaaatggaatcatcattgaatggaatcgaatcatcaacgaatggaattgaatggaatcatagaatggaatccaatgtaatcatcatcgaatggaatcatcatcaaatgaaatcaaatggaatcatcgtatggactccagcggaatcatcatcgactggaattgaatagaagcaccgaatgaaatcaaatggaattatcatcaaacggacccatatggaatcatcattgaattgactcatatggaatcatcgccraatggattccaatggaataatcatggaatggattcgaatggaaacatcatctaattgaatcaaatagaatcatcatggaattgaatcgaattgctcaccgacgcatggaatcaaatggaatcatcgaatggaatcgaatggaatcatcatcgaatggaatgaaatggaatcatccaatggacgagaagtgaatcatcattgaatggaatcgaatagaatcatcaagtgaaatccaatggaatcatcatcgaatagaatcgaattgaatcaacatcaa

SEQ ID NO: 331528 - DNA, 568 bp, Homo sapiens
ccatcgaacggaatcgaatagaatcatcgaatgaactcaaatggaatcatcattgaatggaatcgaatcatcaacgaatggaattgaatggaatcatagaatggaatccaatgtaatcatcatcgaatggaatcatcatcaaatgaaatcaaatggaatcatcgtatggactccagcggaatcatcatcgactggaattgaatagaagcaccgaatgaaatcaaatggaattatcatcaaacggacccatatggaatcatcattgaattgactcatatggaatcatcgccgaatggattccaatggaataatcatggaatggattcgaatggaaacatcatctaattgaatcaaatagaatcatcatggaattgaatcgaattgctcaccgwcgcatggaatcaaatggaatcatcgaatggaatcgaatggaatcatcatcgaatggaatgaaatggaatcatccaatggacgagaagtgaatcatcattgaatggaatcgaatagaatcatcaagtgaaatccaatggaatcatcatcgaatagaatcgaattgaatcaacatcaa

SEQ ID NO: 331529 - DNA, 424 bp, Homo sapiens
atgattccattcsactccattcagtgattccatttgagtccatttgatgattccattcgagtccatttgatgattccattcttttccatttgatgatgattccattagggtccattcaatgattccattcgagtccattcgttaatgcctttcgagtccttttgatcactacattcgagtccattcaatgattctattcgattccattccatgatgattccattcgagttcattcgatgattgcattcgagtccatttgatgattccataagattccattcgacaatgattccattcgtgtccatttgatgattccattcatttcctatcgatgaagattccattcgagtgtattcgatgattccattcaaatccattcgatgatgattccattccagtccattcgatcattccacttgattcc

SEQ ID NO: 331530 - DNA, 424 bp, Homo sapiens
atgattccattcgactccattcagtgattccatttgagtccatttgatgattccattcgagtccatttgatgattccattcttttccatttgatgatgattccattagggtccattcaatgattccattcgagtccattcgttaatgcctttcgagtccttttgatcactacattcgagtccattcaatgattctattcgattccattccatgatgattccattcgagttcattcgatgattgcattcgagtccatttgatgattccatawgattccattcgacaatgattccattcgtgtccatttgatgattccattcatttcctatcgatgaagattccattcgagtgtattcgatgattccattcaaatccattcgatgatgattccattccagtccattcgatcattccacttgattcc

SEQ ID NO: 331531 - DNA, 543 bp, Homo sapiens
ttcgattccattctatgataccattcgattccattcaatgatgattccactcaaatccattggatgattccattcgtgtccattcggtgatttcattagattccattcgaggatgattccattcgattccattcgatgattccattcaattccattcgatgatgattccattccagtccatatgatcattccatttgatttcattygatgatgattccattcgattccattcgatgattccattctattccattcgatgatgattccattcgagtccattcgatgattccattcgagtccatttaatgattccattgggttcaattcaatgatgattacattggattccgttctatgattccattcaattccgttcattgacaatttgattccattcgatgatgattccatttgagttcattcgatgattctattcgattctcttcgatggtgattcaattctattatattggatgattccattcgattccatttgatgttgattcaattcgattctattcgatgatgattccattggatttc

SEQ ID NO: 331532 - DNA, 543 bp, Homo sapiens
ttcgattccattctatgataccattcgattccattcaatgatgattccactcaaatccattggatgattccattcgtgtccattcggtgatttcattagattccattcgaggatgattccattcgattccattcgatgattccattcaattccattcgatgatgattccattccagtccatatgatcattccatttgatttcattcgatgatgattccattcgattccattcgatgattccattctattccattcgatgatgattccaytcgagtccattcgatgattccattcgagtccatttaatgattccattgggttcaattcaatgatgattacattggattccgttctatgattccattcaattccgttcattgacaatttgattccattcgatgatgattccatttgagttcattcgatgattctattcgattctcttcgatggtgattcaattctattatattggatgattccattcgattccatttgatgttgattcaattcgattctattcgatgatgattccattggatttc

SEQ ID NO: 331533 - DNA, 543 bp, Homo sapiens
ttcgattccattctatgataccattcgattccattcaatgatgattccactcaaatccattggatgattccattcgtgtccattcggtgatttcattagattccattcgaggatgattccattcgattccattcgatgattccattcaattccattcgatgatgattccattccagtccatatgatcattccatttgatttcattcgatgatgattccattcgattccattcgatgattccattctattccattcgatgatgattccattcgagtccattcgatgattccattcgagtccatttaatgattccattgggttcaattcaatgatgattacattggattccgttctrtgattccattcaattccgttcattgacaatttgattccattcgatgatgattccatttgagttcattcgatgattctattcgattctcttcgatggtgattcaattctattatattggatgattccattcgattccatttgatgttgattcaattcgattctattcgatgatgattccattggatttc

SEQ ID NO: 331534 - DNA, 432 bp, Homo sapiens
atcatcgaatggaatcgaatggaatcatcatcgaatgaaatcaaatggaatgatcatatggactggaatggaatcatcatcgaatggaattgaatggaatcatcgaatggaatcgaatggaatcatcctcgaatggaatctaatgaaatcaccgaatggacacgaatggaatcatccaatggatttgagtggaatcatcawtgaatggaatcaaatggtatcatagaatggaatccaatgtaatcatcttcgaattgaaaacaaagcaatcaataaatgtactctagtggaaacatcgaatagactcgaatggaatcatcaatgaatggaatataatggaatcatcgaatgcaatcgaatggaatcatcgaatggactcgaatggaatcatcatagaatggaattgaaaggaatcatcaaatggacttgaat

SEQ ID NO: 331535 - DNA, 432 bp, Homo sapiens
atcatcgaatggaatcgaatggaatcatcatcgaatgaaatcaaatggaatgatcatatggactggaatggaatcatcatcgaatggaattgaatggaatcatcgaatggaatcgaatggaatcatcctcgaatggaatctaatgaaatcaccgaatggacacgaatggaatcatccaatggatttgagtggaatcatcaatgaatggaatcaaatggtatcatagaatggaatccaatgtaatcatcttcgaattgaaaacaaagcaatcawtaaatgtactctagtggaaacatcgaatagactcgaatggaatcatcaatgaatggaatataatggaatcatcgaatgcaatcgaatggaatcatcgaatggactcgaatggaatcatcatagaatggaattgaaaggaatcatcaaatggacttgaat

SEQ ID NO: 331536 - DNA, 432 bp, Homo sapiens
atcatcgaatggaatcgaatggaatcatcatcgaatgaaatcaaatggaatgatcatatggactggaatggaatcatcatcgaatggaattgaatggaatcatcgaatggaatcgaatggaatcatcctcgaatggaatctaatgaaatcaccgaatggacacgaatggaatcatccaatggatttgagtggaatcatcaatgaatggaatcaaatggtatcatagaatggaatccaatgtaatcatcttcgaattgaaaacaaagcaatcaataaatgtactctartggaaacatcgaatagactcgaatggaatcatcaatgaatggaatataatggaatcatcgaatgcaatcgaatggaatcatcgaatggactcgaatggaatcatcatagaatggaattgaaaggaatcatcaaatggacttgaat

SEQ ID NO: 331537 - DNA, 441 bp, Homo sapiens
ttgtgggtctgtggtggtggtgctaactatagggtgagacttctctgtctttagaaaggggagggaagagtgggaaggactgcatcttgtgatttgagtgccagctcagccacagtacaatagaacatagaacaccagtagacttctaaggtttcagacttcagtccctggctrtctaatggagggcaaccctggacctgcccagggcctggaggaactcaccaagtggaaggtaaagacacagccctggatggctttgcacccgctgattgtagagcctcagggccctaagcaaacataggcagtagcaggtagtggttatagcaggccttgggcaagaacctgctggcttcaagtctgacccagagctgtcctagtggtggtgactacaggagggcttgggtttctctaccctcagctttaggtggttcagaacagaga

SEQ ID NO: 331538 - DNA, 527 bp, Homo sapiens
gactccaatggaataatcatcaaatggaatcgagtggaatcatcgtatatacwcgaatggtaacatcgaatggaatcgaatggaatcatcaaatggatttgaatggaatagtcatcaaatggaatcaagtggaatgatcgaatggactggaatggaatcatcatcgaatggatttgaatggaatcatcgaatacacttgaatggaatcttcatcgataggaaatgaatggaatcatcaaatggacgcgaatggaatcattgtcgaagggaatcatatggaatcatcaaatggactcgaatgcaatcatcgaatgaactcgaatggaatcatcatggaatggaatcgaatagaatcattgaatggactcgaatgtagtgatcaaaaggactcgaaaggcattaacgaatggactcgaatggaatcattgaatggaccctaatggaatcatcatcaaatggaaaagaatggaatcatcaaatggactcgaatggaatcactgaatggagtcgaatggaatcatcattga

SEQ ID NO: 331539 - DNA, 527 bp, Homo sapiens
gactccaatggaataatcatcaaatggaatcgagtggaatcatcgtatatactcgaatggtaacatcgaatggaatcgaatggaatcatcaaatggatttgaatggaatagtcatcaaatggaatcaagtggaatgatcgaatggactggaatggaatcatcatcgaatggatttgaatggaatcatcgaatacacttgaatggaatcttcatcgataggaaatgaatggaatcatcaaatggacrcgaatggaatcattgtcgaagggaatcatatggaatcatcaaatggactcgaatgcaatcatcgaatgaactcgaatggaatcatcatggaatggaatcgaatagaatcattgaatggactcgaatgtagtgatcaaaaggactcgaaaggcattaacgaatggactcgaatggaatcattgaatggaccctaatggaatcatcatcaaatggaaaagaatggaatcatcaaatggactcgaatggaatcactgaatggagtcgaatggaatcatcattga

SEQ ID NO: 331540 - DNA, 527 bp, Homo sapiens
gactccaatggaataatcatcaaatggaatcgagtggaatcatcgtatatactcgaatggtaacatcgaatggaatcgaatggaatcatcaaatggatttgaatggaatagtcatcaaatggaatcaagtggaatgatcgaatggactggaatggaatcatcatcgaatggatttgaatggaatcatcgaatacacttgaatggaatcttcatcgataggaaatgaatggaatcatcaaatggacgcgaatggaatcattgtcgaagggaatcatatggaatcatcaaatggactcgaatgcaatcatcgaatgaactcgaatggaatcatcatggaatggaatcgaatagaatcattgaatggactcgaatgtagtgatcmaaaggactcgaaaggcattaacgaatggactcgaatggaatcattgaatggaccctaatggaatcatcatcaaatggaaaagaatggaatcatcaaatggactcgaatggaatcactgaatggagtcgaatggaatcatcattga

SEQ ID NO: 331541 - DNA, 604 bp, Homo sapiens
cgactcttattccacttgttcagaccgaacatatgcggtcacttgtgtcccctcttattctcctagtcaacatccaattgagcagcaagtccagtgctctctgccttcaagttagttatattgagaatgaccacttttaggcccctcctctgatactacattgggtcaagccagtgtcatctctcagcattactgggacttgggttaattaggtaagatgaaacatgaaggattagaaataaaggctgaatacagacttaaaaccaggaatccagactaaacactcaaacatggagtccatcgtggccccagggcctttgcgcttggcattctctccatctggaacactctgcccattgcgttagttgttctctaaatgccttcaggcattctcagaaacgtcctgactttgtcttccttcatggtacatgtcatcacctgcctgtgtattgtttccttatttttttctctttctttcctactaggctgtcagcccatcagaatggagayttctgcctgcttctccccttggtgtgccttggtttctggaacaggcccagcatgcagtggggtctcagtgaatgtgcactgaaggagtagatac

SEQ ID NO: 331542 - DNA, 582 bp, Homo sapiens
tctgattggcgaggttgaggtcatgtggcygctgttgccagggatacttggagctgctcccctgttttggtgggagatagtatacccactggcttctgtgtaacagaatccacggaggcatttttccctctcccaccacctcctccccaggccgcatttcacccatcccagaaaggaacaaggagcagacttctgtctgaagataggatttgggattcccctcagcttcaagatttgctgcttgtcctggtgccatcggctactcactcaaccaacatgcaatgagcaccctcgacataccaggctgtcactaggtgtgatacaaggatgagcagggctaatgggactcctgtcctccaggagctgacactctagtggaagtgcacagacaaatcaaagaccaattcagatcagatgagtccagatgaggaaagagataggatgggatggagggtgccatggaggtgtccccagcaaatcccaatttgctcacttcaccatgcactcagcctcatgcagtgtagatcataggaaatggagtacacatcatagaaagtcgccttcacgttcaggcagctgatg

SEQ ID NO: 331543 - DNA, 582 bp, Homo sapiens
tctgattggcgaggttgaggtcatgtggctgctgttgccagggatacttggagctgctcccctgttttggtgggagatagtatacccactggcttctgtgtaacagaatccacggaggcatttttccctctcccaccacctcctccccaggccgcatttcacccatcccagaaaggaacaaggagcagacttctgtctgaagataggatttgggattcccctcagcttcaagatttgctgcttgtcctggtgccatcggctactcactcaaccaacatgcaatgagcaccctcgacataccaggctgtcactaggtgtgatacaaggatgagcagggctaatgggactcctgtcctccaggagctgacactctagyggaagtgcacagacaaatcaaagaccaattcagatcagatgagtccagatgaggaaagagataggatgggatggagggtgccatggaggtgtccccagcaaatcccaatttgctcacttcaccatgcactcagcctcatgcagtgtagatcataggaaatggagtacacatcatagaaagtcgccttcacgttcaggcagctgatg

SEQ ID NO: 331544 - DNA, 524 bp, Homo sapiens
tctttcatagtattttgctattataactatgggcatactatatgcccatccacccattcatccatycatccattaggcagatatttattaagcatcttctacatgcaaagcactattttaggacctgaggatatataggtgagatacataggtcactttctttctattggatctgaatatgtaaacaaataaacatgtaattacagattatgttaagtgacatgagagagataaataaggtgatgagatagagagtaactggaggaatgtatatgcaaatatttgttaactaagggctaaaactgtggaagttgtagatgttaaacttgtatgattcaatttcttctgtctcgtagcaaagataatcctgaagtttatgttttattttctgaaacacattaacttattttttatctagaaatcttagtcctgtttagagaaaaacatcatgtaaacccaatttctcaaaatgttgtggagaatagttttatcttcttattggtttcctcattaattaatgagtt

SEQ ID NO: 331545 - DNA, 533 bp, Homo sapiens
atttattaagcatcttctacatgcaaagcactattttaggacctgaggatatataggtgagatacataggtcactttctttctattggatctgaatatgtaaacaaataaacatgtaattacagattatgttaagtgacatgagagagataaataaggtgatgagatagagagtaactggaggaatgtatatgcaaatatttgttaactaagggctaaaactgtggaagttgtagatgttaaacttgtatgattcaatttcttctgtctygtagcaaagataatcctgaagtttatgttttattttctgaaacacattaacttattttttatctagaaatcttagtcctgtttagagaaaaacatcatgtaaacccaatttctcaaaatgttgtggagaatagttttatcttcttattggtttcctcattaattaatgagttgaataaaatctttgacacatttttaaataattacaagtaatacacatgataatgaatcaaccacataaaccaagaactacaactatttctc

SEQ ID NO: 331546 - DNA, 627 bp, Homo sapiens
ggaaaaagacttgtaaatacagttaatcaagaaatcaatcatgtaatttagctaattgtacagaacaattatttgagttgttaaatattagcactttgtaatgaattttgggacttctgtggtttcttagataaatgaaagaaaataattacttgaactttcatgtaacatcagaaggaaaagatggctttggttaaataaaactatcctaagagcaataaattrttgtatctgagaatacataagatttcatgcttttgatttgtatttcttcaatttcatagactatttaaaataacctcttaaaatcactgataaaattactgtggtaattaatttttaagtcattgtttattggagtaaatgcaattgctatttaaattggcatcactcctgcagttacagaactttgtttaaaagcaaaatattataacattatttattaataaggttagaaggcagagattgtactaattaatttatttttcatttcccccaccatgagtgcttcaatacatctatctttaaaacaaacatttttcttttggctgcattttgaggtagccaggtatatacacttaagggccttctcaatgccataaattcagagaaagttttggggagaaa

SEQ ID NO: 331547 - DNA, 627 bp, Homo sapiens
ggaaaaagacttgtaaatacagttaatcaagaaatcaatcatgtaatttagctaattgtacagaacaattatttgagttgttaaatattagcactttgtaatgaattttgggacttctgtggtttcttagataaatgaaagaaaataattacttgaactttcatgtaacatcagaaggaaaagatggctttggttaaataaaactatcctaagagcaataaattattgtatctgagaatacataagatttcatgcttttgatttgtatttcttcaatttcatagactatttaaaataacctcttaaaatcactgataaaattactgtggtaattaatttttaagtcattgtttattggagtaaatgcaattgctatttaaattggcatcactcctgcagttacagaactttgtttaaaagcaaaatattataacattatttattaataaggttagaaggcagagattgtactaattaatttatttttcatttcccccaccatgagtgcttcaatacatctatctttaaaacaaacatttttcttttggctgcattttgaggtagmcaggtatatacacttaagggccttctcaatgccataaattcagagaaagttttggggagaaa

SEQ ID NO: 331548 - DNA, 647 bp, Homo sapiens
attatatgtccctcccctaactttctttctatctgcaattgcaatgttatctattacttgaactctatgaaattgttgaatattagacacttttacctcaaaatagcaattttctatggttcaaccaaatatatttccagtgaactcaccagctgtaatccattacagataatgttcaagatgtctgtttgagattcattcaaaagatctaagattattttggaaagctattaaccatacaacaacaaaataaatttctagtgtgtgtgtgtgtgtgtgtgtgtgtgtgtgtgtgtgtgtgtggtgtcattctcacagcatgtaaaatattgttaaaagtaggaagaagaagaccactaccatttatagaayatctgttaagtgccacaccccaggttgggacattacccaatttcttctgttttagcttaatgaccagtttttcatattattgcacctattatagaggcaaaatatgcttacaattagaatcactagattaaggccactcagactacagacaatatagccagatttcattctctggtccatctgtctccaaatcttctgttatttctaacacactcactgtgttttgtgtcacaattttgatattatttttatacataaaatttcccaagctcaat

SEQ ID NO: 331549 - DNA, 647 bp, Homo sapiens
attatatgtccctcccctaactttctttctatctgcaattgcaatgttatctattacttgaactctatgaaattgttgaatattagacacttttacctcaaaatagcaattttctatggttcaaccaaatatatttccagtgaactcaccagctgtaatccattacagataatgttcaagatgtctgtttgagattcattcaaaagatctaagattattttggaaagctattaaccatacaacaacaaaataaatttctagtgtgtgtgtgtgtgtgtgtgtgtgtgtgtgtgtgtgtgtgtggtgtcattctcacagcatgtaaaatattgttaaaagtaggaagaagaagaccactaccatttatagaatatctgttaagtgccacaccccaggttgggacattacccaatttcttctgttttagcttaatgaccagwttttcatattattgcacctattatagaggcaaaatatgcttacaattagaatcactagattaaggccactcagactacagacaatatagccagatttcattctctggtccatctgtctccaaatcttctgttatttctaacacactcactgtgttttgtgtcacaattttgatattatttttatacataaaatttcccaagctcaat

SEQ ID NO: 331550 - DNA, 555 bp, Homo sapiens
acttggaaaattcagcaagtaagcattaaatgatatttacaaagtgcatagtaaagtgcttggcatataggaaacacttgataggtgcttgttaaagaagtaggatagtttctttgtttgcaaaagttgggattttcataacattttcatcatgaagggttgcacaaaataatgcctaaaaagtgctatccaatgtgtggtacaaagaaagtacatcagattattaaataataatagagtgtcaagaagtaagcatagtgtaactgtagacatacatataatacaagtaaaaattagagattttttatatttttctctttagtacatttttttgacagtaatgctataggcaagcttgtcttggttttgcaagttcaragaaataactattacccttttaatacattttattgtttttaatgaccattaatttgagaaatgagaaattcctgtctcacatttgccattgtaaatgaatctatttttgttacatggtttaatggtataaaagtgctgggcagttaacttcataactaacacaggggctaataagat

SEQ ID NO: 331551 - DNA, 636 bp, Homo sapiens
tatcaccatctttcaggctacagtgtgctaatgttataaacacagcacattggcaccattttatagatgaggaatttgagatttaagtaggtaatccatgatttcagtgctagtaagtacactagagccacaatatctgactccagagttgcactttcaaytttcctacaacatgtcctccccaaggtgaaggaagaatgtatcaattgccacagctgatatataattaatagctctgagaaagaacagaaataatggataaaagtaagggaaaatagtctatagcattagtaacatgatgtaaattaaaatatgtctatcaataaatctgtccatctatttcaatctacatctatatgtgtatgtatatttgtaatatatgtgtacacaaacatatatatgcagatttgcagatttacataatggataagaagagtttcagaaataattcttaggtagatttaaatcctgcttcttcctcttaataactgattttggcactctaggaatgataatagaacctggcttctgaagtcatcacttcagaaggtgattattatcacgttaagtgagataatgtatataaagtgcttggcatagtcatagatacatattcagagctcagtaaatgtttgt

SEQ ID NO: 331552 - DNA, 636 bp, Homo sapiens
tatcaccatctttcaggctacagtgtgctaatgttataaacacagcacattggcaccattttatagatgaggaatttgagatttaagtaggtaatccatgatttcagtgctagtaagtacactagagccacaatatctgactccagagttgcactttcaattttcctacaacatgtcctccccaaggtgaaggaagaatgtatcaattgccacagctgatatataattaatagctctgagaaagaacagaaataatggataaaagtaagggaaaatagtctatagcattagtaacatgatgtaaattaaaatatktctatcaataaatctgtccatctatttcaatctacatctatatgtgtatgtatatttgtaatatatgtgtacacaaacatatatatgcagatttgcagatttacataatggataagaagagtttcagaaataattcttaggtagatttaaatcctgcttcttcctcttaataactgattttggcactctaggaatgataatagaacctggcttctgaagtcatcacttcagaaggtgattattatcacgttaagtgagataatgtatataaagtgcttggcatagtcatagatacatattcagagctcagtaaatgtttgt

SEQ ID NO: 331553 - DNA, 624 bp, Homo sapiens
gttacaataatttgaactttgtaaatctatttatctccatttagagttaaatagattaatttgcttgctttaaacagtaaaataaaaacaggagaaatagaggttacatttacaatgcaaaatacaatttaaaagaaaagtggactgttgtggtttatcttaaaataagcagtgaggtaggagattacatctcccccggccaaaaaagaaaacttttgaacttcattaataactraacatccaatcagcattcctactctgggaacagctctacaagtactcaagctatgtggaagagctgaagacaactgcttgactgtttttcatttgttcttgccaagaaaaaaaaaaataagtcaataacacgtagttgttttaaaacaacctagtgattttcacttgaaaagtagagattttacttggattagacttttaaaatgaatgagttgaggacatagtagagaaacattaaaatcaaagtgaaacatcttcatgtttcttctaagcactgttctaggcacttttgataatacataaacagactgtgtgcattcagggattatctaattgagagtaagcaagatataatttactataatgtaactagtaatgttttaaaagtgc

SEQ ID NO: 331554 - DNA, 595 bp, Homo sapiens
atagtttgcaggtggaatggagagacaggttgcactaataaataacctgatgtggtaaaaaccttgagtagaggttaaaggcttcaaataagttttctggggaaagaacagaaattgagaatgtatatggaatatyaagaaaaaacagaaggtgagaatatatctggcataagatctgtataaactgttaatatttaggtcagtaacagagactggctattctttttctaatttcagatctgcctcaattaatgttaagaccctgcacatattattttgttttttaatattactattttctcaacctcacaatgaggaatattgactaagattgttcagtttctgatatggtttggctgtgtccccacctaaacctcatctgaaactgtagtttccataatccccaagtgctgtgggagggatcaggtggagataactgaatcatgagggcagttttccccattctattctcgtgatactgagttagttctcaagagatctgatggttttataaggggcttttccccctacttcgttctcacttctctttctgccaccatgtgaagaaggacgtgtttgcttccccttccaccat

SEQ ID NO: 331555 - DNA, 537 bp, Homo sapiens
tggcataccttgcagccataaaaaagagtgagctaatgtcttttgggagaacatggatggtgctggaggccattatccttaggaaactaacacaggaacagaaccatatgttctcacttgtgagtgggaggtaaatgatgagaactcgtgaacacaaagaagggaaaacagacactggggcctacttgagggtggagggtgggaagagggagaggagcagaaaaaaataattattgggtactgggtttaatacctgggtgccaaaataatctgtatgacaaggttttgtgatgcaagtttacctatgtaacaaacctgcacatgtgcccctgaacttaaaataaaatttaaaaaaaaatctcaaaggcccccccaaaaaaagaaagagaataaccaaccattgttccagaagtcacaatatttataacttcctcaattgctcctatagataacatcactattgyagaacctaacattggtctttagagatgtttttgttcagactttgagatcatcagctgactccagctggaccca

SEQ ID NO: 331556 - DNA, 588 bp, Homo sapiens
ctttctcactttttatctcaagtcctaaaagatagtttttttttctattagttatatttaaaacttaaaaaaattaaaaccatagtttttttctttatcaaatataatggcatatttttattataaccaatacaaaatgaagaaatttgtatttacaatttactgtatctcttacccaccttatttccaaacttctgtcagttataatattgctttaatattattgasacataattcatattgctttgtaacaataattacatttttccttattttgttatgcaatgattctaaaaattgaaaaagcaaaaagtagcacttactgtcctgttattacaactacggttcatctaagactaagaacaattactgtaaattttaaacattattattttaaattataacatgttttagttttttaatatttgattttctacatagatttttttttatttctcctggagtttcttatctttctgtttgtccttctttttaaaatgcaaatgactttgtcataaatctaagatttatttgtcgtatatgtagtattattatactagaattcctttatttcaaaattatttttcc

SEQ ID NO: 331557 - DNA, 574 bp, Homo sapiens
agttcatcaggcatgggatctaacttctaagttttacaaaatgtgagactcattctcattacagctttgggttaaaataaaattttaacaatgcaatattcatggcatatatgcagttaagtactttaactgtaaaaccaacagagcctttaatacttctcccctaaaattatattgaaatctgccacataacataggcagaatgactttgagctttaaagtcaattagatcaacatttagattctagatctgctaaatattaatggtgaaactagttatttagactttctgcctttcaggtttcttaggcaaaactgatatcratcaaaaataatcaaaatggtcagaatctaattaaaagagagtttattctagtgcaaaatataacagtggaccacctgaaagtaccaactccaaaggaatagagcgagcattccaaagtagggaattttaaggtttcatttatgtgggcagacagagaggagtttttagcaggattacaacatttttcacatgagactggtgcatatttgattggttataagcagtgtttcttttgggaagtgtacattt

SEQ ID NO: 331558 - DNA, 529 bp, Homo sapiens
agttatttagactttctgcctttcaggtttcttaggcaaaactgatatcaatcaaaaataatcaaaatggtcagaatctaattaaaagagagtttattctagtgcaaaatataacagtggaccacctgaaagtaccaactccaaaggaatagagcgagcattccaaagtrgggaattttaaggtttcatttatgtgggcagacagagaggagtttttagcaggattacaacatttttcacatgagactggtgcatatttgattggttataagcagtgtttcttttgggaagtgtacatttagcattttttacagagggtgcagtagtcacggattttctgtcatctggtctaagaacagcaggacaacaaagggaaaattaattcataacaaggatacttaattaaggaggcagaaggtttttgtccctgacatcgtctaattttatctggtcattgtatagaacaagaaaacaatttctcctttatgagaaacagaaattgcaaccacatgtgactcaaattacagtc

SEQ ID NO: 331559 - DNA, 529 bp, Homo sapiens
agttatttagactttctgcctttcaggtttcttaggcaaaactgatatcaatcaaaaataatcaaaatggtcagaatctaattaaaagagagtttattctagtgcaaaatataacagtggaccacctgaaagtaccaactccaaaggaatagagcgagcattccaaagtagggaattttaaggtttcatttatgtgggcagacagagaggagtttttagcaggattacaacatttttcacatgagactggtgcatatttgattggttataagcagtgtttcttttgkgaagtgtacatttagcattttttacagagggtgcagtagtcacggattttctgtcatctggtctaagaacagcaggacaacaaagggaaaattaattcataacaaggatacttaattaaggaggcagaaggtttttgtccctgacatcgtctaattttatctggtcattgtatagaacaagaaaacaatttctcctttatgagaaacagaaattgcaaccacatgtgactcaaattacagtc

SEQ ID NO: 331560 - DNA, 529 bp, Homo sapiens
agttatttagactttctgcctttcaggtttcttaggcaaaactgatatcaatcaaaaataatcaaaatggtcagaatctaattaaaagagagtttattctagtgcaaaatataacagtggaccacctgaaagtaccaactccaaaggaatagagcgagcattccaaagtagggaattttaaggtttcatttatgtgggcagacagagaggagtttttagcaggattacaacatttttcacatgagactggtgcatatttgattggttataagcagtgtttcttttgggaagtgtacatttagcattttttacagagggtgcagtagtcayggattttctgtcatctggtctaagaacagcaggacaacaaagggaaaattaattcataacaaggatacttaattaaggaggcagaaggtttttgtccctgacatcgtctaattttatctggtcattgtatagaacaagaaaacaatttctcctttatgagaaacagaaattgcaaccacatgtgactcaaattacagtc

SEQ ID NO: 331561 - DNA, 529 bp, Homo sapiens
agttatttagactttctgcctttcaggtttcttaggcaaaactgatatcaatcaaaaataatcaaaatggtcagaatctaattaaaagagagtttattctagtgcaaaatataacagtggaccacctgaaagtaccaactccaaaggaatagagcgagcattccaaagtagggaattttaaggtttcatttatgtgggcagacagagaggagtttttagcaggattacaacatttttcacatgagactggtgcatatttgattggttataagcagtgtttcttttgggaagtgtacatttagcattttttacagagggtgcagtagtcacggattttctgtcatctggtctaagaacagcaggacaacaaagggaaaattaattcataacaaggatacttaattaaggaggcagaaggtttttgtccctgacatcktctaattttatctggtcattgtatagaacaagaaaacaatttctcctttatgagaaacagaaattgcaaccacatgtgactcaaattacagtc

SEQ ID NO: 331562 - DNA, 528 bp, Homo sapiens
ctaatggcatttacactccaagtcttagtttacaaggctatttgcagtgtggcstacttcacgttattcatctgtatatactacggtatttcaccatagctttttcatgcagtataatttctcccacagtgttcttgccatccctacctcatgtgtattttatcagttagtcttaccaagtagcaaagcattctaaaaatgtggcttagaacaatagccattaattattataattcaagagtctgtagattgcctgagaattggctggtctacggattcactcatgtatctgtggtcaactgggagttgttctgttctatatttgtcacatggtcacccagtgaccagtgagctagcctagacgtgttcttatgataatagcaaaggcaagaacataagcagaaacatacgtggattcctgaggcttgagctctaagtggaaaatgcataattggaccctaagtaaagaaaggtgttgaaatatatattccattgctttagtgaaggcaacaatagtgttacattgcc

SEQ ID NO: 331563 - DNA, 611 bp, Homo sapiens
gatcgttttgtccagactggcatggctatttcatggtttttcttgtaaataggagcaagtatgcatttgaccagcctcaatcaatcattttgtcatttattcaaacaaccgacctgagctttgagtggtaattttaagctggcaacgatctcaaggagcttgttttcagctgagcttagtgacagtgattggcaggaagttaaggtcctgcatatttctgttccttaattagggcataacgagcatttgggaattttgtcaccatcttcaacacctaatttgaatgaaaaaaggctgcaagtcttgtactacaaagaataaaaataaaaataaataaaagatacactgttaaagtcrattaaacttcaatcacctcatcctctcataacatttgccatctattgtgtctaagggtagatacctataagacttgacctacataatgagaatcttgatctccacaatccctaatcttaacccacacattcctttctatggactccaagtctttagataatattaactctttcaaccaattcccactcagaaaatctttgactccacctatgacctgtaagctgactatcctcctccactttaacttgccccac

SEQ ID NO: 331564 - DNA, 611 bp, Homo sapiens
gatcgttttgtccagactggcatggctatttcatggtttttcttgtaaataggagcaagtatgcatttgaccagcctcaatcaatcattttgtcatttattcaaacaaccgacctgagctttgagtggtaattttaagctggcaacgatctcaaggagcttgttttcagctgagcttagtgacagtgattggcaggaagttaaggtcctgcatatttctgttccttaattagggcataacgagcatttgggaattttgtcaccatcttcaacacctaatttgaatgaaaaaaggctgcaagtcttgtactacaaagaataaaaataaaaataaataaaagatacactgttaaagtcgattaaacttcaatcacctcatcctctcataacatttgccatctattgtgtctaagggtagatacctataagacttgacctacataatgagaaycttgatctccacaatccctaatcttaacccacacattcctttctatggactccaagtctttagataatattaactctttcaaccaattcccactcagaaaatctttgactccacctatgacctgtaagctgactatcctcctccactttaacttgccccac

SEQ ID NO: 331565 - DNA, 664 bp, Homo sapiens
aagtgaggctgctgtctgcactgcttgatcactacaatttatgtacccatactctgaagccacaaaaataattctgcatttaattttttttgtgaccrtaaaacagaatgtcataggcaatgaagacttacagtcctgcaatttcacacgaataaaaaaaacttttgagaggtaggttggtatggtaattcaggatataatacaatcctgcagctattcaatctgcagttgtttccaaaacttctcttaggctcaccttccaggatgggcgtcgctgatgcactcaacccatgttaagttagacatatttttctgcttgcagaaaatatataacagggccaggcatggtggctcatgcctgtaatcccagcactttgggaggccaaagttggtggatcacttgattaggagatcaaggccagcctgggcaatatggcaaaacccagtctccataaaaaaaatacaaaaattagttgggcataatggcactcacctgtagtcccagctactcaggagtctgaggtgggaggatcgcttgagcctgggagacagaggctgcagtgagtcaagattgcaccactgcactccagcctgggtgacagagtgagaccctgtttacccctcctccaccccacaccaaaaaagaaaatatgtaacaggccca

SEQ ID NO: 331566 - DNA, 664 bp, Homo sapiens
aagtgaggctgctgtctgcactgcttgatcactacaatttatgtacccatactctgaagccacaaaaataattctgcatttaattttttttgtgaccataaaacagaatgtcataggcaatgaagacttacagtcctgcaatttcacacgaataaaaaaaacttttgagaggtaggttggtatggtaattcaggatataatacaatcctgcagctattcaatctgcagttgtttccaaaacytctcttaggctcaccttccaggatgggcgtcgctgatgcactcaacccatgttaagttagacatatttttctgcttgcagaaaatatataacagggccaggcatggtggctcatgcctgtaatcccagcactttgggaggccaaagttggtggatcacttgattaggagatcaaggccagcctgggcaatatggcaaaacccagtctccataaaaaaaatacaaaaattagttgggcataatggcactcacctgtagtcccagctactcaggagtctgaggtgggaggatcgcttgagcctgggagacagaggctgcagtgagtcaagattgcaccactgcactccagcctgggtgacagagtgagaccctgtttacccctcctccaccccacaccaaaaaagaaaatatgtaacaggccca

SEQ ID NO: 331567 - DNA, 664 bp, Homo sapiens
aagtgaggctgctgtctgcactgcttgatcactacaatttatgtacccatactctgaagccacaaaaataattctgcatttaattttttttgtgaccataaaacagaatgtcataggcaatgaagacttacagtcctgcaatttcacacgaataaaaaaaacttttgagaggtaggttggtatggtaattcaggatataatacaatcctgcagctattcaatctgcagttgtttccaaaacttctcttaggctcaccttccaggatgggcgtcgctgatgcactcaacccatgttaagttagacatatttttctgcttgcagaaaatatataacagggccaggcatggtggctcatgcctgtaatcccagcactttgggaggccaaagttggtggatcrcttgattaggagatcaaggccagcctgggcaatatggcaaaacccagtctccataaaaaaaatacaaaaattagttgggcataatggcactcacctgtagtcccagctactcaggagtctgaggtgggaggatcgcttgagcctgggagacagaggctgcagtgagtcaagattgcaccactgcactccagcctgggtgacagagtgagaccctgtttacccctcctccaccccacaccaaaaaagaaaatatgtaacaggccca

SEQ ID NO: 331568 - DNA, 615 bp, Homo sapiens
ttgatattccagcaaaacagagttgttaaacacagctaaaacagagttgttaagcacagtgtaaacacagtctaaaagtcagtctattgattatttttcttagttgaaaaactggaaggttggttgttacttaatgctggtatatctaatagaaataatacaatttgagttgtgaaatatctttccttacttaggtatttaaaaaaagaataatacattataagaaaagatctttccctgtacagtgttcctcaagaaagcataagttttagagtgagactratgcagaccgaatgtgaattccatctccactgtattagttacagagtgatctttagcaagttacgtggcctccctgagcctcccctcaacttctaagtaagagaataataaaaataactagcacacttggcttctcaatggggatatgagatgataagtactatcttaacatgcaaaaaaggtgtcccaaaaatgtgaatgtcatttcctagcaattctttttcttataaccaagaatccatatgtccttgttgtacttccatcttaaaacatcatcttccaaactaagcagcgttgttagaaaaccccattaagagcaaaccgaaaaatact

SEQ ID NO: 331569 - DNA, 511 bp, Homo sapiens
cacagatgacaaataagcacacaaaacatgttcaatgtcattagccactagataaacgcaacttaaaaccacagtgagatatcactaatatcccatcagaatggctaaaactaaaaaaagatggcaaatwttggcaaggatatggagaaacaagattactcatacaatgctggtgggactgtaaaaataaaagagtaaccctggaaaaccatttgacagcttattatgaaataaacatgcaattcccatataactcagcaattatattattgggcatttatcccagataaataaatacatgtactagaggccaaaagaaaacttccccatcaccctctgaagggtcactgaaaaattaacttacaaaaagcagattaacagaagaaagaccatacaaatgtattaatgtgcatgggaaacttatcaaaatagcaaactgtaaagaaaaagaagatagctgacacttttatactgtaagttctcagaaaataatgccccagaatgaaagctt

SEQ ID NO: 331570 - DNA, 579 bp, Homo sapiens
tgaaggtgtcctggtggcacagtgcctggaaggtgttatgcacttgatactctccattaagaagggctagttgaacattaygcttactatttgttttctactttttcattagttggtaactactacaagatactgaaagtttagaaaaattaagaaaagactgaaattgagatttaaaaaattcactatggaacaaagtttaaggatactggtataatagatatggactctgtgagtctggaaaagactttaaccttcataattactgagccctctccacgaaagagaatggagaggtgtcagcaattactgaggttaaagtcttttagtacctaaatttatagtacctaaaatttcatgactatggaatattttttctgtaagattctcccttttaatattctaaaatttgctaccgagcttagaaagttatcatcttagggaaaagatgacagatgaaagaaagcaagaccatatatgaaaaatagagtttataagcatctgggaaaagtgaaacttaggaggtgcatttccagaagtgcactaatctgggaaataagtaagtgacaaagtcacatg

SEQ ID NO: 331571 - DNA, 600 bp, Homo sapiens
  misc_feature (1)...(600): n = A,T,C or G
ttatgaaataaacatgcaattcccatataactcagcaattatattattgggcatttatcccagataaataaatacatgtactagaggccaaaagaaaacttccccatcaccctctgaagggtcactgaaaaattaacttacaaaaagcagattaacagaagaaagaccatacaaatgtattaatgtgcatgggaaacttatcaaaatagcaaactgtaaagaaaaagaagatagctgacacttttatactgtaagttctcagaaaataatgccccagaatgaaagcttcaggagtaactctctctgaactcatgcccttttgtcttcagctttttgcctccttgagactagccataagaattagaatcattcttctccaaggtggatcacagaaaccagaaaccctttcaccacaaatcagccataaaacctaaaaatattgctccaatttyaacatcacaacaancctttctgtgtattaattggtgaaaaataagttatctgtcctaccttgtttgattgtaggatataaggaccccattacagagagggtcttctccatacccagaagaaaggaatgctacacagagaggccaagaa

SEQ ID NO: 331572 - DNA, 589 bp, Homo sapiens
ccagggtggtggagtgagatggttgctaggcaacctcactagtatcagacgggttattgagatctttacctttgagagtcttgcttgtggagaatctaaggaaaaagctacttctaactcctgtgtctttaagtctcagaaaatccagagatttggaacaaayatacaacatatttagaaaggattttcaggaaaaaattaggtggaatatttgtgttttttttccaggtttaaggaggttgctttaaaagaaaaagtcttttgatcctgttttggtttcctactgctacataacaatcatgacaaaactaatggtttaaaaatataaatgtattatctcacagtttctatagattagaagtctaggtatggtgttgctgggtctctgctcagggtttcctaatgctgtaatcaaggtgtctgctggggttgtggtctcatttaaggcctaagatcttcttccaggttcttgtggttgtttgcagaattcatttccttgcagcaactgacctcttcgtggtttatttctttaaagctagcaagagaaaaagagagagtttctgttgcttccaaactctgagctcagaaa

SEQ ID NO: 331573 - DNA, 611 bp, Homo sapiens
acttctacaaaacaagttataaatttccatcttatctaattcaagcccactgaatttccctaaaaattatttactatccccctaaacttatgcagacttccccatatccctttcccctaagaagaagggtatataccatctatgctccattgcgtggtggggaaatcctctgtgagtttccctctatgcatgctaatacatttgtatgacttttctgctataaatctgccctttgagtattgattttttatcaaaccttcagaaggcaaagggaagttttcccttggccctataactgcataactattaagccargatttgaaagtaggcagacaaggctcagagctcacacacgttggtaatgctttacattgccttctttcaattagtccaaatattgttttcctctccctgatgtcgttagcaagcaattccatcatttactttagcatgctctagacacgtatatgtcctgcaagcaaaataactgacaaatgaatgtccaggagcaaatggtgagaaattcaaagagctcacatgactatagagcattcccatttgtaaacacgagcacaggctatggagccagacacatctgagttcaaatcttc

SEQ ID NO: 331574 - DNA, 593 bp, Homo sapiens
agtaaatagacaggtgaaaatatcatgttggatgcagtattgccttgtattctatctgtacttggaaagttggataaacagaatactttttaataaactagtatgaaagcacacaaattcatacatatacttatgcacaattattaatagaacagtacttaataagcccttaaatgtgagcaaaattttggactttctaataagaaaaaataaaactatgctggttgaaaagcagtaccacctattaaaaatactatgcaagccatatatgtaattaaaaattttttaggaatcacattaaaaacataaaaagaaaaaaataaaattaatatattttatttacttttcaaggaacaatacattttgaaagcaaaataaataaattataacataaaacagggtctgccagagtctgaatattttattgttagagtttccagaaaaggtcatgtcgtcacacataatgagaagyagctgactctctgatggagctttctggaccaactgggtggatattttggaattcctggggaggctctttcaccacctttataccacgcacttcagcatttgattgcaaatggatgtctgtg

SEQ ID NO: 331575 - DNA, 593 bp, Homo sapiens
aaaaatataaaacatgaataataaacatgaagaaaattttgacaaatatgtgattgttcattttactttacaattcaaaataaaattgccagaggtgaagctccaacrtacagtctgtctctttaatctgttgtttgtgaaatgttccagtttgcttgtgtatattttgcatgcatacctcctgttaatgcaatgaaatttatttcaatagaataaattaaggaagtttgttggcatagtataggagagttctctcctccaagtatcacaagactgaattcaaggtgtcatccaagctgattttttctctggagttatcaaagatttctcttaagtcatcaaagattcttacctagagatactttgactaatacactcagctttaattttacttttagttttaaaatttaaataccaatacaaacaaggcattgaaagctttctttaaaatgacacattatctacactgtcaaggtagacatcagttttgcattactcacaatctccagagaaactccagaaactccagagaaaaattcactttggatcattcttactgacagaagttagtttcttcagattatagggcggag

SEQ ID NO: 331576 - DNA, 593 bp, Homo sapiens
aaaaatataaaacatgaataataaacatgaagaaaattttgacaaatatgtgattgttcattttactttacaattcaaaataaaattgccagaggtgaagctccaacgtacagtctgtctctttaatctgttgtttgtgaaatgttccagtttgcttgtgtatattttgcatgcatacctcctgttaatgcaatgaaatttatttcaatagaataaattaaggaagtttgttggcatagtataggagagttctctcctccaagtatcacaagactgaattcaagrtgtcatccaagctgattttttctctggagttatcaaagatttctcttaagtcatcaaagattcttacctagagatactttgactaatacactcagctttaattttacttttagttttaaaatttaaataccaatacaaacaaggcattgaaagctttctttaaaatgacacattatctacactgtcaaggtagacatcagttttgcattactcacaatctccagagaaactccagaaactccagagaaaaattcactttggatcattcttactgacagaagttagtttcttcagattatagggcggag

SEQ ID NO: 331577 - DNA, 563 bp, Homo sapiens
tcttcaccattctcggtgactgtataatctgcattagtaaggactacttatgttgtgtttagaaagtcaactttttaaataaagggttttattagaaacatactgatgcttcacaggaccaggaggcaaagatactaggccgactccagcatttcagggactagaataggggatttgatatcattaggatgctcttttctctccatcttttctttcttttcctctttctcttcaaaccatcatggggcatggaaaaagcacctagttgttctgaggcttagaattaatggaattgaaaaaatgggggaaactttcttcttacctccaacaaacatagccagtgaaatgattttgaatgcccctccttttccatccaaacagtcaattcgtgtgagcaaaggagtctactagcatttttcaaaaggggaaatctatcctctgaargatgggaatagtgggaatttgccaaggagataaacacaatagctaccaagatgtctattgttttaaaaatttaaagtcatttaattctagctatgtcatatattaaattatacgtaaag

SEQ ID NO: 331578 - DNA, 578 bp, Homo sapiens
cccaaaatgatccaatttaagtgaggattctggtctcttgttcagtatgttatttgtctcaatggcmcccacttcatagacagaaatatatagtatatgtgtgtgggtgtgtgggtgtggagtgggtggatgtatgtgtatggcagcacacgcagccacagactttgttgttgaacaccatgtatagtttattgatctgagagcagctgtccagattaggtaatattttctctctttggcagggggttgttagccatctgggggtttccaggtagttgtcatgctattgctattcctctcacttgttatcttgtgatgttttactgaaatgcatgtctgtattaaaggttatcttcttcgtaagaggcatatataaacttgtgccaggtaggatgtcttgtagcatttagctcaggatccttgccacccaacagtcagttacctcagctgtggagagggaaatgccaacctgaagagcagaatctgctggtcgctgtgaaataaagttggaaagagtctcttctgctcaaaagctgggatgttcttgttccctcagagaccttctatctcttggtaac

SEQ ID NO: 331579 - DNA, 578 bp, Homo sapiens
cccaaaatgatccaatttaagtgaggattctggtctcttgttcagtatgttatttgtctcaatggcacccacttcatagacagaaatatatagtatatgtgtgtgggtgtgtgggtgtggagtgggtggatgtatgtgtatggcagcacacgcagccacagactttgttgttgaacaccatgtatagtttattgatctgagagcagctgtccagattaggtaatattttctctctttggcagggggttgttagccatctgggggtttccaggtagttgtcatgctattgctattcctctcacttgttatcttgtgatgttttactgaaatgcatgtctgtattaaaggttatcttcttcgtaagaggcatatataaacttgtgccaggtaggatgtcttgtagcatttagctcaggatccttgccacccaacagtcagttacctcagctgtggagagggaaatgccaacctgaagagcagaatctgctggtcgctgtgaaataaagwtggaaagagtctcttctgctcaaaagctgggatgttcttgttccctcagagaccttctatctcttggtaac

SEQ ID NO: 331580 - DNA, 595 bp, Homo sapiens
attcaaaatatgatctatgcccattcccaattattcaaagaatagagtaattcagtcttcaggagttactcagagaatgactcagaatgacaaacagataacctaaagattcaatctaaggaaaccttccattatttaaattctcccactctctctttctctttctgtctctatcttacacacacatacacacactcacacacacccacatgcacactcttgctttctagttttcttcaatcattcagaaatattattctgaaggatcttcctgacaacccctttagttcatactctatacttcaatagtaagtttatttcattgtttctaagatttttttgaaagttattccaggttaaattttccttgatctaaatatctatcagaaccttacagacagtgagaatctctcaagcatgcacttgcttatatttaaccagataatctcttttcagctraagaaatacaaagttttcaatattttatttttttgtacataaccttacaatgtcccattatttgaaagtcaggatattaaaaatagtctttctttttaaagtaacatattttgtttgcagaatattatatttatat

SEQ ID NO: 331581 - DNA, 534 bp, Homo sapiens
attttgtttgcagaatattatatttatatatagtaaatttagaaaatataaaaaagattttagaaaagagagccttttgcaatctcaccactctaaaagcctattagaaattattttaagctattctccaaaatgggatcacttttagtaactcttaaaatgctttgtgaataaatgaatgtatgtcaattcacttatatatttgtaaaattatcaaaataagtcaagttctgaaggtagattaaataaaggaccatttgattgtgaaatgtataattcacatttaacaggcttccacattgcagaggrtggtaatgagactcagtctatcaggttagtacatttggattgacaatttagttccaaattagaatcctgattgccagtaatctcaggcaaatgaaccttagagaaaacaacattatcttatttgaggttctacctaatctctctgggaaatttttcaatgaacttagttttcagtatatgactacttcataactttataatatactaacattgaccttattaaaa

SEQ ID NO: 331582 - DNA, 519 bp, Homo sapiens
tctggccactgtgctcagccaggaattctcatttctgtagcgggggggcagcttcaggcaccagcacaggtgccagctctgtgcaaggctgtggctggaccacacgtacaataagcagcttctgctgcgggcaccagcatcttgacaaagagaatgcagtgacactcaaaagcttggagacaccaggaaccccagagccccaragagggtgttacagcatggcacattcctggcttggggagccctgagttctgggatcccagcagggtgacagctcttccctcctcaacccttgcagcatggcaagagttggggcatgtttcagcccatttgtctaacagctttttcagtcccaccaccccactctggcccacacctcctgggctggcctggccccactgttgcttcccattgtgtgggccagtcgcctggtgccagcaaagagcaagagggatacagttttacagcagctctgcctgggaaatgctaaggtctgggccgccagaagggttgccactc

SEQ ID NO: 331583 - DNA, 629 bp, Homo sapiens
tcaacccttgcagcatggcaagagttggggcatgtttcagcccatttgtctaacagctttttcagtcccaccaccccactctggcccacasctcctgggctggcctggccccactgttgcttcccattgtgtgggccagtcgcctggtgccagcaaagagcaagagggatacagttttacagcagctctgcctgggaaatgctaaggtctgggccgccagaagggttgccactcttcactcccacagtctgggagcatgtcaccatctgcagtttagccagctggccaggaacatgatacagctccttttgctcccatcattcagcgggtcccaagttcttgtcccatgtccaggaagaatgaggttacacagacaactggaggataagcaaggtggagaagagctttattggatggccaaacagctatcagaggagagaagacccaaagtggatagctcctatctacaggcagttaatcacaaggagcgtagaggagacctgaagtacacagctcacatcctcaggcaggtagtcccaatgagtgcctgagttggctgagtctggggtttttatgggctcagaatagaggaagtacatgctgattggtccatgggcaagagacagtgc

SEQ ID NO: 331584 - DNA, 425 bp, Homo sapiens
atgctgattggtccatgggcaagagacagtgcatgctgattggtccatgggtggccatgggcaggactaaaataagcaccatttaatcrgccaaaagtcttaaggaagttctcactccagattgctgactccacccagaactggcagttcagcccccaggcttcagaacatctttggctttaaggtgggggttcaccagggacccaccccttcccccccaagggacctgtctgcctcctgcctgccatcaacatactgtctgtggtgcccatgctgtccacactgagaggtgcctgcaggcctatgctgagccactctcagccccctggcctcccttttgggctcactggagcccaaagtttggaggagaccgacgtagcaagggctggtgtgtcagtgctgcctcaagtgcatacacacccagc

SEQ ID NO: 331585 - DNA, 425 bp, Homo sapiens
atgctgattggtccatgggcaagagacagtgcatgctgattggtccatgggtggccatgggcaggactaaaataagcaccatttaatcagccaaaagtcttaaggaagttctcactccagattgctgactccacccagaactggcagttcagcccccaggcttcagaacatctttggctttaaggtgggggttcaccagggacccaccccttcccccccaagggacctgtctgcctcctgcctgccatcaacatactgtctgtggtgcccatgctgtccacactgagaggtgcctgcaggcctatgctgagccactctcagccccctggcctcccttttgggctcactggagcccaaagtttggaggagaccgacrtagcaagggctggtgtgtcagtgctgcctcaagtgcatacacacccagc

SEQ ID NO: 331586 - DNA, 622 bp, Homo sapiens
tgacagagtcagtgacacacacttctcttcgatgacactccaggacaaagtgagcagcctgtgggctaggactagtctgaagaaatgaaaacaggagacaactaagccatgggtggagaaacccagtgaaaacaatcgtaagttatcaccaagctgaggaaggatgttaagactttgagctcattccagcaacaattcccaaacttagtgtctggaagcattaaacatttgtgatgtcttagtgggttaggaatctgggagcagattagctgggtgcttctggtttagggtctcttaagagtttgcaagcaaaggtgttggctggggctacacctttggaggatgctcttctaagcccactcacaaagctgctagaagacctcaagggcacttacgtggacctctccacaaggttgattcacagcatggcaactgtttccttccagagcaagtgacccaagagagagcagaacacagcacccaagataaaagccactttttctctagagcctcatcttaaaaaygacttcccaccacctctgtcatattctatttgttagacattaattaacatgtacagctggccctcgaagggaggaaatggcacaagagtgtgagtagc

SEQ ID NO: 331587 - DNA, 622 bp, Homo sapiens
tgacagagtcagtgacacacacttctcttcgatgacactccaggacaaagtgagcagcctgtgggctaggactagtctgaagaaatgaaaacaggagacaactaagccatgggtggagaaacccagtgaaaacaatcgtaagttatcaccaagctgaggaaggatgttaagactttgagctcattccagcaacaattcccaaacttagtgtctggaagcattaaacatttgtgatgtcttagtgggttaggaatctgggagcagattagctgggtgcttctggtttagggtctcttaagagtttgcaagcaaaggtgttggctggggctacacctttggaggatgctcttctaagcccactcacaaagctgctagaagacctcaagggcacttacgtggacctctccacaaggttgattcacagcatggcaactgtttccttccagagcaagtgacccaagagagagcagaacacagcacccaagataaaagccactttttctctagagcctcatcttaaaaatgactycccaccacctctgtcatattctatttgttagacattaattaacatgtacagctggccctcgaagggaggaaatggcacaagagtgtgagtagc

SEQ ID NO: 331588 - DNA, 622 bp, Homo sapiens
tgacagagtcagtgacacacacttctcttcgatgacactccaggacaaagtgagcagcctgtgggctaggactagtctgaagaaatgaaaacaggagacaactaagccatgggtggagaaacccagtgaaaacaatcgtaagttatcaccaagctgaggaaggatgttaagactttgagctcattccagcaacaattcccaaacttagtgtctggaagcattaaacatttgtgatgtcttagtgggttaggaatctgggagcagattagctgggtgcttctggtttagggtctcttaagagtttgcaagcaaaggtgttggctggggctacacctttggaggatgctcttctaagcccactcacaaagctgctagaagacctcaagggcacttacgtggacctctccacaaggttgattcacagcatggcaactgtttccttccagagcaagtgacccaagagagagcagaacacagcacccaagataaaagccactttttctctagagcctcatcttaaaaatgacttcccaccacctctgtcatattctatttkttagacattaattaacatgtacagctggccctcgaagggaggaaatggcacaagagtgtgagtagc

SEQ ID NO: 331589 - DNA, 579 bp, Homo sapiens
atctgagactcagttgcctcatctatgaaatgtggataatgataccatttgctttaagtagattgaggataaaatgagatcacctgcatgaagcacaaagtagctggcatatactaagtatttaataagctttagctatttctatcatttgttttttatcataaatatttagatactaatcttggcactggcatttgctcttcgatgtggaggtagtcatataaaccctctttgctctggtatttttctttttaatttcacagatgaaggtgaattgcagtgcagactgctttgtctttgttgaaatggtgaggtgagggtaccttcccaacagtaagctcttttgatcttacctccctagaggatccagaaggcactgcctgggcaaggatggaggcaaccatgtggtgattcctcawgtcctgtaggaccaaagaccacttcacaaagtccagttttctcaaacattctttccaagacaggaatgtgatacttgctcaagaaagggtgtttggtaacttttaaaatacacaattcgcttttcatcggaacctaggcattttcacgccaggtgctgct

SEQ ID NO: 331590 - DNA, 580 bp, Homo sapiens
cacagttctaccttggacctgccctgctgagtcagcctggaagaaagtagcaaggacccacagactttagtcagcagcctgaaaacagagtggagtttgctctaatacagtgtgtactcataaaacgatgtttaacctgcatgggagatgccctattgttttgaccttcatgacaattgggtgtaaaactttgagtaaacaccttcctgacacctattacggggactctgcaggaggcacagccattaatcagaacagctgcaggaggcaagggctgctgatggagccctagaagaatgacttggtcccctgcagttctctctctttttcttcaaattaaaacccaaggaaattgagagagaaagaaactctatttggttcyttcttgcctcccagaagaagcggcagtttcaacctgcctgcgccaggaggaggcgggcatggaatggagactgtgatggagcttgtctgtggctattgctgtttgtgtttgacctctagtggagatgaggaagtggaacagagataagaatgcctctcccaggtgactgaagaagctgataaagctgagcttgtggtg

SEQ ID NO: 331591 - DNA, 563 bp, Homo sapiens
aaaaattttgctctcttcttactacccctcggactctgatgaagttctcaggataatctaaaaaactggctggtttagcagtacaatgaatactcagggctgtaaattggcataacaaatcttcgtgcccaaaaaaatcacatatgtttgaatacamacacacacacacacacacacacacacacacacacacagacgtaagtcaaatatacatcacagtcaatatgggcataatggtactcatccccaaacctcaaggaatatcaacatttatttcatgctgacattcaaattctgatgcgtttaggcatgttgaactcatggcaatctgaaaaatgcctactaggtatttcttagagtctatttaaaatttgagatttaaaaaaatcaaattatttatctatttatttgatatggcttagacctcagatacttttgccagaacattccaagttatagttgcatagtttactgattttgatgggatttttaggtaaaaaattatcaccaatttgtatttacaggttggacattcccttatctgaaaatctgaaatgctccaa

SEQ ID NO: 331592 - DNA, 521 bp, Homo sapiens
gtttcttttcttcttctctgccagaaagaagcccaagaggactttttttccgacattcactgtgaggacctggtagagtcccaggtgataaaactcacaagtgctagggctcaccgatgactgagtcttcctgttgtttttaatgtctcaggcttgtccacactgaacttctagcaatatgttgattaccgcactggttttcctattctggcactaactcccatggaagtttctgattgtgggtttctgctgtggtaagttgtgatactctgtatccacctgtgtctctctaatttggggttagtagtwtgcattgtgacttcacttccctgagggatgtaagaagagtgattgagttttcagtttgttcagatttgtagtctttattgagatggagtgaagacttctaagctctttacttgctggactgaaaaccagaagtccacaatagtgtttttatttttatactataaaattttgaaagccatgttgtttttgacaaaagggattaaaaattcact

SEQ ID NO: 331593 - DNA, 607 bp, Homo sapiens
aacagaattaaaacaaaaacaatacaataatcacaataaatgcaaaaaagtagtcaataatgtccagtatcctttatgataaaaaccctcaacaaactagtaacagaagtaatatacttcaaaatagcaaaagccatatatgacaaacccacagccaacaacatactaaatgggaaaaagttgaaagcattccccctaaaaaccggtagaagacaaggatgctcattttcaccacttctattcaacatagtaacggacattcaagccagagcaatcagaaaagagaaagaaataaagggcatccaaattggaaaagaggaggtcaaactatctctcttcactagtggcattatcatatacagaggaaatcctaaaaacccttccaaaaactcctagwtttgataaataaattcagtaaagtctcactttagaaaatcaatgtacacaaatcagtagcactgctttacaccaccaacaaccaagctgagaatcaaattaaccactcaatctctgttgtaatagctgcacaaaataaaatacctaagactatacttaacaaaagaggtgaaagatctctacaaggagaactacaaaacgctgctgaaag

SEQ ID NO: 331594 - DNA, 595 bp, Homo sapiens
gcctccagtggggtgtgtggggtgacagtgtgagcagcccttggatgtctggctgctagggaggcaaagaacagagagatctaaagtctgggccagctttctctgtgaaagggctttccttgactcttctcctctctgggattcttaagattccttctctaatcccaaaatgggcaagcctatatataagccttgtttctagaatggacaaagctggatttaaaacccatctagccatttaacagttatgaccttgtgtaagtggcacagtctctgaacccgtttctccacctacaaaaacagggctaggtcagtgattcttattctggagccagcatcagaatcacacaggagggggattctttaaaactgactattgggcctggtcccagagtgtctgattcagtggttggagccttacaacttggatttccaacaagttcccaggtgatgctgatgcagtggtcggggaacagattctgaggctctcccccacccccaaaacacacacacacaaacccctgcaaggcttggtaacacttggggttttgaggcagaggygccacactcagggcttggcacatagtaattgatt

SEQ ID NO: 331595 - DNA, 579 bp, Homo sapiens
gaggtcaggagttcgagacaaggctggccaacgtagtgaaaccctgtctctactaaaaatacaaaaattagctgggcgtggtggtgggcacctgtaatcccagctactcagaaggttgaggcaggagaatttcttgaacctgggagacggaagttgcagtgagctgagatcacaccactgcactccagcctgggctacagagtgagactcagtctcaaaacaaaaagcaaaaaacaaaaaactgggttgataaacttgaaatcattgcaaactgagacccctctaaatcctcttgacctggcctgcaccttcctgttagagggctacaactcacccatttgatgaagatgttgaaaaggccactacaatgtgactcaacacwtgaccccattgtgatcctcttctggctactagatccataacaatgattaagttacaacataatctgaccaggcttctgctaagcctgcttaaaaagaaagaaattacattgtaaggagctgtgggacctagaaaaattgtattggaaagagctggaagagggctggtgcctgaggatactggatccaaggtcgtttc

SEQ ID NO: 331596 - DNA, 573 bp, Homo sapiens
tgatatgaaacaaccctcgtggaggctgctttagtgattaaatatgacatataataatctagcaaagtgtatgggaaatcacagacaatatctaatatcagtcatctattaaaatccagtaagtttctacttactttaagtatgcttaaaaacaacatgtgtgaaatggaggtaatagtaatttctaagcatgtctatgtggcatatgcatgtcaggaatttgtactgcttttctacagatataataactcaaaaattgtttaaaaactttaaaaatatttatgaattatcatttttgatacatcctttacaacataaagaagaataaaaatgaaaaaaatatttcctggttataatcaaaatgaggcagttttaaagttatgaatttactccacttaatcagaattttaggtaagktattaaaattgctatagttgaatatatcaagggatcattaaataaaataaattggtttaaaagtaaaagtagaaaatcacaaacttacctttctcccccaatagcatttaaggtcctatatttcagatcaaacacaaggaaaaggccacttagtag

SEQ ID NO: 331597 - DNA, 640 bp, Homo sapiens
tgcactgaactgtgacaaatggcaagcatgattcagcctaatagaatgtcgattttcaaacggaggctttacaccataaggactatgaaagttattaagccccaacatgtctgctctgcttggtgattccttctctctcatcagaaaagacggatgagatgtacaatacctccattcaatatttccaacatttattagcataaaggagagacccataaagatgtattcagtctaaggaaaatggatgaagaaaaaaataaaataaactgtgagtgaaaactactaacaaatttggaaggatgggcatggtgttgggggtagaaaagggaagaaggaggctggtatggtcttaaatgtttgtgtcccactgaaattcatacrttgcaatcctaatccaaggtgatggtgttaggacatggggcctctccaaggtgattaggtccagaagctagagcctgatgaatgagattaatgcctttctaagagaggcccaagggagcctttttgtacatccaccatgtgaaagcccagcaagtaatcatcacctaggatcaggaaacaagacctcaccagacacataatctgaggccttgatcatggacttcccagcctccagaactgagaaatagatttctattgt

SEQ ID NO: 331598 - DNA, 640 bp, Homo sapiens
tgcactgaactgtgacaaatggcaagcatgattcagcctaatagaatgtcgattttcaaacggaggctttacaccataaggactatgaaagttattaagccccaacatgtctgctctgcttggtgattccttctctctcatcagaaaagacggatgagatgtacaatacctccattcaatatttccaacatttattagcataaaggagagacccataaagatgtattcagtctaaggaaaatggatgaagaaaaaaataaaataaactgtgagtgaaaactactaacaaatttggaaggatgggcatggtgttgggggtagaaaagggaagaaggaggctggtatggtcttaaatgtttgtgtcccactgaaattcatacgttgcaatcctaatccaaggtgatggtgttaggacatggggcctctccaaggtgattaggtccagaagctagagcctgatraatgagattaatgcctttctaagagaggcccaagggagcctttttgtacatccaccatgtgaaagcccagcaagtaatcatcacctaggatcaggaaacaagacctcaccagacacataatctgaggccttgatcatggacttcccagcctccagaactgagaaatagatttctattgt

SEQ ID NO: 331599 - DNA, 548 bp, Homo sapiens
ttagcagtaataatacaagaaacaatgttgttaaagaacaaagcaagaagatatcttagaaygaaaagaaacagattttttagcttatgatgctcttcagtgtaatacttctgacttttacagtacataaaaatagctttattgtgtaggattttatgatgtactcagggatgtttttataggcattttcttttattttcataatagttacctggtaggtattttaaaaattttatggatgataaccgtaataaataaataaatacacacacacacacacacacacacacacacacacatatatgtaactttattgagtatttaagtgtgtgcctggacctcttctgattgcctttcatttatttatttcatctttataagaatgtgatgaggtagatactatagcacactgtacagaaacaaactgaagctcaaaaataattataaaattgactccattctaaaggtagaaaatctcaatttttaatttcagttttctctcctatatccaaagtccctgttctttctttaacaaactgtgtttcaac

SEQ ID NO: 331600 - DNA, 549 bp, Homo sapiens
caaattcattcattcattcctactttctcactacaactttcaggacccctttcatattacaaatatagtcatgcatcccttaacgacaaggatatattctgrgaaatgcattattaggcaattttgttgttgtgtgaacatcagttgcacaaatgtaggtggtatagcctactacgcacctgtgctatatggtagaacctattgctcctagtctacaaacctgtatagcaggtgactatgctgaatactgtaggaaactgtaaccctataataagtatttgtaatacctaaatatatctaaacatagaaaaggtacagtaaaaatacagtataaatgatttaaaagatatacttgtatagggcacttgccataagttgcaggactgatggttgctctcttttcacgtttttctgcctgcttgtattctaaccctgttggcagctgattagattgtgcctatccagattaagggtggatctgcctttcccagcccactgactgaaatgttaatcttctttggccacaccctcacagacacaccccggatc

SEQ ID NO: 331601 - DNA, 549 bp, Homo sapiens
caaattcattcattcattcctactttctcactacaactttcaggacccctttcatattacaaatatagtcatgcatcccttaacgacaaggatatattctgggaaatgcattattaggcaattttgttgttgtgtgaacatcagttgcacaaatgtaggtggtatagcctactacgcacctgtgctatatggtagaacctattgctcctagkctacaaacctgtatagcaggtgactatgctgaatactgtaggaaactgtaaccctataataagtatttgtaatacctaaatatatctaaacatagaaaaggtacagtaaaaatacagtataaatgatttaaaagatatacttgtatagggcacttgccataagttgcaggactgatggttgctctcttttcacgtttttctgcctgcttgtattctaaccctgttggcagctgattagattgtgcctatccagattaagggtggatctgcctttcccagcccactgactgaaatgttaatcttctttggccacaccctcacagacacaccccggatc

SEQ ID NO: 331602 - DNA, 593 bp, Homo sapiens
aactgtaattttaaaattacattttttaaataaaaaaattgcttaaaatgatatgaaagaagtgacagatttaatagataaataagaaaagtaagcatacataaaataggggtttccaaagaattccagacaatgaaagagggcacatgttgtaaatcataattttataaaacttttctggaataaaggatatttaaatataatcttaaatacatgtaccaagattatcaagtaagawtactgaactttcaaaatgagtaataaaaagtgggagatattccagctcctccaaaagaagagctacgaaaaagagaacaaaaatcagatcgacatcagaatttccaaagggaacaccttccaacttacgtaaaaataaaaaataatgattctgctggaaaaactatataaaggaaggagaaaattctcaactgcctgatataaaaatgttcaaaaaataggaacagctaattctccttaaaaagaaaaaaaacagccaaatggctctttaaaatacaaaaagatccacataagcaatggaagttaaagctacactaaaatacaattttttcaattttttttgtaaaaatttagat

SEQ ID NO: 331603 - DNA, 562 bp, Homo sapiens
tgcatttttataaaaattaaataaatttgtatattgagagttgctttgtatactataaagcattcagtatattagttaattcctctcctgagaaaagacactcaccattctttgttcttttatgtgatggtcagtcagatgcaaccacaagagaagactcagaaaggttcagagagtcttagaaacaagagcatggcacatcaggcagaaccactgggaaagcacctgcattggtcaagaggcagaaagagaaggagcaagaggagatcccaggccacagtcctcattggaatttctgcaggaaaggcaagacagggcagaaatttacaagaaaaaaaatcaaacaaccccatcaaaaagtcggcaaaggatatgaacagacacttctcaaaagaagacatttatgcagccaacagacacatgaaaaaatgytcatcatcactgccagtcagagaaatgcaaatgaaaaccacaatgagataccatctcacaccagttagaatggcgatcattaaaaagtcaggaaacaacaggtgctggagaggatgtggagaaataggga

SEQ ID NO: 331604 - DNA, 555 bp, Homo sapiens
atctcagcacttttggaggctgaggcggaaggattgcttgagtccaggagtttgagaccagcytgagcaacatggtggaacctggcctctacaaaaattagccagacaggtgacacgtgtctgtagtcccagttgtttgggaggctgaggcaggaagaccacctgaacccagggaggtcaaggctgcagtgaaccatattatcctgtcactgtactctagtatgggtaaaagggtgagaccctttctcaaacaaaaacaaaaacaaaaaaccctataatttttagaaaaataaataaagaagaaaataatatgtcttccaattcatggtgtcttaggcacgtgtctagtttgaattgagatgtgttttaaggtaaattatacacaccagatttcaaagtcttggaatagacaaaagaatgtaaaatatctctttagtaatttgatattaattagatagtaaaacattttggaaataattggttaattaaatatagcctcaagtaatttcatctttttacttttaaaaatgggtccactagaaaattaaaaattaa

SEQ ID NO: 331605 - DNA, 555 bp, Homo sapiens
atctcagcacttttggaggctgaggcggaaggattgcttgagtccaggagtttgagaccagcctgagcaacatggtggaacctggcctctacaaaaattagccagacaggtgacacgtgtctgtagtcccagttgtttgggaggctgaggcaggaagaccacytgaacccagggaggtcaaggctgcagtgaaccatattatcctgtcactgtactctagtatgggtaaaagggtgagaccctttctcaaacaaaaacaaaaacaaaaaaccctataatttttagaaaaataaataaagaagaaaataatatgtcttccaattcatggtgtcttaggcacgtgtctagtttgaattgagatgtgttttaaggtaaattatacacaccagatttcaaagtcttggaatagacaaaagaatgtaaaatatctctttagtaatttgatattaattagatagtaaaacattttggaaataattggttaattaaatatagcctcaagtaatttcatctttttacttttaaaaatgggtccactagaaaattaaaaattaa

SEQ ID NO: 331606 - DNA, 508 bp, Homo sapiens
aagtcaaataccacttgttctcacttataaatggaagctaaataacatgtacacattgacatagagcgtggaataataaaaactgagaactcagaagggtgggaggttggtaagggacgggaaatgtctttatgggtacaatggacaccattcaggtgatgactacactaaaagtccaaacatcactgttacatgatatatctatgtaacaaaacttgacttgtaacccttaaatctataaacataaaaaaattaaaattaaaaaacaaaattttaaagttttgcttttcatttttggamctttaattatccttgaattatatgttaaggtatgaccttttattagtccattctcacactgctgtaaaaaaccaccttggactgggtaatttattaaaaaaaaaaagaggtttaattgactcacagttcctcaggctgtacagaaaccatagctggggaggcctcaggaaacttacaatcatggtggacagcaaagggggagcaaata

SEQ ID NO: 331607 - DNA, 528 bp, Homo sapiens
atggaagctctgaagcaccctcctgaagccacagcctgagctgtaccatggccccttttagccatggctggagtggctgggatgtagggcaccatgtaagaggctgcacacagcagggcatccctggacccagcccaggaatccgtttttcccttctaggcctctgggcctgtgatgggaggggctgccattaaattctctgacatgacctggagagagayatttcccccattgtcttgatgactaacattcagctcctcattacttatgcaaatttctgcaattggcttgattttctccccagaaaatgggcttttcttttctattgcatcatcaggttgcaaatatttcaaacttttatgctctgctttcttttgaacactttgccacttagacatttttttccaccggataccctgaatcatctctctcaattcaaagttccacagatccctagggtaagggtaaaatgccagaagtctctttgctaaagcatggattgacctttgctccagttcccaagaagtt

SEQ ID NO: 331608 - DNA, 528 bp, Homo sapiens
ttatagtagtgccccattcccttggtaccaatttattgcattagtctgttctcaccctgctatgaagaaatacccaagattgggtaatttataaaggaaagrggtttaattgactcacagttcagcatgactgggatgatctcaggaaacttataatcatggtggaagtcacctctgcacatggcggcaggagagaggatgacctcaagcaggggaaatgccagaccatcatatctcatgagactcactcattatcatgagaacagaatggaggaaactacccttatgatccaatttcctccacctggtcccacccttgaaacatggggactattggaactacaattcaagctgatatttgggtggggacacagccaaaccatgtcactatcccttagagaaagaaatgtttaagtctccaacttcaattgtacgttttgttttctttcatttcagttccatttctgttttatatattttgaagacaatgctgtcagttacatgtaccaataagattatcagtcccca

SEQ ID NO: 331609 - DNA, 409 bp, Homo sapiens
tttaacacacctttcttagtaaactttatgttaagaagacaaaatctgtacaggagcagtagactataccatataacctagtgtgtagttggctataccatctaggtttgtgtaagtacacccaacgatgtttgtacaaggaataaattaaattgcctaacaatgcatttctcagaacatatcctcatcattaagtgacacgaaattgtttttgtatatcttcatctgtgaagtgctattcaattgccttatgcayatttttgctatggttcctttctttgccttatgacttgaagcatttatttataccttgtagatgcaatctctttgtcaaagatacaagttagaaatatattttcaatatttacttttttatttaattaatgttgtttttagaagaaatatcttt

SEQ ID NO: 331610 - DNA, 409 bp, Homo sapiens
tttaacacacctttcttagtaaactttatgttaagaagacaaaatctgtacaggagcagtagactataccatataacctagtgtgtagttggctataccatctaggtttgtgtaagtacacccaacgatgtttgtacaaggaataaattaaattgcctaacaatgcatttctcagaacatatcctcatcattaagtgacacgaaattgtttttgtatatcttcatctgtgaagtgctattcaattgccttatgcatatttttgctatggttcctttctttgccttatgacttgaagcatttatttataccttgtagatgcaatctctttgtcaaagatacaagttagaaatatattttcaatatttactttttwatttaattaatgttgtttttagaagaaatatcttt

SEQ ID NO: 331611 - DNA, 506 bp, Homo sapiens
tattaaattaaggcaaaaagagttaactatttttgagattttttttttcaatttaaggtyattgcatgtaaagtttaatgtaatctaagaataaaacacagacattcacattttctgcccagttctttaatcactcttatttaacctcagaaaaagaaggacaggcaagaaacaatatggaaaaactacagtaataaaacctaagaaaatcctttgctataagaaagaaaaacaaattatttgaagcttatgcttcctagatctcatccatctttgcaggtaagtgaaattgtccaggtaagaataacatactatttaatcctagcaatcctggaatgttatgtgtctattatcctctctcccaatcttaatatttagctgcctatcttgtgatgatgtctgcatttcaaagacattttctaaacaatgcatttaataatggaccatttgcttaaggtcagtagttcaaacttcataatggttataagtgtgtaaaagtgggttaa

SEQ ID NO: 331612 - DNA, 506 bp, Homo sapiens
tattaaattaaggcaaaaagagttaactatttttgagattttttttttcaatttaaggtcattgcatgtaaagtttaatgtaatctaagaataaaacacagacattcacattttctgcccagttctttaatcactcttatttaayctcagaaaaagaaggacaggcaagaaacaatatggaaaaactacagtaataaaacctaagaaaatcctttgctataagaaagaaaaacaaattatttgaagcttatgcttcctagatctcatccatctttgcaggtaagtgaaattgtccaggtaagaataacatactatttaatcctagcaatcctggaatgttatgtgtctattatcctctctcccaatcttaatatttagctgcctatcttgtgatgatgtctgcatttcaaagacattttctaaacaatgcatttaataatggaccatttgcttaaggtcagtagttcaaacttcataatggttataagtgtgtaaaagtgggttaa

SEQ ID NO: 331613 - DNA, 542 bp, Homo sapiens
tactgatatgcaatcattttaggtgattttctatctggtgtgagatttaatgtaacagccctgaagaatacaatataatcttattatgataaacacatatatttgttgttctaaaatgacaccattggaattcaattacacaccaatcgcaggtgtctttatgttagattagctcaatttattttggtcattttggcatcttgggtttgcaccattaactgttgtctaaaacatgaaaaatctaatgtcatgatggctaaggataagctgagacccccataagaaacctttatttcccatcatttattatgttcattctcctatttaatgaagctagcttttatgtaatattggatcmagtgtgagaaaatgtattactgcctgactagagtagctcaggctttttacacagcataagtgcactaaaatccaagcttcaaactaggattctttctctgttgggtaaactttaattattgatcctatttagggttcacctttttggtgagaccttgtatctcccatctgctctcaaaatgaat

SEQ ID NO: 331614 - DNA, 457 bp, Homo sapiens
ctatttaatgaagctagcttttatgtaatattggatccagtgtgagaaaatgtattactgcctgactagagtagctcaggctttttacacagcataagtgcactaaaatccaagcttcaaactaggattctttctctgttgggtaaactttaattattgatcctatttagggttcacctttttggtgagaccttgtatctcccatctgctctcaaaatgaatcactcttcttctgtgtgattcccagggcactattacgttttttttttaaatgtcrtaatcattatttttagcagttttgggttgatagcataattgagtggaaagtacagacagtccacatccatagacagcctcctcagctatccacatcccacatcacagtaatgcaacttgttataatcaaaccttcattgacacataagagtccccgaaagtccatagtttatattaggat

SEQ ID NO: 331615 - DNA, 594 bp, Homo sapiens
gaattttataaagaataagctataaaaacatgttttaacaaagccataaaacaaagaaaatacctaacaaacatatagttgtgttaatttactagggggtaccattacaaaatttcagataatgtattttttatctctagaatttacatactaatctttatagtgtccatttttatgtytttctgatatggaatttcttacttaatctgttattttatgtcatttttcatcatttccattctttgtgattctgtttctgtttattcaaatttattcttattatggatcatatttccctgcctctttgcatgtcttatacatttttatgggattgcaaatattgtgagttttatgttgttgggtgctggattttgttgtatttctttaaagagtgcaagactttattcagttgtatggttaagtgatttgtgattagctagatcattttcagattttcgcttaagatttgtcaggataccagtctttcttctaggagtaatttatttaggataatctagaacacccttctgcaagctttcgcggctctccttctaaagcactctcctcttcattattcagctccacacattctag

SEQ ID NO: 331616 - DNA, 594 bp, Homo sapiens
gaattttataaagaataagctataaaaacatgttttaacaaagccataaaacaaagaaaatacctaacaaacatatagttgtgttaatttactagggggtaccattacaaaatttcagataatgtattttttatctctagaatttacatactaatctttatagtgtccatttttatgtttttytgatatggaatttcttacttaatctgttattttatgtcatttttcatcatttccattctttgtgattctgtttctgtttattcaaatttattcttattatggatcatatttccctgcctctttgcatgtcttatacatttttatgggattgcaaatattgtgagttttatgttgttgggtgctggattttgttgtatttctttaaagagtgcaagactttattcagttgtatggttaagtgatttgtgattagctagatcattttcagattttcgcttaagatttgtcaggataccagtctttcttctaggagtaatttatttaggataatctagaacacccttctgcaagctttcgcggctctccttctaaagcactctcctcttcattattcagctccacacattctag

SEQ ID NO: 331617 - DNA, 614 bp, Homo sapiens
actattgatgctgtgtgtagttgtgtgtgtgtgtgtgtgcatatgcatatgttggggatattttgattgcttcttgatgttatctatgcaaatgatcttactgaggcttctaaaatgaaaaagaaagtttcaatatgagtaatattaatttgcattcctctctgtccccactttgccctatcctcctagttggaattcataaatgtgtacaaaaatagatacttatggatggttcactatgtactagctgtgggcacttgctatgtgtcacacatatcacctcatttmtctctcccaaaattcttgtagcagcttcatttgtaaataaaggcttctaatattttaataattataaaatatcaatcatgatttttttctgtagagttctaatgatattctcctttgaactaacccacatgattttgactattaaaaccagatcaggcttacattattatctaagtaattttaaatatctcttcttagtgtccttttagataactctgctccatttttttttctttttggtgatttggattttttatatcatcttgtttgataagatagctcatcatttttatacacaaagtcattatatcccatatggttttgaa

SEQ ID NO: 331618 - DNA, 549 bp, Homo sapiens
aacctcctggcttggggaattgggatagcagagaatctatcctggatatcccaaagggcagtttgtcttgatagtggtaaccagagctagggtagaacttggtcatttctaattaagttcaatccgtatattacaggcagagaggacagaaatctggcttgccaagccatttagtgctatcttcattttttttcttgtcctcgtcgaatccctgtcaagtgtgtgcatatgtgatcatagtctctcatcatttacaatccatgatcaaatccctccctgatgctactgaaacattccacagcaattatgcagatgattatttgccacagctarcaaagtgggagaattaacatttgctttcaaaatattattagctgtgggatcagttaagtgagaatatctgaagtacaacacttgttgtgtaacaggtaacactcaaaatgcttttgaattattttatttgatttctatgtttttgagaaatattttctcttactcttatggaaaactttaagtggcattggaatcccatattaatgaaaaggaaat

SEQ ID NO: 331619 - DNA, 584 bp, Homo sapiens
tttaaacattttcctagctcccaggattacttaaaacrgtttaattatctgttcttttgaaactaagtaaaactcaattattaatccagtagatcctggtaatagtttcaatgaacaaagttttcaaatactttgtaataactaatcttcatattttgacttatttgaggttcattttatttttgctatgaaatttaggtcattatttgctaggaattatagatttattttaggatttcaaattcttttgataatatatcctttccaatatttacatttattccattacatttattgtactctattctattgcagcttttaacattatttattccaatggcaggccacatacaagaccgccaaatgatccctatctctcagtatttgtgcttttatataaccccctcccattgagtataggatggatctgtgatttgctttgaacatacagaatacagcaaaaatgatgggtgtgattagattatgaaaagactgtcagactctcactggcttcctctaaggcaagcaatccatgttgtaagcaaccctatggagaaggctgtctggccaatggctaaaggaag

SEQ ID NO: 331620 - DNA, 555 bp, Homo sapiens
ttgtagcatagggaaggaaaacaatggggtgcagaactggaattataacacggtctctgacatcactctgaatggattcttcccatagggctacctggggagaygagaaaattgtctgaagggtgcatttcctgtccccacagagctgaccagtgcaaaggtgtccatgacagagcaagggacagaaatagttctaaggaagctacagctgtgtacactcaaaatttaatgttagaactcctgccccacagagagtatgctgactaggtactgttgggcaagagaacaccacagacagaaccagctcagtagaattcatttccctcttctctaatctttgcacctcctcctgccccacccacctgctgcatgaagtatggaggcagatatacatgaaaaataaatactgaaggtacaactattttatttctccaccttatattccttaacttggggaaaaggagatattgtgaactagattgaagattgaaatcttggatattcctgaatccaaagtgttttcatttctaaaatgacctgtgttcttatgactaa

SEQ ID NO: 331621 - DNA, 553 bp, Homo sapiens
gggtaatcaaggctgtgtttaaactgaaacagtgaatttcaggaattgttgaatttcaggatcaagacccttaaaaacaggccaaaatttatactgactcaaawaaactaggacccttggaaaactgaccgaatgtgcttcagaacaatattttgctcagtgttacaaacaggcatgtgatattccagcccttaaaggacctccggccatttttaggttttttcaaaatcccatatcccaagtcctgtatatattggaaaaaaaaaaaaaaaaaaaaaacagcaaaacagcggaacaagaataatttctatgatggtcacagaaccaaatgtgctccagagatctcgcctttttatcccgtttgtggatggatatggtgtcaccttctcattcctacgagtgcaagttccttaaagggcaagggctcattccccagttcagccaacgctaggaaccactagataggctgaacaaaacagagcctcatggactcctgggacattaactagctttcagtaagtaagccactgaatcaacatacacaccttgaaaa

SEQ ID NO: 331622 - DNA, 553 bp, Homo sapiens
gggtaatcaaggctgtgtttaaactgaaacagtgaatttcaggaattgttgaatttcaggatcaagacccttaaaaacaggccaaaatttatactgactcaaaaaaactagkacccttggaaaactgaccgaatgtgcttcagaacaatattttgctcagtgttacaaacaggcatgtgatattccagcccttaaaggacctccggccatttttaggttttttcaaaatcccatatcccaagtcctgtatatattggaaaaaaaaaaaaaaaaaaaaaacagcaaaacagcggaacaagaataatttctatgatggtcacagaaccaaatgtgctccagagatctcgcctttttatcccgtttgtggatggatatggtgtcaccttctcattcctacgagtgcaagttccttaaagggcaagggctcattccccagttcagccaacgctaggaaccactagataggctgaacaaaacagagcctcatggactcctgggacattaactagctttcagtaagtaagccactgaatcaacatacacaccttgaaaa

SEQ ID NO: 331623 - DNA, 550 bp, Homo sapiens
cagaccttcaactgatttaatgaggaccacccacattaagatagtaatttgctttattcagtmtacaggttaaaatgagaatatcatctcaaaacaccttcacagaagcatcatgaataatgtttcagcgcctgtgtgggcactttgaagcccattcgagttgacacatgcttatgatttgcatatttatgtcccgtccacatacatattttgaaatccttaactgccacattgaaggttttgcaaggtggaataattaggaaagtaattaggtcatgaagtcagaacctttataaatgggactagtgcccttaaaaataggttcaaaggagctcgttcacttcttcccactaggtaagatacagttaaatctgcatctatgagggaatgggtcctcaccagacacaaaatatatctgagtctggatcttggacttccaaacttccagaaacatgagaaataaatatacgttatttataagccacccagtctaaggtattttgttataacaacctgaatggactaagataacgtataaaattaaccatca

SEQ ID NO: 331624 - DNA, 553 bp, Homo sapiens
gggtaatcaaggctgtgtttaaactgaaacagtgaatttcaggaattgttgaatttcaggatcaagacccttaaaaacaggccaaaatttatactgactcaaaaaaactaggacccttggaaaactgaccgaatgtgcttcagaacaatattttgctcagtgttacaaacaggcatgtgatattccagcccttaaagkacctccggccatttttaggttttttcaaaatcccatatcccaagtcctgtatatattggaaaaaaaaaaaaaaaaaaaaaacagcaaaacagcggaacaagaataatttctatgatggtcacagaaccaaatgtgctccagagatctcgcctttttatcccgtttgtggatggatatggtgtcaccttctcattcctacgagtgcaagttccttaaagggcaagggctcattccccagttcagccaacgctaggaaccactagataggctgaacaaaacagagcctcatggactcctgggacattaactagctttcagtaagtaagccactgaatcaacatacacaccttgaaaa

SEQ ID NO: 331625 - DNA, 553 bp, Homo sapiens
gggtaatcaaggctgtgtttaaactgaaacagtgaatttcaggaattgttgaatttcaggatcaagacccttaaaaacaggccaaaatttatactgactcaaaaaaactaggacccttggaaaactgaccgaatgtgcttcagaacaatattttgctcagtgttacaaacaggcatgtgatattccagcccttaaaggacctccggccatttttaggttttttcaaaatcccatatcccaagtcctgtatatattgraaaaaaaaaaaaaaaaaaaaaacagcaaaacagcggaacaagaataatttctatgatggtcacagaaccaaatgtgctccagagatctcgcctttttatcccgtttgtggatggatatggtgtcaccttctcattcctacgagtgcaagttccttaaagggcaagggctcattccccagttcagccaacgctaggaaccactagataggctgaacaaaacagagcctcatggactcctgggacattaactagctttcagtaagtaagccactgaatcaacatacacaccttgaaaa

SEQ ID NO: 331626 - DNA, 582 bp, Homo sapiens
tctattttctttaaacagtggttgtcagaaagacaatgtcttcgtgtggaagacaattatgatatcatattgacattacaacaaaacacatttacagacataaagcttcttacgctttaattttaaactgatggtttgatatctttgtaaattgtacatttcagcagagtttttttaaactaaaacatttattggtctaaaatacatattaacttgaaatattgccattcccatttcatagccaagtgataataattttctttaattacacattaactccaatgtattacctggataggcagttattgttttaacagggtcaagattaatgggcaggtgttccgcgataatctgagtgaaaagaaataaaggaattatacatgattcattttcttacttctctgagctgaataatattaagaacactgccaccttacatttataaagcactttwcagtttcagagtatttttgtatctgggattacattttcctgcattttttacctttgacagatccttccaggtaatacacaactctaccgcttttcaactttctgatgcccaaacattgtgtttgtgtg

SEQ ID NO: 331627 - DNA, 556 bp, Homo sapiens
cctatagatacatacctatgataaagtttaatttagaaattaggcacaataaaatatttaaagcaataattaaatagaacaagtataacaatacactgtaataaaagttaygtgaatatgggctctctcaaaatatcttattgtactatactcaactttcttgtgatgatgtgagatgataaaatgcctacatgatgagatggaatgaggtaaatgacataggctttgtgacataatgttaggctactgttaacttgaacacaagcactgcaatacggtctcagtagatctgataaccaagatgcctacaggcaggtcgcatataaagcatgtacaaaagctgaacaaagaaatgactcgtgacagtgagaggttgtgtcacactattcagaactgcctacaatttaacatttataaattgtttatttctggaattttccatttaatattttcagactgaggctgaccgtaggtaatcgaaaccttggaaagtgaaaccatggataagaggagactgatatattggtctatttcttgcttcctcaaagcctacggt

SEQ ID NO: 331628 - DNA, 470 bp, Homo sapiens
ctaaaacataagttcaaaggtgaatttgtttagccttttacaatagcttacataaagccaccaacttaacaagtccacataaataagacagacttggttcataaagaccagtgggagttgaagggattgatgagaaggaactaaccttgtccaagcacaggagcattgactagttaaccctctttgaaggtaaatctaaaaggtcctctactcagtcttaggacccatacccattggtgacagggcaaggggatccagaggataaaagcaaaggtcctctgtgccaatccctactaaaacaatgccccatacccagagacaaatggacccttctgactccagcccgggctttttttttttttttttttttttttgkcaaagccaaaggataccaacctaacttatgcttttagaagatccaaaaggggctgcttttgaatactaattttgaaagaaggaaggagaaaaaa

SEQ ID NO: 331629 - DNA, 551 bp, Homo sapiens
atggcttgcaatgggaagaagaaaaagggcataatggcattggttgttttgctggtaacattccttttctctcttgaaagttgttttacccccctttttttttgagacagagtcttgctttgtcacccaagctggactacagtggcgcaatctcatttcactacaacctctgcctcccaggttcacatgagtctcctgcctcagcctcctgagtagttgggattacaggcacacaccactacacctggctaatttttgtatttttggtagagacagagttttgccatgttggccrggctggtcttgaactcctgatctcaagtgatctgccctcctcagtctccctatgttttaccatttcttgactttcagcacatgtgcctctggtgaagaggataataaacaaacacataagtaaacatacaggatgtcaatgtaataaatgctatgaaggataacacaggaatgggagaatgctagggtggttattttattttagtttagtttcttgactttcagcacatgtgcctctggtgaagaggataataaac

SEQ ID NO: 331630 - DNA, 543 bp, Homo sapiens
aatcagccaggtgtggtggcgtgcacctgtagtaccagctactagggagactgagacaggagaatggcttgaacctgggaggtggaggttgcagtgagccaagatcgtgccactgcactccagcctgggtaacagagcaagactctatctcaaaaaaaaaaaaaaaaaaaaaaaaamccacacaaaaaaattcagtatattaggcaatgccaacctaggacacagatttgttgtctgactgggatcctgtttataaagagtagatgggagttaacttatatgaagtcagtttaagtcatgatgtccttgcataggacgtttgtaacctctaggtcctttcctgaatttagttgctactgtggaaaggtgactggatctgggcctggtgctgtaaacagatgcagacagttggctctgtcagaggactgctgggccttgtttgtttactgacttcttgagatctcagatagaagacataatagaagatcaaaggcctttgtaattacttcccctagtaattgttgctaatgcctgcagggttat

SEQ ID NO: 331631 - DNA, 495 bp, Homo sapiens
taccacatacttccttttgaagagttctcaaacactcagtttcctcttcctcaaaatgatgataatattagtacccaatgtaatgaggatgaaaagatagaatacatgtaaagtgtgtagtatagtgcctagtgtactatagatgaatttgtgtgcaagttcagacttctgtgaatgttatttttcaatattgaaagagtcatttgacatgtggtggaayatgaaagagtgtttcaaacatggatgaacattccaggaaattagttcatcttctgttgtatagaaatctatggtgagtcaaagttggggttgactaacctatttgatttcacattagaaggggccagttggcatgctgggttaaggatggggaggctgcttctggatgcagtgggaagtgctgggattagctgggtctgcaggttctggagggatgattggtaacatacattccatgcatttgccagccctctactctatctcatagctaagctc

SEQ ID NO: 331632 - DNA, 561 bp, Homo sapiens
tgtgtgtgtgtgtgtacatgtatgcatgcgtgcacactcttgatatttatcatacctgatgttcttgagctccttggatctgtgatttggtatctgtcattaattttggaaaattctcagcaattattttttcaaatatttcttctgcctattttctttcttttctcctgaaatttcagttacacctaggtttgaatttatgatacagtcccacagctcttgggcactccattcgttttttgcttgttttattcatgttttttctcttcttatttagtttgggtaatttctactgatctattttcaagttcaatgattttttcctttgctgtatcaagtccactgaagaatgcctgttgaaagcatcctttatttgttactgtctttagcctttcaaatatttccatttgattctttcctgcagtttttctctctgataacattttccatttaatctttcagattgtctaccctttccactayggacttttataattaattttggttatttaaaattctttgtctgatagcttcagcatctaggtctggttctattcattg

SEQ ID NO: 331633 - DNA, 586 bp, Homo sapiens
tttaatagaataagtttctagaaatgacataagtgagtaaagggctatatattattattattatttatttttgagatggagtctcactctgttgccgagactgaagtgcagtggtgcaatcttggctcactgcaacctcctgctcctgggtttaagcgattctcctacctcagcctcctgtgtagctgggatttcaggcatgtgccaccatgccctgctaatttttgtattattagtagagacagggtttcaccatgttggccaggctggtctggaacttctgacctcaagtgatctgcccgcctaatcccagcactttgggctatattatttttaaggctttggatatatatttcccatgttgtcctccagaaagcatgaactaatttattttatcacctgggaatttgagagtgccttttctcctaagcctcatacaatactaggattattattattattttgagatggagtctcgctctgtcrctaggctggagtacagtggcacagtgttggctcactgcaacctccgcctcctgggttcaagtgattcttctgcctcagcctcccgagtagctggaattac

SEQ ID NO: 331634 - DNA, 620 bp, Homo sapiens
atctgtctgtctttaggcagataaggggagctcagagcaagcctctctctgcacttgctgtttttcaaatgccttcagctcaaaataatcatactaatacagtgtgttttggggtggcatatcctgaagtccttcacttgcttttaccagcagaataaaatgaaggcattctgggcttcctgcattcttggagccacatatctggaccatggatatgacatgattggttctgactggctcccctgattctcccttagtgatgctgatcttgaattttgtgactcatgccatgaaggtgtctacccacactgttgtgcaatatccaagacctgtggaataacactgcttccaaggaagccaaattcaggcatttctggctttgtattctattgcagactaaaaggaacaaacaaaatcctgtattcccacgatatccctctacaaggatctaacttggcaccctaccttggtgctgaaagcttgcmtccatcttcccaaatttgatcactaattggtcttagctttttccaagtgaatgtgctgcctcactggccctaggtgggtgatataagagcttggaaacaccttgtgatggttggtaaacctgctggcaagtggcc

SEQ ID NO: 331635 - DNA, 570 bp, Homo sapiens
ttccctttcaatttttataactcaaggataggaattctgtttttctcattccttacgtgagagctcttttttgaagtctgattttttttttttgatcctatatccccagcctattttcttgttgttactttatatctgtgagtgggataggtggagaggaaaggagtatatggaaagggggactcaagaaaggccacatctttacaataacatatggatggcagggaaaggttttgaataaraaaaacattttttcaatgctcttctccactatttaaagatgtaagaacattggcgctatgctgctgaagatgttctgttggtttagggagaaaacactctactactgaaatttgctctgtgatttctttcctaggatctacaataaaaaccaatgatctatgtgagagcccatggcattgtgattcccctccatcctgaattgcatgtcttcaattcaagcaccctgctttgtggctcccaggcccctggtttctaccctctgcccttttggctcatttcctcctcattttccgtatgcctctgtattagtttgttatcatgctgcta

SEQ ID NO: 331636 - DNA, 611 bp, Homo sapiens
acctggcaggcatgagatttgcccacagagcattagccatctactccaatcccttrcagatcccaaagcaaagcatcctgctgttgactcccaaaatgtcgggcctctaagccaaaaatcaatgtatgagttgtttcatttcccctggtaatttacatccattttctttacaaagagcaatgctactggctgccaaagaaacaaagtgaaggggaataagagacagaaggaaatagccaaatgggagcagagctaaggtaaccaaataaacatctctctttactgccaagatactaaaaacataaccccagccagctttgttagttaccaccttagccacatggctacatatttgatggaaacagagatccaacaatggaaaaataaaagcatttccccaccaaatgagtagctggaaatgcatttgaagaatggcattgggatgttccaggctctctccatgcaacgctaatcaaatttacccagttcacgtgtttgggggccatttctctaaccacagatgctgccaattccacctgcaatctaaaaacccagactgcgcatttggttcctcagttcaccacaataataactgaaacaccatttttcat

SEQ ID NO: 331637 - DNA, 564 bp, Homo sapiens
tgcccaagcaacacccactctttaggggctcaagaacccaccccacctcccaaccctccagtgatattcccaacaatagagcaagccacctggaggcccaagaattggcctgcctcgacccactaatgctggtgctctggggcccaaagacaggcacactcagcccaccgctgctaccactggtgtctgaagactggtctacctggttgtccagtccccagcaaaacttcagcaaaaccttcactaacaactacaccttgagccactgaggaaattacagacrtcattgacactgtttacagccaaagaaataatacagagactacactattaaatgcacccagaatcaaagctaaagtgtaatacccaagcagcaccatagatatatcttcaggaaaaaatccttctctccaaagacaaatttaaaaaaatgtaaaaagcaactgttaaatcagatgtgcaggtatcaaagtaaggacataggaagaagaaaaaacaaggatatatgacacttccaaagcaacacaataattctccagcaacagatcctaatcaaaaagaaat

SEQ ID NO: 331638 - DNA, 623 bp, Homo sapiens
caggcacactcagcccaccgctgctaccactggtgtctgaagactggtctacctggttgtccagtccccagcaaaacttcagcaaaaccttcactaacaactacaccttgagccactgaggaaattacagacgtcattgacactgtttacagccaaagaaataatacagagactacactattaaatgcacccagaatcaaagctaaagtgtaatacccaagcagcaccatagatatatcttcaggaaaaaatccttctctccaaaracaaatttaaaaaaatgtaaaaagcaactgttaaatcagatgtgcaggtatcaaagtaaggacataggaagaagaaaaaacaaggatatatgacacttccaaagcaacacaataattctccagcaacagatcctaatcaaaaagaaatttatgaaatctcagaagaaagaattcaaaattttgatgctaaagaagctcagtgacatataagagaattctggaaaacaatacaaagaaatcagaaagacaattcagaacatgaatgagaaatttaccagagatagatataaaacagaaccaaacagaaatcctggaagagaataattaattgaatgaaatacacaatgcatttgaaag

SEQ ID NO: 331639 - DNA, 564 bp, Homo sapiens
tgcccaagcaacacccactctttaggggctcaagaacccaccccacctcccaaccctccagtgatattcccaacaatagagcaagccacctggaggcccaagaattggcctgcctcgacccactaatgctggtgctctggggcccaaagacaggcacactcagcccaccgctgctaccactggtgtctgaagactggtctacctggttgtccagtccccagcaaaacttcagcaaaaccttcactaacaactacaccttgagccactgaggaaattacagacgtcattgacactgtttacagccaaagaaataatacagagactacactattaaatgcacccagaatcaaagctaaagtgtaatacccaagcagcaccatagatatatcttcaggaaaaaatccttctctccaaagacaaatttaaaaaaatgtaaaaagcaactgttaaatcagatgtgcaggtawcaaagtaaggacataggaagaagaaaaaacaaggatatatgacacttccaaagcaacacaataattctccagcaacagatcctaatcaaaaagaaat

SEQ ID NO: 331640 - DNA, 623 bp, Homo sapiens
caggcacactcagcccaccgctgctaccactggtgtctgaagactggtctacctggttgtccagtccccagcaaaacttcagcaaaaccttcactaacaactacaccttgagccactgaggaaattacagacgtcattgacactgtttacagccaaagaaataatacagagactacactattaaatgcacccagaatcaaagctaaagtgtaatacccaagcagcaccatagatatatcttcaggaaaaaatccttctctccaaagacaaatttaaaaaaatgtaaaaagcaactgttaaatcagatgtgcaggtatcaaagtaaggacayaggaagaagaaaaaacaaggatatatgacacttccaaagcaacacaataattctccagcaacagatcctaatcaaaaagaaatttatgaaatctcagaagaaagaattcaaaattttgatgctaaagaagctcagtgacatataagagaattctggaaaacaatacaaagaaatcagaaagacaattcagaacatgaatgagaaatttaccagagatagatataaaacagaaccaaacagaaatcctggaagagaataattaattgaatgaaatacacaatgcatttgaaag

SEQ ID NO: 331641 - DNA, 591 bp, Homo sapiens
tgagatcccataaagtggcccaattttcaaatttcacctaaagaaaggtgaaacaaagggcacagagccacctctctgtacatactcagtaaactggtcaaaaccagtctatagccagcagtcatttagcaaaaaggaatgctttgtagacaaggagaactgcaatgctagaaccatgaaaacaaaaggagtggtgtcaggtggtcaaattaaataagtggaggtgttttcctgtcttttgttctcccaagctggcttttgagaaaatctggtaataataagtaaggggaagccaagagtgggatataaccaatctgtctcatcatggccaggaactcaaaggttttggggtattttagcctagtgggttgtattagtccattctcacactaattttatgctaataaagacacacccaagtcttggtaatttataaaggaaagaagtttaattgactcacagttcaggctagctgaggaggcctcaggaaacttacaaycatggcagaagaagaagcaaacacgttcatcttcacttggcagcagcaagaagtgccaagcaaaaggggggaaagccccttataaaaccata

SEQ ID NO: 331642 - DNA, 633 bp, Homo sapiens
aatcctagccaaaacaatcaggtgagagaaagaaataaccatccaaattggaaaagagaaagtcaaattgcctctctttgcaaaccacatgattttctatttttaaaaaccaaaacatgtcatcaaaaaaactcttagaactgatgaaacaaattcagtaaagttgtagaacaaaaaatcaacatacaaaaaattaataccatttctatataccaataataaaattggaaaaaataaatcaagaaggcagttcatttataatagctaycaaaaatacctagaaataaatcataaatactacaatcaaatggaaaaacattttatcctcaaggataggaagaatcaatattgttaaaatggccatactgtcataagcaatttacaattcaacgctattcctatcaaactcccaatgacatttttcacagaattagaaaaaaaaactattctaaaatttacatgaaaccaaaaaagaacccaaatatctaaagtaatcctaagcaaaaaagaaaaaagctgaaggcatcacactatttggcttcaaactatactatgaggctacagtaaccaaaacagcatggtactaattcaaaaacacacacatagagcaaagggacagaatagagaacccag

SEQ ID NO: 331643 - DNA, 562 bp, Homo sapiens
gggagaacctgcccccaatacttcaaagtaggttctttctattttctgtaagtgtcagctggatgagaaataaagagagacagtataaagagaggaattttacggctgggccaccaggggtgacatcacatgtcggtaggaccatgatgcccacctgagtctcagaccagcaagtttttattaagggtttcaaaaggggagrgggtgtaagaacagagtaggtacaaagatcacatgcttcaaagagcaaaaagcagaaccactgataagggtctaacaaagatcacatgcttctgagagaacagggcaaagggcaaaagcagagccactgataagggtccaagaaagatcacagggcaaaaggcaaaagcagaacaactgataagggtccaacaaagatcacagggcaaagggcaaaagcagaaccactgataagggtctatgttcagcagtgcatgtattgtcttgataaacatcttaaacaacagaaaacagggttcaggagcagagaaccggtctgaccacaaatttaccagggctgagttttcccaaccctagttag

SEQ ID NO: 331644 - DNA, 562 bp, Homo sapiens
gggagaacctgcccccaatacttcaaagtaggttctttctattttctgtaagtgtcagctggatgagaaataaagagagacagtataaagagaggaattttacggctgggccaccaggggtgacatcacatgtcggtaggaccatgatgcccacctgagtctcagaccagcaagtttttattaagggtttcaaaaggggagggggtgtaagaacagrgtaggtacaaagatcacatgcttcaaagagcaaaaagcagaaccactgataagggtctaacaaagatcacatgcttctgagagaacagggcaaagggcaaaagcagagccactgataagggtccaagaaagatcacagggcaaaaggcaaaagcagaacaactgataagggtccaacaaagatcacagggcaaagggcaaaagcagaaccactgataagggtctatgttcagcagtgcatgtattgtcttgataaacatcttaaacaacagaaaacagggttcaggagcagagaaccggtctgaccacaaatttaccagggctgagttttcccaaccctagttag

SEQ ID NO: 331645 - DNA, 562 bp, Homo sapiens
gggagaacctgcccccaatacttcaaagtaggttctttctattttctgtaagtgtcagctggatgagaaataaagagagacagtataaagagaggaattttacggctgggccaccaggggtgacatcacatgtcggtaggaccatgatgcccacctgagtctcagaccagcaagtttttattaagggtttcaaaaggggagggggtgtaagaacagagtaggtacaaagatcacatgcttcaaagagcaaaaagcagaaccactgataagggtctaacaaagatcacatrcttctgagagaacagggcaaagggcaaaagcagagccactgataagggtccaagaaagatcacagggcaaaaggcaaaagcagaacaactgataagggtccaacaaagatcacagggcaaagggcaaaagcagaaccactgataagggtctatgttcagcagtgcatgtattgtcttgataaacatcttaaacaacagaaaacagggttcaggagcagagaaccggtctgaccacaaatttaccagggctgagttttcccaaccctagttag

SEQ ID NO: 331646 - DNA, 562 bp, Homo sapiens
gggagaacctgcccccaatacttcaaagtaggttctttctattttctgtaagtgtcagctggatgagaaataaagagagacagtataaagagaggaattttacggctgggccaccaggggtgacatcacatgtcggtaggaccatgatgcccacctgagtctcagaccagcaagtttttattaagggtttcaaaaggggagggggtgtaagaacagagtaggtacaaagatcacatgcttcaaagagcaaaaagcagaaccactgataagggtctaacaaagatcacatgcttctgagagaacagggcaaagggcaaaagcagagccactgataagggtccaagaaagatcayagggcaaaaggcaaaagcagaacaactgataagggtccaacaaagatcacagggcaaagggcaaaagcagaaccactgataagggtctatgttcagcagtgcatgtattgtcttgataaacatcttaaacaacagaaaacagggttcaggagcagagaaccggtctgaccacaaatttaccagggctgagttttcccaaccctagttag

SEQ ID NO: 331647 - DNA, 451 bp, Homo sapiens
acaacagtcacaaataaaattaaataactaggaactaaccaaagaagtgacagatatctacaaagaaaactgttaaacactgatgaaataaattgaaaaggacacaaaaaatggraagatattccatgcttgtggattagaagaatcaatactgttaaacggtccatactactcaaagcagtttacagatccagtgcaatctctatcaaaataccaatgacattcttcacagaaatagaaaacacaatcctaaaacttatatggaaccagaaaagagcccaagtagccaaaactctcataggcagaaaggacaaaactggaggaatcacattacctgacttcaaattatgctacacggctatagtgaacaaaacagcatgatactggcataaaaatggatgcatacaccaatggaacagaaaagagaacccataaacaaatccacacacct

SEQ ID NO: 331648 - DNA, 592 bp, Homo sapiens
gttttcagaaattaggagaaggaatttsaggttgtttccgcaagtaaagttttctaatatcagtttctatgcttgaaactgcaacatgcaatttctgatcaagacatcttagggatgtttcctttacagttttgatagttgtcatgaatataaaaatggccaggcatggtggctcatgcctgtaatcccagcactttgggaggctgggctggaagggtcacttaagccaaggagtatgagaccagcctgggcaacatagggagaccccgtttctacaaaaataaaaataaaaaactagccaggcatggtggcatgtgcctgtggtcccagctacttgtgaggctgaggcaggaggatcacttgagcctgggaggccaaggtagtgggtgagctgtgatcatgcccctgtactccagcttgggtgacagagtgagagagaccctgtctctgaaacaaaacaaaacaaaccattctgacaaggtagttgataaaaattgttgacgaaaagagtcaaactgtaaaatatttgcagagatttattgtgagccaaatgtgatgaccatgacctataacacagccccagaaggtcctg

SEQ ID NO: 331649 - DNA, 309 bp, Homo sapiens
aagtaaaggcctttcctacagggtctgagaaggccaccgcagtcatttcttccmttctgtcagacataattcctcagtttagccttcccacctcaatacagtctgataacagatgagcctttattagtcaaatcagccaagcagtttttcaggctcttagtattcagtgaaacctttatatcccttacagtcctccatcttcaagaaaagtagaatggactaaaggtcttttaaaaacacacctcaccaagctcagccaccaacttaaaaaggactgaacaatacttttaccacttttccttctcagaa

SEQ ID NO: 331650 - DNA, 566 bp, Homo sapiens
caggtcataaagacctggcagataaaataggttacagtaaagaagctggtcaaaactcaccaaaaccaagatggcaaggagtgtgacttctgggcatcctcacagctcattatatgctaattataattcattagcatgctgaargacactcccactagtgccatgaaagtttacaaacgtcatggcaatgtcaggaaattacactatttggtctaaaaaggggatgaacccgtagttccaggaattgtccactcctttcccagaaaactcatgaataatccatcccttgcttagcatataatcaagaaataaccataaaaatgggcaaccagtagccctctctgaaggtttgctgaaaatcaactcacaaggcagatcaataggagaaaaggcatgcaaaagttattttaacgtgtatagcctgggggaactgcaggagaatgattacccaataacccaatgggacacagaaacttatatacccttttcataggaggggagggagatggggaatgtagacaattcttttgaggggtagcaaatgattattaggggaagcaaatgga

SEQ ID NO: 331651 - DNA, 611 bp, Homo sapiens
tccaaattgtagacaaatagtaaaaactaaaaaacaactaaaaaacaatggtcagggctagaatcttataagaaggatggtatagtttccttctaaaacaatttttttctctccccagttccccattcctaccaaatataaatgttagtaggacaaatttattggctaaataagttttagtattatacttggcctgattatttgcaaaatgtgcaacaagaagaatgattggccatataggctcttttccattgactttgcagaatttttaataagaaatctcagattacacttttaaaacctctmaagactagtaagccaagccagggattcactgtgggactgcttgtaacatatgtaaaaattgagtgaattcctatcttctcaatgacccaaaatatcttgtggttcctgggtgcatcagaaaatgacagtctttacttaccgcaagctgaggaaccttgtaagagaaccgtgtgggcaaggcatgaggccagtctttcccatgtctattggctttataaagtcagcctcaattcctcaaagcagtttggtcacattcaaaaatgtaacattccagccaaagccttggtaaaataaccggtgtatcc

SEQ ID NO: 331652 - DNA, 609 bp, Homo sapiens
gacagaactgtgctgctggaaatggagacattacagaggatatgctattaggtaatggcccttattcagacctggaacctcaaatgggactcccagatgttgcttatcagcagtgtgcacaggccactaaatgcacctgggccactattcctgaaggagtcccagtacaatcctttttatgtatcatacaagggttgcaggaaccctatgtgcaatttcttgcatgattacaagaggcagtgaagtgtcagatttctcatactgcggctgcagaaatgctaaccttaacactagcttttgaggatgcaaacacrgattgtaaatgtgcactggcactggtgaggtgtacaaaaaacttgggaaattttctcagagcttgtcaagatgtaggaactgagcttcatcactctgcaatgttagcacaagcaatagctaatttatcagttgacaaatctaaaaggagccaagggtcaaaccccaaaacgggaaaatattataaatgtggaaaaactggacattttaaaaaggaatgctgccagatctcaggacagaaaggaccttacaatgcagtgccccacccagcagaataaacaccaggattctgtcctc

SEQ ID NO: 331653 - DNA, 647 bp, Homo sapiens
tatggacgtaaacatactcaaataataatgacatctggggcttcagctcaaggctcagagctaattgcagtcattcaggttttacagctcgcagcttcagatcctatcaacattgtctgtgattcagcttatgttgtaaatgtaaccagtcacatagaaaytgctacaattaaaagtacactagacccagaactgtttaatttatttttaagacatcatgttcacacatataagtgggagccaaacattgagtacacatggacacaaaggaacagcagacactggggcgtgcttgaggatagagggagggaagaggatgaggatccaaaaattacctatcagtttctatgcttattatgtgggtggcaaaataatctgtacaccaaacttctgtgacatgcaatttatttatataacaaacctacatatgttcaccgaacctaaaagttaaaaaaataaaaatttctaccaacatctaatgtgaaaaacaaaacaaaacaaaacaaaaaaagacttcagcgagttactcgttctcatgcagatccttttcatatttctgatatttgttctcatacacaacttccaggaccattatccctagggaatgataaagtagatataaattgatttgttctgtgtttcagcaa

SEQ ID NO: 331654 - DNA, 554 bp, Homo sapiens
ggtatgatattttagaggactgtaggacgtataaaagtaatttgacatgtaggaaatatacaaataactgtggccagagggattgtggtaggctggagatggctgtgacatcattgctacttctcttattgacaggtggaatctaatttcccttcccttgaatctggactgaaattactaatttgctttgccagtagacaaaggtggacaagatgtctacgtctcctgaggctaggtgataggaaatactgcagatttcttttaatctcttggaacacttgctattaaagtcttgagccactatgtgagaaatccaactaaactgctagtgagaccatatagaatgatcctatgactacctggagagggagaggctttcaaaccattcctgtgaaggtgctgggcatttgaatgatgccatttttgactctgtagacatgcaaagatgccatctgaatatkactaagtgatcctcattcatgctattagagtaaaattgccaagccaaacccaatcttaatttctgactcatgaaataatgtaatataataaaa

SEQ ID NO: 331655 - DNA, 552 bp, Homo sapiens
atttatttgtgaaatacaaatagtggaatcacttcatagggttgttgtgaggaataaatgagttaacatatgtaacatgcttagcatagggcctggcacagagtaagtaaaagctattgtttgtgaaataaattaaataaaggaaaaatgcttggcatctacaagagtttaataatagtaataattattactatcattattactgacatctaggtctcccaattggtctacaagtatttaaaaatgaaagttagaacaaataaatataattttattttaagcaatcagttaagtagtatttggtaggtcctaaacgtgataccgataatgaaaactttataggtcgtctgaaatgctacaaattgatcctaagaatatattctgacagttgcctttcttagtgcctcctttacatctctgttcctcagactatagataaaggggttcagtatggggattaccactgtgtaggacagmgatatcaatctgttctggctagttgagtaactggatttgggcatcacataaatgaaggtaatcgttccatagtag

SEQ ID NO: 331656 - DNA, 582 bp, Homo sapiens
atctatctgatttggtccacagaaagacagactcaataaacaactagtaaatgttgaggcattcacacatccacccaggtagcaaacccccactaagagtatgcagattatgggggacaagtgggtggagtwcaccaggggtgagcagatggccacatagcgatcataggccatggtcgccagtaggaagcattcagacgtcccaaacatgactacagaacagagctgggcttcacagctagtgacagggagggctgttccacgtcttaggaatcccataagcattataggtgtgactactgtggcaagccctatgtccacaaaagccaagtggctgaggaacaggtacatgggagtgtgaagttgggaacagcttctttattatgctgatattgcctattaaggtgacaatgtagattcctagaaatatcacaaagaagatgtcacaaagtgtaggatcctcagttaaccccaaaataataaactctgtcactgtggtatggtttccaatctccatctttgtgaattgttcctgttgaaagaaatgtgaatattaatttgttataggattttatttcacac

SEQ ID NO: 331657 - DNA, 447 bp, Homo sapiens
ggaatgtttataacatcgctattcataattgtcaaatactggaagyaacaaaaatatcattcaagtgaatgataaaccataatacattcatgcaatggaatactactaagcaaaaaagggaatgaatacaaacatatggataaattttcaagtcattgtgctgagtaaaagaagctagtctccaaagttatctaatgcatgatttaatgaatatgacattctctaaaagataataatatacaggagaaaaaattagtgtttgcccagggtttggagtggacagaggtgaagctacaaaggggtagcacaaagcagtcttttggagtgatgcagctattctgtatcctaattgtgatggtggttacacaaatctataccttcattaaaatttgtgcatctgttcactaaaagggtcatggttactgtacattaattttaaaataaaat

SEQ ID NO: 331658 - DNA, 529 bp, Homo sapiens
ctaatgcatgatttaatgaatatgacattctctaaaagataataatatacaggagaaaaaattagtgtttgcccagggtttggagtggacagaggtgaagctacaaaggggtagcacaaagcagtcttttggagtgatgcagctattctgtatcctaattgtgatggtggttacacaaatctataccttcattaaaatttgtgcatctgttcactaaaagggtcatgkttactgtacattaattttaaaataaaataaacaaggggaaaatgatctagtaactctacaaactggatcaagcctaaggtggagatcatgtcaaaatacaatacattttaaaatattcccattactcggtatttttcttaagacaataggtaaaaagaagtatattctgtgctccaaggtaagcaaatccctatgatttgcaataatgaaaatactaaaccaaagtgctccctcttgatcattgtttcgttgcattcttgcctatgttttcattaaggggcttattgccttattcacatgt

SEQ ID NO: 331659 - DNA, 576 bp, Homo sapiens
ttttaaaataaaataaacaaggggaaaatgatctagtaactctacaaactggatcaagcctaaggtggagatcatgtcaaaatacaatacattttaaaatattcccattactcggtatttttcttaagacaataggtaaaaagaagtatattctgtgctccaaggtaagcaaatccctatgatttgcaataatgaaaatactaaaccaaagtgctccctcttgatcattgtttcgttgcattcttgcctatgttttcattaaggggcttattgccttattcasatgttttgccattgtgttgtggcaaaggcaaagcttctgtgtttggaggtaatcataacaaagcagaattaataataaataatatgaaaagacagataagtttctgtagtccaatgtaataatttcagggcatactaaagattcagtgaaaattagaaaaaaaaagcatattcatcagaatcacaaaatataagtgaggaaataatttatgttaaagcatacagcatttgacacagtcaatgtcttttcttgccattaacttcagctaaacagcaatcgctttaggtaaattc

SEQ ID NO: 331660 - DNA, 576 bp, Homo sapiens
ttttaaaataaaataaacaaggggaaaatgatctagtaactctacaaactggatcaagcctaaggtggagatcatgtcaaaatacaatacattttaaaatattcccattactcggtatttttcttaagacaataggtaaaaagaagtatattctgtgctccaaggtaagcaaatccctatgatttgcaataatgaaaatactaaaccaaagtgctccctcttgatcattgtttcgttgcattcttgcctatgttttcattaaggggcttattgccttattcacatgttttgccattgtgttgtggcaaaggcaaagcttctgtgtttggaggtaatcataacaaagcagaattaataataaataatatgaaaagacagataagtttctgtagtccaatgtaataatttcagggcatactaaagattcagtgaaaattagaaaaaaaaagcatattcatcagaatcacaaaatakaagtgaggaaataatttatgttaaagcatacagcatttgacacagtcaatgtcttttcttgccattaacttcagctaaacagcaatcgctttaggtaaattc

SEQ ID NO: 331661 - DNA, 642 bp, Homo sapiens
ttcataatctatcttcaattacttttctaaatgtatctccctattacatatccttccttgcaacttttgtagttttcaagagtcatattaacatgagattgagattttctgctcaatatcactagttatactattaataaaaacacaattttctactaacaatgttattgctgttcttaaggtttgaaacatttacctaaataataaatattagtaccaatgtcttcaaattcctaaaattataatttatttttactttggaataagaattaattttctytgatagtggaactgaattctttgactatgtgaattctgagggataataaaccaatagttgagaacctgtagctcatgaaagaatgtgttccatctcttccttaattgatcttcattaattgcacctcaattactctagtgtcaggccttattgcctttggtgttggttctgttattaaaatctattttttaaacttcccaattggtcccgcctgagtttaatggtgcaaaccatccaatatctatataaaaatgttaacatatttgaccccctatgatgcctcttctaccttcctttttctaaatttaaactctcatagttcctttggccattccactgtgaaataccatttagatccctca

SEQ ID NO: 331662 - DNA, 600 bp, Homo sapiens
gcctgtgtgtaccctttgtttagctcctacttataaaggatatgcactatttgattttctgtttctgaggtatttcacttaaaataatgtcctccaggttcattcttgttgctgcaaaagacgtgctttcatattttttatggctgggtagtattccatggtatatacataccacattttcttaatccaatcaactgttgatagacacttgggttaattccatgactttgttattgtgaatagtgctgcaataaacaaacaagctcagtggtcttttgttataatgatttattttcctttaggtagatactcagtcacgggattgctgggccaaatggtaattctgtttttagttctttgagaaatctccatgctgtttcccttagcagttttactaacttayatcctcatcaacagtgtataagcattcccttcttctctgcgtcctcatcaacatctgttattttttgactttttaattatagccattctgactagagtgagatagtgtctcattgtatttttgatttgcatttctttaatgattaatgatgtcgagcattttttcatatgctttttcatatgcttttttcatatgct

SEQ ID NO: 331663 - DNA, 497 bp, Homo sapiens
accatttattgattaaggtatacttttcccattgtttatttttgttgactttgtcaaagatcaggtggttgtatgtgtgtgattttatttatgggttctttattttgtttcactgatctatgggtctatttttgtaccatgatgatttggttattatagccttgtagtatactttgaagtgaggyaatgggatgcttccagctatattactttgcttagtattgatttggctatttgggctttttttttgtcccatatgaattttagcattttttctaattctgtgaaatactacactgacaatttcataaaaattacattgaacctgaggattgctttgggcaacatggtcattttaatgttggttcttccaatccatgagcatgggattttttttatttgtttatgtcacctacaatttccttcatcagtgttttgtagttctccttgtagaggtcttttgtctccttggttaggtgtattgttaggtattttaa

SEQ ID NO: 331664 - DNA, 474 bp, Homo sapiens
agcagtaatagcactttccaccactgtgaggttcataaattagaagctgtttatttttatgctctaaatcaatttaaatagcatttgaattatttgttccttgagtatttaaacaaattaattattaaactatctgctctaatgctttgtgggagagaacaggaaaacatgtctttgacggatttctcaaaaatttccatggaaattggtatgtcaaaaaatgtctgttgcttttggggtcattttgtaagcttattttttccataaatgcattcatgtttttttctaattttcaaatttgtttgaataaatttgaacaaagtattctcttaaattgcttttaattttctctattttaatcacatcctcattttcattttcaaytttttgtgtttgtactttctccctcttttcggattaattatactagtcaactcgatttttttcttttccttcttcccttcctcccttcct

SEQ ID NO: 331665 - DNA, 474 bp, Homo sapiens
agcagtaatagcactttccaccactgtgaggttcataaattagaagctgtttatttttatgctctaaatcaatttaaatagcatttgaattatttgttccttgagtatttaaacaaattaattattaaactatctgctctaatgctttgtgggagagaacaggaaaacatgtctttgacggatttctcaaaaatttccatggaaattggtatgtcaaaaaatgtctgttgcttttggggtcattttgtaagcttattttttccataaatgcattcatgtttttttctaattttcaaatttgtttgaataaatttgaacaaagtattctcttaaattgcttttaattttctctattttaatcacatcctcattttcattttcaactttttgtgtttgtactttctccctcttttyggattaattatactagtcaactcgatttttttcttttccttcttcccttcctcccttcct

SEQ ID NO: 331666 - DNA, 401 bp, Homo sapiens
ctctctctcttccttgctgtctttctgtctttagtatcataattttctttcttcccaaaaagcaactgctatcattaaaatacagtgttctaaagcaatatgtaccctgaatggatatgtgtacatacacacatgcacacrcacataaacacacacacataacatttaaaaacattttaaaactgcatcctctctgtagtaggaaaatggtgaggccaggacatatcaggaaattagacaatactttaaccactttgtgcacaaagtgatattaattagaagtactccacttttctcacctttatttatcaatgctgtgtaatttttttaaatgttcaggctctttttttgtcttctgagggaaaaccccaaatacactgcctagtgtttttcttagggct

SEQ ID NO: 331667 - DNA, 502 bp, Homo sapiens
gccagggtagaatgcagagctttttagatgaacaagatctgaaaatgtttacctcccacacaccytttctcaggaaacaacttgaaaatgtgcttcatcaaaataggagagtgaagcaataaagacattaaataccagagacactcccaagataaaggtaaagaagactccaagataatagctatgcatcaaataggtgtggaagcatgttaggaaacaccagtaaggaaacaccagggactctccaaaatgatgaaattcatagaatatctgatatgaagtaacatactgagagaatttttaaacaaccagaggagaagaatttggagattgaattagcagtatagtttcctacttaactatagaaaaaatagaaagttatttagttaagttggctcaggtaaaaaagagtcattatttactacatatctcggttctgaattacatacattgtcatgataatttaaaactaaatattgatctaatttatattaaagagtag

SEQ ID NO: 331668 - DNA, 565 bp, Homo sapiens
gccacatagcgatcataggccatggcagccagcaggaagcactcggccgtaccaaacgtcacyacagaacagagctgggccacacaaccagcaacagggagagaggtttctttccttaggaagctcatgagcatgacaggtgtgactgatgaggagtacccaatgtctacaaaggccaaatggcagaggaaaatgtacatgggtgtatgaagatgatgacttcttctgatcaatacaattatgctgatattacccattaaggtgacaacataaattcctagaaacacaagaaataaaatagcacaaactgtagtatcctcagataaccccaaaagagtaaactctaccacagtggtgtcatttccagtccccatctatattgggaatggtgccaactgaaagaaaaacaaatgaatattataatgggattaaatgctataattgcacacttatttttccaatatctatttaaccaaaaagtataacaatttaggcactcatgtaaatttgggaagaaaatgctttcacacacagtatcttatgtaagactttaaaacataaatgt

SEQ ID NO: 331669 - DNA, 565 bp, Homo sapiens
gccacatagcgatcataggccatggcagccagcaggaagcactcggccgtaccaaacgtcactacagaacagagctgggccacacaaccagcaacagggagagaggtttctttccttaggaagctcatgagcatgacaggtgtgactgatgaggagtacccaatgtctacaaaggccaaatggcagaggaaaatgtacatgggtgtatgaagatgatgacttcttctgatcaatacaattatgctgatattacccattaaggtgacaacataaattcctagaaacacaagaaataaaatagcacaaactgtagtatcctcrgataaccccaaaagagtaaactctaccacagtggtgtcatttccagtccccatctatattgggaatggtgccaactgaaagaaaaacaaatgaatattataatgggattaaatgctataattgcacacttatttttccaatatctatttaaccaaaaagtataacaatttaggcactcatgtaaatttgggaagaaaatgctttcacacacagtatcttatgtaagactttaaaacataaatgt

SEQ ID NO: 331670 - DNA, 565 bp, Homo sapiens
gccacatagcgatcataggccatggcagccagcaggaagcactcggccgtaccaaacgtcactacagaacagagctgggccacacaaccagcaacagggagagaggtttctttccttaggaagctcatgagcatgacaggtgtgactgatgaggagtacccaatgtctacaaaggccaaatggcagaggaaaatgtacatgggtgtatgaagatgatgacttcttctgatcaatacaattatgctgatattacccattaaggtgacaacataaattcctagaaacacaagaaataaaatagcacaaactgtagtatcctcagataaycccaaaagagtaaactctaccacagtggtgtcatttccagtccccatctatattgggaatggtgccaactgaaagaaaaacaaatgaatattataatgggattaaatgctataattgcacacttatttttccaatatctatttaaccaaaaagtataacaatttaggcactcatgtaaatttgggaagaaaatgctttcacacacagtatcttatgtaagactttaaaacataaatgt

SEQ ID NO: 331671 - DNA, 565 bp, Homo sapiens
gccacatagcgatcataggccatggcagccagcaggaagcactcggccgtaccaaacgtcactacagaacagagctgggccacacaaccagcaacagggagagaggtttctttccttaggaagctcatgagcatgacaggtgtgactgatgaggagtacccaatgtctacaaaggccaaatggcagaggaaaatgtacatgggtgtatgaagatgatgacttcttctgatcaatacaattatgctgatattacccattaaggtgacaacataaattcctagaaacacaagaaataaaatagcacaaactgtagtatcctcagataaccccaaaagagtaaactctaccacagtggtgtcatttccagtccccatctawattgggaatggtgccaactgaaagaaaaacaaatgaatattataatgggattaaatgctataattgcacacttatttttccaatatctatttaaccaaaaagtataacaatttaggcactcatgtaaatttgggaagaaaatgctttcacacacagtatcttatgtaagactttaaaacataaatgt

SEQ ID NO: 331672 - DNA, 566 bp, Homo sapiens
ggtcaaaaatcctggagttaaaaaaacaaaaaaactggattctggtgatagtcatttctgagattactgcagtggtgacttcacgtagatccaaaactgccattgctagtcatggttacytttatggagtatgcatctggaatattacatatggtctgtcaagactttcatctctacctatgctgttatttcatatagggtttcaaaaaattggctagaaatagagaacatcttactaggacagggaagaatgaagatgaacagatattatacaaaatgtttaaactgaacgtggagatataagaaagaaaatttccaaaatgagaagttgatttttatgaaggagagaaaaattaccataaaaataaaatgtatgcttcatcataaatatgaaaaaatatttgaaaatatatatttgtgtctgtatttgtagggtctcatgactttatgaaaaagcaacctttttgggtaatagaagttgggattacagcatagaaagaccaatatgcaccaaagggcatcagcaagatggggaagaatgttgcagtggctgctacaaaaatagg

SEQ ID NO: 331673 - DNA, 561 bp, Homo sapiens
agaagttgggattacagcatagaaagaccaatatgcaccaaagggcatcagcaaratggggaagaatgttgcagtggctgctacaaaaatagggttgctgatacagaaattccatgttgattggttgggaatatgagtaaagagaaacagaagatacagagttttaaagtgaatgaaggaacataagcaatttatcttgggcaagaaatggctcctgaaggaaattaacttttatcttatttttttttttactactccagtgctttttagaagtctgaggatacacaaaataactgctcaatacatgggagaatcatcaagcagtcacaattgtgcccagttggaatgggctgcaaattggtgacagcactatgaaagagattcaggaattacaggtctacctgagctaatgtgatgctgtgacattttaaaatgatattctaggattcagcatagtaaattaatccactatagtctatactctacacatccatatgaagataatgcgtgaactttctcaatagattgctttcactctggagtctgcaaacactttgctct

SEQ ID NO: 331674 - DNA, 561 bp, Homo sapiens
agaagttgggattacagcatagaaagaccaatatgcaccaaagggcatcagcaagatggggaagaatgttgcagtggctgctacaaaaatagggttgctgatacagaaattccatgttgattggttgggaatatgagtaaagagaaacagaagatacagagttttaaagtgaatgaaggaacataagcaatttatcttgggcaagaaatggctcctgaaggaaattaacttttatcttatttttttttttactactccagtgctttttagaagtctgaggatacacaaaataactgctcaatacatgggagaaycatcaagcagtcacaattgtgcccagttggaatgggctgcaaattggtgacagcactatgaaagagattcaggaattacaggtctacctgagctaatgtgatgctgtgacattttaaaatgatattctaggattcagcatagtaaattaatccactatagtctatactctacacatccatatgaagataatgcgtgaactttctcaatagattgctttcactctggagtctgcaaacactttgctct

SEQ ID NO: 331675 - DNA, 561 bp, Homo sapiens
agaagttgggattacagcatagaaagaccaatatgcaccaaagggcatcagcaagatggggaagaatgttgcagtggctgctacaaaaatagggttgctgatacagaaattccatgttgattggttgggaatatgagtaaagagaaacagaagatacagagttttaaagtgaatgaaggaacataagcaatttatcttgggcaagaaatggctcctgaaggaaattaacttttatcttatttttttttttactactccagtgctttttagaagtctgaggatacacaaaataactgctcaatacatgggagaatcatcaagcagtcacaattgtgcccagttggaatgggctgcaaattggtgacagcactatgaaagagattcaggaattacaggtctacctgagctaatgtgatgctgtgacattttaaaatgatattctaggattcagcatagtaaattaatccactatagtctatactctacacatccatatgaagataatgcgtkaactttctcaatagattgctttcactctggagtctgcaaacactttgctct

SEQ ID NO: 331676 - DNA, 569 bp, Homo sapiens
caaaattaaggaataatgtatttttctttaaagaatttgctctcaagcagactgaacgctcttgcacacatgcactgctgtctctttctctctctcacacacacaccacatgcatacrcacacacacactggcatcaaagtcatgtgctcatccagccacattattttcacacttttattctgaactgagatgcttgaataatttcacgtctgaattaactgatcaatatcatgctatgttaagaacaccatgcaattacatgtttgaactctgaagtcctatcttccttatctttgtacagggctttattaagtggcatggacccaagaatgaatgaatgcttaaaattttagaaaagatagatgtgtataatagaaattcagagtcagttatacatgctattatggcatggaagcaatgtgttggacagaaatgccatgagctttggagacatacggccctgggattagattcagctttgtcaccagcaatctatggaatcttggaaattttacataaactgttcaactcttcattacgttatttgtttaaaaaaatacttcacatg

SEQ ID NO: 331677 - DNA, 569 bp, Homo sapiens
caaaattaaggaataatgtatttttctttaaagaatttgctctcaagcagactgaacgctcttgcacacatgcactgctgtctctttctctctctcacacacacaccacatgcatacacacamacacactggcatcaaagtcatgtgctcatccagccacattattttcacacttttattctgaactgagatgcttgaataatttcacgtctgaattaactgatcaatatcatgctatgttaagaacaccatgcaattacatgtttgaactctgaagtcctatcttccttatctttgtacagggctttattaagtggcatggacccaagaatgaatgaatgcttaaaattttagaaaagatagatgtgtataatagaaattcagagtcagttatacatgctattatggcatggaagcaatgtgttggacagaaatgccatgagctttggagacatacggccctgggattagattcagctttgtcaccagcaatctatggaatcttggaaattttacataaactgttcaactcttcattacgttatttgtttaaaaaaatacttcacatg

SEQ ID NO: 331678 - DNA, 569 bp, Homo sapiens
caaaattaaggaataatgtatttttctttaaagaatttgctctcaagcagactgaacgctcttgcacacatgcactgctgtctctttctctctctcacacacacaccacatgcatacacacacacacactggcatcaaagtcatgtgctcatccagccacattattttcacacttttattctgaactgagatgcttgaataatttcacgtctgaattaactgatcaatatcatgctatgttaagaacaccatgcaattacatgtttgaactctraagtcctatcttccttatctttgtacagggctttattaagtggcatggacccaagaatgaatgaatgcttaaaattttagaaaagatagatgtgtataatagaaattcagagtcagttatacatgctattatggcatggaagcaatgtgttggacagaaatgccatgagctttggagacatacggccctgggattagattcagctttgtcaccagcaatctatggaatcttggaaattttacataaactgttcaactcttcattacgttatttgtttaaaaaaatacttcacatg

SEQ ID NO: 331679 - DNA, 609 bp, Homo sapiens
agaaattcagagtcagttatacatgctattatggcatggaagcaatgtgttggacagaaatgccatgagctttggagacatacggccctgggattagattcagctttgtcaccagcaatctatggaatcttggaaattttacataaactgttcaactcttcattacgttatttgtttaaaaaaatacttcacatgattcttgtgttgaataagatgatgtacatgataataccaagtatggatcatagaaataagtgaatgttcaacaaatgattatttcctttaaaaaactataccttaacttctaatacaaaaatgagaaacaaacattcctgtatcaatagaaaagggaaattattacctgcagatgaatgtacatcagcaataataacaaattgcaaagaactgtcactgtataggaaggtgatatttatgagatttggggtcctttgggatatagcctcttgagtacactacttgtttataaaaatttcactgaaaattcatcaagacaatggaaattacaggtacatatgctcataawaatatgtgttgctgctgggcatggtggctcacacttgtaatcccagcactttggaaggccaaggt

SEQ ID NO: 331680 - DNA, 608 bp, Homo sapiens
cgtgagatggtatctcattgtggttttgatttgctttctctaatgaccagtgaagaatgagttcatgtcctttgcagagacatggatgaagctggaaaccatcatcctcagcaaactaacacaggaacagaaaaccaaacactgcatgttctcacccataaatgggagttgaacaatgagaacacatggacacagggaggggaacatcacacaccagggcctactgggggtgggggcaaggggagggagagcactagggcaaatacctaatgcatggggggcttcaaacctagatgacgggttgatgggtgcagcaaaccaccatggcacatgtatacctatgtaacaaaactgyacattctgcacatgtataccagaacttaaagtaaaatttaaaaaagttcctagttttgatacctgaaaaaactttgcagaattcaaacacattagaataaaatttgattttaaaatattgatttaaaagttgagttgaactaaactgtccgatgtattacacactcctgatgatttcaagtctaatattttagacttccttgaattaaatatactacctacaaattatcattttaaaataactatttaaaaaa

SEQ ID NO: 331681 - DNA, 244 bp, Homo sapiens
taatgaccatagttctctttgaggaaaggctatatatatataactccactggccaaaggcaaaaatatatatataactgcactttcagggtccttgatcatasgtcctggcctcttcttcagtcagagggctctgagtctgaaaactggttcaggtgtggaaactgggcaagagatcacctgtttttgtttgagcagctataatcacccccctctaatctctatccttgatttcttttaattgt

SEQ ID NO: 331682 - DNA, 577 bp, Homo sapiens
cctgttaattctgtgtatgtgcgtgtgtacccaatatttagctcctattatacatgaatatgtgttatttggttttctgtttcttcattaattcacmtaggataatggcctccatctccatccttgttgctgcaaagaacatgatttcattcttttatggctgcatagtattccatggtgtatacataccacattttctttacccaatccactgttgatgggcacatagggattgattccatgtctttgctattgtgaatagtgctgcaacaaacattagaccgcatgtatctttttggcagaatgatttattttcccttgagtgtgtacccactaacgggattgctgggtaaattgctatctttagttctttgagaagtctccaaactggtttccactggagctgaattaattaatttacattcccaccaatagtgtataagcattcctttctctctgtgaccttgctaacatttgctaaaaaatatatataaatatatataatatatttataatagccattttgactagtttgagataatatctcattgtggttttgatttgcgtttctctaatg

SEQ ID NO: 331683 - DNA, 577 bp, Homo sapiens
cctgttaattctgtgtatgtgcgtgtgtacccaatatttagctcctattatacatgaatatgtgttatttggttttctgtttcttcattaattcacataggataatggcctccatctccatccttgttgctgcaaagaacatgatttcattcttttatggctgcatagtattccatggtgtatacataccacattttctttayccaatccactgttgatgggcacatagggattgattccatgtctttgctattgtgaatagtgctgcaacaaacattagaccgcatgtatctttttggcagaatgatttattttcccttgagtgtgtacccactaacgggattgctgggtaaattgctatctttagttctttgagaagtctccaaactggtttccactggagctgaattaattaatttacattcccaccaatagtgtataagcattcctttctctctgtgaccttgctaacatttgctaaaaaatatatataaatatatataatatatttataatagccattttgactagtttgagataatatctcattgtggttttgatttgcgtttctctaatg

SEQ ID NO: 331684 - DNA, 564 bp, Homo sapiens
attacactaatcattcagcccaaagtaaatatcttctgaatatgtaaatgtcaccaaaataatggcagatttatcagaatttaagactgcaacattttgctgaaagtgaaaataaactcttctcacatgtaaataaacagcgtatttgtcttcctttgktaataatcctaaaactgaatgttatttgccagcattcgccacttagacttttcattaacaaatatgatatgtatctgaaatactcatttggacataaaatgctgaatttttcaactggtatagatttcaacttcttatttctcttcattttatactctattgatttgtcatgcttggaaacatgccaaatgaattgttttattattccaatcaaaataaggaaccatgagagggaaccatattattcttttccattttctttcatattatttgatgtattagaatttcagaaatgtaagcattttaaaaatctcaaatatgtgcccccaaattttcaactctgccctggatgtatcattctagcattctttggtgaacaagattgaatagaaaagtgctgattca

SEQ ID NO: 331685 - DNA, 564 bp, Homo sapiens
attacactaatcattcagcccaaagtaaatatcttctgaatatgtaaatgtcaccaaaataatggcagatttatcagaatttaagactgcaacattttgctgaaagtgaaaataaactcttctcacatgtaaataaacagcgtatttgtcttcctttgttaataatcctaaaactgaatgttatttgccagcattcgccacttagacttttcattaacaaatatgatatgtatctgaaatactcatttggacataaaatgctgaatttttcaactggtatagatttcaacttcttatttctcttcattttatactctattgatttgtcatgcttggaaacatgccaaatgaattgttttattattccaatcaaaataaggaaccatgagagggaaccatattattcttttccattttctttcatattatttgatgtattagaatttcagaaatgtaagcattttaaaaatctcaaatatgtgcccccaaattttcaactctgccctggatgtatcattcwagcattctttggtgaacaagattgaatagaaaagtgctgattca

SEQ ID NO: 331686 - DNA, 533 bp, Homo sapiens
aaaccagctatgtaaactactaagagtagctggacactgacttgtgtggacattttggttgaataaagcagtggactgcaaattgccacaaagcggtcataggccatggcagccagaaggacgcattcgactgttgcaaagaaagccgctgaaccaagctggatggcacatccaaggtaggagactgtatttctctccaccaggaagtttacaagcatgttgggtgtgacagaagatgaataggccatgtcagcaaaagccaagtggctcagaaagaaatacataggatgatggagctgagaagaaattctgataagaataattatgctgagattaccagataggatgatcatgaagaggatgactcgaaggattggatcatctgttaagcccaataggatgaaccccgtcagagcggtgtgattccygtccttcagggaattcatgagacgaagtagctgctgactaaatgaaccctaatgagaacagcacattaaaatgttataaatttgatggcttcatcttcattaata

SEQ ID NO: 331687 - DNA, 535 bp, Homo sapiens
tttgcatttgggaaataagattttttggcattacacaagaaccacaaaccataagagaggcaaaaaaaattatactttggttatgaattgaatttttgtgtcccctaaaattcacatgttggagccttaacttccaatatgatggtatatgaagatgaggctttggggaggtaattggggatataggaggtcatgagaatggggccctggcctgatgagatcataaccctaaagaagagacctcagaaactgaccatgctggcatcctgtttctgtagaattataagaaaataaatgtctattgtttaagcccccagtctaagtattttttatggtagcccatgctgactgatacattagacttcatcaaaatttaaaacgtttgttcttcaagtgacagcaaaccaacacagaaaaggatataatatttgcagtacatatatctcacataggccttatgttcagaaaagagaacaaaaaattacaaactttcrctgaccatctgtttgtttaaataaagttttattgaaataca

SEQ ID NO: 331688 - DNA, 609 bp, Homo sapiens
tcagcctgtctgcatttagttcccttgcatgtaggtgcccatcaaatttccagctgctctttttttcccaagctctgtcatctgaccattcaagtcattaatgttaaatttttatctgatgcctgggcttrcaaattctatccgtcaaaagtgcaacaaaataggggccaatatggctgattagaagcatctcttactcacctcctttaattaaaataaccaaaatagtgaagagataatcactctttgaatagatcatccaagagaaaacactggaattcaacagagaagtggtgacaaacacctaaagcaagggaaaggcagggagcaaggcagtctgcttagccaagatcagtggggaaccagaaaagactccctaatgcagggaaaatgtaaatgagagatttccagtggtccacattcccaccaagaaatcctataatcctagccaatggagagctgcatgacccttgcaggccccgagaataacatagggagtccctggaaaccacacaaaggcattgcttcagaaagagaggtcatgctgggtcccacaagccctgaagtcctgggcacagcaacaagatgccattttgagagcccagccca

SEQ ID NO: 331689 - DNA, 577 bp, Homo sapiens
aaaaattgcatcatttaaggtttacaattttttttagctttctgtcatccctaatttctctgtagaaacataattatactgccaaaatcttctgatatatgaatatacgcatatatgcacatacatatgcatatatgtatgcatatccacactgcctggagatactttcctcactatgtatatatgcgtgtatatgtataattgtatatrtgtgtgtataggtatatatgtgtgtatgtgtatatacacacatgtgtatgtatgtgtatgtatgcacatatatgtatattaaagtatattaaacttttaaatcatgtgtgtatatgtgtatacatatatgtaaacatatacatatatatcttatatacatgtatacatatgcaagtatgatgtatatgtattatgtgtgtgtgtatgtgtgtgtgtgtgtgtatatatatatatatatatatatgaagagagagaaaacgagagagagaaattgtatagattactgactaggagagtgtccctaggtatttgctttcttataaaaagttatctcacaaagatgaacatgaaagattgaaggagaatc

SEQ ID NO: 331690 - DNA, 543 bp, Homo sapiens
gggtctgcttccaagcgtagttagccacaatctttgcccagaggcagacagatgctctgaggcgctcaatcaagctgattttggccctaatcctgccctmggagacaggggcagaattaatctaattttcaacagttaaatgatgaagaaacttattttgtccctttcatggaaattacagatgagttggaaaggcagacaataaacaatttatttaaagaactatgagtaatttgcagacaaaatatagaaaaatataaataatataatagctgaacgagtttacattcccaccagcagccactgtggaaagcagtttggagatttctcaaaggacttaaaatagaactattgtttgacccagcaatctcattagtgggtacatagccgaagaagtataaatcattttaccaaaaagacatatgcatgaatatattcattgcagcacaattcaccctagcaaggacatggaatcaacctaaatgcccatcaatggtagactggataaagaaaatgtggtacatatgcatcacggaatactat

SEQ ID NO: 331691 - DNA, 543 bp, Homo sapiens
gggtctgcttccaagcgtagttagccacaatctttgcccagaggcagacagatgctctgaggcgctcaatcaagctgattttggccctaatcctgccctaggagacaggggcagaattaatctaattttcaacagttaaatgatgaagaaacttattttgtccctttcatggaaattacagatgagttggaaaggcagacaataaacaatttatttaaagaactatgagtaatttgcagacaaaatatagaaaaatataaataatataatagctgaacgagtttacattcccaccagcagccactgtggaaagcagtttggagatttctcaaaggacttaaaatagaactattgtttgacccagcaatctcattagtgggtacatagccgaagaagtataaatcattttascaaaaagacatatgcatgaatatattcattgcagcacaattcaccctagcaaggacatggaatcaacctaaatgcccatcaatggtagactggataaagaaaatgtggtacatatgcatcacggaatactat

SEQ ID NO: 331692 - DNA, 618 bp, Homo sapiens
aaaaatgtggggaagagacattataactgaaatacttatttcatgaaacagaataaattcattttaagaaacaaactaacaaaaaaacacaattwtattgagtttttttgacactttactcccttttttcattatctgacctgattgccagcaatgtgggtttaaaacaagggcacttttatttagagataaatatcccactgtggcagaagaagaaatgtaccctctgagaagggaaaaggaggctgtgaagtggatattattcaaggtcaacaaaagacaatttctaaaatgtaaaaaaaaaaataccataagggactaaataaaaggcagacccgattctgggcatgcaaatatcccacttactctacacatcaagtgtgagaggaaagaatcattcccctccacttactgatgcacaaatggagacaaaggtgtccagaaatcaccctgtcacacagctagcaaaggcaagatcttgtgagaaaatccagattttccccatatactgcacgccttgaagtcattccaagttactatccaatacttgtgcgttgcattactcaagaatgatgatagggtgtataagtccattctcacgctgctaatacagacata

SEQ ID NO: 331693 - DNA, 588 bp, Homo sapiens
taactaacatcctctcttgaacctccactcccatgtcactagcacaagcatatgagctattttcatatcttaaaactggtcccagctaggcacagtgggtcatgcctctaattccagtactttgggaggycaagccatggggattgcttgaacccaggagagcaagaccagcctggaccctgtctctacaaataaagaaaccagctgagtgtggtagtacatgcctgtggtcccagctacttgggaggctgaggcaggaagatgacttgagccctggcagttgaggctgcaatgagctgagatggtgccactgcattccagcctgggcaacagagtgaaaccctgtctcaaactaacaaacaaacaaaaaaacaactggtcctattctctcttgcctttagagaagtgttccacaaacgttcctatgcctaggaatctcctggggaacttgataacatgcagattctgactctgtcagtctgggatggagttggagcttctgcaattctaacagtcttggaggctatgctgatgccacctgtcctgggttaaattgtgatcaaatattttgaaagctatgttgaagtc

SEQ ID NO: 331694 - DNA, 525 bp, Homo sapiens
agacccctttaattgtttctttaatgtctactggcttatgcctgtctacaggcaatcagctgagttttgtatattaaccttgtgtcctgtcatctttgtatagacacttattaattcccagaggcatttttgttgttacatcttggggattctctgcaaaaataaaatcatctcatttgcaaatacacacacacaaacccgtataatacacatacatacatgcactcacacatatgtatatgcatacatatctaaatataatgtaaaatgattrccacaatcaagttaattaaatctaaaagcacaatctatgaaagacagaaaatgttggactttattcaagttaaaaacttctacagtatgaaatacactgttaaaacttgaaaggaaactcaggttgtagaataaaatatacccaaaatatatgtccggtaaaagatctgtagccagcatacaccaaaagctcttaccaaagcgctcttaaaataagagaacaaactattctaattaaaaaactgaacaaag

SEQ ID NO: 331695 - DNA, 542 bp, Homo sapiens
tccctcttaatcttgctctctaactaacatcctctcttgaacctccactcccatgtcactagcacaagcatatgagctattttcatatcttaaaactggtcccagctaggcacagtgggtcatgcctctaattccagtactttgggaggtcaagccatggggattgcttgaacccaggagagcaagaccagcctggaccctgtctctacaaataaagaaaccagctgagtgtggtagtacatgcctgtggtcccagctacttgggaggctgaggcaggaagatgacttgagccctggcagttgaggctgcaatgagctgagatggtgccactgcattccagcctgggcaacagagtgaaaccctgtctcaaacyaacaaacaaacaaaaaaacaactggtcctattctctcttgcctttagagaagtgttccacaaacgttcctatgcctaggaatctcctggggaacttgataacatgcagattctgactctgtcagtctgggatggagttggagcttctgcaattctaacagtcttggag

SEQ ID NO: 331696 - DNA, 574 bp, Homo sapiens
aaaacagaaatcactgagctttattttgagagctgacagatgggtttcctatatcatamgatttttttctgacatttctcaaaatatcagcaagagtaagcagaatatcatcatttaagtagcaatttttgacatcctttgagtcacaaacacttttgagtaactgatcacaattattggcctcgtccagaacaatgagcacatgcatcttttcagaatttgacgggattttgtatgcatatatataggtcactggttaagaatgcctccttcgaaaagtaaattgtccttggaaaattaagctgccttttataatttgagaggaacaagaatttaaagagataactatcagcaaatattcacaatgaaaatgatatgctaccagtatgtcctgaacttccatgcataaaagaaaatgatttccaagaattagaatttatcatggccttagtgttcacgcagatgttataagaatagtaagcatcttcaaattcttgaacctaattttttaaaggtgatcatttcttaggtagaaatgggtaaccgccaacaaaaatggattgttcaatcagtt

SEQ ID NO: 331697 - DNA, 483 bp, Homo sapiens
cttagcaagcaatacatttagcttttttctttccccagaaactgagtggtggcatatttctaccaactacgtttggtttgttagcaacttctagaaaataagccattcctagatgacttagcatttgaaggtatgcagtgtatacyttcttatttcttgtgtccatttgtcttgctgcttacctgtctgccttctcatttcatgcagacaacaaggctaacaaacacactttaatgcaattgctaggctatgtgtatttcagccccttatgctgactcttaaatgtcttgcaaagccaagacagcaataccaacaaatctaaaatttccaaattgtggtgtgtccatgaaaaaactgtttagatatttgtttctcttcacacgggtaggtctaaatatatttccttgctttctcattgatagctttagtgtcattttacctggaataaattgagatggagtagaagtgatcggaggtgctgtg

SEQ ID NO: 331698 - DNA, 588 bp, Homo sapiens
taactaacatcctctcttgaacctccactcccatgtcactagcacaagcatatgagctattttcatatcttaaaactggtcccagctaggcacagtgggtcatgcctctaattccagtactttgggaggtcaagccatggggattgcttgaacccaggagagcaagaccagcctggaccctgtctctacaaataaagaaaccagctgagtgtggtagtacatgcctgtggtcccagctacttgggaggctgaggcaggaagatgacttgagccctggcagttgaggctgcaatgagctgagatggtgccactgcattccagcctgggcaacagagtgaaaccctgtctcaaactaacaaacaaacaaaaaaacaactggtcctattctctcttgcctttagagaagtgttccacaaacgttcctatgcctaggaatctcctggggaacttgataacaygcagattctgactctgtcagtctgggatggagttggagcttctgcaattctaacagtcttggaggctatgctgatgccacctgtcctgggttaaattgtgatcaaatattttgaaagctatgttgaagtc

SEQ ID NO: 331699 - DNA, 612 bp, Homo sapiens
gtgtgtgtatgtttttttgtgtctatacacatacacacacatatatgtataaaactgtattgcaatgcctccaataggtggctatttatttgaaagtcaaatctgtttaaattaaatacaaattaaaagtcagcttcttcatttatacttgccacactcaagtgcatagtggccatacagtttatgcctaccataccaggctgtatagtggtcgaatatttgtttctttatagaaaatttcccttgttctttgatagccattatattcacagacactttaattattcaaaagaggatcacatctcttcctgggggtttaaatggccaatatctccatgtttatcaatctgccctatgctgaacttactttaaaaaagcaaatagtaacagaaaaggatattcccgtcgcggctaatttccaaagaagaaattacattgaataattgaaaagtgcagcctgtattgtgctttgggtgaaagtcartaggacttggcctcgtcactggaaaatgacaataggtaaaataggctctgccaatcagttctgatatgctctgcctttgaacagaactgaaaagagagaatgacactttctcagttggacaacccaaa

SEQ ID NO: 331700 - DNA, 588 bp, Homo sapiens
taactaacatcctctcttgaacctccactcccatgtcactagcacaagcatatgagctattttcatatcttaaaactggtcccagctaggcacagtgggtcatgcctctaattccagtactttgggaggtcaagccatggggattgcttgaacccaggagagcaagaccagcctggaccctgtctctacaaataaagaaaccagctgagtgtggtagtacatgcctgtggtcccagctacttgggaggctgaggcaggaagatgacttgagccctggcagttgaggctgcaatgagctgagatggtgccactgcattccagcctgggcaacagagtgaaaccctgtctcaaactaacaaacaaacaaaaaaacaactggtcctattctctcttgcctttagagaagtgttccacaaacgttcctatgcctaggaatctcctggggaacttgataacatgcagattctgactctgtcagtctgggatggagttggagcttctgcaattctaacagtcttggaggckatgctgatgccacctgtcctgggttaaattgtgatcaaatattttgaaagctatgttgaagtc

SEQ ID NO: 331701 - DNA, 525 bp, Homo sapiens
tgatacttttataatagtatttctcttcttagacatactacctaatgttgacctatttatgtttcacccttgaacaagagtcaagagtaatttttcaaattttgattatttcataaaatagatatatcaatgcagtaatgtttcctttttaaatggcaagaaacaaatcattttgcatatatatactgaggagagtaaagatcacttgatgaccatctggaggcaaaaccccttatctgaggcattcaagaagaaatttataagtaactagaatttctatacatctctagaatgtacgcatgtccaaacccattgtgcaacctttgctgacatcaaggcaccaaaatgtctacgtaacaaatatggctggaattatccttcagctcctgctccaaggtccgtaagtaaccytaaagaaaatccaccacagtgcactgggtcctcccttgccgaagctcacccctcttcactctgctgcagtgttctttctaatacaactttctttttcaaacctataccgttgtc

SEQ ID NO: 331702 - DNA, 537 bp, Homo sapiens
aaatgccagacacttataaaaccatcagatctcatgagactcactcactatcacaagaacagcatgggggaaaccgcccccccatgattcatttacctccaactgctcctgctcttgacatgtggggattatagggattacaattaaagatgagattttgggttgggacacaggcaaaccatatcactcrccgtggtattcatttcagaactagaagaagacaagagttgggaatcacagacaaaaccccccgtgttctacttcaaaagcaaaaataatacaaatttttaaaaagatgattcacccaaactccaaggagctgaagagctgcaattcaacttttaatgcagtaaatcctcaccggatgttttcccaaaggaacacaactcagtggcttccattggtgtgagaacagctctttataggacactaaatactgttctaattcatagatgataaaatgataattattattattactgttctcatcaccaaagctaattatgaatatttgccatggttcttataggtttgatg

SEQ ID NO: 331703 - DNA, 527 bp, Homo sapiens
aggataactgcccatacatggtgggcaagattcaattttcttacaatgtcccacatctctcagaagcagctggcatcatcatgaaaataaaatgtatccattatggtatcagttaagatgtttgctctgggataaaatcctgcagggakgggacaccgactttcaagatgcattttatgcagctaaccaactacctatatatgatgctctgtccccaatatctagtagtacacacatatccaggaacaattgtgtgataataggtgtgtccctttttgtcaccattcccagctatgcttttgcagaatttggggctcccttatgtgcaactggccagtctgcaacatggcagtcctggttcccaggcatcaggatacatccaaggtttgctctcaacctgaatgtgcacttaccacatgatcaccttaggctgttcatggcagtgggccagaagcaaataaatgagatattatattgacagaagcttatccttaagtgttagagatgatgcattataatgggggcag

SEQ ID NO: 331704 - DNA, 412 bp, Homo sapiens
gctgttcatggcagtgggccagaagcaaataaatgagatattatattgacagaagcttatccttaagtgttagagatgatgcattataatgggggcagggaggagcatgtctggaacttgggayatttactaagttatggtccaataaagcaaagcaaggcaatggaagggacatgccttgtctcagatgagactttacaccttgggcatttgagttaatgctggaatgaatcaagagtttgggggactgttgggaaggcctcattgtattttgcaatgtgagaaggacatgagatttgtgagggatcaggggtagaatgatatagtttggatatttgtccctgccaaatctcatgttgaatcgtaatccccaatgttggaagtggggcctggtgggaggtttttgcgtcat

SEQ ID NO: 331705 - DNA, 586 bp, Homo sapiens
ataatccccacattattacaattacaagagtggggccaagtagagataattgaatcatggaggtggtttctcccatactgttctcatggtagygaataagtctcatgagatctgatggttttataaaggggagtttccctgcacacactctcttgcctgctgccatgcaagatgtgcctttgcatctcctttgccttctgccatgattgtgaggcctccccagccatgtggaactgtgagtccatttaaacctctttgctttataaattacccagtctcaggtatgtctttattagcagtgtgagaacagactaatacactcaccatgcatgcttgctcaccgccactacaggtcattgttcacttttccttctcggttctccaaattcagttgcccatcaagagtcacggaggcaacctttcacccccaacatgagcacacgcacgcacacacacacacacacacacaactatatttcgaatctcttggcttctgtctcagttgcctcaaagcagcccctgttactctgccctgcaaccttggataatcttgctgatgtaggtccccttgtctagtttaacccca

SEQ ID NO: 331706 - DNA, 528 bp, Homo sapiens
attgccaatattcccagtggtgattgttaaaaatgatggtgtgtatgttaaagagtcttaccaggggaattttgtgaaactaaaatttgaaatccactatcyccatgcaaagtttaaggaccagattttgactgagctattgagtgtgaatcagccaccagttaacttttctttcattgtattttacttggctctttaccatatcagctgtttcctgggctcttatctttgaagccaattgcatgaccagtgattaaaaatatattttttaattcaactttgatgtttggagaccatttatttgctagttttcactccaaacaatgctctttgttttcctctgtgaattctgacatttgcaatttttattaaagaaagctacattgaaatcagaaaatgtatgcagtaagtaactcttgggcctccttataaggaatatttttaaagatctgaattatcaaagtaaaataaatgtccaagagaatgatgttttacagaagtcccaaaaactggtaccttgatttcagt

SEQ ID NO: 331707 - DNA, 497 bp, Homo sapiens
gatttccactggcaagaatttaaaattttggtatggctgtcctggagcttttgaaatgctacgtgtggagaattaagtcctgatgtataagaacagggtatgcttcccagtattagcgctggagagagtaagttgtcctggttygtggcattttcctctctcccaaaacatagatatctctaggatctcctaagacctacacatgtatggattgaaaataactgtcatatggagaggatgagaaagtcacaactagcaaaatggattcagaaaagtcttgggttgtgaagatgtgaggttatttttgcaggacttttcaaagtacaggaataatgggtgcaagtttctaatcaggatagacacctgtgagaactcaagaaactataactagcattgcccaagttttacaccatggggtatacccatcaagagttttttcttggaggttaatatctcctttaaaataatggatgagtttcataattggctgagaaggt

SEQ ID NO: 331708 - DNA, 497 bp, Homo sapiens
gatttccactggcaagaatttaaaattttggtatggctgtcctggagcttttgaaatgctacgtgtggagaattaagtcctgatgtataagaacagggtatgcttcccagtattagcgctggagagagtaagttgtcctggttcgtggcattttcctctctcccaaaacatagatatctctaggatctcctaagacctacacatgtatggattgaaaataactgtcatatggagaggatgagaaagtcacaactagcaaaatggattcagaaaagtcttgggttgtgaagatgtgaggttatttttgcaggacttttcaaagtasaggaataatgggtgcaagtttctaatcaggatagacacctgtgagaactcaagaaactataactagcattgcccaagttttacaccatggggtatacccatcaagagttttttcttggaggttaatatctcctttaaaataatggatgagtttcataattggctgagaaggt

SEQ ID NO: 331709 - DNA, 543 bp, Homo sapiens
gtgttactgcactccagcctgggttacaaagggagactctgtctcaataataataataataaaagttcagatccttgtggatactttccacattatattcatatagaaaaatatcaccttgtacccagaagtgtatataattacggcttttcaattaaaaatgatattaattaaaaataaataaatataataaaataaaagtttactaatattcccaagttttctaacaccaaaaccgaaaccacattcctcatgtggaggtaataaaaatagacattaatcaaaaaratcaaagccataatcagcagtgggctatgaccaactttgcaaaattattacataagaaattttctacactagtcgtatttactaacctttcaaaactctcatttttttcatgacttctgttatgggttgaattctgtcttctgctgccaaatccatatgttaaaatcctaattctaagtgactcagaatgtgactttatttggaaatatggctattgcagggataattcattaatatgaggttgtattagagtag

SEQ ID NO: 331710 - DNA, 543 bp, Homo sapiens
gtgttactgcactccagcctgggttacaaagggagactctgtctcaataataataataataaaagttcagatccttgtggatactttccacattatattcatatagaaaaatatcaccttgtacccagaagtgtatataattacggcttttcaattaaaaatgatattaattaaaaataaataaatataataaaataaaagtttactaatattcccaagttttctaacaccaaaaccgaaaccacattcctcatgtggaggtaataaaaatagacattaatcaaaaaaatcaaagccataatcagcagtgggctatgaccaactttgcaaaatkattacataagaaattttctacactagtcgtatttactaacctttcaaaactctcatttttttcatgacttctgttatgggttgaattctgtcttctgctgccaaatccatatgttaaaatcctaattctaagtgactcagaatgtgactttatttggaaatatggctattgcagggataattcattaatatgaggttgtattagagtag

SEQ ID NO: 331711 - DNA, 543 bp, Homo sapiens
gtgttactgcactccagcctgggttacaaagggagactctgtctcaataataataataataaaagttcagatccttgtggatactttccacattatattcatatagaaaaatatcaccttgtacccagaagtgtatataattacggcttttcaattaaaaatgatattaattaaaaataaataaatataataaaataaaagtttactaatattcccaagttttctaacaccaaaaccgaaaccacattcctcatgtggaggtaataaaaatagacattaatcaaaaaaatcaaagccataatcagcagtgggctatgaccaactttgcaaaattattacataagaaattttctacactagtcgtatttactaacctttcaaaactctcatttttttcatgacttctgttatgggttgaattctgtcttctgctgccaaatccatatgttaaaatcctaattctaagtgactcagaatgtgactttatttggaaatatggctattgcaggrataattcattaatatgaggttgtattagagtag

SEQ ID NO: 331712 - DNA, 453 bp, Homo sapiens
taatatatctccctatatggrttagaaagattcaagtgagcacctaataaaaaagcatcttattaatgcttacgtttgcaacgcttcactagcagctttaaagacaaatccagtacattctcttctccagtaatggttacacatattacattctttctttaaatggaacttctttaatatcatacataactttaaggcatccctctttttcacatgtggaagcacctgaattatctttattaattgcctgataaagccttgctttatcaattgacttaaaatgattgtatagtatgtatcaacttaatgtctaaatgtcatgaggacactatttgaaataaattcacttaatcagatatatacatatatagagtgtgacttttaaatgtcagcacaacagaaatatgaatataaactcttatgagcaagtaatagatacaattcacttattgc

SEQ ID NO: 331713 - DNA, 453 bp, Homo sapiens
taatatatctccctatatggattagaaagattcaagtgagcacctaataaaaaagcatcttattaatgcttacgtttgcaacgcttcactagcagctttaaagacaaatccagtacattctcttctccagtaatggttacacatattacattctttctttaaatggaacttctttaatatcatacataacttyaaggcatccctctttttcacatgtggaagcacctgaattatctttattaattgcctgataaagccttgctttatcaattgacttaaaatgattgtatagtatgtatcaacttaatgtctaaatgtcatgaggacactatttgaaataaattcacttaatcagatatatacatatatagagtgtgacttttaaatgtcagcacaacagaaatatgaatataaactcttatgagcaagtaatagatacaattcacttattgc

SEQ ID NO: 331714 - DNA, 499 bp, Homo sapiens
tcctaagctcatgaacaaaaggtttaataaaatgagtgcctgaccagttttggtttgtataattacataagtgtgtagtgaagcaacaacagcaacaacaaaaccttttccctaattatgtttgcatccagttactataaatcaagggcaatgtcagattagcattcacttgagactgatgtttcccttctgttctctctaaacacatgagttcaaaacattttatcttgtctgaatcagagttgctatgtgttcataaaaaatgctgtattattaatatttttaagatccattgaaaataatgtttgcatgagtattcatgatatttcaaaatttcatgatgctttaaaattcagatgctttcttaaaattaatgttcaaataatgtatcatggaagaattacagaatrcaacaaacatctatgaattaaacaacgtttctcctacttgcaagttttgctttcaaaataggtcaggtgtgagatttgaaattttgaga

SEQ ID NO: 331715 - DNA, 567 bp, Homo sapiens
ttgtgtgcatgttatgccgttattgggaaaagtcgctagggacacaagtggggagaggtatcacatgggttggacagtttagccaaaggattcagccaaattgtcttaaggtgtcttgctaacttctttactgcaagctgaagctattgatggtctcctttcaatagactgggttagtcctactctactaaagacaagtgtaataatggacctggttggtttccttggtaacaaagaatcatgcaaaaggggttagggttgacagatcatcatgacattttcatgaagctaaggtcaatacctgcatggatttatggaaccagaagattcccattttaagtgtagctctggtcaaaaagagaaatgccacggccagccagtgacctccttggaaactcatagcatcatttactagaaacatttgagcatcccaagaaagaagccttgcyttaatatgcaatagataaagaaatgaaggaccatgtacaggtacttctgtgatagttgaacccctttcagttcccccttgctctgtgcatatagaatataaaattctttatgaatgca

SEQ ID NO: 331716 - DNA, 568 bp, Homo sapiens
aagcctaggaatgcgggtaccttctagatgctaaaaaggtcaagagatagattatcctctaaagactccagaatgaaccagtagagatgagaaactgatttcagcctcctgagacctatctctgatttttgacctccagaactgtaagctaatgcaagtctgggtcactggttacagcagccacagggaaccaaaacactctgtcaatacctcctttaagctatcttaatttgagtgtcacctcttctgagatggsactctgagtgtccattaagtatctgacaaaaatagatgagataaagagtgattcattttcttctacttatagaatagaacaaccatattgcattgtcagaaaattgtaaagaatcaccccatctaatatttgctttctctctcaaaaaattcataaatgtgtcaatgaacgcatttctgacggcatgcatgaaataccgattgttgcatgttgaaggctgacaaagcaatgctgagatggaggctggtgtagggtgtgcttgagcgaagttagaggaagtaggtggagaagataaaaggacttgcagagctg

SEQ ID NO: 331717 - DNA, 568 bp, Homo sapiens
aagcctaggaatgcgggtaccttctagatgctaaaaaggtcaagagatagattatcctctaaagactccagaatgaaccagtagagatgagaaactgatttcagcctcctgagacctatctctgatttttgacctccagaactgtaagctaatgcaagtctgggtcactggttacagcagccacagggaaccaaaacactctgtcaatacctcctttaagctatcttaatttgagtgtcacctcttctgagatggcactctgagtgtccattaagtatctgacaaaaatagatgagataaagagtgattcattttcttctacttatagaatagaacaaccatattgcattgtcagaaaattgtaaagaatcaccccatctaatatttkctttctctctcaaaaaattcataaatgtgtcaatgaacgcatttctgacggcatgcatgaaataccgattgttgcatgttgaaggctgacaaagcaatgctgagatggaggctggtgtagggtgtgcttgagcgaagttagaggaagtaggtggagaagataaaaggacttgcagagctg

SEQ ID NO: 331718 - DNA, 568 bp, Homo sapiens
aagcctaggaatgcgggtaccttctagatgctaaaaaggtcaagagatagattatcctctaaagactccagaatgaaccagtagagatgagaaactgatttcagcctcctgagacctatctctgatttttgacctccagaactgtaagctaatgcaagtctgggtcactggttacagcagccacagggaaccaaaacactctgtcaatacctcctttaagctatcttaatttgagtgtcacctcttctgagatggcactctgagtgtccattaagtatctgacaaaaatagatgagataaagagtgattcattttcttctacttatagaatagaacaaccatattgcattgtcagaaaattgtaaagaatcaccccatctaatatttgctttctctctcaaaaaattcataaatgtgtcaatgaacrcatttctgacggcatgcatgaaataccgattgttgcatgttgaaggctgacaaagcaatgctgagatggaggctggtgtagggtgtgcttgagcgaagttagaggaagtaggtggagaagataaaaggacttgcagagctg

SEQ ID NO: 331719 - DNA, 568 bp, Homo sapiens
aagcctaggaatgcgggtaccttctagatgctaaaaaggtcaagagatagattatcctctaaagactccagaatgaaccagtagagatgagaaactgatttcagcctcctgagacctatctctgatttttgacctccagaactgtaagctaatgcaagtctgggtcactggttacagcagccacagggaaccaaaacactctgtcaatacctcctttaagctatcttaatttgagtgtcacctcttctgagatggcactctgagtgtccattaagtatctgacaaaaatagatgagataaagagtgattcattttcttctacttatagaatagaacaaccatattgcattgtcagaaaattgtaaagaatcaccccatctaatatttgctttctctctcaaaaaattcataaatgtgtcaatgaacgcatttctgacsgcatgcatgaaataccgattgttgcatgttgaaggctgacaaagcaatgctgagatggaggctggtgtagggtgtgcttgagcgaagttagaggaagtaggtggagaagataaaaggacttgcagagctg

SEQ ID NO: 331720 - DNA, 647 bp, Homo sapiens
ttatttttgaagactgtgttggcatctggctccttgtgtttccttatgaaatggagaatcagcttgtcaatttattcaaagaaatcaactagcattctgataagtactgcatcaaatctgtacatcagtttggggaatattatcattttaacaatgttaaatcttctgatctatccccatggatgactttctacatatttagatcttctccaatttctttcaaccacattttttagttttcagtgtacaaatcttatgttgcttttgttaattttattcctaagagttttaatccytttggtgctgttataaatggaattttcttattttaattttcagactgttcattgctagtgtatagaaatgcagttgattttgtgtattgatcttgtatcctgcaactttgctgaacttatttattctaataatttttagtggatttcttaggattttctatatacaagattatgtcatctgcaaatatagttttacttcctcctttccaatttggatgtgttttatttctttttctagcctaactaccatgggctagaacctcagtacaacattgaatggaaatggtgagagtgaacatccttatcttgttcgtgatgtatccagtctttcaccaattaagtatgatgtta

SEQ ID NO: 331721 - DNA, 560 bp, Homo sapiens
atgatggttaattgtgtgtgtcagcttgattgggtaagggatgcctggatagttagtgaaacataattttttgatgtgtctgtgagggagtctctggaagagataagcatttgaattggtagattggataaagaagatccatcctcacccatgtgggtggacatcatccagcccatcaagggcctgaatagaacaataaagtggaggaagggagaattyactctttgtaggaagtttctaaattattaatttaatcacctgtctcaggtttattaagattttctatttctttgagtcagtttcaggagtttgtgtttctctagaaatttttccgttttatctaagttatctaatgtgttggcatatagttgttcctaatattttcttaaagtcactgttatttctgtaatatcagtagtgatgtcctttcattcctgagttgagtaatttgtttcttcttttattttctgttcagtctagctaaaggttttcaattttgctgatcttctcaaccaatctttcattgactttttctatttttctattctctattttaattg

SEQ ID NO: 331722 - DNA, 543 bp, Homo sapiens
acttgctttgttaactttttctgttttctatctcattgactttcctttcttctactttgtttttactttgttcttgtcttgtttcttaaggtagaattttagatattcctgtcttacatgagcatttaaagctataaatttccttctaagcactgctttaactatcgcatgggaaagaattttgccttgcccaaacagaggtctggctttgtccctggctcaaaaccttgaaatttcctgagtaacggcagtgtctttgttatttatggtgggtccctcagaccgcatgatatggtttgtctgtgttcccacccaaatctcatcttgaattcccacatattgtgggaggggcctggtgggaggtaattgaatcatgggggcaggtcttgtgatagtaagtctcacgagatctgatggttattataagggagagttttcctgcacaagctctctttaagatgtgacctgctcctccttgccttctgtgatgattgtgakgcccgcccagtcttgggtatgtctttatcagcagcgtgaaaacag

SEQ ID NO: 331723 - DNA, 569 bp, Homo sapiens
tgtgatccataaattatatggatccctattatgagtttgacttatgcaaaagactatcttgtgaagatttataaaacaaggaattgacataattagtggtggttgttaataaactggcaatgtagggcataaaaattacccaagtgtaaaattgaacactggagattgccagaacctgcagatagagaagttgagttaaatttatctgatgagaaagagctttaactcttagattagagtgagcattaaaactctggtacctataatttaagtattaatacggctgttttcagtctatagataattagtttgaacttacctactcactctttcatccacttgcttaactttgcctgaaggtgagacaatcagaaatacattyctgattagggacacactagaggccactttttcatctcctagtcagcaaccttaaaaatagtggaaatgagctaaaataccttaaataaatgaatctggttccttgatttcttgagctaggctacattttagtggggggtatttaatgtgagagaaactcatttctgttgatcctagcatactactgt

SEQ ID NO: 331724 - DNA, 595 bp, Homo sapiens
acttgtgggaggggaggattatactttagggcctggaaggggctgctgatcaaaagtctctttttattctggaatctggggagaaggcagaaatcatatactttatttttgtggaagacctgctgctgtactacaccaagcattcttgggatcggggcatgacgatgatcccatccaggatatccaggaacccctgaattacatcccatgctttgtatctgttggaatttcctatgaacagcacccatagcttgtattagaagctcacaagtgtctgtaactgtagaagattaaraaggctcaggagttattgtaactcattttggcttacttaataaaagtaaattatagagactgaaatatttctactggatatgcttgcattttagtatgctctgttttttatataacaaacataattgcataatgaaattaatatattagcctcaagtagtttttaaaaaaaaaactgaatcatttggatcttgagatcttactgagttattactacattaattattaaatatcaaaagaagtaccttagtttaagaaactttataaccatatttctaccatatttgaaacctttccaaag

SEQ ID NO: 331725 - DNA, 501 bp, Homo sapiens
taccttgagtggtagtgaattctttgccattggaggtcctcaaataataatgcatgactatttgttggagaaaccataataactatcacaggagtagatgagaggaaaaaataataacctctgagtttcttcccaagtcttagattttgtgattctttattcccttcttgtgtagtcttacattaatatttctttctgttaaggcttcatttgcagactttgaaatgctgctttgaggaataaagaatcgatattcttacagcttgttcccagtatgtttgttctattaggccattgacctaattaccagagaatcatggggggtgagaattgcattataaagaactgggaatattttaatgtgactttgatacactgtcgtgaaaaaaaaatacctgtgaaaatactagtgggagttaaggwttattagaggttgcaaaaagatcagaaaaccacagggtttaaagggggaggttatttattatctgtgagagtttttat

SEQ ID NO: 331726 - DNA, 586 bp, Homo sapiens
ttactctgctttattgaatttgtcttaatgtacttgaagaagaataaaatgctgttggaggtcactttaatggtctttcagtttgaattttcctatttagagttcagtgatatgcccatttagaaatgtcaggtagccaacaaagctgaagtctcaacatttcyatcttgcacaattcagttgttcaataaatatatagataaataaataagcattttggtgcttagttatagtcaccaaaatgaacaattgcattctgtattattcagaaattgagaggccctggatatttatatttgctagggaggaaaagatatcattggcgtgtgcttctttactggaatagattgagtgtagcattacttaaatattaatttggatatgtctgtctagatatctttggccgctgaaggatctttcaatcaaaatggagcatccttcagcattgtaatcactgacacagctgccgtggtcatgagtgtttcctgagtaccagaaataggctgcgtttttacaataggatgttcctttcagcactgcccctgtcattggaatgtgacaggttgaagtgctgatacatgagtca

SEQ ID NO: 331727 - DNA, 586 bp, Homo sapiens
ttactctgctttattgaatttgtcttaatgtacttgaagaagaataaaatgctgttggaggtcactttaatggtctttcagtttgaattttcctatttagagttcagtgatatgcccatttagaaatgtcaggtagccaacaaagctgaagtctcaacatttccatcttgcacaattcagttgttcaataaatatatagataaataaataagcattttggtgcttagttatagtcaccaaaatgaacaattgcattctgtattattcagaaattgagaggccctggatatttatatttgctaggkaggaaaagatatcattggcgtgtgcttctttactggaatagattgagtgtagcattacttaaatattaatttggatatgtctgtctagatatctttggccgctgaaggatctttcaatcaaaatggagcatccttcagcattgtaatcactgacacagctgccgtggtcatgagtgtttcctgagtaccagaaataggctgcgtttttacaataggatgttcctttcagcactgcccctgtcattggaatgtgacaggttgaagtgctgatacatgagtca

SEQ ID NO: 331728 - DNA, 577 bp, Homo sapiens
gggtttcaccttgttgcccaggctggtctccaattcctgggctcaaacaatctgcccaccttggccgcccagattgctccctactatttcagacacacttttgaaaggtttgtctacaacttcttctgctttaattgagctcatattgtgatcttttggtctctgttggattgacaatggacaattgaagcagaatggagggatgtgtgtgtgtgtgtgtgtgtgtgtgtgtgtgtgtgtgtgtgtgtgtgtcargattcatactgtcttttttaaaggagaatgcagcatggtatcatcttctcatgcagctcagaaagagaggacccgggcttcagacctcacaaaaactcaaagttagaagcagtaatttgattctcttggcacttccacttgtcaacatttataactcagtaaagaaagaaatcattagaagagcatcatttatgtgaaactggcattctaattgtaaaaagaaacttaaggcagatctttctggacaataaaacagttctccctggacattcaaggacccaatctgaggggcaattgcaggaaagaaatcaggctgccctgg

SEQ ID NO: 331729 - DNA, 644 bp, Homo sapiens
caaggtactagttttgtgtttacattcctctattatatagtgtacattcatgaccctggacgcactcttcctgtgtctgattgaattcaagggctcttttcatcagatttgacagttatctgaatgggcttttcataaaaaaaggcaatgacactatgggaggtttttctttatgtttttagtagctggcctacacaataaagattttacactctattaagataattcctgtgttgtctttattcagtttttgattaactaggaaaactgagcttaaaagggttaagtattttacatccatgttatgactctagtgaaatgaataattattattttataataatctgtgaatctgttttgatcaagtattttaaacattttgacatcttttgcagttttcccaaagatcaaaattctaaattaagtctttttgattaaaatattagacttattaggtagattgtatagaaaatattatcaaatgataaataatctagatcctctttccattatatttatgggtatgttattgctataaatsacataaaatatataaattcatagaaatctaatatggtatcagctataattttgattatgttaaatcttttctaaaattatatttttataaatgttattaatgt

SEQ ID NO: 331730 - DNA, 407 bp, Homo sapiens
atgtgccaaagagcatggaccagcattatttaggttcatagtaaagaaaacaattttaccatcttaaagtataytaaagaagaaaaaaattaaggggccataaattatattctccgtctgatccaatgaaatataaactaattatcagcctttaaagaaatgtagcactccatttcatagctaaagggttataggtacactaataatcaatttgtcattttaaattttcaaaagtacaactgtctttgctatagcaaattgattcaaagttgacattttaatttctgagtgttgtggtttttattctcaggatctcagcaaggctcattcagaggaaatgaaattcctggctctaccttttctcactccatgcctaactctactaaaatagcttttaacgcagtaga

SEQ ID NO: 331731 - DNA, 341 bp, Homo sapiens
atccataaatattattatacaatatatagtataaagtacaatatataattcacgtgttatgtattattataaaatatatatttattgaactcactagcagtgttgcatttagaattccctaactaggagctactctgggcttactctgaacagacaaaggctttccataaatattagggaatggtggataatggataacaacttgaaggtaatgcctttgcctttgaagtaacactatgagacacatggaacctcacctaaaaaccactacaatactcaaaaytgaagggctagttttcatagcaaataaaactcatcataaattaagaggttgtatttag

SEQ ID NO: 331732 - DNA, 341 bp, Homo sapiens
atccataaatattattatacaatatatagtataaagtacaatatataattcacgtgttatgtattattataaaatatatatttattgaactcactagcagtgttgcatttagaattccctaactaggagctactctgggcttactctgaacagacaaaggctttccataaatattagggaatggtggataatggataacaacttgaaggtaatgcctttgcctttgaagtaacactatgagacacatggaacctcacctaaaaaccactacaatactcaaaactgaagggctagttttcatagcaaataaaactcrtcataaattaagaggttgtatttag

SEQ ID NO: 331733 - DNA, 634 bp, Homo sapiens
gtgttatgtgctgtgctgagatctttggggcatcttttccaacaaggcagtctctaactggttaagcatctcttctttgaaacagtcaaatagaaaactatcctaactcagatatacaaaaggtaattgcattagtccactttgtgctgctatatcagaatacctgacattgggtaatttataataaacagaaatttattgatgcacagttctggaggctggaaagtctgagattgagagactggcacctaataaagggatgcttgctgtgccatgccatgaagaaagggtaaagagagggtacgagagaccgaggtggggacaaacttgtcctttcataaaaaaccactctcataataatgaacctacattcacaataatgtcataatttcatttttgaggtcggtgccccatgacctaaacacctctattaagtyctacctccatatactgggggccaaatttccaatacatgaattttagggaacacactcacaccatagcagtaatataagaacctatggtagactggggattccttttaagagaagctcaaatcaatatgttgaaaggtaaaaatgttttggaatgttttaagggcatttattttgctgattgttaaagtaatagaagc

SEQ ID NO: 331734 - DNA, 520 bp, Homo sapiens
tctgctgtccttgagttctaaataaagttcctgagagttcctggaaatgaccaaattactatacaatctagcatccatttagatagatgaccatctgtttagaaatatagaaggttggcggaggggccaagatggccacttagaagcagctgggttcgaggctttcacaaaacgacaagtgaattctgcaccttcaactgaggtatccaggttctcacattgggactgactaggcagagggctcaacacaccaagagcaaggaaaactaggytggggttatggcccacctgggagtggcacagagacagggtagcccccaccccagccaagggagtcagtgagggattctgcggccctgcccaggaaaacatgtttttcctacatatctttgcaatccgcgatcaggagattcccatgtgagcccatgtcaccatccttgggtctgaagcacagagctgtgtggtgtctcagtggggcagccactcacttggttgcttgggaaacccaggagttttgcat

SEQ ID NO: 331735 - DNA, 487 bp, Homo sapiens
catttatttgcaatactttttttctgtccaaacgcaggctgagcaattcatagagatgtgccagctgtaatgaattcaccaaagatgttgtagaaaagttgtgaccctgttcccacacccagtatttctagatattggtattaattggtatggtcaacctgaatagtataactatgggggatcagccttcctctctcgcaataatgacaacaatgttcttgtaattgtaatcttttcaactttcaacaaacatgtattaagtaatttccatgttgccggctctgtgttaattgccaacaacacaaagaaaattaaaatgtggtctccgacttcaagggactattcctaaagggacctaatgattgagtggaagtaaaaatgatcaagcaatgttggcaaatgtcttactataggatttaaaaccgtttaattgttgtcratgaaaagagtaaaactttgcaaaatattttaagagatttattctgag

SEQ ID NO: 331736 - DNA, 589 bp, Homo sapiens
atagttatattgccagtttggttggttcaatagttaatgtctacattatcatgactttataaatgttatgagtggctgagccatgtactataatgtattttttctttcctatgtgtgatggttaatattgagtgtcaacttgattggattgaaggatgcaaagtattattcctgggtgtgtttgtgagggtgttgccaaaagatattaacatttgagtcagtggactgggagaggcagactcaccttcaatctgggtgggcaccatctaatcagctgccagcatggttaggataaaagcaggctgagtcttccagctttcatgtttctcccatgctggatgcttctggccctggtacatcagacgtcaagttcttcagcttttgaactcttggatctacaccagtggtttgccagggcctctcaggcctyaggccacagactgaaggctgcactgttggctttcttacttttgagattttggggcttggactggcttccttgctcctcagcttgcagatagcctattgaggaacttcaccttgtgatcctgtgaatcaatacttcttaataaacttgccttcatatata

SEQ ID NO: 331737 - DNA, 266 bp, Homo sapiens
atcccacactttattctcatggacacactatcgactgatagcctacttgcttcttttatcaacaagatgactctccttttttccttcagtgtwacagagaggctgggttgggaaacagtgattgaaaccaagtcacacttttgtagatgactctgagtcctggagctccccatcaagactttgtaggagtataccataaaggaacaacaaaaaaagttatcttctagacatctgcataggttacacattaatagtatcagctgttt

SEQ ID NO: 331738 - DNA, 618 bp, Homo sapiens
gtaggaatgtcattgccttcactgctgattttatgaatttgagcccttactctttctttcttgttaatcaggctaaagacttgtcagttttgttgatcttttcaaagaacaactttagattttgctgatttcccgtttttttttaattacctatgccatttatttctgctctagcatttattatttttctttttctgcttgctttctgtayagcttgctctcctttctctaattatggtgggcatttacattactgatttaaagctttattttataacacaggcatttaaaggtttaatttttttctcttagcattgctttagctgcaaccgatcgactggggtatactgtgtttcatgttcattcatttctagtattttctaatttttcttgtgatttctttctcaagttatttaaacttgattttaaaataattgtccataacttgtcaatttcacaaattttctccagttactgattctaattttattcattttagtcagaaaattattttgtattattttaatcttttaaatttatttaaactttctttagagcataacatatggtcaaacactgggaatgttccatgagaacttgagaagaatgtgtagtctg

SEQ ID NO: 331739 - DNA, 618 bp, Homo sapiens
gtaggaatgtcattgccttcactgctgattttatgaatttgagcccttactctttctttcttgttaatcaggctaaagacttgtcagttttgttgatcttttcaaagaacaactttagattttgctgatttcccgtttttttttaattacctatgccatttatttctgctctagcatttattatttttctttttctgcttgctttctgtatagcttgctctcctttctctaattatggtgggcatttacattactgatttaaagctttattttataacacaggcatttaaaggtttaatttttttctcttagcattgctttagctgcaaccsatcgactggggtatactgtgtttcatgttcattcatttctagtattttctaatttttcttgtgatttctttctcaagttatttaaacttgattttaaaataattgtccataacttgtcaatttcacaaattttctccagttactgattctaattttattcattttagtcagaaaattattttgtattattttaatcttttaaatttatttaaactttctttagagcataacatatggtcaaacactgggaatgttccatgagaacttgagaagaatgtgtagtctg

SEQ ID NO: 331740 - DNA, 536 bp, Homo sapiens
tgtccacagcacataagttactcccattagcttgaatacacacgaagaaaagtgcaaagctactttccagtttttctatccctgcccgtttaattgggagaggaaaaataaattaataatatttttcactattcagaagacatagaaggtcagagtcagataaaggtttaagtgtctattaactaaaattaattagttggcagtgcgtggtggctcatgcctgtagtcccagcacttcgagaggcaggcgggcggatcacaaggtcaggagaccgagaccatcctggctaacactatgaaaccccatctcaactaaaaatmcaaaaaaaaaaaaaaaaaaaaaaatagcagggcgtagtggcaggcgcctgtattcccagctactcgggaggctgaggcaggagaatggcggaaacccaggaggcggagcttgcagtgagccgagatcgtgccactgcactccagcctgggtgacagagcaagactctgtctcaaaaaaaaaaaaaaattagttacttgcatatattcataaaaat

SEQ ID NO: 331741 - DNA, 588 bp, Homo sapiens
ttacatatattaactactattctgctcttagtctctaatttccaatgataaacctgggtttaaatttaacataacatgtctttatcattttaaattactgaaaagaattttgaaactagttttatttaccaaagattattaaagtcatgtgaactaaaaggcgtttgacctagcttctatttttctaatgcaatattttatttgagcacttattttttctttaagccaattgattagagctctttcacatgttttgtggtgaaatatcacatacacatgacacatatacactgatagatgcaacagtgaatctatcagtgatggaacagatagaagtggatttcataaatttatagatttttttatttgtcagttttcaaagtttctttccccatattttgttaggatatccaaaggattttgctttatttttgaagctkagaaactttactagcttgtgctttggtgttgatggctgtgttaatttttttttccttgttactcagtgtcctaaagtgtatatacataacattttcttattttcagaaaggatttataaataatcattttaaacattgattttatatt

SEQ ID NO: 331742 - DNA, 496 bp, Homo sapiens
tctgtaggtggtctgtttactctgttgatcgtttattttgctttgcagaagctctttagcttagtaagctaaacatctcttagttagctaaagagcttgtgaacagccaatttgtcaatttttgtttttgttgtgattgcttttgaggatttagccgtaaacactttgccaaggttgatgctgagaagagtatttccyagggtttcttctaggatttgttatagtttgaggtcttacatttacatctttaatttatcttcagttaatttttatagtgaaaggtagggtcccagtttcattcttctgcatatggttagacagctatctcagcaccatttattgaatagggagtccttccccattgctaattttggtcaagtttttcaaagatgattgtaggtgtgcagctttatttctgagtactctattctgttccactagtatatgcatctgtttttatagcagtaccatactttttttttttttttactgtaga

SEQ ID NO: 331743 - DNA, 496 bp, Homo sapiens
tctgtaggtggtctgtttactctgttgatcgtttattttgctttgcagaagctctttagcttagtaagctaaacatctcttagttagctaaagagcttgtgaacagccaatttgtcaatttttgtttttgttgtgattgcttttgaggatttagccgtaaacactttgccaaggttgatgctgagaagagtatttcctagggtttcttctaggatttgttatagtttgaggtcttacatttacatctttaatttatcttcagttaatttttatagtgaaaggtagggtcccagtttcattcttctgcatatggttasacagctatctcagcaccatttattgaatagggagtccttccccattgctaattttggtcaagtttttcaaagatgattgtaggtgtgcagctttatttctgagtactctattctgttccactagtatatgcatctgtttttatagcagtaccatactttttttttttttttactgtaga

SEQ ID NO: 331744 - DNA, 537 bp, Homo sapiens
ctgggtaggcaccagctgtagctaaagcaagtgtatagatttaatatccaatagtgtgcaaaggtcccagccttgatgaaggtggctagattagctctcaattagatgtgctgagattttctcagggtgaagggtgggagctatctcagctcacatgccacatgggcaggaaatatgtccacctcacagtctgaccactgtcccagtgttctggctatttacatcasacaggcacctcttttcatctagagcaatattgatgttccaagtagggagaaattgtgactttgcctctcatgaaggcctgagtctggagagtgctcctcctgtggggctgcaatcaccctgaattgttccaggaatgctgtctatacatgcagccatgctgtgttcctgtgggagaagccccagctgtgtctgcagtggtctaccaggggatacaccagtggggaataaggatgccttctccaagacgcttcatcatcatacaggctgcctgcctgttggggtaaaggtgcagactttccctactgcacc

SEQ ID NO: 331745 - DNA, 647 bp, Homo sapiens
gagtaggctgaagcctagtgattcattcaaagggcatgtggattctttcagttttttaagttcctatggtggttcttggaaaaataaaatcacaatgtgaatctctacctgttattctgtccttccacatgggaagggcacactaacactgcctcctcgccatgatcttgaaaaaatattattttcttttgggtttagtttattttttgtagtaaaacatttcattttttttctcatttccttttatgtatattgtataggtatttcctttatggttgccrtgcgaattacattttacatactaaaattaaaacactctaatgtgaatttttataatgtagtaccttcgcaaatcagggtttccctcttctccagggttttatttatttatttatttatttatttttaaattcttttagactgcatcagtccaaggcataagcttaatttcaataacatatagagtatgcttctatgaagctatgccctaccccctttagtttatgtcatgaaactatacccctatacatcatgtatctaaaaacatagactaataattttaatgcattagtttcttaaatcatgtaaaaacaaaaagtgtaattataaaccacaattactatatttttagattttataattagtca

SEQ ID NO: 331746 - DNA, 647 bp, Homo sapiens
gagtaggctgaagcctagtgattcattcaaagggcatgtggattctttcagttttttaagttcctatggtggttcttggaaaaataaaatcacaatgtgaatctctacctgttattctgtccttccacatgggaagggcacactaacactgcctcctcgccatgatcttgaaaaaatattattttcttttgggtttagtttattttttgtagtaaaacatttcattttttttctcatttccttttatgtatattgtataggtatttcctttatggttgccgtgsgaattacattttacatactaaaattaaaacactctaatgtgaatttttataatgtagtaccttcgcaaatcagggtttccctcttctccagggttttatttatttatttatttatttatttttaaattcttttagactgcatcagtccaaggcataagcttaatttcaataacatatagagtatgcttctatgaagctatgccctaccccctttagtttatgtcatgaaactatacccctatacatcatgtatctaaaaacatagactaataattttaatgcattagtttcttaaatcatgtaaaaacaaaaagtgtaattataaaccacaattactatatttttagattttataattagtca

SEQ ID NO: 331747 - DNA, 606 bp, Homo sapiens
ctcttttaatatgcattacagtgtattttcctcaaacatttacaacgtaatgggtgaattgtatagattttttttttttacggagtctcgctctgttgtcaggctagagtgcagtggtgcgatttcggctcactgcaacctctgcctcccacgttcaagtgattctcctgcctcagctttccgagtagctgggaatacaggcatgcaccaccacatctgggtaatttttgtatttttagtagagacagggtttcaccatgttgatcaggctggtctcaatctcctgacctcatgatccacctgcctcggcttcccaaagtgctgggatgacargcatgagccaccgcgcccagccccgcacaaatgtgttcttaatgggacaaatcaatgcttctcaaactcagctctattgggattttatgctgaataactttcttttgtggagcacttttctatgcattgttggatatttgcagtatctccttgccttcacactctatatgcctgtaggatccacctgctgagttgtgacaaccacaaatgtctgcagacattgtcaaatctccctggggagactgcaaaattatctccaattgaaaaccattg

SEQ ID NO: 331748 - DNA, 622 bp, Homo sapiens
gataagcatcaaaagtgtttcagaagaagaaaacaggaaatgcaaacagacaggttttttgttgtttttgttgtttgtttgttttgttttgttttgtttagaacagtacctgtataaatatggaaggaaacttctgggaaaataagttggaaagaacatttmggaaagggtcacatcatttaatcttggaataaatataaccaataaatagcttattttcaccagtattttttgatattttagtagccccagttctataagtgtattgttattttcaactcattgaagacttgtagtatagtccatgtgtttcctttttaagggtgtaaatacagtcttttgaatggctgatcaaataaatgtttcatcatgtcacttttttggtaaatcagcactttaccgaagtttatttcatgtgtttgtatgcttgtgtttactaagaacactggttgatttaaggactttttggggtggccttataagagcctttgtaaagatagctgacgcttactggattctggttatgagagattataagtggccgttcttagagtgtgttaaaatacagccaacaagataaatgtgaaaaagcaaggtgcagaatagtgtggaagaggccacc

SEQ ID NO: 331749 - DNA, 338 bp, Homo sapiens
tgttaaaagtctattttcactattacacctgacaaaataatcctaccacaagaaagaaaaccatttcaaaatttagtttcaatagagtatgctcatgtgttaatgtgcaaaycactgaagtggctagagactcatacataatataagaaagtctttcaaaagcggccatcttacctgatttgctactacagcatcctgtggatcatctggctctgcagctgccaatagtgcttgcaatgacaataataccgtgcggagagtcattgcagctgccctaaaatgcaaaacatgaaaatatcccaattaagagggctctgcaggcaaaagcaaagtatttt

SEQ ID NO: 331750 - DNA, 533 bp, Homo sapiens
gctttttgttccatttatcttttgtattttttgtttgtttgtttgtttcaatttcatgtagttctgctctgatcttggttatttcctttcttctgctgggtttgggtttggtttgtttttgtttctctagttccttgagatgtgaccttagattgtctgtttgtgctctttcagacgtttcaatgtaggcgttcagggctatgaactttcctcttagcactgcctttgctgaatcccagagcttttgataggttgtgtcattattgtcattcagtttgaagaactttttaatttccatcttgatttcrtttttgacccagtgctctttcaggagcaggttatttaatttccatgtatttgcatggttttgaaagttccttttggagttgatttccagttttattccactgtggtctgagagagtgcttgatataatttcaattttcttaaatttattgaggctcgttttatggcctatcatatggtctgtcttggagaaagttccatgtgctgttgaattgaatgtatattct

SEQ ID NO: 331751 - DNA, 501 bp, Homo sapiens
agagccaaaggccgccttggtaaaataggagacacttccatgtgctgcagccaaagggcgacagaggtgagagccaggctcaggactcaacatcagaaacaccagagaaagctgaactctcaacctaggccgggctgctaagccagggtcagggacccgcctggggaggagtgggactctaagtcctaggatggggacatttgggaagaggsacttggaagttttgaatctccaggttcctttgaaccctctggctgccagaagcaacccacttccccctgtttgaggtgtgcaccttccccttgtgcagtcggtgcagaggcctctcctcatgagacagtgcaggcctgctctggatctgtcctgagtccctctctgcacctggaccactcactggggttaagtcacagcctaatctggctggaggtgtgctggtcttggggagcaggttagggcctattctgaggacagctgcaggacccagccagtgtgagctggcag

SEQ ID NO: 331752 - DNA, 501 bp, Homo sapiens
agagccaaaggccgccttggtaaaataggagacacttccatgtgctgcagccaaagggcgacagaggtgagagccaggctcaggactcaacatcagaaacaccagagaaagctgaactctcaacctaggccgggctgctaagccagggtcagggacccgcctggggaggagtgggactctaagtcctaggatggggacatttgggaagaggcacttggaagttttgaatctccaggttcctttgaaccctctggctgccagaagcaacccacttccccctgtttgaggtgtgcaccttccccttgtgcagtcggtgcagaggcctctcctcatgagacagtgcaggcctgctctggatctgtcctgagtccctctctgcacctggaccactcactrgggttaagtcacagcctaatctggctggaggtgtgctggtcttggggagcaggttagggcctattctgaggacagctgcaggacccagccagtgtgagctggcag

SEQ ID NO: 331753 - DNA, 564 bp, Homo sapiens
ttcttaaaagagaaaaaaaaattgctaagctaatttccataaaatggataaaaattaagtattcacacatctttccaaacatacatcaaagcaagccacaacaatggcaacatgcctacttacatttttgaggaaagaaagcaaattaatatcaagttagaggaaataactgaaaacaaacttatggcactcaacagacatgagtgttaccagcttcaacctagaaattgtttccccaagttagttcagatgagagtctcgtccaaagtttgtaatgtagcaaatggggacatgtgccctcctctccctgatttttaaatagcaacagattctgggtaagtgttggtgtcttccaaattaccaatgwggcatgccttctccttaataacttgcgaggtttatttctctccaggcagtgggaagtgctacatcggtgcttaatttcctccatttgctaaagaaagtgggaactgcctagtgagtgagcaaagccataccatccattaagagggtggaggagaaatacagcctcccaaatcctaatgacctgttggaaaaattgat

SEQ ID NO: 331754 - DNA, 573 bp, Homo sapiens
tgtataaccttactccgttcaggcttttagataatctgttaaaaaataacttgaatattattatattcaagtttgccctttgactctcagaaggcaaatggcatttagaaaatcaaggaagctttcaaacagttacgtatttcagaacccagagttctcagtggagtttcttaaacgaaaacaaacaaacaatgctaaatcagtcaccgcagatatttccaaagaaaattgtttatagctygcaagtttgctttaagtagttgcctggctaacagaatatctaaactcatactagttagcaacatagacaattatgattctctggttgtcagatgctagaggaccctattaagaaactggaaataatgatgaatttttctatccgtggcattagccattcagatatggtgagtgaaaaacaaattaaggaatgtataaatatgaggctttcaaaacaagtggcataatatttcatttattcactttctacctagcttttacttcttaaaggagaatcttgctctctgggataggcataaacaaagaacttttgaaatttactcttttgtaacg

SEQ ID NO: 331755 - DNA, 576 bp, Homo sapiens
cagggtatttttgacctttactcacagggagtctttctccacactgggactcctggttgagtataattctaaccagtttgattattggcttcccctgcagtcattaggaaagggtagatgcctcaggcgagtgcattgaaagtagataaaaatgactgcctacaacctgatggaggaagacaaagaacaacaacaaatctaaggggaatacaaaaacatctccagacctcagaaagcttagcatcctgaggttaccccatattttggataaggtgtcataaacacttcattcatccctgtgagtgctataatgacccagcacaggactggatatttgtartcatggcacaaaactcatcagacaaggttaatttatgtttaaaataatcagttcttatggatggtggtgatggtagtacaagacgaatatacttcatgactctgaactctaaacttcaaaatggtgagaatagtaaattttatgttttgtgtattttaccacaataaagaaatcagttcataagagagttaggaacttcgtaatatatttcaggaaaaaaaatgtaaccaaaattt

SEQ ID NO: 331756 - DNA, 558 bp, Homo sapiens
ttagttctgtttttagctttttgagctgtcaccacactgctttccacagtgrttgaactaatttacactcccaccaacagcatataagtgttcccatttctccacaaccttgccagcatctgtaattttttgactttttattaatagccattgacaagtgtgggatggtatctcattatggttttgatttgcatttccctaatgatcagtgatatttgagctttttttcatatgcttgttggccacatgtaaaaaaataaagtttataaaagtgagagtccatcagccttgctgtactttgtaatgactacaatagcccctctgctgttgtttgaaatctctgcacagccagaattattcagttctgcttgtatatacttcatgtaactccttgtttgtcaattaacgtgatattttgacaactccttccaaaagaacattcttgctaaagaaaaaatgtagcccatgacctctgctttccatgcactgaataaacatggacagatttttcatgaagcaggcctgccaccgagggccacagagacgtaaccacgccag

SEQ ID NO: 331757 - DNA, 553 bp, Homo sapiens
cctgaagctgggtgcagaggcattggtggagggactggttcttcagtacctttaccaggaaggaatcttgacaggaaaccatgtccaagaaattaaagatcaagccacacgcctcaagaaaacaatgctgctgctgcatagcctactttccaggggtcctaaagcatttgatactttcctagattcgctacaggaattttcgtgggtaagggagaagctggagaaagcaagggaaaaagccatgactcagctgcctgcaggtgacacgatgactgggatcccctcgcacatcatcagctccccaacaaactggcagattaatcagctgacccagaggctgggccctaagtggaagtccatggtgctgtctttggtactgttctagacagatatctaccgctgtaaggccaaccatctccacaatgtgcacttgtaggtggtggaggcctttgtctgttggtggcagcgctttgagaagcaggcaactttccasagcttgcacaatgggctgcaggcatggaggtagacctcttggtgttcctgcacatgttgg

SEQ ID NO: 331758 - DNA, 608 bp, Homo sapiens
acttggtgcaaaagtgcttccaggaaagaagctgggagccgcttcctggacaaaggctgagggactgacagggagtcagagaggcagccccaagaaccactactacatgccacaatcagatgctggaaggaaacccaaagtccattctttgaacacacaaagtcattgaggtcctgtttccacagatgagagtttggggccacaccccacccatagcaaatccttttctgaattgatgtggtagagtgttaagggcagaggcttaaagctccaagctagcttgacaatgggcattcctgtcactaaatctcaaaaaaacactttttatcattttacctctttccctagactgggcccaaccatgccttgtcctatgaacagaaaaagtattcaagctgctctcttaaagcagcttttatctcctcagtgaagtggcarttttgggacaaatttccacatgaagaatcaaaatgttccaagcctaaatagggttctagcaacacactcttaactcacagaaaagagcctctaacttagatttctgctttcctttgcagaatctgtagcctgaacacactggttttaactccacaggcctgaagacacaa

SEQ ID NO: 331759 - DNA, 486 bp, Homo sapiens
aggaagggagaggagaagccaaaggtggaccttttccaaggacctggcaagcaaatgttccctagaaagaagatgaaaatttaggtcaataagaaggaaagacactgtttttagaaccattatgacgacttcagagttggttctccttcaggcttttgtccatcaagtctgtcatgtctgattccagactcctcaggatatttgaaaaaaactaatttatttgaattacatcaatgtcctttacttgcatctaaaaaatcaargtcaagctatgctgatatgtgagagagaattgagatgaatgagggctgactcccagtctctgcccctgtaattactttctttgtaagcctgaatacccaatcagatggacgccttctgaacacattttttcatatttatgaaatacctttgaacaatgaaatctggaaactctggcaacatctgtgtccaaatatatccaagtgtgtttatgtttttaattga

SEQ ID NO: 331760 - DNA, 486 bp, Homo sapiens
aggaagggagaggagaagccaaaggtggaccttttccaaggacctggcaagcaaatgttccctagaaagaagatgaaaatttaggtcaataagaaggaaagacactgtttttagaaccattatgacgacttcagagttggttctccttcaggcttttgtccatcaagtctgtcatgtctgattccagactcctcaggatatttgaaaaaaactaatttatttgaattacatcaatgtcctttacttgcatctaaaaaatcaaagtcaagctatgctgatatgtgagagagaattgagatgaatgagggctgactcccagtctctgcccctgtaattactttctttgtaagcctgaatacccaatcagatggacgccttctgaacacattttttcatatttatgaaatacctttgaacaatgaaatctggaaactctggcaamatctgtgtccaaatatatccaagtgtgtttatgtttttaattga

SEQ ID NO: 331761 - DNA, 535 bp, Homo sapiens
tgtcttttaaacacaattttaccttaggtttttacttcctatcaatgtaaacttataaggtaatatgcatgcgtcrgttttctttcttatgtatgtatgattatttcagtgatggttttcattcaaactggagtagacctattttgatttgaaaacatttttgaaagtcttatgtctgaactactgagcagtttagaaatactgaaacaattcatctgttctctaatcatcaatatcatatcacattacaatatttgatccctttgatgacagtatagcaaataaaggtaaatggaggaagattctgaatgttggtgagaagtaatatctttgttggtttggcatcagtaaaggcataaaaggaaagtgctaacagcaatatcgattattaacaattaaatatgccatggtcttgctatatttaaattatcagccaaaatagaaagtttacataatcattgtaattatgtaattatgaagtgaacctattacaaagaagttataaatataagataaaatatggagtagatagaat

SEQ ID NO: 331762 - DNA, 495 bp, Homo sapiens
tatcaatgtaaacttataaggtaatatgcatgcgtcggttttctttcttatgtatgtatgattatttcagtgatgkttttcattcaaactggagtagacctattttgatttgaaaacatttttgaaagtcttatgtctgaactactgagcagtttagaaatactgaaacaattcatctgttctctaatcatcaatatcatatcacattacaatatttgatccctttgatgacagtatagcaaataaaggtaaatggaggaagattctgaatgttggtgagaagtaatatctttgttggtttggcatcagtaaaggcataaaaggaaagtgctaacagcaatatcgattattaacaattaaatatgccatggtcttgctatatttaaattatcagccaaaatagaaagtttacataatcattgtaattatgtaattatgaagtgaacctattacaaagaagttataaatataagataaaatatggagtagatagaa

SEQ ID NO: 331763 - DNA, 535 bp, Homo sapiens
tgtcttttaaacacaattttaccttaggtttttacttcctatcaatgtaaacttataaggtaatatgcatgcgtcggttttctttcttatgtatgtatgattatttcagtgatggttttcattcaaactggagtagacctattttgatttgaaaacatttttgaaagtcttatgtctgaactactgagcagtttagaaatastgaaacaattcatctgttctctaatcatcaatatcatatcacattacaatatttgatccctttgatgacagtatagcaaataaaggtaaatggaggaagattctgaatgttggtgagaagtaatatctttgttggtttggcatcagtaaaggcataaaaggaaagtgctaacagcaatatcgattattaacaattaaatatgccatggtcttgctatatttaaattatcagccaaaatagaaagtttacataatcattgtaattatgtaattatgaagtgaacctattacaaagaagttataaatataagataaaatatggagtagatagaat

SEQ ID NO: 331764 - DNA, 608 bp, Homo sapiens
aatatcgattattaacaattaaatatgccatggtcttgctatatttaaattatcagccaaaatagaaagtttacataatcattgtaattatgtaattatgaagtgaacctattacaaagaagttataaatataagataaaatatggagtagatagaatactagatcaagaataatgcctaaaacaactctataagtagaaattatttacatgttacaaatgaggaagagactgaagaaggttgaataatttccataaggtcagacagtttggtggagccaagattcaaattcgaatctctatgatatgatgtttcctcttttgggaaacccagttcttattattctgcttctgtatttcacagtgaccacagacttagcagttrtaatctccagggactcaattttcttttagtattataattaagacaaaaagatgattaagttctcttgttgttacacagcagctcagtccccccaatgaaggaagccgcacccctagttcaggcaggagtaaggagggagagcacacgtggacttagctctgctagagaaaccctgagaaagagagaagtgatgctgatttgcctcaaatgagacagcagtagtg

SEQ ID NO: 331765 - DNA, 605 bp, Homo sapiens
agtgctcatgtcgaagctgtggtaagttatccagatctagctaagatcatttatgaggtrgctacattaaacaacaggttttcattgtacatggaacaaccttctattggaagaaggtaccatctaggactttcatagctgtagtacagaagctttgaagccaaacttcaagaattagccttcaaaggacagtctaattctctcattaggagataatgcagctagtgactttaagttgaagccaatgctcatttaccatcccaaaaatcctaacacccttaagaattatgctaaatctactctactctgtgctttataagtgggacaacaaagcctgaatgacagcacatctttttgcagcatggcttactgaatattttaagcctgttgatacctactgttcagaaaaaaaaaaaaatccctttcaaaatattgcttctcattgacaatgcatctggtcacccaagagctctgatggagatgtacaaggggattaatgttttcatgcctgcaagcacaacatccattctgcagcgcatgaatcaaggaacagttttgactttcaagtcttattatttaagaaatatatttcataagatgatagc

SEQ ID NO: 331766 - DNA, 572 bp, Homo sapiens
ggggattaatgttttcatgcctgcaagcacaacatccattctgcagcgcatgaatcaaggaacagttttgactttcaagtcttattatttaagaaatatatttcataagatgatagctgtcatagttattgattcctctgatggatctgggctaagtaaattcaaaaccttctgggaaggactcaccattctagatgccattcagaacattcctaattcatgggtagaggataaaatatcaataattacaaaagtttggaagaagttgattccagctctcatggatgactttgaaggtttaaaacttcagtggaggaagtggcagaaatagcaagagaactagaattaaaagtggagtctgaagatgtggctgaactgctgcaaacttgaacatataaaaagttacttcttatagatgagcaaagaaagccatttgttgaaatggaatctactcctgtgaagatgytgcaaaaaatattgaaattacaacaaaggatttggaatattatataaaattagttgataaagcagtgacagggtttgagaggattgactccaattttggcagaagt

SEQ ID NO: 331767 - DNA, 604 bp, Homo sapiens
ttcagacttaagagttctcaaaaatgatactaccctggcagcctttttcagaaagctgttagaagatatatgacagcacaatgatggaataagtaataaaggagaaaatataggaatcaggaaataaggaatccaacacargagagggatggagggaatcccaggataatggtgggaagaaatgctaggattacagcagtgcatcagattgaaagaataaccagaccaaaagaatggaagtttcttagaatgttgagcagaagaatggtgggttcttagaagtatgtctccaagaacaaagagaagctgatagcttacatggggtgtttgaacatgttgagaggatatttacacttctgtaagtttggtgaaaaattaatatcaacacccagaaaatgaagcagaaaaattatgagacaataactctggatggaagctatgcaaggaagaaaatgtcatcttagtacataacatggcccagatgtgcatatgcttatatactataatcatataaagatgaatatagattaagctaaaaattgtgacagaaatatgaggataggaggaggagcagcatctgttgggaattggtataggaagctga

SEQ ID NO: 331768 - DNA, 604 bp, Homo sapiens
ttcagacttaagagttctcaaaaatgatactaccctggcagcctttttcagaaagctgttagaagatatatgacagcacaatgatggaataagtaataaaggagaaaatataggaatcaggaaataaggaatccaacacaggagagggatggagggaatcccaggataatggtgggaagaaatgctaggattacagcagtgcatcagattgaaagaataaccagaccaaaagaatgraagtttcttagaatgttgagcagaagaatggtgggttcttagaagtatgtctccaagaacaaagagaagctgatagcttacatggggtgtttgaacatgttgagaggatatttacacttctgtaagtttggtgaaaaattaatatcaacacccagaaaatgaagcagaaaaattatgagacaataactctggatggaagctatgcaaggaagaaaatgtcatcttagtacataacatggcccagatgtgcatatgcttatatactataatcatataaagatgaatatagattaagctaaaaattgtgacagaaatatgaggataggaggaggagcagcatctgttgggaattggtataggaagctga

SEQ ID NO: 331769 - DNA, 604 bp, Homo sapiens
ttcagacttaagagttctcaaaaatgatactaccctggcagcctttttcagaaagctgttagaagatatatgacagcacaatgatggaataagtaataaaggagaaaatataggaatcaggaaataaggaatccaacacaggagagggatggagggaatcccaggataatggtgggaagaaatgctaggattacagcagtgcatcagattgaaagaataaccagaccaaaagaatggaagtttcttagaatgttgagcagaagaatggtgggttcttagaagtatgtctccaagaacaaagagaagctgatagcttacatggggtgtttgaacatgttgagaggatatttacacttcygtaagtttggtgaaaaattaatatcaacacccagaaaatgaagcagaaaaattatgagacaataactctggatggaagctatgcaaggaagaaaatgtcatcttagtacataacatggcccagatgtgcatatgcttatatactataatcatataaagatgaatatagattaagctaaaaattgtgacagaaatatgaggataggaggaggagcagcatctgttgggaattggtataggaagctga

SEQ ID NO: 331770 - DNA, 604 bp, Homo sapiens
ttcagacttaagagttctcaaaaatgatactaccctggcagcctttttcagaaagctgttagaagatatatgacagcacaatgatggaataagtaataaaggagaaaatataggaatcaggaaataaggaatccaacacaggagagggatggagggaatcccaggataatggtgggaagaaatgctaggattacagcagtgcatcagattgaaagaataaccagaccaaaagaatggaagtttcttagaatgttgagcagaagaatggtgggttcttagaagtatgtctccaagaacaaagagaagctgatagcttacatggggtgtttgaacatgttgagaggatatttacacttctgtaagttwggtgaaaaattaatatcaacacccagaaaatgaagcagaaaaattatgagacaataactctggatggaagctatgcaaggaagaaaatgtcatcttagtacataacatggcccagatgtgcatatgcttatatactataatcatataaagatgaatatagattaagctaaaaattgtgacagaaatatgaggataggaggaggagcagcatctgttgggaattggtataggaagctga

SEQ ID NO: 331771 - DNA, 510 bp, Homo sapiens
gagctttggtagtttgtttaaaaattttgtccatttcatcagagttgtcaaaattaatgacataaaactgttcataatatttattataaagctgctcataatatttctgtattatcatcttaatatctgagggatctgtagtagtatcatccctcttatttctgatattagtaatttctgacttctcttttttattcctaattagtctaccttgaggtttattaattttattgatctcaaagaaacaaatttttgtttcactgatattgtctatttttttttgttttccattgattacaactctgatattttttactttcttctgcctatcttgggtcttggtattaggaaakgaggaaacagtttgaggtatcccaaagaagtagactatatagaactcactactgcatggttgtagtaaaagagagagaagaaaatgtcagagatgattcaaaccttcagaaatgacccttgaaggttttcagaagtcaggaagaaaggaaagatcat

SEQ ID NO: 331772 - DNA, 554 bp, Homo sapiens
tcttttccttctctaaggcccagcttctttcattctttctcatttttattagcctcagggtattcaactgactggtctgcacttattccctttccttattcttaccaatctatgtttaaaaattgaaaaagaagattatcaaccctattttgtataatccaaaatattcawattagagcaatgaaagattgtttatccatccaactgatggaacagtttaacactgtggttaagatctagtgagatcgtctctcatacctactctttaagggactagaaattaaagtaacatttttggaaagcaatttgtcaatatgtaccaagagatattataaacttcccatcctttgattcagaaattttactaatggaattaacgtggatagcgattcagagagtcattcctcttctcaaactcctgagctccttctcttagtatgatggagtaaactttcctgcttttgcttttgtagaaatttcccatctccatattcacaccccactaggggttttcagatacacttcactggagaaaaggtctctgtttatgatcc

SEQ ID NO: 331773 - DNA, 554 bp, Homo sapiens
tcttttccttctctaaggcccagcttctttcattctttctcatttttattagcctcagggtattcaactgactggtctgcacttattccctttccttattcttaccaatctatgtttaaaaattgaaaaagaagattatcaaccctattttgtataatccaaaatattcatattagagcaatgaaagattgtttatccatccaactgatggaacagtttaacactgtggttaagatctagtgagatsgtctctcatacctactctttaagggactagaaattaaagtaacatttttggaaagcaatttgtcaatatgtaccaagagatattataaacttcccatcctttgattcagaaattttactaatggaattaacgtggatagcgattcagagagtcattcctcttctcaaactcctgagctccttctcttagtatgatggagtaaactttcctgcttttgcttttgtagaaatttcccatctccatattcacaccccactaggggttttcagatacacttcactggagaaaaggtctctgtttatgatcc

SEQ ID NO: 331774 - DNA, 554 bp, Homo sapiens
tcttttccttctctaaggcccagcttctttcattctttctcatttttattagcctcagggtattcaactgactggtctgcacttattccctttccttattcttaccaatctatgtttaaaaattgaaaaagaagattatcaaccctattttgtataatccaaaatattcatattagagcaatgaaagattgtttatccatccaactgatggaacagtttaacactgtggttaagatctagtgagatcgtctctcatacctactctttaagggactagaaattaaagtaamatttttggaaagcaatttgtcaatatgtaccaagagatattataaacttcccatcctttgattcagaaattttactaatggaattaacgtggatagcgattcagagagtcattcctcttctcaaactcctgagctccttctcttagtatgatggagtaaactttcctgcttttgcttttgtagaaatttcccatctccatattcacaccccactaggggttttcagatacacttcactggagaaaaggtctctgtttatgatcc

SEQ ID NO: 331775 - DNA, 592 bp, Homo sapiens
gttagcatctgacatatgaaagcatttatgttcttgctttatgctagtaagttaatttggtggtaaaaatgattctatataatattctataagttcttgctaggaccatgatatctttctaatgaattaattatattgcagaggtatgtatatatgtatatattttctatagtataaatggacatttcatttcgttgaaagggcacgacttcttgttaataaatgttatcatttagctagcagtaaatcaagatccagaccagaaaagcaaaggactaataattatgccttggctgtgttagctattgagactatgaataaaaagttctctaaaagtcttctcatgagaaaggagaatcattaatatgacattttcatctccttcttgggtcactgtgcctttgccaaagaatgaaatgttctttttacaaatatataatacacatwttaaaataaacttcatagcttaaatggttttaacatgcaaaaaagtagatagcaatttgtgtctgtgcttaattattttagagtatgtaaaaagcacacaataagatcaatagttgctatgcaacaaggatggcacattttaaaa

SEQ ID NO: 331776 - DNA, 613 bp, Homo sapiens
aaaagtccgccttgcatatgtttatgatcaatgtgtacatgtgggaaaatgacataaagccagcgacagacagagccagagagartattgaatacttgcacatggccagtaatttgcatttccatcagccagactggtaaacctgtaatttataaggccctaggtagagtgctcaaaagggtcttgcatcacaagttgagaatacttagccctagatgaaatgctgatttgattctgcataatacattttaaaaggaaggcctaaaataatcaagctgatttcaagaaactgaactgcatcctaggacagagctcaagaatattcataggaatacaaaaatatctagcaccgaacaaggtaagttaacaatgtctggcatccagtgaaaaattgccatccttggaaatatacaagaaaatagggctcaaaatgaaaagaaaaatcaataaataaaaactgacccagaaaggcacagaagtgagaattagcagaaaagacattaaaacaaatatgataactgtattccatatacccagaagctaaagaaaaaattgaccatgttaagcagagaaatggaagatataaaaaagaccagttactgagttttgacag

SEQ ID NO: 331777 - DNA, 613 bp, Homo sapiens
aaaagtccgccttgcatatgtttatgatcaatgtgtacatgtgggaaaatgacataaagccagcgacagacagagccagagagaatattgaatacttgcacatggccagtaatttgcatttccatcagccagactggtaaacctgtaatttataaggccctaggtagagtgctcaaaagggtcttgcatcacaagttgagaatacttagccctagatgaaatgctgatttgattctgcataatacattttaaaaggaaggcctaaaataatcaagctgatttcaagaaactgaactgcatcctaggacagagctcaagaatattcataggaatacaaaaatatctagcaccgaacaaggtaagttaacaatgtctggcatccagtgaaaaattgccatccttggaaatatacaagaaaatagggctcaaaatgaaaagaaaaatcartaaataaaaactgacccagaaaggcacagaagtgagaattagcagaaaagacattaaaacaaatatgataactgtattccatatacccagaagctaaagaaaaaattgaccatgttaagcagagaaatggaagatataaaaaagaccagttactgagttttgacag

SEQ ID NO: 331778 - DNA, 621 bp, Homo sapiens
aggaaagctataccagatggaaatatggatctacacagaggaatgtagaaaaccagaaatagtaacactgtgggtaaagatatggggtgttttttcattatttaaatttttaaaaatataattgatgatatttataacatagaagcaaaatatatgacaataataacacaatggctgagagggtagaagtggaaatatattactgtgagattcttatacaatacatgtagtgatatgtcattagaaagtagactgtattgaattaaagacatattctccaaaccctaaaattatagataataagccaataaaggagacaaaattgaattttaaaatagcaatcctaaagaagacaggaaaataagggaaagagaaaaaagatgagatgggccaaatggaaaacatagcaasatagtagatttaaagctaattatatcaataatcacattaaatggaaatgatctaaaccagagatcagcaaactttttctataaaggaccagttagttaatatttttggttttgtatgacatacagtctctgtcacaaccattcaaccctgtcattgtaacatataaaagcaaccatagacaatatacaaatgaatgggcatggctgaatt

SEQ ID NO: 331779 - DNA, 557 bp, Homo sapiens
ggcctcaggaaacttacaatcatggagtaaggcaaaggagaagcagacaccttcttcacagggcggcaggatggagtgagtgccgggcaaagggggaaaagccccttataaaaccatcagatctcgtgagaactcactcactatcacgagaatggcatgggagtaactgcccccatgattcaatcaccaccactgggkccctcccatgacacgtggggattatgggaactacaattcaagatgaaatttgggtggggacacagccaaaccatatcagtgagggttcatagcttttgactaaaaagaaaaagatgaaggagagaggagaggccaaaagagaagttaatgtaatgcaggtgaggatgagggaagtggataaaacccttccctgtagcttaaaaattatgctttatggggaaatggggacaatttagtaaactgcatttaagatacataagtatcttaatacttaatgcagagccaaacagatgcagatgtatattatttatatctcagaataatttacacataagcaacttgcacctaactttaattac

SEQ ID NO: 331780 - DNA, 555 bp, Homo sapiens
acgttgaacgaaatcaaagtaaattgagtgatctgaaacgatttgatgtcagcaagaattccccatacagctcacagccctaccccgagcacgcctccctcttgggtatggtgagttcagctccaaatttattctgacaagaaagcacaggcaatggcttcagtgggtctaaatcaggtgaaaattcaaagcaaycacccttcctggacaatcttctgctttctcagtgcttatcatggtctgaaaattcctatttaaagaagcagagctttcttttaagtcctaacagaacaaagtcacactcaacagtgcacaggcacacgccgggatcgagaatgcatttttggcaaaaagtctcctcttttctctgtctcctccagctctctgcaggcccaaaccttgcagaagccattccatgtttcctgagcaggaaaagacaaactcagaccgacaaccttggacttcaaaagactgcacacaaggggaggaaggactgagagtaccaaggcgtgagaattcagaatgctgctatctcatttatttttaccatttagg

SEQ ID NO: 331781 - DNA, 593 bp, Homo sapiens
agccaacatgttgtatatttgatctcaaacacttattccttccgtacagacttttcctaatttcatctactgattctccaggttggaaaataccaactgattcctgaaatgctactttttattctaaagcttctttatctagatccataagagtttttctgttttcatcttgcaattccatcatgcatttgtagagtgcataaatctactttgggagctctgttggtcttattcttctacacatctccagcactagagcagggcccagtcattaggaggtgctcagtaagtgttggctaaataaatcatgaggacatctagcaaggaagttcttattaaacytttgcttgtttgtttctctttaagattcatggttttttatgttctcggagccttcatttgaaacttaagttctcactatacagtcaaaaggtaccgtgtccctttaaagtaaaaaaattctaaatctccttgttgcctctttctatagaagcagtatagaaatcaaaataaaggcctcatttcattgagacttgtttaatcaagatgagaacaacctttgggaggataacgatggagatgacaagtgaaga

SEQ ID NO: 331782 - DNA, 588 bp, Homo sapiens
tgctcttgcaaatctatagaactaaaattttaaaaaataaaaatttgcaaaataaaagaaagaaaaaaagaaactggcacgcaagatggaacctgtttgtcatgcttacccttagagccagcccattccctttgatagctaggatttcatacatattaatgctatggctctaagagttatgatttagcaatgataacaagcaatgtgtctcaggtagcagcaggactgtgagttctaactctccctgagtctctacctgtgctagtcctcagtgtttttaaacaaatccttattggtgtttgggacttcaaagacaaaagaggggaaacataagaaacataaatatttctgtttctcctgggggatatctcaaacaacctcaacaacaacacatataagatgatagatagatagatagatagatagatagatagatagatagatagayagatagatatagatagatatagatagattgttttgcaaatatttcacctcatcagccctgtgacagaagtaaatataactatctccataattaagaacctaattgagcctaggaagccatctatcatggcaaatcaatct

SEQ ID NO: 331783 - DNA, 588 bp, Homo sapiens
tgctcttgcaaatctatagaactaaaattttaaaaaataaaaatttgcaaaataaaagaaagaaaaaaagaaactggcacgcaagatggaacctgtttgtcatgcttacccttagagccagcccattccctttgatagctaggatttcatacatattaatgctatggctctaagagttatgatttagcaatgataacaagcaatgtgtctcaggtagcagcaggactgtgagttctaactctccctgagtctctacctgtgctagtcctcagtgtttttaaacaaatccttattggtgtttgggacttcaaagacaaaagaggggaaacataagaaacataaatatttctgtttctcctgggggatatctcaaacaacctcaacaacaacacatataagatgatagatagatagatagatagatagatagatagatagatagatagacagatakatatagatagatatagatagattgttttgcaaatatttcacctcatcagccctgtgacagaagtaaatataactatctccataattaagaacctaattgagcctaggaagccatctatcatggcaaatcaatct

SEQ ID NO: 331784 - DNA, 588 bp, Homo sapiens
tgctcttgcaaatctatagaactaaaattttaaaaaataaaaatttgcaaaataaaagaaagaaaaaaagaaactggcacgcaagatggaacctgtttgtcatgcttacccttagagccagcccattccctttgatagctaggatttcatacatattaatgctatggctctaagagttatgatttagcaatgataacaagcaatgtgtctcaggtagcagcaggactgtgagttctaactctccctgagtctctacctgtgctagtcctcagtgtttttaaacaaatccttattggtgtttgggacttcaaagacaaaagaggggaaacataagaaacataaatatttctgtttctcctgggggatatctcaaacaacctcaacaacaacacatataagatgatagatagatagatagatagatagatagatagatagatagatagacagatagakatagatagatatagatagattgttttgcaaatatttcacctcatcagccctgtgacagaagtaaatataactatctccataattaagaacctaattgagcctaggaagccatctatcatggcaaatcaatct

SEQ ID NO: 331785 - DNA, 559 bp, Homo sapiens
taatgagtacaaaaaaaaaatagaaagaatgaataagacctagtttgatagcataatagggcaactatagtaaaacagaatttaattgtgcattttaaaatagctaaaagaatatagttggattgtttgaaacacaaagaataaatgcttgaggtgatggatactctatttatcccaataagattattatgatttgcatgcctgtatcaaatatctcatgtaacccgcaaatatatacacctactatgtacccacaaaaattaaaaataaaaaattttcaaagagaccttaaagacaatagcctctccctctctctctctgtctccctcaacatgcagtcatttttatcaagacctattttcattgacttttatgataatttcgctttaattctatcactttcacatgtatttcytatatttagagggaaaggaaagacacagaaaaggtgagtaaaaagctatataaagttgaataacaaaactctgctttttgatgattcatgatcttttgatggtgtaagcagtttactttataaacccacactgactattccgct

SEQ ID NO: 331786 - DNA, 553 bp, Homo sapiens
ttgactccatgttctgcatcatgggcacactggtatgttgggtgggctcccaaaaccttgggaagatctgcccctgtagctttgttgggtgcagcccccatggctgctctcacaggttggagtccaatgtctttggcttttccagtctcaaagtgcaagctgccagtgcctacaccactctggtgtctgaagcacagtgaccccattcccacagctccactaggcagtgccctggtggaaactctgtgttggggctccagccctacaattccccatcggcactgtccaagtagagaggctgtctgtggggctccacccctgcagcmgtctgctgcctggaaacccaggctttcccatgcatcctctgaaatctgggtggaagccaccaagccttcttcactcttgcattctgcatacatgcagacttaacaccatgtggacgtcaccaaagcttatggctagtgtcccaaggctgcacaggacactgaggactcaggcatggcccctgaatccattctttcctcctaggcctctgcacctgtgatgggagggg

SEQ ID NO: 331787 - DNA, 567 bp, Homo sapiens
aaaccctatgtgtgggttccctgaagggccacagctgtcctctctttgttgtcctcaacatggtaagtgcaggggtggggggccatgtttcagccctgcttgtgttatagctctttcagacctgccattgggtgagtcccgagttcttgccctgtgtccaggaagaaygaggtatgcagaaaactggatggtgagcaaggcaaagaggagttcattgagcaacagaatagctctcaggacccaaagtggatagctcctttctgtaggcaggtcatcctgatgagtacagccgtcagtgaagaggagacccacagtgggtagctcatttccacaggctgagtgtccagctctcagcagagaggagacccacagtgggtagctcctttgcacaggcaggtcgtccccacaagcggaggatacctgaagtgggtagctccttcccacagctggtagtcttcatgtttgtgtgagtctggctgaatctcaggtttttatggaatcagaagggagaaagtgcatgccaattggtccatgtgtggccatgggaggaccaggataaagcaccat

SEQ ID NO: 331788 - DNA, 566 bp, Homo sapiens
tatacaagcaagagaggatatacttgctttgtttccaattataataggggagagtttaatctttcactataagttattctgttccatatgagttttgttttttgtttttgtttttgtttttgtttttgagacggagtctcgctctgtcgaccagactggagtgcagtggcgcgatgtcggctcactgcaagctctgcctccagggttcacgccgttctcctgcctcagcctcccgagtagctgggactacaggcgtccgtgtatcgtgtatatatatatatatcgtgtatatatatatcgtgtgtgtgtgtgtrtatatatatatatatatatatatatatatacctcctatgaaccagcaattctacttctaggtatttatccaagagaaatgaaaaataaatgtacataaaaagtattgtacatgaatttcaatagcagctttcttcataagagcaataaaactgggtgggttggggaaaatattctcaagataagaataaataagcaaattgtggttacattcatacaaggaataaccctcagcaataaaaaggagcaaacta

SEQ ID NO: 331789 - DNA, 580 bp, Homo sapiens
gcttgcttacctaggttaagttccattcatctccttgtctagcctagccaagacccaacacaaaaaaataacatttaaacaaacacactgctccctaaatctttgcttaccttattatgataagtttactgaggagtaattcatgaggtacmttgattgtttttcagaaaggtaaaaccaggtgcattccatccagtgacagacaaggtgccattttcaccacacctttgccaatgtgggtttgtcatttctttttataaaacctcttataggtgcagtgcagaaagataaacaggattcaacttgtcccaaccaaggggaaaggatgtccaagacagcagaacagcctcagcaaggcacagaggtgggaaaatgtgtgatttatttagttctatgtgaccaattcattcatttaatacatatttgcccagagcctctataattaaaataatttagtgagattagcagttaaagatgtgttagtagctaattgagcctttcttcctgataaagtaagaagaaatgaaggggaattgcttttttttaaaaaaaaggtaacatgaaaggaggcatgaaaatg

SEQ ID NO: 331790 - DNA, 539 bp, Homo sapiens
caagaatctgcattttaacaagccgctagcatcatctggtgcagatgatccatggaccacactttagaaactgcctgaagaagtgaagaagcatatttggccaaatactctgacatcttaagaccttctctttatgagcatccatcttctaatgagatcctcatggaataaaaactcctttgtactgatttctgtccttgcctaaatagtattataatgaacgtagctataactttgaaattcaaccagatgacaggatacaggaccttctgccagtgcagacacccccaggacactttgtgatcccaggctagcccctgccatgctttttattttctccattgctctaggattggattttctgctcctgtcttaaacggaccttcattgattctttstggccagactcttctccctgcagcactgcagaatatgcagtctcattgctttcccacacctagcctgtctcaagaagtgcacaagacatttgagggtttccttgaagctttattataaacaatgaggaagagacaagagga

SEQ ID NO: 331791 - DNA, 485 bp, Homo sapiens
tgatcttgtattaaaaacctaaagactccaccaaaaaactattagaactgatcaacaaattcagtaaagttgcaggatacaaaatcaatatacaaaattcagtagcatttctattaatatatgccaacagtgaacaatctgaaaaagaaataaaaaagtaatcccctttataatagccacacataacattaaatacctaggaattaacttaagtaaataagtgaaagatttctccagtgaaaaatataaaacactaatgaaagaaattgaagaggacacaaaaattggaaagatattccatgtttgtgggttggaagaatcaatattgttaaaatctccatatggccaaagcaatctacatattcaatgcaattcctatcagaataccaatgacatttttcacagaaayagaaaaaactatcccaaaatttatatggaactacacaagactgagaatagccaaagctatcctaagcaaaaagaaa

SEQ ID NO: 331792 - DNA, 562 bp, Homo sapiens
aggaacacaaacatttaaaccttagcaccatggtttttctgttccccaggagtttagacgtggttgggtctgaggtgtggtcaggacatgaaagtcggaatgttatagagtgcccatggggccctgtgtggccagctcccatctgggaagcatgatgtggtttccttacttacatactccttcattccttgcactaaaaactcagcctgtagcagtattaagacatagttcaaagaggctatggctcacctctcagtacagattctctgaagtgatggtttggcagctggtgtctgttttaagagggtctcaaacaggatcttggtaaattctaaattttgagaagcattacaggagaggtgaagtggtgggatcaggaatctcagagagattgygagaggcagggagtgagcagggagttcatggaaaaccaatgacctgtttgagtggctgtcatcctgaaggcttagttactgaggtgtcatgaagaaagccttttctgatgaatttgaacagattctgaattgctatgaatatctattaatggtgacccaatgccccc

SEQ ID NO: 331793 - DNA, 650 bp, Homo sapiens
tggtttgcaaatattttggtgaagatttatgcataaatgttcatcaacgatattggaccaaagttttctttttttgttgtgtttctgccaagttttgatatcaggatgatgctggcctcatagaataagttggggaggagtycttccacctcaatttttgtaatagtttcagcaggaattgtaccaactcttctttgtacgtctggaagaattcagctgtgaatgcatctggtcctcgacttttttttttttttttttgattgggaggatatttattactgattcaatttcagggttcattactggtatgttcaggaaatcaattctgcctcattcagtcttggaagggtgtatgtgcccagaaatttatccatctcttccaggttttctagtttgtgtgcatagagctgttcatagaagtctctgatggttatttgtatttctgtagggtcagtggagaacatctccttagtcatttcttcttgcagttatttggatcttctctcttttcttctttgttaatgtagctagtggcctatctatcttattaatgttttcaaaaaacaaactgctaaatttgttgatcttttcagtggtttcttcatgtcccaatctccctcagttctgattttggttatttcttgtcttct

SEQ ID NO: 331794 - DNA, 632 bp, Homo sapiens
tagataatttaagactatttaaaatttttttgttttaatttttgtgrgtacatactaggtgtatataattttgtggtacatgagatgttttgtacaggcaagcaatgcataataatcacatcatgtaaaatgaggtatccatttcctcagcattttttgatacaaaaagtccattcatactcttttagttattttacaatgtaagattaaattattatagactatagtcaccctgttgcgctattaaatactaggtcttattcattctttctatttttttggtatccattaacaatcctcactttctccccactctcctactatcctttccaccttctggtaaccattattctactctctatgtccctgagttcagttgttttgatttttgggacccagaaataagagaaaacatgcaatgtttgtctttctgtgcctggcttatttcacttaacataatgacctccagtttcttccatgttgttgcatttgacagaatcttatccttttttatggctgactaggactccattgcgtataagtaccgcattttctttaaccattcatgtgttgtgtacacttagattgtttccaaaccttatgtattgtaaatagtgctgcaacaaatatag

SEQ ID NO: 331795 - DNA, 632 bp, Homo sapiens
tagataatttaagactatttaaaatttttttgttttaatttttgtgagtacatactaggtgtatataattttgtggtacatgagatgttttgtacaggcaagcaatgcataataatcacatcatgtaaaatgaggtatccatttcctcagcattttttgwtacaaaaagtccattcatactcttttagttattttacaatgtaagattaaattattatagactatagtcaccctgttgcgctattaaatactaggtcttattcattctttctatttttttggtatccattaacaatcctcactttctccccactctcctactatcctttccaccttctggtaaccattattctactctctatgtccctgagttcagttgttttgatttttgggacccagaaataagagaaaacatgcaatgtttgtctttctgtgcctggcttatttcacttaacataatgacctccagtttcttccatgttgttgcatttgacagaatcttatccttttttatggctgactaggactccattgcgtataagtaccgcattttctttaaccattcatgtgttgtgtacacttagattgtttccaaaccttatgtattgtaaatagtgctgcaacaaatatag

SEQ ID NO: 331796 - DNA, 632 bp, Homo sapiens
tagataatttaagactatttaaaatttttttgttttaatttttgtgagtacatactaggtgtatataattttgtggtacatgagatgttttgtacaggcaagcaatgcataataatcacatcatgtaaaatgaggtatccatttcctcagcattttttgatacaaaaagtccattcatactcttttagttattttacaatgtaagattaaattattatagactatagtcaccctgttgcgctattaaatactaggtcttattcattctttctatttttttggtatccattaacaatcctcactttctccccactctcctactatcctttccaccttctggtaaccattattctactctctatgtccctgagttcagttgttttgatttttrggacccagaaataagagaaaacatgcaatgtttgtctttctgtgcctggcttatttcacttaacataatgacctccagtttcttccatgttgttgcatttgacagaatcttatccttttttatggctgactaggactccattgcgtataagtaccgcattttctttaaccattcatgtgttgtgtacacttagattgtttccaaaccttatgtattgtaaatagtgctgcaacaaatatag

SEQ ID NO: 331797 - DNA, 594 bp, Homo sapiens
tatttagtctttcttcttaaaagcagtttatacaccacagttatgacattacaatattctgtgtttttttgtacttactattaccagtgagttttgtgccttcatgtaatttcttattgctcgttaacatcctttcttttctgattgatgtacttcttttagcacttcttgtaggacaggtctagtgttaatgaaatccctcagctttttttattgtctgttttttgatgtttgaagaatattttgatcagatatactattctagggtaaaaatctttttccttcggcactttaaatatgtcatgccactctctccttgtcactaaggttttcatggaaaagtctgcttcctaatgtattggaactccattgtatgttatttgtttcttttctcttgctgcttttaggatcctttctttatgcttgctctttgggagtttgattattgaatgccttgaggtgattttctwgggactaattctgcttggtgttctatagccttcttgtacttggatattgatatttttctctgggattgggaagttctttgttataacccctttgaataaactttctattcaatctctttttcta

SEQ ID NO: 331798 - DNA, 594 bp, Homo sapiens
tatttagtctttcttcttaaaagcagtttatacaccacagttatgacattacaatattctgtgtttttttgtacttactattaccagtgagttttgtgccttcatgtaatttcttattgctcgttaacatcctttcttttctgattgatgtacttcttttagcacttcttgtaggacaggtctagtgttaatgaaatccctcagctttttttattgtctgttttttgatgtttgaagaatattttgatcagatatactattctagggtaaaaatctttttccttcggcactttaaatatgtcatgccactctctccttgtcactaaggttttcatggaaaagtctgcttcctaatgtattggaactccattgtatgttatttgtttcttttctcttgctgcttttaggatcctttctttatgcttgctctttgggagtttgattattgaatgccttgaggtgattttcttgggactaattctgcttggtgttctatagccttcttgtacttggatattgatatttttctctgggattgggaagttctttgttataamccctttgaataaactttctattcaatctctttttcta

SEQ ID NO: 331799 - DNA, 563 bp, Homo sapiens
gacacaagcatggctgtggctacaactactaggaccgtgctgggccagaactgaagccgacacaccactgtgtctaacccaaggcctgctttaaccmctccctggctactgcctatgttcgctcaaggctctggggggtctacaagaagcaggtggcaaagccagccaggcctgtgtccttcctttcaggtggtgagttactcaggccctaggcaggtccaatagtgctgcccaggagccagggactacagtaaaaaaccttggcagttagtctggtgttccaaaggcagaagaacctcaccccaaggttaccaccaccacagactcacagggagtactgccaggctaccgtcaatgttctcttaaggtccaaaggctctttagttagcttgtggtgaatgctgacttgtctgggactcacgctttagagcagtggcccccactctggcctaagaaaggcccagaaatgccatccaagagccaagtcctggaatcagggaccccaatatctcactttgtactctatcccactgtggctgagctggtaccaaaggtgcaagaca

SEQ ID NO: 331800 - DNA, 563 bp, Homo sapiens
gacacaagcatggctgtggctacaactactaggaccgtgctgggccagaactgaagccgacacaccactgtgtctaacccaaggcctgctttaaccactccctggctactgcctatgttcgctcaaggctctggggggtctacaagaagcaggtggcaaagccagcmaggcctgtgtccttcctttcaggtggtgagttactcaggccctaggcaggtccaatagtgctgcccaggagccagggactacagtaaaaaaccttggcagttagtctggtgttccaaaggcagaagaacctcaccccaaggttaccaccaccacagactcacagggagtactgccaggctaccgtcaatgttctcttaaggtccaaaggctctttagttagcttgtggtgaatgctgacttgtctgggactcacgctttagagcagtggcccccactctggcctaagaaaggcccagaaatgccatccaagagccaagtcctggaatcagggaccccaatatctcactttgtactctatcccactgtggctgagctggtaccaaaggtgcaagaca

SEQ ID NO: 331801 - DNA, 551 bp, Homo sapiens
ccaagtcctggaatcagggaccccaatatctcactttgtactctatcccactgtggctgagctggtaccaaaggtgcaagacagagccccctttacttttccctcttcttttctcaagcagaaggagtctcactccacagccatcgagccatcacarctgggaatgtgctgcatctcacttgaaaccagcaagtctcagagcctcacccaaggtcttcaatgtaacctaggtattactgctggttattcagggcccaagggctcttcagttagcaagtgatgaatcctgccaggactgggttcttccttcatagcagcaggttcccttctggtccagggtgtgtctagatatgtccgggagctagggcctggaaaagaggtcttgcacctctaacaagtgccctaacatgctgtggctgagctggtatccaagatgcaagagaaagtcctccacactcttccttctcctctcctcaagcagaggaaacagatctcttctggatccacaagctgtgcaacctggggttggggtaggggagatgccagcattt

SEQ ID NO: 331802 - DNA, 599 bp, Homo sapiens
tcactttgtactctatcccactgtggctgagctggtaccaaaggtgcaagacagagccccctttacttttccctcttcttttctcaagcagaaggagtctcactccacagccatcgagccatcacagctgggaatgtgctgcatctcacttgaaaccagcaagtctcagagcctcacccaaggtcttcaatgtaacctaggtattactgctggttattcagggcccaagggctcttcagttagcaagtgatgaatcctgccaggactgggttcttccttcatagcagcaggttcccttctggtccagggtgtgtctagatatgtccgggagctagggcctggaaaagaggtcttrcacctctaacaagtgccctaacatgctgtggctgagctggtatccaagatgcaagagaaagtcctccacactcttccttctcctctcctcaagcagaggaaacagatctcttctggatccacaagctgtgcaacctggggttggggtaggggagatgccagcatttcctgagctactccagctgatgtctcagtaggtcctgtggccccctagtccacagtctttgggcctacttcagcactat

SEQ ID NO: 331803 - DNA, 540 bp, Homo sapiens
atatttaattaagcatattgtttccttgataaacttactctttcatcattatgaattattcatctcttaatatctgataacagataacatttttctttctrtttatcttatattaacatagccactacagccttcttttttttttatttatttttattttttttatttttattaagacggagtttcactcttgttgcccaggctggagcgtggtgatgcgatctaggctcactgcaacctctgctttctggcttcaagcgattctcctgcctcagcctcctgagtagcttggaatacaggcatgtgccaccaggcccaactaatttttgtatttttagtagagacagggtttcatcacattgcccagactggtctcgaactcctaacctcaggtgatctgcccgccttggcctcccaaagtgctgggattataggcatgagccaccacacctggcctacagccttcttatgtttagcatttgttatttaaaatttttactatttccttgtctttatataaatatgcaagttctgtgaata

SEQ ID NO: 331804 - DNA, 540 bp, Homo sapiens
atatttaattaagcatattgtttccttgataaacttactctttcatcattatgaattattcatctcttaatatctgataacagataacatttttctttctgtttatcttatattaacatagccactacagccttcttttttttttatttatttttattttttttatttttattaagacggagtttcactcttgttgcccaggctggagcgtggtgatgcgatctaggctcactgcaacctctgctttctggcttcaagcgattctcctgcctcagcctcctgagtagctkggaatacaggcatgtgccaccaggcccaactaatttttgtatttttagtagagacagggtttcatcacattgcccagactggtctcgaactcctaacctcaggtgatctgcccgccttggcctcccaaagtgctgggattataggcatgagccaccacacctggcctacagccttcttatgtttagcatttgttatttaaaatttttactatttccttgtctttatataaatatgcaagttctgtgaata

SEQ ID NO: 331805 - DNA, 540 bp, Homo sapiens
atatttaattaagcatattgtttccttgataaacttactctttcatcattatgaattattcatctcttaatatctgataacagataacatttttctttctgtttatcttatattaacatagccactacagccttcttttttttttatttatttttattttttttatttttattaagacggagtttcactcttgttgcccaggctggagcgtggtgatgcgatctaggctcactgcaacctctgctttctggcttcaagcgattctcctgcctcagcctcctgagtagcttggaatacaggcatgtgccaccaggcccaactaatttttgtatttttagtagagacagggtttcaycacattgcccagactggtctcgaactcctaacctcaggtgatctgcccgccttggcctcccaaagtgctgggattataggcatgagccaccacacctggcctacagccttcttatgtttagcatttgttatttaaaatttttactatttccttgtctttatataaatatgcaagttctgtgaata

SEQ ID NO: 331806 - DNA, 540 bp, Homo sapiens
atatttaattaagcatattgtttccttgataaacttactctttcatcattatgaattattcatctcttaatatctgataacagataacatttttctttctgtttatcttatattaacatagccactacagccttcttttttttttatttatttttattttttttatttttattaagacggagtttcactcttgttgcccaggctggagcgtggtgatgcgatctaggctcactgcaacctctgctttctggcttcaagcgattctcctgcctcagcctcctgagtagcttggaatacaggcatgtgccaccaggcccaactaatttttgtatttttagtagagacagggtttcatcacattgcccagactggtctcgaactcctaacctcaggtgatctgcccgccttggcctcccaaagtgctgggattatrggcatgagccaccacacctggcctacagccttcttatgtttagcatttgttatttaaaatttttactatttccttgtctttatataaatatgcaagttctgtgaata

SEQ ID NO: 331807 - DNA, 511 bp, Homo sapiens
aatggcttcatatacctgctgtctgcctaagccttccagcctccagagattttctctttgctacattcttcttgctgatacagggatagggactaataagttccatcaggattttcatccctaagattttaagcaaacaaacaaaaagatttcttgttagccaaccaattaatctgaaaagccaatcaaacaaagcactttaaatttgagaggtactcaatgactagtctacagtagtgcaataaaatcactttagggtcctgaagctgtgtttttattagcacacttcaaataataataaccataataacaacagtactctcaggccagagtccgatgctttcagtttagagagcaatgctattatttcctaaaagagcctgttatcgagctagaacgtatggtttagtgagcaaaacaggaaaaacttcaaggaccagggagtggacttsggttttggtattgctggcaggagaagacacagttctgtgcccccaacacttctaagata

SEQ ID NO: 331808 - DNA, 558 bp, Homo sapiens
acagaacttcactaaggtggaattttaaatttggacaagagctggaaataaagtgtgccttattgctatctagaaagaaagaacatgccaagcaaattaataatgtaaacaagatttcccacaagaatctttaatccatataatcctgtccaattcaataaacaktttgtaagcacttactgggtgctgaattgaagaaccgagtgaatttgtccctttcaaagggagttcacagcccagcctagaagtaagcaatctaagtgcacacacacgtgtacacacacacacacacaaacacacacgcacacacacacaaacacacacacatacacacacatatacaaacacaaacacacacatgcaaagtattttaaaaagtaagttctgcgtgaataaaatgaaaagagggataaattaggtttggcaagatccaagaaaacttttaagactcaactgacaattttcataaatgctttccttccagaggtcccttttatttgaaagattaacctagtgatgaaaattatccctatcaaattattaaagcaggatatcaaa

SEQ ID NO: 331809 - DNA, 558 bp, Homo sapiens
acagaacttcactaaggtggaattttaaatttggacaagagctggaaataaagtgtgccttattgctatctagaaagaaagaacatgccaagcaaattaataatgtaaacaagatttcccacaagaatctttaatccatataatcctgtccaattcaataaacattttgtaagcacttactgggtgctgaattgaagaaccgagtgaatttgtccctttcaaagggagttcacagcccagcctagaagtaagcaatctaagtgcacacacacgtgtacacacacacacrcacaaacacacacgcacacacacacaaacacacacacatacacacacatatacaaacacaaacacacacatgcaaagtattttaaaaagtaagttctgcgtgaataaaatgaaaagagggataaattaggtttggcaagatccaagaaaacttttaagactcaactgacaattttcataaatgctttccttccagaggtcccttttatttgaaagattaacctagtgatgaaaattatccctatcaaattattaaagcaggatatcaaa

SEQ ID NO: 331810 - DNA, 505 bp, Homo sapiens
cctgcattgcaagaggaaatactctaccctcagaggctcagtccatatcagggacccccagaaatgccaggctggtggacaaacaaactgtatctcagaacataccctggtgctggagttctgaatgactccatggcatctgattctcaagaagcactgggctaggtggaaagaagtaaatagatgggctgggatcattaggaaactagaggcaactaagtgaaggtgtctcctcttggcagtttattccaggatcaagcttcaatgacttcatattcttggatgaaggggctgtgtcatgtcagaagggctagcttagtgagcttcagccagggcgagccccagtgcctttgctgactcagtgtcccaaagctgccttgacaggagackgacctgagaggcagaatgctggattaaaccacctgcaaccgtgctcaaatccttcccccatctttcttctccactgccctcactacccaatgaatttgccactcagttgttcctt

SEQ ID NO: 331811 - DNA, 628 bp, Homo sapiens
cctttccactggaggctggacagctatactccacctacttccctccagcccccctggactgacacagagccctctgtcttcctgtggaatgcagtagcaattctgagcatggtgctggacaagaagtccagctcccctcataaactttttatagcttaggaaaataaacatgtggtttaaggtctttgcataggcggtgctcgctragtttgagcttgctttacagaactacgaaagaaaatattggtagagctaagaaatttctgagccagccaagggacagtagtccagaaatcttggggagggtttgatggttcaggcaataaaaagagaagtcatctacctagctgttatctcgctctgtcctgctaagaatctgcctgcctgagtgatgcagccaggctcccttgttccctggggcaaggaaccagtagagggatagggaatcacagtgtttcccggctgcaagggcccttggagatggttttacagatgaggaagcagagtccagagaaaggaagtgatctgctgggaaccactgtacttttcacacaagcaactttccaggcatctgctatgtgctgtccacaggatggcgagggggtaaggagaccacttaatgcatgtg

SEQ ID NO: 331812 - DNA, 628 bp, Homo sapiens
cctttccactggaggctggacagctatactccacctacttccctccagcccccctggactgacacagagccctctgtcttcctgtggaatgcagtagcaattctgagcatggtgctggacaagaagtccagctcccctcataaactttttatagcttaggaaaataaacatgtggtttaaggtctttgcataggcggtgctcgctaagtttgagcttgctttacagaactacgaaagaaaatattggtagagctaagaaatttctgagccagccaagggacagtagtccagaaatcttggggagggtttgatggttcaggcaataaaaagagaagtcatctacctagctgttatctcgctctgtcctgctaagaatctgcctgcctgagtgatgcagccaggctcccttgttccctggggcaaggaaccagtagagggatagggaatcacagtgtttcccggctgcaagggcccttggagatggttttacagatgaggaagcagagtccagagaaaggaagtgatctgctgggaaccactgtacttttcacacaagcaactttccrggcatctgctatgtgctgtccacaggatggcgagggggtaaggagaccacttaatgcatgtg

SEQ ID NO: 331813 - DNA, 520 bp, Homo sapiens
tttatgccaacctctgttctgagtgcttttcatggattaagtgatttaaccctcacgagaatttagacacgggaaccrtagctcaggagggctgggcaggttgcccaggtcagcagagttggtatgtggcagagctagaatctgaagccaagccatctgccaacagggtccatgcaattaaccactgcaccacattattactccccagtggaaaaagacaatccccatggccaacaaggacatgcgtggaaatgcatgtgttcctctcctgctattggtagcagaggttcccttgatacaccttgatcccaagtgctccatgatggtagtgctcaggtactatattcagtgaatgaatgcaagtgacaggttccacttgtcccccaggatctgaaaagacagtccagcttttgctagattttgagcatgaccatgatgggactcaaggaaccttccctccctaacttggcagtgggtgacttgacttcctcacatgctctggaggatggttttccactga

SEQ ID NO: 331814 - DNA, 514 bp, Homo sapiens
gtcctgtggtgtggttgggtatttgtctagtctgcattgtttttggttgggcagcatcctggcttggttcctgggcctcccaagaaactttgcaaactcccacatactctgtaataaactcattttcatgtcaatagctagagtagactctgttgtctgcaattaagcactttgttcaatccatccttccgtacattgcacagatgtattcttttctttaaacaatttattcaacatctactagtatcaagttttgtgttttgacttgcatttttcttgtttaatacaacaactgycttgtgacatagtacctactaagagaggagtacactgaagctcagagaggttaagaaacataactcaagctgcagagccagatttgggcagattttcaagttgtctaccattttcccatgacctaaaggtctgagaaaaggatgcactggtgaaggaacaaaggtgtgtgtgtctttttaaagacaggaggtccagcgggccagagcgttttgagagg

SEQ ID NO: 331815 - DNA, 514 bp, Homo sapiens
gtcctgtggtgtggttgggtatttgtctagtctgcattgtttttggttgggcagcatcctggcttggttcctgggcctcccaagaaactttgcaaactcccacatactctgtaataaactcattttcatgtcaatagctagagtagactctgttgtctgcaattaagcactttgttcaatccatccttccgtacattgcacagatgtattcttttctttaaacaatttattcaacatctactagtatcaagttttgtgttttgacttgcatttttcttgtttaatacaacaactgtcttgtgacatagtacctactaagagaggagtacactgaagctcagagaggttaagaaacataactcaagctgcagagccagatttgggcagattttcaagttgtctaccaytttcccatgacctaaaggtctgagaaaaggatgcactggtgaaggaacaaaggtgtgtgtgtctttttaaagacaggaggtccagcgggccagagcgttttgagagg

SEQ ID NO: 331816 - DNA, 514 bp, Homo sapiens
gtcctgtggtgtggttgggtatttgtctagtctgcattgtttttggttgggcagcatcctggcttggttcctgggcctcccaagaaactttgcaaactcccacatactctgtaataaactcattttcatgtcaatagctagagtagactctgttgtctgcaattaagcactttgttcaatccatccttccgtacattgcacagatgtattcttttctttaaacaatttattcaacatctactagtatcaagttttgtgttttgacttgcatttttcttgtttaatacaacaactgtcttgtgacatagtacctactaagagaggagtacactgaagctcagagaggttaagaaacataactcaagctgcagagccagatttgggcagattttcaagttgtctaccattttcccatgacctaaaggtctgagaaaaggatgcactggtgaaggaacaaaggtgtgtgtgtctttttaaagacaggaggtccagygggccagagcgttttgagagg

SEQ ID NO: 331817 - DNA, 539 bp, Homo sapiens
tcacagccactggctcggaggactccgagcgctgacaacatgactggcacagagccaggtacacacattgtcttcacgcttcacacagacctgccgtccactgctgagaagatcaaggctcagaggtgggaagacttgcccaaggccatccaaatagaagcgactgaacagggattggacacatcgtttggctcaagaacaaaagccagcatataagatttgatggtaacttttaggagcaggttagggagmaccaaaatccctcagtccaaattcgtctgcttttaccatctgtttcttgcttcccaccagtaaaatgatacagtgtagagagaagcagctccctgggtactttgggaattagagcaataaatttttataagctaatcaaaacactgggactggttctcagattttccttcttgccccaccatgtcattgcctcgctggacctatctggaagcctcattctcatggctggggagaggaactattgaggcccagacacacccctctgtcaggcaggagcctgggcctgc

SEQ ID NO: 331818 - DNA, 540 bp, Homo sapiens
ttagcccgacaggtgaaccacaaatcactcaggatgacccaacaacttcattcaaacctcccttttagaagactgtgagatgctgttggtatcagaagggcctatagaagtagtctgcaaagaggaaaggcatatgccacagagagaagaacccaagatcgtcagaacatctgtactttcctgaagagcagcaggctgtgagagcagaggtgagcttagagcacccctggaggagtcggggctcccagctttcaactaccaggatccattttcaatgcagaagttgttgatagtagttatattttttatatctggggtagacaaaattcctaaagatgaaaaactactaaaagttyagtaacatgtttcaactgattaatggtggcttgctttcaacaggacccacgtttgtcatgtgcctaagtgcaataacagtatttctctagtctccatcaaaacatgggcctgcttatgctggagtcatttagtgaacccattgctgctgctttgtagctttcatgaatttgaagattggttgaa

SEQ ID NO: 331819 - DNA, 602 bp, Homo sapiens
actgtgcctggccacgctgccattcttctctctcctggcaccctgtagttttccttcttggctctcattggaatttgtagtcctttgtctttttattggctgggttatttaacgtctccatcacaagttttgtgagggcagaaaccattcttgctgtgttttgctcatgtggcacaaagtgtcgatacctatccctacaattattgaatgaatgagaacattttcccccaatcataaaagtcaaccatgttcaccataaaagttttggaaacagtattaagaataaaataaaagtaacmtgcgatcctaccactcaagctgtctgacaatcacagcctacattttgagtttatttatttattgagacaaggcctggctctattgcctgggctggagtgcagtggtgccatcccagctcactgcaacctctgcctcctaggctcaagccacccttccatcgcagccactcgagtagctgggactacaggcatgaaccgccatgcctggctaatttttttggtattttttgtagtgatgaggtttcatcatgctgcccaagctggtctcgaactcatgagctcaaccaatctgcttgccttggc

SEQ ID NO: 331820 - DNA, 562 bp, Homo sapiens
ctgaccactctacttaacattgccatctgtccccatttccatcatgctcatttctttctttctttttgaaacagggtctttctctattgcccaggataaagtacagtggtgcagtcacagctcacagcaacctcaacctctcaggcttaaacaatcctcctgccttggcctccctaggagctgacacgcctggctaatttttttcaacttttttttttttttttttttgagacagagtctcrctgtcacccaggctggagtacagtgatgtgatctcggttcactgaaacttccacctcctgggttcaaatgattctcctgcctcagcctcccgagtagctgggactacatacaggtgcccgctaccatgcccagctaatttttgtttttttagtagagacggagtttcactacgttgttcaggttggtcttgaacccctgaactcaagtgatccaccgccttggcctcccaaagttatgggattacaggctgagacactgcatctggccccaaccacattttttgaggcttggaactttcagcctcactcgctgaactcca

SEQ ID NO: 331821 - DNA, 579 bp, Homo sapiens
gggcatggaagtgccccttttcccacttaccttaccctgtgcatctctttcattggctgttcctgagatgcagcctttacattgagccagtaatagaaaataaactggccagatgtggtcgctcatgccaataatcccagcactttcccagatctttttaccttggcctccaaggtggctgggacaacaggcatgcattagtgtaccatcatacctggctattttttttatttttagtagaaacaaggtctcaccatgttycccaggcttgtttcaaacttctgggctcaagcaatccttttgcctcagcatctcaaagtgctggggttacaggtgtgggccatggcccagcctggaaccatgctacttgtacagtctgcagaactgtgagccaaataaaccttttttctttataaactacctagcctcaggtgtttccttatagcaatggaaaatggactaatataggaggaatcgtatgtcaacacttaccagactgtgatgagcacaatgacaggagtatagagagggactgaaacgctcccaaggggcttctcgttgcatcatagagagtgaggt

SEQ ID NO: 331822 - DNA, 574 bp, Homo sapiens
ccaaggtggctgggacaacaggcatgcattagtgtaccatcatacctggctattttttttatttttagtagaaacaaggtctcaccatgttccccagkcttgtttcaaacttctgggctcaagcaatccttttgcctcagcatctcaaagtgctggggttacaggtgtgggccatggcccagcctggaaccatgctacttgtacagtctgcagaactgtgagccaaataaaccttttttctttataaactacctagcctcaggtgtttccttatagcaatggaaaatggactaatataggaggaatcgtatgtcaacacttaccagactgtgatgagcacaatgacaggagtatagagagggactgaaacgctcccaaggggcttctcgttgcatcatagagagtgaggtgagacatctcagctgaggctaaagatgagcaaagatgagagtgaaagagtgatgatgggggtagggagagggtttcctcaaggaccagtaaagtcccggaaggaaactgacattccatgtggctggagggtaggtgaattcaactgtcattgcaattcagcaac

SEQ ID NO: 331823 - DNA, 579 bp, Homo sapiens
gggcatggaagtgccccttttcccacttaccttaccctgtgcatctctttcattggctgttcctgagatgcagcctttacattgagccagtaatagaaaataaactggccagatgtggtcgctcatgccaataatcccagcactttcccagatctttttaccttggcctccaaggtggctgggacaacaggcatgcattagtgtaccatcatacctggctattttttttatttttagtagaaacaaggtctcaccatgttccccaggcttgtttcaaamttctgggctcaagcaatccttttgcctcagcatctcaaagtgctggggttacaggtgtgggccatggcccagcctggaaccatgctacttgtacagtctgcagaactgtgagccaaataaaccttttttctttataaactacctagcctcaggtgtttccttatagcaatggaaaatggactaatataggaggaatcgtatgtcaacacttaccagactgtgatgagcacaatgacaggagtatagagagggactgaaacgctcccaaggggcttctcgttgcatcatagagagtgaggt

SEQ ID NO: 331824 - DNA, 579 bp, Homo sapiens
gggcatggaagtgccccttttcccacttaccttaccctgtgcatctctttcattggctgttcctgagatgcagcctttacattgagccagtaatagaaaataaactggccagatgtggtcgctcatgccaataatcccagcactttcccagatctttttaccttggcctccaaggtggctgggacaacaggcatgcattagtgtaccatcatacctggctattttttttatttttagtagaaacaaggtctcaccatgttccccaggcttgtttcaaacttctgggctcaagcaatccttttgcctcagcatctcaaagtgctggggttacaggtgtgggccatggcccagcctggaaccatgctacttgtacagtctgcagaactgtgagccaaataaacyttttttctttataaactacctagcctcaggtgtttccttatagcaatggaaaatggactaatataggaggaatcgtatgtcaacacttaccagactgtgatgagcacaatgacaggagtatagagagggactgaaacgctcccaaggggcttctcgttgcatcatagagagtgaggt

SEQ ID NO: 331825 - DNA, 579 bp, Homo sapiens
gggcatggaagtgccccttttcccacttaccttaccctgtgcatctctttcattggctgttcctgagatgcagcctttacattgagccagtaatagaaaataaactggccagatgtggtcgctcatgccaataatcccagcactttcccagatctttttaccttggcctccaaggtggctgggacaacaggcatgcattagtgtaccatcatacctggctattttttttatttttagtagaaacaaggtctcaccatgttccccaggcttgtttcaaacttctgggctcaagcaatccttttgcctcagcatctcaaagtgctggggttacaggtgtgggccatggcccagcctggaaccatgctacttgtacagtctgcagaactgtgagccaaataaaccttttttctttataaactacctagcctcaggtgtttccttatagcaatggaaaatggactaatataggaggaatcgtatgtcaacacttaccagactgtgatgagcacaatgacaggagtatagagwgggactgaaacgctcccaaggggcttctcgttgcatcatagagagtgaggt

SEQ ID NO: 331826 - DNA, 435 bp, Homo sapiens
ggaattgtgtttgggctatcatggaagctctctggatcttagaccgcaacttatgctgagaggtaaagacttgaactttttgtttktctctctgtaagtgctcaagtgcagcggtccccaatttttttggcaccagggactggttttgtggaagacaatttttccacagactgggggcagcaggtcagttttggaatatttcaagtaaattacatttattgtgtacgttatttctattattattatattgtagtatgtaatgaaataattatgtaactcaccataatgtagaatcagtgggagtcctgagcttgtttttctgcaactagatggtcccatctgggggtgatgtgagacagtcatagattatcaggcattagattctcataagaacagagcaaggtagatccctcacatgcacagttcacaatagga

SEQ ID NO: 331827 - DNA, 626 bp, Homo sapiens
cagaactggccatggactgtggctacgagggctgaaactgagtacagctgaagtgcccgcctctctgggcatgaatgggcatctctccccaggtctctgaatgggcaggaccacttctggaccatggctgggaggatttggagacgggtagagtcacttttgaattgtaagtggggtcaagttgagtggaccatttactggtgtgtagccaaagccagaggtcctcaactttgccacctaaatgaggatcagccttctcaaaatgactcccgttggtcttaggcttgagcagggtttcaccaccttctttctgaatctcaaaattagtatacagcctatttttttgagacatggtctcactataattacccaggctggtctcaaactcctggcatgaattgatccttgtgcctcagcctaccaagtagctgggattacaggtgtgagccagaatgtctgtcaagataatggactccctgtatcacttcttgtaggtgtgttctagaggcggcagacaccttcaacttttgtttattttagaaagtctttattttttctttatttttgaagtaaattttccccaggtcaagtcctcttgtttgwtagtattttatttttaatcactt

SEQ ID NO: 331828 - DNA, 598 bp, Homo sapiens
gacttcaataataaactgttcagtgcataatgtcagacaaatgttgtatctgaaaagtaggacaaatattgttcttttagttctgtctacccataaacscaatacttacatgtatttataatgggttaataaaaagaaaatgagtttattgttctagagagtattagaattttgacaacatgaattctcctgtcctggaacataattaaaagtaagaggaatattatttcatgtgaaaggtaccgttaaaaaaatcattgttaagcattaaataattatttcacataatcttctaatctgacttaagactgaagacctaccacctgaagctggtttatcaagttgtaagtcttcacatgttgaattcgcaagttcatgtttgaaaggtgagaataaatacttaatattcactaggcaatattcagcaaagtaatattcactggtgcatattttacatttcataaccaagggtggctttgaaaaaaaaaaaagacaggctggtcatggtggctcatgcctgtaatccaacactttggaaggctgaggcagacagatcaggaagtcaggaattcaagaccagcctggccaacaaggtgaa

SEQ ID NO: 331829 - DNA, 598 bp, Homo sapiens
gacttcaataataaactgttcagtgcataatgtcagacaaatgttgtatctgaaaagtaggacaaatattgttcttttagttctgtctacccataaacccaatacttacatgtatttataatgggttaataaaaagaaaatgagtttattgttctagagagtattagaattttgacaacatgaattctcctgtcctggaacataattaaaagtaagaggaatattatttcatgtgaaaggtaccgttaaaaaaatcattgttaagcattaaataattatttcacataatcttctaatctgacttaagactgaagacctaccacctgaagctggtttatcaagttgtaagtcttcacatgttgaattcgcaagttcatgtttgaaaggtgagaataaatacttaatattcactaggcaatattcagcaaagtaatattcactggtgcatattttacatttcataaccaagggtggctttgaaaaaaaaaaaagacaggctggtcayggtggctcatgcctgtaatccaacactttggaaggctgaggcagacagatcaggaagtcaggaattcaagaccagcctggccaacaaggtgaa

SEQ ID NO: 331830 - DNA, 618 bp, Homo sapiens
gcaactagactgtccatctggggtgatgggagacagtcaccccaggcattagatcatcaggcattagattctcataaggagcaygaaacctagatccctcacatgcacataacagggtttgtgctcctaggagaatctaatgctgctgctgatgtgacaggacatcatgcttaggtggtcatgcaagtgatgggagggctagaaatacagatgaagttttccctcactcgcctactgttcacctccggctctgtggccctgtggttggagacccctgctaaagtgcatctgaaaggatccatcccatgcccttcttcagagtcatatttactgccacagtgttcaagtgtagcactcctaagctcgcagggcctatggctcagctggcatttcatcacaatcaacagtaagtggtagcttgagtcattgtgaggtcacttcctggaaatgaccagcatcccatgtcccattggaaagcagctgagcactgctccttggataaccaaacctatgcccaaatcccatctgtgtgcgtctatctcctggaatccttcctatcatcaattctgtatttgtaggagtccaatcaggagacacaaaccactcaaaagtttaaac

SEQ ID NO: 331831 - DNA, 618 bp, Homo sapiens
gcaactagactgtccatctggggtgatgggagacagtcaccccaggcattagatcatcaggcattagattctcataaggagcacgaaacctagatccctcacatgcacataacagggttygtgctcctaggagaatctaatgctgctgctgatgtgacaggacatcatgcttaggtggtcatgcaagtgatgggagggctagaaatacagatgaagttttccctcactcgcctactgttcacctccggctctgtggccctgtggttggagacccctgctaaagtgcatctgaaaggatccatcccatgcccttcttcagagtcatatttactgccacagtgttcaagtgtagcactcctaagctcgcagggcctatggctcagctggcatttcatcacaatcaacagtaagtggtagcttgagtcattgtgaggtcacttcctggaaatgaccagcatcccatgtcccattggaaagcagctgagcactgctccttggataaccaaacctatgcccaaatcccatctgtgtgcgtctatctcctggaatccttcctatcatcaattctgtatttgtaggagtccaatcaggagacacaaaccactcaaaagtttaaac

SEQ ID NO: 331832 - DNA, 618 bp, Homo sapiens
gcaactagactgtccatctggggtgatgggagacagtcaccccaggcattagatcatcaggcattagattctcataaggagcacgaaacctagatccctcacatgcacataacagggtttgtgctcctaggagaatctaatgctgctgctgatrtgacaggacatcatgcttaggtggtcatgcaagtgatgggagggctagaaatacagatgaagttttccctcactcgcctactgttcacctccggctctgtggccctgtggttggagacccctgctaaagtgcatctgaaaggatccatcccatgcccttcttcagagtcatatttactgccacagtgttcaagtgtagcactcctaagctcgcagggcctatggctcagctggcatttcatcacaatcaacagtaagtggtagcttgagtcattgtgaggtcacttcctggaaatgaccagcatcccatgtcccattggaaagcagctgagcactgctccttggataaccaaacctatgcccaaatcccatctgtgtgcgtctatctcctggaatccttcctatcatcaattctgtatttgtaggagtccaatcaggagacacaaaccactcaaaagtttaaac

SEQ ID NO: 331833 - DNA, 530 bp, Homo sapiens
ctaaaaacattttgtacatgtttggtggacctactcattttctgttggaattgagtggaactgctgggkcataggatgtatatttgttttgttttggtatatattgcattttccggaatgattgtaacagcttacactcctatcagcagtataataggttcctctcctatcttccttccttcctccctccctccctctctccctctctctcatgattcttcatcattcaacttgagcccttgcatacagaaaaaatgttgatgaatttgcataaaaaccgacaagctgctgggcttggtggctcacgcctgtaatcccagcactttgagaggctgaggcaggtggatcacttgaggccaggagttcgagaccagcctggccaacatggtgaaactccatgtctactaaaaataccaaaattagctgggtgtggtggtacatgcctgtaatcccagctacttaggaggctgaggcaggagaatcgcttgaacctgggaggcagaggttgcagtgagccgagatcatgccac

SEQ ID NO: 331834 - DNA, 530 bp, Homo sapiens
ctaaaaacattttgtacatgtttggtggacctactcattttctgttggaattgagtggaactgctggggcataggatgtatatttgttttgttttggtatatattgcattttccggaatgattgtaacagcttacactcctatcagcagtataataggttcctctcctatcttccttccttcctccctccctccctctctccctctctctcatgattcttcatcattcaacttgagcccttgcatacagaaaaaatgttgatgaatttgcataaaaaccgacaagctgctgggcttggtggctcacgcctgtaatcccagcactttgagaggctgaggcaggtggatcacttgaggccaggagttcgagaccagcctggccaacatggtgaaactccatstctactaaaaataccaaaattagctgggtgtggtggtacatgcctgtaatcccagctacttaggaggctgaggcaggagaatcgcttgaacctgggaggcagaggttgcagtgagccgagatcatgccac

SEQ ID NO: 331835 - DNA, 530 bp, Homo sapiens
ctaaaaacattttgtacatgtttggtggacctactcattttctgttggaattgagtggaactgctggggcataggatgtatatttgttttgttttggtatatattgcattttccggaatgattgtaacagcttacactcctatcagcagtataataggttcctctcctatcttccttccttcctccctccctccctctctccctctctctcatgattcttcatcattcaacttgagcccttgcatacagaaaaaatgttgatgaatttgcataaaaaccgacaagctgctgggcttggtggctcacgcctgtaatcccagcactttgagaggctgaggcaggtggatcacttgaggccaggagttcgagaccagcctggccaacatggtgaaactccatgtctactaaaaataccaaaattagctgggtgtggtggtacatgcctgtaatcccagctacttrggaggctgaggcaggagaatcgcttgaacctgggaggcagaggttgcagtgagccgagatcatgccac

SEQ ID NO: 331836 - DNA, 523 bp, Homo sapiens
gttcaagaccagcctggccaacatggtgaaaccccgtctctactaaaaatacaaaaaaaaattagccaggtgtggtggcatgcacctgtaatcccagctactcaggaggctgaggcaggagaatcgcttgaacctgggagtcagatgttgcagtgagctgagatcgtgccactgcactccagcccaggtaacagagcaagactccatctcaaaaaaaaaaaaaaaaaaaaaagactttaagacaaaagtwgttactagggcaaataaggacattttacgatgataaaaggatcaattcatcaagaagatatggcaattataaacacttaggcacctaataacagagttctgaaatacctgaggcaaaaaactgagaaaatataggacaaaaatagatttaccaataaaagtgggagatgtgattacccactttcaataatgaatagaacaaccaggcagaagatcaaagaagcaaagaaataggaactggaagagctttgcaaaccacctaaaactctctacc

SEQ ID NO: 331837 - DNA, 523 bp, Homo sapiens
gttcaagaccagcctggccaacatggtgaaaccccgtctctactaaaaatacaaaaaaaaattagccaggtgtggtggcatgcacctgtaatcccagctactcaggaggctgaggcaggagaatcgcttgaacctgggagtcagatgttgcagtgagctgagatcgtgccactgcactccagcccaggtaacagagcaagactccatctcaaaaaaaaaaaaaaaaaaaaaagactttaagacaaaagtagttactagggcaaataaggacattttacgatgataaaaggatcaattcatcaagaagatatggcaattataaacacttaggcacctaataacagagttctgaaatacctgaggcaaaaaactgagaaaatataggasaaaaatagatttaccaataaaagtgggagatgtgattacccactttcaataatgaatagaacaaccaggcagaagatcaaagaagcaaagaaataggaactggaagagctttgcaaaccacctaaaactctctacc

SEQ ID NO: 331838 - DNA, 545 bp, Homo sapiens
aatgaattttttagaagctgataagctagcaactgagcctaaccagccactcaccttcattattcagtgcccttttattcttgtctatttctccaccaacttggctacactcacaaagtggtaaaaacttgcatttcttttctttcctttttagagacagagttttgctctgttacccaggctgcagtacagtgacatgatcatgggtcactgtagcttcaaactcctgggctcaagcartcctcccatgtcagtctcccaggtagctgggactacagacatgtgccaccatgcccagctaatttttttatttttttatcatagagacgggatcttgctaggttgctcagactgggctcaaacttctgacctcaagtgatcctcctgcctcagcctcccaaagagctgggattacaggcaggcatgactacctgtgcccagccccttattattattatttaaaataatagctttattaaaatataattcacataccattcactttatttattgaaatctgcaattcagtaggttttagagtattc

SEQ ID NO: 331839 - DNA, 574 bp, Homo sapiens
aattacctaggggagccttaagacatactcatactaagccgggcaygatggcttacacctgtaatgccagcacttagccaaagtgggcagatcacctgaggttgggagttcaagaccagcctgaccaacatggagaaaccccatgtctactaaaaatacaaaattagccggatgtggtggcgcatgcctgtaattccagctactcgggagcctgaggcaggagaattgcttgaacccgggaggcagaggttgcagtgaggtgagattgtgccattgcactccagcctgggaaacaagagcaaaactccacctcaaaaaaaaaaaaaaaaaagacatactagacattctgagtatcccaggaagtctgcctggtagaggaagtggagccacatcagagagaggctgtgtgagtgcctcatgagagcaggagcctaagagatgaacagaatgccctagagagcatggcccacatcagatgagggttcaatgctggaatttctctaataaactcccatctcaaccctaatctcactgaggaagaactggagtctaggcatctgctctctgaagagca

SEQ ID NO: 331840 - DNA, 574 bp, Homo sapiens
aattacctaggggagccttaagacatactcatactaagccgggcatgatggcttacacctgtaatgccagcacttagccaaagtgggcagatcacctgaggttgggagttcaagaccagcctgaccaacatggagaaaccccatgtctactaaaaatacaaaattagccggatgtggtggcgcatgcctgtaattccagctactcgggagcctgaggcaggagaattgcttgaacccgggaggcagaggttgcagtgaggtgagattgtrccattgcactccagcctgggaaacaagagcaaaactccacctcaaaaaaaaaaaaaaaaaagacatactagacattctgagtatcccaggaagtctgcctggtagaggaagtggagccacatcagagagaggctgtgtgagtgcctcatgagagcaggagcctaagagatgaacagaatgccctagagagcatggcccacatcagatgagggttcaatgctggaatttctctaataaactcccatctcaaccctaatctcactgaggaagaactggagtctaggcatctgctctctgaagagca

SEQ ID NO: 331841 - DNA, 574 bp, Homo sapiens
aattacctaggggagccttaagacatactcatactaagccgggcatgatggcttacacctgtaatgccagcacttagccaaagtgggcagatcacctgaggttgggagttcaagaccagcctgaccaacatggagaaaccccatgtctactaaaaatacaaaattagccggatgtggtggcgcatgcctgtaattccagctactcgggagcctgaggcaggagaattgcttgaacccgggaggcagaggttgcagtgaggtgagattgtgccattgcactccagcctgggaaacaagagcaaaactccacctcaaaaaaaaaaaaaaaaaagacatactagacattctgagtatcccaggaagtctgcctggtagaggaagtggagccacatcagagagaggctgtgtgagtgcctcatgagagcaggagcctaagagatgaacagaatgccctagagagcatggcccacatcagatgagggttcaatgctggaatttctctaataaactcccatctcaaycctaatctcactgaggaagaactggagtctaggcatctgctctctgaagagca

SEQ ID NO: 331842 - DNA, 405 bp, Homo sapiens
aggatcaggtgtggtgtctcacacctgtaatcctagcactttggaaggctaagacaggaggattgcttgaggccagaaattcgagaccagtctggacaacatagtgagaccccatctctacgaatctaaaaatgaaaataaaagtatctgggtgtcatggtgcacacctgtattcccagctacttgggaggctgaagtgggatgatcactrgaggccagaagttggaggctgcaatgagctataattgcaccactgcactccatcctgggtgacagagcaagaccccaactctaaaaaaaaaaactaaaaataaaaaaaaaaacaaaaaataaaaacctctgatcaaattggctctcaggtcaaaacccactgctgctttccactgagaataaagctgaagttag

SEQ ID NO: 331843 - DNA, 541 bp, Homo sapiens
agtgcatgcctgtagtcccagctacttgggaggctgaggtggaagggtgacttgagcctggaagtttgaggctgccatgagctcygatcatgccattggactccagcctgggtgacaaagagagacactgtctcagacaaaaagaaaaaaaaaagtctttgcagatatgattaatttaaggttgtttgagataaggagattgtcctgggttagccaggtatggcctaaatgcaatcacgagtatccttatcagaagaaaacagagggacaattacacacagaagagacagagtcagtgtgaccaacaggagcagagattgagtgatgcagccacaagccaaggaaagcctgcacccacagaagctggaagaggccaggaatggataatctccagagcaccggaaggagctcagccctgctgacccattgatttctgccgagtgctaccgaattcagacttctagactctagaactgttagaaaattcatttctgttgttttaagctactaagtttgtggtcacttgttacagcagccacag

SEQ ID NO: 331844 - DNA, 541 bp, Homo sapiens
agtgcatgcctgtagtcccagctacttgggaggctgaggtggaagggtgacttgagcctggaagtttgaggctgccatgagctctgatcatgccattggactccagcctgggtgacaaagagagacactgtctcagacaaaaagaaaaaaaaaagtctttgcagatatgattaatttaaggttgtttgagataaggagattgtcctgggttagccaggtatggcctaaatgcaatcacragtatccttatcagaagaaaacagagggacaattacacacagaagagacagagtcagtgtgaccaacaggagcagagattgagtgatgcagccacaagccaaggaaagcctgcacccacagaagctggaagaggccaggaatggataatctccagagcaccggaaggagctcagccctgctgacccattgatttctgccgagtgctaccgaattcagacttctagactctagaactgttagaaaattcatttctgttgttttaagctactaagtttgtggtcacttgttacagcagccacag

SEQ ID NO: 331845 - DNA, 541 bp, Homo sapiens
agtgcatgcctgtagtcccagctacttgggaggctgaggtggaagggtgacttgagcctggaagtttgaggctgccatgagctctgatcatgccattggactccagcctgggtgacaaagagagacactgtctcagacaaaaagaaaaaaaaaagtctttgcagatatgattaatttaaggttgtttgagataaggagattgtcctgggttagccaggtatggcctaaatgcaatcacgagtrtccttatcagaagaaaacagagggacaattacacacagaagagacagagtcagtgtgaccaacaggagcagagattgagtgatgcagccacaagccaaggaaagcctgcacccacagaagctggaagaggccaggaatggataatctccagagcaccggaaggagctcagccctgctgacccattgatttctgccgagtgctaccgaattcagacttctagactctagaactgttagaaaattcatttctgttgttttaagctactaagtttgtggtcacttgttacagcagccacag

SEQ ID NO: 331846 - DNA, 541 bp, Homo sapiens
agtgcatgcctgtagtcccagctacttgggaggctgaggtggaagggtgacttgagcctggaagtttgaggctgccatgagctctgatcatgccattggactccagcctgggtgacaaagagagacactgtctcagacaaaaagaaaaaaaaaagtctttgcagatatgattaatttaaggttgtttgagataaggagattgtcctgggttagccaggtatggcctaaatgcaatcacgagtatccttatcagaagaaaacagagggacaattacacacagaagagacagagtcagtgtgaccaacaggagcagagattgagtgatgcagccacaagccaaggaaagcctgcacccacagaagctggaagaggccaggaatggataatctccagagcaccggaaggagctcagccctgctgacmcattgatttctgccgagtgctaccgaattcagacttctagactctagaactgttagaaaattcatttctgttgttttaagctactaagtttgtggtcacttgttacagcagccacag

SEQ ID NO: 331847 - DNA, 220 bp, Homo sapiens
tctgttgttttaagctactaagtttgtggtcacttgttacagcagccacagggaactaatacactcccctctgcaaccctggaagagctatgcttcttaaaaagtagagacagggctgggcacagtrgctcatgtctgtaatctcagcactttgggaggctgagtggggcagatcgttcaaggtcagcagtttgagaccagcctggcaaacatggcgaaa

SEQ ID NO: 331848 - DNA, 220 bp, Homo sapiens
tctgttgttttaagctactaagtttgtggtcacttgttacagcagccacagggaactaatacactcccctctgcaaccctggaagagctatgcttcttaaaaagtagagacagggctgggcacagtagctcatgtctgtaatctcagcactttgggaggctgagtggrgcagatcgttcaaggtcagcagtttgagaccagcctggcaaacatggcgaaa

SEQ ID NO: 331849 - DNA, 220 bp, Homo sapiens
tctgttgttttaagctactaagtttgtggtcacttgttacagcagccacagggaactaatacactcccctctgcaaccctggaagagctatgcttcttaaaaagtagagacagggctgggcacagtagctcatgtctgtaatctcagcactttgggaggctgagtggggcagatcrttcaaggtcagcagtttgagaccagcctggcaaacatggcgaaa

SEQ ID NO: 331850 - DNA, 220 bp, Homo sapiens
tctgttgttttaagctactaagtttgtggtcacttgttacagcagccacagggaactaatacactcccctctgcaaccctggaagagctatgcttcttaaaaagtagagacagggctgggcacagtagctcatgtctgtaatctcagcactttgggaggctgagtggggcagatcgttcaaggtcagsagtttgagaccagcctggcaaacatggcgaaa

SEQ ID NO: 331851 - DNA, 592 bp, Homo sapiens
ctttgggagactccaccacctatctctggagttctgtgtacaactcctgcctctctggtactctgcgccacaaatgatggtgaccttccctccccgccaacccccaycttgtcctctcaattctaagataccaggctctatttggcttccccatccccgctctgtagcctgaaaagcagctccagataataaattggggaaaccgcagagctcagtaagtttgtttcccacctttcagtgaccacagtcttgcattgcctgttacctaattcctacaaattggtatttcgtatattgtccagttttctagttgcttaaaatagcaaggtaaatccagtccttgttattccatcactgctggacagaatatatactgtaaatcaagtaacagtttctcaattttgtatcttattgttatcgctgttttgagacagggtctcactctcgcccaggctggagtgcagtggctcatacctcactgcagcctcaaactcctgggctcaaggcatcctcccacataggcctcccaaagcgctgagattacaggcatttgccagccactacgccctcaatttagtatctaaaggcttag

SEQ ID NO: 331852 - DNA, 592 bp, Homo sapiens
ctttgggagactccaccacctatctctggagttctgtgtacaactcctgcctctctggtactctgcgccacaaatgatggtgaccttccctccccgccaacccccaccttgtcctctcaattctaagataccaggctctatttggcttccccatcccygctctgtagcctgaaaagcagctccagataataaattggggaaaccgcagagctcagtaagtttgtttcccacctttcagtgaccacagtcttgcattgcctgttacctaattcctacaaattggtatttcgtatattgtccagttttctagttgcttaaaatagcaaggtaaatccagtccttgttattccatcactgctggacagaatatatactgtaaatcaagtaacagtttctcaattttgtatcttattgttatcgctgttttgagacagggtctcactctcgcccaggctggagtgcagtggctcatacctcactgcagcctcaaactcctgggctcaaggcatcctcccacataggcctcccaaagcgctgagattacaggcatttgccagccactacgccctcaatttagtatctaaaggcttag

SEQ ID NO: 331853 - DNA, 592 bp, Homo sapiens
ctttgggagactccaccacctatctctggagttctgtgtacaactcctgcctctctggtactctgcgccacaaatgatggtgaccttccctccccgccaacccccaccttgtcctctcaattctaagataccaggctctatttggcttccccatccccgctctgtagcctgaaaagcagctccagataataaattggggaaaccgcagagctcagtaagtttgtttcccacctttcagtgaccacagtcttgcattgcctgttacctaattcctacaaattggtatttcgtatattgtccagttttctagttgcttaaaatagcaaggtaaatccagtccttgttattccatcactgctggacagaatatatactgtaaatcaagtaacagtttctcaattttgtatcttattgttatcgctgttttgagacagggtctcactctcgcccaggctggagtgcagtggctcatamctcactgcagcctcaaactcctgggctcaaggcatcctcccacataggcctcccaaagcgctgagattacaggcatttgccagccactacgccctcaatttagtatctaaaggcttag

SEQ ID NO: 331854 - DNA, 592 bp, Homo sapiens
ctttgggagactccaccacctatctctggagttctgtgtacaactcctgcctctctggtactctgcgccacaaatgatggtgaccttccctccccgccaacccccaccttgtcctctcaattctaagataccaggctctatttggcttccccatccccgctctgtagcctgaaaagcagctccagataataaattggggaaaccgcagagctcagtaagtttgtttcccacctttcagtgaccacagtcttgcattgcctgttacctaattcctacaaattggtatttcgtatattgtccagttttctagttgcttaaaatagcaaggtaaatccagtccttgttattccatcactgctggacagaatatatactgtaaatcaagtaacagtttctcaattttgtatcttattgttatcgctgttttgagacagggtctcactctcgcccaggctggagtgcagtggctcatacctcactgcagcctcaaactcctgggctcaaggcatcctcccacatargcctcccaaagcgctgagattacaggcatttgccagccactacgccctcaatttagtatctaaaggcttag

SEQ ID NO: 331855 - DNA, 567 bp, Homo sapiens
actgtctttcaggagctgggcctattcaagctgccgggaggcagaaggttgtgctggaaaacttgatgtgagaaagttttgggcctataaaggctgccaggagctgggyaggagctgagccgaaagaggttgttgtgaggtaggaggtgggcctggagatgcagccgggaggaagagctggacctggagaggcccacttgaggaagttctgggtctggagatgctgccaaaaggcaaaagctgggccagaatggccactgtgaggcataagcttgccctagagaggccattgaggcaggagtggggcctgtagaggctgctgaaaggcaggagcttggcctagggggctgcagtgaggcacatgctgggctgggaaaatctgctgtgaggcagacgttgagcctgtagaggctgacggaaggcacaagttgggcctggaatggcagacttgagaaagttctcggtctagagaagctgctgggatgcaggagctgtgcctggagaggccgacttgaggaagtttccggcacggacagcctgttggggggcaggagctgggcctggaga

SEQ ID NO: 331856 - DNA, 567 bp, Homo sapiens
actgtctttcaggagctgggcctattcaagctgccgggaggcagaaggttgtgctggaaaacttgatgtgagaaagttttgggcctataaaggctgccaggagctgggcaggagctgagccgaaagaggttgttgtgaggtaggaggtgggcctggagatgcagccgggaggaagagctggrcctggagaggcccacttgaggaagttctgggtctggagatgctgccaaaaggcaaaagctgggccagaatggccactgtgaggcataagcttgccctagagaggccattgaggcaggagtggggcctgtagaggctgctgaaaggcaggagcttggcctagggggctgcagtgaggcacatgctgggctgggaaaatctgctgtgaggcagacgttgagcctgtagaggctgacggaaggcacaagttgggcctggaatggcagacttgagaaagttctcggtctagagaagctgctgggatgcaggagctgtgcctggagaggccgacttgaggaagtttccggcacggacagcctgttggggggcaggagctgggcctggaga

SEQ ID NO: 331857 - DNA, 567 bp, Homo sapiens
actgtctttcaggagctgggcctattcaagctgccgggaggcagaaggttgtgctggaaaacttgatgtgagaaagttttgggcctataaaggctgccaggagctgggcaggagctgagccgaaagaggttgttgtgaggtaggaggtgggcctggagatgcagccgggaggaagagctggacctggagaggcccacttgaggaagttctgggtctggagatgctgccaaaaggcaaaasctgggccagaatggccactgtgaggcataagcttgccctagagaggccattgaggcaggagtggggcctgtagaggctgctgaaaggcaggagcttggcctagggggctgcagtgaggcacatgctgggctgggaaaatctgctgtgaggcagacgttgagcctgtagaggctgacggaaggcacaagttgggcctggaatggcagacttgagaaagttctcggtctagagaagctgctgggatgcaggagctgtgcctggagaggccgacttgaggaagtttccggcacggacagcctgttggggggcaggagctgggcctggaga

SEQ ID NO: 331858 - DNA, 567 bp, Homo sapiens
actgtctttcaggagctgggcctattcaagctgccgggaggcagaaggttgtgctggaaaacttgatgtgagaaagttttgggcctataaaggctgccaggagctgggcaggagctgagccgaaagaggttgttgtgaggtaggaggtgggcctggagatgcagccgggaggaagagctggacctggagaggcccacttgaggaagttctgggtctggagatgctgccaaaaggcaaaagctgggccagaatggccactgtgaggcataagcttgccctagagaggccattgaggcaggagtggggcctgtagaggctgctgaaaggcaggagcttggcctagggggctgcagtgaggcacatgctgggctgggaaaatctgctgtgaggcagacgttgagcctgtagaggctgacggaaggcacaagttgggcctggaatggcagwcttgagaaagttctcggtctagagaagctgctgggatgcaggagctgtgcctggagaggccgacttgaggaagtttccggcacggacagcctgttggggggcaggagctgggcctggaga

SEQ ID NO: 331859 - DNA, 572 bp, Homo sapiens
aatgaacaagctatgttttttatttctatcttactaattttgaggttaaaatggccacatcactgtgtacctggctagctcctactccaaaaggaagtaaaagaaacagctactaccagatcagtgtaatcaaggtaaaatatcacaagcaaaaataatacaatcttgggtagtgtagaagggagaaggaagatgagaaaatgattatactaaataactaggtttaagaggaacaattgcaattcatcaaaaagtacttcttcttagttctgagtttcttctcaacccagaaaataaaggaaaaatgaaaaatgacaaggacttcattacttagtaaaaagaaacataccatattgccaaaagattattattattattttttgaaatggagtcttgctcttgttgcccaggctggagtgcaatggcgtgatctcagctcactgcaacctcctccttctgggttcaagygattctcctgcctcacagttgcctaccaccatgcctggctaatttttttttgtatttttagtagagacggggtttcaccatgttggccaggctggtcttgaacc

SEQ ID NO: 331860 - DNA, 529 bp, Homo sapiens
catggtgcaaggtgttgaggaaaggcagagaagacacagtccctgctctagaggagtttgtggtcaagtttatcaaaagtctgtagagtaactgcatcaaggtcacacagcgcactcctcctgttcactaccaagttgttctgatgaagtgaatgtagctctgtgtggggacacagaaggaaaaaagtatataaaaaagtaatatatggctgggtgcggtggctcatgcctataatcccagcactctgggaggctgaggcgggcggatcacgaggtcaggagatcgagaccatcctggctcacacagtgaaaccccatctctactaaagatacaaaaaattagccaggcgtagtggtgggcacctgtaatgctagctacttgggaggctgaggcaggagaatggtgtgaacccaggaggtggagcttgcagtgagtggagattgcacctccagcctgggcaacagagcaagacttygtctccatgcccagctaatacaaaaaattagccgggcatggtggtgggcacct

SEQ ID NO: 331861 - DNA, 606 bp, Homo sapiens
atgcactggcaaccaaagcaaaaatggacaaatgggatctcaccaagttaaaaagcttctgcacagcaaagaaacattatcgaagtgaagagacaatctgcaaaatgggagaaaatatttgcaaactgtccacctgacaagggattaataaccagaatatataaggagctcaaaacaataggaaaagatataataattcaattaaaaatgagtgaaagatcggaatagacatttctcaaaagaagacatacaaagagcaaacagataaatgaaaaggtgctcaacatcattgatcatcagagaaatgcaaatcaaaactacaatgagatatcatctcactccagtgatccaaaagacaggcaataacaagtgctggtgaggacatggagaaaarggaaccctcatacactattggtgggaatgtaaattaatacaactactatggagaacaattggaggttcctcaaaaaactgaaaatagagctactatttaatccagcaatcgcactgctaggtgtatacacaaaagaaaggaaatcagtacatcaaagagatctctgcactccatgtttattgcagcactatttgtaatagccaagatttgga

SEQ ID NO: 331862 - DNA, 606 bp, Homo sapiens
atgcactggcaaccaaagcaaaaatggacaaatgggatctcaccaagttaaaaagcttctgcacagcaaagaaacattatcgaagtgaagagacaatctgcaaaatgggagaaaatatttgcaaactgtccacctgacaagggattaataaccagaatatataaggagctcaaaacaataggaaaagatataataattcaattaaaaatgagtgaaagatcggaatagacatttctcaaaagaagacatacaaagagcaaacagataaatgaaaaggtgctcaacatcattgatcatcagagaaatgcaaatcaaaactacaatgagatatcatctcactccagtgatccaaaagacaggcaataacaagtgctggtgaggacatggagaaaagggaaccctcatacactattggtgggaatgtaaattaatacaactactatggagaacaattggaggttcctcaaaaaactgaaaatagagctactatttaatccagcaatcgcrctgctaggtgtatacacaaaagaaaggaaatcagtacatcaaagagatctctgcactccatgtttattgcagcactatttgtaatagccaagatttgga

SEQ ID NO: 331863 - DNA, 582 bp, Homo sapiens
tcccctttgccagtgactggtttaagggaaggcaagggatccagttccaaccaatcagatgcaaggagaagtctgcttgaatcttctgctaaggatttcactttcttgttaaaagacagacgygtggcttgcaatgctatttaatactttcttttccttccattttcaacgtagaagtgatgcttgaaaccacagcagccattttggggccacgaggcaataagcacaaggataaaaagccaagaaccaaagatggagaatcaagggtgtaatgaacctagatgatatgatatgacagagtcctgaactgctagacttcttactaggtgagatgagtaaatgtattcattgcttaaatcactcgtaatttggatttctgttaattgcaactaaaagcattcttatctaatattccttattgttgaatagcatttctttctgaagtgccatactgcaaccttcctgatagcccaggatctctgctaaggtaccactgaagatcatggtattagctggacttaatgcatggtttcatcaatgaatacttgcattttaacaaataattcctggagacaaaggcat

SEQ ID NO: 331864 - DNA, 582 bp, Homo sapiens
tcccctttgccagtgactggtttaagggaaggcaagggatccagttccaaccaatcagatgcaaggagaagtctgcttgaatcttctgctaaggatttcactttcttgttaaaagacagacgcgtggcttgcaatgctatttaatactttcttttccttccattttcaacgtagaagtgatgcttgaaaccacagcagccattttggggccacgaggcaataagcacaaggataaaaagccaagaaccaaagatggagaatcaagggtgtaatgaacctagatgatatgatatgacagagtcctgaactgctagacttcttactaggtgagatgagtaaatgtattcattgcttaaatcactcgtaatttggatttctgttaattgcaactaaaagcattcttatctaatattccttattgttgaatagcatttctttctgaartgccatactgcaaccttcctgatagcccaggatctctgctaaggtaccactgaagatcatggtattagctggacttaatgcatggtttcatcaatgaatacttgcattttaacaaataattcctggagacaaaggcat

SEQ ID NO: 331865 - DNA, 225 bp, Homo sapiens
cagggccttgctgctttgtgcagtctcagggctttgtgccctgtgtcctagccatggctaaaaggagccaatgtacagctcaggctattgcttcagaggrtgcaagccttggcagcttccaagtggcgttgcacctgcaggtgcacagaagtcaaggattgaggtttgggaacctccacctagatttcaaagaatgtatggaaatatctggatgcctaggcagaa

SEQ ID NO: 331866 - DNA, 538 bp, Homo sapiens
gggtcagtaaaatttttaaggcaattttaagaaggaatgtggaaatgcatcattgaggccagaagcggtggctcatgcttgtaatcccagcattttaggaggctgagggaggaaaatcacttgagcccaggagtttgagaccagcctggccaacatggtgaagccccatgtctactaaaaatacaaaaaattaaccagtcrtggtggtgcacatctgtagtcccagctactcgggaggctgaggtaggagggtcatctgagcccaggaagttgaggctgcggtgaactgtgattgcaccactaaactccagcctgggcgatgggagtcagactctgtctccaggaaaaaaaaaaaaaacaagaaagaaagaaaaaaaaatgcatcagtgatgaagaaaaaacagagttcagaaaaggaaggcacccctgggagaccagctgacagaatgcagccactacagggtgtcagggataactcaaagctcagggactgcagggcaatagacttgttcagtctctgacatttgagccagccacc

SEQ ID NO: 331867 - DNA, 463 bp, Homo sapiens
aagatagatcagaaatgtactgtgtagctgmggcatatcatctgggaacttcaaattaattatgggtaataacagtaaaaaaaaaatcagtcattgactggagatcatttatttctccttttcctttcttgtaaccacagagaaatacatattgaaaattacattttctattcaattatacctaaaagtgttatgcctagttgagtgcttagtctatactcagagagaacaattagaaacttgtgtctacaattacttaatttaatatttcattgcatgccagtgctttaaaaagggagttccatctcaggcattgttaaaatgaagcttagcataattaaaagacaggatgcccctgaaaagttacactgatgtttaaaaaaattgttaatatcaactaatgatgacattaatttagtaaaaatatgcacaagaaaaatcttttactacaaactaacaatta

SEQ ID NO: 331868 - DNA, 496 bp, Homo sapiens
tattgaccctattttaactgataaaagagctaatttttcagattttaagtaacttgacctagattacaaatccgtgaaatgtccaagatgtcatgctcctcttctgttgtgatatagatcacttttctatatttctcctgaaaataaaagccatatgttcatagtgatgacactgkgcttcattatataaattaacgaagaaaagacatcctctctagaacatgaaagtcaccaacactttccctctattatccaaaaagacagaacttttgcctggggagccattcattgtcatacaagtgcttcttccctttcattcaaggtgcaggaagaaaatggttggaattagtaagtactgaaaagtaggatgttggtaaaaccaaaaaaaaaaaaagactgataaaagcgcatttcattattctctagagagagttgacgcatctttggaagggacgaatggcagagattgtcagaaatgaggagaggagagttgctc

SEQ ID NO: 331869 - DNA, 567 bp, Homo sapiens
tcatggatgttattgagtctcatttctcatacctttttcataaactattttatgcctcagtctctttgcaggttctcctcctccttgcccaggatgctagcctctattctgatattccaatgataaacacttgcrcattttcaaggtacatgaacgtcacatttctaagtatcctgcctgatactccactctcaggtagagtattgtttcttacattataccgatttaaacatttatatatttaactcccatattagcctatcagctacttgatatgggagatattatctagctcattattgtatcattatctgttacagttccaggtgtatgatagctatgccacagacatttcataaagggtacttacttggtattttgtaatctctttaacatacactcttcactaaggcttacagaacaagtctagaattctttttgcaggggaggtcatagtagctaattcttctagttgatcatcttctgttttctaattgttttacatattgataaacctaatataattaacacattacattttctggctgcagaaatagattcaggaat

SEQ ID NO: 331870 - DNA, 567 bp, Homo sapiens
tcatggatgttattgagtctcatttctcatacctttttcataaactattttatgcctcagtctctttgcaggttctcctcctccttgcccaggatgctagcctctattctgatattccaatgataaacacttgcgcattttcaaggtacatgaacgtcacatttctaagtatcctgcctgatactccactctcaggtagagtattgtttcttacattataccgatttaaacatttatatatttaactcccatattagcctatcagctacttgatatgggagatattatctagctcattattgtatcattatctgttacagttccaggtgtatgatagctatgccacagayatttcataaagggtacttacttggtattttgtaatctctttaacatacactcttcactaaggcttacagaacaagtctagaattctttttgcaggggaggtcatagtagctaattcttctagttgatcatcttctgttttctaattgttttacatattgataaacctaatataattaacacattacattttctggctgcagaaatagattcaggaat

SEQ ID NO: 331871 - DNA, 604 bp, Homo sapiens
gaataaaccatcagttaatcttatctacagtagccccccccatcccccggcttatctttaggggatacattccaagactcccagtggatggttgaaaccatgaatagtaactgaggcttaaatataataagtttttttctatacatacacacctatgataaagcaaaattagagaaactaagaaactaataacaataactaataatatagaaaattataacaatatgccaaaatcattagtcttgttttgctggtcatttgctaagtaaaatgagggttacttgaacacaagccctgagatattgtgatagccagtccracaatgcagatggcactaagtgactagcaggtgggtagcagatatggcatgaatacactggacaaagggatgattcagatcctgggtaagatggcgtagggcggcataagatttcatcacaatactcagaatgttgtgcagatactcagacgaacaatgttgtgcacaatactcggaatgttgtgaattgttgtttatttctaaaattatccattgaatatttttctaccttggttaattgtgattaactgaaaccacagagagtggaaacttaggtaagagaga

SEQ ID NO: 331872 - DNA, 583 bp, Homo sapiens
cacaggtgaactccttatgaacacttctaattgcttargaacggtgtttgaaaatctcaagtaatttgccattattataatgagtagcataaactgtaatttttcatagtaattaacttgtgtcagcaccattatttttcattaattataaatgagaaagaatgaaagaacacccacgggaacagatgtgcgaaattgtctcttatgttctgttttatgttttctttttgtttttttgtttttcctttttttcccctactcagtatactattctatgaaacttgaggaaattgcaaatggtaatgcctgtttggggcagaaaagggcaaagagcatttaatgaggttgttgtctgtgaagtccagtgtattaataaaagaagaaagttgttactggcatgccagataaaaccactggggggaaaagaacactttgcttttagtaagtgcaactgagataatttgaggaaatgtattttgacagtcttcttcttttgttagaaaaataaaagccactatctagttttgccagattttatgggtatggtgtgtttaattaaagtcaaatggaaaaaaaaaaaaaa

SEQ ID NO: 331873 - DNA, 583 bp, Homo sapiens
cacaggtgaactccttatgaacacttctaattgcttaggaacggtgtttgaaaatctcaagtaatttgccattattataatgagtagcataaactgtaatttttcatagtaattaacttgtgtcagcaccattatttttcattaattataaatgagaaagaatgaaagaacacccacgggaacagatgtgcgaaattgtctcttatgttctgttttatgttttctttttgtttttttgtttttcctttttttcccctactcagtatactattctatgaaacttgaggaaattgcaaatggtaatgcctgtttggggcagaaaagggcaaagagcatttaatgaggttgttgtctgtgaagtccagtgtattaataaaagaagaaagttgttactggcatgccagataaaaccactggggggaaaagaacactttgcttttagtaagtgcaactgagataatttgargaaatgtattttgacagtcttcttcttttgttagaaaaataaaagccactatctagttttgccagattttatgggtatggtgtgtttaattaaagtcaaatggaaaaaaaaaaaaaa

SEQ ID NO: 331874 - DNA, 527 bp, Homo sapiens
tagctgtgctcctccctggaacctcaccttcatggtcagggaaccaccctctgatctccattggggccactgctcgcacccacatgtgaggarccagagcacacagttgcctgacccagccccagtctggctttgcccctccatctgccctggtagggtaacacaatgattaagggattttgggagctccatggtccctcacattgcctgagacaacagagtacctcccttgggtaacataaggcaagtgcaaatcccatggctaccactgcagctggcattcttttgcaaacacctcctcatggctggaggccaactggaacagcccattacaacatctgcaggcacaataatatagggctcagtaaggagaagacttttgtgcaatctcagctgtcaccagtgcctgcatcactgaatacattaaggctaattataactgaggaaatctcagagactttgtcactttcctctcaagcccatcagagatggagttgatactcaatgctgggacacaagaacaggtc

SEQ ID NO: 331875 - DNA, 540 bp, Homo sapiens
gctgtagaaattacttgtccatgttttcttacttatgggtattttgtggaacattttatsagtttcatttgaagtttctatgttgattatatacttatgaaacatttttctgaaatgtttctgagctataaaacttgactttttaatccttgtgttagaaagaatattgcttaaaccatttaaccaatttttctaatatttacatagagaaattaaagtattgggcataaattaaaataaatttttttccatctttctaatcttattttatgatatgtctttttctctggtggtgtcaaatttagatttgttagggatttaacagcacattatcagtgtaggttgtaatactccagtaaaagtgcagatatttcagggcacggctgctattgtttattctagaaaatttaatgtaattgtcaaaacagatatatatgtatctgtacttgtctattttgtgaattaatttttattgcatataatagataactaagtttctcagatcaaaataattattaagatttttcccctattaaattg

SEQ ID NO: 331876 - DNA, 540 bp, Homo sapiens
gctgtagaaattacttgtccatgttttcttacttatgggtattttgtggaacattttatgagtttcatttgaagtttctatgttgattatatacttatgaaacatttttctgaaatgtttctgagctataaaacttgactttttaatccttgtgttagaaagaatattgcttaaaccatttaaccaatttttctaatatttacatagagaaattaaagtattgggcataaattaaaataaatttttttccatctttctaatcttattttatgatatgtctttttctctggtggtgtcaaatttagatttgttagggatttaacagcacattatcagtgtaggttgtaatactccagtaaaagtgcagatatttcagggcacggctgctattgtttattctaraaaatttaatgtaattgtcaaaacagatatatatgtatctgtacttgtctattttgtgaattaatttttattgcatataatagataactaagtttctcagatcaaaataattattaagatttttcccctattaaattg

SEQ ID NO: 331877 - DNA, 617 bp, Homo sapiens
aaaatgaattaagagtagaactgaagaaaacaaaaagacaagagtttcaaatagtagtgggaagttcataattgccaaatgctactctgcaatacaagaaggtgagaatttaaaatagggcatatagcttatcaattaaaaacttatgagtaatcttagttgagacaaactcatctgatgtggctttagtttctcaactaaagcaatgttaagaaggaagtaagagtagaggacaaagaataatggattgaagaataaattcccattcacgaaagtactagatagtaattgaatctatcctttcttatttgatcgttggataatgttaatatactgcattatactgttaatgttatccattagtattgattatcagtcagtgcaaatactgactcaactcccacactcctctcttcagtaaaactgccccatatatatatatwtttttaatcagtaaatggtagtatatcgggtgacctcactttggccaaaactaactggaaaattactccatagactgaaacttaattatccttcttgctactaagttttgcaaatttgtcagcttttgttcaacaaattaccttattacttgaataactctttgtggatttcta

SEQ ID NO: 331878 - DNA, 619 bp, Homo sapiens
tttcctgatgcctccccagccatgcacaactgtgagtcacttaaatctctttcctttataaagtacctagtcttgggtatttctttatagcagtgcaaaaacatactaattcagataattaataaggagggctagaaaatgagaggagaaaaagaggtttaactttttaatatattaggaaattgagatcatgaagatataaagtgacttatgggtcatttattgcttaaaaatgcagacattctgtaaattaaattccttcgttctctgccctcaccatgttttcaaaagagggcaaatgtagacatcttatttttgtgaagattagaaaaactcttgaaggaatttaagtcatgaagaatgtctgcatcaaaattttacataacaaatagacatttaattgaggatattaatttctgtactctagatgctgacacataaccatttaacatccatgtcattgacagatattkatttcactaccgcaagctataacatataaaaatttaattatggatattcatttccttcttttagtcctgatgtatacccatttagctatcacatcacagaggcatatatttttaccaattcaagctgtgaaatgtcaaaattaaac

SEQ ID NO: 331879 - DNA, 540 bp, Homo sapiens
aaatcttcaataactgaaatttgaatttggcacatgaacagacagaacaaatcaagcagaatagaaatccagaaagcaacacacttatgcataatgttttagtatgtaacaaaacattagcaatctataggttaacattagattttttgaatacaaggtatttagacatatggtttgccatatgagttttgtttcatattgatcacatactactttagagtawactctatagatcaaaacttataaaacactaaaagaataaaagtaacaggcaaatatgggcatatattttagggggtgatgggggcatataaacaaaaactttggaacagcataagcatttttcaattacaacaggtggaaaggttattagaagtaaaagtatcagtgaattgaaacaatcatgtagacatcaactattattccttaggcataaaacaaatataaagactatctgtttttttttaagtcaatggcaagcatgaatattgtaccgctttgattcaccaaggtacttctatcatgtagttattttaccta

SEQ ID NO: 331880 - DNA, 582 bp, Homo sapiens
taattgcaatattcttagagtcaaaagactaatgcctttaattttgtttacatataaatccattagaaaaaaacctgaaagaaaaagtgggaaatatatatgtaaaaacagaacacagaaaatattaatattataaattgaaacaaaataaaaatataaagttctctcaaataggtgaaaatgctatgcctcacccataatttgaaaaagttgtaaaataaaattataaactgtgaatcatacattatacattatatacattatatatacatacatgcacattrtatatacatatatacattatatacctatcagagtaaagtaacattggcatattcttggcaataccaagtgctggctaggaaataaaaaaataggcactggtatttcttttgttgtcagtatcaactggagcaaacgtttcggaagctcatttgaatatatatttgccagttacactagcaatccatgaatctaggtagatgtactactttgccaagatataaatggaaggatatttatgggagcattgtttcaaatgtcatcaatctgtaaacaaaaacaaatttatctcaataaggc

SEQ ID NO: 331881 - DNA, 515 bp, Homo sapiens
tttctattagtgacatattctaataatctaccaaatattggatgaaaataaatggaatttgagctgtaaagacttgggaggaggaaaaagctacacatgttattgattactaagaaaatagagtgatgatcactgacaaagatattgacataccataatgaagattatacaatttaagtcttgggaccctgttagttctttttatctccacagtaaagaacatagtctataacatatgaactataaactatctggaaagattctagcccttggaagtagtatgataaatatttcaaagttgaggatgagtaacttgaagtaaagtaagaatgtttatcaaagttaagttatggaagcttaaaygtagcttaagagttttctacacatattttttttctctttaaattcttctttgtactcagtccatccaggcttttgcctttaccaccacaggtcttatcatgtgtgctgctaaatgcaaagcccatttgtcagatttaattacatttaattaa

SEQ ID NO: 331882 - DNA, 577 bp, Homo sapiens
gtatacccaccatttaaaatttctttatacagacattttgtggtcaattgtgatacttttatctgtggcatgtgtattatttttgagaagatagttattaaaacttcagtcctggatacttctaaagttccacccacatgtgttttggtccgtttttacactgctaataaagacatacctgagactgggtaatttatagagaaaaagaggtttaatggactcacagtaccacatcgctggggaggcctcacaatcatggcagaaagcaaaaggcacatcttacatggtggcaggcaagagagaaatgagaaccaagtgaaaagggtttccccttataaaaccatcagatctcgcgagatgtattcactaccacaagaacagtatgggggaaaccacccmcattattcagttatctcccactgggtctcttctacaacacatgggaattatgggagctacaagtcaagataagagttgggtggggacacaaaccatatcaacatgcatgcacgcatacacatctttgaaggtagagtatgtgaatttgatgctggagtatgttgatggtatagtaaaa

SEQ ID NO: 331883 - DNA, 599 bp, Homo sapiens
atcctataactttatttttctttttaacattcttttggcaatctggtgtcctttgcagtttcatatgaatgtgagaaccagctttttcatttctgaaggatcrgcttttccattttgggagatacttgctattactagggtggggaacacggggccacatcctctaacacttcagattgtgtgttttgatttgagtgtcctattgccacctcttcaactctctccatcaacaattttgaacattcatacattccttcttctaaacctaggcttgtacatctaattttttttttcttttgagatggagtgtcactctgtccgccaggctggagggcagtggtgcaatctcggcttactgcaaactctgcctcctggattcaagtcattctcctgccttagcctcccaagtagctgggattacaggcatgcaccaccatgcctggctatgttttgtatttttagtaaagacagggtttggccatgttggccaggctgatcttgaactcctgacctcaagtgatcctcctgcctcggcctcccaaagttctgggattataggcgtgagccaccatgcccagcctctagttttttaaataggt

SEQ ID NO: 331884 - DNA, 597 bp, Homo sapiens
acaagaattcattacgtggtcctacctacattcaaaggagatgggaatgggataaggtatggaaaatacagtccctggataggcagcttcttctcagcagcaactttttacaaataaattaaaacacagatagctaacaattatctctacaaaagtgactccctgtcattgctgaagctatttcttttagcatcagattcattcctaccttaatacgtctttcaaacagaacatcacataatttragtggtactcaaaaacaaaataaccacaatttggtctggtattgtattgataacatttttgtgagattttcaacacaatattttcagtgccagagcaagggcagaatcattaaagacataataaatactttttggctagtattaaatgtagttgatctagacaagaaatcacatctttggttattgagtgacataatgctcttatatgttattcattttgcataaaccaactactatcttaccttcactgtttataaatcttcattagtcttaaattcaaatagcattgatattttttacataaaaaatcaatgcctgtttcttataaaccaaagctctgaatgagtaaaat

SEQ ID NO: 331885 - DNA, 597 bp, Homo sapiens
acaagaattcattacgtggtcctacctacattcaaaggagatgggaatgggataaggtatggaaaatacagtccctggataggcagcttcttctcagcagcaactttttacaaataaattaaaacacagatagctaacaattatctctacaaaagtgactccctgtcattgctgaagctatttcttttagcatcagattcattcctaccttaatacgtctttcaaacagaacatcacataatttgagtggtactcaaaaacaaaataaccacaatttggtctggtattgtattgataacatttttgtgagattttcaacacaatattttcagtgccagagcaagggcagaatcattaaagacataataaatactttttggctagtattaaatgtagttgatctagacaagaaatmacatctttggttattgagtgacataatgctcttatatgttattcattttgcataaaccaactactatcttaccttcactgtttataaatcttcattagtcttaaattcaaatagcattgatattttttacataaaaaatcaatgcctgtttcttataaaccaaagctctgaatgagtaaaat

SEQ ID NO: 331886 - DNA, 607 bp, Homo sapiens
atactattcaagtattaatataagtacggataatcctgtaatgcattggatattaaatacatccgttttttgatgggctttcttgaagttaatttgccactcttcatttatttcctttaaccatcttaccacattcatcagactgtcagagttgagcttcttagactttcctcttctttctttccatttacagtgaaaagcaagcaaagtcaaatctgcatcactaaaatttcatcacattgctctgtgtcttattttctcatgtggccacacagaagaaaagaaaatactttgtatgaaggttattcaagctttgaagacaagagtcataccatccaatcttcacaaatgcatttataatatattttctggatactttactatccttttaaatactggaggaatattttccagtttgttgtttggagcctttttaagtgcagtgccagaatataacacaacattccaggtacacacaatgagcactaagttccatgagtataatacctcatttgrttaaaagtctgtattatttctaatggtgcattttaacataacaggagcttcttagcatcaccattttattcctggtccatgctaaaattgt

SEQ ID NO: 331887 - DNA, 607 bp, Homo sapiens
gattcagtaatttcactttgaatgataacttttgttctagcagctgagctccatttactcctttgtctgccaaagacagcatttttgtccctcatccatggcatacttttctcttttttcttcttcatttacctttttcttttttgtaggttaaattggctccacattcttagcttaatgagtatacacaagttgrcaggcaagaaagagccatttatctagagagctgagccagctgtgaggtatagagattttatttcatcttgaggaaataaaacaaaaatactaatattatgctaatcctcacattcacattggaagcattttaggaatctttggaaaatatggaatagattagggacactattaaaactagtagcatactgcagtggtaacacctattatgaagtagtatccaaaagaagcaaggtagcttgttggaatctgtatcaaaaagaagatattaaagaaattggccattgtagaataattctggtttttttgttttctatgcttcctcaggaaatatactttcaatttttaacttaaaaagacgttacaaatatagctacataattattagaaatgggtctcagggttaaggagg

SEQ ID NO: 331888 - DNA, 619 bp, Homo sapiens
ctataaataatgccttaataaatacacttaagagggccttatgtaaagagtctgaggggttcttaaaaaatgaacaaggggggatgtctgtaacctgagtttctgggttccttcagttcacaccacaagcatcctctcttgcacagacagaattctagtcaatgttctttctcatcactccagatatgtggcatttctttaaaagccaggttcaaatgtactgtacctaggaagctttctttcatattttcgactcaccccttcactaaccctattcagaggcaccatcttattcttttatgtccctgttacactcttctaattttctcatacgtttattataacattctgctgacttgtagaattttttttgtttgcttacttcattacttcaaaaaattaaaagtttcttctagttactgatcaaattttattcattttttcacacctcaagtttatttaatatttatttgtttctcaccatattgtttagwattctcattttatatgagggttcacactatttccctcacaatattaaaaaaagagaatggagaaaccagcaaaattgaaaatttatgttttctaactaaatcctacccttttaaaaaaataaata

SEQ ID NO: 331889 - DNA, 635 bp, Homo sapiens
tatacacacatgatgcatatatacacacacatattatatatatgtattttgagactttccattttgttttaataatcttcatgtcttttcttatttcattatcataatttttttgattactgtagcttcaaaataccccaaaatcaacagtttggttgcctctactgcttgactctttgtgaataatgcttctatgaacatgggtgtaacaaatagctgtctgagtttttgctcttaattattttgtatatacccagaagttgagttgctgagtcatatggtaatttttaaatttttatttaagaactatcctactgtttttcatagcagctgcataattttacattcctaccaacaacgcacaagggttccaatttctctacatctcaccaacatttctcattttgtttgtttgtttccttgtttattttgatagtagccattctaatgggtatgaggtgatatctcattgtggttttaatttgcatttcattaatgattagagatgttgagyatcttttcatgtgcttagtggccgtttgtacatcttctttgaagaaatgtttattcaagtcttttgcatatttttagtaaagttttttgtcatgtagttatttatatgttttatatattca

SEQ ID NO: 331890 - DNA, 593 bp, Homo sapiens
tacaatttaaattcataatttaattgttaaaaagcatggtagatatatcatccagttgaaatgcatgaaccttgtttggatctttattcagcaaataagctgttaaaaattatgaattagawaaacgtgggcatttgttggtatttactaataatcattgttctactcttaagtattacaatgttagtttaaagaattcttatctcttgaaacacttttggattaaatggcacagatgctagaatttattttaaattaatattataggggctatctattaggcaaaataataattccaagaagattggctatgatttgatacttgttgaaactgaaggacagatatgagaatttgttgtaattttttttccatttagaatatgccggaggttgttcatactacaaagcctttttttttttttaactttttcagattagtccttatgtttgtcattttttcatttgttcacacattggaaatttctttagtcagagtatattgacagtaaattttctgtttttgtctaaaatttttttccaccttaatctaaagatagtttagctatctttggtaatacatggaaaagaggaag

SEQ ID NO: 331891 - DNA, 611 bp, Homo sapiens
tatctatacaccaagtgctttttttccaataaagtttacacagagctgatgaaggcagggtcaaaaaagatctcaatttcaataagtaacagtctagaaattagttgcagttaaaaaaaaaaaaaagcagagacgctcagtcaaaagtataattgttacctttatatatccttttactatgacccctttgataattgttttagaagccaaaatgtatacaaagcaacatgtttttatttagaaacttaaccatgaaaataaaaatacatgatttctgaacagatacaagtaagactagactaatgccaggttaatctctggatctctataggaaaagtgaagttcatttctcattttaagaaaaaacatgtattgaatgtggcttccattatggaaaaamtattttttcaaaatataaataaaaaagaaaaagaaaaagaaaaagaaacatgtaggtttaaccagtagcacgtgctacaacttcttcaggaaacactgcaacatttactctaggggaaaaaatactttcccctacagacacgtaccatattctgttgttgttcactaacaatgttttcagtcttctcaacaaaggaaaaccatccagtttc

SEQ ID NO: 331892 - DNA, 574 bp, Homo sapiens
acttaggtagtgtatgatgcaagggcctggggtgcccyggtccccctgctgtccccggcagcacaggctaaatataactcagagcagctggccccaggctgacctggaagggctcctgcatcctggtgcacactcaccagctcggccaccacagtgacttggctcctagacttggctgcaccctcagcctccctccctcagctctggcagcctggacacggccatttgttcactcatggcatgttggacctggcctcatttccagacttccctctcatggctgtggccaacccattgcactcaacagctgcaggggagcccaccccacttcattcatgacagcgttcagccagacaaaaccgccagccaggagaccactggcaacataagaaacatcccagtggggtgtcaggttgaaagaccaccacccaaccctgcccatggccagtgcttgcatctggccaggtaggttgctcatgtggtgggggaaagtggaaatgtccattgaacaaataaatgaaaaggtgaatcctggagaaaggacaataatcattatgttagaaatgggagaatg

SEQ ID NO: 331893 - DNA, 574 bp, Homo sapiens
acttaggtagtgtatgatgcaagggcctggggtgccccggtccccctgctgtccccggcagcacaggctaaatataactcagagcagctggccccaggctgacctggaagggctcctgcatcctggtgcacactcaccagctcggccaccacagtgacttggctcctagacttggctgcaccctcagcctccctccctcrgctctggcagcctggacacggccatttgttcactcatggcatgttggacctggcctcatttccagacttccctctcatggctgtggccaacccattgcactcaacagctgcaggggagcccaccccacttcattcatgacagcgttcagccagacaaaaccgccagccaggagaccactggcaacataagaaacatcccagtggggtgtcaggttgaaagaccaccacccaaccctgcccatggccagtgcttgcatctggccaggtaggttgctcatgtggtgggggaaagtggaaatgtccattgaacaaataaatgaaaaggtgaatcctggagaaaggacaataatcattatgttagaaatgggagaatg

SEQ ID NO: 331894 - DNA, 574 bp, Homo sapiens
acttaggtagtgtatgatgcaagggcctggggtgccccggtccccctgctgtccccggcagcacaggctaaatataactcagagcagctggccccaggctgacctggaagggctcctgcatcctggtgcacactcaccagctcggccaccacagtgacttggctcctagacttggctgcaccctcagcctccctccctcagctctggcagcctggacacggccatttgttcactcatggcatgttggacctggyctcatttccagacttccctctcatggctgtggccaacccattgcactcaacagctgcaggggagcccaccccacttcattcatgacagcgttcagccagacaaaaccgccagccaggagaccactggcaacataagaaacatcccagtggggtgtcaggttgaaagaccaccacccaaccctgcccatggccagtgcttgcatctggccaggtaggttgctcatgtggtgggggaaagtggaaatgtccattgaacaaataaatgaaaaggtgaatcctggagaaaggacaataatcattatgttagaaatgggagaatg

SEQ ID NO: 331895 - DNA, 599 bp, Homo sapiens
gagacaatgagacaggccggtgtgctggtgacttccaggtctagacaagccccttttcacccttcatgtgtggccatgtgcaagttgctgagtcaccctgtgcctcagtttccccacccataaaatgagatgatactatcttctcacagcattgatgggagagaaaaaggaggcaatacctcttcctgccttctcagttgaatgggtaattcaaaccagccacattaaactcactggagagatgctggggaattggcctcatcacctctctcctgtggactttgaaacaaaatgagaagagcccctgtgtcacgtgactgatgagggactacgcctgacacctcttctcacatttgtcccatagggtcgagccacgccgtctttcctgccttgtctcccaagccacagggctggagggccctggctgggaggtgaggcaggatagctgaggccatcagactgggttgtggagggcaggaggggagcagggaaccctggtacagggtcatgtgtggtctcacactgatgagtgctggctgggggctctacaaacaaaggtgaggctctracccagcagatctgggtttttgggggtgcac

SEQ ID NO: 331896 - DNA, 483 bp, Homo sapiens
attccactcacacccagttaaaaagcccagaaagcctaaacgatctgtttctaatacaggctgcattcctgggtgggagtgattaagggactccatggtagtcactcagggttggggtggtgggaggcgtggacagggagggcacacaggaggttgccagagcctgaaaacgtgttcccatgcattcgaagttcattttactatgcttgaarctgttcacacacattttatacacttttgaatgtgtgctgtattccactagatttttaaataagagaaaaatttaaaaccttggggtgaagaagagtcaatagcggagacgagtggaggagagggaatgagcgagagagcccaggaagcaggaggcagacacactcacacacactcacattcacactcacgctcacacagactcacacactcacactcagacacattcacacacagactcacacactcacactcagacacattcacacacat

SEQ ID NO: 331897 - DNA, 525 bp, Homo sapiens
ctgacaaaacattcatgtatagaataagtgcacacacaccacataccccacaaccaacccaaggaaaaaaaacctgggacagtcactccacaaaataggatatatagatggctaygtgatctatcctaggtttttttaaaaagctatcaaacactgtatattgttggggcaactgggagtatttgagtatgttctgaataatagacattagggaattattaatcttgtcaggtatgataatgataagtggtagcgtaggagaatgcttatttttgagaggtgcaggaggaagtgtcagacatctgtgatttactttcaaatggtttaacagatagacagccctacaaatggatagataatccatatgcatgatactatgcgtaagtgtatttgtttgtatgaatagagaccaagagataaaacaaaggttgcaaagtattaacaattgtatacagatgggggatatatgggtgttccttctactactccttataattaaaattcttcaaatagaaatgtaaaaat

SEQ ID NO: 331898 - DNA, 485 bp, Homo sapiens
ttccaggagtttaggaaatctctgttcaaacattagctgaccattaagctaacaaaacggaatgtcataaccacatgtgacacgtttgcattgtacattttactgaatttaagcaagtggagggtaatcatctatatcacagygatacaatcagcaattaagtattggacatgcctcttttaagagtcatggaggttggaggatggtcactgtcccagggtccattgtgtccccttccattcaactctggctgcagccatcttgatgtttgtctcaagctttgacactggctcttgattaattgcagaaacagttgtgacaacttactgactcagaccctgtgacacatgccttaaatgttggactcatagactcttccataaagggaaggttcagacatcccagcttgccaaatgtgcaccagatctccactggacactctctgcctcccaggaaaccaatgagattgtgacaccaatgtttct

SEQ ID NO: 331899 - DNA, 563 bp, Homo sapiens
gggaaaggcaccccctcccaaaggcaacctctggaggtgtctgctgagtgggtaccaggctgcagagggaaagccattcacagagaacagaagagatcccagagacagccccaaacagcmatgggaaccagaatatgaatggtgcaaaaccagtgcaaaaaccagtgttgttcatcagtgatcccatgagagtcaagataaagctggacccctgcctcacaccccacacaacgatcaaccaaaatggactgaaggcaaaactatgaaacttccagaacacaacatgggggaatgtcttgagagagcccttgaatgagcagaaacaaaggaagagataaaatcagttccattaaaataaagaatctctgttcaccaaaagccccataaaaaatgaaatcacaaatgacaagctgcaaggagatatttgtaacccatgtaactgcaaagcattaatatccagaatatataaaggactacaatagtcagtaaggagactgtgattgaaagacaggaacaggcattcctcatgaagaaaattgaaatggccaacaaaccttgttagt

SEQ ID NO: 331900 - DNA, 285 bp, Homo sapiens
cagaaaaggaaatatcttcgtataaaaactagacagaatcattctcagtaactgctctgtgatgtgtgcgttcaactctcagagtttaacttttcttttcattcagcagtttggaaacactctgtttgtaaagtctgcacgtggatattttgaccacttagaggccttctttggaaacggttttttytcatgtaaggctagacagaagaattcccagtaacttccttgtgttgtgtgcattcaactcacagagttgaacgttcccttagacagagcagatttgaa

SEQ ID NO: 331901 - DNA, 557 bp, Homo sapiens
gtgcattcaactcacagagttgaacgttcccttagacagagcagatttgaaacactctatttgtgcaatttgcaagkgtagatttcaagcgctttaaggtcaatggcagaaaaggaaatatcttcgtttcaaaactagacagaatcattcccacaaactgcgttgtgatgtgtttgttcaactcacagagtttaacctttctgttcatagagcagttaggaaacgctctgtttgtaaagtctgtaagtggatattctgacatcttgtggccttcgttggaaacgggatttcttcctattctgctagacagatgaattctcagtaacttccttgtgttgtgtgtattcaactcacagagttgaacgatcctttacacagagcagacttgaaacactctttttgtggaatttgcaagtggagatttcagccgctttgaggtcaatggtagaaaaggaaatatcttcgtatagaaacaagacagaatgattctcagaaactcctttgtgatgtgtgcgttcaactcacagagtttaacctttcttttcatagagcagtta

SEQ ID NO: 331902 - DNA, 364 bp, Homo sapiens
tttaaggtcaatggcagaaaaggaaatatcttcgtttcaaaactagacagaatcattcccacaaactgcgttgtgatgtgtwtgttcaactcacagagtttaacctttctgttcatagagcagttaggaaacgctctgtttgtaaagtctgtaagtggatattctgacatcttgtggccttcgttggaaacgggatttcttcctattctgctagacagatgaattctcagtaacttccttgtgttgtgtgtattcaactcacagagttgaacgatcctttacacagagcagacttgaaacactctttttgtggaatttgcaagtggagatttcagccgctttgaggtcaatggtagaaaaggaa

SEQ ID NO: 331903 - DNA, 559 bp, Homo sapiens
aattcccagtaacttccttgtgttgtgtgcattcaactcacagagttgaacgttcccttagacagagcagatttgaaacactctatttgtgcaatttgcaagtgtagatttcaagcgctttaaggtcaatggcagaaaaggaaatatcttcgtttcaaaactagacagaatcattcccacaaactgcgttgtgatgtgtttgttcaactcacagagtttaacctttctgttcatagagcagttaggaaacgctctgtttgtaaagtctgtaagtggatattctgacatcttgtggccttcgttggaaacgggatttcttcctattctgctagacagawgaattctcagtaacttccttgtgttgtgtgtattcaactcacagagttgaacgatcctttacacagagcagacttgaaacactctttttgtggaatttgcaagtggagatttcagccgctttgaggtcaatggtagaaaaggaaatatcttcgtatagaaacaagacagaatgattctcagaaactcctttgtgatgtgtgcgttcaactcacagagttta

SEQ ID NO: 331904 - DNA, 557 bp, Homo sapiens
gtgcattcaactcacagagttgaacgttcccttagacagagcagatttgaaacactctatttgtgcaatttgcaagtgtagatttcaagcgctttaaggtcaatggcagaaaaggaaatatcttcgtttcaaaactagacagaatcattcccacaaactgcgttgtgatgtgtttgttcaactcacagagtttaacctttctgttcatagagcagttaggaaacgctctgtttgtaaagtctgtaagtggatattctgacatcttgtggccttcgttggaaacgggatttcttcctattctgctagacagatgaattmtcagtaacttccttgtgttgtgtgtattcaactcacagagttgaacgatcctttacacagagcagacttgaaacactctttttgtggaatttgcaagtggagatttcagccgctttgaggtcaatggtagaaaaggaaatatcttcgtatagaaacaagacagaatgattctcagaaactcctttgtgatgtgtgcgttcaactcacagagtttaacctttcttttcatagagcagtta

SEQ ID NO: 331905 - DNA, 342 bp, Homo sapiens
aacgatcctttacacagagcagacttgaaacactctttttgtggaatttgcaagtggagatttcagccgctttgaggtcaatggtagaaaaggaaatatcttcgtatagaaacaagacagaatgattctcagaaactyctttgtgatgtgtgcgttcaactcacagagtttaacctttcttttcatagagcagttaggaaacactctgtttgtaaagtctgcaagtggatattcagacctccttgaggccttcgttggaaacgggatttcttcatattctgctagacagaagaattctcagtcacttccttgtgttgtgtgtattcaactcacagtgttgaa

SEQ ID NO: 331906 - DNA, 342 bp, Homo sapiens
aacgatcctttacacagagcagacttgaaacactctttttgtggaatttgcaagtggagatttcagccgctttgaggtcaatggtagaaaaggaaatatcttcgtatagaaacaagacagaatgattctcagaaactcctttgtgatgtgtgcgttcaactcacagagtttaacctttcttttcatagagcagttaggaaacactctgtttgtaaagtctgcaagtggatattcagacctccttgaggccttcgttggaaacgggatttcttcatattctgctagacagaagaattctcagtmacttccttgtgttgtgtgtattcaactcacagtgttgaa

SEQ ID NO: 331907 - DNA, 366 bp, Homo sapiens
tcagaaactgctgcgtgatgtgtgcgttcaactctcagagtttaacttttcttttcattcagcrgtttggaaacactctgtttgtaaagtctgcacgtggatattttgaccacttagaggccttcgttggaaacgggtttttttcatgtaaggctagacagaagaattcccagtaacttccttgtgttgtgtgcattcaactcacagagttgaacgttcccttagacagagcagatttgaaacactctatttgtgcaatttgcaagtgtagatttcaagcgctttaaggtcaatggcagaaaaggaaatatcttcgtttcaaaactacacagaatcattcccacaaactgcgttgtgatgtgttcg

SEQ ID NO: 331908 - DNA, 189 bp, Homo sapiens
tcagaaactgctgcgtgatgtgtgcgttcaactctcagagtttaacttttcttttcattcagcggtttggaaacactctgtttgtaaagtctgcacgtggatattttgaccacttagaggccttcgttggaaacgggtttttttcmtgtaaggctagacagaagaattcccagtaacttccttgtgttg

SEQ ID NO: 331909 - DNA, 476 bp, Homo sapiens
tttgaccacttagaggccttcgttggaaacgggtttttttcatgtaaggctagacagaagaattcccrgtaacttccttgtgttgtgtgcattcaactcacagagttgaacgttcccttagacagagcagatttgaaacactctatttgtgcaatttgcaagtgtagatttcaagcgctttaaggtcaatggcagaaaaggaaatatcttcgtttcaaaactacacagaatcattcccacaaactgcgttgtgatgtgttcgttcaactcacagagtttaacctttctgttcatagagcagttaggaaacactgtgtttgtaaagtctgtaagtggatattctgacatcttgtggccttcgttggaaacgggatttcttcattttctgctagacagaagaattctcagtaacttccttgtgttgtgtgtattcaactcacagagttgaacgatgctttacacagagcagacttgaa

SEQ ID NO: 331910 - DNA, 366 bp, Homo sapiens
tcagaaactgctgcgtgatgtgtgcgttcaactctcagagtttaacttttcttttcattcagcggtttggaaacactctgtttgtaaagtctgcacgtggatattttgaccacttagaggccttcgttggaaacgggtttttttcatgtaaggctagacagaagaattcccagtaacttccttgtgttgtgtgcattcaactcacagagttgaacgttcccttagacagagcagatttgaaacactctatttgtgcaattkgcaagtgtagatttcaagcgctttaaggtcaatggcagaaaaggaaatatcttcgtttcaaaactacacagaatcattcccacaaactgcgttgtgatgtgttcg

SEQ ID NO: 331911 - DNA, 476 bp, Homo sapiens
tttgaccacttagaggccttcgttggaaacgggtttttttcatgtaaggctagacagaagaattcccagtaacttccttgtgttgtgtgcattcaactcacagagttgaacgttcccttagacagagcagatttgaaacactctatttgtgcaatttgcaagtgtagatttcaagcgctttaaggtcaatggcagaaaaggaaatatcttcgtttcaaaactasacagaatcattcccacaaactgcgttgtgatgtgttcgttcaactcacagagtttaacctttctgttcatagagcagttaggaaacactgtgtttgtaaagtctgtaagtggatattctgacatcttgtggccttcgttggaaacgggatttcttcattttctgctagacagaagaattctcagtaacttccttgtgttgtgtgtattcaactcacagagttgaacgatgctttacacagagcagacttgaa

SEQ ID NO: 331912 - DNA, 476 bp, Homo sapiens
tttgaccacttagaggccttcgttggaaacgggtttttttcatgtaaggctagacagaagaattcccagtaacttccttgtgttgtgtgcattcaactcacagagttgaacgttcccttagacagagcagatttgaaacactctatttgtgcaatttgcaagtgtagatttcaagcgctttaaggtcaatggcagaaaaggaaatatcttcgtttcaaaactacacagaatcattcccacaaactgcgttgtgatgtgttcgttcaactcacagagtttaacctttctgttcatagagcagttaggaaacactgtgtttgtaaagtctgtaagtggatattctgacatcttgtggccttcgttggaaacgggatttcttcattttctgstagacagaagaattctcagtaacttccttgtgttgtgtgtattcaactcacagagttgaacgatgctttacacagagcagacttgaa

SEQ ID NO: 331913 - DNA, 478 bp, Homo sapiens
attctgacatcttgtggccttcgttggaaacgggatttcttcattttctgctagacagaagaattctcagwaacttccttgtgttgtgtgtattcaactcacagagttgaacgatgctttacacagagcagacttgaaacactctttttgtggaatttgcaagtggagatttcagccgctttgaggtcaatggtagaaaaggaaatatgttcgtaaagaaacaagacagaatgattctcagaaactcctttgtgatgtgtgcgttcaactcacagagtttaacctttcttttcatagagcagttaggaaacactctgtttatacagtctgcaagtggatattctgacctccttgaggccttcgttggaaaagggatttcttcatattctgctagacagaagaattctcagaaacttccttgtgttgtgtgtattcaactcacagagttgaacgatcctttacgtagagcagacttgaa

SEQ ID NO: 331914 - DNA, 478 bp, Homo sapiens
attctgacatcttgtggccttcgttggaaacgggatttcttcattttctgctagacagaagaattctcagtaacttccttgtgttgtgtgtattcaactcacagagttgaacgatgctttacacagagcagacttgaaacactctttttgtggaatttgcaagtggagatttcagccgctttgaggtcaatggtagaaaaggaaatatgttcgtaaagaaacwagacagaatgattctcagaaactcctttgtgatgtgtgcgttcaactcacagagtttaacctttcttttcatagagcagttaggaaacactctgtttatacagtctgcaagtggatattctgacctccttgaggccttcgttggaaaagggatttcttcatattctgctagacagaagaattctcagaaacttccttgtgttgtgtgtattcaactcacagagttgaacgatcctttacgtagagcagacttgaa

SEQ ID NO: 331915 - DNA, 478 bp, Homo sapiens
attctgacatcttgtggccttcgttggaaacgggatttcttcattttctgctagacagaagaattctcagtaacttccttgtgttgtgtgtattcaactcacagagttgaacgatgctttacacagagcagacttgaaacactctttttgtggaatttgcaagtggagatttcagccgctttgaggtcaatggtagaaaaggaaatatgttcgtaaagaaacaagacagaatgattctcagaaactcctttgtgatgtgtgcgttcaactcacagagtttaacctttcttttcatagagcagttaggaaacactctgtttatacagtctgcaagtggatattctgacctccttgaggccttcgttggaaamgggatttcttcatattctgctagacagaagaattctcagaaacttccttgtgttgtgtgtattcaactcacagagttgaacgatcctttacgtagagcagacttgaa

SEQ ID NO: 331916 - DNA, 548 bp, Homo sapiens
tggaaaagggatttcttcatattctgctagacagaagaattctcagaaacttccttgtgttgtgtgtattcaactcacagagttgaacgatcctttacgtagagcagacttgaaacactctttttgtggaatttgcaagwggagatttcagccgctttgaggtcaacggtagaataggaaatatcttcctatagaaactagacagaatgattctcagaaactcctttgtgatgtgtgcgttcaactcacagagtttaacctttcttttcatagagcagttaggaaacacactgtttgtaaagtctgcaagtggatattcagacctctttgaggctttcgttggaaacgggatttcttcatattctgctagacagaagaattctcagaaacttccttgtgttgtgtgtattcaactcacagagttgaatgatcctttacacagagcagacttgaaacactctttttgtggaatttgcaagtggagatttcagccgctttgaggtcaattgtagaaaaagaaatatcttcgtataaaaattagacagaat

SEQ ID NO: 331917 - DNA, 258 bp, Homo sapiens
ctagacagaagaattctcagaaacttccttgtgttgtgtgtattcaactcacagagttgaacgatcctttacgtagagcagacttgaaacactctttttgtggaatttgcaagtggagatttcagccgctttgaggtcaayggtagaataggaaatatcttcctatagaaactagacagaatgattctcagaaactcctttgtgatgtgtgcgttcaactcacagagtttaacctttcttttcatagagcagttagga

SEQ ID NO: 331918 - DNA, 469 bp, Homo sapiens
agagttgaacgatcctttacgtagagcagacttgaaacactctttttgtggaatttgcaagtggagatttcagccgctttgaggtcaacggtagaataggaaatatcttcctatagaaactagacagaatgattctcagaaactcctttgtgatgtgtgcgttcaactcacagagtttaacctttcttttcatagagcagttaggaaacacactgtttgtaaagtctgcaagtggatattcagacctctttgaggcyttcgttggaaacgggatttcttcatattctgctagacagaagaattctcagaaacttccttgtgttgtgtgtattcaactcacagagttgaatgatcctttacacagagcagacttgaaacactctttttgtggaatttgcaagtggagatttcagccgctttgaggtcaattgtagaaaaagaaatatcttcgtataaaaattagacagaa

SEQ ID NO: 331919 - DNA, 469 bp, Homo sapiens
agagttgaacgatcctttacgtagagcagacttgaaacactctttttgtggaatttgcaagtggagatttcagccgctttgaggtcaacggtagaataggaaatatcttcctatagaaactagacagaatgattctcagaaactcctttgtgatgtgtgcgttcaactcacagagtttaacctttcttttcatagagcagttaggaaacacactgtttgtaaagtctgcaagtggatattcagacctctttgaggctttcgttggaaacgggatttcttcatattctgctagacagaagaattctcagaaacttccttgtgttgtgtgtattcaactcacagagttgaaygatcctttacacagagcagacttgaaacactctttttgtggaatttgcaagtggagatttcagccgctttgaggtcaattgtagaaaaagaaatatcttcgtataaaaattagacagaa

SEQ ID NO: 331920 - DNA, 548 bp, Homo sapiens
tggaaaagggatttcttcatattctgctagacagaagaattctcagaaacttccttgtgttgtgtgtattcaactcacagagttgaacgatcctttacgtagagcagacttgaaacactctttttgtggaatttgcaagtggagatttcagccgctttgaggtcaacggtagaataggaaatatcttcctatagaaactagacagaatgattctcagaaactcctttgtgatgtgtgcgttcaactcacagagtttaacctttcttttcatagagcagttaggaaacacactgtttgtaaagtctgcaagtggatattcagacctctttgaggctttcgttggaaacgggatttcttcatattctgctagacagaagaattctcagaaacttccttgtgttgtgtgtattcaactcacagagttgaatgatcctttacacagarcagacttgaaacactctttttgtggaatttgcaagtggagatttcagccgctttgaggtcaattgtagaaaaagaaatatcttcgtataaaaattagacagaat

SEQ ID NO: 331921 - DNA, 548 bp, Homo sapiens
tggaaaagggatttcttcatattctgctagacagaagaattctcagaaacttccttgtgttgtgtgtattcaactcacagagttgaacgatcctttacgtagagcagacttgaaacactctttttgtggaatttgcaagtggagatttcagccgctttgaggtcaacggtagaataggaaatatcttcctatagaaactagacagaatgattctcagaaactcctttgtgatgtgtgcgttcaactcacagagtttaacctttcttttcatagagcagttaggaaacacactgtttgtaaagtctgcaagtggatattcagacctctttgaggctttcgttggaaacgggatttcttcatattctgctagacagaagaattctcagaaacttccttgtgttgtgtgtattcaactcacagagttgaatgatcctttacacagagcagwcttgaaacactctttttgtggaatttgcaagtggagatttcagccgctttgaggtcaattgtagaaaaagaaatatcttcgtataaaaattagacagaat

SEQ ID NO: 331922 - DNA, 262 bp, Homo sapiens
aaacactctgtttgtaaagtctgcaagtggatattcagaactcctagaggccttcgttggaaacgggatttcttcatattatgctagacagaagaattctcagwaacttccttgtgttgtgtgtattcaactcacagagttgaacgttcctttacacagagcagacttgaaacactctttttgtggaatttgcaagtggagatttcagccgctttgagatcaatggtagaataggaaatatcttcctatagaaagtagacag

SEQ ID NO: 331923 - DNA, 455 bp, Homo sapiens
ttatgctagacagaagaattctcagtaacttccttgtgttgtgtgtattcaactcacagagttgaacgttcctttacacagagcagacttgaaacactctttttgtggaatttgcaagtggagatttcagccgctttgagrtcaatggtagaataggaaatatcttcctatagaaagtagacagaattattctcagaaactcctttgtgatgtgtgcgttcaactcacagagtttaacctttcttttcatagagcagttagggaacactctgtttgtaaagtctgcaagtggatattcagacctctttgaggctttcgttggaaacgggatttctccctattctgctagacagaagaattctcagaaacttccttctgttgtgtgtattcaactcacagagttgaacgatcctttacacagagcagacttgaaacactctttttgtggaatttgc

SEQ ID NO: 331924 - DNA, 445 bp, Homo sapiens
tctttttgtggaatttgcaagtggagatttcagccgctttgagktcaacggtagaataggaaatatcttcctatagaaactagacagaatgattctcagaaactcctttgtgatgtgtgcgttcaactcacagagtttaacctgtcttttcatagagcagttaggaaacactctgtttgtaaagtctgcaagtggatattcagacctctttgaggctttcgttggaaacgggatttcttcatattctgctagacagaagaattctcagaaacttacttgtgttgtgtgtattcaactcacagagttgaatgatcctttacacagagcagacttgaaacactctttttgtggaatttgcaagtggagatttcagccgctttgaggtcaatggtagaataggaaatatcttcctatggaaactagacagaatgattctcagaaactc

SEQ ID NO: 331925 - DNA, 445 bp, Homo sapiens
tctttttgtggaatttgcaagtggagatttcagccgctttgaggtcaayggtagaataggaaatatcttcctatagaaactagacagaatgattctcagaaactcctttgtgatgtgtgcgttcaactcacagagtttaacctgtcttttcatagagcagttaggaaacactctgtttgtaaagtctgcaagtggatattcagacctctttgaggctttcgttggaaacgggatttcttcatattctgctagacagaagaattctcagaaacttacttgtgttgtgtgtattcaactcacagagttgaatgatcctttacacagagcagacttgaaacactctttttgtggaatttgcaagtggagatttcagccgctttgaggtcaatggtagaataggaaatatcttcctatggaaactagacagaatgattctcagaaactc

SEQ ID NO: 331926 - DNA, 320 bp, Homo sapiens
agagcagactggaaacactctttttgtggaatttgcaagtggagatttcagccgctttgaggtcaacggtagaataggaaatatcttcctatagaaactagacagaatgattctcagaaactcctttgtgatgtgtgcgttcaactcacagagtttaacctktcttttcatagagcagttaggaaacactctgtttgtaaagtctgcaagtggatattcagacctctttgaggctttcgttggaaacgggatttcttcatattctgctagacagaagaattctcagaaacttacttgtgttgtgtgtattcaactcacag

SEQ ID NO: 331927 - DNA, 320 bp, Homo sapiens
agagcagactggaaacactctttttgtggaatttgcaagtggagatttcagccgctttgaggtcaacggtagaataggaaatatcttcctatagaaactagacagaatgattctcagaaactcctttgtgatgtgtgcgttcaactcacagagtttaacctgtcttttcatagagcagttaggaaacactctgtttgtaaagtctgcaagtggatattcagacmtctttgaggctttcgttggaaacgggatttcttcatattctgctagacagaagaattctcagaaacttacttgtgttgtgtgtattcaactcacag

SEQ ID NO: 331928 - DNA, 385 bp, Homo sapiens
aacctgtcttttcatagagcagttaggaaacactctgtttgtaaagtctgcaagtggatattcagacctcyttgaggctttcgttggaaacgggatttcttcatattctgctagacagaagaattctcagaaacttacttgtgttgtgtgtattcaactcacagagttgaatgatcctttacacagagcagacttgaaacactctttttgtggaatttgcaagtggagatttcagccgctttgaggtcaatggtagaataggaaatatcttcctatggaaactagacagaatgattctcagaaactcctttgtgatgtgtgcgttcaactcacagagtttaaccttttttttcaaagagcagttaggaaacactctgtttgtaaa

SEQ ID NO: 331929 - DNA, 410 bp, Homo sapiens
tgcaagtggagatttcagccgctttgaggtcaacggtagaataggaaatatcttcctatagaaactagacagaatgattctcagaaactcctttgtgatgtgtgcgttcaactcacagagtttaacctgtcttttcatagagcagttaggaaacactctgtttgtaaagtctgcaagtggatattcagacctctttgaggctttcgttggaaacgggatttcttcatattmtgctagacagaagaattctcagaaacttacttgtgttgtgtgtattcaactcacagagttgaatgatcctttacacagagcagacttgaaacactctttttgtggaatttgcaagtggagatttcagccgctttgaggtcaatggtagaataggaaatatcttcctatggaaactagac

SEQ ID NO: 331930 - DNA, 297 bp, Homo sapiens
taggaaacactctgtttgtaaagtctgcaagtggatattcagacctctttgaggctttcgttggaaacgggatttcttcatattctgctagacagaagaattctcagaaacttmcttgtgttgtgtgtattcaactcacagagttgaatgatcctttacacagagcagacttgaaacactctttttgtggaatttgcaagtggagatttcagccgctttgaggtcaatggtagaataggaaatatcttcctatggaaactagacagaatgattctcagaaactcctttgtgatgtgt

SEQ ID NO: 331931 - DNA, 410 bp, Homo sapiens
tgcaagtggagatttcagccgctttgaggtcaacggtagaataggaaatatcttcctatagaaactagacagaatgattctcagaaactcctttgtgatgtgtgcgttcaactcacagagtttaacctgtcttttcatagagcagttaggaaacactctgtttgtaaagtctgcaagtggatattcagacctctttgaggctttcgttggaaacgggatttcttcatattctgctagacagaagaattctcagaaacttacttgtgttgtgtgtattcaactcacagagttgaatgatcctttacacagagcmgacttgaaacactctttttgtggaatttgcaagtggagatttcagccgctttgaggtcaatggtagaataggaaatatcttcctatggaaactagac

SEQ ID NO: 331932 - DNA, 410 bp, Homo sapiens
tgcaagtggagatttcagccgctttgaggtcaacggtagaataggaaatatcttcctatagaaactagacagaatgattctcagaaactcctttgtgatgtgtgcgttcaactcacagagtttaacctgtcttttcatagagcagttaggaaacactctgtttgtaaagtctgcaagtggatattcagacctctttgaggctttcgttggaaacgggatttcttcatattctgctagacagaagaattctcagaaacttacttgtgttgtgtgtattcaactcacagagttgaatgatcctttacacagagcagactwgaaacactctttttgtggaatttgcaagtggagatttcagccgctttgaggtcaatggtagaataggaaatatcttcctatggaaactagac

SEQ ID NO: 331933 - DNA, 298 bp, Homo sapiens
tattcaactcacagagttgaatgatcctttacacagagcagacttgaaacactctttttgtggaatttscaagtggagatttcagccgctttgaggtcaatggtagaataggaaatatcttcctatggaaactagacagaatgattctcagaaactcctttgtgatgtgtgcgttcaactcacagagtttaaccttttttttcaaagagcagttaggaaacactctgtttgtaaagtctgcaagtggatattcagacctctttgaggctttcgttggaaacgggatttcttcatattc

SEQ ID NO: 331934 - DNA, 327 bp, Homo sapiens
gagttgaatgatcctttacacagagcagacttgaaacactctttttgtggaatttgcaagtggagatttcagccgctttgaggtcaatggtagaawaggaaatatcttcctatggaaactagacagaatgattctcagaaactcctttgtgatgtgtgcgttcaactcacagagtttaaccttttttttcaaagagcagttaggaaacactctgtttgtaaagtctgcaagtggatattcagacctctttgaggctttcgttggaaacgggatttcttcatattctgctagacagaagaattctcagaaacttccttctgttgtgtg

SEQ ID NO: 331935 - DNA, 551 bp, Homo sapiens
tgcaagtggagatttcagccgctttgaggtcaacggtagaataggaaatatcttcctatagaaactagacagaatgattctcagaaactcctttgtgatgtgtgcgttcaactcacagagtttaacctgtcttttcatagagcagttaggaaacactctgtttgtaaagtctgcaagtggatattcagacctctttgaggctttcgttggaaacgggatttcttcatattctgctagacagaagaattctcagaaacttacttgtgttgtgtgtattcaactcacagagttgaatgatcctttacacagagcagacttgaaacactctttttgtggaatttgcaagtggagatttcagccgctttgaggtcaatggtagaataggaaatatcttcctatrgaaactagacagaatgattctcagaaactcctttgtgatgtgtgcgttcaactcacagagtttaaccttttttttcaaagagcagttaggaaacactctgtttgtaaagtctgcaagtggatattcagacctctttgaggctttcgttgga

SEQ ID NO: 331936 - DNA, 279 bp, Homo sapiens
aatgatcctttacacagagcagacttgaaacactctttttgtggaatttgcaagtggagatttcagccgctttgaggtcaatggtagaataggaaatatcttcctatggaaactagacagaatgattctcagaaactyctttgtgatgtgtgcgttcaactcacagagtttaaccttttttttcaaagagcagttaggaaacactctgtttgtaaagtctgcaagtggatattcagacctctttgaggctttcgttggaaacgggatttcttcatattc

SEQ ID NO: 331937 - DNA, 279 bp, Homo sapiens
aatgatcctttacacagagcagacttgaaacactctttttgtggaatttgcaagtggagatttcagccgctttgaggtcaatggtagaataggaaatatcttcctatggaaactagacagaatgattctcagaaactcctttgtgatgtgtgcgttcaactcacagagtttaaccttttttttcawagagcagttaggaaacactctgtttgtaaagtctgcaagtggatattcagacctctttgaggctttcgttggaaacgggatttcttcatattc

SEQ ID NO: 331938 - DNA, 279 bp, Homo sapiens
aatgatcctttacacagagcagacttgaaacactctttttgtggaatttgcaagtggagatttcagccgctttgaggtcaatggtagaataggaaatatcttcctatggaaactagacagaatgattctcagaaactcctttgtgatgtgtgcgttcaactcacagagtttaaccttttttttcaaagagcagttaggaaacactctgtttgtaaastctgcaagtggatattcagacctctttgaggctttcgttggaaacgggatttcttcatattc

SEQ ID NO: 331939 - DNA, 328 bp, Homo sapiens
tttttttcaaagagcagttaggaaacactctgtttgtaaagtctgcaagtggatattcagacctctttgaggctttcgttggaaacgggatttcttcmtattctgctagacagaagaattctcagaaacttccttctgttgtgtgtattcaactcacagagttgaacgatcctttacacagagcagacttgaaacactctttttgtggaatttgcaagtggagatttcagccgctttgtggtcaatggtagaaaaggaaatatcttcgaataaagactagacagaatgattctcagaaactcctttgtgatgtgtgcgttcaactcac

SEQ ID NO: 331940 - DNA, 400 bp, Homo sapiens
gcgttcaactcacagagtttaaccttttttttcaaagagcagttaggaaacactctgtttgtaaagtctgcaagtggatattcagacctctttgaggctttcgttggaaacgggatttcttcatattmtgctagacagaagaattctcagaaacttccttctgttgtgtgtattcaactcacagagttgaacgatcctttacacagagcagacttgaaacactctttttgtggaatttgcaagtggagatttcagccgctttgtggtcaatggtagaaaaggaaatatcttcgaataaagactagacagaatgattctcagaaactcctttgtgatgtgtgcgttcaactcacagagtttgacctttcttttcacagagcagttaggaaacactctgttt

SEQ ID NO: 331941 - DNA, 414 bp, Homo sapiens
attctcagaaactcctttgtgatgtgtgcgttcaactcacagagtttaaccttttttttcaaagagcagttaggaaacactctgtttgtaaagtctgcaagtggatattcagacctctttgaggctttcgttggaaacgggatttcttcatattctgctagamagaagaattctcagaaacttccttctgttgtgtgtattcaactcacagagttgaacgatcctttacacagagcagacttgaaacactctttttgtggaatttgcaagtggagatttcagccgctttgtggtcaatggtagaaaaggaaatatcttcgaataaagactagacagaatgattctcagaaactcctttgtgatgtgtgcgttcaactcacagagtttgacctttcttttcacagagcagttagg

SEQ ID NO: 331942 - DNA, 400 bp, Homo sapiens
gcgttcaactcacagagtttaaccttttttttcaaagagcagttaggaaacactctgtttgtaaagtctgcaagtggatattcagacctctttgaggctttcgttggaaacgggatttcttcatattctgctagacagaagaattctcagwaacttccttctgttgtgtgtattcaactcacagagttgaacgatcctttacacagagcagacttgaaacactctttttgtggaatttgcaagtggagatttcagccgctttgtggtcaatggtagaaaaggaaatatcttcgaataaagactagacagaatgattctcagaaactcctttgtgatgtgtgcgttcaactcacagagtttgacctttcttttcacagagcagttaggaaacactctgttt

SEQ ID NO: 331943 - DNA, 283 bp, Homo sapiens
tgcgttcaactcacagagtttaaccttttttttcaaagagcagttaggaaacactctgtttgtaaagtctgcaagtggatattcagacctctttgaggctttcgttggaaacgggatttcttcatattctgctagacagaagaattctcagaaacttccttctgttgtgtgtattcaactcacagagttgawcgatcctttacacagagcagacttgaaacactctttttgtggaatttgcaagtggagatttcagccgctttgtggtcaatggtagaaaagg

SEQ ID NO: 331944 - DNA, 381 bp, Homo sapiens
tttttttcaaagagcagttaggaaacactctgtttgtaaagtctgcaagtggatattcagacctctttgaggctttcgttggaaacgggatttcttcatattctgctagacagaagaattctcagaaacttccttctgttgtgtgtattcaactcacagagttgaacgatcctttacacagagcagacttgaaacactctttttgtggaatttgcaagtggagatttcagccgctttgtggtcaawggtagaaaaggaaatatcttcgaataaagactagacagaatgattctcagaaactcctttgtgatgtgtgcgttcaactcacagagtttgacctttcttttcacagagcagttaggaaacactctgtttgtaaag

SEQ ID NO: 331945 - DNA, 414 bp, Homo sapiens
attctcagaaactcctttgtgatgtgtgcgttcaactcacagagtttaaccttttttttcaaagagcagttaggaaacactctgtttgtaaagtctgcaagtggatattcagacctctttgaggctttcgttggaaacgggatttcttcatattctgctagacagaagaattctcagaaacttccttctgttgtgtgtattcaactcacagagttgaacgatcctttacacagagcagacttgaaacactctttttgtggaatttgcaagtggagatttcagccgctttgtggtcaatggtagaawaggaaatatcttcgaataaagactagacagaatgattctcagaaactcctttgtgatgtgtgcgttcaactcacagagtttgacctttcttttcacagagcagttagg

SEQ ID NO: 331946 - DNA, 400 bp, Homo sapiens
gcgttcaactcacagagtttaaccttttttttcaaagagcagttaggaaacactctgtttgtaaagtctgcaagtggatattcagacctctttgaggctttcgttggaaacgggatttcttcatattctgctagacagaagaattctcagaaacttccttctgttgtgtgtattcaactcacagagttgaacgatcctttacacagagcagacttgaaacactctttttgtggaatttgcaagtggagatttcagccgctttgtggtcaatggtagaaaasgaaatatcttcgaataaagactagacagaatgattctcagaaactcctttgtgatgtgtgcgttcaactcacagagtttgacctttcttttcacagagcagttaggaaacactctgttt

SEQ ID NO: 331947 - DNA, 366 bp, Homo sapiens
tttgtggtcaatggtagaaaaggaaatatcttcgaataaagactagacagaatgattstcagaaactcctttgtgatgtgtgcgttcaactcacagagtttgacctttcttttcacagagcagttaggaaacactctgtttgtaaagtctgcaagtggatattcagacctctttgaggccatcgttggaaacgggatttcttcatattctgctagacagaagaattctcagaaacttccttgtgttgtgtgtattcaactcacagagttgaacgatcctttacacagagcagacttgaaacactctctttgtggaatttgcaagtggagatttcagccgctttgtggtcaatggtagaaaaggaaa

SEQ ID NO: 331948 - DNA, 381 bp, Homo sapiens
tttttttcaaagagcagttaggaaacactctgtttgtaaagtctgcaagtggatattcagacctctttgaggctttcgttggaaacgggatttcttcatattctgctagacagaagaattctcagaaacttccttctgttgtgtgtattcaactcacagagttgaacgatcctttacacagagcagacttgaaacactctttttgtggaatttgcaagtggagatttcagccgctttgtggtcaatggtagaaaaggaaatatcttcgaataaagactagacagaatgattctcagaaactcctttgtgatgtgtgcgttcaactcacagagtttracctttcttttcacagagcagttaggaaacactctgtttgtaaag

SEQ ID NO: 331949 - DNA, 366 bp, Homo sapiens
tttgtggtcaatggtagaaaaggaaatatcttcgaataaagactagacagaatgattctcagaaactcctttgtgatgtgtgcgttcaactcacagagtttgacctttcttttcayagagcagttaggaaacactctgtttgtaaagtctgcaagtggatattcagacctctttgaggccatcgttggaaacgggatttcttcatattctgctagacagaagaattctcagaaacttccttgtgttgtgtgtattcaactcacagagttgaacgatcctttacacagagcagacttgaaacactctctttgtggaatttgcaagtggagatttcagccgctttgtggtcaatggtagaaaaggaaa

SEQ ID NO: 331950 - DNA, 381 bp, Homo sapiens
tttttttcaaagagcagttaggaaacactctgtttgtaaagtctgcaagtggatattcagacctctttgaggctttcgttggaaacgggatttcttcatattctgctagacagaagaattctcagaaacttccttctgttgtgtgtattcaactcacagagttgaacgatcctttacacagagcagacttgaaacactctttttgtggaatttgcaagtggagatttcagccgctttgtggtcaatggtagaaaaggaaatatcttcgaataaagactagacagaatgattctcagaaactcctttgtgatgtgtgcgttcaactcacagagtttgacctttcttttcacagagmagttaggaaacactctgtttgtaaag

SEQ ID NO: 331951 - DNA, 366 bp, Homo sapiens
tttgtggtcaatggtagaaaaggaaatatcttcgaataaagactagacagaatgattctcagaaactcctttgtgatgtgtgcgttcaactcacagagtttgacctttcttttcacagagcagttaggaaacactctgtttgtaaagtctgcaagtggatattcagacctcyttgaggccatcgttggaaacgggatttcttcatattctgctagacagaagaattctcagaaacttccttgtgttgtgtgtattcaactcacagagttgaacgatcctttacacagagcagacttgaaacactctctttgtggaatttgcaagtggagatttcagccgctttgtggtcaatggtagaaaaggaaa

SEQ ID NO: 331952 - DNA, 366 bp, Homo sapiens
tttgtggtcaatggtagaaaaggaaatatcttcgaataaagactagacagaatgattctcagaaactcctttgtgatgtgtgcgttcaactcacagagtttgacctttcttttcacagagcagttaggaaacactctgtttgtaaagtctgcaagtggatattcagacctctttgaggccatcgttggaaacgggatttcttcatattctgctagacagaagaattctcagwaacttccttgtgttgtgtgtattcaactcacagagttgaacgatcctttacacagagcagacttgaaacactctctttgtggaatttgcaagtggagatttcagccgctttgtggtcaatggtagaaaaggaaa

SEQ ID NO: 331953 - DNA, 314 bp, Homo sapiens
atagatattttgaccacttagaggccttcgttggaaacgkgtttttttcatgtcaggctagacagaagaattcccagtaacttccttgtgttgtgtgcattcaactcacagagttgaacgttcccttagacagagcagatttgaaacactctatttgtgcaatttgcaagtgtagatttcaagcgctttaaggtcaatggcagaaaaggaaatatcttcgtttcaaaactagacagaatcattcccacaaactgcgttgtgatgtgttcgttcaacacacagagtttaacctttctgttcatagagcagttagg

SEQ ID NO: 331954 - DNA, 314 bp, Homo sapiens
atagatattttgaccacttagaggccttcgttggaaacgtgttttttkcatgtcaggctagacagaagaattcccagtaacttccttgtgttgtgtgcattcaactcacagagttgaacgttcccttagacagagcagatttgaaacactctatttgtgcaatttgcaagtgtagatttcaagcgctttaaggtcaatggcagaaaaggaaatatcttcgtttcaaaactagacagaatcattcccacaaactgcgttgtgatgtgttcgttcaacacacagagtttaacctttctgttcatagagcagttagg

SEQ ID NO: 331955 - DNA, 390 bp, Homo sapiens
taacctttcttttcatagaacagttaggaaacactctgtttgtaaagtctgcacatagatattttgaccacttagaggccttcgttggaaacgtgtttttttcatgtmaggctagacagaagaattcccagtaacttccttgtgttgtgtgcattcaactcacagagttgaacgttcccttagacagagcagatttgaaacactctatttgtgcaatttgcaagtgtagatttcaagcgctttaaggtcaatggcagaaaaggaaatatcttcgtttcaaaactagacagaatcattcccacaaactgcgttgtgatgtgttcgttcaacacacagagtttaacctttctgttcatagagcagttaggaaacactctgtttgtaaagtct

SEQ ID NO: 331956 - DNA, 390 bp, Homo sapiens
taacctttcttttcatagaacagttaggaaacactctgtttgtaaagtctgcacatagatattttgaccacttagaggccttcgttggaaacgtgtttttttcatgtcaggctagacagaagaattcccagtaacttccttgtgttgtgtgcattcaactcacagagttgaacgttyccttagacagagcagatttgaaacactctatttgtgcaatttgcaagtgtagatttcaagcgctttaaggtcaatggcagaaaaggaaatatcttcgtttcaaaactagacagaatcattcccacaaactgcgttgtgatgtgttcgttcaacacacagagtttaacctttctgttcatagagcagttaggaaacactctgtttgtaaagtct

SEQ ID NO: 331957 - DNA, 390 bp, Homo sapiens
taacctttcttttcatagaacagttaggaaacactctgtttgtaaagtctgcacatagatattttgaccacttagaggccttcgttggaaacgtgtttttttcatgtcaggctagacagaagaattcccagtaacttccttgtgttgtgtgcattcaactcacagagttgaacgttcccttagacagagcagawttgaaacactctatttgtgcaatttgcaagtgtagatttcaagcgctttaaggtcaatggcagaaaaggaaatatcttcgtttcaaaactagacagaatcattcccacaaactgcgttgtgatgtgttcgttcaacacacagagtttaacctttctgttcatagagcagttaggaaacactctgtttgtaaagtct

SEQ ID NO: 331958 - DNA, 390 bp, Homo sapiens
taacctttcttttcatagaacagttaggaaacactctgtttgtaaagtctgcacatagatattttgaccacttagaggccttcgttggaaacgtgtttttttcatgtcaggctagacagaagaattcccagtaacttccttgtgttgtgtgcattcaactcacagagttgaacgttcccttagacagagcagatttgaaacactctatttgtgcaatttgcaagtgtagatttcaagcgctttaaggtcartggcagaaaaggaaatatcttcgtttcaaaactagacagaatcattcccacaaactgcgttgtgatgtgttcgttcaacacacagagtttaacctttctgttcatagagcagttaggaaacactctgtttgtaaagtct

SEQ ID NO: 331959 - DNA, 314 bp, Homo sapiens
atagatattttgaccacttagaggccttcgttggaaacgtgtttttttcatgtcaggctagacagaagaattcccagtaacttccttgtgttgtgtgcattcaactcacagagttgaacgttcccttagacagagcagatttgaaacactctatttgtgcaatttgcaagtgtagatttcaagcgctttaaggtcaayggcagaaaaggaaatatcttcgtttcaaaactagacagaatcattcccacaaactgcgttgtgatgtgttcgttcaacacacagagtttaacctttctgttcatagagcagttagg

SEQ ID NO: 331960 - DNA, 358 bp, Homo sapiens
aacttccttgtgttgtgtgcattcaactcacagagttgaacgttcccttagacagagcagatttgaaacactctatttgtgcaatttgcaagtgtagatttcaagcgctttaaggtcaatggcagaaaaggaaatatcttcgtttcaaaactagacagaatcattcccacaaactgcgttgtgatgtgttcgttcaacacacagagtttaacctttstgttcatagagcagttaggaaacactctgtttgtaaagtctgtaagtggatattctgatatcttgtggccttcgttggaaacgggatttcttcatattgtgctagacagaagaattctcagtcacttccttgtgttgtgtg

SEQ ID NO: 331961 - DNA, 358 bp, Homo sapiens
aacttccttgtgttgtgtgcattcaactcacagagttgaacgttcccttagacagagcagatttgaaacactctatttgtgcaatttgcaagtgtagatttcaagcgctttaaggtcaatggcagaaaaggaaatatcttcgtttcaaaactagacagaatcattcccacaaactgcgttgtgatgtgttcgttcaacacacagagtttaacctttctgttcatagagcagttaggaaacactctgtttgtaaagtctgwaagtggatattctgatatcttgtggccttcgttggaaacgggatttcttcatattgtgctagacagaagaattctcagtcacttccttgtgttgtgtg

SEQ ID NO: 331962 - DNA, 562 bp, Homo sapiens
tcagtcacttccttgtgttgtgtgtattcaactgacagagttgaactttcatttagagagagcagatttgaaacactgtttttgtggaatttgcaagtggagatttcaagckctttggggccaaaggcagaaaaggatatatcttcgtataacaactggacagaatcattctcagaaactgctgcgtgatgtgtgcgttcaactctcagagtttaacttttcttttcattcagcggtttggaaacactctgtttgtaaagtctgcacgtggatattttgaccacttagaggccttcgttggaaacgggtttttttcatgtaaggctagacagaagaattcccagtaacttccttgtgttgtgtgcattcaactcacagagttgaacgttcccttagacagagcagatttgaaacactctatttgtgcaatttgcaagtgtagatttcaagcgctttaaggtcaatggcagaaaaggaaatatcttcgtttcaaaactacacagaatcattcccacaaactgcgttgtgatgtgttcgttcaactcacagagtttaacctttc

SEQ ID NO: 331963 - DNA, 266 bp, Homo sapiens
ttgtgttgtgtgtattcaactgacagagttgaactttcatttagagagagcagatttgaaacactgtttttgtggaatttgcaagtggagatttcaagcgctttggggccaaaggcagaaaasgatatatcttcgtataacaactggacagaatcattctcagaaactgctgcgtgatgtgtgcgttcaactctcagagtttaacttttcttttcattcagcggtttggaaacactctgtttgtaaagtctgcacgtggatatttt

SEQ ID NO: 331964 - DNA, 537 bp, Homo sapiens
attgtgctagacagaagaattctcagtcacttccttgtgttgtgtgtattcaactgacagagttgaactttcatttagagagagcagatttgaaacactgtttttgtggaatttgcaagtggagatttcaagcgctttggggccaaaggcagaaaaggawatatcttcgtataacaactggacagaatcattctcagaaactgctgcgtgatgtgtgcgttcaactctcagagtttaacttttcttttcattcagcggtttggaaacactctgtttgtaaagtctgcacgtggatattttgaccacttagaggccttcgttggaaacgggtttttttcatgtaaggctagacagaagaattcccagtaacttccttgtgttgtgtgcattcaactcacagagttgaacgttcccttagacagagcagatttgaaacactctatttgtgcaatttgcaagtgtagatttcaagcgctttaaggtcaatggcagaaaaggaaatatcttcgtttcaaaactacacagaatcattcccac

SEQ ID NO: 331965 - DNA, 470 bp, Homo sapiens
tgaactttcatttagagagagcagatttgaaacactgtttttgtggaatttgcaagtggagatttcaagcgctttggggccaaaggcagaaaaggatatatcttcgtatracaactggacagaatcattctcagaaactgctgcgtgatgtgtgcgttcaactctcagagtttaacttttcttttcattcagcggtttggaaacactctgtttgtaaagtctgcacgtggatattttgaccacttagaggccttcgttggaaacgggtttttttcatgtaaggctagacagaagaattcccagtaacttccttgtgttgtgtgcattcaactcacagagttgaacgttcccttagacagagcagatttgaaacactctatttgtgcaatttgcaagtgtagatttcaagcgctttaaggtcaatggcagaaaaggaaatatcttcgtttcaaaactacacagaatcattc

SEQ ID NO: 331966 - DNA, 537 bp, Homo sapiens
attgtgctagacagaagaattctcagtcacttccttgtgttgtgtgtattcaactgacagagttgaactttcatttagagagagcagatttgaaacactgtttttgtggaatttgcaagtggagatttcaagcgctttggggccaaaggcagaaaaggatatatcttcgtataamaactggacagaatcattctcagaaactgctgcgtgatgtgtgcgttcaactctcagagtttaacttttcttttcattcagcggtttggaaacactctgtttgtaaagtctgcacgtggatattttgaccacttagaggccttcgttggaaacgggtttttttcatgtaaggctagacagaagaattcccagtaacttccttgtgttgtgtgcattcaactcacagagttgaacgttcccttagacagagcagatttgaaacactctatttgtgcaatttgcaagtgtagatttcaagcgctttaaggtcaatggcagaaaaggaaatatcttcgtttcaaaactacacagaatcattcccac

SEQ ID NO: 331967 - DNA, 537 bp, Homo sapiens
attgtgctagacagaagaattctcagtcacttccttgtgttgtgtgtattcaactgacagagttgaactttcatttagagagagcagatttgaaacactgtttttgtggaatttgcaagtggagatttcaagcgctttggggccaaaggcagaaaaggatatatcttcgtataacaactrgacagaatcattctcagaaactgctgcgtgatgtgtgcgttcaactctcagagtttaacttttcttttcattcagcggtttggaaacactctgtttgtaaagtctgcacgtggatattttgaccacttagaggccttcgttggaaacgggtttttttcatgtaaggctagacagaagaattcccagtaacttccttgtgttgtgtgcattcaactcacagagttgaacgttcccttagacagagcagatttgaaacactctatttgtgcaatttgcaagtgtagatttcaagcgctttaaggtcaatggcagaaaaggaaatatcttcgtttcaaaactacacagaatcattcccac

SEQ ID NO: 331968 - DNA, 470 bp, Homo sapiens
tgaactttcatttagagagagcagatttgaaacactgtttttgtggaatttgcaagtggagatttcaagcgctttggggccaaaggcagaaaaggatatatcttcgtataacaactggacagaatcattctcagaaactgctgcgtgatgtgtgcgttcaactctcagagtttaacttttcttttcattcagcggtttggaaacastctgtttgtaaagtctgcacgtggatattttgaccacttagaggccttcgttggaaacgggtttttttcatgtaaggctagacagaagaattcccagtaacttccttgtgttgtgtgcattcaactcacagagttgaacgttcccttagacagagcagatttgaaacactctatttgtgcaatttgcaagtgtagatttcaagcgctttaaggtcaatggcagaaaaggaaatatcttcgtttcaaaactacacagaatcattc

SEQ ID NO: 331969 - DNA, 399 bp, Homo sapiens
tgtgcgttcaactctcagagtttaacttttcttttcattcagcggtttggaaacactctgtttgtaaagtctgcacgtggatattttgaccasttagaggccttcgttggaaacgggtttttttcatgtaaggctagacagaagaattcccagtaacttccttgtgttgtgtgcattcaactcacagagttgaacgttcccttagacagagcagatttgaaacactctatttgtgcaatttgcaagtgtagatttcaagcgctttaaggtcaatggcagaaaaggaaatatcttcgtttcaaaactacacagaatcattcccacaaactgcgttgtgatgtgttcgttcaactcacagagtttaacctttctgttcatagagcagttaggaaacactgt

SEQ ID NO: 331970 - DNA, 399 bp, Homo sapiens
tgtgcgttcaactctcagagtttaacttttcttttcattcagcggtttggaaacactctgtttgtaaagtctgcacgtggatattttgaccacttrgaggccttcgttggaaacgggtttttttcatgtaaggctagacagaagaattcccagtaacttccttgtgttgtgtgcattcaactcacagagttgaacgttcccttagacagagcagatttgaaacactctatttgtgcaatttgcaagtgtagatttcaagcgctttaaggtcaatggcagaaaaggaaatatcttcgtttcaaaactacacagaatcattcccacaaactgcgttgtgatgtgttcgttcaactcacagagtttaacctttctgttcatagagcagttaggaaacactgt

SEQ ID NO: 331971 - DNA, 470 bp, Homo sapiens
tgaactttcatttagagagagcagatttgaaacactgtttttgtggaatttgcaagtggagatttcaagcgctttggggccaaaggcagaaaaggatatatcttcgtataacaactggacagaatcattctcagaaactgctgcgtgatgtgtgcgttcaactctcagagtttaacttttcttttcattcagcggtttggaaacactctgtttgtaaagtctgcacgtggatattttgaccacttagaggccttcgttggaaacgggwttttttcatgtaaggctagacagaagaattcccagtaacttccttgtgttgtgtgcattcaactcacagagttgaacgttcccttagacagagcagatttgaaacactctatttgtgcaatttgcaagtgtagatttcaagcgctttaaggtcaatggcagaaaaggaaatatcttcgtttcaaaactacacagaatcattc

SEQ ID NO: 331972 - DNA, 468 bp, Homo sapiens
actttcatttagagagagcagatttgaaacactgtttttgtggaatttgcaagtggagatttcaagcgctttggggccaaaggcagaaaaggatatatcttcgtataacaactggacagaatcattctcagaaactgctgcgtgatgtgtgcgttcaactctcagagtttaacttttcttttcattcagcggtttggaaacactctgtttgtaaagtctgcacgtggatattttgaccacttagaggccttcgttggaaacgggttttttkcatgtaaggctagacagaagaattcccagtaacttccttgtgttgtgtgcattcaactcacagagttgaacgttcccttagacagagcagatttgaaacactctatttgtgcaatttgcaagtgtagatttcaagcgctttaaggtcaatggcagaaaaggaaatatcttcgtttcaaaactacacagaatcattcc

SEQ ID NO: 331973 - DNA, 399 bp, Homo sapiens
tgtgcgttcaactctcagagtttaacttttcttttcattcagcggtttggaaacactctgtttgtaaagtctgcacgtggatattttgaccacttagaggccttcgttggaaacgggtttttttcatgtaaggctagacagaagaattcccagtaacttccttgtgttgtgtgcattcaactcacagagttsaacgttcccttagacagagcagatttgaaacactctatttgtgcaatttgcaagtgtagatttcaagcgctttaaggtcaatggcagaaaaggaaatatcttcgtttcaaaactacacagaatcattcccacaaactgcgttgtgatgtgttcgttcaactcacagagtttaacctttctgttcatagagcagttaggaaacactgt

SEQ ID NO: 331974 - DNA, 562 bp, Homo sapiens
tcagtcacttccttgtgttgtgtgtattcaactgacagagttgaactttcatttagagagagcagatttgaaacactgtttttgtggaatttgcaagtggagatttcaagcgctttggggccaaaggcagaaaaggatatatcttcgtataacaactggacagaatcattctcagaaactgctgcgtgatgtgtgcgttcaactctcagagtttaacttttcttttcattcagcggtttggaaacactctgtttgtaaagtctgcacgtggatattttgaccacttagaggccttcgttggaaacgggtttttttcatgtaaggctagacagaagaattcccagtaacttccttgtgttgtgtgcattcaactcacagagttgaacgttcccttagacagagcagatttgaaacactctrtttgtgcaatttgcaagtgtagatttcaagcgctttaaggtcaatggcagaaaaggaaatatcttcgtttcaaaactacacagaatcattcccacaaactgcgttgtgatgtgttcgttcaactcacagagtttaacctttc

SEQ ID NO: 331975 - DNA, 621 bp, Homo sapiens
tcacttccttgtgttgtgtgtattcaactgacagagttgaactttcatttagagagagcagatttgaaacactgtttttgtggaatttgcaagtggagatttcaagcgctttggggccaaaggcagaaaaggatatatcttcgtataacaactggacagaatcattctcagaaactgctgcgtgatgtgtgcgttcaactctcagagtttaacttttcttttcattcagcggtttggaaacactctgtttgtaaagtctgcacgtggatattttgaccacttagaggccttcgttggaaacgggtttttttcatgtaaggctagacagaagaattcccagtaacttccttgtgttgtgtgcattcaactcacagagttgaacgttcccttagacagagcagatttgaaacactctatttgtgcaatttgcaagtgtagatttcaagcrctttaaggtcaatggcagaaaaggaaatatcttcgtttcaaaactacacagaatcattcccacaaactgcgttgtgatgtgttcgttcaactcacagagtttaacctttctgttcatagagcagttaggaaacactgtgtttgtaaagtctgtaagtggatattctgacatct

SEQ ID NO: 331976 - DNA, 621 bp, Homo sapiens
tcacttccttgtgttgtgtgtattcaactgacagagttgaactttcatttagagagagcagatttgaaacactgtttttgtggaatttgcaagtggagatttcaagcgctttggggccaaaggcagaaaaggatatatcttcgtataacaactggacagaatcattctcagaaactgctgcgtgatgtgtgcgttcaactctcagagtttaacttttcttttcattcagcggtttggaaacactctgtttgtaaagtctgcacgtggatattttgaccacttagaggccttcgttggaaacgggtttttttcatgtaaggctagacagaagaattcccagtaacttccttgtgttgtgtgcattcaactcacagagttgaacgttcccttagacagagcagatttgaaacactctatttgtgcaatttgcaagtgtagatttcaagcgctttaaggtcaatggcagaaaaggaaatatcttcgtttcaaaactasacagaatcattcccacaaactgcgttgtgatgtgttcgttcaactcacagagtttaacctttctgttcatagagcagttaggaaacactgtgtttgtaaagtctgtaagtggatattctgacatct

SEQ ID NO: 331977 - DNA, 413 bp, Homo sapiens
agaattcccagtaacttccttgtgttgtgtgcattcaactcacagagttgaacgttcccttagacagagcagatttgaaacactctatttgtgcaatttgcaagtgtagatttcaagcgctttaaggtcaatggcagaaaaggaaatatcttcgtttcaaaactacacagaatcattcccacmaactgcgttgtgatgtgttcgttcaactcacagagtttaacctttctgttcatagagcagttaggaaacactgtgtttgtaaagtctgtaagtggatattctgacatcttgtggccttcgttggaaacgggatttcttcattttctgctagacagaagaattctcagtaacttccttgtgttgtgtgtattcaactcacagagttgaacgatgctttacacagagcagac

SEQ ID NO: 331978 - DNA, 581 bp, Homo sapiens
gaattcccagtaacttccttgtgttgtgtgcattcaactcacagagttgaacgttcccttagacagagcagatttgaaacactctatttgtgcaatttgcaagtgtagatttcaagcgctttaaggtcaatggcagaaaaggaaatatcttcgtttcaaaactacacagaatcattcccacaaactgcgttgtgatgtgttcgttcaactcacagagtttaacctttctgttcatagagcagttaggaaacactstgtttgtaaagtctgtaagtggatattctgacatcttgtggccttcgttggaaacgggatttcttcattttctgctagacagaagaattctcagtaacttccttgtgttgtgtgtattcaactcacagagttgaacgatgctttacacagagcagacttgaaacactctttttgtggaatttgcaagtggagatttcagccgctttgaggtcaatggtagaaaaggaaatatgttcgtaaagaaacaagacagaatgattctcagaaactcctttgtgatgtgtgcgttcaactcacagagtttaacctttcttttcatagagcag

SEQ ID NO: 331979 - DNA, 475 bp, Homo sapiens
atttgtgcaatttgcaagtgtagatttcaagcgctttaaggtcaatggcagaaaaggaaatatcttcgtttcaaaactacacagaatcattcccacaaactgcgttgtgatgtgttcgttcaactcacagagtttaacctttctgttcatagagcagttaggaaacactgtgtttgtaaagtctgtaagtggatattctgacatcttgtggccttcgttggaaacgggatttcttcatwttctgctagacagaagaattctcagtaacttccttgtgttgtgtgtattcaactcacagagttgaacgatgctttacacagagcagacttgaaacactctttttgtggaatttgcaagtggagatttcagccgctttgaggtcaatggtagaaaaggaaatatgttcgtaaagaaacaagacagaatgattctcagaaactcctttgtgatgtgtgcgttcaactcacagagttta

SEQ ID NO: 331980 - DNA, 407 bp, Homo sapiens
cagaagaattcccagtaacttccttgtgttgtgtgcattcaactcacagagttgaacgttcccttagacagagcagatttgaaacactctatttgtgcaatttgcaagtgtagatttcaagcgctttaaggtcaatggcagaaaaggaaatatcttcgtttcaaaactacacagaatcattcccacaaactgcgttgtgatgtgttcgttcaactcacagagtttaacctttctgttcatagagcagttaggaaacactgtgtttgtaaagtctgtaagtggatattctgacatcttgtggccttcgttggaaacgggatttcttcattttmtgctagacagaagaattctcagtaacttccttgtgttgtgtgtattcaactcacagagttgaacgatgctttaca

SEQ ID NO: 331981 - DNA, 407 bp, Homo sapiens
cagaagaattcccagtaacttccttgtgttgtgtgcattcaactcacagagttgaacgttcccttagacagagcagatttgaaacactctatttgtgcaatttgcaagtgtagatttcaagcgctttaaggtcaatggcagaaaaggaaatatcttcgtttcaaaactacacagaatcattcccacaaactgcgttgtgatgtgttcgttcaactcacagagtttaacctttctgttcatagagcagttaggaaacactgtgtttgtaaagtctgtaagtggatattctgacatcttgtggccttcgttggaaacgggatttcttcattttctgctagacagaakaattctcagtaacttccttgtgttgtgtgtattcaactcacagagttgaacgatgctttaca

SEQ ID NO: 331982 - DNA, 340 bp, Homo sapiens
gttcaactcacagagtttaacctttctgttcatagagcagttaggaaacactgtgtttgtaaagtctgtaagtggatattctgacatcttgtggccttcgttggaaacgggatttcttcattttctgctagacagaagaatyctcagtaacttccttgtgttgtgtgtattcaactcacagagttgaacgatgctttacacagagcagacttgaaacactctttttgtggaatttgcaagtggagatttcagccgctttgaggtcaatggtagaaaaggaaatatgttcgtaaagaaacaagacagaatgattctcagaaactcctttgtgatgtgtgcg

SEQ ID NO: 331983 - DNA, 340 bp, Homo sapiens
gttcaactcacagagtttaacctttctgttcatagagcagttaggaaacactgtgtttgtaaagtctgtaagtggatattctgacatcttgtggccttcgttggaaacgggatttcttcattttctgctagacagaagaattmtcagtaacttccttgtgttgtgtgtattcaactcacagagttgaacgatgctttacacagagcagacttgaaacactctttttgtggaatttgcaagtggagatttcagccgctttgaggtcaatggtagaaaaggaaatatgttcgtaaagaaacaagacagaatgattctcagaaactcctttgtgatgtgtgcg

SEQ ID NO: 331984 - DNA, 565 bp, Homo sapiens
ccttgtgttgtgtgcattcaactcacagagttgaacgttcccttagacagagcagatttgaaacactctatttgtgcaatttgcaagtgtagatttcaagcgctttaaggtcaatggcagaaaaggaaatatcttcgtttcaaaactacacagaatcattcccacaaactgcgttgtgatgtgttcgttcaactcacagagtttaacctttctgttcatagagcagttaggaaacactgtgtttgtaaagtctgtaagtggatattctgacatcttgtggccttcgttggaaacgggatttcttcattttctgctagacagaagaattctcagtaacttccttgtgttgtgtgtattcaactcacagagttgaacgatsctttacacagagcagacttgaaacactctttttgtggaatttgcaagtggagatttcagccgctttgaggtcaatggtagaaaaggaaatatgttcgtaaagaaacaagacagaatgattctcagaaactcctttgtgatgtgtgcgttcaactcacagagtttaacctttcttttcatagagcag

SEQ ID NO: 331985 - DNA, 624 bp, Homo sapiens
tatatgttaaacaaaccttacatttctagaataaatcccacttactaatgtattttttgtacattgttgaatttggtttgctgtattttattgaattgttttacatctatattcacaaaggttattggtttgtattcttccatttgtggtgacttagaaaatgattatttctcctcttctttatgaagtatttctcttgattctttttcaaatgtttgatggaatttgccagtggagccatattggtttataatttttgtaataatttttttattactaactcatttcctatagggctctatttgtatttcctattttggagttaattttattagttatgtctttctagaaatgtttccattttctatagaatatctaattttttggtatagaattgttcacagtataaccttataatctcttttattttggtaaagttggtagtaatgttgctatttcatctgtgatttgataatttgaaacttttttatttcttgtttaactaaagaatctcyattttgatgcagaaccaacttttgattttattgatttttgtatatatttttttactgttctctattctatttatttctcctttaatcttcattttctgtcttcacattg

SEQ ID NO: 331986 - DNA, 541 bp, Homo sapiens
agggctgtttttagtttcagcagtgtatcttggtaagcaaagattcaaagactccagaggagagaaaaatagtggaggagtctaatggcatcagggacatgggggcttctacagaacacctccggcaactatgcatgtatcaggcactgtcacttaaaccattcatgggtttgactagttgaatacaatgtgttttgttaaacccttctcccacctcattttgaaagccatttgttataattcaaagaacaggttcatttatgtgrcacacttcaaaatcagattttgacagaattatttgaagctgaggaagactcacaaactcttttataagctttctgaaagtttcttttgataaaactactatgtcacaatttgccaagagaaagtagatataaaacagaaaagcttggtgacaatgacatgagtcacgagcttggtgaaatgtcacacctagaagacaatgtcttatggaaattattaacacaatgttcggaacagctttcatggagctctgcctcttagctgtccagaccctatt

SEQ ID NO: 331987 - DNA, 607 bp, Homo sapiens
atatagactacatctgaggaaaagaaaatatatgtttcatgcaaatgtaaccaaaatcaagcaagagtatctatacttataccagaaaaacatagactttaagttaaaaactaaaatagtcaaataaagctgttttgtattgagaaaagggtccattcaagaggaaaagaaaacaattataaatatatataaaaccaacatcaaagctctatataaaacagaagtcgacagaacttaaggaaggaatagacacaaatgcaataatagtaggaaacattcatgcctgcttttaatcatgttgtattagtmcctgacttccagcaacaccacatctttctgtcttcttagccttccaaatttctaggaagtcccaaattttcccacattttcctgtcttcttctgaaccctccaaactgttccaacctctgcctgttaccccgtccaaagtcacttccgtatttccagatgtctttatagcagcactccactctctgtggtgccaatatactgtattagtttgttctcatgctgatacaaagaacttctcaagactgggtaatttataaaagaaagaggcttaatttacttacaattccacatggctgg

SEQ ID NO: 331988 - DNA, 640 bp, Homo sapiens
taattacatacaaaattccttccataaatttatcttcacaaatcttatcacaacttacacagacaatctatgacaaggttgaatatttttacttctcctaaatatcactcttttttaaacagccagtcattttattttagaaccagaatttaaccatacaagatcttttttatacaaaattgtattttctttatgacctgctttaccaaaaatacaactttatattcacagttttctttgtatttcctttcctcaacttacactttcggttttggatactttgtatcctctttgtagaaagtttaaggtttgtactkcatgtctttgtgtgagctctgtgggggtggggcaggagtaagtaatttatatattgtagaagttctcccccatcaagaggtagctcagttagagtttttgctggggcctgtttgaataagtatggactatttttcaaaccttaaatttgggctttccaggttgaagctattgggtaaagattggtttgtgtggcttccccaggagaaatagggctattggagggaaaaatgaattcagatgtttggtaaatattatccaggcatccatttgggagagtatatttttacacaaaagaagattgggacatttaggcattaccagg

SEQ ID NO: 331989 - DNA, 640 bp, Homo sapiens
taattacatacaaaattccttccataaatttatcttcacaaatcttatcacaacttacacagacaatctatgacaaggttgaatatttttacttctcctaaatatcactcttttttaaacagccagtcattttattttagaaccagaatttaaccatacaagatcttttttatacaaaattgtattttctttatgacctgctttaccaaaaatacaactttatattcacagttttctttgtatttcctttcctcaacttacactttcggttttggatactttgtatcctctttgtagaaagtttaaggtttgtacttcatgtctttgtgtgagctctgtgggggtggggcaggagtaagtaatttatatattktagaagttctcccccatcaagaggtagctcagttagagtttttgctggggcctgtttgaataagtatggactatttttcaaaccttaaatttgggctttccaggttgaagctattgggtaaagattggtttgtgtggcttccccaggagaaatagggctattggagggaaaaatgaattcagatgtttggtaaatattatccaggcatccatttgggagagtatatttttacacaaaagaagattgggacatttaggcattaccagg

SEQ ID NO: 331990 - DNA, 640 bp, Homo sapiens
taattacatacaaaattccttccataaatttatcttcacaaatcttatcacaacttacacagacaatctatgacaaggttgaatatttttacttctcctaaatatcactcttttttaaacagccagtcattttattttagaaccagaatttaaccatacaagatcttttttatacaaaattgtattttctttatgacctgctttaccaaaaatacaactttatattcacagttttctttgtatttcctttcctcaacttacactttcggttttggatactttgtatcctctttgtagaaagtttaaggtttgtacttcatgtctttgtgtgagctctgtgggggtggggcaggagtaagtaatttatatattgtagaagttctcccccatcaagaggtagctcagttagagtttttgctrgggcctgtttgaataagtatggactatttttcaaaccttaaatttgggctttccaggttgaagctattgggtaaagattggtttgtgtggcttccccaggagaaatagggctattggagggaaaaatgaattcagatgtttggtaaatattatccaggcatccatttgggagagtatatttttacacaaaagaagattgggacatttaggcattaccagg

SEQ ID NO: 331991 - DNA, 576 bp, Homo sapiens
aatagcaattggtcccttaagtaataaaaagggggtgcgggctgggtacagtggctcacacctgtaatcccaacactttggcaagcccaggtgggtggatcacctgaggtcaggagatcaagaccagcctggccaacatggtgaaacactgtctctgctaaaaatacaaaaattagccaggcatgggggtgggtgcctgtaatcccagttactcagtaggctgaggcaggagaatcacttgaacccgggaggaagagggtgcagtgagctgagctcgtgccactgaactccagcctcggtgacagaatgagactctatcgcaaaatgaggagggggtggagtgtgagtttttttgggggactgccacttgtcctcactacccaacaggattttggacamaagttgcccagagaaggaggttagcataggataatcagctcttgaatccaaaataaaatgtataatcttacctgacaccattagacttgccttggtttcgttttttttttttatgatgatgtcagatctcagagacagctggagaagaggaccacttcagttcaaatccattactgg

SEQ ID NO: 331992 - DNA, 583 bp, Homo sapiens
aatgctttaggactagttctcctttggggattcctgggtctaagttggtatgtttgataagcgtttcttgcagccttttgagaaaggctataggtttgttatttggcccttggtctatggtggctaacttataataatttccttatttgatgttactcctttttattacctctgctaggcataggagcatattgtttctggcctgtatccccctctgggtagtgtagtcccaaccggggtcctgcatgggaacagctgtagttaccatgaggtaggtagcatctgccaagtgtaggttatccttgcagcagaatgctgccttatatatgttttytttttcttgtgagagggcttgtttcatgaggatgaacaagttaataaaatataagagttaattgttggaatccattggtgagcctctcagtgtcagctgagagctctcctaggttttctttaacttggcaaaggtcctgtatagaagagcggacctggacctaggtgggtctgggtggctcaattataatttatatttgtccttcacatgttccaaaagaaagaggaaaatgaatcagaaaggtgcctg

SEQ ID NO: 331993 - DNA, 521 bp, Homo sapiens
caatatttgtaatatgacaatccagaagaagaagagagagacaacaatgcaaagagattttttaaaagaaataatggccccagacaggtgcagtggctcatgcctataatcccaacaatttaggagggaggccaagtttgggcagatcgcttgagcccaggagtttgagaccaacctaggaaacaggccaaagctccatctctaccaaatatgtatatatacaaaactagccaagcgtggtgttgcatgcatgcagtctcagctacactggagactgagatgggaggatgggttgcacccatgaggcagagattgcagtgagctgtgatcatgccattgtgctgcagcctgggcaacagagccagaccttgcctcaaaaaaataaaataaataaataaataaataaataaataaataaayaaacaggaatcattgacccaaattttggaaatttaacgaaatacataaatgtatgaattcaagaagctcaatgaaattcaaccagtataatcccaaagaca

SEQ ID NO: 331994 - DNA, 628 bp, Homo sapiens
tggttaaaatgaccacatttctagcccaatttgtcactctttgtcctatgatctgaaacccactatgtcagtagcaagttagatatttatgatatatatcagccctttaaacccaaagataacattatttatgagggtgaaaaaaagtcagcgatgcttttaaaagtggctactataaatttaatattgaggattatacacagctccaaatttcttacacttttaagttttttgacagcgaaatggacatgattctgaactatatgaagctggtccttgcaggtctttcttgtttaattaaagtctttgartatttctatccatctctcttatgattcacaggtagccaaaccaaatgattcaccaagaaattttgggccaactaagaatatatggtgtcttagagagtagtagttaactagatggggaataaaggcaaattttaaagtggagttacagatatttctgcaaacttatctagcttctactccaaagcatgaaaaatcagttttaagtaacagaggataagaggctttggcctcaagtatttcaagagatccaccacttgctagctgtgcagtatgtgcaagtgatttcatcactcagagcttcagtttccttatctgaa

SEQ ID NO: 331995 - DNA, 611 bp, Homo sapiens
ttgcgcctcacctatccacatagtcaaggacctggaaaactcaaattattttctgctatgctttaagcctccctgcttctgtatacaagataagagtgtgaagtcttcattaytgtactgttttcacacccaggcataagttatggatacagcaacagagagtgaaatttctttgtgcttctcattggcttcggttcgctgccttaaacggactgagtcaaggccatgttttcatgccatagacatgctattcaaataccagtgtgaccacatttgaaaagccatcctgtaccacttcattgccgcagatgtcttttacatctggcaagggccgtttctctgcatgtcaacagtaattcagtttaacagctgtctcttttgacaagcttagtgtcagactctaaaatgacagggtgacagtttttcttttctttaacagaacatagtgcaaattaactatttgaatacagaagcattgaatgtatttagagcagtttttttctgagtaagctgaataggctttgggattttatttgtatgattacatggtctataaagctattgaagctgatgattcaaggcattctgcagggagcttcgatctgtacctt

SEQ ID NO: 331996 - DNA, 627 bp, Homo sapiens
cctccttcttttgttaaaaacatgtttgtgcacgtatacaattgcactaacaaaataccttaattgtacttccttttcctttatcatgtgatataagatttattgactttatatcagcatttaarcattgttaactttatgtaatagtatttgggatggggataggtgcatttccggtcatatgaagaatagttgtattatgttaggcataattataaccttattactgtctttatttgaagatcatatataatctcaggagatgtgtatgggttcaattggacaaggggtggacttgggatggttaatactgagtgtcaacttgattggattgaaggatacaaaatattgatcccctgagtgtgtctgtgaaggttttgccaaaggagattaacatttgagtcagtgggctggggaaggcagatccatccttaatctggtgggcacaatctaatcagctgcagtgaatataaagcaggcagaaaaaacaagaaaaacccagactggcgtagcctcccagcctacatctttctcccctgctggatgcttcctgcccttgaacaactgactccaagttcttcagcttgggataaggactggctttccttgctcctcagcttgcagaca

SEQ ID NO: 331997 - DNA, 590 bp, Homo sapiens
aaatatttaggtccttatatttcaaatatcaaaaaatcttttaagagtcatccctggaaatgtcctcatgtttaaaacctatggtttaggkcctaaaattaaggctcaatattatgcaagccttgccatctgggagaaacttggaagcctcaaatggcctaaattcaagtttcaagttttcctctctgttttactcccacagaagggttccctattcaaacacctttcattgttatggagaagacactgtttctgcttaccctgagtagcaggccattggtaccttgaagaccatgaaattattcacagaagtctgtcatattcttccgtgaaaacctagtcatgtgggttggtagacagtggatctgtatttttgtaaaggaaaattgagaagactagccttcctaaaaatgacttattaatagtggaatcacatcgatacagcagacagtgggataaatttgggagccaaagagctgtgactggtgctactcattatacaatataagaaaatgcatgccaatgcatacagtaggcttttgtggccaagtaaacggttcttccaaacccaaagtgaaaaaaaaaatata

SEQ ID NO: 331998 - DNA, 525 bp, Homo sapiens
aaatatttaggtccttatatttcaaatatcaaaaaatcttttaagagtcatccctggaaatgtcctcatgtttaaaacctatggtttaggtcctaaaattaaggctcaatattatrcaagccttgccatctgggagaaacttggaagcctcaaatggcctaaattcaagtttcaagttttcctctctgttttactcccacagaagggttccctattcaaacacctttcattgttatggagaagacactgtttctgcttaccctgagtagcaggccattggtaccttgaagaccatgaaattattcacagaagtctgtcatattcttccgtgaaaacctagtcatgtgggttggtagacagtggatctgtatttttgtaaaggaaaattgagaagactagccttcctaaaaatgacttattaatagtggaatcacatcgatacagcagacagtgggataaatttgggagccaaagagctgtgactggtgctactcattatacaatataagaaaatgcatgccaatg

SEQ ID NO: 331999 - DNA, 626 bp, Homo sapiens
aagcacaaaattaagcagctgtttgggcaaacactgagctagctgagtattttttcataacccagtggtgcctggaaccccagcaagacagaacaattcactcccctggaaaggaggctgaagccagagagccaagtggtatcgctcagcaggtcccactcccacagagcccagcaatctaagaaccactggcctgaaattctcactgccagcacagcagtcggaagtcgacctcggatgatcaagcttggtagggggaggggcttccaacataactgaggctttactgagccgttattctctgacagtactaaggaggctgggaagtctgggctgggtgcagcaaagtggctttggccagactgcttctctagattcctcctcactgggcaggacatctgtaagggaaaggtaacagccccagtcaggggattacagacaaaacccccatctccctgggacaragcacctgggggaaggagtggctgtgggtgcagcttcagtggatttaatcattcctgcctgctggctttgaagagagtagctgatcctgacaagagagattctcccagcacagcgcaccagctccgctaaaggacatactgcctcctcaagtggttccctga

SEQ ID NO: 332000 - DNA, 626 bp, Homo sapiens
aagcacaaaattaagcagctgtttgggcaaacactgagctagctgagtattttttcataacccagtggtgcctggaaccccagcaagacagaacaattcactcccctggaaaggaggctgaagccagagagccaagtggtatcgctcagcaggtcccactcccacagagcccagcaatctaagaaccactggcctgaaattctcactgccagcacagcagtcggaagtcgacctcggatgatcaagcttggtagggggaggggcttccaacataactgaggctttactgagccgttattctctgacagtactaaggaggctgggaagtctgggctgggtgcagcaaagtggctttggccagactgcttctctagattcctcctcactgggcaggacatctgtaagggaaaggtaacagccccagtcaggggattacagacaaaacccccatctccctgggacagagcacctgggggaaggagtggctgtgggtgcagcttcagtggatttaatmattcctgcctgctggctttgaagagagtagctgatcctgacaagagagattctcccagcacagcgcaccagctccgctaaaggacatactgcctcctcaagtggttccctga

SEQ ID NO: 332001 - DNA, 609 bp, Homo sapiens
agcttcagtggatttaatcattcctgcctgctggctttgaagagagtagctgatcctgacaagagagattctcccagcacagcgcaccagctccgctaaaggacatactgcctcctcaagtggttccctgacccctgagcctcctgactkggagaaacctcccaacaggggttgacattgcatacaggagagctccggctggcatcaggctggtgccttctgggacaaagctttcagaggaaggagcaggcagcaatctttgctgttctgcagcctgtccaggccaacggggtctggactggaactccagcaaattgcagcagacctgcagaagaggtgcctgactgtttgaagaaaaactaacaaacagaaagcaacaacatcaacatcaacacatcaacataaaggactcccacacaaaaactccatccaaaggtcatcagcctcaaatatcaaaggtagataaatccacgaagatgaggaaaaaccagcgcaaaaacactgaaaatttcaaaatttcaaaattggaggctcttctcctccaaaggattgcaactcctctccagcaagggcacaaaactggatggaggatgagattgatgaattgac

SEQ ID NO: 332002 - DNA, 469 bp, Homo sapiens
gaatggaatggaatggagtggaattggatggaatggaatgtaatcaacgcaaatggaatggaatggaatggaatggaaaggaatggaatggaatggaatggaatgcagtggaatggaatcaaccagagaggaatggaagagaatggaatggaatggaatagaatggaatggaatcaacccgagtggaatggaatggattggaatggaatggaatggaatggaattgaacgaaatggaawggaatggaatggaatggaatggattgggatggactggaatggaatgatgtggaatgaggtggaatggaattgaatggatcaccacccatgcaatggaatcgaatggaatggaatgtaatagaatggaatggaatggaatcgaatcaactcgagtcgaatggaacggaatggaatggaatggattggaatgcaatggaatggaatacaatggaatggaatggaatggaatg

SEQ ID NO: 332003 - DNA, 615 bp, Homo sapiens
ctacacatttatttattgtgtgtgtgattatatgctgcctttttccttcactagtctttaagttttatgtgggtagagactgtcttgatgaccactttatctccaagactttttattgaataactgaatgatgtgtatcttaaatattaccatgcataatcatcctaacagtgatttgaacttacatctgtatagtatcaattttattgtccattagctggaggaacttcttttaaatggktttctgtaagaatggtgaggccaagagggataataaggccgcacgtaattatatgtcaccttttctctctgtcatgcagagctcctccatggggattcaggtacatttccatgaggcacaaaggttcttatcctaatattagacacaaaataataccccaagacaagggggctcagcaatatcaatttacagagtatgggtcagatcagagaatttgtatcagatttcccaagcactgggtcatttcttgattcctgtcagcaactttaaaattagttcccaagaggcttctagagaaaaattattttctgcattttccaattgttttataatgcttaaaaataaaatgttaaccaaaacagaatgactcttca

SEQ ID NO: 332004 - DNA, 615 bp, Homo sapiens
ctacacatttatttattgtgtgtgtgattatatgctgcctttttccttcactagtctttaagttttatgtgggtagagactgtcttgatgaccactttatctccaagactttttattgaataactgaatgatgtgtatcttaaatattaccatgcataatcatcctaacagtgatttgaacttacatctgtatagtatcaattttattgtccattagctggaggaacttcttttaaatgggtttctgtaagaatggtgaggccaagagggataataaggccgcaygtaattatatgtcaccttttctctctgtcatgcagagctcctccatggggattcaggtacatttccatgaggcacaaaggttcttatcctaatattagacacaaaataataccccaagacaagggggctcagcaatatcaatttacagagtatgggtcagatcagagaatttgtatcagatttcccaagcactgggtcatttcttgattcctgtcagcaactttaaaattagttcccaagaggcttctagagaaaaattattttctgcattttccaattgttttataatgcttaaaaataaaatgttaaccaaaacagaatgactcttca

SEQ ID NO: 332005 - DNA, 587 bp, Homo sapiens
agtttagtaactggcactattgcattcatctgcatgcaattgtttaatgcagtttccatctcgagacagtaggttccatgggaggagcaagcatttttgcttcgttcaccattgaatacccttgtctaatacagtgcctggcacatagtaagtgttcagtaattgttgactaatgaatctgtgtatatttcccaaacttttccctattctcagagaatggcttttcctttatcctttctaagaagatccttcagcctrtattctgggcatactttctcacaactcttcaatgatttaattccctaatgatcctctttctggcagctccaatacttcactttcactgacttttatactttatattcaaagatttagacaacacttcttttgcccattcactcaactctgctgtcttctctcatcaagctaaccagcattcccttaaaaaaaatccatgaaggagaaggtaggaaagtcatctgattgcaatgcaagtttgacccctgtaaaagacgggagaaacatggaagggttgggtaggaagggtttcagtttaaagcaaatttctaagaaaattgctatcagac

SEQ ID NO: 332006 - DNA, 587 bp, Homo sapiens
agtttagtaactggcactattgcattcatctgcatgcaattgtttaatgcagtttccatctcgagacagtaggttccatgggaggagcaagcatttttgcttcgttcaccattgaatacccttgtctaatacagtgcctggcacatagtaagtgttcagtaattgttgactaatgaatctgtgtatatttcccaaacttttccctattctcagagaatggcttttcctttatcctttctaagaagatccttcagcctgtattctgggcatactttctcacaactcttcaatgatttaattccctaatgatcctctttctggcagctccaatacttcactttcactgacttttatactttatattcaaagatttagacaacacttcttttgcccattcactcaactctgctgtcttctctcatcaagctaaccagcattcccttaaaaaaaatccatgaaggagaaggtaggaaagtcatctgattgyaatgcaagtttgacccctgtaaaagacgggagaaacatggaagggttgggtaggaagggtttcagtttaaagcaaatttctaagaaaattgctatcagac

SEQ ID NO: 332007 - DNA, 588 bp, Homo sapiens
tttgacccctgtaaaagacgggagaaacatggaagggttgggtaggaagggtttcagtttaaagcaaatttctaagaaaattgctatcagactaataggagccttggaggtaaagtcacctgtaagaggagtaccatatctctaagaaatgactttttctcattcaatatgttaatgcagcaaatgacagcgatttctcaaatgttaaaccatcctgttttgggacagattccatttaattatagtatataatcatttttccatattgtttgtttatgtctgctattattttgttggggactttaacacatgtacattaatgagtgaagcgggtcttttacattcctttctcatattgtctttttagttttgaaatcaaagttatgctggcctcatagagtaagtttggatatattccttttttttcttcccctctagaatactctctaagattggggcaatctgtttcttttaagtttgttacaacttgccaataaaaccaactgaacctagtgtggggtgtgtgtgtgkgtgtgtgtgtgtgtgtaaagatactaaattactacttcaatttattttatagttttt

SEQ ID NO: 332008 - DNA, 581 bp, Homo sapiens
tctttcccttttttaactttccagagttttatctatcttagtttttttgtttctttgtttttccaaaagaatcagcctttctgagccctggagggtcgagtacccaaccatgggtaatcaggaactgtgcaactaacctgcctatcagagtctgggttccaacagaaccagagggcacaagtaaggtgacccagaatcctatgccactgttcattagtgcctctcagttcctacctgtagcccatatggggttcccttataattgttgataaaggaagaaaaaggccaagtatggttcctggacggatgactttctatgtmggtataaagtaaaagtgaactgccattgcaatacagccctcttcaagggtggtcccaaaagaggccagtaatgggaaattgttccaacagccagagcttcaggtacagcacttggtgacccctttggaggcctgaggtaaggatagatgggtagtggcaagtgatttcaccggtcggccaggggcctggaaggaaaaagatggaaagatcagggacaagggagactaaaactggagagggttcagaaactggacaagtga

SEQ ID NO: 332009 - DNA, 581 bp, Homo sapiens
tctttcccttttttaactttccagagttttatctatcttagtttttttgtttctttgtttttccaaaagaatcagcctttctgagccctggagggtcgagtacccaaccatgggtaatcaggaactgtgcaactaacctgcctatcagagtctgggttccaacagaaccagagggcacaagtaaggtgacccagaatcctatgccactgttcattagtgcctctcagttcctacctgtagcccatatggggttcccttataattgttgataaaggaagaaaaaggccaagtatggttcctggacggatgactttctatgtcggtataaagtaaaagtgaactgccattgcaatacagccctcttcaagggtggtcccaaaagaggccagtaatgggaaattgttccaacagccagagcttcaggtacagcacttggtgacccctttggaggcctgaggtaaggatagatgggtagtggcaagtgatttcaccggtyggccaggggcctggaaggaaaaagatggaaagatcagggacaagggagactaaaactggagagggttcagaaactggacaagtga

SEQ ID NO: 332010 - DNA, 420 bp, Homo sapiens
tgtatgatttcaattatatgccactctggaaaaagcaaaactacagaggtagtaaaaaagttagtagtttgctagggattcagggctaggaaagggagggttgaataggtaaagcacagatgttttcagggtgggaaagctattctgtatggtactataattttaaattcatggcagtctgcatttttcaaagccattgcatgttacagcaaaaagaatgaaatttaatgtatgcaaatttaaacaaataatttgtcactttgcagaaatctcaggatggaatgcagaatttgacaaaacaatctaactgtattytaaatgtataaaacaaccttcctgaaaggggtgagggaaaggtgctgagtgaagtaattctggaaatgagcgaagtctgtaaaactaaaggcgaaagaaaccgta

SEQ ID NO: 332011 - DNA, 565 bp, Homo sapiens
ttgcagaaaactaatatgatttccaattataagaatactcaggcaaagcatacgtggcacactaagcacaaaattgtgatcatgtgcattgctttgtttttacattcatttttttaaaatcttcaatcactgacacaagtgtcctagaatttgctccaggtatagattacacatgacaatccctctaaaaggcatatctgtrtaacaccggctgtctgtaataaagataaaggatttccaggcttagacgagggaagaggaaaatgcaaaagcatacatcttgtagtgccaaacaataaaaatcttttgatgccttggagacaatacaaaccaaagggagaatactaataaaaacagatatttgggatttcattgaaatcttcctgtacctctatttctatgggccaaaatgaagatttccttcctccatctgagacccagcatttgaatctattttttcgcattactttaaaaaaaaacatattgttgttaatctcttaattggaattagttttagaactaaattttaactttctagaggcactcgaatctatgtagacactta

SEQ ID NO: 332012 - DNA, 488 bp, Homo sapiens
aagctatacttacagcaaaaattttagcttaaattgctttaatatcaactggttaaaaaatgacaattattttaaaatgtaaccaaaagttagaaaacataataaagcaaattaaggcaagagataatttttatgaaatttgtaataagaaatcagtgaactttaaaaagagaaaaatggcagaattgattaaaatactatttttatatcacttcaaggactgtataatatcgactctaaagacatacatattgtctactttaggaaccaggcaaaatcatcatcacaaacattttctggctcctacctaattcattctttcagaagataattttttgagttatatacacattgtttcatctaaagagggggtgatgcttcctaactgttacacaaggactaygtaattatttaattcatagcttccaactctatttgaagattttggccaaatcgagcattctttgtgtcaggtacactcattaata

SEQ ID NO: 332013 - DNA, 541 bp, Homo sapiens
actaaacatgtccttgcatacctgatagtttccctttctggtgcagtcagtctcccggcccactgtctccattcaaacatctgggctgctaagggaacttccttctaatgaatgttgctcagccacacagactagccattatcatgtacccaagggccccaaccttagagctatcaacstggcttgcttaccttggtgaatttttgcttattcttagtcaatttcccctctacacctcttgtaacttcttatccctctccaaactcctaatccacctcatctaccttacccactgtgatggactaaattgtgtctatcccaaaaccacatgttgaagtcttcacccctgatgtgcctctgtttggagatacagtctttaagaaggtaattacatttaaagaggtcataagagtgggaccctaatccaacagaatggttgtccttataagagaagatacagcaaggatgtgagcccacagaggaaaggccacgtgaagacagagagcaggcagccatctgcaggctgaggagagagacctcc

SEQ ID NO: 332014 - DNA, 641 bp, Homo sapiens
atttaaggtttgtttcatcatagtcttcaagcaagaagctgggaatagtgaaatacttctttatttgacatttttgttttatttttattttattttttatttttccataggttgttggggtacaggtggtgtttggttacatgagtaagttctttagtggcgatttgtgagattttggtgcacccatcaccccagcagtatacctgcatcctctttatagtctgttatcccttacccctttcccacccttccccttaagtccccaaaatccattgtatcattcttatgctgttgtgtcctcatagcttagctcccacatatcaatgagaacatacaatgtttggttttccattcctgagttacttaacttagaataatagtctccagtctcattcagatcactgtgaatctttaaggctgagtagtattctatcatatatattatatatgtatataatatatatataaatatatataatatatacatatataatatatatggatgaagaaactgtgatatatatatcatatatatcgcatgtgtatatatatatcatatatatcgcatgtgtgtgtrtatatatatatatatatatatatatatatatatatatatatatgcgcattgattgatgggcatt

SEQ ID NO: 332015 - DNA, 534 bp, Homo sapiens
ttgttaatcttcaactgatgctatttttctctggtctcttttcacatttggctcctccttgtcgtttgttaaatgtaaattttcctgtctaagcacaaatgttcayagcaggcctgtaatctcaaatctcaaatcatttaatataattgcactaattcaatgtgcaccacttaaattcacaatgctcacttagatcctgattcagaaaactccaaatagtagccatgctcacttgtgatagaaagcttatttataaacttctcttttcctccttagatgaataaactaaattcttcaagattctcaaaaagaaaatctgtggtggcagccatttatctattgtctttcaccccaatccactcttttatactatatttgcaattctgggtcttggaacatgcttctttgccagatgactttatgttaggttctgccaacagggaggactaggaggatcttagaaggcaagaggaggaagagaatttatttttcttttctgtgtattgttcttgctagtatctcctcagtagtggc

SEQ ID NO: 332016 - DNA, 605 bp, Homo sapiens
tatgttacctgctctgcctccatcccctgccacacacacactatgcaaagcggagtccagaagacatgtggtgtccagcaaatgctttctgaattgacagacatgctttagaagttttactggctcaaagcagtgaagggaawtcaacacactcattagagagaggcagcactgggtgacggtaaacgctgtgtattctgcgaaggccagggcagtgtgcgatgttggccaacacatcagagcaagggatgctgcagtagtctccgtgaaaagcaaggaaaccaaggcttagagaggttagagaaggagcaagtcctaggtaaccgcctgcagctgggcaggattggggctcaggtctctggcaccccagcctcagtgtctttcccacacaacatgatgcctgcaagatttcctgttacagtgacagaccatttagtgagtctgtcaatttgattctaatttggtatggcatgcatctccaggaaaacagacaaacaaacttaggccccattttatgaagtttccataaaatcccagaagcattatccaaaagacattcagatgttctggaaagctccgtgaagaatttgggtttggggaactgt

SEQ ID NO: 332017 - DNA, 601 bp, Homo sapiens
aagtctttttttaagtttattgtcttccaatatggtactttcttttcattatatttgaattttggtataatcattaatacaccaaaaatagtctaaaattgaagatatgcaacaatgacttcagtgcactttaaaatgactgctacattggattgagataaacaaacacataatcaaattactctaatatgatacacattgatttatgaatgaatatgtgtaagcattttattgcagcaacatgtttcttcaggtcatttcaccaygtagatgctaattttgagtactgtttcatggaaccactcaactctgttagggtgagaagtgtcagatacctaataagatgtaataagatgagataaatacaacatgacttcacaaaacattactcactgcttatagtatgttgtatgtttattccctacaaacaagaatgttgataaattttacttcaagtgatatccatcaaagaaaaaaataatatgtatggtatgtttgcaattgtttatgctaacttatctagtcaaaattctgttttgagtaggtattggtgagaaatgaatcctctacttacacagctagtaatcagaaacttttttat

SEQ ID NO: 332018 - DNA, 437 bp, Homo sapiens
gacccagatattgagagactcactcctctgagggataaggctgcacgtggcagactggaaascagtgaattgaaacctatttccttctacatttctctggagacaagatggtaatataccagggccatggtcttcctgtcttgatatctgtgctcatcccaaatgcacaaaaaaaaaaaaaaaaaaaaaaaagacagcttcaggagacagatctttggacaacaaaaagatctttagattagatctatctacgccggaacaggcaggtgggcttcagtctttgaaaagcagaagctactatgcatgagttgttgttctcataactgaaaatctaaaaatataaggaaattcattttaatactgacagattggaaaacggaaggaagaatttagaaaactcagaaatagtgtcaaagaacaaggcaagaaaggctcag

SEQ ID NO: 332019 - DNA, 627 bp, Homo sapiens
ccaaagaagtgacctttttctagaattttactgtayggtacatgccctctaagtacaggaaatgttagcaatgggcaaataaatctcatgctccggcatgactggaataatggctgaaattgaagggagtgacaggctgtaggctgttattcaaatgagggcaatatagccaagtggtgtaacatggcttgctagacaaacataatcatcaggaaaagctgcaaatctatagttgagagatggctacaagtaaagagagagtaaaagggagagaaaggctgggcgtggtggctcacacttgtaatcctaacactgtgggaggccaaggggagcagatggcttgagctcaggagttcgagatcagcttgggcaacacggtgaaaccccatctctataaaaaatacaaaaattagctgggtgtggtggcacatgcctgtggtcagagctactcgggagactgaggtgggaggattgcttgaatccagcaggtcaaggaagcagtgagccatgatcactccactgcactccagcctgggtgacagagtgagaccctgtctcaaaaataaaataaaaattaaaagaaagagagagagagatacagtgcatacttagacctcaagcagttaa

SEQ ID NO: 332020 - DNA, 445 bp, Homo sapiens
aggcaattactaactccagggaagcagaattacataagaaatggaaaattttcatgctacatgctttaaatcagttgtgagtgacaattatatatatatatatatawaacatatattatatattatatatattagcttaacacagtaagaaatgccaagagtgtgcagtagaaagctgttatttgaaatacgacattaaatattttacagtagctgcctttagggagggccaaggaggattatgaaagagtgaggcagagggctcctgatcttggagtagagtttaatgttttaacttatgtaactactgtattttggaaaatagaaaattaaaattgaaaataggcaaagcattgaagcaacaaatacacagggaaagaacctcttactaaacttttatctcttatgtctctcatatcttatatctatgtttgtatctatgtat

SEQ ID NO: 332021 - DNA, 578 bp, Homo sapiens
agaaaggatcaatttggttttcatggttaggttaattattaaaaaataatgactgtattttctgaaatttgaatcctgggggaaaacaaatatttaaggaaaatattttttattgttactaagtatctggagaatataaaggaagtggctgtattataacactctagtaatagaactttttcttcctttctgattcatagcatattgtgtgctttacctttccacttaccattacagaagattttataaaatatatttagaattcccaatgattttcagtaattagagaaagtcagctatttttccaagtttccaattaatctccatatctaataagaaaatagttaccagaatttggagcctctatactaaaaggacaatttagaggcctgccatgggaaatcacccactcttagaattgaaatataaagactatgataatatatttaaatctacagataaaaaattggcatttctcrtcatattaatcaaaatcaaattactatagaatagtggattagaaactaagtttttcatttctccaatattctttcaaaattcaattttaaaaggttgat

SEQ ID NO: 332022 - DNA, 694 bp, Homo sapiens
actgactactttttacttttgtagtgcatatatgacataaatcatcaccttaaaacaattrgaaaaaccaatacctgtttcttatctctaattgaagtatcaagtgatagctgtttatcatatatattgaaataattgtccttttcttttaagaatgtaatctgtagctgttgatactcttgagctaaacgcagattttcttcaagtgaatcagctattattttctagaaggtaaaaaaatataattgaattgtgtgtatatatatataaacgcaattaaaatcatttggatttgtttgaatttttacatcttttaaattatctaaacatgctctattatgtatagtagaaaaataacaaaataaccaaaaaatgtttctcctgataccaatatcctttgttgatttaataatattcttttttgatgcaggtttttttttaacattaatgtgtgattcatcagagttagtctgacttttaattcacctcttttcactgcctttttcctgaacttccctctatcatgccttgaaaggtgcccagtcctgggaccctttaatcagcatcccaggagcactttcacagtttcctgtcctcttatacttttctctagcccctgtgcttaaatgagtagatggtaccttgtagcttagaatttcatctccatgaagttcagaatgttggtacccacaga

SEQ ID NO: 332023 - DNA, 552 bp, Homo sapiens
tctgctaaaaatcaataatccttgatatgttgagaaacatttacctttgaaataaaaacatgtgtatttcttttgttggactttatttattttagttggaaagagatttgatgacttgtgtcataacattccttaaataattttaggataagctggggttaaaatcttaaataaaaactttggaatcaataaaataatttctgaggacacttgatatcttaaaatggtcacagctacctactagatgaaattcattatcttgagattcaacatcttggcaaagtcttcatcactaattaaaatagcaatggaagagcayctgcaattactctgtttaggataaaattacaagggttataaatctccaagcttcagggcataaaccgatcaccagctggggtgaaaaagaaatgtctacctattgtgtagttttgcaaaattaggtacattatatgttttactccctcagaaacatctgccacagactactatatgagaggctattggactgcatgcaagggacactactttggctatgttatagaaattaca

SEQ ID NO: 332024 - DNA, 620 bp, Homo sapiens
tattaatctgtccctaagttaaaggagcccacagaaaatccaaaagcagaatatgaggcaaatagctctttttcacattcaattatcttgtgttaaattcttaaatcacaaactttggcaatatgtagattaaatgaaacagggctatagttactttttaaaaaatgtttaaattttttaagctatattcaaatattttatttaaaggaaactcagcaaaggcagagtcaaatacactgttcattcttctaataggacagaccacctaggagaagtgagaagtggagggatgagagaaaattaatctgttccatatttccaaaggccaaagtttttatgtaatgrgccaaaatagcaagggaaaaagaatgtggctgcctagttgtcatttgaataatagagatttacaggtcaaaaaatagatgaggttggattgcatggttctggggttgagccaggtagattgaatagaggtaaattcttctcttgattacacgatctcatgttgcaccagagagaggaaactgatataccagcatttccctctctaaaacagttgtccatcctgagcttcttattaatgctattcttccttgcttggttcttttcttcaccaaaaa

SEQ ID NO: 332025 - DNA, 620 bp, Homo sapiens
tgatacagggtcctatattatatgcrgacatcacctgaaagcagacagctatagcactacaatcactttctgggacagccatgaagaacaatggtgaaggaggattcccccagtgggcagcatttcctatgagcagtgtacctagttgtttatttggtctggatggagaaaaagccaggggcatgaatctatatcaattgatggtctgtggttaatagtttggctggatgaccatggactactaaggggcatggttagaaaattgatgaaaaggaggtctggggaagacaaatatgtattgcccattctgaatgggcaaaaaatgaagatatttgtgtctcatattaaaatttaccaaaaggtcacctctgcagaagaagattttagaaatcaagtgggtaagatggtccattcagtcaattatgaattagcctcttttctcaaccacgcctggcattgtccaatgagcttctgaacaaaatggccatggtgtttatggcaattaatgggatggaggttatgcatgggctcagcaacattgacttccactcaccaaagctgacctggatacagccactgcagagtccttaatctgccagcaacgtagaccaacttgagtc

SEQ ID NO: 332026 - DNA, 568 bp, Homo sapiens
ctttctgggacagccatgaagaacaatggtgaaggaggattcccccagtgggcagcatttcctatgagcagtgtacctagttgtttatttggtctggatggagaaaaagccaggggcatgaatctatatcaattgatggtctgtggttaatagtttggctggatgaccatggactactaaggggcatggttagaaaattgatgaaaaggaggtctggggaagacaaatatgtattgcccattctkaatgggcaaaaaatgaagatatttgtgtctcatattaaaatttaccaaaaggtcacctctgcagaagaagattttagaaatcaagtgggtaagatggtccattcagtcaattatgaattagcctcttttctcaaccacgcctggcattgtccaatgagcttctgaacaaaatggccatggtgtttatggcaattaatgggatggaggttatgcatgggctcagcaacattgacttccactcaccaaagctgacctggatacagccactgcagagtccttaatctgccagcaacgtagaccaacttgagtccctgatatggcaa

SEQ ID NO: 332027 - DNA, 569 bp, Homo sapiens
agcacaccaacatggcacatgtatacatatgtaacaaacctgcacgttgtgcacatataccctaaaacttaaagtataattaaaaaaaaaaaagaaagagacacttaatctagatatggacttgccttccctrctataaaacacttcatctagttgtagttgtttggtagggtgacccaaaccctcattcttgaagagtgatgtctattcaatcctgatcaattggggtattgtagttttccattgacatttatcacaagacatgggggtacaaagagaggccctggagggcctccttattattctcattgtgtagtagcagcccaatttccccagggtagtcaggatcaatcactgcagccagcagagtaacccctgtctgacaaccacagacatacagaatgccttatcatttggcacagcatttttttctgactagtgaattcactccatagtaaatgaaatgtattgataggccaatgctcatggaagtcactggttttatcatgttccccatcatcctgaagcaggcacttgatataatggtggaatggccttttgagcactca

SEQ ID NO: 332028 - DNA, 610 bp, Homo sapiens
gcagtagcgtttataaactgtttgtgtatacaaaggcttgtgcaaacaagtaaaacaatgaaataaggatacctgtaagcatgtgcattggttttagtatctgctaacgctggaagtagatttttgagacatggtccctgtggtccccttagtttatgcctcagtgtcagctgtgccctcttacctccacctgcacacatttgcttgatgctagtgtttarcacctgttgccaggagattttttttttcctgtttttggcaatgcctagcacaatagtgggtatctatttcccagtttacactctcaggctggcaggcttcaatatctcatcctacctttgtaatcttcagacacactgcactcctctaattttgttctggattttgcataatataatgcacttcagactagaacaaaaccagaagctaatacattcaaggggtatataaaatgatagcacaacatttgatagctaccaggcaaaatttttaataagaactagatttccagaaaaaagtgtaatctctagttatttatttgataaatattagatttccagaagaagagtataatcatcacttaactggttttaaagagtagttaaaaata

SEQ ID NO: 332029 - DNA, 467 bp, Homo sapiens
aaatcaaatgactctatcaaaaagtgggtgaaggatatgagcagacacttctcaaaggaagacatttaagcagccaatattgtttttaacctagtaatatgtcctctagatgtatgtcaaatgtggttccaataggatttgttggtggaaagcatgtgggccatgagagagaggtgtcctcatatcattttttaaatgtttgtcttataatgggcctcaaaagaaatatttaaaaaattacagagaaaataatagatatttgctgcatgttttatgtgtgtcaggcattgttttaagtgcacagacataacagcacatcatttcattttcatgataagcctatgaagagtgtgctattacctctatcttacagttgagaaatctgatgctttgtttyttaattaacttgtacaggttcacataactcattagtggtaaagttgcaattccaacccagacagtctgac

SEQ ID NO: 332030 - DNA, 602 bp, Homo sapiens
ggcacaatctctctacacggagagaaatcagtgactaacattttaccccgcaccaggaactgcatcacataatctgtcactgtccaaatacaattttctttttttgtaaatgagtcagtctcaaacctctgattgcaccatttcaaatgcaaataattctgttccaactgcctctttacattagctaaatgaagtcatcagtaaccaaaattggagaaaatcttaacacaactgccgtaaacaacttttaaagttttataycccataagaatgaaaccgttatgagatagttaagattcattaaagatacccacccctggtataactcatattcaaaaacaataatactttcccccataaccaatagtggtcagagcaaattataatcaaagatagatttcttggagggtgatgataccattagatttaaggaattaaaaatacatgaaacttttgagttaatgaacagggtccttaactgctcatttaattcaaacagctgtttgttaatgccctaagcagtgtcataaactgtgaaaatactgttgagtgcaagacactagttaatgctataaagcaacacatgctctaatattaaaagg

SEQ ID NO: 332031 - DNA, 588 bp, Homo sapiens
ttttcatgtaatctaaaagaggttatgcactattgaaagcaaattcattggtctattaattaaaccgtctttaactgacaaacatctatatattacgttgttttttcttttggttaaagcatttatcaagttttttctttaaagactgggtttcaagtgttttatataataatatttgcacttataaaattatccatagtttaaatgactaatatttattaacaatcatattttaaaaggtaatttaaaagaatctgcctataaacagcattcatgaaaaatgaggtgtyggcttttcttttcatttgaaatggtacttttctctcaatatataatatctgcttcttcctctttattgttaagaacaacaaacacaattttttctaaatagtgttaataatataccattaacagagtaattccacaaataaaactacaaatagtatgtaaatagtggtggcttgctggaaaaatgcttttatagtttactttcctatttctttcattaccaattgtaatttgtaatgatgatgtaataatacagcagaattaagaaagaaaactttgcaacagatttcgattccctaa

SEQ ID NO: 332032 - DNA, 588 bp, Homo sapiens
ttttcatgtaatctaaaagaggttatgcactattgaaagcaaattcattggtctattaattaaaccgtctttaactgacaaacatctatatattacgttgttttttcttttggttaaagcatttatcaagttttttctttaaagactgggtttcaagtgttttatataataatatttgcacttataaaattatccatagtttaaatgactaatatttattaacaatcatattttaaaaggtaatttaaaagaatctgcctataaacagcattcatgaaaaatgaggtgtcggcttttcttttcatttgaaatggtacttttctctcaatatataatatctgcttcttcctctttattgttaagaacaacaaacacaattttttctaaatagtgttaataatataccattaacagagtaattccacaaataaawctacaaatagtatgtaaatagtggtggcttgctggaaaaatgcttttatagtttactttcctatttctttcattaccaattgtaatttgtaatgatgatgtaataatacagcagaattaagaaagaaaactttgcaacagatttcgattccctaa

SEQ ID NO: 332033 - DNA, 546 bp, Homo sapiens
atgatgattttgtccccttagatgcatgttagacttaagctaatcaattctgcaggcaattacaaaagaaaagaaaaaaatttaaagaacatgtacaaaatgctagaaactcatagatcaaagtttgcacctgagcggtaagttatcaacaagaattatataataattttaggtctccaggaatagtaattttagaacytataaatctattattactttttaatattctactcacacatatggttataaaaatattcatattatgcttaaggagtaccttttccataatttatgaatgttcatagttgggggttaggataattgaaaactactttatgaagagattgtgtccaacatctgcttagatcgcaggcttatttcaacatgtgactacaaacagcagttttaaaaacagtaattacaagcttgcatcccaaattatctcaaatgttttgagaaatttcataataatgatcaagaaatttattgcaattgagaaaaattaatagtagctacagaatgttcactattagctactgaaatatg

SEQ ID NO: 332034 - DNA, 584 bp, Homo sapiens
tgacagactgactcttggtctgccctgcaaggtttcccatatccttcttctggtaatagacacagattcttgtttacagagcctgtgatccaatgtaactgatttttgttgtctattacagcaaacttgaaagatccctttagaatttttataccagtctgtacaaatgactgttttataaatctagcaaataagatcagaaaactcaccatgaggaaggggaaaatctgatcctgggttgttattttgcagagcaagttcaaggcagaggctgacccagcctccgtgggaccttgagcaggcagaggggaaatgactgtgtagagcttaaacaaaaagagctgagaagccagagaactgaatgttggcagagaactgacctactgtagtgtggaacaaatgtaatggggcttaatatggtgaaatgacatgttcsctttctccccacgtaccttgaaaaactactacaagaatagcagatcatcagaccaagtattggtgactgccttgataagtatggagttagaagatgtctacctctgacttcaggaatgcttattttccataatgacactatgaggtag

SEQ ID NO: 332035 - DNA, 603 bp, Homo sapiens
agaagaaagacaaagagatcaatctggaagtttgaaatattcctacttccactccaatgcaaacaaatgatgaaagaaatcaaaatgttagtctctcattggaacacatttcattaatttattcagttcattcacaagcattcattaagcatctattatgcattgtcattgtcatgcaaacactttttaaaaagcaagtaatatattgtttttctatagtttaaactgatttcataaaatatagtctaaggcataacaaatgattstataaggaattaagtaaaaaagaatacccttaaataggttaatattaatagtaatgtaaatttttattttagcaattgtgtatttacaccattataaatttctacaactattagttctactctttgaagagaacctagtctgagctgacgtttgttctatgtctgcaaagattcaaagccttcccaggttttatctaagtaactttgttttatgttctatttatacttcataaatccattataagcccatctagaaaagcaattatttccaggcatcaactaatttactggacttcttctcaatggatatgtggtttctactttagacaaccaatct

SEQ ID NO: 332036 - DNA, 584 bp, Homo sapiens
caaagtgagactccatctcaaaaaaaaaaaaaaaaagaaaaagaactttgctaggtataacagtcttggctgccagattgttgctcttgttgctgttttcagtactttgaatctatcatcccattctctccttgcctgtaaggtatctgctacaaaatttgctgttggtctgatggggattccattatgtgtaacttgctgcttttctcttgctgcttttataattctctctttgtctttgtctcattgttgccagttggacaacaatgtgccttggagaagacccttcgaggytgaatctattggaattgttgaacttcctgtatctgaacatgtatatctttttttgcaaggcttaggaagttttcagctattttttcatttaacaggtgtttttatgcttttatccatctcgtctccttctggaaatcccaaaattcaagtattggatgactttatggtgttccatgtgtcacataggctttcttcattctttttctttttattattataaaaactgacacattgtaattgtacacatggggtataatttgatgtttcaatacatatatatgttgtataat

SEQ ID NO: 332037 - DNA, 589 bp, Homo sapiens
cattgttgacactttttttcttttattgttcgttgttggacacttgagataactccatattttggctattgtaaatagtgctgccataaacatgggagtacagatagctcttcaacatactgattccatttcgcttagatatatatggagtattgggattgctggattatataacagttctattttaatttcttgagtaccatgcatgcagtttttcacagcagctgtcctaacttacaattgctctaacagtgtgtaagcattctcctttctacacatcctcatcaaaaatattttttgtctttttattatagccattctaactggaatgaggggatatctcactgtgattttgatttgtctgactgggttatttcaaaagatctgtcttcaagttcagaaatcatttcttttgtttgatctagtctattgttggagtgctcaatggtattgttttatttcatttattraattcttcagtactaaattttctacttggttctttttacgatatctgtccctactgaatgtctcattgagatcacaatttttgtctcatttatttgtattgcttacttatgttctcttg

SEQ ID NO: 332038 - DNA, 577 bp, Homo sapiens
gagttcagtctccaggttcccaggaaagcatgcaggtgctggcactggacagagtagacctgtacttatgcccctgtatggtgcatgcatacaccactggtgggggcaagcttcccttatacccaggcccctgaacagagtttatgggcagtggcagcagtctgggagagcttgtcctcagtcccctggaaggtatgcatgggtgctagcagcggtaggcagaacagtttgatctccaaacccccagatgacatgctgggcacccatggtgataggcagagagggcacatactcaagtgcaggtrtgtgttggcactggcagtggcaggcagggtaggtcaatccctagccccaccctgtgcaatgccagtggcaatggtggaaagtggagcaggcctgtcctcaggccccaggatggcgcctggctggtgggctggtttccaggaactctgaaagtgcatgcagatgtgcctgccatgccgctggaaggggttgtgtttctgtcagtgtcagtggcccagggcagatggctttcaggctctgctgaatgcgggctccagctccctttatcctgggg

SEQ ID NO: 332039 - DNA, 577 bp, Homo sapiens
gagttcagtctccaggttcccaggaaagcatgcaggtgctggcactggacagagtagacctgtacttatgcccctgtatggtgcatgcatacaccactggtgggggcaagcttcccttatacccaggcccctgaacagagtttatgggcagtggcagcagtctgggagagcttgtcctcagtcccctggaaggtatgcatgggtgctagcagcggtaggcagaacagtttgatctccaaacccccagatgacatgctgggcacccatggtgataggcagagagggcacatactcaagtgcaggtgtgtgttggcactggcartggcaggcagggtaggtcaatccctagccccaccctgtgcaatgccagtggcaatggtggaaagtggagcaggcctgtcctcaggccccaggatggcgcctggctggtgggctggtttccaggaactctgaaagtgcatgcagatgtgcctgccatgccgctggaaggggttgtgtttctgtcagtgtcagtggcccagggcagatggctttcaggctctgctgaatgcgggctccagctccctttatcctgggg

SEQ ID NO: 332040 - DNA, 582 bp, Homo sapiens
gtgttggcactggcagtggcaggcagggtaggtcaatccctagccccaccctgtgcaatgccagtggcaatggtggaaagtggagcaggcctgtcctcaggccccaggatggcgcctggctggtgggctggtttccaggaactctgaaagtgcatgcagatgtgcctgccatgccgctggaaggggttgtgtttctgtcagtgtcagtggcccagggcagatggctwtcaggctctgctgaatgcgggctccagctccctttatcctggggcagctttcctagcacactggtcagcctgctccctaggctataagacactgtgggctggagttctgaggacctagctgcactaggtcctggcgttgtgacacttcggcatctaggtgaatgtggggagatatcagtgaggctcgtggaatgtggaaataagggactgtgtggcctcagggcagaatgtaatatggtggggtctagggtctcaaaatggtgccatgcttcagcttcttggaccttggggaatgtgtgggacccagcacaaactccctctctgaaacaatgccatcacatggactgcaggaaac

SEQ ID NO: 332041 - DNA, 632 bp, Homo sapiens
aagtgtcaacaggattgattctttctgatggcctcgtgggatggatctgtttccagccccacattgcttgtagggggccatctttttcctgtgtcaatacaatgtcttccctttgtatgcgtctgtccagatctcctcttcttttcttttttaacttttattttaggttcagggttacatgtgcaggtttgttacataggtaaactcgtgtcatggggtttggtgtacagattattttgtcacaccggtactaaacatagtacctattttctgttcctctccctactcccaccctccaccctcaaataggctccagtgtctgttgttcccttccttgtgtccacgagttctcatcatttggctcctacttataagtgagagcatgtgagatttggttttctgttcctacattagttgttaaggataccagcctccagctccatccacattcccacaaaagacatgatctcattctttttatggctgcatagtrttccatggtgtagatgcaccacattttctttatccaatctgtccttgatgggcatttgtgttgattccatgtctttgctattgtgaagagtgctgcaatgagcattcacttacatatgtctttatggtagaatgatttc

SEQ ID NO: 332042 - DNA, 584 bp, Homo sapiens
atcatttatgtttctaatccatggtgaaagttcaggcagataagtacctctcccactagaagaactttaaaatccactcccattgtctcagacaacagaacatatgtttaccagaagatcttgatcctaaacagattgctacagacacaaagatgaagggtgagggtatayatcctattagcagctccaagcagctgctagcatgtagcagagaatacagagtaaagcaaagcttgctgtggaaatttgatgagagagatactgagattgatattctggaaaatatggtagcatgacagggttagatgcactaccgcctcctccccctcacacacaccacgagctgactagagtaaccaaagagaagttttggaagatttaaggaaagaatattatagagaatattataataatcaatgctgacaaatatatcacacaaagtgtggagtgctgacaaatatatcacacaaagaggagaaaggcaacacatttggaaaaacaaatgaagatacggagtgctgataattagaaactctcatttctgaaagagatctgaaatgcggcagtaagcaatgggaggaatt

SEQ ID NO: 332043 - DNA, 500 bp, Homo sapiens
ttattctctctctctctctctttctcgctatatatatatgtgtgtgtgtgtgtgtgtgtgtatatatatttatatatgtatatatacatacatgtatatatgtacatatatataaaacataagagaataagaggcaactatgtcacaaactctactttcatgatattctgctgatatatagctttaataaaaaataagtattatttatattacctataaagctatagaataatttggaatattttcaaataaatatgttctttgggaatccacaggtatccagaatgctgactttctttgatactgtagtagagcaataaaatgaaatagtattgtttttatcacttaaaacctatgtttaaaaaattacaataaaacaagtaaatatttttgtatayaccttttatgataggtatattttctaattatctaatacatgacttataactgcaattgattttcaattctgtgggattatctgttaatgattttttcatttt

SEQ ID NO: 332044 - DNA, 562 bp, Homo sapiens
atttaatttgatttcaagataaggcacatgaatatctccagaattatcattgaggttgaaaaatatgtaaaaatgaaggtaaatgagttgtacaatattttcccttgctacaatatcattaaagaaaattggcttatatgaagctttttttaagatatagtagaaacactacttttatattatcttttctgtatcaagaagcaagacacatgtcactaataatccatcttccctcaggcaatgaagtcccagttaaaatacattcaaatgaggttatgtttcaaaagtgaagtagaattattccatagtggaaaaawtaatgatatttatcagaaaggacgcaaggaaaaggagtttcttagtaggaaaaacaaaccccaaactgtaatgcacaattatactctgtgattcagaggataatgaaaacatggttgctgaatctgaagacacagtcattacattgggagccatttagaaaaaagtcattccagatctaaattataataaaagattcctagaatagaaatgttagttttaaaaaacagagcagcacacagattta

SEQ ID NO: 332045 - DNA, 515 bp, Homo sapiens
ggaagtaggaaacagcagaagttccaatgacaacttccagcaagaagacagagtgtcatgatgtgataaaatggaggaggaaggcatggtggcatgcacctgtggtcccagctacttgggaggctgaggtaggaagatggcttgagccagggaggtggaggttgcagtgagcygaggtcatgccactgtactccagcctgggcaacagaaccaaactgtagtaattaaagaaaaaaaaaaaggataaggaaggtgaagtggcttaatctaggcaatgaacaaacatgaatgggaggaagccagagagataattttgtggctgacatgaatatagaactttgggaaggtcttactgacgatttctggagaaatgtgtgcatgtcatggtataatctagcaaaaagtacaccttattatttaagatcattagatgcagatttaaaaaatgttactctatagagtgggagtcacatagccattatttctgggttatatataaactaacccaaattact

SEQ ID NO: 332046 - DNA, 490 bp, Homo sapiens
cgatttttctgatagctccttcccccttcttagttctaattttttcttccaccacctaagtatgakaactcttagtatatttatttcctattactgctgtaagcattatggctaagtgacttaaaacaacagaaatttattgtcctagatttctagaggtcagaagtccaaaatggggtatatgggttaaaattaaggtgtcagcacaactgtgtacttttggaagctctagggaaaaattaatttccttgtcttttctagcttctaagagaggcctgctttttttgccttgtggctccttcctccctcactccaagctctgtttctgtaatcacatctcctttttctgactttgaccttcttgcctccctgatcacattgggaacactggaagaatccagaataatcttcccatctcaagttccttaacttaatcacatcagccatgtcctttttgccatgtaaggtaacatgttcacatattctaagg

SEQ ID NO: 332047 - DNA, 490 bp, Homo sapiens
cgatttttctgatagctccttcccccttcttagttctaattttttcttccaccacctaagtatgataactcttagtatatttatttcctattactgctgtaagcattayggctaagtgacttaaaacaacagaaatttattgtcctagatttctagaggtcagaagtccaaaatggggtatatgggttaaaattaaggtgtcagcacaactgtgtacttttggaagctctagggaaaaattaatttccttgtcttttctagcttctaagagaggcctgctttttttgccttgtggctccttcctccctcactccaagctctgtttctgtaatcacatctcctttttctgactttgaccttcttgcctccctgatcacattgggaacactggaagaatccagaataatcttcccatctcaagttccttaacttaatcacatcagccatgtcctttttgccatgtaaggtaacatgttcacatattctaagg

SEQ ID NO: 332048 - DNA, 658 bp, Homo sapiens
ggggcacccaggctgattccatgtctttgctattgtgaatagtgctgtgaagaacatgagggtgcatgtgtctttttggtagaatgaattgttttcttttgggtatatactcagtaatgagattgctgggtcaagtggtagttctgttttaagatctttaagaaatctacaaacagctttccacagtggctgagmtaatttacattcccaccaacagtgtgtaagtgttcatttttctttgcaaccttgccaacatgtgttctttcttgacattttaataatagccattctgactggtgtgagatggtatctcattgtggttttgacttgtgttcctctggtgattagtgatgatagcacatccctttagatcaataccaattcaatataattcaaatatctatatttactgaatgttatgatgtaattgagtttcttcacaatctccacaatcctttagaaaatttctaagctttaactaccttctatagatttcatgtacaacatgtaacataataagggatagcagatgaatggacataaaaagcaattgggccttttccccgatatttcatgtgcaactaatgaaggagaaatagactttgatttaaaatctactggtgacttttatgtaatgtagtgggcttgagaaactttc

SEQ ID NO: 332049 - DNA, 603 bp, Homo sapiens
agatcttgagtgagtaattcgttaagttttaataaatgtatgcatatgtgtaactcacatcctgattaaaagattacatttctatcactccacatctttacttcatgctccttccagccatttcctaggtacacaccaaaggtaaactacattctgatttctattaccatcaattaattttaactgctctagaacttcatataaatggaattataccgtaggcaatttttgtgtgtatcttcatttattaaatttaatgtttaaaaaattcatccctcttgttaggtatgttggtttttcatttttatttctttattgagttttttcacataaatacacagtaattttttattcattcttttggaatggagatttttttggatatggcttcaaatttgggactattatgaagaacattcaggctatgatttttcaaaaggggcatgaagtttaaacaaaaagccttcttataattctgtagaaagtgggtaatgtgtgagtgtgtatattatgcattaatatgcttacaaaaatgatatatatacacacatgctaaatgtctaataataatagtaatwataatgacaagtaacatttgtttat

SEQ ID NO: 332050 - DNA, 592 bp, Homo sapiens
tttgaattgaacatataggctgaaatgcaataaaccgccatttttgtaggttaaaaggaataaagtatcaagtacatgcagtttgrcattacaagtttgcctagtagcactttaaatgagtcactaatttaatatattatttcttttataaagttcatttatactttctgaaccaagacagtggagctggtacaaatatacactgtaatgcctccctatttgttgtttcctttaaatctttaaaatgtgtttttatatttgttttttgagatgctgaatttccataatatttattagaatattatatgtattgagatgatatttccctatgttagggagaaaccatttgtgttatataaacaaacaataaagttgtctaaaaatagaagatccttttggaaatgttgatgcctaaaagacaaaattatgtggatgaacatacgtaagcttcagtgagcttttcttgtactaggcatttagctgtcttgcaactgttaatcagcacaggccttaaaacagctgctatcagattaattagagggaatccaggaaataattcaactgaatgtagcattcatgtaagtgtgttgaa

SEQ ID NO: 332051 - DNA, 592 bp, Homo sapiens
tttgaattgaacatataggctgaaatgcaataaaccgccatttttgtaggttaaaaggaataaagtatcaagtacatgcagtttggcattacaagtttgcctagtagcactttaaatgagtcactaatttaatatattatttcttttataaagttcatttatactttctgaaccaagacagtggagctggtacaaatatacactgtaatgcctccctatttgttgtttyctttaaatctttaaaatgtgtttttatatttgttttttgagatgctgaatttccataatatttattagaatattatatgtattgagatgatatttccctatgttagggagaaaccatttgtgttatataaacaaacaataaagttgtctaaaaatagaagatccttttggaaatgttgatgcctaaaagacaaaattatgtggatgaacatacgtaagcttcagtgagcttttcttgtactaggcatttagctgtcttgcaactgttaatcagcacaggccttaaaacagctgctatcagattaattagagggaatccaggaaataattcaactgaatgtagcattcatgtaagtgtgttgaa

SEQ ID NO: 332052 - DNA, 592 bp, Homo sapiens
tttgaattgaacatataggctgaaatgcaataaaccgccatttttgtaggttaaaaggaataaagtatcaagtacatgcagtttggcattacaagtttgcctagtagcactttaaatgagtcactaatttaatatattatttcttttataaagttcatttatactttctgaaccaagacagtggagctggtacaaatatacactgtaatgcctccctatttgttgtttcctttaaatctttaaaatgtgtttttatatttgttttttgagatgctgaatttccatratatttattagaatattatatgtattgagatgatatttccctatgttagggagaaaccatttgtgttatataaacaaacaataaagttgtctaaaaatagaagatccttttggaaatgttgatgcctaaaagacaaaattatgtggatgaacatacgtaagcttcagtgagcttttcttgtactaggcatttagctgtcttgcaactgttaatcagcacaggccttaaaacagctgctatcagattaattagagggaatccaggaaataattcaactgaatgtagcattcatgtaagtgtgttgaa

SEQ ID NO: 332053 - DNA, 497 bp, Homo sapiens
agtttcactgcaatgggcatatatcttcaggtaaataaaccaggcaaatgacatgaatgtggggktaaatgaggaaaggagaatagatatttttatgtctttactgtatttctcccaatatcctttatcacttctaacttcacttgttttgcctagtcatttttaggcctcttaggttcacgttgttcagaatcttttccattttgtttgaagagatttcttttaatattgtggggaaggtgacaatgagattgtatatatttaaataatacatgcatgttatgataacctaaagtggaggcaattcagtcacacacagatagacaaaagctgaaagatagaaaaaaatttagaaattaaacaaatctcttattctgaagtgctaaaaattttccattttttagagagcttttcctttaattttgtggggaagtgacaatgagattgtgtatgtttaaataatacaggtatattatgataacctaactaaagtgggg

SEQ ID NO: 332054 - DNA, 497 bp, Homo sapiens
agtttcactgcaatgggcatatatcttcaggtaaataaaccaggcaaatgacatgaatgtgggggtaaatgaggaaaggagaatagatatttttatgtctttactgtatttctcccaatatcctttatcacttctaacttcacttgttttgcctagtcatttttaggcctcttaggttcacgttgttcagaatcttttccattttgtttgaagagatttcttttaatattgtggggaaggtgacaatgagattgtatatatttaaataatacatgcatgttatgataacytaaagtggaggcaattcagtcacacacagatagacaaaagctgaaagatagaaaaaaatttagaaattaaacaaatctcttattctgaagtgctaaaaattttccattttttagagagcttttcctttaattttgtggggaagtgacaatgagattgtgtatgtttaaataatacaggtatattatgataacctaactaaagtgggg

SEQ ID NO: 332055 - DNA, 605 bp, Homo sapiens
agttaagcatgcagtaaaaatcataaaggaatacacattttcttggtctttgtaaattccgaaatatctactactctggagaagtgatcctattccaaatggaataaaacatactggtttggtcatcttaatgttagcttaattgcatgccatacagattaataagcttaaatcccatttcttctcccagggaaatctattaaaatatgattgggtatctgattagccaaaatgattgtaatataaattatgtagcgtttttagactatagctgaaattttgcacacaaaaatttaattgaatagatttgggtttttccttgtattattcgtaacaagaaaacaccaccaatttcactggctgctatagtccatattcaagagtccacaatgaatacaaatgagctttattgaacaagtcaatatgcctacmctatagttttttgaaatattaaacagcgagtaattatttataaagaaaatgaaaacccattacacagatcaagttgccaggggattaaccataacaatggactttcattaatgtgtaaaactacttataattcaaacaaaaataaattcagttttatcatgacccttgtttta

SEQ ID NO: 332056 - DNA, 622 bp, Homo sapiens
atgagaaaatgtgcaggaaatgcccagccttttgcccagtatacaagagacacttgataagtgttcttctctttatttccttctttctccctgccctctgggaccgctgtctgggagccattggggcctacccggtgctgaccaccagccaccgcttcagaggaagctgcgttcagggtcgttcctccccaggtcgggcaatgccgagcactgcctccagggggcgccgccacgccgaccccgcgccccgggggttgtcttttccgccgcagccgcgcggggccgcccgggccctgagttttcaggaccgatggcgcgccgacagtggggaggtcggcgtcccagytgaatcaaggacgtcctttagcaccgcagtgataatgaacacacaacaataatagccgcagatccacccatagcgagctgctggagtttaaagggcgcatgcgcttgctgggaggctgtgggactcagggaaggtgccaggccttagactctgagctgggttcgaatccagagcagagcagtctctcacgtttccccgctctgtacccttaggcttctctgagcttctgcttccttttttttttttttttttttttttttttttttgagacgacgg

SEQ ID NO: 332057 - DNA, 414 bp, Homo sapiens
tttgatgtgtgcattcatctcaaagtgttgaaaatttctttcgaatgagcagttttgaaacattgtttttgtagtatccgcaagtggatayttggagagctctgagaccttctgcggaaaaggaaatatcttcacataaaaactacacacaaccattctgagaaacttctttgtgatgtgtgcaatcatctcacagatttgaatttttctttttattgaggatatttgaaacacacttttgtagaatctgcaagtggttatttggagtgctttgaggcctactgtggaaaagcataatcctcacataaaaattacatggacgcattctgagtaacttctttgtgatgaatgcattcaccacacagagttgaaactttattttgattgactagttttgaaatactgtttttgtag

SEQ ID NO: 332058 - DNA, 451 bp, Homo sapiens
ttttttttgattgatcagtattgaaacactgttgttggataatctgcaagttcatatttggaacgytttgaggcctattgtggaaaaggaaataacttaagaccacacagaagtattctgagaaaattctttgtgttgtgtgcattcaactcacagatgtgaattaatcttttgatgagcagttttgaagctctctttttgtagtatctgcaggtgtatgtttggaaccatttgatgcctagggggaaaaggaaatgccttcacatgaaaactagacagaagtattctgagaaactcctttgtgatgtgtgcattcaattcacagagatgaacctatcttttgattaagccattttgaaactctctttttgtagtatctgcaagtggacatttacagccttttgtggcctgttgtggaaaaggaaatgccttcacataaaaaacagacaga

SEQ ID NO: 332059 - DNA, 451 bp, Homo sapiens
ttttttttgattgatcagtattgaaacactgttgttggataatctgcaagttcatatttggaacgctttgaggcctattgtggaaaaggaaataacttaagaccacacagaagyattctgagaaaattctttgtgttgtgtgcattcaactcacagatgtgaattaatcttttgatgagcagttttgaagctctctttttgtagtatctgcaggtgtatgtttggaaccatttgatgcctagggggaaaaggaaatgccttcacatgaaaactagacagaagtattctgagaaactcctttgtgatgtgtgcattcaattcacagagatgaacctatcttttgattaagccattttgaaactctctttttgtagtatctgcaagtggacatttacagccttttgtggcctgttgtggaaaaggaaatgccttcacataaaaaacagacaga

SEQ ID NO: 332060 - DNA, 451 bp, Homo sapiens
ttttttttgattgatcagtattgaaacactgttgttggataatctgcaagttcatatttggaacgctttgaggcctattgtggaaaaggaaataacttaagaccacacagaagtattctgagaaaattctttgtgttgtktgcattcaactcacagatgtgaattaatcttttgatgagcagttttgaagctctctttttgtagtatctgcaggtgtatgtttggaaccatttgatgcctagggggaaaaggaaatgccttcacatgaaaactagacagaagtattctgagaaactcctttgtgatgtgtgcattcaattcacagagatgaacctatcttttgattaagccattttgaaactctctttttgtagtatctgcaagtggacatttacagccttttgtggcctgttgtggaaaaggaaatgccttcacataaaaaacagacaga

SEQ ID NO: 332061 - DNA, 466 bp, Homo sapiens
aatagactcgaatggaatggaatggaatggaatagacccaaatgtaatggactcgtatggaatggacccaaatagaatggatgcraaaggattggtcttgaatggaatttattcgtatgcaatttaatcaaatggaatgcaatagtatgtaatggaatcaaatggaatagaatcgaatggaagggacaggaatggaatggactggaataggactgacttgaatgtaacggattgcaatgtaattgattcgaaagtaaaggaatagaatggaatgtaatcaaatggaatggaatggaatgcaatggaatggaatagaatgcaatgtaatagaatggaatggagtggaatggactggaatggactggaatgcaatggacttgaatggaatggactggaacaaaatgggatgaaatggattggaatcgaacggaacggaatgtaatggtatggaatggaatgcactcga

SEQ ID NO: 332062 - DNA, 466 bp, Homo sapiens
aatagactcgaatggaatggaatggaatggaatagacccaaatgtaatggactcgtatggaatggacccaaatagaatggatgcgaaaggattggtcttgaatggaatttattcgtatgcaatttaatcaaatggaatgcaatagtatgtaatggaatcaaatggaatagaatcgaatggaagggacaggaatggaatggactggaataggactgacttgaatgtaayggattgcaatgtaattgattcgaaagtaaaggaatagaatggaatgtaatcaaatggaatggaatggaatgcaatggaatggaatagaatgcaatgtaatagaatggaatggagtggaatggactggaatggactggaatgcaatggacttgaatggaatggactggaacaaaatgggatgaaatggattggaatcgaacggaacggaatgtaatggtatggaatggaatgcactcga

SEQ ID NO: 332063 - DNA, 466 bp, Homo sapiens
aatagactcgaatggaatggaatggaatggaatagacccaaatgtaatggactcgtatggaatggacccaaatagaatggatgcgaaaggattggtcttgaatggaatttattcgtatgcaatttaatcaaatggaatgcaatagtatgtaatggaatcaaatggaatagaatcgaatggaagggacaggaatggaatggactggaataggactgacttgaatgtaacggattgcaatgtaattgattygaaagtaaaggaatagaatggaatgtaatcaaatggaatggaatggaatgcaatggaatggaatagaatgcaatgtaatagaatggaatggagtggaatggactggaatggactggaatgcaatggacttgaatggaatggactggaacaaaatgggatgaaatggattggaatcgaacggaacggaatgtaatggtatggaatggaatgcactcga

SEQ ID NO: 332064 - DNA, 577 bp, Homo sapiens
gtggggaatattgattagttgctataaaggcacagggataaaaagtttatcctttaaatattttatcgtataattgtgtcttatttaacaaactcttatacagtatttattataagttaggcactattttaagaaatgtacaagtattaattcgtggggtgarggacctatttgacatcaattttaatgtttttcccatcctgccatcgtaaagttgatatacaggccggatgtcttgctggaaggatggggaagtccctggtaataacgattattattacatgtatactcaggttccatggcctctaacttgtatccatgaaaccctgcatgattgttacatgaaatttatttgtcactgtttgctatagaatatttgtcagctccctccaaggcagcaactgtttgcctccagaaattgaatttgctcagcgcctatattgtaattaacccactgaccatcacctcgtgttcttgttatcatttcctccttctaaatttaaattgcttaaatactcttgcttcttgggaaatataccttcaggtttttctccccagttaccagatattcactgta

SEQ ID NO: 332065 - DNA, 577 bp, Homo sapiens
gtggggaatattgattagttgctataaaggcacagggataaaaagtttatcctttaaatattttatcgtataattgtgtcttatttaacaaactcttatacagtatttattataagttaggcactattttaagaaatgtacaagtattaattcgtggggtgaaggacctatttgacatcaattttaatgtttttcccatcctgccatcgtaaagttgatatacaggccggatgtcttgctggaaggatggggaagtccctggtaataacgattattattacatgtatactcaggttccatggcctctaacttgtatccatgaaaccctgcatgattgttacakgaaatttatttgtcactgtttgctatagaatatttgtcagctccctccaaggcagcaactgtttgcctccagaaattgaatttgctcagcgcctatattgtaattaacccactgaccatcacctcgtgttcttgttatcatttcctccttctaaatttaaattgcttaaatactcttgcttcttgggaaatataccttcaggtttttctccccagttaccagatattcactgta

SEQ ID NO: 332066 - DNA, 577 bp, Homo sapiens
gtggggaatattgattagttgctataaaggcacagggataaaaagtttatcctttaaatattttatcgtataattgtgtcttatttaacaaactcttatacagtatttattataagttaggcactattttaagaaatgtacaagtattaattcgtggggtgaaggacctatttgacatcaattttaatgtttttcccatcctgccatcgtaaagttgatatacaggccggatgtcttgctggaaggatggggaagtccctggtaataacgattattattacatgtatactcaggttccatggcctctaacttgtatccatgaaaccctgcatgattgttacatgaaatttatttgtcactgtttgctatagaatatttgtcagctccctccaaggcagcaactgtttgcctccagaaattgaatttgctcagcgcctatattgtaattaacccactgaccatcacctcgtgttcttgttatcatttcctccttctaaatttaaattgcttaaatactcttgcttcttrggaaatataccttcaggtttttctccccagttaccagatattcactgta

SEQ ID NO: 332067 - DNA, 591 bp, Homo sapiens
acacacacgtgagaccctgctgaaagcatgcactgccacacccatattttatgtaacacactcgtcacatgtgcagcrcatatgcggccactgtcttacgcatggaccgagagctgcatttaaaactcaactcaaactattgcaagaaaagtaaggctttggtggaaactgaatgtgatggtgcctgacagacagccccagtttgcactagcccccacctgcaaaagaactgggctgggctctgggttgggaaagaggagtaaagcagaagagagccaggaggaggtggcaggaggcacacgcttcccccacgtcgcacttgggagaggagtgctctggcgcctctgggaagaaactcctcggtgctccccagggaagcctcccctgggtcgagagtgccctggggaggaggatgggcctccccagggtgttctctgcctgttccccgctctcccagcacattcccaagatccacacacccacctctcttctctgcaccccgaggatgcactgatagccacagcgagcctgtttctagtgggaacagagagctgaaggtggaaaagaaagagaagcataacccagccttcc

SEQ ID NO: 332068 - DNA, 591 bp, Homo sapiens
acacacacgtgagaccctgctgaaagcatgcactgccacacccatattttatgtaacacactcgtcacatgtgcagcacatatgcggccactgtcttacgcatggaccgagagctgcatttaaaactcaactcaaactattgcaagaaaagtaaggctttggtggaaactgaatgtgatggtgcctgacagacagccccagtttgcactagcccccacctgcaaaagaactgggctgggctctgggttgggaaagaggagtaaagcagaagagagccaggaggaggtggcaggaggcacacgcttcccccacgtcgcacttgggagaggagtgctctggcgcctctgggaagaaactcctcggtgctccccagggaagcctcccctgggtcgagagtgccctggggaggaggatgggcctccccagggtgttctctgcctgttccccgctctcccagcacattcccaagatccacacacccacctctcttctctgcacccygaggatgcactgatagccacagcgagcctgtttctagtgggaacagagagctgaaggtggaaaagaaagagaagcataacccagccttcc

SEQ ID NO: 332069 - DNA, 573 bp, Homo sapiens
cttttttactgtgagccatttttggtgaagatgcaagtcttataccacgagcaggagtgggagtctgagaacgatggtagcacgggaaaactgggttttggtattctgggtaacagaatatggtattttaaagaacgaaagcattggcatttttgctgatatactamcattactatgatatatttctaacagctttatgaaggcctgagtgatatataataaactgatcatatttcaaggatagaattttataagttttgacaaatgtatgctctcatgaaaccatccccagaaagcaaggagaaaagggatggagaaagaggggtatgtgcacatcaatactgtctgctcaattaacagcagccctctgtctccattcatcactaacagtacagaatttacacaacatcaaattcctcattttaaataccccttcattcaaaatatcccattttgctataaaatatacctgataaataagacatggaaagaaaacctcacaaatgtaatcaattctgaatttttaaaagtcatcacttttaaaattgtattgtaggaaaagatggaactctc

SEQ ID NO: 332070 - DNA, 528 bp, Homo sapiens
ttgcccaggctggagtgcaatggcgtgaccttggctcactgcaacctccacctcccgggttcaagcgattctcctgcctcagcctcctgagtaactgggattacaggcgcgtgccaccatgcctggctaatttttttttttttttttttttttagtagagatggggtttytccatgttggccaggctggtctcaaactcttgacctcaggtgatccgtccaccttggcctcccaaagtgctgggattacaggtgtgagccaccgtgtccagcctgctacacactttaaaatgaccagatctcgtgagaactcactaccatgaggaaagtcccaaggaggatggtactaaaccgttcatgagaaactgcccccatgatccgctcacctcccacaaggccccgtctccagtactggggattataattctacatgaggtttggtgggcgcacagatctaaaccacatcaaagtcactcttaaacggctgactccacccactttgatcttaggcatcttaaagatgcttcct

SEQ ID NO: 332071 - DNA, 528 bp, Homo sapiens
ttgcccaggctggagtgcaatggcgtgaccttggctcactgcaacctccacctcccgggttcaagcgattctcctgcctcagcctcctgagtaactgggattacaggcgcgtgccaccatgcctggctaatttttttttttttttttttttttagtagagatggggtttctycatgttggccaggctggtctcaaactcttgacctcaggtgatccgtccaccttggcctcccaaagtgctgggattacaggtgtgagccaccgtgtccagcctgctacacactttaaaatgaccagatctcgtgagaactcactaccatgaggaaagtcccaaggaggatggtactaaaccgttcatgagaaactgcccccatgatccgctcacctcccacaaggccccgtctccagtactggggattataattctacatgaggtttggtgggcgcacagatctaaaccacatcaaagtcactcttaaacggctgactccacccactttgatcttaggcatcttaaagatgcttcct

SEQ ID NO: 332072 - DNA, 589 bp, Homo sapiens
aaaataaatggaaatagagctcctttctcagaagggaggttccaaatgtatgctgaggtgtggaatagctggatcctcgacgtgggacttggaagaggtctcccatgggaagccaagacttgtcatttggggaaggagacatctttctggaatctatgtcgagaatgtaaaggaaatttgctggaatttgtgaagctgacaaccgccacccagtctggccacttcactgggagctgcctttagggttctgatgaccttcaacctaggaaggcagctgaggacccagggcacagacagaggctcccaacctctaagggacaagggctgccccttgtgaagacagcagaggctgcaggcctccaaggcagggggtggtgaatgaatgarggaggcttctcagcatggcttccctgacaagcatggcatgacccactgaccgagaagggagagggtggtgctctaactctacattgggaggaaagtcatagtcacagacagaagcacaaatctggctgctggagacccagagccatcaaacgtgaagacctagcatagagacgtttccccagagaattacatgggcaaacta

SEQ ID NO: 332073 - DNA, 589 bp, Homo sapiens
aaaataaatggaaatagagctcctttctcagaagggaggttccaaatgtatgctgaggtgtggaatagctggatcctcgacgtgggacttggaagaggtctcccatgggaagccaagacttgtcatttggggaaggagacatctttctggaatctatgtcgagaatgtaaaggaaatttgctggaatttgtgaagctgacaaccgccacccagtctggccacttcactgggagctgcctttagggttctgatgaccttcaacctaggaaggcagctgaggacccagggcacagacagaggctcccaacctctaagggacaagggctgccccttgtgaagacagcagaggctgcaggcctccaaggcagggggtggtgaatgaatgagggaggcttctcagcatggcttccctgacaagcatggcatgacccactgaccgagaagggagagggtggtgctctaactctacaytgggaggaaagtcatagtcacagacagaagcacaaatctggctgctggagacccagagccatcaaacgtgaagacctagcatagagacgtttccccagagaattacatgggcaaacta

SEQ ID NO: 332074 - DNA, 476 bp, Homo sapiens
gtccctggacatggatggtgctggaggccattatccttagcaaactaatgcaggaacagaaaaccaaataacacatgttttcacttacttataagtgagagctaaatgatgagaacacatggacacacggggggaacaacacacactgaggactgttgaagggtagggggtggaagaagggacagaatcaggaagaatagctagtggatgttkggcttaatagctgggtgatgggatgatctgtgcagcaaatcaccacggcaaatgtttgcctatgtgacaaacctactcatcctgcacatgtaccccagagcttaaaataaaagctggacattttttaaaaagttagattttcataggttaccacgacaaagaaatattttaagtgagttaaatctgaaatggcatcaaaaggacactgagaatctggattagcagtgagaggggaagccattacaaggaaaaataagagagtc

SEQ ID NO: 332075 - DNA, 613 bp, Homo sapiens
aaaataaaataaagagcctggcatggtggcgtgcacctgtaatcccagctactsaggaggctcaggcaaaggaatagcttgcacccaggcagcagaggttgcagtgggccaagattatgccactgccctccagcctgggtgacagagtgagaccctgtctccaaaaacaacaacaacaacaaagcagatagctgatataaagatggaggcagtaaatatgcaagatgaacctggagcatcttagaatgccagacggaaaagaacagctacaaaaagaaaaagaaaagaaaagagaaatagagatagaaagagagacagaaaagaaagaaagaaagaaagaaagaaagaaagaaagaaagaaagaaagaaagaaagaaagaaagaaaagaaaagaaagagaaagagagagggaaaaaaggcctaaagaaagacccacaatgatgggtgtacatcaaagaaagaaagagagagagacaaaagcccaaagaaagaagacccacaatattgggtgtataaccaaagaatataggagtcaactgaaagagctctcataactatttttggaacaacttgagaaacaaaataaatattgttgggaaataccctaaagtat

SEQ ID NO: 332076 - DNA, 623 bp, Homo sapiens
ggaggggaaacatggtcttaacttactgaggtaaaaaatatcttacttccaaattttacaaaagaatatgatcatgtgaacaattgcacggattattttcacattttggcccatgcaagtgaaggaccctgacatgtgaagcccacattttggcccatgaaagtgaagggcctttcattggcttgatattaacatgcctctctgttctttcctctttggtactttggctctggttttacatgcttggagccctactgtataagtctttaaaacatctggggacagtcatatgtttttgttcctaagtctcttcttccagataaacattctcattcagactcacattccagggtataagtggctcctccctgctctccccatttagtgcttataactttcacatttgttatttcaactattcttaagtgcttaatcagaaggtctgttagaatcacatattggcaactgtgtggggcatagtgtaatttcayatacaactggcagaagtgtaaattggggaaattattgatggggattccattgagcagtaactatttaaattaaaaatctgcataccctgtgatctagcaccagcacttattagattcagcctctgaaaaaca

SEQ ID NO: 332077 - DNA, 599 bp, Homo sapiens
ctaaaggtagaggatcagtagaatatgctatattccaggaaataactagtcaygactaagcctcctctgtgtattatgcccaagagtttaaaagcagattcatgttcaaaatggctttgttatcacagaagaaaaatggtggttagacatgatatggtattttttcaaatgtaagagagtaacagatctggtaataatatttctgaacacttgtaaaattgctgggtccccagatttgttgataatttttgcctcctaaaatattttctcattaggaagttgctataattggatttacatgagaaggacccctgggtatattcttgggacagcaaaaaagacaagagggaggaaggaagtatcacccctgtcatctgaaatgagcagaaagaagcccatatggaatgaatgagtggtagcagctacgtgaaatagggaattaactccataacaaattacactcattgccctatcttaggcttttttgtgctaagcatttttactttcacctcatttaatctttagagtgattttgttttacacatgagaaaactatgggtcaaaaagcttatgcattattcctgggtagaaagaggtag

SEQ ID NO: 332078 - DNA, 543 bp, Homo sapiens
ttcttcttactctccctgctgagaatctaaaatgacagttgtcactttataaagctgtgacttcactgccatacagaggcagcccaggtcatcaactgtgcctttcgtgttgagcagctgagctgcaacagaagttgaacatacactgaagagcacaaattaagagttagatattgtttgtcacccagcagagttcagactgggaaattttgaaaccaaagccaggttcctattttatagtcaaaacactctacattttatctctttactgatatatccagcaatttctctgatgtgcctcaaatcatctcatcttttctaatgagagtgagaaagaatacttttacctttgtttccctgatccatgctgtctcttagtgctagcaatagggaaaaactgcataatcattttggaatatcctgaacctatttaagacgctttaatagtaaatatatatggatgctttaagcatacaacttatttagcaaagcaagaaataraaaaagtcatatcagtttcacacatatgttggcatatacaat

SEQ ID NO: 332079 - DNA, 601 bp, Homo sapiens
ccaatgacctatttggaattgacttttgtatattctgtgaggaaagggtccagatttatttttacacatatagatatccagttgattctgtaatattcgtggatataaacaaagaccaccaaataagaatatatatatatatcaagaacttctatgaattaaagaaaaggcaaggtgataagattgagcaaaagacaccagcaaccagcaaaaattataaaagaggattttaaaatgtaataagtttataaaaaagtgctagacatcattacccaccagggaaatgcaaatsaaaaccaaggagaaatgctactacacacccactacaatggctaacatttaaaaataatttaaaaatctaacaatattatttttttgaaatggatttggagcaccttgaacacctacaatactggcaggaatacaaattggtaaagcatttttgaaaactactggtatttatgaatagtattgaacatctgcatactcttatgaacaacttctagctatgcccccaacagaaatgagggtgtgggaaaacagtctgttgcatggcatgagtgatgccatcttgaagcaaaaccacaatgatgactgatgt

SEQ ID NO: 332080 - DNA, 525 bp, Homo sapiens
atttctatctaaattttaccaccaaaatgcacttacatgtaacagttttagtaaaactttccctggtatatgcagacagccctaaatatcacagcattcccccaattatttttgtattgcagcacaatatttttgagtttcaactgcttgcttatatccctggcctatggacaggaaagatgtcttatttatattgatttctatggtatctacatggtgctttgcacatgttatacccaaaataaatatttgtggcataaacgaatgaatgaatgatgccaggaaggccagccttatgaattggtagcaaaatgtattggttagctttacrtgcactataaaatgcttctgaaacacaaataatgttcctatatagatacaggaagttaagtgtcagaataattattttcttagtttaaatgaagactttaacttttgttacatataaatgtttcttgaaaaggtccctctttcttgtgtttccaggctattctagattcatcatgataacaactaaagtcctct

SEQ ID NO: 332081 - DNA, 586 bp, Homo sapiens
taacaaaagatgataaaaaaaggcatgtaaaattccaaattacctgtcttgcatgtctacctctacacttgttcctctataagtaggttttccactttgtttcaaaagtaagacttaagtggttaatcttttgaaggtttatttttaattacttttaatagaacagtaaaatcaccaagttgggggaaaaaaagatttaaaagacattttgggaaattgctgtttacacaatcaataatcattttatgtaaatgtctacttgacaataaaataattagtcaaaaactgaatattttacatactcaatttattgtggctacctcgcaatcattgcccagtttgattacctacattgaagatagcatgggcattgaagaagtaagttacaacttcttaattttaaaaattaaactgaccaatttttaaaataaaacagataacaatgcagtgggagaaaataaagggtatagaaagtatattctagcygtatatcttttctggttgatttattgatatacatacactgttctttttttgagttttgacagtgtgatgtcatgaataggagaaatgcagggagaaaaac

SEQ ID NO: 332082 - DNA, 437 bp, Homo sapiens
attaaattatttcaacacatcagtgctcatttatatttaccccagaaggaacaatgagaggtcagctgtactgggctagtgacagctgcaagtgaagactgataagggtatcttttctgaacagctcaaataacaccagtagtgaatgatttactcaaatggtgacaacacttcrcaaagctccaaataaatggaagtaatatctgtctttgattttcacaatagttgcatttctgtacattttcatacatgttatcactggggaaaatatttcgagtttaaaatctaaagtggagttgttttctagtctcaggtattaataaactgccttttcacctacgtgaacatccaatggaatgtctgaaaataacctgaactacaaacaaatcttttcttgtgaaggatcacccctctccttgcggacaatctacctgacc

SEQ ID NO: 332083 - DNA, 533 bp, Homo sapiens
atgtaaattatcagttgtgtgctaagttgtgagcaaaatcagtaagaccaatgactgatatcagcaagctcaccataccgtggctcaaataaggaaatgaatgcaaagttaaaatggttttgatgtggatgtccgtgcactgcttttctaaaaggacataagatgtgtcctaatttactcacagagtgctgttgagtggcatgtcactttggctgagaagctaagtcttgatgtataagtaaatattagccatayaatatgcaggagaagtgaaaggtatcccaggccaagagaacagcatacaaaggccctgggatgacggggcacaatcactaagataatacagtagtgtgagaagactgaagtgtcagggtgtgcctggatagcaaatttgccattaagcaataagttcagtttttcagaaaccatgccagaatctggagatgtaaaaataaataaaaccagatttctgttatgaccttatttatagcctaactagagagagaaaaaaaatcacagtagaatgtggaaat

SEQ ID NO: 332084 - DNA, 634 bp, Homo sapiens
gctcaaataaggaaatgaatgcaaagttaaaatggttttgatgtggatgtccgtgcactgcttttctaaaaggacataagatgtgtcctaatttactcacagagtgctgttgagtggcatgtcactttggctgagaagctaagtcttgatgtataagtaaatattagccatataatatgcaggagaagtgaaaggtatcccaggccaagagaacagcatacaaaggccctgggatgacggggcacaatcactaagataatacagtagtgtgagaagactgaagtgtcagggtgtgcctggatagcaaatttgccattaagcaataagttcagtttttcagaaaccatgccagaatctggagatgtaaaaataaataaaaccagatttmtgttatgaccttatttatagcctaactagagagagaaaaaaaatcacagtagaatgtggaaatataataaccattttacttgttttattttgctttatttacatttagtgcagagaggacttagaggaggcaggagtagaaagaaggcagagttagaaaaagcatcaaggagagtggaggaaaaaatggcagataggaggcaagactaagttgcagctcccatttagacagagagagcggtgtgtg

SEQ ID NO: 332085 - DNA, 639 bp, Homo sapiens
atttatagaaaaatcaactcaagatggatcaaggacttaaatctaagacctgaaactataaaaattctagaaggtaacattgcaaaaacccttctagacattggcttagacaaagacttcatgactaagaacccaaaagcaaatgcaacaaaaacaaagataaataggtgagacttaataaactaaaaagcttctgcacagcaaaaggagcagwcagcagagtaaacagacaacccacagaatgggagaaaaaatcttcacaatctatacatccaacaaaggactaatatccagaatctacaaggaactcaaaaaaactagcaagaaaaaaacaaacaaccccatcagaaaatgggctaaggatatgaatagacaattttcaaaagatgatatacaaatgaccaacaaatatttgaaaaaaatgctcaacatcattaataatcagggaaatgcaaatcaaaaccccaatgtgatgccacgttattcttgcaaggatagccataatcaaaaaataataaaaaaatcagacgttggtatggattcagtgaaaagggaacacttctatgctgctggtgggaatgtaaagtagtacaagcactatggaaaacagtgtaaagattccttaaagaactaaaagta

SEQ ID NO: 332086 - DNA, 639 bp, Homo sapiens
atttatagaaaaatcaactcaagatggatcaaggacttaaatctaagacctgaaactataaaaattctagaaggtaacattgcaaaaacccttctagacattggcttagacaaagacttcatgactaagaacccaaaagcaaatgcaacaaaaacaaagataaataggtgagacttaataaactaaaaagcttctgcacagcaaaaggagcagtcagcagagtaaacagacaacccacagaatgggagaaaaaatcttcacaatctatacatccaacaaaggactaatatccagaatctacaaggaactcaaaaaaactagcaagaaaaaaacaaacaaccccatcagaaaatgggctaaggatatgaatagacaattttcaaaagatgatatacaaatgaccaacaaatatttgaaaaaaatgctcaacatcattaataatcagggaaatgcaaatcaaaaccccaatgtgatgccacgttattcttgcaaggatagccataatcaaaaaataataaaaaaatyagacgttggtatggattcagtgaaaagggaacacttctatgctgctggtgggaatgtaaagtagtacaagcactatggaaaacagtgtaaagattccttaaagaactaaaagta

SEQ ID NO: 332087 - DNA, 610 bp, Homo sapiens
tagaatcaccagctctcatgatgccttcggaatctctttggattggcaagaaggggaggtattcatagcagtatcaggaaggaaggactattctgcataattttctccccggcttggcattcctactttataataaaatggtttgctgaagttgtgatgcttaattaaagtatactcagtattttcccttaaaggaaaataaaatatagagtggcacatctattttaatcttcatgtaaacaaaacactataataaatgtaaataagaagaccctttccatggcctctttgtatgtgatagatgggagcaaacaaataaaattgggctggttatgtaatctcatcagtttgataggctgagatgggaggaccatttgagtttgagaccatcttggggcaacatagcaagaccccatctctacaaaaaawttaatttttttttttaattagctgggtgtggtggtggcatgcacctgtagtcttaggtacccaggaggttgaggtggggggatcacttgaacccaggagtttgaggctgcagtgagttataacatgccactgcactccagcctgagtgacagagccagaccatgtctctaaaaacaaaaat

SEQ ID NO: 332088 - DNA, 516 bp, Homo sapiens
ttccacctcaggtaatgttctttttgcctaaacaagtccctttagcacaacttttaggcagatctgttggcaatatctactctcattcgtggtggatacttttgcttcatataaaattctagcttgtcagttatattcttttagttcttgtcatcatttcttctttcaatcaactgtatctattattattagtattttgagaataatggctttgtttcacttctggttacttctatgatttttctctttgtctttggttttttgacattacaatatgctataggtagtttttctttttttcttgtatttattctgtytgatattgacagagtttccagaaacaggaatttcatatcttgaaaaaatttcagaaaagtgtcagccaaaatttctcaaaatattctttcttatccattttatttcctacttttttctggaattcaattatttatatgtgagagtgttttaccaggtttcctatacctcttatcatcctttttattattctattcaaga

SEQ ID NO: 332089 - DNA, 610 bp, Homo sapiens
tgttttacagaaagaataggcagtgtctgtaaagccagtgagtccatgtaaatgagatggcccagagaattacattgaactgatttttaatcatatttatcatttgaagttatggcccatgactttatgcacacatacacacacacatacccctcayactgtgctttgtatacaacaaactctcaacaaacagaaactagataaaggaagctggtcaggcatttcaatacaagtgccatagaaactatttagaggaagtagttggcaaacgcaaaatgataaaagttcaatagtctgttttgttgaaatagtaaaaaaaaaaaaaaaaaaatgagctaaaaggaattaggtattaactattctaattctcttatttcataaatgtggaagcttgggccaaggaaggttttcactaagtcagtattgcatgcttattttatttatgaattcaccataataaggggaagagagagacataagccatgttctgtgaagtcacaatgaagcacaagcgtggttaggttagaagtggagatctgagaaaggttaaatgtggggcactgaagcccagtccagaagaaccggaatagacgaagagagaaaaatgaag

SEQ ID NO: 332090 - DNA, 610 bp, Homo sapiens
tgttttacagaaagaataggcagtgtctgtaaagccagtgagtccatgtaaatgagatggcccagagaattacattgaactgatttttaatcatatttatcatttgaagttatggcccatgactttatgcacacatacacacacacatacccctcacactgtgctttgtatacaacaaactctcaacaaacagaaactagataaaggaagctggtcaggcatttcaatacaagtgccatagaaactatttagaggaagtagttggyaaacgcaaaatgataaaagttcaatagtctgttttgttgaaatagtaaaaaaaaaaaaaaaaaaatgagctaaaaggaattaggtattaactattctaattctcttatttcataaatgtggaagcttgggccaaggaaggttttcactaagtcagtattgcatgcttattttatttatgaattcaccataataaggggaagagagagacataagccatgttctgtgaagtcacaatgaagcacaagcgtggttaggttagaagtggagatctgagaaaggttaaatgtggggcactgaagcccagtccagaagaaccggaatagacgaagagagaaaaatgaag

SEQ ID NO: 332091 - DNA, 553 bp, Homo sapiens
gtgtaataaagagaacagacggtattgacaaaattaatgcaaaaaaaccccacacaattttgcacttttattttcctctaagacaacaaagatacatcaaaggaaactgaaaaacagtcctagaaaaaagaactattactacttataaagtgtcagaatcaataaaatataacctgcttggtttattggctttaagatatttaaattactgctcttttrtttttattttcagaattttatttactgaaatagaaatggtttaaaacttatactccaaagaaccagtgtttagcttgtctgtactcattcatctccagtgtacatcatgctctccttcacatagcataaacagaggcttccagctggcttcccttcacccccttgctgtcctctagcctaataagaaagtcatctcagttactgggaaaaggggacatcatttaacaaaataatttgtacaggggtttagaattttctctctcctaaccaattggggaatagattttggtttatattgagaataggataatttttgttttgattctgtttttga

SEQ ID NO: 332092 - DNA, 553 bp, Homo sapiens
gtgtaataaagagaacagacggtattgacaaaattaatgcaaaaaaaccccacacaattttgcacttttattttcctctaagacaacaaagatacatcaaaggaaactgaaaaacagtcctagaaaaaagaactattactacttataaagtgtcagaatcaataaaatataacctgcttggtttattggctttaagatatttaaattactgctcttttgtttttattttcagaattttatttactgaaatagaaatggtttaaaacttatactccaaagaaccagtgtttagcttgtctgtactcattcatctccagtgtacatcatgctctccttcacatagcataaacagaggcttccagctggcttcccttcacccccttgctgtcctctagcctaataagaaagtcatctcagttactgggaaaaggggacatcatttaacaaaataatttgtacaggggtttagaattttctctctccwaaccaattggggaatagattttggtttatattgagaataggataatttttgttttgattctgtttttga

SEQ ID NO: 332093 - DNA, 397 bp, Homo sapiens
agattaaatactttgtattatcgttcatgaaactttaattttatacatttcttttaaaaaacaaagctactgatctagtttggatatttggccyttcaaatctcatgatgaaatataatccctagtgttggaggcggagctcagggggaggtgtctggatcacaggggtggatccctcatgaatggcttagtgccattcctttggtgatgatgagtgagttcaccagagatctccttgtttaaaagtgtgtggcacttgtccccctctcttgctccctctcaaccatgtgacatgctcctgttgcctctccttctgccatgggtagaagtttcctgaggtcctcaccagaagctgagcagatgctggtaccatgcttgtacagcctgcagaactgta

SEQ ID NO: 332094 - DNA, 618 bp, Homo sapiens
ctgaaaaataaagtaatatggacagagcctttgcttcatcaggcagaggctccctgttctgaagctggctgtcagcactcccccaactgccgtctcaagcagagaaagcaagggagggaagcttccaggaccaagccctggtgggcaggtagcagcccacctccagtgagacggagaagttggccggggccagcaatgaaggaccagcctgtctcctccccgagaactgaaaggcaaaaggcacccaaggctgggaagagagcagcagcctcaccaagtaaggaagacaaaatgaagcaatcagtgagggtttcctgggtctacacagggattgaaggaggtgagagaagggagccaaatcataccccacttccccatggatgcccayaggaaaaatctgtctaactccagccctcgggatttctccaaagctcttaagtttggtcattttccccagggccgaaagtttagttcaatggcaggctttcttcatctctcatttcctttctcttctctccctcttcgcacttttgagtttctattatagaagctgatttaagcaattcctgagggcaaaagtatttgagttatatagcaattatgccttagcatatacag

SEQ ID NO: 332095 - DNA, 585 bp, Homo sapiens
ttcctgtcttattttccctacagggttaaagtagttgtaaagaagaaagttttgcaaagtacatgtattaaaactcaaaacattaggccaggtgcagtggctcatgcctgtaatcccagcattttgggaggctgaggtgggcagatcacamggtcattagatcgagaccatcctggctaacacggtgaaaccccgtccctactaaaaatacaaaaattagccgggcgtggtggcacgcgcctgtagtcccagctactcgggaggctgaggcaggagaattgcttaaacccagaaggcagaggttgcagtcagccgagattgcgccattgcactccagcctgggcaacagagcaagactctgtctcaaaataaaaaataataaaatagaataaaaatcattatttccacttaaaatagttcatagcggctgggcacagtggctcacaccagtaatcccagcactttgggaggccaaggcaggcagatcacctgaggtcaggagttcaagaccagcctggccaacatggtgaaaccctgtctctactaaaaatacaaaaaaaagcagctgggtatggtggtgcatgc

SEQ ID NO: 332096 - DNA, 585 bp, Homo sapiens
ttcctgtcttattttccctacagggttaaagtagttgtaaagaagaaagttttgcaaagtacatgtattaaaactcaaaacattaggccaggtgcagtggctcatgcctgtaatcccagcattttgggaggctgaggtgggcagatcacacggtcattagatcgagaccatcctggctaacacggtgaaaccccgtccctactaaaaatacaaaaattagccgggcgtggtggcacgcgcctgtagtcccagctactcgggaggctgaggcaggagaattgcttaaacccagaaggcagargttgcagtcagccgagattgcgccattgcactccagcctgggcaacagagcaagactctgtctcaaaataaaaaataataaaatagaataaaaatcattatttccacttaaaatagttcatagcggctgggcacagtggctcacaccagtaatcccagcactttgggaggccaaggcaggcagatcacctgaggtcaggagttcaagaccagcctggccaacatggtgaaaccctgtctctactaaaaatacaaaaaaaagcagctgggtatggtggtgcatgc

SEQ ID NO: 332097 - DNA, 521 bp, Homo sapiens
tcccttaaccgtaaacatctagaggccaggaatacctcacctcccggcaatgctgtccagcaagctccagcctcattttccctcgccctcactcaagatggagtcgctttggttctaatgcttctgacaaagagccagttgcatcagtgcagatgtggggattgtctctttgccctcagccgagggagccctgaacaaaaaactccagcaatttttttggaccctggggtagggagggaggggctgggagtagaaaagtaccaggtactgagtcaaagtggggaaaagtgtcttcagggttctcccccaccccaaygaggaggtcttgcattagcacctgagaaaggcctcaggagactggagtgcaggtgcctgggtaagaagggcaaatgtgtgagatcacgacccctgactgcagctcccctcaaagaccagagtgtgctggccgtgcaccaagtctcttgggagggcagttttcccctgaggcctgctgggtaaagccttggtaattgcctgtgctt

SEQ ID NO: 332098 - DNA, 572 bp, Homo sapiens
tcacaggtcaggagggatgagatcatatccattccctgcactgcttctctccaagaggatgatctcttggttgtttgtgaagacaagaggcccagcagcctcttctgttgaagtggacctgagctggccccagccaggctaaccctctagccagctagcttctggggtgaatcaccaggcagggaccctgggttggccagagctctgtggaccagtgccaaacttctctgggagctttgagcgagacaagggcttgggtttctctctctggtccaggtccagaggaagatcttccaaggaggagatctccaagtcactctcatcttcagaaagctgcagggggtaaaggggagaagaaaatgcattttgataagggaggagggtggctgagagctaagcacattgcaggatgggaatgcagaatggaaatggggacmaatgcagactgggaagaaagcaatagggagatgctactcctcctgacttctcaagtcttcctgcctttgagaacctgctttagtgacctgggatcagggtgatttcaaatacccctgaaattctactaaccaaac

SEQ ID NO: 332099 - DNA, 549 bp, Homo sapiens
gccacctttgctaccacatgagggcaactaacaactatgttttattatttttgtttaatattattgaatttttgttaattgtttgtagaaagagggtctcrctgtgttgcctaggctggtcttgaactcctggcctcaagcaatactctcacctcagcctcccaaagtgctgggattataggcatgagccactgagcccagctggtaacgaagacttataacagtcctgggtctccttgaggaccccttgaaggccacatattccttttctgggggtgggaggatcactgttttcctcgtagagccccaagagctgtgggtggataggttcctctcaggtctaactctctactctttttcatatttaaccttgatccttttggcttttagatacatacatgtgagttgggcatagtggcacatggctataatcccaggtactcaggtcgctgaggcagaaagatcatttgaactcaggagtttgaggccatcctggacagcatagcgagaccatgtcccaaacaaagaaacaaagccaaatagacacat

SEQ ID NO: 332100 - DNA, 388 bp, Homo sapiens
ctgctgggtttatataaaagacacagaaaagctgaatttgtaagcattaggttgttcagagaatttatattatrgtaggctttttcactgaaaactttccagtcaatattaactaattatggttgagaagtagtacaatttctttttttgcaatgttgaggattaatcacctctgatttatctcaacagtttagaattagaagtttttctctggaggaatggatattagaagctttgcatggctgtgatttatgcagtgtctgacttcatgtttttcaagctgtaatggttcacaattttagcacttctcatcaccaccaaccaaatccagaaaatgtagcatttttaatttgaggcctctgagctggccatacatggaaatgtcaag

SEQ ID NO: 332101 - DNA, 388 bp, Homo sapiens
ctgctgggtttatataaaagacacagaaaagctgaatttgtaagcattaggttgttcagagaatttatattatagtaggctttttcactgaaaactttccagtcaatattaactaattatggttgagaagtagtacaatttctttttttgcaatgttgaggattaatcacctctgatttatctcaacagtttagaattagaagtttttctctggaggaatggatattagaagctttgcatggctgtgatttatgcagtgtctgacttcatgtttttcaagctgtaatggttcacaattttagcacttctcatcaccaccaascaaatccagaaaatgtagcatttttaatttgaggcctctgagctggccatacatggaaatgtcaag

SEQ ID NO: 332102 - DNA, 531 bp, Homo sapiens
acctacattaggtatttctcctaatgttatcactcccctagccccccacccaccgacaggccccggtgtgtgatgttcccctccctgtgtccatgtgttcttgcctgctaagatggctctcctcctctgtccttgattacattccctgcctcctgactctattctctacctcctcctgaaggattttgctctatccattgtcccttcttttagattttcaatctttcacattctgattccttgaatcccatctataaacaagttcaagtcctcctagtccttaagtacctttcatctgatcctttttcctccagctcctggcccacctcactccattcatttttcataagatgtttgaagggtaaacctacattctgtttgactttttaaactcccactcctttctgagtcttaatgcacatctgattcctgctctyattgtgccactgaaattattcatcctgttaaccatagtatcctaatttccaattgctatttataatggcctcttctcatctcatagctgtaaaa

SEQ ID NO: 332103 - DNA, 625 bp, Homo sapiens
atgatatgaaatatatatcctacaatttgasttttttctcatcatttgtgttacataagtgtcaattaaaaaaagcaatttcaattaatttgtaaatgagatttagaaagaaataagcagtaaattttaatcatgtctaaaaaggcacagcacacaataactagttctatttgaatattttaaataaagtacgagaggacagaatccttacttttgtggttgctctaaaatattgtctatttctacctttggaagtaggacatactgctttcattgaacatgggggctctggagctatattgtgtttgttgaaatcctggcttccttaaaccaataaagaaaggctttgagtgaggaaagattaacattttattttctggtaggacactcacttcactttgctactaagcttgctcacctgcatctggaccaatgggacagaagataggacactggagatgtggccaagagataggggtcagaatctgctcttctaggttccataccaagtaattcagaaaatgagcccatatttgtccgagaaagttggaatcttgcttgtttccatgtgggtcaggtgtgggccaatggatattctaacagtgcccctggacaagggggccaa

SEQ ID NO: 332104 - DNA, 625 bp, Homo sapiens
atgatatgaaatatatatcctacaatttgagttttttctcatcatttgtgttacataagtgtcaattaaaaaaagcaatttcaattaatttgtaaatgagatttagaaagaaataagcagtaaattttaatcatgtctaaaaaggcacagcacacaataactagttctatttgaatattttaaataaagtacragaggacagaatccttacttttgtggttgctctaaaatattgtctatttctacctttggaagtaggacatactgctttcattgaacatgggggctctggagctatattgtgtttgttgaaatcctggcttccttaaaccaataaagaaaggctttgagtgaggaaagattaacattttattttctggtaggacactcacttcactttgctactaagcttgctcacctgcatctggaccaatgggacagaagataggacactggagatgtggccaagagataggggtcagaatctgctcttctaggttccataccaagtaattcagaaaatgagcccatatttgtccgagaaagttggaatcttgcttgtttccatgtgggtcaggtgtgggccaatggatattctaacagtgcccctggacaagggggccaa

SEQ ID NO: 332105 - DNA, 563 bp, Homo sapiens
cacccaccaccaaaaaaaaaatataacaataaattaaaaattaaaaaataaagtgtcaaggagggatgcaaagttgggggagtcttatggtatttatttatggtatttatttctagcaaatggctagaaatatggtatttatttctagcaaatggctagaaacatggtatttatttctagcaaaaggctagaaatcagattgccatgcttctaagggagcaccttctccagatggaaagggatttgacaaggcactgttggtaacaatttttkggggaggaaagcttacatttaatccttatgaagtgtgactgcttattaaattgatcaaagctctattagaacatgaacatgttactgataagactatcacatgaagcagttaagtaattaaaatctgatttgccatgctgcccatgaacccttaacaatgtgtttttgaatgaaggcagggaagatgagagaggtggcaccatgaaatttttgatttcaacaaactaaggaataggttaaaaaaaaaaaaggcaaaagatctgttttaaggagagcatcaaatagaatca

SEQ ID NO: 332106 - DNA, 542 bp, Homo sapiens
ctgccaaattcgtgaatcattctttgctcaattaaactctgttaaattttattcagctaagaattttcttttcacagatgtgtcagaagtgggatctgaagtacagcttctaatgacacccaggagtgctgagtgaccaagaaaggtacccactgcacccatttgtctccattgctctctcacagcactgggawcatggtaagttctctctcagactctgaagccccatagagttttgttttgagctctccaagtttctttgaacaaattctgatccaaactgggtttggaagttgtgacagaaactggactgagtccaggattggattctatattaactggcttagatccataaaagaggcctcttatgtctgactggatcagaaagaaactggtagtaaatggcagtatcgcagagggtataaactttggcttttaaaagtttgcaggaatttttgtgttctaccacctttctttttcttgcatgcttgggtaggaaaaaaatcattggctaagttaatcaaggagatctgaaaaccaag

SEQ ID NO: 332107 - DNA, 518 bp, Homo sapiens
cattccttaccaagaaaagcataaatattcccctgcttgcttttaatgcccagycccttcactgaagataccctatatctgtaactccctggttctctctcaggaggtgataagttgatttgagagccacactcccacttctgcattttatggccatcagataaagcctgtactgtctaatgctcactttcagtttcgtatacttgcttgtgacactgaacaggaaaaggcccattttcgggggtaactgggaccccctggtaacagttagagtacatcagaaatttaccaaaaaaaaaaaaaaagacaaagatcattctcttcatgaagattatatttctattatgggaaggaagttagaaaattaaaaaaagaagtactatctgctggaagctgggaatgctatagtgcagcaggtgtgtgtgtgtggcactaaagtagggtgaaaggaatggacaatgagcaggagtggtggactggtgggggtggaccactctcttaaataggggcatggtaca

SEQ ID NO: 332108 - DNA, 518 bp, Homo sapiens
cattccttaccaagaaaagcataaatattcccctgcttgcttttaatgcccagtcccttcactgaagataccctatatctgtaactccctggttctctctcaggaggtgataagttgatttgagagccacactcccacttctgcattttatggccatcagataaagcctgtactgtctaatgctcactttcagtttcgtatacttgcttgtgacactgaacaggaaaaggcccattttsgggggtaactgggaccccctggtaacagttagagtacatcagaaatttaccaaaaaaaaaaaaaaagacaaagatcattctcttcatgaagattatatttctattatgggaaggaagttagaaaattaaaaaaagaagtactatctgctggaagctgggaatgctatagtgcagcaggtgtgtgtgtgtggcactaaagtagggtgaaaggaatggacaatgagcaggagtggtggactggtgggggtggaccactctcttaaataggggcatggtaca

SEQ ID NO: 332109 - DNA, 518 bp, Homo sapiens
cattccttaccaagaaaagcataaatattcccctgcttgcttttaatgcccagtcccttcactgaagataccctatatctgtaactccctggttctctctcaggaggtgataagttgatttgagagccacactcccacttctgcattttatggccatcagataaagcctgtactgtctaatgctcactttcagtttcgtatacttgcttgtgacactgaacaggaaaaggcccattttcgggggtaactgggaccccctggtaacagttagagtacatcagaaatttaccaaaaaaaaaaaaaaagacaaagatcattctcttcatgaagmttatatttctattatgggaaggaagttagaaaattaaaaaaagaagtactatctgctggaagctgggaatgctatagtgcagcaggtgtgtgtgtgtggcactaaagtagggtgaaaggaatggacaatgagcaggagtggtggactggtgggggtggaccactctcttaaataggggcatggtaca

SEQ ID NO: 332110 - DNA, 516 bp, Homo sapiens
ccatgtgtataccttctttagagaattgtctattcaagtccttagcccactttttgatgggattgttaatttttttctcactgatttgtttgagttatttgtagattctgcatattagtcctttgttggatgtatacattgtgaagattttctcgcactctgtgcggtgtctgttaattctgctgattatttcttttgctgtgcagaagctttttagtttaattaagtctcgtctatttatctgtgtttttgttgaatttgcttttgagttcttggctataaagtctttgcctaagccaatgtctaaaaggattttcccaatgtatcttctagtatttttatggtttcaggtcttagatttaagtttttaactcatcttgagttaatttttgtgtaaagtgcgatatgagaacccagtttctttcttctacatgtggcttgccaattatcccaacacygtttattgaatatggtgtcctttccccacttagtgtttttgtttgctttgtcaaagac

SEQ ID NO: 332111 - DNA, 548 bp, Homo sapiens
cacactcctgagctcaagcgatctctgcctgggccccccaaagttctggaattacaagcgtgagccaccacacctggccaaaattaaccattttaaagtgtatgattcaggacatttaacatttcacaatgttgtacaaccaccatcttcctctatctagttccaagacattttcatcacyccaaaagataaacctgtactcattaagcagtcactctctatttcccctccctgccccacaggtccctggcaatcaccaatctgttttctaactttatgtcttttcatgtgccgattatttcatataaagggaaccatacaatatgtgaccttttgtttctggcttctttcacatagcataatgttttcaaagtttatccatatttcagcatgtatcagtaatgctgagtaacattctattttatacaccacgtttgtttatctattcatccactgaaggacattaaggttgtttgtaccttttagctattatgaataatgcttccatgaatattcctgtacaagtatttgtatgagtacatgttttt

SEQ ID NO: 332112 - DNA, 572 bp, Homo sapiens
atagacaaaaaatgaggagtactttattggaaactggaggaaaggcaatcgttattacccacaatgtggtaaagaacttggctgaatcatgttcatgttctagtactttgtagaaagcagctcttaagagcaattaactgggatttctggtggaagaaatctctaagcaaaggttcagggtgctgcattgctcttcttaactgtttatagtcaaatgtgggaagagagaaacacattaaaaatggaatttatgattaaaagggaaccagaacttaaagatttggaaaattctcagcctggccaggttgaaaacacatgtttgagagagaaaagcaagggtgtagccaagtgaccatttgayaaggaaattagtattgatggaagagagccagatattatccataaagacaatggagcaatgaccctgcaaggcatttcagagattattggtgtctctctgcacttcccatcagagggcccaggatgtcaaagcctaggagacagaactgtgctcaaaaaaggggtcttgggtgcccccggggggtaaagttgccatagagagtccccactaa

SEQ ID NO: 332113 - DNA, 586 bp, Homo sapiens
acaattgcattagcaaaatgggtatgatgtaaatattttggaactctggagtctattgaaggcttgtaacttccagggatggtttggatggtaaattgcagttaatttaggtcgattttagctcttaccaccgtagaatctgtctcccatccccaaccccatggcaggcagcttgcatgtgttcccggaacaacctgcccacagtttgcaggagccacggtgggcaaaaaatatcctgtcttccaaatatcaggttctgtgttctcattaccagttgctatttctgaccacagaggtgcaggtagaaactgggtggggcgggatacggaggcattgttgttgcctctcccgcagttgttgcaagccctccctctacgactgaaasgacttccaggtgatttaaagggccagtgattcctgccacacctatttttctccttttcccctcttggaagccagacattaaagactaggaccttaaaaagcaattgcatacatggggaaaattagaaagttaccatgcatgtgtaaggaaaggtgtgggctcagaaaagacttgagaagacctgaagtttacaccacaggc

SEQ ID NO: 332114 - DNA, 518 bp, Homo sapiens
aaattagtattattgaagctttcctttataactccaaattttgtttgctatgtgatttaagagactaataattattagtatatgttttggaacacataatgtatacaaatgtcattctgtgaatgacatgaaaaagggtggaggcagaactgttaaaagagtagagtttttgtatgttacttaagttaacctggtataaatgccaattaaagtattataactttagggtattaaacataatcctcataaccacaaacaaaatatctatagaatatatacaaaaggaaatgagaaatgaattttaacattccactacaaaaattaaactaaacctagaagacagtaatacaggaaatgaaataccaaaaarttataagccatatagaaaacaaatagtaaaatgacaagtccatccttataagtaattactttaaatgtaaatgaattaaacttgccaatcaaatgacagccattggatgagtggattgaaaaaacatggtcgaagtatatgctgtcca

SEQ ID NO: 332115 - DNA, 554 bp, Homo sapiens
accctgaatagcccaaaatatgttgaataaaagggaacaaagctgaagcacttacacttctcataaggacagatatgtagaccaatgaaatagaataaagaacccagaaaaataggtgggcacgatggctcacgcctgtaaactcagcactttgggaagctgaggcaggcrgatcacctgaggtcaggagttcgagaccagcctggccaacatggtgaaaccccatctctactaaaaatacaaaaattatccaggtgtggtggtgggtgcctgtaatcccagctactcaggaggctgaggcaggagaatcatttgaacctgggaggcaaaggttgcagtgagctgggatcatgccactgcactccagcctggatgacagggtgagattgtgtcaaaacaaacaaacaaacaaaaaaaccagaaaaaaaaattttcccacatatggtcaaatgattttgatgtggtgcccacaccattcaatgggggaaaaatagttttggtcctagaaaaatcagatatcgacgtgcaaagaaatgaagttagactcttaccta

SEQ ID NO: 332116 - DNA, 549 bp, Homo sapiens
ccacataaattatttctcacagttctggaggctgagaagctcgagataaaagtgccaggagatsagtggtgagtatccacttcttagttcacagagagcagttttcatcttgtgtcttcacataggagaagggccagatatgctcccttagccttcttttatcagaccaaattacctcccacatcctaatactatcatctttgaggttaggatttcaaaatatgaattttggagggacacatacattcagacaatagcaaaagtattatagtttaataattatgagcttgggtctggagttagtataggttcaaaccccaaccctgccacgtcttccaacatttgaagcaataactatgccaaaagttcagtatcttctattaatttagaatcataacactttatggtatatggattaatgatgtaatatatgtaaagctcagattccaatgcttaatattttgcagaaattcaataaatggtggtaacctccctttaaactttcatagagttcatatttctctattttgatcctgagaacatttgtgc

SEQ ID NO: 332117 - DNA, 580 bp, Homo sapiens
tgtatctccatgtgagcttgtatttcattatcattcagattatttatcaatgcaaatgtttacggtacaagtgattttagatttggttcagctggctgattgtatcagattgtgacaactgccagactggtgttcacaatacagtaacatatcaatgtctgataattaaattaaagagtctgtgcttccttgtattcacatgcataaatagcacttagtaaacttaatagtaaatgagggagtaatataattttcctatgaatttaaagcaagaacatgcttctgaactgttttcaagtatccagagtacatagggtaaatattacttttaagtgaacaccttaatattrtgtacttacactttctgtgatacacacagataattgaaaactgtcaatgaactcagagcactttgtccagtaaatctagtggtttcagctgatttagttgtagtcactttattcttttgctatgttaagttgcctagaaagaggaatgtgggattgctggcaagatggctgaataggaagagctctggtctgcaactcccagtgacatcgacgcaggaggtgggtgattt

SEQ ID NO: 332118 - DNA, 512 bp, Homo sapiens
  misc_feature (1)...(512): n = A,T,C or G
tagtantgctgtgaaggtatttttgtatatgtggttaggaaattatcatcagtaatntggagctaactcatccaatcagttgaaaggccagaagggcaaaacaactttctctgaggaataataaattctacctatgggatgaaacttcagcttctgccccagaatttccagcttrccagccttccctacagatttcaaactagctaatctctacaattccataagccaattccttgaaataaacatatttatcatatctatctttctgcctagatctattctaattccaggagacccaaaatgttattgtgttctaccagtcagagtagtggcttatggaggtcaagttaggggcttatggagtcagagtaggagattatgggggtcaggttatcaatggaattttagctcaagcctgtgtccgtgttgagcaggtccacagaccaatcctgtggttgtttctccagttccacaatgtgtaattgggatagatgtacccagcaactggtaga

SEQ ID NO: 332119 - DNA, 555 bp, Homo sapiens
tgagtaaataacaaggagctgaatgttaatcactgagataatggggaaaatgtctccagggcatgttggagacatttgtggtagaccctctcatcacagacccagaggcttaggaggaaaaaatggttttgtgggccaggcacagggtccctcagctgtgtgcactctagggacttggtgtctttcatttcagccactccagccatgactaaaagaggccaatgtacagctcwggctgttgcttcagagagtggaaaccccaagccttagcagcttctacatggtgttgagcctgccagttcacagaagtcaagaattgaggtttgggaacctctgcctagatttcagaagatgtatgaaaactactggaagcccaggcagaagtttgctgcaggggtgggtctctcatggagaacctctgctagggtagtgcagaaggaaagtttggggtcagagcccccacacagagtcctcactggggcactgcctggtggagctgtgagaagagggccactgtcctccagaccccagaatggtagatccaccaacagcttg

SEQ ID NO: 332120 - DNA, 584 bp, Homo sapiens
tagctaacagctaagcagtaattgtgtcataatttttgttatttgtgtatgcgctaaagcaaaagcatcagcatcaaaattcatagaataagtccaagtggcttataagagaatattgaagaaaatagtgaagcacatccttcaaccttataagtcaaatttttggaaatggrtggtgaaggtggtgagtcagatgtatttagaaacactgccaacatcccacatatttgcacagttagctttagagcacagtacccttggcctgtatatcttttatgaattatgttaagaaaaaatgcatcattaacactttttatggcatagaatatgataatgtgtggaaaaacaaggacatcattaattctgaatcaaaaagccactcagaagaatcagactcagaattttagttttaaaattactttaacctatttcttttatgttttccttcctatatttgtgtcagagtgatataagatttctttaaaagtctaagttttaaaagaagtatttctatacatataaaataaaaattccatgtgattaaaaagcattgtgccatagtttatttggcaacattctctttc

SEQ ID NO: 332121 - DNA, 564 bp, Homo sapiens
ctggcacatataatgactccgataaactacgccaaaagagtaaatgaacttgtgttggcaactttagtgtaagtcttsaccaattttattaaagtatgagatcagtcatgttgtgatcatattgtgactgtgagatcctcaatggcaacaatactgctgctgcttctgctactgctgatatggtaaaaataatggtgatacttgcacttcactggcatttgcaaaacccgtaagataatatcttacatatatacatgatttgtagctcccttcatgtagaatgattttaactggaattacctgaatttctctcccactatctctatgtgaaggaattaaaaatatacacaattttggagcttgtaattatcactgtaatgttagaacaaccaataccatctgggcagtgctgattaactttcaaagtaaataagcactgtgccattcaacattgttgatgtcttcctaccaaaaatggccttctcattaaacgatgagtagaaggatcactggaagtgctttatttaggaacctataataacaagcatgagagcacaagttata

SEQ ID NO: 332122 - DNA, 660 bp, Homo sapiens
ctgggatttggtttctaacttccacatattttcctcattaccagccagtctgagacccgggaaaccactatttggtgtgtgatcacaaaagggcaggaaagaggaaaatcagtagttttatttayagcatcaactgttcaattaccaaagcacaatcttcaaacttaaatactctcatttcgtccagtgtagccccttctctgagtgttacctttagcaagtgggtcactaaagacgtttcagaaaagcttatctaatatcaccacagaggactctgaggtcacactattctggtctttacctcatacttagcaacgatacgcacgacacagaatacaacatgctcacacagtgccttccactgagtttcatacactcctaggaatttaacacctactgaacgaatggaaatgattctcagttgtgtttatacactgagaaaattttaaagtttccctatccagggtccaagcagcggcatatcttcaagctctgccaagtgcagacagagcccccttggctcacgttgccgtggatcagagaataccaaaccctgcagctacccatgtgaacgatggaatgtaaaagctaaactaaacccattcccactccccgcttggctttgacgcaggggtggtggtggagaggattcactaagtg

SEQ ID NO: 332123 - DNA, 610 bp, Homo sapiens
agcaacaggatttaagaggattggttccaattttggacaaaattcttctgtgggtaaaatgatatcaaaaagcacagaaaaatcttttgtgaaaggaagagttgactggtgaagcaaactttattgcagtcttattgtaagaaattgccacagccaccccaaccttcagcaaccaccctcgatcagtcagcagccatcaacatcgacgcaagaccctctaccagcaaaaaagactacaactcgctgaaggctcagatgatcattagcattttttagcaataaagtattttttaattaaggcatatatattgctttttagacattgtactattgcacayttaatagactacagtatgtgtaaagataaattgtataagcactgggaaaccaaaaatatgctgtgactttttgatgacattttgtcgctttattatgatatttactttattgaggtgatctggaaccaaacccacaatatctcccaggtattcctggagatctgtagtgtcttcactaacttaccctacacacacaaaatggtaactatgagtaatgatggatatattatttaaattgattgtggtaatcatctaccacgtatagctatatc

SEQ ID NO: 332124 - DNA, 589 bp, Homo sapiens
ataaacaaataccaggaaagttattttcagaatttgtttacytaatgtttaacactgaaatcaaacacaagagggtcattagggagaccttctgcattactccacttaagcaattagaatctgtaagtagtataaagataattactcatttggtcctcctacacagcaattagttcatatggtaaatatgaaagtacagcattgcattgcaggctgttttctaccggtctgtctgtgtagactgtagcagaatggggggcaaaaggcaattggaaagggccttattaaagtgtgttatttagttttgtgcatacagtagatgtttaatattttttgattgacagtgaaattatttctttagacaatttgacttaaaaaccacccaagtcagtgtgcataaagacaaaaaccaaatgaagcctgcagattttagtttgtcttaattcgtggtaaaaatagtcctagttaaaccaatcgtcctatggatcaggtcaaaatgattcaactaatgaatgcttccctactggagtgctatgcctaatatttatactaggtttaccatagtcctgtgcaaagcaaataatttacc

SEQ ID NO: 332125 - DNA, 437 bp, Homo sapiens
agatgccagcaggcaccagcttgactggctggtagacaaggcaccaagctgatacacagatcccctgccagctcacctaccgccccccgaaccgtgcttctcatgttcagcccagtttaaaagtgcttgctttctgctccaaaagtgaagcagcacccttaagcaggaagcctgtacttccactaagctagctttggaataaaaartcattttctttatgccagacctcactattgttaattggactctacaagtgtccaattagcaacaagtggcaagtgccaagtggcttaagttgcatttcaaatacagtttcttggtctgtaaaatgggcataataataatatatacctcatcatatggttataaaaatgctgaggcttagagatgggtagtgactgggtatgttaaataactaataggtaaatgtggtgcta

SEQ ID NO: 332126 - DNA, 648 bp, Homo sapiens
cctttatgtataatgaagatgatcataaatttgtcctggctcctttttgtctgcattgtcagggatctcagagtaaatttttattctcagacacagcaactttgttatcccttaggactgatattttgtttcctccattttctttattcttgaattcttggtttacatcatcatccattaactttattatacaaatcatctgcagaacagcttgaatctttagagtgcctattatatatcaataactatgctaagtgctttatataaaatatttcattctcaatagaaatccaaaagagagtcattgttatcaaaccacttcccacatgagaaaactgttgcttaaataaattagatatttttcccaatgttaaataaattacatattttgccagagtactcttagtaagtggcacatatacaatttaaatatagaaccaagaacagatgagccaattaccagtctgggtggaaccagctggttaatcagaatgcasggtcagaaaaatgcttcaaaccaatcttaggttttacaatagtgatgttaatctgtaggagcaattgggaaggttaggaatcttatggcctccagttgcatgactcctgagccataatttctaacctggtggctagtttgtcagttttaca

SEQ ID NO: 332127 - DNA, 487 bp, Homo sapiens
catattttgccagagtactcttagtaagtggcacatatacaatttaaatatagaaccaagaacagatgagccaattaccagtctgggtggaaccagctggttaatcagaatgcagggtcagaaaaatgcttcaaaccaatcttaggttttacaatagtgatgttaatctrtaggagcaattgggaaggttaggaatcttatggcctccagttgcatgactcctgagccataatttctaacctggtggctagtttgtcagttttacaaaggtggtctgatctctaagcaaggagagggtttgttttggaaaggggctgttatcatccttgtttcaaagttaagctataaaccaaattcctttcatagttagcttggccatgaatgagcaagagcagcttggaggctagaagtaagatggaattgataaggtcagatttcttccactttcctaatttttgcaaaggtggttttaatatttctaagtgcg

SEQ ID NO: 332128 - DNA, 569 bp, Homo sapiens
agtaaaaaggtagagatgagagacactgttgccacataaaaggctgtgcagcatttgtctaattaaatctttctaccagttgctcccatagaaatgttgaacatacactttttgtgcagcccagccattttttgggtgcagcaatggctggacaatttcatgaattcatttggtagcaaatgtcctatcatgttaatttgctgcttttttttaaaaaagctttaggtttactttcacatcaacttatttatttatggattttagtatattaacattatcaaaaataattgcaagcaatagaaaaataggaatgccatctgttttctctgtcctaattcttatattttttagcaagtggaaattatcaaattataatttaaaaaaaagtagaacaaagtcttgatttgaggatagtaagctctccattatcttcaatttcattttgcaaaactctttgtctctaacaagatagacacctggcttttcactgtggctttcttccctctgcagcccaatcaagcagtggcttcccacctaycactcactcttgcatgtttgcaccatttgat

SEQ ID NO: 332129 - DNA, 445 bp, Homo sapiens
agattaatgataatcatgcaagatttcatacatattcttgacaatcatgtgttccttattatgttagataagtattaatactattgtcaatatactttttaaaagatttctgaaacaatgtaattatgaatatgggaaattttaaaastaggaaaaacattatttgaagtttttatttttaaactgtgactgaaatagacaatttatcaggaaaagtaattaatccaaatataaaattagaatcgctgtcaaaaactactgtcaaaagcaggcatggccctgcatgatttagaggtttgttctttcagtgcttaaacttgacaaaaatgtcatcaattcatctgatgacacttgcatatccatagattctaaatctaacatatatgcccccttataaaatattatagccaaatctcacatacaaatacagatgctaacataatag

SEQ ID NO: 332130 - DNA, 622 bp, Homo sapiens
taaaaacacttggtaaatttgtcagctataaaataaaaatacaggacaaaatattgcaggctgtgtcagatataaaactctattagatgtaattggaagttacacctcattagtccacagaggctcttaagaagctcttgggcagaaccatcttctaacaatcataacttgatcaagagtgtcttaactgcctgggaatgttctagggcacagatccagatttccagtaatagaacttgatttccatgggataatgaaatctgtgagaaaatatccaagtgaaaaacaagtctgatagagtatgtaagtagagcaacagaacctgagtttcaaaagagaaatagtattttcagagagagtatgagaatagacctctccatcccctaacattgccctttggatgyctgcttactctaagacaaaaaatgacataaaataaaggaagaatttaccacggcgccaacatacatgctatgagaaacttcagaagactcgtcatataaagaagaaaattttcttttctaatggctagagggagaaagcgtcaaaaatagaggatatctgtgacaacactggcaattccatcagcaacaatcttgggctacagaggtcatggatgacc

SEQ ID NO: 332131 - DNA, 565 bp, Homo sapiens
ttttatctctttttacagagaagaaaatggcttagagaatttcccaggatcatatgcacaaatacagaacttgggcttcagagttagtatattgtaatggttaatggtaaaagcttaggagttagattgcttggattcartcctaactctactgcttactgtgccatcttggacaagttactttattcctctaagccttggcttcctcttcagtcagatgcagccaatagcagtatctgtttcataaggtccaggctgtaagcattaaatgagataatgcttatacatttgcaagctgcctcaacatgatttctcaattgcatgtgatttctggattgctagtggcaatgagtgaagagaaatgattctcacctactttcccagctcagagatggagacgcaggaaaaagtccctttatcttctgcttcagcaaaaagcaaaggtgaaattccaaaatgatcaaaaaatctcaacactcaatcacaactgaataactaatgaagatataaaataatttttgatgagactaatgaagtgatgtctgaatgtctttttttcttacag

SEQ ID NO: 332132 - DNA, 648 bp, Homo sapiens
atttgcaagctgcctcaacatgatttctcaattgcatgtgatttctggattgctagtggcaatgagtgaagagaaatgattctcacctactttcccagctcagagatggagacgcaggaaaaagtccctttatcttctgcttcagcaaaaagcaaaggtgaaattccaaaatgatcaaaaaatctcaacactcaatcacaactgaataactaatgaagatataaaataatttttgatgagactaatgaagtgatgtctgaatgtctttttttcttacagcctatttcttaatttaagcctgaaggaaaaaatatagatttggcatagcctaagcaggaatattgtgtgagaccagtgcgtgcactatcagtggctcctatgccactctgtgaagcgtgagtatacacaactggatgcattctaattgctcaggttaatccttggctgtggatgcatccaaaatgtttgctagtaacaatcactamatcctagccccaagaggtattaattttcatctgtcttgggcttctagttaatttaagagatattaagcaattagaatctcttaatattcataattaaatttataatcctgaataatataaaagtcttaatatactgtgtccttctaagataagtgactgtttt

SEQ ID NO: 332133 - DNA, 501 bp, Homo sapiens
aatggatggaaaaagatattccatgccaatggaaaccaaaaaagagcagaagtagtagctatacttacattagaaaaaatagattttaagacaaaaattataagaagagacagagatcgctaktacataatgataaaggggtcagtctagcaaaaggatatagcaattataaatatacatgtacccaacactggaacacccaaatatgtaaagcaaatattattatagctaaagagatagacctcaggctaggcacaatagctcatgcccataatcccagcactttgggaggtccaggtgggtgggtttctggagcccaggagtttgagaccagcctgggaaacatggcaaaactctgtctctacaaaaaaatacaaaaattagccaggcatggtggtgcatgcctgtagtcccagctaatcagagggctgaggcaggaggatcacttgagcctgtaaggttgaggctgcagcgggctgagatcgcaccactccactccaa

SEQ ID NO: 332134 - DNA, 567 bp, Homo sapiens
tagtggcaagtgggatatggctcccaggctctaattggctctaattgtctaatatgacaattagagtttgagtaacttgtgctgacctaaaatagtttaatttttctcagagataagaacagaaaggcctgagaaaaattctggatggaaatgaaatggcagtatggtttgctatccataaacattcctggacactttcagaatggattttgctctattacctagtcttcagaagtgtggtggtgcagatgtccttgaaatctttacctaacacgccgcagctggtttcccacattggacatattcaacacatatgggctgtattggctgatgccttgcccccamagacaattcagccctttagaaggactagggaaggctgggtatgatggctcaggcctgtaatcctagcactttagaaggctgaggatgtaggatcacttgagcccagggcttcaagaccagcctggatgacatagagagaccttgtctcttaaaaaagaacaacaactatggaaaaaaagtgaaccattgcatgtagattttcaaataactagctatataaga

SEQ ID NO: 332135 - DNA, 581 bp, Homo sapiens
acatgttttattgtaatacaatttcctactaaagtatgggagatttaccttcatttcaggagtttagtgtgctagatgtttatttttgttaayagaaaaactgtttttatacttgatgaagatataagatgtaaatatttagaaaggggtgatggtaaatgagttttattttaagtgcaacactcagtacccaaattaattaggaaatttctatttcacacatcaaatgtccttagtaaagccttctgcttacaaaatcatagtttttgaattcactaaagatgcttagtttcccccagaatcatcagtctcccacttgacagctcatgactgatcctaattcagaatcctacctcctagtttttcttcaaccaaggtgtaacagtttccatttcctaatggcttccttttgtttttcttcttctccttttccctcacctaaaacaacataagcatttgttcatgaaccaatcaacagacatttatgaagcacctgctgtatgccaagcactgcaggcactgattcagtgataggaaataccctccatgctacctctagacctatatttccatcacgacca

SEQ ID NO: 332136 - DNA, 466 bp, Homo sapiens
gagtatggatgctagtccagattttggacaagagggtatgtggtgtttttatggccaaaatatagggaccagaaaccctgctttctagtgtggctttgggccaatacacagtkcccctgggatgagcagggtactctttcctagtgggagacctattcctattagagtattacagccaaataaaccactactttcttcacaagaataagctcaataaaactaatatttgaaaagattttgaagttctagctcatgaatggcaaatattattttcctttttttcttcttaatctacccaagatagtatttcatttttcccttttaacattttaaacagcttttgttttattttttcttatttttaaaattttacaaacagtaaaattgaaacaaatcttggtgtacagctctgaatttttacacatgtataggttcatgtaaccgtgccacaatcaggatacagaac

SEQ ID NO: 332137 - DNA, 560 bp, Homo sapiens
ccaatatacatttgtcttgagtattgtaactttaattcttgaaatgtggtagtataagccctaagaacaaaaaataatatttttaagattattaaatagcatctctagagattattttcctattctagagcctttgcatgtccttagaaaattttatttaatttcagatttttgtgggtacatagtaagtatatatatttatgaggtacatgagatactttgatacaggcatgcaatgcttaatgatcacatcatgaaaaatgggatatccatcccctcaagcatttcttctttgtattacaaacaatccagttatattcttttagttattttcaaatgtagaattaaattattttcactacagtcaccctgttgtactatcaaatactagctcttattcttactttctaacaattttttttgtacccattaactacctccatctccccgctacccttccccactacccttcccagcctttggtaaccatccttctactttctatcctcaggagttcaattgcattgatttttmgatcccacagataagtgagaacatgt

SEQ ID NO: 332138 - DNA, 504 bp, Homo sapiens
tgccaaaggccaagattgagacactctgatagctctaccactgactgatgctggtacttccttcacaaattaccaggaaaaaatagcctctgccatatcaatagctatgacagacagagaacagtgacctcctaagcagcccatttcatctgctaataaagaaatctatttctcaagtactgttagaatttgcctctacgagctttcacccatcaattactctactgctagtttttgaggccaaacagtagtcaaatccctgttctgcatggmagttcttcaaagtcagaagatagctactgcatcttccattataaacacaccagacagactttcagaaacttgtctatacacacttctatgtttatctaggtataagagccctggactgaaattctcaagaccaggtaatcatgtctacatcatgttgcccagctcatccgtaaaaatattatccagactagcacttaataatatataaccagtacttactaatatacaact

SEQ ID NO: 332139 - DNA, 508 bp, Homo sapiens
tggcccttcccttcttttcccataagggatacttttagttaattcaatatctatagaagyaatgctaatgactggtttgctactaataaatatgtgggtaaatctctgtttggggctctcagctctgaaggctgtgagacccctgatttcccacttcacacctctatatttctgtgtgtgtgtgtctttaattcctctagcgccactgggttagggtctccccaaccgagctggtctcagcagcactgacatcaaaaaagaagaaaaacttcaaattaataacctaatggtgcatcttgactagaaaagggcaaacaaaaccccaaattagtagaagaaaagaaataataaagatcagagcagaaataaatgaatgtggaatgaagaaaatacaaaagatcaatgaaacaagaggttgtttatcttttggaaagataaacaaaattgacaaacctttagccagactaatgaagaaaaaaagggagaagacccaaataaataaaatcag

SEQ ID NO: 332140 - DNA, 609 bp, Homo sapiens
  misc_feature (1)...(609): n = A,T,C or G
gtatacaactataaatataaaaatacacagtagcctagctatgaatggcagcaacaatccattgtggccagccatgtttaaaaacagagtggaactttcctgaacaagatttcagacttgttaggatcttaggagattgagctgacagagtgacaaattgcaaacagttgctgaggctacaaattaatgcaacctcatatttgtgtagcactttcacatttacagagcatttccttatcctttacctcaactcatccttacttggagtttaaaggagcaaatattgctagatccagcttcatagaaaaggtgtttggggttaaagaggttgccttgtatcaaacagccagtgacacaggcacaaaatattaagtggccccctgtccattttctaagaagagatcattcctttcttgtttcaattagctattttcctcatgctgaaaagaacaataggtaggaagagaaagtggaaaactctccaaataatgataatgatgrtgatgataaaaagaccaggaaggagcantctaggaatgtggctgacgctgcagagcatggtgcaggagaaagaaaaaaaggagataggacanctagtatacaatgcgg

SEQ ID NO: 332141 - DNA, 609 bp, Homo sapiens
  misc_feature (1)...(609): n = A,T,C or G
gtatacaactataaatataaaaatacacagtagcctagctatgaatggcagcaacaatccattgtggccagccatgtttaaaaacagagtggaactttcctgaacaagatttcagacttgttaggatcttaggagattgagctgacagagtgacaaattgcaaacagttgctgaggctacaaattaatgcaacctcatatttgtgtagcactttcacatttacagagcatttccttatcctttacctcaactcatccttacttggagtttaaaggagcaaatattgctagatccagcttcatagaaaaggtgtttggggttaaagaggttgccttgtatcaaacagccagtgacacaggcacaaaatattaagtggccccctgtccattttctaagaagagatcattcctttcttgtttcaattagctattttcctcatgctgaaaagaacaataggtaggaagagaaagtggaaaactctccaaataatgataatgatgaygatgataaaaagaccaggaaggagcantctaggaatgtggctgacgctgcagagcatggtgcaggagaaagaaaaaaaggagataggacanctagtatacaatgcgg

SEQ ID NO: 332142 - DNA, 596 bp, Homo sapiens
ttatgaaggaaattagttgcacatttatgtgactaaatgcgccagttaaagtgactcaattgcagcatcattttgcttgatataacctggtgaacgtgtatgttaatcttgctcattcttgtgaaatctrtggggagatgcatactaagtggaagacctgttaggcttcgaggatgatgtactgtatactgcttcatccaattgcatttaaatatatctgagatgagggagatgtcactgacctaagggtgctgatgtagagaaataagacgtttttgtatggtagaaattcttagaaatgagagaagtagaacagattgtcagggagcactggagtctaataatgtgaatcttcatagtccgaaatttgttgtgtgtggatttatctaggattctgtccaaggagttttaattgtcatatgtattggcaggtccgtacaacgtggttttagttataatgcagtcacatggtccccaaaggtcatgtttattgaggccccagttgaaaaatgaatagggagtgatagagccatacatcaaatatccttgttttcgttgttacttaggttattgactaagtacataatgcaagttga

SEQ ID NO: 332143 - DNA, 565 bp, Homo sapiens
gctccagccagtaaaataactggactaccagggccctgggacctcagagaataatcaagaaaaaaaaaagctatagagactttgggtatcatatcctgaatatatgaagttcattaagcactttctcctcatctcccttagaaggtcctctttctcccagggtgggggtggggaagagctgacaggacaccctaagtccatcctgattttgcagaactcaagacatggggaggatacttaaaggcctagacttcctaaccctgcttatatggctctggaagctcattcctgattcttcctatctagagtcaggatagacatattctgtccaatggagacatgttgtaggacactcccaactgacttaggaaaggcagtgaagaggagctggaatggaggcagaggcagatatttattgagaatcatctattagacccaagaaggatcaatttaaggtccagagcaaggggaaatgggtcaaaatgtaaagytgggatgttcaaactttgtaaagacctactggcactagactgagaagtcaaaggaagctcaggggagaaaaaag

SEQ ID NO: 332144 - DNA, 558 bp, Homo sapiens
atcgtccttcttacacctgggggtgggaagaagggggaggggagacctctgactagaagggtatatgcatgtgtgggtattgtgtatgcatacatacacacacataatatatacatacttttggtggkggttggaaagggaatgaatacatgaggccctctagtggaaacagggatatctaagcagttcttgattgtttcaagacaggcttgttggaacagactcctccacatttgccagaaatatagctgctgagtaatagggtttgggagtattgttgttgtatccaaactggagatttcgggcataggttgaagaggggtctgtctctctgctcctgtgcccctccaagtctcaccctctcacccccaatcataaaaagacaagggccaaaggccgggcgcggtggctcacacctgtaatcccagcactttggcaggctgaggcaggcggatcacgagatcaggagattgagaccatcctggctaacacggtgaaaacctgtctctactaaaaatacaaaaaattagccgggcgtggtggcacatgcctgtagtc

SEQ ID NO: 332145 - DNA, 593 bp, Homo sapiens
acccacacccccggcaggccctggtgtgtgatgttcccctccgcgtgtccatgtggggaactactagtcttttcaaatgtacttggaacaytttccaagatatcatactgtgggtcataaaacattttctattaaatttaaaagaactgaaaccacacaaactatgtcctttgaatgaagttagaaactaacagcaagcggaaatttagaaaatctcccaagcatttggtaattaaacaatacgcttctacatagtaactcacagatcacagaagaactcacaaaggaaattagaaaatattttggactgattaaaaataaaaacacaatttgggggatatagctaagcagtgcttagaggaaatttatagcattaaactcatatttgaaaatgagaaagacctcacataaataattaggcatttaccttaagaaattagaaaaaggagcaattaaatgcaaagcaagcatgaggaacaaaatgaaagataacagcagaaatcaatgaaaaatgaaacataaaaacaatagaaaaacatcattaaaaccaaaagctggttctttaaaagatcaatagaactgataaactttta

SEQ ID NO: 332146 - DNA, 593 bp, Homo sapiens
acccacacccccggcaggccctggtgtgtgatgttcccctccgcgtgtccatgtggggaactactagtcttttcaaatgtacttggaacactttccaagatatcatactgtgggtcataaaacattttctattaaatttaaaagaactgaaaccacacaaactatgtcctttgaatgaagttagaaactaacagcaagcggaaatttagaaaatctcccaagcatttggtaattaaacaatacgcttctacatagtaactcacagatcacagaagaactcacaaaggaaattagaaaatattttggactgattaaaaataaaaacacaatttgggggatatagctaagcagtgcttagaggaaatttatagcattaaactcatatttgaaaatgagaaagacctcacataaataattaggcatttaccttaagaaattagaaaaaggagcaattaaatgcaaagcaagcatgaggaacaaaatgaaagataacagcagaaatcaatgaaaaatgaaacataraaacaatagaaaaacatcattaaaaccaaaagctggttctttaaaagatcaatagaactgataaactttta

SEQ ID NO: 332147 - DNA, 550 bp, Homo sapiens
cacatgtaataatttgtttatctattctcctgatgatagacatttgggtcctttatagtttgggggctattacaaattaagctgttatgaacatccatatacaaaactttgcatcaatatatgctttaactttcttagcaaatacctagaagtgattccactagatcatayagtagatgaacatttaactttttgaaaaactgccacactgttttcttaagtggttgtacaattttacatttccatcagcagcatatgagagttcaaggtcctccacatggtatggtcagtcttttaaattttagccactctcatgggtgtgttgtgatatctcatcgtgtttaattctcattttttaatgaataatatttaaaatcatcttgtgtgctgtttgccatctgtatatcttctcttgtgaaatgtctgttcatatcttatgctcaataagatttttggattcactgagttttgagtgttctttatgtattctagaggcaagatatagatgtcctttactagccatattttttgaaaacttttttctcctaat

SEQ ID NO: 332148 - DNA, 565 bp, Homo sapiens
  misc_feature (1)...(565): n = A,T,C or G
nnnnnnnnnnnnnnnnnnnnnncctttttactggagttaaggaggtagatgacttctttgagcaagagaatgacttccttattaactattagagtaggatcaaagattcttgtgtgaaagctgacaaaatgaccagatctcataaaaatgttgccgatgactatattcacactgcagcctgcttacatagyctggctttagaagagcccacagtcatcaaaaagtatctattgaaggttgctgagctatttgaaaaacttaggaaagtagagggttgaatctcatcagatgaagatttaaagctaacagagctcctccgatactacatgctcaacatcgaagctgctaaggatctcttacacagatgcaccaaagccctcattgactatgaaaaatcaaacaaagctctggataaggcccagtttaaagagcaaagatgtcaagttggctaaggtacactaggaggagtgctgccagaaatttgaatagctttccaaatctgcaaaggaagaactgataaatttcaaacggaagaaagtggcagcatttagaaagaatctaattg

SEQ ID NO: 332149 - DNA, 565 bp, Homo sapiens
  misc_feature (1)...(565): n = A,T,C or G
nnnnnnnnnnnnnnnnnnnnnncctttttactggagttaaggaggtagatgacttctttgagcaagagaatgacttccttattaactattagagtaggatcaaagattcttgtgtgaaagctgacaaaatgaccagatctcataaaaatgttgccgatgactatattcacactgcagcctgcttacatagtctggctttagaagagcccacagtcatcaaaaagtatctattgaaggttgctgagctatttgaaaaacttaggaaagtagagggttgaatctcatcagatgaagatttaaagctaacagagctcctccgatactacatgctcaacatcgaagctgctaaggatctcttacacagatgcaccaaagccctcattgactatgaaaaatcaaacaaagctctggataaggcccagtttaaagagcaaagatgtcaagttggctaargtacactaggaggagtgctgccagaaatttgaatagctttccaaatctgcaaaggaagaactgataaatttcaaacggaagaaagtggcagcatttagaaagaatctaattg

SEQ ID NO: 332150 - DNA, 629 bp, Homo sapiens
  misc_feature (1)...(629): n = A,T,C or G
agtggtttatctgatttactggcacagcaaggctctgaggaaatgagactcaggaggggcaagagataatgaacgagagggaggagagtggggcttgaggcctggaccaactgtcaagggaagcagggtccaagaggggaccgtggtgaccacgcctagtgtgggtacttcagacttccgacaggaataggggcaagaagagactattagaacaagacaggtcaggaggagaacaacggactggcctagattacgctaagggacagtggtgggctgagtctggccctccttggcagttttgtctagagctggcyctccatttaaccacgtctcccaaggtggccgcttcagagtggattgtccccagcacggaacacttgatgtcatacttcagagcctgtgcacacctgggcacggtcctgggtgctgctcacagacacactgcctttgggtaattctcttggaaggattgcttccatgtacctggagatgtcaaatgaatgctctttttctgctgaagttagagaaaaaaggatgatttttaagaaaatggaaaaaaaaagctacaccaccaattcttctggtgcctctacctancagtggaattcttcacttaatcaagggatttg

SEQ ID NO: 332151 - DNA, 619 bp, Homo sapiens
cttacttgccacacctagaaaagccaataatgagcaatgctgcctctcaattattgatactaaggtacttacgggtagccaagttccatgaaattattccaggtctgctttagcaccattataatacccatttgcatacacagatcaataaggcatccactagggtggcactgcaaggtaagcaaacacagaaattccagaatcaatggagaggaagaaagggtgtctggtttataatctacacaaagttgccctaaggctgtttaatgcaagtctgtcggaaacaaggaatgatgggagaatacagacctcttctagtctccacctgtttatcagcctcaagtaggcacctgggtgtcctgtaaatcttcaacacacagagaaaaacaagccattagtgctctaggtccaagctttcagygaatattacatttagtttagcacattctccaatgtgaatgactgctactataagtagtaggtctgggggaattaggaaaccctccagatctgtcataaccatagcttctggaattctccagggcacatgtctcttctggcctttctgtcaggctgcctaaagcagaagccagttcttgctgcttgctgtggactttca

SEQ ID NO: 332152 - DNA, 560 bp, Homo sapiens
cggaggaaatacacgctggcaacaaatgccaaatatcaaaagttgatttttaaatacatttttctaatacttaacaaactaatgcatttcatcaygcaaagaatctaatccaagcttcaacattctgaggtggacacaaacaaatctctttcattgtgattaattcctacaaaagcagcttttcatatgacatttcattgaggataataaataataaccacaatagtccttattaatatctgccttaccaattcctaatgccttataaggaaaatagaattccaaatgtgaagtcagagttctatggctattctatatctgaagcgactgcacatacattatcagtttttcctgaactacatcttatagccagactgaaccagtggactttcttctgggtttcagagaaataatttctagctcatttattccaaacaaaagttagcacttctaagcacagatatgtctaggtagaaggacagagatattacgtctttctggaaaatattcccaattatgatcacccctttggggctaaatcatgttgtgggagctacagc

SEQ ID NO: 332153 - DNA, 604 bp, Homo sapiens
cacatacacacatgcatacatgtaccccaccctcagaaccatctattgaccagatggctgggtgagttaaggatgcgtgagttaaggaggcatcgggtccaccaatggaaaagtggagtaccataagctctgggaatttccagtaatgtttaatcacttcagtgcttttgaatgctgtaatctagagtttacagcagtccataaagaataggattgcaggatcttaccatcagaagcgggcttagagattttacgttcaagatgcagaggttcagcaatattatgactacccagcactgcctagaaagctggtaatgaatagcagctagccttgttgccataaaattattygccccaaaataagaagtgagattttataaatagttagataggaccttgtacatttctttcttgccctgaaaattacgctaatctccattaccaatggactccaagagtctgagatttctatacacaatgttttcattggttgagcaatggatgcttaatgaaattattttgactcgtgatttgactccctatttcctttgtgattatagattttataatacgtgcagttcatttattaaatgcatgaaattta

SEQ ID NO: 332154 - DNA, 578 bp, Homo sapiens
tttaatttttgtgggtacttagtaggtgtatatatttatggggtacatgagatattctgctacaggcatgcaatgcattataatcacatcatggaaaatcgagtatctatcccctcaagcatttatcctttgtgttacaaacaatccagttatattattttagttattttaaaaagtacaattaaattattattgactatagtccccatgttgtgctgtcaagtactatgtcttattcattctattgctttttgkactcattaaccattccccctcctcttcagcacctccacgccccaactcacactatctttcccagcctctggtaaccatctttctattctctacctccatgagttcaattgttttcacttttggatctcacaaataagtgagaacaacatgtgaagtttgtctttctgtgcctggcttatgtcgcttaacataatgacttccagttccctccatgttgttgtaaatgacaggatgtcattctcttttttttttttttaatggctgactagtacttcattgtgtataagtgccacgttttctttatttatacatctgctgatgga

SEQ ID NO: 332155 - DNA, 533 bp, Homo sapiens
  misc_feature (1)...(533): n = A,T,C or G
atagagtggccagtgaggcagaaaataagattcatgaagaaacatacataaatttactctttgaaaacatgaaaaatgactaatggattagaaaacaaaaggcagatccataaattgaaagtggcagaaggctcctaagtcaaagagaaaggttaanaaagaaagaaagaaaagaaaagctccaaagagcccagtaaaattgatacaaggaggctatgagatacactttaatcactgyggacattgtcttaaatctaccaggttgttaaaattctaaatctttgattcactatcaattgtgcataaaggttcccattttgtttttggttccccctaaaacaagatagatttcaccatatttgaatttgggaaagaactgaaacaccattacgacggaaaatccagggggtttactgttaagggacagcctcaagggctgtgaggtgcgggatggagagtgagtcgaggctccaccttcacatgggctcccagagttactatgccttgtgattctggacttaacctcttttaat

SEQ ID NO: 332156 - DNA, 552 bp, Homo sapiens
cagtttcctcatctacaaatcaaaggctataatttcctcatagcttatataagaaaatggatatattgaagctcatggcacagtgcctgacatgttggtatctctaaataatagtatcttttttagtttaagacttcctacatggaacacaggctggggtagcttcatatcactgttctaccattaattagctgcccatcctcttgggcaaattccttaactcttgacagattacttaacttgggaaaattacttaactttttgagcctcagtttgctcacgtagaatgaggatcatcaccaccaaactgggtgttayagtctgggtttgtatcctccaaatctcaagttgaaatttgctccccagtgttggaggtgaggcctaatggaaggtgtttgagccatggaggtggatccctcatgaacagattaatggggagtttgtgaattgtcaatctgttagttcccacaagagctggttgttgaaaaagcctggcatgtcctactccttgctcttgcttcctctcttaccaagtgatctctgcacacatcg

SEQ ID NO: 332157 - DNA, 650 bp, Homo sapiens
atacatgtctttggaaagttagcgttttccgcatactggattatttcctaagaaggcattttctctgtgtatgcttcttaaggggaagaagcatgtcgttttcttcactgttcagtctccaaagactagagccaggtctgacaacaaacagttgtaaatgagtgaatgagtgaatgaatgaatgaaccacttcaacagattcttaaatgttaaatattgaatgcaagtgtatacatagttcatcaccaagttctaaaatatgagatattttaaacctatacattattaatggcattatcaaacagcataaaaacagggtgccattttaaaaaaaatgctattttataaatttgtatttcttttttttgtttttgttttctgagacagagtctcgctctgttccccaggctggggtgcaatggcacgaccttggctcactgcaacctccacctcccaggttcaagctattctcctgcctcagcctcccaagtagctgggattacagacatgtgccaccacgcccrgctaattttttgtatgtttagtagagacagggtttcaccatgttggccagcctcgaactcctgacctcaggtaatccacctgcctcagcctcccaaagtgctgggattacaggtgtgagctgccac

SEQ ID NO: 332158 - DNA, 638 bp, Homo sapiens
acctactgtgtgtccttgagcagataactaaaactctctgagccttgactttcttgtctatagaatggggataaccacacccatctcatagggtttttgtttgtttgtttttgttttgaggtggagtcttgctgtgtcacccaggctagagtgcagtggcgctatctctgctacgtgcaacctccacctcccaggttcaagtgattctcctgcctcagcctctcgagtagctgggactacaggcgtatgccatcacacccagctaattttttgtattttttagtacagatggggtttcaccatattggccaggatggtctcaaactcctgaccttaagtgatctgctcgccttggcctccgaaagtgctgggattacaggcatgagccactgcacctggccatatagggttttaagaaagattaaatgaaatattcggtgagtgtctggaacatagtaagcagtgagtaaatggmcaaatggtagttgtgttattttcattattgttgtttgcagctacaactgccaatgaaaaactaaatcacaaacttcctctagatggtcccgttcactttactcgttacattggtttcagagcatccaaagtttgagcttctttctttgtttcttctctcactc

SEQ ID NO: 332159 - DNA, 640 bp, Homo sapiens
ggggcaggtcgagggaagccctttgtttctttgacatgtctctgtccctggtagaccaatagttcctcaaggattgggaatgaatgaaatcttacgtgccctttttattcctcactgtctgtggccatctctaccacctccacttctactactcacatccaagccaccatccttgctagtctgaactgaaaaagtctccagacggatagccctgcttccattcttgcctacctaccatacrtgatcttcatagcatccagggtgagcattacacaaagtttaattcagatcaaaagctcaactcagaagcctcctgtggcttcccactggacaaaatcacaagtgttcaccacagccttcaaagcctggcttcctttaatccaacctcctgtccccggactgccctggctcactctgctccgagcacaaagaggtctttgccatttcccatgacacgctgagaccctcctgctgcatggccttggcagtggctcttccctttgcctggatgctcttcctcgaaatgttggcaagcctcattctctcactttatgaaggtctctgctcaaaggtaccctcagcagtgaggctttctctgactaccctgtctaaacaagcaaacctcccgacccaacttctt

SEQ ID NO: 332160 - DNA, 565 bp, Homo sapiens
ccacccttctctaattggcaaattcccatttatccatcaagaccttccttccctgtaaatccttactgtgtcctcagtaagctcttttaagagaaggacactgccctcttcgtctctagactagtaatatcatgtgtagtagatgttcaatatccattaaacmaataagccacaataataattgttaacccttatagggtgcaggcattatgctaagcactttacaagaattaactcactctatcttatgagaacccaaacacatagattctgttattccctacattacccataggggcatcccaggtacagatggataaattatccaaggtcacacagccactaagtaaagaaaaaaatttgcatgactccagaagttaagcgcttaatgccaatgctatgggagaggacataatcttattgtacaacctatgttgtactagaagcatacgtgtatgaggcttatttttaaaaagcatattactcatgtaaaaacagtgatctgaggcgggaggatcactcaagctcaggagtttgagaccagcctgggcaacatagggagata

SEQ ID NO: 332161 - DNA, 571 bp, Homo sapiens
tcaggatggccatgcatgaactgaggcctcggttgcttgtctggtaaagaagaaccagaatgcgtgctgtcaggctttggggtggatcaaatgaggagatctatctatcttcaacaactggcaggcatttactctcatgacaatggctttgcaggtagctaaagtggtctgcaagggtaggaaggaaatatcacctcccacaaagaacttctgcagacagacaggatgtggggagactgacttcctctcaggagtagattaaactaagatcctgagaagccaaacmtgttggaagttctttcccctttatgtctttattttccctaagattcctaattgattacctgaaaagggagccaatactatacccaatttgaattgtaatttaatttcctaacatttattttggttattgtttccaccaaaaaatgagatagcttttatactcattcactactgtttaaaacaataaaaaccctatctttcccagggcacaactaagaagaagccctgaatggaaatttaaatatttttaagtaaaaaaaaaaaaaaccttttagatgactatgca

SEQ ID NO: 332162 - DNA, 571 bp, Homo sapiens
tcaggatggccatgcatgaactgaggcctcggttgcttgtctggtaaagaagaaccagaatgcgtgctgtcaggctttggggtggatcaaatgaggagatctatctatcttcaacaactggcaggcatttactctcatgacaatggctttgcaggtagctaaagtggtctgcaagggtaggaaggaaatatcacctcccacaaagaacttctgcagacagacaggatgtggggagactgacttcctctcaggagtagattaaactaagatcctgagaagccaaacatgttggaagttctttcccctttatgtctttattttccctaagattcctaattgattacctgaaaagggagccaatactatacccaatttgaattgtaatttaatttcctaacatttattttggttattgtttccaccaaaaaatgagatagcttttatactcattcactactgtttaaaacaataaaaacmctatctttcccagggcacaactaagaagaagccctgaatggaaatttaaatatttttaagtaaaaaaaaaaaaaaccttttagatgactatgca

SEQ ID NO: 332163 - DNA, 571 bp, Homo sapiens
tcaggatggccatgcatgaactgaggcctcggttgcttgtctggtaaagaagaaccagaatgcgtgctgtcaggctttggggtggatcaaatgaggagatctatctatcttcaacaactggcaggcatttactctcatgacaatggctttgcaggtagctaaagtggtctgcaagggtaggaaggaaatatcacctcccacaaagaacttctgcagacagacaggatgtggggagactgacttcctctcaggagtagattaaactaagatcctgagaagccaaacatgttggaagttctttcccctttatgtctttattttccctaagattcctaattgattacctgaaaagggagccaatactatacccaatttgaattgtaatttaatttcctaacatttattttggttattgtttccaccaaaaaatgagatagcttttatactcattcactactgtttaaaacaataaaaaccctatctttcccagggcacaactaagaagaagcmctgaatggaaatttaaatatttttaagtaaaaaaaaaaaaaaccttttagatgactatgca

SEQ ID NO: 332164 - DNA, 600 bp, Homo sapiens
tcatacttgcccaacagacactgaaaactccatatatgctattctatgactgcctttcagaaaggtgtatatacctttcactacaggaatatgcccacgatacaccgtgtattaacctatcatggctctctattgtaagtgtggtttgtatgtctcccctctttatcaaattgtaagcttctagaagacagaaartatcttaatcatgtttatatttccaggccctgagactgtcattgcctgaatgaagtatggaaattcttgaaggaatgcctgaattttgttttaagcattaatagttgcctaggttcaaatgcatgctgccagaatttaaattttaaaaaaaatctaggctcatattgatttttaaaaatttaaaaagaaggaaaacgccttgtcagaaaatgacgaaggtatttgtagtatctacatcctttggacatttttttaaatgctatgttctgacacttcaaaaagacattgttttcccaggtcagttatattttgaggcccaccaaccaaatccaaataagtaagtttatgaattttgttcttgatcatttataaagttggatgtttggggttgttttacgtttcgtt

SEQ ID NO: 332165 - DNA, 593 bp, Homo sapiens
gaggcagccttcctggagggggtggctggaaagagagaccctgaatgatgagtagctcacctagcagatataatgtgggaaggacaccacaggcaaaaggaagcgacctgtttcatagtataatgagacctgttaacaacttggaataaacagctccaattattcctaatatgaatcctcagtgtgtctaaatctataggccatttactgagtgaagagattaaccagaaawaacaaattatagccaaaatggcaattctaagacagaagctagggttttccaggttaatgacccagagaatgaggaatacttgaagaccctaacctttctgagtgcattgaatccccaaggcaagcagggtaccttgaatatctattggccacatccagtctgtaattcatgtgggtctttgcaaggccacataatgcgggtaaagaagaaaagtgctccttttcttctaattctagactctaattctattcatatagggagatggagggaaccacaatcattgcatgtaagtgaggccactcttttttttttaaactgagcccaggtttacaatgtttccaatagccaaaccagtcaatag

SEQ ID NO: 332166 - DNA, 555 bp, Homo sapiens
aaatcaccatcctattgctagggactctgttgacaatcaccactccagtcttctgtggattggatttccacagattcagcaattccagtgcctagctagtgctgactctttagataggatgacctttatcataccttgttaattttaacctaatttcagctcactataatctatgataactgagatatattctttaagttaataaagaaatgtgtatccaaaacttagcaaaaaagcaactggccatgctggaaacacaggttagtttacagagtcactaatgattgtttatgattatgctttttctagttagtgagtgtattttcagaaagctactacttaagtgaaatttgattgtgttatttgaatgtattacttataattatcatcacttcagtttttttgtcttttaaaaatactggcagccatctgactgaaacagaaggcaagggacactgtggcmcaagcccaagcatggacccaggagatcatgtttcagtacctcagagagcttatttgcaacaggaattaatatgcatcttgttgctgttcagc

SEQ ID NO: 332167 - DNA, 503 bp, Homo sapiens
cagcaggactggtttcaaaagatataggtcgcaaagaccacactgatgaaacaagatgagccgggcacgttggttcattyctgtaatcccagaactttgagaggctgagacgggcggatcatttgaggtcaggagttcgagaccagcctggtcaacatggtgaaaccccgtctctactaaaaatacaaaaattagctgggcggtagtggtgcgggcttgtagtctcagttatttgggaggctgaggcgggagaattacttgagcctgggaggcggagtttgcgcagtgagctgagatcatgcccctgcactccagtctggatgaaagagtaagaccctgtataaaaaaaaaaaaaaacctggatgtggtaaagaagctaggcaaaacccacccaaaaccaacatggcaatgaaagcaacctctggcagtcttcactgttcattaaacgctaattataatgcatttgcatgctaaaagccacccccaccagcaccatgatagtt

SEQ ID NO: 332168 - DNA, 519 bp, Homo sapiens
aaattttaatcctcagtgttggaagtagggcatggtgagaagtgactggatcatgggggcaaatttcccactttagtgcttttcctttgatggcgttcttatgagacctggttgtttcaagtgtgtggcatctcctccctctcgactcggtcttcctcccattctggtcacatgaagcactcactgcttcatcttctgccatgtctgtaactttcctaaagccttcccagaagcctagcagatgccagcatcatgcttcctgtacagcctatggaattatgagccaattaagcctcttttcktcatacattacccagtctcaggtatctatttatagcaatgagagactaaactaatacagcagtttaacatacaagaaccaatcaatgtaatacaacacattaattgaatgaagggggaaaggagcacatgattatctcaactgaggcagaaaaaaactttcaaaaatatctaaaactttttcattactttttaaaaaactcaattatgattagaaag

SEQ ID NO: 332169 - DNA, 503 bp, Homo sapiens
cagcaggactggtttcaaaagatataggtcgcaaagaccacactgatgaaacaagatgagccgggcacgttggttcatttctgtaatcccagaactttgagaggctgagacgggcggatcatttgaggtcaggagttcgagaccagcctggtcaacatggtgaaaccccgtctctactaaaaatacaaaaattagctgggcggtagtggtgcgggcttgtagtctcagttatttgggaggctgaggcrggagaattacttgagcctgggaggcggagtttgcgcagtgagctgagatcatgcccctgcactccagtctggatgaaagagtaagaccctgtataaaaaaaaaaaaaaacctggatgtggtaaagaagctaggcaaaacccacccaaaaccaacatggcaatgaaagcaacctctggcagtcttcactgttcattaaacgctaattataatgcatttgcatgctaaaagccacccccaccagcaccatgatagtt

SEQ ID NO: 332170 - DNA, 592 bp, Homo sapiens
aattataccttcattttattaatgcttgtctgcctttggtttcatttaggaaaccccacctgtttcctaatactcagagatgattgcctctcagtgagccatgttcagatcatctttttctcaagaatactgacctgcattcttgatgtacccctcccccgttcccatcttgcagacacttttaagtaataaaatgcatgcacctcactaacagagaatactttcctctgtctaaagttcttcacttagaaatttcctttgctgttattaataagatcctttctcacagttttggagcatataactgggtgagttggatacatatctcagaattttctttgatccctcacttctcaattgrcattgcaccacattgaactgcacacttattcctgctgtactatatattgtatatctttaagcaggaaaaaatgacttgttatttcaagcgaacaatatgcattatttgactccctgaaagacccattaatctctaagttagagttataccaatcatcggagtttctaatttgtgaatctgtgttctaattaatataaattacaaattactattctattctgcaaagccata

SEQ ID NO: 332171 - DNA, 603 bp, Homo sapiens
accagcctggccaacgtggtaaaaccgcgtgtctaccaaaaaagtacaaaacttagccagacatggtggcgcatgcctgtaatcccagcttctcaggaggctgaggcaggagaattgcttgaaaccaggaggcagaggttacactgaattgagatcgtgccactacgctccagcctgggtgacagagtaaactctatctcaaaaaataaataaataagtaaataaaatccacaagccaggacctcaaatgttaactgttactcgggatccatagttgtcactctttgtttgatgaatgaatctggggcgggccaacrggaatccccagaaggaggttctacaaacatttctaaaatcacagtggctggagatcccaatattgaggtggaacagactcctttccccactgaccaactcacagagttccccggagagttatacgactctcctagtatcccctattgtgaccttatctataagaggccctccccataggcactcatttccctggtacatgctatggagattctaagttgtttactccattcatagatcttcaaagatgctccaaacaggagtttaaatcctctgctataaagatgg

SEQ ID NO: 332172 - DNA, 603 bp, Homo sapiens
accagcctggccaacgtggtaaaaccgcgtgtctaccaaaaaagtacaaaacttagccagacatggtggcgcatgcctgtaatcccagcttctcaggaggctgaggcaggagaattgcttgaaaccaggaggcagaggttacactgaattgagatcgtgccactacgctccagcctgggtgacagagtaaactctatctcaaaaaataaataaataagtaaataaaatccacaagccaggacctcaaatgttaactgttactcgggatccatagttgtcactctttgtttgatgaatgaatctggggcgggccaacaggaatccccagaaggaggttctacaaacatttctaaaatcacagtggctggagatyccaatattgaggtggaacagactcctttccccactgaccaactcacagagttccccggagagttatacgactctcctagtatcccctattgtgaccttatctataagaggccctccccataggcactcatttccctggtacatgctatggagattctaagttgtttactccattcatagatcttcaaagatgctccaaacaggagtttaaatcctctgctataaagatgg

SEQ ID NO: 332173 - DNA, 603 bp, Homo sapiens
accagcctggccaacgtggtaaaaccgcgtgtctaccaaaaaagtacaaaacttagccagacatggtggcgcatgcctgtaatcccagcttctcaggaggctgaggcaggagaattgcttgaaaccaggaggcagaggttacactgaattgagatcgtgccactacgctccagcctgggtgacagagtaaactctatctcaaaaaataaataaataagtaaataaaatccacaagccaggacctcaaatgttaactgttactcgggatccatagttgtcactctttgtttgatgaatgaatctggggcgggccaacaggaatccccagaaggaggttctacaaacatttctaaaatcacagtggctggagatcccaatattgaggtggaacagactcctttccccactgaccaactcacagagttccccsgagagttatacgactctcctagtatcccctattgtgaccttatctataagaggccctccccataggcactcatttccctggtacatgctatggagattctaagttgtttactccattcatagatcttcaaagatgctccaaacaggagtttaaatcctctgctataaagatgg

SEQ ID NO: 332174 - DNA, 317 bp, Homo sapiens
gttatgtcagttctcttcttaaaaagttttatcttccatctttaaagattcctacacttctacaacattgccaaaatgtcaaagccacctgcagtggtcactgtctctccttttgaatgcaaggaaatattcatgacagcctctcacctacttcaacagaagargcatgaggaaaatgatccctggtaatacccaggtgtaaaatctctggcattactcttttcccagacagccaagaggccagctatttattgtcaaaggctgtcaccccatctgctgttgtgccatcctatacttagggggcctcagtgtcactt

SEQ ID NO: 332175 - DNA, 546 bp, Homo sapiens
gggttcttcataatttttaaggatataaaggggtcctgagactaaaaatttgagacccactccttaatgaaaatattttctcatatgtaacttgtatttgttgaattcttttcaattcaattgttgtattcaagtaacagaagagacatcatctctacagagaagttgatttttgtctttattttctctctgagcccatgagaaagacacatagggcctcmtgtaatagccactgaattataagagacaagataaaacacaaatgatgacagcaggaaacagacatactgaacaaactcgttagctaacatggagttatagctacttgtaagccgatttaagtgctttcctttgccatattgtatgctacaacatcaactctgagatctaaactggctctaactctattcaacactatgtactaaagatacataaggcagtggtctgttttttataaataaagttttatgggaacacaggtgctcctgttcatttaagtattgtctatgtctgttttccacttcctcgacagagttgacctgttgc

SEQ ID NO: 332176 - DNA, 309 bp, Homo sapiens
atgcatcatttactcatcttcatcacttgaaaactttccctttccrgcttcacgctctcccccaactcttgctcttctgatgtcacttacagagcctgtgggatttttcactcttctaccatcttcaggaaacatttgggtcactcctaagtgtgaggtcttagccttgtcggccaagcacttctctcctttgctcttcaacatgtatatttcatggccgacaagcctcaagcctttcccatttctgatttctacaattcattcacaaaaagaatgttaaggggaaatcacagcagtagactcgcaatg

SEQ ID NO: 332177 - DNA, 534 bp, Homo sapiens
atatcaataataactttgaacagaaaccttaaattatccatttacaagatacagaatggctggctgaatggaatttaaaaaaaaaaagatccaactatatgctgcttacaagaaactcactttgccagtaaagacatatagatagactgaaaataaagtcatgataaaaagatattccatgcaaatggaaaacaaaagtgcacaacagtagctgtacttagataaaacagtctgtaagtcaagaacagtaaaaaaaatacaaagaaggtcattatataatgataaatggatcaatccagcaagaggatataacagttctaaatatatggctatccaacactggagcacccagattcataaggcaaatattattagatccaaagaaatrgactgcaatgcaataatagtggaagtcttcaattccctactcccagcattagacagacaatctagacagtaactcaaccaagaaacactggatttaaactgaactttaggccaaatggacccaacagacatttacagttcattcta

SEQ ID NO: 332178 - DNA, 427 bp, Homo sapiens
ttgtgtgtgggtgagctaagaacactcagcgtgagatgcgtccttttcgatgttaagtgtataatacgttactgttgactggaggtgcaatgtggtagagtagatttctaaagcttattcattatacttaaatgaacccttatacccattgattaataactcccaattttcccctcccccaggccccaggtcacctccattccagtctttgattttatgaatttgactattttaaacatctcagataagtagaattataggcctggtgcggtggcttatgctggtaatcccagcattttgggaggcagaggcaagcaaatcacttgagcccaggaatttgagaccagccwaggcaacatggcaagaccccatctctacaaaaaaattaaaaaataaaaattagtctggcgtggtggtagacacctgt

SEQ ID NO: 332179 - DNA, 495 bp, Homo sapiens
tacaaccatgtgttctcagcagagaaggcgtagtattccgctgtggtcacttattatcccgtcagtagctatatggaacgtggataatgagcaaagttgttttttccgttcagaactgggattgtcccctgcagatgttacagccagatcagtgcccaagtggagtagaaatcattgttcttggactgaacattctgatgctagctcctatttggcaggaggagaggaagaagggaagaaaataggatttgtgttcttgtgcctgtattacccaatttgggaacttacagatctgtttaatttctattgggagagagaataaagcatttgaggttattttggttactctctgcggaaatcacacgstacacctaacagattcaacaatttcatagagccgtagtcaagcgcgtgagttacaattttattcattccatttattcagtgagtcaggctctgacagggggttgatttgttgtttaatatttgggggga

SEQ ID NO: 332180 - DNA, 439 bp, Homo sapiens
ccaccaaactcatgctgaaatttgatctcattgtggtagtgttgggggttggggcctaatgggaggagttcargtcatgagggctctgtcctcttgggtggcttggtgctgttctcatggcagtgagttcttgctctggcaagactggattagttctctcaggaattggttagttcctgcaagagtgggttattatgaagtcagaacacccacctggttttgcctttcttcacacatgtccatttacccattgatcttctctgccatattatgacgcagcctgaaacctctcaccagaagctagagccatgtgcttgaacttcccagcctgcagaaccatgaactaaatcaaccttttttaaaaataaattacccaatcttaggtattctgttatcatgatgcaaaacagactaagacatccctcatcacaaaactctg

SEQ ID NO: 332181 - DNA, 507 bp, Homo sapiens
atattcctcaagcatattttaaatatcataattgtctatgcctcttagagtgaaaactattgagtttttcctcaaagagtaattcttacttcaatcatcatttctacctagaagatactttcactgttttcagggctaacttgtaacatttgaatacagtgattaaaactgtactttttggggtaatgaatatatataggctgcctggaggtctaggtgtgaattaaataagttgggatatgctggatgcttcagggcaaatttcttaaatctctcatatgaaatgtacactgatttctgtccagctatttcytgaagagcctggaaacatcaagatctggcactccaaaagctgcctaaagtatagcagcgaactcctgttctgttattaaaccatccgcatcaagatcaaaaagcttaaaggacatttgcagactcttttcagacctattacatactctctgaagtctatgttgccatcattattcctgccgaagtgggcagggg

SEQ ID NO: 332182 - DNA, 507 bp, Homo sapiens
atattcctcaagcatattttaaatatcataattgtctatgcctcttagagtgaaaactattgagtttttcctcaaagagtaattcttacttcaatcatcatttctacctagaagatactttcactgttttcagggctaacttgtaacatttgaatacagtgattaaaactgtactttttggggtaatgaatatatataggctgcctggaggtctaggtgtgaattaaataagttgggatatgctggatgcttcagggcaaatttcttaaatctctcatatgaaatgtacactgatttctgtccagctatttcctgaagagcctggaaacatcaagatctggcactccaaaagctgcytaaagtatagcagcgaactcctgttctgttattaaaccatccgcatcaagatcaaaaagcttaaaggacatttgcagactcttttcagacctattacatactctctgaagtctatgttgccatcattattcctgccgaagtgggcagggg

SEQ ID NO: 332183 - DNA, 290 bp, Homo sapiens
tttattacagataaaaactgttaaagcagtacagattgagtatcccttatctgaaatgcttgggatcagagtgtttcagattttttcagatcttagaatctttgcatatgtagtaatgagaaatcttgggacttggggatggggatgatgcctaagtctaaacacaaaatttatttatgtttcgtgtacacygtcaaattcaaaataaaatatagagacaaatctctaaattaaatgttttatttgagaatcatagaattacaattcagagcctacacacagactgttgt

SEQ ID NO: 332184 - DNA, 530 bp, Homo sapiens
tgtataatcaacttacacaacaccttatagcctgaaggcaattttataaagtattttaaatagttttgtgaatgaaacaaattttgtgtatattgaaccatcggaaagcaaaggtgtcactatctctcataaaatgctaaaattttgtagcattttagatttccgattttcagattagcaatgctcaacctgtagaatgtgctctaatgcaagagccaaagttggcttgcttactgtatccctctaaaacagctcacctgagagaaagtttgaatctgcatggcagatatacttcttctccatcayctcttcccactggttcagcagagaagaaaggagaacatatatcagattacctcttatctggagttcctcccaactgataaccagttgttgtccaccaaccacatgattcactccctttagtatagaggaatagaggctggggtaagatgcaagacgctatgtagcagtgctctcaacaagatgggaataacagaaagaggactaagtttggtgtggggagtaag

SEQ ID NO: 332185 - DNA, 377 bp, Homo sapiens
tccacagcgaaggaggaggaccttaatggtttcatgaaagttagaggagactgatacagggctagatgacaccgtgtcccacttggggaggtattgtgcatcgtgagccacttgaagagttcttatctacagagagrccaggttgaagcttgatctgccactaaaggagccattacatcaataaaggcctccagtatctgaattagaacaaagctaaggacatctccctactaccatcttggtctctgcttaattaagtaaggtgaccagagccatttatagtcttccatatgaatttgacccagaaaatggaggagcaggagatcagaccatgctctactctctatttcacatctcaaccataaatctagtcagca

SEQ ID NO: 332186 - DNA, 603 bp, Homo sapiens
taaaatcctcaacaaagcactggcacactgaattcaacagtacattataaagataattcaccatcaactagtggtatttattcctaggatacaaggatgatttaacatatgtaaatcaattaatgcaacccacatcattaacagcatagacagaagtcaaatgattatctcagtaaatgcagaaacagtatttgacaagattcaattacttttcatgactgaaaactctcaacaagttaggaatagaagtaaattatctcaacataatagaggccacaagcccactgctagaatcatactcaaggtttaccctgaaaacttttaagttaatatcaggaacaagacaaggatgctcattctctccacttccattcaacatagtcctggaagccctaaccagaacaatcaggtatgaagaagaaataataaggcatccaaactgtaaaggaagaagtaaaattgtccctgcttgmagataacataatcttatatatagcaaactctaaacacttcaccaaaaaactgttaaaacaaattcagtaaagatgaaagctacaaaatgaacatacaataatcagttgcatttcaactaacaacattaat

SEQ ID NO: 332187 - DNA, 603 bp, Homo sapiens
taaaatcctcaacaaagcactggcacactgaattcaacagtacattataaagataattcaccatcaactagtggtatttattcctaggatacaaggatgatttaacatatgtaaatcaattaatgcaacccacatcattaacagcatagacagaagtcaaatgattatctcagtaaatgcagaaacagtatttgacaagattcaattacttttcatgactgaaaactctcaacaagttaggaatagaagtaaattatctcaacataatagaggccacaagcccactgctagaatcatactcaaggtttaccctgaaaacttttaagttaatatcaggaacaagacaaggatgctcattctctccacttccattcaacatagtcctggaagccctaaccagaacaatcaggtatgaagaagaaataataaggcatccaaactgtaaaggaagaagtaaaattgtccctgcttgcagataacataatctyatatatagcaaactctaaacacttcaccaaaaaactgttaaaacaaattcagtaaagatgaaagctacaaaatgaacatacaataatcagttgcatttcaactaacaacattaat

SEQ ID NO: 332188 - DNA, 498 bp, Homo sapiens
tcataaggggctaattccaaaatatataagaaactcctacaatttaatagcaaaaatctgataacactgttaaaaattggctgaagacttgaatacacatttcaccaaagatgacatacaaatggccaacargtatatgaaaagatgttctatgtcattaatcatcagggaaatgcaaattaaaaccacaataggatgtcaccgcacatctgtttggatggctatgatcaaaaaaataaaagataacaagttttggtgaggatgtggagaataggtagtacttgtacactgctggcaggaatgcaaaatggtgcagctgctatgtagaacagtatgcaggttcctcaaaaaattaaaaatagaactaccatatgatccaaaaacctacttctgggtatttgtgttaacctgtttgcactgctatgaaaggactactgcaggctaagtaatttataaggaaaagaggtttattagctcatggtcctgcaggctgtacaa

SEQ ID NO: 332189 - DNA, 589 bp, Homo sapiens
gtccctctatatttttaattgaaaaaatttttttattttatcatgtaactgattcctaatctgtgcttgtccatttgatcatagatatgttacccttccattgtgttcttgattttattttttctgaagtaattttaaaacaaattactaaattttactcacaaattggaggtgatattacattactgaatataccctcttacttttcttaggatcccaaggagagtcaccaaactcagtaaaatcttcagtctcttcaaggcagtctgatgaaaatgtggcaaagttggaccacaatacaactacagagaaacaagcacctaagagaaaaatggtcaagcaagtacacacagctttgcctaaggttaatgcaaaaatagtggcaatgcctaaaaatctaaatcagtcaaaraaaggtgaaactttgaataataaagattcaaaacagaaaatgcctcctggacaggttatatcaaaaactcagccttcctcccaaagacctttaaaacatgaaacatctactgtccaaaaaagtatgtttcatgatgtgcgtgataataacaacaaggacagtgtttctgaacagaag

SEQ ID NO: 332190 - DNA, 481 bp, Homo sapiens
tatgaagaaataacaatcccaaatgtgtatgtaacaaataatagagctccaaaatacatgaagcaaaaactgacagaactaaaaggagaaataaatttataatgatacttggagacttcaatactccatcagtaattaataggataggtagacaaaaattcagctaaggatacataaaacttgagcaacactatcaaccaattttttcatttatagaacactccaccacaggacaacagaacacatattctttttaagtacatgtggaacattcactaacacagaccatattctgggccatcgaaaagtctcaataaatttaaacaaaactaaaataatataaaatatgttctatgaccacmatggaattaaactagaaatcaataatggagaattatctggaaaattcccaaacagttgaaattaaacatacgtctagacaacccatgggtaaagaagaaatcaaaaggaaaattagaaa

SEQ ID NO: 332191 - DNA, 595 bp, Homo sapiens
tgaaagttttggaaaccttaaaaggtcaaattgaagctttttccacattgtaagtcaccaacagtggagattcctaatatgtaaatataggggattgattaagtatattttcatttcatccatataatggagaactattttgctattacagctgatattgtagaaaagcatatttaattactcagtactatgttaattaaaatgaagcaagttacataagaagatagtctcatttttggaatccatagcccatatatgtgatagaattgtccacatggagataggccaactctaggtgcttggctgtaatatttgttgctggcagcagggattcatatgaaggagagacatyaagtacatataggatatgaactaacttaggaacttggtttgtcttttatccttccactctatttggctttagaaacttcaagtgctgcaagatgcgtaaagtttatctggattatcttgtcatttggagcactcaagtgtctgcatcaatatgccttcgaatcacgagtgccaaatgagagcgatactttgtgcttctcacataagcttcttaccaaggatcccaaagcaccagcaaaatgtt

SEQ ID NO: 332192 - DNA, 622 bp, Homo sapiens
cctggctctagtgctcatcctcactccaaagccttcatgattcacttaccctcttttcattgctctttgagccttgtccccagggaactctgccctggaatggacagagctttcttgctcatcatcttgaaatatcgttatgtatcagcaggcaggctctactttcagcaggggggtgctgasctgatctagctaaaaaataaaaatgtgctccatgcacttcacctttttctccctgagaaagcagtgacacctgccaagtatgctgcttgcattgaaaatggtttcctaatgagtttttccactcagctttgcctataaagggcactaggattggaggcagagagatggcataacacccaacactattctctccttcaggattgccacagaccctcagagtttccatctgtaaatgggaataattacacctacatctcaaggtaattgtaaagattacataaaataatgtttatagcatgatttggggaattggttggcattcaatatacataaaaattatgtgcacagataaaataaaaatattttagccaacatgaaggtcaattttgctgccactgacagactcttctgagactggtgactcctgttgagtaagcag

SEQ ID NO: 332193 - DNA, 612 bp, Homo sapiens
acttgaaaagaatacacaatcagaatcaagcattaagaagtactgcaaattgacatatttcatagactatatgtaaattgaaattccctaagatcacctgcttgttttcccaaaaagtcatttcaatggcaatccccaaagtctaggaaattactcagtctcaaagaattcagccactacttctgtgtctcttaaatagtccctgaatttgggatcttgaggatcagggagtgtcacacacataaccagaatttctgcaggtgtctttaacttgctgatttgtagytcttcatgcaagctggacatactggaaatatctacttcagttatgacttgctttcattttctctttggtgtatttacatgaagagaaattcttaacttctataaattagaacttaccaattactgtttgcatgttttacatttgtttaagaaagcccagctttgcacttataatagtctataattatccctacaaatccaacactctcatttctcagatgtccaggttacattggtctgttcctattagcgatgtattctgctccattggtcaatgtctccatctctcacagtacaacaaaatattgagtattatagctttataac

SEQ ID NO: 332194 - DNA, 531 bp, Homo sapiens
atgatgatttacaactagctttttttcctcaaaaaaatagttggcatatgtctgtgtttgcatgtgtatttatgtaagatagccaacaatcacagcatgaaatggagtagaaaaaaatcacattttatacttaaaactatttcttaaaaaaatcaccaactttgtatatgagccaattacattaatgattgagcctgtctccaaatcgtgcaaattacgtaataaataagcatcatgtgaaaacattcataatggtcaccggactaaataaaaggaatcttatagcatgatagtttagacactaggatcttgaatcaagtagcytagatccaaatctcaaaaatgccaactcaactgggagctactgtctcaatatctgtaagtgtattttcacatatataaaatgggactaataacagtatccaccacaagctcagtcatctgggttaggaaaggtcatttgtatacatagcttagcacaatgcatggaatatgatggacagctaatcaatgatatcacagtatatgtgg

SEQ ID NO: 332195 - DNA, 607 bp, Homo sapiens
ttggtcctctgggctcattgaaggaacagaaggaagcttcattctcaagacagtcactttcttaaaccactggtgcatgtggccacattaatgccctagagccctatgtcagaataataattataaaaaataaaactatgaaaagagagaaagaactaaatttggatttattggaatgttgggcaaagtttctagatatacgttatttacaacccatgaaattaaacttaaggaggacaccgtcatcaaagatttaattgtgtcactatgttttacgtatctctatttgaacatctgcttgggtgctctccgttctctctcaragagtgatggatatcatgaaaccagatttagaatttgagtcatgctaccctcagcaccacgtgatttatcagtgtccactcccaatccaggatgccacactgccccttgttgtcatatctcagtctttggtctgtgacagtttttctgtatctccttgatttttatgaccttgacattttagaagaggatttttgtagaatgtctctcatcaaagtttgtctgatgcttcctcatatttagattgtgaattttgaggaaagagaacacaaaggagaagtgtgct

SEQ ID NO: 332196 - DNA, 636 bp, Homo sapiens
ctgttggtatagcaactttcaagaagctattaatttacatgtactaacccaagaaagcacatgagcaggttattcatcattacagatgactgtcatttagaaaatagtattaactatggtgaaaccagttatttgagtgacttatatgcatctactttaacttggatcgatctgttattagcatgaggtacacgagggtttagcctacacttaaattgacagtactcttattgtaccacattcaaacactgagcaatgcaactcataggcaatgacatttcatgcataggaatttagatgagtcactctttcaagtacttaagctaacaaattaaattttctctgctcaaaatccttccaaatatgcataagaagtttagagtcagaaattcactctatttacaccagtagtatttattatcttgtgccatagatatattttagtttgcttacatgtaaccacatrtttcaaaattttattctaaaataaactttaactattacattaactagtaatccagctaaattctttcccctcatatctacaccaccaatcatctaaacataggatttttatttttaatttttttatttttacttttatatacttaggggtacaactgatatttcttacat

SEQ ID NO: 332197 - DNA, 577 bp, Homo sapiens
catgcctaactttttatgatgcagtcagatgtcactgccctatggaagcatttattgacactgactggcttgcattcttctgattatttgcttttctaataacagctagctttcaaggaggtctttactgtgtgtcagcacttagtatcttctcatttattctccacaacagccttattaaattattacaattagtataacttagtcccacttttcagagataacttgcccaataccacaaagctaagagggagctgtgacattaatggctgtgtattcaagacatcmatacatggcataaataatgtcacttacctcctgatcataacacctatcatagattggaagaggttctattttttattttaatatggttatttgtgtaaattttctatcctaaatcatacatataactccatgaggactttgggcacttcttttgtttgtttgtttgtttgttcgtttggcagagttttgttcttgtcgctagagtgcaatggcacgatctcggctcactgcaacctccacctcccgggttcaagcaattctccagcctcagcctcctgagtagctggga

SEQ ID NO: 332198 - DNA, 559 bp, Homo sapiens
cttgtacccctaaacttaaaataaaagttgaaataaataaataataaaaaaatcgaaaaaagttacagggaagaggcaagcctaaaaattatgtatccatcacaaaagcaattagctgtatcaaatgtctaccatcatacctggtacctggacatgccaatatctrtgattaaaaagatatgagctttttaagattaaacttgaaagtccagatttttaagagtagccaaaaggaggagaaaacttaaaagcaaattgccttagtaaggataaagtttgtatacttcagtacaaattgtaacaactattttcataaataaggaaaaaggcttaattttcaggtagactgaaaacttagaaagttttccttactcaaaaattgaaaaatattacataaaatcccataaaccagtcttttaaaataggtttcttttcactttgtagtaggaaatgtttatagaactttccctgtggtatatcaggaaagcaggacaaagtagtagaaaaattggtgagcatgtccaattctctctgccacaaagttaaaaagagacaaaca

SEQ ID NO: 332199 - DNA, 550 bp, Homo sapiens
aacttcaactttttctttttgttttacataaacatttaagcagctaggaacttttagttttagttaggtcagttgaagttctctggtgaactaaaaaatctacattttggttggggataaagatttgattttaaaaacagcttgaatttaaagcaagaaaaagatgaacgttatagttttaaaatcaatattagcagagccatagataggctgarctcttatttggggttctgagaaataactcagtttaaaacttctttaactgcctcccttagtacccaggctagcccatggtgacatcagggatattcattactgattggcctctagtattccaagggtactactatagatattacaatgatgctgtttactaagtgataaccccgtatcttacaggactgactttgactcaataaaccactcagcctattattggaaagtgccataggccttgagaaagtatagttacatcctcacaaatatatgaagttaagtcactacttacaaggaaaaaaaatgtaaatacatttttctttctggaaccgaa

SEQ ID NO: 332200 - DNA, 476 bp, Homo sapiens
taatcttggtgaaaagttgtatgggagttttttgtacgattcctgcaacttttctataaacgtggcattatatctaaataaaaaawtaccaaaaaacatattttcacagtgaagttaaatcatctgtgataggttccccagaccagcctacaaaggcccattaaatacagaataatttgtggatcttcaaagaggatgaacatacatttccatgacagagtccatacgaaattcacaatttagatgctaaaaaatttaaggaatatctttttttctctatcttatctgctttgaagcatagcgattagcgagaaacttttcagatccagaccactgatggtagccagagtagagaccctggagcatagattcttaaaataaataaggggcccaagtcagagctttgaggtattgaagatggaaaaatagtggacaaacagcctgtaatcaggttggggattacgggtactgagtta

SEQ ID NO: 332201 - DNA, 508 bp, Homo sapiens
gtcctgttgttttttgtgtcgagtacactatataaattatctccttatacatatttctcaggcaagcacagagttatactgaacttttctaaagatgctttgcatcaagaagcaaagggaaatacagaattaaaatgtttctttccattttgctttgtttttctatatcgatctagactttgtaggaaaatgcaaagcgtatatttaagaaaacctaaataagaatagattcatttactcattttcatttattcattcatgaagaatttattgaatgcctactatgtgccargaatattgctatatttttgaaatttaaggataaaatatggcccaatctatcaagaaaggaaagtgaaagacaaatgtaagacataattacaacattctgtgggagcacaaagtaggggactcagttcttagagaagtcttttggtcttagagttcatcaagcagagaaggggaaggacatggtccaggaaaataaatcagcacacaaagagatggg

SEQ ID NO: 332202 - DNA, 642 bp, Homo sapiens
tatactgaacttttctaaagatgctttgcatcaagaagcaaagggaaatacagaattaaaatgtttctttccattttgctttgtttttctatatcgatctagactttgtaggaaaatgcaaagcgtatatttaagaaaacctaaataagaatagattcatttactcattttcatttattcattcatgaagaatttattgaatgcctactatgtgccaggaatattgctatatttttgaaatttaaggataaaatatggcccaatctatcaagaaaggaaagtgaaagayaaatgtaagacataattacaacattctgtgggagcacaaagtaggggactcagttcttagagaagtcttttggtcttagagttcatcaagcagagaaggggaaggacatggtccaggaaaataaatcagcacacaaagagatggggtcttgagggtgcatagtacattctggacagccagttacctgggatgagttgggagggaggagaataaggacaaaagaccatctgggcaaaaatcacgaaggggtatgtgtgtcatgtaaaggtgtgccatgatagttattcatattgctattgtaatattaatatatagtaattaactacacatgacacagctttacatgaccttaa

SEQ ID NO: 332203 - DNA, 507 bp, Homo sapiens
cggaatacaatgctgctatggctgcttggtcaagggacccccaaagctgaaacagatggtgtcagttatgagsaatctgccacctattagagtgttgggcaggttgaatacactgcaagttcatttggttgagctgcctctgtgtgctcataactaaaagtaagtgctcctcccttattggtggaaagctactctctacatcttacacctaacccatccctctctctctactctgatctcagctactttaaggagataaatgattagaggtgaggtcaggctctccctgcctccaagtggaatcaaaggccaaaagcaactgcccaagtatagctgggggcagagattttggggaggggagggaatcataattttatgcctctgttgtatactgacacccagggcccttgtcagaatgggacacacaaactttccattaatagagtttggtcagaaattagagtagggaaaggagacaagtgtgaccttctgtttgtggtctttttg

SEQ ID NO: 332204 - DNA, 575 bp, Homo sapiens
gtgtatgtttttgatggtatactaagtacatcctcaagggggccaagcattcccttcattcaaggggctctgactttgtaaactggctsaaatctgggaattgattgaggcccatgattctctgtttttaagattcaagttaaacttttgtttgcttaacctgaaaatttttgcttacatatgtcaggtaagaatttagtaggcttcctatctatttcatttataagaacatcatgattaagtagccaatgttatatatatctacatgagtcacactattctgatggatgctttgactctgctctctattaaggttaccacatctactttgctcttggtggttgagttctgccacttggtccctgtcactccagattttattaccctcattgtctgtaggtttcttaattcagtgactgcagatcccaaaataaggcctggcctacagaaaagagaaattacggagcccttcaaagatgccagtgctgctctcacaaatttatttctcacagtactggcgaaaggtatgtcttctggacaccaccagtgtaagtgagtaggtcttacacgacaaa

SEQ ID NO: 332205 - DNA, 429 bp, Homo sapiens
tttagctacaggtaaagatgaaatacacctgagttgagagcaatacatgctctacctattataaacctgagtggttccaggtgggagaggtagagcaaccccccccccccccccccgcccacaaaaggacataccaaaataaagaggacttttatcacctggcaaaggcggcagggaaatatctcttactgacaggtaaaaaaaaaaaaatgtggatagagggtgccacttctctttggctgcagtgtgggatgagaagagacttcagagttcccgcctatctcccwtttttagtttaagggagaataaaccgagttctggactatcagttcttgcaatctggttacctccccaccctccatttccataccaatggtagcttcttcccaggaggagttttgcactaagagcaggagttttgcactaaga

SEQ ID NO: 332206 - DNA, 429 bp, Homo sapiens
tttagctacaggtaaagatgaaatacacctgagttgagagcaatacatgctctacctattataaacctgagtggttccaggtgggagaggtagagcaaccccccccccccccccccgcccacaaaaggacataccaaaataaagaggacttttatcacctggcaaaggcggcagggaaatatctcttactgacaggtaaaaaaaaaaaaatgtggatagagggtgccacttctctttggctgcagtgtgggatgagaagagacttcagagttcccgcctatctcccttytttagtttaagggagaataaaccgagttctggactatcagttcttgcaatctggttacctccccaccctccatttccataccaatggtagcttcttcccaggaggagttttgcactaagagcaggagttttgcactaaga

SEQ ID NO: 332207 - DNA, 621 bp, Homo sapiens
caccttatcactgagcccttccatgacaattctttaggaaagaggaagcagtatccatgctgcccctctccctcttccccactacctggtcccttactgtgctttattttttcccacagctcttaataattattggcatatgatatatttacttatatgtttgattaacccttttctctagctataaaataagtttcaagaaggcagggacttattttcctggctatatctctagctccttsaatagtgcttagcacatagttggcttgcaataaatatgtgcttagtttaaaaagatgggtaacagtcatggaaatccagtcactgactaggaaggcaaatatttaggccaccagagagctattggtctcactcataaagatatcataccttgtgtctttcttgtttaaacctcagtttttaaactttgtaataacttgaaaatattctttcatggtgttaggaattatgcttttatttaccttatctttggtaatcctatctattcatataccctttttataaatgttatctttctaaaggaagaaaaaaatcaaatattcaaagtcagtgcttttgcaagattttataggcaccagccattgtaggcataattttttc

SEQ ID NO: 332208 - DNA, 621 bp, Homo sapiens
caccttatcactgagcccttccatgacaattctttaggaaagaggaagcagtatccatgctgcccctctccctcttccccactacctggtcccttactgtgctttattttttcccacagctcttaataattattggcatatgatatatttacttatatgtttgattaacccttttctctagctataaaataagtttcaagaaggcagggacttattttcctggctatatctctagctccttcaatagtgcttagcacatagttggcttgcaataaatatgtgcttagtttaaaaagatgggtaacagtcatggaaatccagtcactgactaggaaggcaaatatttaggccaccagagagctattggtctcactcataaagrtatcataccttgtgtctttcttgtttaaacctcagtttttaaactttgtaataacttgaaaatattctttcatggtgttaggaattatgcttttatttaccttatctttggtaatcctatctattcatataccctttttataaatgttatctttctaaaggaagaaaaaaatcaaatattcaaagtcagtgcttttgcaagattttataggcaccagccattgtaggcataattttttc

SEQ ID NO: 332209 - DNA, 461 bp, Homo sapiens
cagttctggaaaagatgccatcactgccatttataagcagtatgttacccttcgttttcacattttctagcaaaagtttaataatttattttgattttagaaaaacaaacacaggaagcaaaactttatcaccactagatcagcgatacctatgccaaataagayataacaatcaatgtgttaacttagaaaacaatttttaaactaacatgactataatcacatgtatttttagaaattttgtgtaaacaagccttccaaaagacagtttggtaggaaatctccctcagtgtttccatgcatggcagccatcaaaatgtgctgctctcatctcttgcaggaagcatgcttgattgatggccactgctgctgtctctctacattggccattgtggttgctcctaaccaatgactaagtatagcaggatttctcaggcagacccattctggtaagacatgac

SEQ ID NO: 332210 - DNA, 585 bp, Homo sapiens
tgaacgcatcatccaaactttcacagccctctcattagaagtttttttattcattaagtatttactaagcagctatctgttccaggcagtgtcctattcactggagatatagatgttgcactaacagagaacatatacattagatatagattttatgytaccaaggaaaatatacattaaattaataattatgaatgtaatgaaaaaggagtcctatggaagcacaatttgggagatcaaataaattctaaaatttgaagatggtcacccacactgagagagttttaagcatagacttgaaagaggtgtggacattagctatgtaagctgaaaaaaaggaaagagcttactaagcaaattctgaggaaagaaagctaatggcttattcttccagcttatgggaatccagtgtgaactgaaagaacccccagtaaattcaacattataaataatttctgaagaacgtatatatgaagttctccctggattcactttttttccccggtaaagtatttgggataagtatcttactttaacatcctccaaccccatttcagttctaactgcacatcccataaatgtact

SEQ ID NO: 332211 - DNA, 585 bp, Homo sapiens
tgaacgcatcatccaaactttcacagccctctcattagaagtttttttattcattaagtatttactaagcagctatctgttccaggcagtgtcctattcactggagatatagatgttgcactaacagagaacatatacattagatatagattttatgctaccaaggaaaatatacattaaattaataattatgaatgtaatgaaaaaggagtcctatggaagcacaatttgggrgatcaaataaattctaaaatttgaagatggtcacccacactgagagagttttaagcatagacttgaaagaggtgtggacattagctatgtaagctgaaaaaaaggaaagagcttactaagcaaattctgaggaaagaaagctaatggcttattcttccagcttatgggaatccagtgtgaactgaaagaacccccagtaaattcaacattataaataatttctgaagaacgtatatatgaagttctccctggattcactttttttccccggtaaagtatttgggataagtatcttactttaacatcctccaaccccatttcagttctaactgcacatcccataaatgtact

SEQ ID NO: 332212 - DNA, 593 bp, Homo sapiens
gagtcctatggaagcacaatttgggagatcaaataaattctaaaatttgaagatggtcacccacactgagagagttttaagcatagacttgaaagaggtgtggacattagctatgtaagctgaaaaaaaggaaagagcttactaagcaaattctgaggaaagaaagctaatggcttattcttccagcttatgggaatccagtgtgaactgaaagaacccccagtaaattcaacattataaataatttctgaagaacgtatatatgaagttctccctggattcactttttttccccggtaaagtatttgggataagtatcttactttaacatcctccaaccccatttcagttctaactgcacatcccataaatgtactatatcagatccctrtaacttacaacatagcagaatcattctaattgtacagaatattgtaaagaatattgactaattatacagactattggctaatggtgctatatcaaataagccagcggctctcatgttttccagcaactattttccttaagaataagctttgcactttatttctagaatcttcttcatccttgttatgtgattgtctacaaag

SEQ ID NO: 332213 - DNA, 592 bp, Homo sapiens
aaaggtcttttcaacttctgatacctattggtgaaagggaaagactatacagaaaaagaacaataatatttattaaaaacttcctatatgccagcctccaggcagaacyctctatattatctatctatctatctgtctatctatctatctatctatctatctatctatctatctatctgcatacacacacacaaacacgcgcacatataaaccacacacattcacataccacgaatgtaaaaaataatctaaaaaatatttggggaattaagaaaagtgttttttcatttgaattatacagttacttgcctcaggttgactttaacttctgtttagaaaagacttttgagtatattcaattcagtattatttaaaatagcaccaaaatgcattcccttaaaagcactagttatcatgttttactaagcataataataaatccgtcatcttaatctgccttttctattattaattataatgcagctattaggttaacaatgatattgctaaataaggtatgctaattgtacatctaggataaaagtttaagaaaaattttatctttgttcaagaaaattactgagggataaat

SEQ ID NO: 332214 - DNA, 624 bp, Homo sapiens
taacatgaagactttaagtcatgtttacctaatttctctatttccatttcttctattagcaagaattttctaaaggtcttttcaacttctgatacctattggtgaaagggaaagactatacagaaaaagaacaataatatttattaaaaacttcctatatgccagcctccaggcagaaccctctatattatctatctatctatctgtctatctrtctatctatctatctatctatctatctatctatctgcatacacacacacaaacacgcgcacatataaaccacacacattcacataccacgaatgtaaaaaataatctaaaaaatatttggggaattaagaaaagtgttttttcatttgaattatacagttacttgcctcaggttgactttaacttctgtttagaaaagacttttgagtatattcaattcagtattatttaaaatagcaccaaaatgcattcccttaaaagcactagttatcatgttttactaagcataataataaatccgtcatcttaatctgccttttctattattaattataatgcagctattaggttaacaatgatattgctaaataaggtatgctaattgtacatctaggataaaagtttaagaaa

SEQ ID NO: 332215 - DNA, 624 bp, Homo sapiens
taacatgaagactttaagtcatgtttacctaatttctctatttccatttcttctattagcaagaattttctaaaggtcttttcaacttctgatacctattggtgaaagggaaagactatacagaaaaagaacaataatatttattaaaaacttcctatatgccagcctccaggcagaaccctctatattatctatctatctatctgtctatctatctatctatctatctatctatctatctatctatctgcatacacacacacaaacacgcgcacatataaaccacacacattcacataccaygaatgtaaaaaataatctaaaaaatatttggggaattaagaaaagtgttttttcatttgaattatacagttacttgcctcaggttgactttaacttctgtttagaaaagacttttgagtatattcaattcagtattatttaaaatagcaccaaaatgcattcccttaaaagcactagttatcatgttttactaagcataataataaatccgtcatcttaatctgccttttctattattaattataatgcagctattaggttaacaatgatattgctaaataaggtatgctaattgtacatctaggataaaagtttaagaaa

SEQ ID NO: 332216 - DNA, 592 bp, Homo sapiens
aaaggtcttttcaacttctgatacctattggtgaaagggaaagactatacagaaaaagaacaataatatttattaaaaacttcctatatgccagcctccaggcagaaccctctatattatctatctatctatctgtctatctatctatctatctatctatctatctatctatctatctgcatacacacacacaaacacgcgcacatataaaccacacacattcacataccacgaatgtaaaaaataatctaaaaaatatttggggaattaagaaaagtgttttttcatttgaattatacagttacttgcctcaggttgactttaasttctgtttagaaaagacttttgagtatattcaattcagtattatttaaaatagcaccaaaatgcattcccttaaaagcactagttatcatgttttactaagcataataataaatccgtcatcttaatctgccttttctattattaattataatgcagctattaggttaacaatgatattgctaaataaggtatgctaattgtacatctaggataaaagtttaagaaaaattttatctttgttcaagaaaattactgagggataaat

SEQ ID NO: 332217 - DNA, 624 bp, Homo sapiens
taacatgaagactttaagtcatgtttacctaatttctctatttccatttcttctattagcaagaattttctaaaggtcttttcaacttctgatacctattggtgaaagggaaagactatacagaaaaagaacaataatatttattaaaaacttcctatatgccagcctccaggcagaaccctctatattatctatctatctatctgtctatctatctatctatctatctatctatctatctatctatctgcatacacacacacaaacacgcgcacatataaaccacacacattcacataccacgaatgtaaaaaataatctaaaaaatatttggggaattaagaaaagtgttttttcatttgaattatacagttacttgcctcaggttgactttaacttctgtttagaaaagacttttgagtatattcaattcagtattatttaaaatagcaccaaaatkcattcccttaaaagcactagttatcatgttttactaagcataataataaatccgtcatcttaatctgccttttctattattaattataatgcagctattaggttaacaatgatattgctaaataaggtatgctaattgtacatctaggataaaagtttaagaaa

SEQ ID NO: 332218 - DNA, 601 bp, Homo sapiens
aaggaagaaaggagggaggaacaaggatacttagtgaagaaaatacagaagatagcagaaaaaccatcagggcrtccttaaccaaaggtagaaccatgcaagagtccgatcaaattatatttgtttttctcatgatgaagaccttctcattctttgccttagctcagcaaatttttgttgttgtctatatcatttatttcattacaaattgcaatttgatgattttctagttaccacatttcttttatatgtattagctggaatgcttctgaaaaaaaaatctttgtattatcaactaatacttttggttaccttgaaaatctttttggaagtgaaaagcataaaaagtttagaatgatcatgctttcaaggtgattgggatcagaaaaatgttttattcttgatctttggagcaagcataaccaccatcacttcaagtacactggccacgacccaacagttactccacgtctctgactaagacttcaggattcttagaacaaaaaccacagaaacttgggcattttcctaaatatgtcttaggttttgagccattgccagacatgttaaattatttaatgtaattcatagagagtatata

SEQ ID NO: 332219 - DNA, 494 bp, Homo sapiens
atgttaaaagccaagatgcgcacaaagctagaccctttgcaccaaatagacaaattgtaaatgcaaacgaaaaaattattaaaggaaattaaaagtgctactccagtgaacacatgaatgacaagaaagcaaaacagtcttattgataatacggagaaacgttgagaggtctcgttagaagatcaaaccagctagaacattccyttaagccaaagcctagtacagagcaaggtcctaactctcttcaattccatgaagactgaaagaggtgaggaagctgtagaagaaaagctggaagctagcagaggttggttcacgaggtttaaggaaagaagctgtctccatagcgtaaaagtgcaaggtgaagcagcaagtgctgatggagaagctgcagtaagttatctggaagatctactaagataattggtgaaggtggctacagtacacaacatattttcagtgtagattaaacagccttctattggaagaagatg

SEQ ID NO: 332220 - DNA, 494 bp, Homo sapiens
atgttaaaagccaagatgcgcacaaagctagaccctttgcaccaaatagacaaattgtaaatgcaaacgaaaaaattattaaaggaaattaaaagtgctactccagtgaacacatgaatgacaagaaagcaaaacagtcttattgataatacggagaaacgttgagaggtctcgttagaagatcaaaccagctagaacattcccttaagccaaagcytagtacagagcaaggtcctaactctcttcaattccatgaagactgaaagaggtgaggaagctgtagaagaaaagctggaagctagcagaggttggttcacgaggtttaaggaaagaagctgtctccatagcgtaaaagtgcaaggtgaagcagcaagtgctgatggagaagctgcagtaagttatctggaagatctactaagataattggtgaaggtggctacagtacacaacatattttcagtgtagattaaacagccttctattggaagaagatg

SEQ ID NO: 332221 - DNA, 497 bp, Homo sapiens
ttctaacattaactctttgaccttgtgaaaagggaattctcatgactaattagtatgcacatcatctggasgaggcaaataaaattgtgcaggctgctgtagcagattgctgtgcataaaggccattagcttctaggaaaggatagatttttccagtgtacccaggtaaaaaatatttttcaaaccttgataacttcatccttttattcgacctagagcccatttacctcaaaagtgtgtgaaccccacctcacaacccctctccggaattaattgggtattcacaagtgttattaaattgattgaatatatagatctttttcaaatgtcctagacaattacatactttaatacctttgttttaatttaaaatgaattctgtttttactcatttccagagcaacccaaggtaaccaaaataaatataggataatagtaattgaataagagaaaaatacatatcactccacttatctagtgataaacaccagtatcac

SEQ ID NO: 332222 - DNA, 497 bp, Homo sapiens
ttctaacattaactctttgaccttgtgaaaagggaattctcatgactaattagtatgcacatcatctggaggaggcaaataaaattgtgcaggctgctgtagcagattgctrtgcataaaggccattagcttctaggaaaggatagatttttccagtgtacccaggtaaaaaatatttttcaaaccttgataacttcatccttttattcgacctagagcccatttacctcaaaagtgtgtgaaccccacctcacaacccctctccggaattaattgggtattcacaagtgttattaaattgattgaatatatagatctttttcaaatgtcctagacaattacatactttaatacctttgttttaatttaaaatgaattctgtttttactcatttccagagcaacccaaggtaaccaaaataaatataggataatagtaattgaataagagaaaaatacatatcactccacttatctagtgataaacaccagtatcac

SEQ ID NO: 332223 - DNA, 489 bp, Homo sapiens
agaaaaataaagccagaggaaaatagattcccagtgaacatatccatatccttttaagacttgccttgaatccactcagtattatgtttctgagatagtttccttgataaaatgtaaatctagtcataaatctagattattcattttaactattgctaatggagtggtttgctggtaaaccagctttggaggatgaggtagagaatccatgattccagcatttgccaatttctgtggtgttactatgtccactctggcaggtttcaggctatggatggcttaactgtcttacaaagttcctgaattttaacaattggctctcacaagccagtatgaaccagatctagcatgttactatatgtgcatgtgatataatgtgtattctagagtatgaatgagccagactctatcttctacctgtggktaattagagtgtgtccaatttttcattattacaaaaagtgattcaataggtatctttatacatat

SEQ ID NO: 332224 - DNA, 426 bp, Homo sapiens
taatgttacaatgagaccaaaatagaatactctaaaaagtaataagaaagagatttggtaagacattatttctcttaggtaatattgtcaactgtttaaacaaagtattttataaatatgagagcggcagccatagctgtcattttcataaagtgagatttcaacaagcctgcctctgcataatttgccttttccctatgtcaaaacagagttctctttactttcagacttgaatcagttctttttttaarccatggctcaggatatgccttttggccctgtctggtgagactatcatttaagagtatctcagtgtttttggctgccttttacagttttgagatctatgtgcttccctttttccaggaggagaagcaggcatgaaacacacttaggagctaggttcaaagaaaacatcttgacttc

SEQ ID NO: 332225 - DNA, 417 bp, Homo sapiens
cagttccacatggctggggaaggcctcacaatcatggcggaaggtgaaggaggagcaaaaccacgtcttatgtggcaacaagcaagacaagttgtgcaggggaactcccgtttataaaaccattatatctcgtgagacttattcactaccaggagaacagtayggggaaaattgcccccatgattcaattatctccacctggccctgcctttgacatgtgaggattgttaaaattcgaagtgagatttgagtggggacacagccaaaccatatcaactgatgatctcctttcctacaacttccaataacactttcctcatttccacctgtatcctgttcgtagcacttttaatgtccatatttgtaccagcagtctgttcatgatgatttatgatgatttatgtattccctaagatg

SEQ ID NO: 332226 - DNA, 289 bp, Homo sapiens
aacaagatattaacctcatttggacattctaaaaattactgaatactaatatcaccagagaaattgtgtaaaagttcagttccttagaaacaaaaataaaattacaacattgttcttgctaagacacttaatcccccaaaatgagatcactgaatatttagtgttatcacttgyttcctgacctgagattcccttctaaaggttagattaacctttagattaacacaatgaatacacatctaaaataattcctttttggttatttatgagaatataaaaggaagaattc

SEQ ID NO: 332227 - DNA, 542 bp, Homo sapiens
gtactgccttgatcccatgaaccctgacactcatctaccacagctcactctatcttcccacacagccccatctcctgagtgatgctgcatgcatagcgaatgagacattacaactttctttcagactcccagccatggccccagccacactccccacccacagccccagccccattcgccacccactttaatagttcccatattgcaattatagtaaaaagaattggataaagaaattggtattgggtagaaattacagatagataatagtaatagagtgattaggtccactggtaggtacattaaagggctagtaaatacagattgaacggaattgaatmgctttcctcgtctggtctggtcaatgcacatttttttccagggtatgagacatagtcaaagttgtccaatagtatcaaatagctccaacgtttcaaaggtttcaacttatcttcagtcaaattacttcactgtacacaaaaaacataaggcagaaaatggcaggttttataatcctcatcaaataaatgtttcagaggaag

SEQ ID NO: 332228 - DNA, 547 bp, Homo sapiens
cagttgtttaatggctgaacaaagcacagaatgcatagacaacttccactgaagcaataataaagcttatatgtataactttcagaccaattaagtgttgcttattttggttacatcgtcgttgctatcataacgagtttactttttaccactgtacataatagggtacctgaaatgatcactcttaaagaaaaaatatgtatagcaattttaggaaaagcaacagaccacttctacactmtgaaccaagataaaaaaaaattatatcaagtgcttctatgcttacccatatgtaacaggaaagtttgacgtttgtacaaagacagttctagtaagtggtagagatgtatgaaatcaaatcaattcattaaataggcatttagtgaaattaccataggagaactgatcctaaaacatcactattgatatgttataaatgaagttcaaatgaaagaaaaaaaaatctgtcctatttaaaactcagcactgtttccataggttccaaatcaagatgccttcaaccagtcatcgttaagtgagccataca

SEQ ID NO: 332229 - DNA, 547 bp, Homo sapiens
cagttgtttaatggctgaacaaagcacagaatgcatagacaacttccactgaagcaataataaagcttatatgtataactttcagaccaattaagtgttgcttattttggttacatcgtcgttgctatcataacgagtttactttttaccactgtacataatagggtacctgaaatgatcactcttaaagaaaaaatatgtatagcaattttaggaaaagcaacagaccacttctacactctgaaccaagataaaaaaaaattatatcaagtgcttctaygcttacccatatgtaacaggaaagtttgacgtttgtacaaagacagttctagtaagtggtagagatgtatgaaatcaaatcaattcattaaataggcatttagtgaaattaccataggagaactgatcctaaaacatcactattgatatgttataaatgaagttcaaatgaaagaaaaaaaaatctgtcctatttaaaactcagcactgtttccataggttccaaatcaagatgccttcaaccagtcatcgttaagtgagccataca

SEQ ID NO: 332230 - DNA, 580 bp, Homo sapiens
tgagaacttttcaatttggtttatgcattttactgataatcattttaaaaacaaccacaactttgtttgtgtttatgatggcatgtctgtcaaagagtgaccgagagtaattagatttagctttaaatgcagtatttttcagccaagatgaggaaattctagaagttatagacatagtttcatggatctataccacatacacacacatgtgtacatacacaggtacatacacatgtatatacatatatatacacacatatatatacacacatatatgatatacatatacagagatatgtagatatctatatatatttatatttgtatatcagatattttatgtgtgtatgtgcataatttttccaaaggggtcttatattattcaagttggaaattcactctrcactttacaggatgaattgtaaattcactctacactttacaggatgaaggttcttaacatgtcttatattatcttttatgatctggcctctatattatttatcttagtctcttactttatactttctgtggaagcaacatcaaattacttgagagtcctcatatacacaaatgctat

SEQ ID NO: 332231 - DNA, 608 bp, Homo sapiens
ggtcttatattattcaagttggaaattcactctgcactttacaggatgaattgtaaattcactctacactttacaggatgaaggttcttaacatgtcttatattatcttttatgatctggcctctatattatttatcttagtctcttactttatactttctgtggaagcaacatcaaattacttgagagtcctcatatacacaaatgctattatttttcctgttgtatttatgcgtttacatttaccccttaggtgtatggtattyttttgccttctgtcttctcctgactttaactttgagctcctactttataagtagttccatcatgacctcttccaggatacactaatctaacaaggtaggctgttcaatggccctcctgattttatagttccctcagtaaatctctatgtctgggtacaccttattgctttgtagttacctattggattcactaccagactgtgacctccttcaggtcttgtggctttctcttctgcatctttcaagcatggcattgtaattgaatgagagataatgacctgaaaacacatgaatgagtcacctttctacccatgaagataaagaccttttttctacaatctc

SEQ ID NO: 332232 - DNA, 403 bp, Homo sapiens
tggtgccaaagtaattatagttttatcgttttaatcatatttgacagggtaatgattgaccagtgagctttttttggctgtgcttctttttcagaattaggcatatttttgttttgtcttcctatgctagataatagactctgcagaatcaagcatatggcttttggccatatccctaatgtacttacagagttctcatttgggctttactggcagatagactatacttaaaaagagtgttagctatggaatcacgtatgtctccaaacttcagtgtgtgaataattcttgtcttcataacaarcctatagttagttcatatacttaacgtcacgtgatgagttattatgtcatgcttcaaatattttattcaatggcgaaatgaaaggcatttaatttcttg

SEQ ID NO: 332233 - DNA, 599 bp, Homo sapiens
aattatagttttatcgttttaatcatatttgacagggtaatgattgaccagtgagctttttttggctgtgcttctttttcagaattaggcatatttttgttttgtcttcctatgctagataatagactctgcagaatcaagcatatggcttttggccatatccctaatgtacttacagagttctcatttgggctttactggcagatagactatacttaaaaagagtgttagctatggaatcacgtatgtctccaaacttcagtgtgtgaataattcttgtcttcataacaagcctatagttagttcatatacttaacgtcacgtgatgagttattatgtcatgcttcaaatattttattcaatggcraaatgaaaggcatttaatttcttggttgaaaattggccggttacaatttttttttctatttctcggttgtctggtttgatatatttttacacagttttgtgagcttttaagaaaagagtaatttatgtgattccacagtgacataatcttttcacctctgaacttttgtaatacgtttttaaagaatattgttataagattcttttagcagaaatttctgagcactcacctt

SEQ ID NO: 332234 - DNA, 184 bp, Homo sapiens
ttgccaatttttgatcaatactagattgtgaattccacaatcttgtagaatttttttgccmatcattaacaaagtttactgactgaacagaagagtgcaatgcaactcctgctacagcagccgtagctgtgactgcaattaatcccataatcactgcaattaaagtaaaaatgaatcttttgga

SEQ ID NO: 332235 - DNA, 504 bp, Homo sapiens
gttaaattcctcatgatggattatctgtactgtattgaatttgctctttttctggcattgactagcaaatgccttggggttgaagaatatttttctcttcttttggcctttcccttgtaagtgataaatgccccatggaccctctgcagatktaggtgaattgaataaattggctaaggagcacataatataaagctttattatgttttatttccttacttatttatttatttaacatggcttagaaagatttactcagggattctttcttaacaagtgacattgagataacctgaagttgttttgttgtttggctcttgagacatgatagagaatttctttttcatattatttctgccttctttaatatctgatcctttttctgggaaattccaaatggcttcacattttaatcctctttatttgactaccaaaaatataatagaagaaactaaaaggtctatctaacttatttactatatttcattgtaggaaaaaggttat

SEQ ID NO: 332236 - DNA, 504 bp, Homo sapiens
gttaaattcctcatgatggattatctgtactgtattgaatttgctctttttctggcattgactagcaaatgccttggggttgaagaatatttttctcttcttttggcctttcccttgtaagtgataaatgccccatggaccctctgcagatgtaggtgaattgaataaattggctaaggagcacataatataaagctttattatgttttatttccttacttatttatttatttaacatggcttagaaagatttactcagggattctttcttaacaagtgacattgagataacctgaagttgttttgttgtttggytcttgagacatgatagagaatttctttttcatattatttctgccttctttaatatctgatcctttttctgggaaattccaaatggcttcacattttaatcctctttatttgactaccaaaaatataatagaagaaactaaaaggtctatctaacttatttactatatttcattgtaggaaaaaggttat

SEQ ID NO: 332237 - DNA, 556 bp, Homo sapiens
gttttccaaacttaacgtctgtgagtgttaaattcctcatgatggattatctgtactgtattgaatttgctctttttctggcattgactagcaaatgccttggggttgaagaatatttttctcttcttttggcctttcccttgtaagtgataaatgccccatggaccctctgcagatgtaggtgaattgaataaattggctaaggagcacataatataaagctttattatgttttatttccttacttatttatttatttaacatggcttagaaagatttactcagggattctttcttaacaagtgacattgagataacctgaagttgttttgttgtttggctcttgagacatgatagagaatttctttttcatattatttctgccttctttaatatctgatcctttttctgggaaattccaaatggcttcacattttaatcctctttawttgactaccaaaaatataatagaagaaactaaaaggtctatctaacttatttactatatttcattgtaggaaaaaggttattggaccttgtttctttggatacatca

SEQ ID NO: 332238 - DNA, 538 bp, Homo sapiens
ttgaaattggtgctttaaataaataacgttttatccaacaatgatgtatgtatatgctatttaattactttgttctttataaggactaaagatactcttgggagggaagggkgacatgtgtttaataagccaacaattacaattttttttggtacctgcaagatccattgttagatttctcttggggtgatacctccacaaaaacgggagagggtctctcagatgtgagtggtgattctggaccctccagggttagtgaaggtcagaacagagtccacctacttggatcaacagaatttatgggtattcctggcaccctgggggaaaaggaggtaaatgcatcaagaccttgaaaggcactagtaggatgactgatgcatattatggcctatattataatcttcagcgctttggagaaacactatcatttgtcctcagaagtgaagattaaaggggattttatgaatgttttatgtatcctaggactatgagattatttccttggcaaaggctaagttatttgaagatatatgtttag

SEQ ID NO: 332239 - DNA, 625 bp, Homo sapiens
tttgttcagttctataaagtttatgagcttgtagagagttcaggaaaaaattacccttttgacatttggttctatgagtgtattatttcattttcacactgctataaagaactgcctgaggctgggtgcggtggctcatgtctgtaatcccagtactttgggaggctgaggcgggcagatcacctgatatcaggagttcaagaccagcctgactaacatggtgaaacctcatctctactaaaaatgcaaaaattaactgggcatggkggcacacacctgtaatcccagctactagggaggtttaggcaggagaagcacttgaacccaggaagcagagattgtagtgagccgagattgtgccactgcacttcagcctaggcaacagagcaagactcaagactccatctaaaaaaaaagaaaaagagaaaggactgcctggagactgtatagtttacaaagaaaatagatttaattgactcacagttccaaatggctagggagccctcaggaaacgcacagtcatggtagaaggggacacagtcatgtgttacatggcagcaggtgagagagagagcaaagggggaagagccccttataaaaccatcagatctcatgagaacccact

SEQ ID NO: 332240 - DNA, 625 bp, Homo sapiens
tttgttcagttctataaagtttatgagcttgtagagagttcaggaaaaaattacccttttgacatttggttctatgagtgtattatttcattttcacactgctataaagaactgcctgaggctgggtgcggtggctcatgtctgtaatcccagtactttgggaggctgaggcgggcagatcacctgatatcaggagttcaagaccagcctgactaacatggtgaaacctcatctctactaaaaatgcaaaaattaactgggcatggtkgcacacacctgtaatcccagctactagggaggtttaggcaggagaagcacttgaacccaggaagcagagattgtagtgagccgagattgtgccactgcacttcagcctaggcaacagagcaagactcaagactccatctaaaaaaaaagaaaaagagaaaggactgcctggagactgtatagtttacaaagaaaatagatttaattgactcacagttccaaatggctagggagccctcaggaaacgcacagtcatggtagaaggggacacagtcatgtgttacatggcagcaggtgagagagagagcaaagggggaagagccccttataaaaccatcagatctcatgagaacccact

SEQ ID NO: 332241 - DNA, 532 bp, Homo sapiens
ttatctgaattgatccttcccatccaataatggtcacttcattgtctgcctctcttcactgtagcacaatctccatttgtatgtcttgttccacagtgcccttttgattggttggagaggcttagattggaagggaattayaggttggtacaaaagtactggtgatcttgtgatttttgccattgctttaattgcaaaaccacaattacttttgcaccaacctaatatctatctctaaaagcttgataaagtttgtctataaaattgtctaggcctggttctttcattgaaaggctttgtttttgttttgtttttagacaacagcttccacttttttaattttggtttttggattcttaaactatttttgtcaacatagatgaactatttatgtcaacatagattaaatgcctggaaaaatcaggcatttaataagatttaaacttccatgccacagaaatttttattcttttatgaattttaatatttttcctgtctttttttacatgtgctttctcattctaaatgttgc

SEQ ID NO: 332242 - DNA, 532 bp, Homo sapiens
ttatctgaattgatccttcccatccaataatggtcacttcattgtctgcctctcttcactgtagcacaatctccatttgtatgtcttgttccacagtgcccttttgattggttggagaggcttagattggaagggaattataggttggtacaaaagtactggtgatcttgtgatttttgccattgctttaattgcaaaaccacaattacttttgcaccaacctaatatctatctctaaaagcttgataaagtttgtctataaaattgtctaggcctggttctttcattgaaaggctttgtttttgttttgtttttagacaacagcttccacttttttaattttggtttttggattcttaaactatttttgtcaacatagatgaactatttatgtcaacatagattaaatgcctggaaaaatcaggcatttaataagatttaaacttccatgccacagaaatttttattcttttatraattttaatatttttcctgtctttttttacatgtgctttctcattctaaatgttgc

SEQ ID NO: 332243 - DNA, 550 bp, Homo sapiens
ttgaactaataccaatcctgctcaaactcttctgaaaaatagagaagaagatacttccaaactcattctaaayggccaatattaccctgaaagcaaaaccagacaaagacacatcaaaaaaaaaaaaaagaaaactacaggccagtatccctcatgaacattgttacaaaatcctcaacaaaaatctagcaaaccaaattccacaacacattaaaaaggtcattcatcatgaccaagtgtgatttaacccaggatgcaaggatggttcagcatacacaaatcaatcaatgtgatacatcatattatcagaatgaatgacaaaaaacatgattatttcaattggtgtggaaaaagcatatgataaacttcagtatccctccaggattaaaactgtcaataaactggatatattaatagaagtaatatacctcaacagaataaaagccatatttgacagagccacagccagtatcatactgaatgggaaaaaactgaaagcctttcctctaagatctggaagacaacaaggatatgcacttcaacatagtat

SEQ ID NO: 332244 - DNA, 486 bp, Homo sapiens
gtattgcattgtggttttgatttgcgcttccctgatcattagtgatgttgagcattttttcatgtttgttgaccatttgtttatcttcttttgagaattgtctattcatgtctttagcccactttttgatgggatttttttttcttgctgatttgtttgagttcattgtagattctggctattagtcctttgttggatgtatagattgcaaggattttctcccactctctgggatgtctgtttactctgctaattgttttttttttgtttttgtttttgtttttgtttttttgctgtgtagaagcaaagactctttttctaaataaagtggtaacartcacagattctagggactttatgtggatatcttttgagggctttttttctgcttactatacctaaccagtattaattttgactcttaccctttgattttaataaaatatctatgccttcttccaaataggccatgccgctacccacaga

SEQ ID NO: 332245 - DNA, 606 bp, Homo sapiens
aaaataaggaagattggtcagaaatgtgctttggaagcacttagaatcctgaagcccckcttctgcctcaggaaaggggaattgtcctcccacaatcagtaaaagactggatattttttcattggaaataaaaagtagaataaaattgaccatcccaagaggaaagatatgaatgtattgctatcaaatttccctaaaggaaaaaagagcagccaaatcatcctacactaaagcttacagtgcacaagcctcacccacgaaccaagagcttctagttagctttcagtccttgctcttaagtatacccatataatcaggattagcagatatctaaggaaataatctaatgacaaaacttaaatcctgatgacaacatgggggaaccaaagagcaggcagaaatgcaaaacttacatttaaaatgcatatattctcagaaaggtaaaagcatgttttacaaccaggaaaaaaagaaaatgatgttttaaaattttcagggaattaaaaaaacctttaaatttaaaaaatatggttatgaaaacacataaattaataacagtttggaaggtttggtacataaaaattatgccgatgaataaaacaaggt

SEQ ID NO: 332246 - DNA, 606 bp, Homo sapiens
aaaataaggaagattggtcagaaatgtgctttggaagcacttagaatcctgaagccccgcttctgcctcaggaaaggggaattgtcctcccacaatcagtaaaagactggatattttttcattggaaataaaaagtagaataaaattgaccatcccaagaggaaagatatgaatgtattgctatcaaatttccctaaaggaaaaaagagcrgccaaatcatcctacactaaagcttacagtgcacaagcctcacccacgaaccaagagcttctagttagctttcagtccttgctcttaagtatacccatataatcaggattagcagatatctaaggaaataatctaatgacaaaacttaaatcctgatgacaacatgggggaaccaaagagcaggcagaaatgcaaaacttacatttaaaatgcatatattctcagaaaggtaaaagcatgttttacaaccaggaaaaaaagaaaatgatgttttaaaattttcagggaattaaaaaaacctttaaatttaaaaaatatggttatgaaaacacataaattaataacagtttggaaggtttggtacataaaaattatgccgatgaataaaacaaggt

SEQ ID NO: 332247 - DNA, 563 bp, Homo sapiens
gatagatctgtttaataaagattaatggaggattcaataataattattatcataaatatttactgagaagccttatgtgtcaaacattattccaaacatttcatagtccatcaaatattttgcatatatttttgtttgaaataaatagcgattaattttaattttatgttatgtcatttaattctcctaactacactagtaattcatattattcccattttacaaaagagggcgattaggattagagagtttaaatagcctgcccatagtcataggaagtacagcaccagtctgtygaacccacaaagtctgactctataatctagaagataaagtatggaataatttctgttattgactaaccatgtcagttatttgtatttcactaacaccattttatattaatttgtctcatgcaactggtatgtgtgttgtctcacctactttttagcagggtaagtaaagtagatatttgtgtcaagtttaacatattttttatgtatattctgtgaccattgaatcagatttttgaaaggtggttttgtgaactcttatcctagtat

SEQ ID NO: 332248 - DNA, 586 bp, Homo sapiens
ctttttaaaaattaccttgaaaacactatcagatactatgattatgtggggtaatagaatttatctattacctgggaaaattaaagatgcatatcctgtaaaatatagcaaattcactgtactaaggagatctgtataaggatgttcatttcagcatgtttataatagcttaaatttggatataacataaatttctattttaaaatatggcttgatgtggtgtatctaaaatgagtatttgataatagttaaaatgaataaattatttctgtattaacattcatagattttgaaaaaaataatgttgatctaaaaggaaggatgaagtatctgagaaggagagctacccaaatataccatttttttacaaattgtaaatgaaaaataatttttacaaaatataaatacaaaacaaattataaatacaaarcatgacactttcactgcgtgtatacttttaaaaatttatttaaaaaatacagaatctgtaatgtttttaatttatgtattgcatgtcctcaagatgcatgttttttgcattgtaaatatttttatatagaaaagaaaacatctctttaggtgtcag

SEQ ID NO: 332249 - DNA, 537 bp, Homo sapiens
ctgacataggcctaatgtccctactgatgcttattagaatgactcatgaatctgcatttgtctttctcttgtcacagtcaccatacacagttttatgcctcatggtattaataattttttaagaatagagttcctcgtcacaaagccggtcctaaaatgtagatttggaatttctgattgcttttattgctgtaaacaaaatctctccatctacattggagggtcatagtaaaacttctttccaagccttaagaacataacagaagccttccatcaatatatgaatacactgtggttaatttcaacaatgttctgaagatctagagcaatctctcagtgaactgcaaatatccttctcagctctygaaatttctgcatatcaattcaaaagtttttattgcaaattgaaatcttttttgttaaagatgagggtaatacaaaacattaaatgaatattcagaaattggtaattttataagtgtttttaattctaaaatttaaattatgcagggaatatatcagagtatatttaatgtt

SEQ ID NO: 332250 - DNA, 522 bp, Homo sapiens
actaactggttggagtatgaagttaaatatgacagcaagagactgagcagtgatggtctagatctagtaaagcatctattgactttgtaaaagttttatctgccagctggagaagtaagtgagagaatgagatgagagaaaaggatgtattcatatgtatcaccgtattatctcataattaaagctgcatggatgggccaccaagaccacagaaaatttgcttaaactcatggtcttgaaacatgagttggattcacgtctttgttttcctgttgtaaatgatattgttttatttgtctgcttgtagaaccagttaaattaagcttgacattctatgaaagaaatctggctcaggaatrttttttaaatattgacaataagtctttatagccatatttgcaaaaaaaaaaaaaacatttaaatgctagaaagaggaggtgactggctcagtgatgttgataactttaaatttagcatgtatgttttcacatataattttggagcaatcaggttgttagtgtg

SEQ ID NO: 332251 - DNA, 538 bp, Homo sapiens
gtgtgtggcaattaattcacagccaaaatgacataattgaatgttgttcaacaaatgttgcttcaagaaagcaaatgtgattgccagaacatattcttctggatgccaaactatttaytaatgctactatataatggaaaaggatttcttacttgctaaagaacttctataagttttagaaaattcatatggagatcattacttatgttttcaagtgcatatttataatatcatgaaaatattctggtgtgtcaataatgagacaacagggttttcattttgataatttttgttaattgaatacatgactgaaattggaggacctacccacaagactctggcttcattatatctaaaataataacaaaataatagtcacaactccaacttattaagctgcacacatgtaaaatgctttacttatgttcacttatttggttatcactgtaactttacaaggtacttactatgattaaccccattatacagcctaggaacgtggcttttattatataaatagtaagtaaaagagcccaat

SEQ ID NO: 332252 - DNA, 619 bp, Homo sapiens
tggaatgtaactctttaatattttggagtcttttgtttggactctattgttttcaagccctcagaggtaaattttcttttacagctgggacaagagaaagcacttcgttcttgacttgggatattaaaccaaccttgtatttctgacataactctcaakttgtcatgttgtataagtctgtctatatattactggatttggttgacaagtttctgttaagaagttttgtgtctatattaaaataaatactggtctataacttccttttcttttgcaattttgccaagtttaggtttaggtatcagggtaatattgatctcataaaatgagttgtgaagttgtttcttcctcatcttgtcaaagattggcattaactactctgaatatttaatggaatttattagtgaagccatctgtcctaggaacttccatgtgggatgtttttagttactgatttgatctctttacttccattagatgtattcacattttacatttatctggagtaatttatggcaattgtgtctttctagaaatgtttctatttcttctaagttatataatttgttggcatacccttgttaaatagtgctcccttctaattcattgttttaaggtt

SEQ ID NO: 332253 - DNA, 617 bp, Homo sapiens
tttacatttatctggagtaatttatggcaattgtgtctttctagaaatgtttctatttcttctaagttatataatttgttggcatacccttgttaaatagtgctcccttctaattcattgttttaaggtttcataatacagccttcttttatttcttatttcagtaattcaagtcttatttaagaaaaatcttggtcaaactagctaaagatttgtcaatttgattgatatttacaaagtttcaaactttggctcattagttcattgttttgccagtgttgatgaaaagagtcaaactctgtaaaatatttttagagatttattcttagccaaatatgagtgaccatggcctatgacacagccctcaggaggtcctgagaacatgtgcccyaggtggtcagggtaaagctcagttttgtacattttagggagccatgagaaatcgatcaaatacatttaagaaatacactggtttggttcagaaaagcaagacaactccaagcaggggcttccaggctgtaggtaaatttaaacattttctggttgacaattggttgagtttgtctaaagacctgggattgatagaaagaaaatgctcagattaagctaaaagattg

SEQ ID NO: 332254 - DNA, 581 bp, Homo sapiens
gaaattaagtaatttaaaatatgtaaaagcatttagagtaatacttgacacaaatgaacactacttaagtgctggagagttttagaagtcacctcattaattttgtaaaaaaatgtagatacaataataatattactttattatacacatttaatttcatggagacaggagattgcagataaaaaaagattraaaattagtcaattaggttcattctctttaatttacatataactttcttacatgcaaagcattctaaaaagaacaaattggaagctaaaaagtgtttttggatgatatcccaactttaatgagacagatagtaacttctttgagatacaacaggcaaaacccattgttggtgtaaagaatttaaaatgaagaaaataaaagggtaaaatggtattaaatcattattgaaagttttttatatgacattgtcatatatttcaatttaatttacagatggcattgacattgcaaagggccgtctgatatcaacatttctaagtattataaataacacaaagattattactcagtatttaagaaacttgacagagaatcagttgaatttttaa

SEQ ID NO: 332255 - DNA, 608 bp, Homo sapiens
aagccatctatgacaaaccttcagccaacataatactgaatggggaaaagttgaaagcattcactctgagaactggaataagacaaggatgtccggtctcaccactcctcttcaacataatactggaagtccaaaccagagcaatcacatagcagaaagaaataaaggacatccaaatcctaaagaggaagtcaaactctcactgcttgttgatgatatgattgtttacctcacaaaccctaaagacttctccagaaagatcctagaactgataaaagaattcagcaaagttcccagatgcaaaattaatgtacacaaatcagtagctcttcyatacaccaacaatgaccaaatggagaatcaaatcaagaactcagccccttttacaatagctgcaaaaaaataaaaataaaatactcaggaatatacccaaccaaggaggtgaaagaactctacaaggaaaactaaaaaacactcctgaaaaaaatcataattgacacaaggaaatggaaacacatcccatgctcatggatgggtagaatcagtattgtgaaaaataaccatactgccaaaagcaatctacaaattcagtgtaatccccatccaaa

SEQ ID NO: 332256 - DNA, 514 bp, Homo sapiens
gtgtttgctcttccctaaaacgtttgttttttctgttcctttagcatggcttcttccctcacttcattcagttttgtgctcaacgttcctgagagagctgctctaggcaccctgtgtataataacaccactgtatcattttgctattaccttattctacttttaattttctctataatgcttttttatcacctgccatactctctactcatctctcttggagagtagggactcttttctttacttcttcagagcataaaaaagtgcttggcacacagtagcttaataagtacttgctagagatgtgaatacacattgaaatactgttacttaaaatttttcataaagtcttagttaacagccatattattatttattgaatattcctcaaatcaatagaattctgtaarcctgagaaaaagacactcaagcaatgaatgggattccccaaacatacacattttgtttcttacaaaactttctcaaaagcatttaagattttcataaaatgatgg

SEQ ID NO: 332257 - DNA, 615 bp, Homo sapiens
gtaaattgcatattatttaaaaattctcagttctcagaatgcatcaagagcggggagaatattctataatcagcttccaatattggagagaatcatgaactaggaattgtgattttgttctgcctttgtctacaactcactaaatgaggctgacaagttatagaaactcttttaatcattatatgggatgtaaaatgatgtgagcaaccacaatgatgtttcagatgtcttctgactctrtacttctattaaaatctttcctgttttgaaattttgctgtgtattcttaagcgtccctttcttgtaaacttggccttgataaacctattacaacattgtaacactaaaaagagtaacttatcattgtctcctgcagtgaggttttcagacctttgttggtggtctagattttttaaattaaaagtcaagttaaaagcatggatcaagctcctactggtactcaacacataaagcaatacacagtccaaaatttaccattaaggtctttacattaattagggcaatttctgtatactctcatgaatgtctcagcaataaacaaaggccaaaagctcttctctgatcatggcagagttatgtaaagaagtagttctt

SEQ ID NO: 332258 - DNA, 507 bp, Homo sapiens
actgcttattttgctttaaatgaatatgaaaacctcattatttttacktatattgacattcaacaaggctaaatagagcctgaaccttataaagccctctaacgtttagatgacagtgatgataaccaggtgtggtagagaattctaaaggtctctaccacataacatttataacactatggacaggctctaaaactgcaaaaattcccaagacgagccaatttatgggtgatatttattggtctttgcttccaaaaatcatcttaaaataattattgcagtattaaccaaatttaaattgactcttaatctctttgaaatcagaaattgggtctcactttctttgaatctccagaatctagctccatgagcaagatattatagggatttattaaaatttgctaaataatggaataaacatcttaatgtccaattggaatacttgattctttatagatatccactcaacatagttttttgtgtgtgtacctactcatgccaggcatt

SEQ ID NO: 332259 - DNA, 541 bp, Homo sapiens
ccatctgggtaagaaatcttgttccattggccagaaaaataattttgatccagatagttttaaataaaatagtgagtttgtgttattgtacttggtgcatggacaaaattttaaaatgaaagctatacaatctctttctatatgtttatctatatctgtatgatatgtatatatacatacatgtatatgtgatatttgtctrtcttactatactgtcaaattaaattacaaaggagctctgtttagttgtctttaagaaaaataaggcttatataaatgaaatattctatcaaaaaataggatctaacccaaatgcatttcgagttcatgtgacttgggtaatctttgataataaaaaaaaaagtttgtttgattaaaataggcatgtcttcagcgttttcaacattaaatataatacatactcacaatttttcctacctaagtttactggtaaaataagcttatgttatctctatacttaaaaaattcattggtaaaataagaataattataaaaacataatggctggctgttttgtgtt

SEQ ID NO: 332260 - DNA, 592 bp, Homo sapiens
ctggccaacatggcaaaaccccatccctcctaaaaatacaaaaattagcctggcatgatggcacatgcctgtagtcccagctactcgggaggctaaggcacaagaatcattgaacccaggaggcagaggctgcagtgagctgagataatgccactgcactccagcctaggcaacagagcgagactctgtctcaaacaaacaaacaaaaaaaagtgatgttaagtaaaattcttaatttttttcaatatcataaattagtctaattcatatacaatttgttgtttattaatactttttaaatgtttctacagtttgtagcttgatagaactattttatgtcaagtgaaaaatyaacaaattatcatatcacttattttctagttggagtttttaaataataattattacattaaaaaaatcagcaacacatttaaagtcagcattctaaatagatctcaaatttaaaaaaaaacactaaatacaataaactttcaattctcatcaaaacctataaagttcacaaggactgcaatgtaaaaccacagctggtgtttgtttgcacacttacatttgatatttatagatagaccaa

SEQ ID NO: 332261 - DNA, 610 bp, Homo sapiens
ttggactgaaagaagcaaagtattgttcctggctgtttccatgagggtgttgccaaaggagattaacatttgagtcaaaggcctgggagaggcagacccaccctcaatctgggtggacaccatgtaatcagctgccagcatggctaggataaagcaggcagagaaacttggaaggactagtctggctcagtcttctggcctccatctttctcccatactgggtgcttcctggcctccaacatcagactccaagttcttcagcttttggactctcagacttataccagtgatttgccaggggctctcaggccttcagtcgcaggctgaaggctgcactattggcttccctacttttgaggttttgagacttggactggcttctgggctcctcagcttccaaacagtstattgtgggacttcaccttgtgatcgtgtgagtcaatctcctaaaaaactacccttcatatattcatctactctattagttctgtccctttagaaaaccctgactaatacaaggttcctccaccaacactggggattacaattcaacatgagatttggatggggacatgcagccaaatcatatgagatagcaagaagcaaaact

SEQ ID NO: 332262 - DNA, 582 bp, Homo sapiens
atccaggttgaatttgctcctaaatatcatatattaggcactatgctaggtttttacacattatctcattttttaaaatgctcctctacacccatttatctcctgaccccatttttacatgagcactgtggttaaggaacacatatgctagagccagaatgccatttttgatcccagtctcatcacttgatagctatgagactctatacaaggtttttaacatctctgttttcatttcttcaattataaaatagagacaatattgcaccactttctttgtattaaaggttaaatataaaacatttaaaagaagaaytgaacataattgttactcagagagtgttcactgttgctattattgttgtcttcaaagtcattcatatgacctcatagacctataaattcctttataattcccagcaatcaaaagcagttggctcagattttatgcagttccttatttatcaatgcatgcttgtatccaagaacatgcctgctttcctagaattttgcaaatactctttatgaaaattttgtagaacacaaacaaaaataaatgcatacatgtaaatacagacacac

SEQ ID NO: 332263 - DNA, 605 bp, Homo sapiens
tttacataagagggttcctagccaggaatgaatattaaaaatgaatactggctgggcacggtggctcatgcctataatcccagcactttgggaggctgaggcaggtggatcacctgaggtcaggagtttgagaccagcctggccaacatggtaaaaccctgtttctactaaaaatacaaaattagctgggtgtggtggtgcatgcctgtgatcccagctacttgggaggctgaggcaggagaatcacttgaacctgggaggtggaggttgcagtgagccaaggtcgcgccactgcactccaatctgggcaacaagagygaaactccgtcccaaaaagaaaaaaaaaaaaatgaatacaacctttatagttccaatcctcatgaaacttagagtgttagaatctactactggaaatagatgcttattacatgtatcacatatgtatgtttgatttttaacaaaaatggatagataatatagatatagatagacataacatatactatcttagctcagattgccataacaaaatacaattatgtctcacagttctcatggctgggaaattcaagttaaggtgcaggccagttaggttcctgatgtgg

SEQ ID NO: 332264 - DNA, 533 bp, Homo sapiens
agaactaaaaaattggagcttttattatttgtattactagacatatttttgcataatttgtaaatgtttatagaccaaattaactgttaatgtccctccacacagtgggatttcattgagctctttagttatcatggttagttatcatttatttagttctttatgttaaaaaggatttaaacagaatagcaccctgctgtcctgaacattatcaaacatgtgcctctttcttgaaattgtttgcaatctgtaataatccaatctttgataagtatcacataataaaaatgataattgtgctgttagtggttttattaatgtcattgaagttagagcagggagatgaattactttatggagaaagaagataacacataagraccacgtagataaaatgaccctaggattaaggccttagaagaatgacatttccaaatgtgagcctggttttacacagtatcaagatacttgactggaaaccttattttttaaaaaaaaactttatttgggaatgataaaataatactttatat

SEQ ID NO: 332265 - DNA, 533 bp, Homo sapiens
agaactaaaaaattggagcttttattatttgtattactagacatatttttgcataatttgtaaatgtttatagaccaaattaactgttaatgtccctccacacagtgggatttcattgagctctttagttatcatggttagttatcatttatttagttctttatgttaaaaaggatttaaacagaatagcaccctgctgtcctgaacattatcaaacatgtgcctctttcttgaaattgtttgcaatctgtaataatccaatctttgataagtatcacataataaaaatgataattgtgctgttagtggttttattaatgtcattgaagttagagcagggagatgaattactttatggagaaagaagataacacataaggaccacgtagataaaatgaccctaggattaaggccttagaagaatgacatttccaaatgtgagcctggttttacacagtatcaagatacttgactgraaaccttattttttaaaaaaaaactttatttgggaatgataaaataatactttatat

SEQ ID NO: 332266 - DNA, 622 bp, Homo sapiens
agcatcctgcagctttccttgtaaactctgttcagattggctcagggaatatgtagtcacttgagttaaaatgaacttaaaaagcataagtaaagggtatggttaataggtgctggagccttctgggggaaatattgagtggacttcttcagttttagtgataatgatctgtaagagggtgcagacagaatgctaataacattttttgataacattaaattagaagaggccaaaacacgtgtcagatcagaaaattctctgttagaggcgtggctatragaaagttaggaatacaaagaaaacaataaaatgccacccagggacactaaattctatgtagtatactataagattgattttaaaaatatccaaagtagaggacatcagtgaaagaataactggaactgccttggaacctaagaatgaaaaaaaaaatattcataagcatgtgagcaaggctgttctatatgactcagggaaggaactgaaactattgggtactcaaaagaagtgaaatatttttgagatgcatgaaggcctatggattatattggaagccattaaaagcaaggaaagactgctggaaaaggaaatatcaaatttatctcctagaatctttctt

SEQ ID NO: 332267 - DNA, 441 bp, Homo sapiens
acgaactacaaatatagttccacctccccttttccttagtcttctctgtttcacaacagagcaactccagctttcctattgtttatgcaaagaaattttggaatcatctttgccttccctttctcgtagcttatatccaattagtcatcagatctcattggtactaccttaatgtattcagaatataaccactttttactcctccactatttatgagcctggtctgagaaacaaggatctcttatctggrctaatggaaaagtgtcctaactaatctctgtgtttctaacctgactcctaataatctactttcaacacagcaactagcgtgaatatgtaagactgtaataaattgtttcactcatctcctgaaaatcttccaaggtcttcccacattgtgttgagtgaagggaaaaacccttttggtgatgcacatctaca

SEQ ID NO: 332268 - DNA, 592 bp, Homo sapiens
gatctttacaggtggccagttaagcagtgtattgagttttccctgctcttttctgtctccactattgtttcctgatcaaattatgtgaagttacttgccctttcatcatttgtgcagttttaccttctggggaatccaggctgagacaatatctgaaaacgaactacaaatatagttccacctccccttttccttagtcttctctgtttcacaacagagcaactccagctttcctattgtttatgcaaagaaattttggaatcatctttgccttccctttctcgtagcttatatccaattagtcatcagatctcattggtactaccttaatgtattcagaatataaccactttttactcctccactatttatgagcctggtctgagaaacaaggatctcttatctggactaatggaaaagtgtcctaactaatctctgtgtttctaacctgactcctaataatctactttcaacacagcaactagcrtgaatatgtaagactgtaataaattgtttcactcatctcctgaaaatcttccaaggtcttcccacattgtgttgagtgaagggaaaaacccttttggtgatgcac

SEQ ID NO: 332269 - DNA, 441 bp, Homo sapiens
acgaactacaaatatagttccacctccccttttccttagtcttctctgtttcacaacagagcaactccagctttcctattgtttatgcaaagaaattttggaatcatctttgccttccctttctcgtagcttatatccaattagtcatcagatctcattggtactaccttaatgtattcagaatataaccactttttactcctccactatttatgagcctggtctgagaaacaaggatctcttatctggactaatggaaaagtgtcctaactaatctctgtgtttctaacctgactcctaataatctactttcaacacagcaactagcgtgaatatktaagactgtaataaattgtttcactcatctcctgaaaatcttccaaggtcttcccacattgtgttgagtgaagggaaaaacccttttggtgatgcacatctaca

SEQ ID NO: 332270 - DNA, 626 bp, Homo sapiens
cttaatgtattcagaatataaccactttttactcctccactatttatgagcctggtctgagaaacaaggatctcttatctggactaatggaaaagtgtcctaactaatctctgtgtttctaacctgactcctaataatctactttcaacacagcaactagcgtgaatatgtaagactgtaataaattgtttcactcatctcctgaaaatcttccaaggtcttcccacattgtgttgagtgaagggaaaaacccttttggtgatgcacatctacaactttgatttcatcctctcctagttttcccctatatcactcctctttaactagattggccacctcctccttcttcaaacagtccaagtgcatgcctccttcatgacctttgctgtttcctctgcatgtaatattttcccccgatagctatatgcctcgctcctctatttctcaagttttccacacatcaattcttgtttactagggttccttcccattaatatggcatctgctatttactggggttccttcccattaatatggcatctgctgtyttcttccttgcttcattttctccataatgtttattgctatcaatcatagagggttataaaaaatggccacaatagtct

SEQ ID NO: 332271 - DNA, 576 bp, Homo sapiens
ataatatgtataatatatattgattaaacaaatacatgtttaatttttttgtaaggacacaacttaatgataagagaagaaatgcctagatgcactagaaagtatttcataatatattaatattaaattaatattcaatagtattartctagtaatatgttaattgaccaataaattaataatctatcagtataatctattaatggaatatattattaatctattgattaataatattgattatctatagatattaatctattgataaattaatatattatattatttattaatattgagtgaatattcagtattctatgatgactcttggtaaggaacagagtggagggtctccttagtcttgctaatcagtgaagtggagaaggttttggggaacttctcttgtatttatggcatttatggcatgttcttaaaatctccaactgtaaaatattcacttaaacaatttctggattattgtttttaagtctaatttgtcctgcatatgctttatgataccaacctttttccatagctgtttctaaatagctatgtcagtttttgaaaaacaatcac

SEQ ID NO: 332272 - DNA, 591 bp, Homo sapiens
aagcgtatgtcttagtttggtcagtctattattacagataccatagactggggagcttaacaaccaagcatttatttctcacggctctgaatgctggaagtccaaaatgaggatgccagcatggtcaggttctgggtgaacatcctcctcctagttcacagacagctgccctctccttgtattctcacgtggtggagaggcagaactttggtaacttcatcttataagaccagtaatcccatcatggggactccatcctcatgacttgatataaaccaaagtaacctcccaaagtccccacctccaaacaccgtcacagtagggattaaagcttcaaaataggaatttggggaggacataaacattcagtccataccagtatacaaatgaatttattsgtaggaatttcaggaaaaaaaaagaatataatttttttctgggttaaaatacagtattaaattgttaaacagttctcaaaaactcagaaacaaaagcaggaacaggagcaagaggaggagaaggagacagagaaggagaattagaagaagaagaaaagttcttccatcagtttatccatatccgtatcttctt

SEQ ID NO: 332273 - DNA, 533 bp, Homo sapiens
ttccaaccatttcagataaaggatactcaaaatatgtgttatgaaattaattkcatttaaatttgagactataattaaaagtgtcaggagacacattcctaatcactcagattacatcacacagagcctaattaggcttcctaataccccatgcaaaaaaaaaaaaaaaaaacctaaatgaagttagacctgagaaaacctagtgatagatgcaggaggcagataagggaggatccctggagaatccccaacccgccccacaagtgtttacatcagatgcttttgtgcagatgtgggaacctgccaagggtcttgtctgcacatgctggcaacagactgggggcctgcctgcacactgggaaaatggggtgcagccactggggattcatgccttaagcagtgagaagagacctggccccttcagctggtgtgtgtggtgacctggtatgcaatctgtgagttgggagcctgctggcagaaccccttttttttcactgagagcgttctttaataaattctgctctcctcaaact

SEQ ID NO: 332274 - DNA, 482 bp, Homo sapiens
ccaccttgaattttcctctctgagcacctgggagattacctttgataaagtttcaaagctacaaatattggttgtttggcatggataaagtcaggtaataagggatttaaaaggatttttttaaagagcactcagcttaattcaaagtggatatccaagttataagtatatttaaaaggcctttatgtttttctcttcctaaactttattttcctggaaaaagatttttttctcagtcgactaaactatttttctccattttgccttgcctatcttaatgggtgcatgagaggccccaagatgatttctcatggcctgggaatccttgggaaaaacagaaaaggtgccacaaattccattttgggagagacctctgttttcctaaaggagtcctaggaattagaggtggctagatccctctcaaaatctgtttttaatcttccagctatacctgtttattrggccctggaaactgcatgctt

SEQ ID NO: 332275 - DNA, 527 bp, Homo sapiens
tttttaaaagacacaatctaaagaaggcaaaataaaaggaaaagggctacaaagaacagataggaaaaatagaaagaaatgacaagatgttggatttaaatccaaatatattgataactaaattaaacacaattgattgaaacattccaattaaaatgaaccgattgkcaactggattgaaaagcagtcaccaactatagtctatgaacaataaatgtttttctctatattaaaaacaataaattgtaaaataaaatttaaaaatatgtgtaacaacattaaataagaaatacttagaacaaaaatcttcccattcactgatgaatggggcctaatgtaatcaacctgtcaccaggtagctggctgatcaccatgaagaatggtgccatgtaaaagggttcagtgtgggtttctgttgttggcagactgggcacttaatggtggccacagtcatacaaggcttagtgaatgggaatccatattgctgaacccatgcataatctcatgcccgccaccatggccatgtt

SEQ ID NO: 332276 - DNA, 552 bp, Homo sapiens
ttcattcaccatctggaagcagtacaggtagtatttgaatgatgctcagcattatagtattttgtatggaataaaagaaaaataaaaaacctataaattgttctttatattttgatgacccaagctgcaatgagctgattcatgcccccaccmccacattcatatgttgaagccctaacacccagtacctcagaatgtaatggtatttggagatatgcaaaagatataggcctttaaagataggaccttttaagaggtaattagggtaaaatgaggccattaaagtaggccctaattcaatgactggtgttctcataagaagagttaaggacacagacacacatacaaagaggaaagaccatgtgaagacatggccatctgcatgccaaatagacaggcccttggcagaaaccaaccctgccaacaccctgatcgtgctcttctagcatctaggactgtgagactataaatttatactgtttaagcctgctggtctatgttatagcctacagcagccctagcaaactaataaactaatctttcatcttattg

SEQ ID NO: 332277 - DNA, 561 bp, Homo sapiens
gactatatgtagtgttttgatgactcagtcagtggcatctttatacttactaaggttcacaatagtttaatttttcaattatgatagatgtatccatttttcttgaatgttattcagtctttaatgattgaattattttttatataatgattttttcatgttctccatcttctcattaggaaggctttctaatctccayttgctggtctctagtttggctcctaatacaatacattatgatttcatatacttcttatgccagagaccgaaagtccaagaaggcaagaaatcaagccttattcccttgttgtcaatgctttgtacttaataggttcttaatgcaaaatttcagaataaacaaaaatatgaaaaatacctttagaggcttcaaataatgattatatatattttaatcctttaaagacattaatagtgattatagttttgctttttttatcctacacctattaagactccaattacctctttcatcaacacaccgcatgctgatatgattgataaaggtagaactattttctattatgcattaattagattagc

SEQ ID NO: 332278 - DNA, 561 bp, Homo sapiens
gactatatgtagtgttttgatgactcagtcagtggcatctttatacttactaaggttcacaatagtttaatttttcaattatgatagatgtatccatttttcttgaatgttattcagtctttaatgattgaattattttttatataatgattttttcatgttctccatcttctcattaggaaggctttctaatctccatttgctggtctctagtttggctcctaatacaatacattatgatttcatatacttcttatgccagagaccgaaagtccaagaaggcaagaaatcaagccttattcccttgttgtcaatgctttgtacttaataggttcttaatgcaaaatttcagaataaacaaaaatatgaaaaatacctttagaggcttcaaataatgrttatatatattttaatcctttaaagacattaatagtgattatagttttgctttttttatcctacacctattaagactccaattacctctttcatcaacacaccgcatgctgatatgattgataaaggtagaactattttctattatgcattaattagattagc

SEQ ID NO: 332279 - DNA, 549 bp, Homo sapiens
aagcataactaagaccttcaaagaaccagtcctcttcaggacactttcagcagagatatcttaaaacaagcaaactgcttgaagtgacataaattcagtataccttccaggcctccgagggcagcttttcaaactttcccatacattacaatggcctggwgggctgttgaaaacactgtttgcagagtttgtgattcactaggtttgggttggggcctgagaatttgctttgataagttctcaggtgatgtggatgctgcttgtttggggatacactttgagaagcaccatcttagtgtgttgcaggagtctatctttcacagttttccatgagaattgaggatctctgtaattctcaatcaattctatatcagctataatatatcagccaacaaatgtgtcacatctgcactttatgttaagatcaaggacatggagagatgagtatcagaaagagttccaacgttagttaaaacacatttttttttaaaagattaatggctttgtgttatggttcatacctgtagatctcattcagctatgagcaac

SEQ ID NO: 332280 - DNA, 604 bp, Homo sapiens
cttaaaacaagcaaactgcttgaagtgacataaattcagtataccttccaggcctccgagggcagcttttcaaactttcccatacattacaatggcctggtgggctgttgaaaacactgtttgcagagtttgtgaytcactaggtttgggttggggcctgagaatttgctttgataagttctcaggtgatgtggatgctgcttgtttggggatacactttgagaagcaccatcttagtgtgttgcaggagtctatctttcacagttttccatgagaattgaggatctctgtaattctcaatcaattctatatcagctataatatatcagccaacaaatgtgtcacatctgcactttatgttaagatcaaggacatggagagatgagtatcagaaagagttccaacgttagttaaaacacatttttttttaaaagattaatggctttgtgttatggttcatacctgtagatctcattcagctatgagcaactgctctacctctatacctccctccaaaattcaaacactggtaattactgcatcctaaataaaggccctcaacttttatcttcaacagtttgcaaaattctcattctcctccctt

SEQ ID NO: 332281 - DNA, 607 bp, Homo sapiens
atctcctgggctcaagggaccctcccaccttagcctcctgagtagctctgatcagaggagcacaccaccacacctgagtaacttaaaaaaaaaaatctttggagatatgaggtctttctatgttgcccaggctggtctcaaactcctgggctcaagagatcctcccgccttgacctcccaaagtgctgggattacaggaatgagttgccgcacccrgccctggactttcttttcttcttgtcccctgttcagacactgccctaaggttctgcccttgaactctttctctttcagagaacccaacaatcattcatctggcaatgactcccaaattttagttccaattgtactttctcgcttgagctccagtcttgtgtttccagggggccagtatctgcattacctgaaaacaccagatttatgatgtctgagcccagtgtcacatatccattagctttggtgaattgtaagactttaaattcaagacccctccccacccagtggccccaaaaggatattctagtcctctctgcactccaccacaccccacacaactggcctccacagtttgctgcctcccttgctctgcagtgcattttccttagtc

SEQ ID NO: 332282 - DNA, 575 bp, Homo sapiens
cctaaggttctgcccttgaactctttctctttcagagaacccaacaatcattcatctggcaatgactcccaaattttagttccaattgtactttctcgcttgagctccagtcttgtgtttccagggggccagtatctgcattacctgaaaacaccagatttatgatgtctgagcccagtgtcacatatccattagctttggtgaattgtaagactttaaattcaagacccctccccacccagtggccccaaaaggatattctagtcctctctgcactccaccacaccccacacaactggcctccacagtttgctgcctcccttgctctgcagtgcattttccttagtccataaggccaacagtgccacagtgaccattcggatggtgcctatgtttaaaatttccctaattactcatattttggctcgagctgtctttggcatgccttcttttctgtrtcatctttttttgcagaggtaaatttgaaaatacagtctgcttttatttcaccctaatatctgtcatcgtgctttgcacagagaagccacaccataactgcccagaagacctgtatc

SEQ ID NO: 332283 - DNA, 601 bp, Homo sapiens
cccaactccaccctcagtttttagttgtcccacctttcaggaccaaaccaatatatacattacatgtattgattgatgtcttatgttaccctaaaatgtataaagccaagctgtgtcccaatcaccttgggcacacattctcagactctcctgggactgtgtcatggaccatggttactcatatttggctcagaataaatctctttaaatattttacagagtttgactctttttgttgacagactcttgtttattaaaatccttaatatactctcctatttttatcctactgttatgtaatttaaaaattacaatgcaaatgtcattcctagtaattaatatatattttgcacttcttagagccagcatattttgctcaaaagtcacttatctcttctctgtgtggttgtattatcactggcatatagagtcaggtccatctgttcccatttatcctctccacttcattcctattctgttacctcccacctccagccattakgtcaatcattttcagtgatttctaatttatccttcgagtgtaactttttttaagaataagcaaattatttcctcatttttctttcacaaaaggtaacat

SEQ ID NO: 332284 - DNA, 621 bp, Homo sapiens
attttaattactgaaattttttaaagccttcctcctataagcagcattcctaataaatcaatcaagttgtgagattgtttcaaccaagtccctctaaacatgtgtatctacatgcatgtgcatttattttctttttaaaaacatactactttttaaaaatttgttttattttgaaatcaaacctggaagttgcaaagggagtaggaggtcctatgcagccttcactcagtttttttcccaaagttacagcttacatgattatagaataatacaggagtgaagaagaaatcacttaggcagatagtgagggtatgggagtcctcggtaaagcttttcttttaatgaaaagcagcctcaaatcattttctaacaaagagcagcctgtaaagttgagctgcagacatagacaagctgggagcttacaagagtcaatkccagcaggaactactgactagacatgttcaagatggtggctccatcttcccttctctgccagccatgtgtatagtaaggagcagataagatggcaaccaccaaggggagagttcatttacaaaataagattagggtggggtgaccagccttcccccatgctatgtaaatgtcacatctgatccaacc

SEQ ID NO: 332285 - DNA, 610 bp, Homo sapiens
ttttgttgttatggtctaagccactaatatccagccatcctattgattacaattatatattcaaaataattacattgtaaaataactacctgagtactctaaaaagcaaagagattaaagtgaatttagarggacagttgaaagaaacaactcacacagggaagagtatccattctgtttgtctgtttttaaattttctctctctcacatttatttccattattatctagaaaaatcttaaatatctaaaaatattttgaatttaataataatgaatatataacactgaaattaatggtataaatctaaagcagtgtttgaaaaaattatcattttacatgtagcttttattaggaaaaaatggaaatttctaaatatcaatgccctcattgaaaatttcaagaaatctattttttgaaaagtctcctaaaatatgtaaatgtagcaaagtagtagtaagcaagggcaacgaacaaaaactattatgtttctaagtactagcaataaatgattacaaaccaaaatttaagccacaataacacttataataactccctccaaaatgaaataactacatgaatctaacaaccatgtataagatctatatgat

SEQ ID NO: 332286 - DNA, 610 bp, Homo sapiens
ttttgttgttatggtctaagccactaatatccagccatcctattgattacaattatatattcaaaataattacattgtaaaataactacctgagtactctaaaaagcaaagagattaaagtgaatttagaaggacagttgaaagaaacaactcacacagggaagagtatccattctgtttgtctgtttttaaattttctctctctcacatttatttccattattatctagaaaaatcttaaatatctaaaaatattttgaatttaataataatgaatatataacactgaaattaatggkataaatctaaagcagtgtttgaaaaaattatcattttacatgtagcttttattaggaaaaaatggaaatttctaaatatcaatgccctcattgaaaatttcaagaaatctattttttgaaaagtctcctaaaatatgtaaatgtagcaaagtagtagtaagcaagggcaacgaacaaaaactattatgtttctaagtactagcaataaatgattacaaaccaaaatttaagccacaataacacttataataactccctccaaaatgaaataactacatgaatctaacaaccatgtataagatctatatgat

SEQ ID NO: 332287 - DNA, 623 bp, Homo sapiens
agctctacctgcttccaaatattcttccctggggagcagctgtgagtcttactgaatcgatttattcattgcattctatgtgtcaactgcaatttagacctgggtgatagagtcatatatggtctttggacccatgaagctctgagtcaaggataycagcagatatccttaaactaataaaaaaagcgatggcatcacatgccattttgaacttttgcattaaagtcataaacttacatcagtattacgatttatacttttaagcaaaattttgccattttctgatacatagtagctagctagtgataaaattatgaagttaccattgtatgttccaatgacataaaaaactaagtgcctgcttgggctagttatactctgcagtataccctggtttattgtgaggattaaataaaaaatcctcacaaaccccaatttaatttaatatagattaattataaaaataatctacccatgttacataatgttaaatctgtagtttcaaggtgtatgctatttcttaaaacaaaaacaaagattgtccccactccaaacaataacagcaatggtgaaggttgtgggtggacagaggtagtcccactcatccccagggggctcagctg

SEQ ID NO: 332288 - DNA, 624 bp, Homo sapiens
tttctactggtgataattttttcagctttcatttcattaaaatatctttatttaaactgcatttttaaagaatagggttataggccgggcatgttggctcatgcctataatcccagcactttgggaggccaaggcaggtggatcacctgaggtcaggagttcaagaccagcctggccaacatggcgaagccccgtctctacaaaaatacaaaaattagctgggcatgatggcaggtgcctgtaatcccagctacttgggaggctggggcagaagaatcacttaaaccggggaggcggaggttgcagtgagccaagatygtgccattgcactccagcctaggtgacagagcgagactctgtctcaaataataataataaataataataataataataataacaacgttataaaatggtaaaagcacaaataagtactagatcttgataaggcaaggaggcataccataatttatagggtaattttttatatgtagcagtgaatgaacaggagacaaaatgttcataaaatacataaatacctgaacaacagaattaaccaagctgacctaggaaacaggtgcataattcttcatgaaaaaattacaaaatacaagcatgtggaaa

SEQ ID NO: 332289 - DNA, 624 bp, Homo sapiens
tttctactggtgataattttttcagctttcatttcattaaaatatctttatttaaactgcatttttaaagaatagggttataggccgggcatgttggctcatgcctataatcccagcactttgggaggccaaggcaggtggatcacctgaggtcaggagttcaagaccagcctggccaacatggcgaagccccgtctctacaaaaatacaaaaattagctgggcatgatggcaggtgcctgtaatcccagctacttgggaggctggggcagaagaatcacttaaaccggggaggcggaggttgcagtgagccaagatcgtgccattgcactccagcctaggtgacagagcgagactctgtctcaaataataataataaataataataataataataataayaacgttataaaatggtaaaagcacaaataagtactagatcttgataaggcaaggaggcataccataatttatagggtaattttttatatgtagcagtgaatgaacaggagacaaaatgttcataaaatacataaatacctgaacaacagaattaaccaagctgacctaggaaacaggtgcataattcttcatgaaaaaattacaaaatacaagcatgtggaaa

SEQ ID NO: 332290 - DNA, 582 bp, Homo sapiens
atttcttgcctttaataatgtgttggctcttctaggtcttttgycttttcacataaattttagaatcagtttgtagataaacacaaaatattttactgatattttgagtgtcactgagtttaaagtatatatcaaattggcaagaactgacattgtaacaatagtggatcttcctatctatgaacatggaatatctttttatttacttagatctttgatttttttaatcagagttttacagttttcctcatacagatattgcacatattttgttatatatttcatttttgttagtgtaatggcatttcattgttttcaaattacagttgtttattacaagtacataggaaagcaattgactttttaaaacaatttttaactataaatttaagttatacaacatgtttatacacatatatgtatatattaaaataactattgcaagtcaagcaaactaacatatctattatctcacatcattatctttcttttcccctccaccccatggtaagagcatgactcatggtaaaatgactcttcttgcaagtttttagcatataataccgtattattaactagagt

SEQ ID NO: 332291 - DNA, 526 bp, Homo sapiens
agctcagggaagtttggaagccctcccctactgcccaagaatactcctcattgcagttttaactgtggagcttgtccactctgaacttcttagcagtccctcaattataatttaaattatcctggtaatggctccagtagcaggcttctgctcctggtaagttgtgattctctgtatacacctatctgcctctacatttttggaagctgcagttttcccagtgacctcaattttctgatgggtctaagaaaagttgcggatttttttgttgttgatacaggcctgacaactgacaagttccgtagatgtcaaatagaaaccagaagatgtctcatatcttttttgtttgattgtccctgttactaccttcttttgtgtttcattatttatagaataccgtttaaatttccttctcatttcattttattaatatattttagttgttttcttggtggctaacctgagaactataattagaatttcaaactygtaagaaactagtttgaattgattccagcttagttat

SEQ ID NO: 332292 - DNA, 581 bp, Homo sapiens
agcagataataatagtggaagacatcaatactgcaccttcaatattgaatataaaaggcagaagatcaataagcagatagagcacttgaacaacactagatctatacaatatacacaggaccctccacccaacaacaggagaatacacatacttcacaagtacacatgaaacattcctccaggaagaccatatgtgtaaccacaaaagagtctcagtaagtataagaagatgaaaatgatataaagcagcttccataatctgagaaacaaaaatagatgyccctttatcaactaagatggaccccaaggttaagaaaacaaaaattagctatgagctaaaggttcagggctcagctggcatgtcaattccctaaatttctatggctacaaaaaacaaacaaacaaacaaaaaaaccacacacacacaccttgctaaactctttaacaacaagagctattagacaaattgccagactcccttcctaactctgatttacaacccagaccactaaaattctgactggatagagaatctgccttacaaatactccttcctgaaaggcaactgcagaccttaagcc

SEQ ID NO: 332293 - DNA, 586 bp, Homo sapiens
atggacagaattgaagagagaaatacacaacaaaaataccccacttttagtaatggacagaacaaccataaagatyagtatgtaaatagagaacctgaacaataccatagatcaacaggacctaaaagatgcacagaacactccacccaatatgacaaaatactttttcctaaagtgcacatggaacattctccagggtagaccatacgtaaagccacaaaacaaatatttataatgtaaaaggttgaaataatacaaagaatcttttccaatcaattttccgtttctaatttaatatgattaaattaaatactggaaaatccacatctattgattaaacaagatatccctaaacacaaaagggtcagagaagaaagcacaagggaaatttatgggattcagttaaagcagtgtttagaaggaaacttatagctataaatgcttacacaaggaataaacatttcaaatcaacctacctttacaacctagagaattagaaaaagaacaatttacacctatatatagcaacaggaaaataatttaaaagattacagcagagataaacaaaatagaggatagaaaaatt

SEQ ID NO: 332294 - DNA, 586 bp, Homo sapiens
atggacagaattgaagagagaaatacacaacaaaaataccccacttttagtaatggacagaacaaccataaagattagtatgtaaatagagaacctgaacaataccatagatcaacaggacctaaaagatgcacagaacactccacccaatatgacaaaatactttttcctaaagtgcacatggaacattctccagggtagaccatacrtaaagccacaaaacaaatatttataatgtaaaaggttgaaataatacaaagaatcttttccaatcaattttccgtttctaatttaatatgattaaattaaatactggaaaatccacatctattgattaaacaagatatccctaaacacaaaagggtcagagaagaaagcacaagggaaatttatgggattcagttaaagcagtgtttagaaggaaacttatagctataaatgcttacacaaggaataaacatttcaaatcaacctacctttacaacctagagaattagaaaaagaacaatttacacctatatatagcaacaggaaaataatttaaaagattacagcagagataaacaaaatagaggatagaaaaatt

SEQ ID NO: 332295 - DNA, 586 bp, Homo sapiens
atggacagaattgaagagagaaatacacaacaaaaataccccacttttagtaatggacagaacaaccataaagattagtatgtaaatagagaacctgaacaataccatagatcaacaggacctaaaagatgcacagaacactccacccaatatgacaaaatactttttcctaaagtgcacatggaacattctccagggtagaccatacgtaaagccacaaaacaaatatttataatgtaaaaggttgaaataatacaaagaatcttttccaatcaattttccgtttctaatttaatatgattaaattaaatactggaaaatccacatctattgattaaacaagatatccctaaacacaaaagggtcagagaagaaagcacaagggaaatttatgggattcagttaaagcagtgtttagaaggaaacttatagctataaatgcttacacaaggaataaacatttcaaatcaacmtacctttacaacctagagaattagaaaaagaacaatttacacctatatatagcaacaggaaaataatttaaaagattacagcagagataaacaaaatagaggatagaaaaatt

SEQ ID NO: 332296 - DNA, 514 bp, Homo sapiens
tgtagtatgctattaactagagtcagtttacccattctgttgttgattggaatttatttgtgctattattaacagtaattattaataattactattaattactaatagctgtgatattatgagtgtaattgcaagtcatcttattgttcatgttttcagaagaaatattttccttgaatatatatctataaatggaatggctaagttataggcctggcatattatactagctttagtagatattgctacacaatttttcatgtgcttgcatgattgtacttacgtcagtaatttatgagagatctagtttaagattatatgttaattaacatttagttaatcagctccatatgtyttgatatcttttgatgtaaatctaccaattttattgtttttcttcagtttaatttttgctctcctaggttgctatatttttagataaattttggaatcatctcataatttttacaaaatacatgtcagtgctttgatttgagtggagtttaatatatag

SEQ ID NO: 332297 - DNA, 593 bp, Homo sapiens
ttgacaaaaccaagtttctcaaattttttcttaatgttccaaggatattgtgtctgtccaagaaatctttgcttagatccaattcatgaagacctttttctgttttcttctagaaatgttgactttgtatcttgtggccttgctaaactcagtgatagttctaatagtttatttttgatttttaggatttttctttatatacctaatcatattccacaagaataaagacaattttacttttttcttaagatctatttgctcattatttctttttattgactcatgagactattgtatttagaaaactttaaacagaagtgttaagagtgggcatgctaatcttgttcccactatcagagccctcagactttcacaattaagtatgacactagttgtgggcttttcataaatgccattaatcaggttgacaaaggaaattgtttcctatttattttgatttttawtcgtaaatcaggttgaatttttcctaatgtcttttacacccgaattgagatgatcacatggtttgtatcttttattatgtttttatgatgcattgattgattgacatatgttaaagcaaccttacataa

SEQ ID NO: 332298 - DNA, 599 bp, Homo sapiens
ctagtgtcgaactcctgacctcaggtgacccacccacctcagcctcctaaagtgctgggattacaggcctgagtcaccgygcccggcctctgtgttttttaatagcattttggattccgcatttaggtccatgatccattttgagttgatttttctgtttggtgtgagaaaaaggttgatgatcattttttaccataaagatatcatatcttaatgatccagtaccatttattgaagatacttttcttcctctattaaaatgccatgttgcctctggcaaaaattcagctgactgcaattttgtacatttaattatgctccattcatctatgtctgttatttgaacaatactgaagtatcttgattactgtagctttatagtaactattgaaatcacataggataatcctccagctttgtttttattttaaagattgcttttttccctgttttttgaattattgtatgcattttagaattaacatatcaatttctacaaagagttcaactgtaatttgaattgatttcattgactctaaagacaaaattaattgttatctcaaatatatttagtcttctaaatagtgaacatgttgatt

SEQ ID NO: 332299 - DNA, 599 bp, Homo sapiens
ctagtgtcgaactcctgacctcaggtgacccacccacctcagcctcctaaagtgctgggattacaggcctgagtcaccgcgcccggcctctgtgttttttaatagcattttggattccgcatttaggtccatgatccattttgagttgatttttctgtttggtgtgagaaaaaggttgatgatcattttttaccataaagatatcatatcttaatgatccagtaccatttattgaagatacttttcttcctctattaaaatgccatgttgcctctggcaaaaattcagctgactgcaattttgtrcatttaattatgctccattcatctatgtctgttatttgaacaatactgaagtatcttgattactgtagctttatagtaactattgaaatcacataggataatcctccagctttgtttttattttaaagattgcttttttccctgttttttgaattattgtatgcattttagaattaacatatcaatttctacaaagagttcaactgtaatttgaattgatttcattgactctaaagacaaaattaattgttatctcaaatatatttagtcttctaaatagtgaacatgttgatt

SEQ ID NO: 332300 - DNA, 527 bp, Homo sapiens
taacaccacttggacaccaccaagatttgttgcttgtattcttacaatcagtgactcaagtcctgtctggggcctccttcagcaacacctgggtgactgaggagccctgtgccagaatgcagggaacagagacctgagacttccctgggaagcaagcctcgatgtcctgagggcccactaggcctctcttttcacatatttccttctcccagaccttggcactctgggcctgtgatgcgaggagtgacactctgggcctgtgatgagaggactgttttagcaacagtcccacttctcaaaatcaattttctatcttagtccactctgtgctgctataatagaatatctgagactttgtaatttataaagaacagaaatgtatttctcacagttctggagcatggaaagtccaggatcaaggtattgacatctggtgagggccttctcattgtgtaaycttatgatggaagtgcaaagagagggcgtgagacagagagagaaacagagacaaaggggccaaactcaga

SEQ ID NO: 332301 - DNA, 598 bp, Homo sapiens
atcaagatcatccaggaaaacatgacctcatcaaatgaactaaatagggcaccggtgatcaatcttgggaaacagatgtgtaacctttcagatggagaattcataatagctattttgaggaagcttaacagaattcaagataacacagagaaggaattcagaatcctgtcagataaatttaacaaagaaattgaaataattaaaaagcatcaagcagaagttctggagctgaaaaatgcaattgatatattgaagaatgcatcagagactcttaacagcagaatttatcaggcaaaataaagaattagtgagcttcaaggtaggctatttggaaatacacagtcagaaaagacaaaagasaaaaagatgaagcatgtctagaagatctagaaaatagcctctaaagggcaaatctaagagttattggccttaaggagaagggagagtgagaggttggggtacaaaggttattcaaagggatggtaacagagaagtttccaaacctagaaaaaggtatcagtattcaaggacaagaaaggtatagaacaccaagcaactttaacccaggtgagactacctcaagacatttaatagtcaa

SEQ ID NO: 332302 - DNA, 543 bp, Homo sapiens
tatacaataatagctggagactttaacaccctactttcagtgcagcattggacaaattatccagacagaaaatcaacaaagaaatatcaggcttaatctctactatacaacaaatgaacctaatagccatattcacagaacatttcatcccacagttgcagaatacacattcttctyctcagctcatggataatcctcaaagataggccatatgttaggccacaaatcaaatctttaaaaagtcaaaaaattgaaattatatcaagtatcttctctgaccacaatggaataaaactagaaatgaataacaagaggaattttgaaactatatgaacacctggaaattaaacaatatgctcctgaatgaccagtggctcaatgaagaaattaagaaggaaattttaaaatgtcttgaaacaaatgaaaatggaaacctgatgtacctaaacctgtgggatacagcaaaagcagtacagggaagtttattgcaataggcacctacatcaacaaaagcagaaaaacttcaaattagcaacctattga

SEQ ID NO: 332303 - DNA, 543 bp, Homo sapiens
tatacaataatagctggagactttaacaccctactttcagtgcagcattggacaaattatccagacagaaaatcaacaaagaaatatcaggcttaatctctactatacaacaaatgaacctaatagccatattcacagaacatttcatcccacagttgcagaatacacattcttctcctcagctcatggataatcctcaaagatagrccatatgttaggccacaaatcaaatctttaaaaagtcaaaaaattgaaattatatcaagtatcttctctgaccacaatggaataaaactagaaatgaataacaagaggaattttgaaactatatgaacacctggaaattaaacaatatgctcctgaatgaccagtggctcaatgaagaaattaagaaggaaattttaaaatgtcttgaaacaaatgaaaatggaaacctgatgtacctaaacctgtgggatacagcaaaagcagtacagggaagtttattgcaataggcacctacatcaacaaaagcagaaaaacttcaaattagcaacctattga

SEQ ID NO: 332304 - DNA, 584 bp, Homo sapiens
aaacaaatgaaaatggaaacctgatgtacctaaacctgtgggatacagcraaagcagtacagggaagtttattgcaataggcacctacatcaacaaaagcagaaaaacttcaaattagcaacctattgatacatcttaaagaactagaaaaacaagggcaaaccaaaccccaaattagtagaaggaataaagatcagagcagaaataaatgaaataaaaaaaatacaaaaatcaatgaaatgaaaagttatttttaaaaaagataaacaaaatcaacaaacctttagccagactaagaaaaaaagaagataaaataaatgaaaataaaatcagataaaacagtagacattgcgtctgctgccatggaaattcaaaggatcattagaggcttctaggagcaactatatgccaataaattggaaaacctagaagacattcccagacagatacagcctaccaagattgaactatgaaaaaatctaacaactgaggagaccaataacaactactgagattgaagctgtaataaaacaggtcacttcagccaggcctgggaagttctgaattcatttacccaacataag

SEQ ID NO: 332305 - DNA, 558 bp, Homo sapiens
tgcacgttcctgatactgaaagttttaaaactacatttggccctatgtcacaaaggaagcaaccaaatttatttgcaagtgatatgcagtcttttctagaaaatgctgaaatgtccactgagagctagaccagtttctagaaaagatcatgagtcagtaactgaagacactggtgggataaatgaagcacaagaagagacatgtaaaaagggacagtccaaaggaatataggatgagctctccagggttatagattcaccagatgttgtagttctggttgctggctagagatccartgggtacccgttcccgtcacattgagccttgagccatacttgaaaaagaataaaccctgggaacacgttatgtttgtacataacaaatgtgaccttgttgcaacctgggcaacaaaatgatgggttgctgtcctctccttggattagccaacacttgctttccatgcaagtcttactgacccctttcgcaaaggagcatttattcagcttctgtggcagtttggaaagttgtacactgacaagaaacagatgagtgttgggt

SEQ ID NO: 332306 - DNA, 496 bp, Homo sapiens
gggagcagaagcaagagatgatgaagagtcttactaggaatctgaggaagaacatatggaaaaatcacaccaaagccattattaaagctctagatgagaatattgctaaatatcagaagtttttagacaaagctaaagctaaaaagttttcaggagtcagaatatccaaggtactaagtgaaaagatayttgaaaaacatgaagagcagagaaaaatatctgaagaagatgcagatgctacacagcatttaccaaaaaaggaaataagcagaacacagagggaagaggaatattcaagtaaaacttgcaggatgcttacatctaaggaatggaagtgagcagtacagcagcaacaatccaaaaaaatttgtgtgcactactatgaaacacacaatgtgaaaaatacaagcgggaacaaaaagaagaccaatgactcagagggactgaagcagaaacacaaaaattcagatattagcagtaacgtttaaaaggttgt

SEQ ID NO: 332307 - DNA, 547 bp, Homo sapiens
tgctacacagcatttaccaaaaaaggaaataagcagaacacagagggaagaggaatattcaagtaaaacttgcaggatgcttacatctaaggaatggaagtgagcagtacagcagcaacaatccaaaaaaatttgtgtgcactactatgaaacacacaatgtgaaaaatacaagygggaacaaaaagaagaccaatgactcagagggactgaagcagaaacacaaaaattcagatattagcagtaacgtttaaaaggttgtgtattatacaaaaatatgcaaaaaaagagaaatcattgtaaaatgcagtatcctgaagcttttccccagtgtcatcttctaaatgttctacagttttagctcttaagtccttgattcattttgagttaatttttgtatatggtctaagaatccaacttcatttagttgtctgtgtatatccagttttcccaataccattgggtgaaaaaaattgttctttccccattgaatgatcttggcatcctttgtgaaaatcatttgtccctgtatgcaaggatttattact

SEQ ID NO: 332308 - DNA, 547 bp, Homo sapiens
tgctacacagcatttaccaaaaaaggaaataagcagaacacagagggaagaggaatattcaagtaaaacttgcaggatgcttacatctaaggaatggaagtgagcagtacagcagcaacaatccaaaaaaatttgtgtgcactactatgaaacacacaatgtgaaaaatacaagcgggaacaaaaagaagaccaatgactcagagggactgaagcagaaacacaaaaattcagatattagcagtaacgtttaaaaggttgtgtattatacaaaaatatgcaaaaaaagagaaatcattgtaaaatgcagtatcctgaagcttttccccagtgtcatcttctaaatgttctacagttttagctcttaagtccttgattcattttgagttaatttttgtatatggtctaagaatccaacttcatttagttgtctktgtatatccagttttcccaataccattgggtgaaaaaaattgttctttccccattgaatgatcttggcatcctttgtgaaaatcatttgtccctgtatgcaaggatttattact

SEQ ID NO: 332309 - DNA, 568 bp, Homo sapiens
cactatgaatgcctacttctcttttcaaatttgaagcatctctgttagcctcagggagtccatcttgcttggagagtctttccacagttttattttacacaatcgttacttttatgatttttaaaattaatttcttaattttaatattaaatgttttacattatggttagtgcattttcctttttaagaaattatttcctatccaaagttcataacttttttttgtactttatcatgttttttatgtcaatactgattagtcacaaatccttctttgtctctttgtttaaagagttggctaattttgtactttaaatttaaataacattttaacatttttccccagttctacttaacagagaaaaaatattttagtatgtatactaggaaggagtgctacacataggaactatatgatgttrcacatgtcatactgtgacggtttattaattctaagaatagtaactagaaagtcatatttatttaagcttgtatttagatgattttatgctggtgtcatttctatttttgataatcaatataaagcatatgtgtaaagactgcatgc

SEQ ID NO: 332310 - DNA, 492 bp, Homo sapiens
tcacaaatccttctttgtctctttgtttaaagagttggctaattttgtactttaaatttaaataacattttaacatttttccccagttctacttaacagagaaaaaatattttagtatgtatactaggaaggagtgctacacataggaactatatgatgttacacatgtcatactgtgacggtttattaattctaagaatagtaactagaaagtcatatttatttaagcttgtatttagatgattttatgctggtgtcatttctatttttgataatcaatataaagcatatgtgtaaagactgcatgcagatttctcttctgcatgtgtaatgatttaacacttttagtatctttgctcaacatttccatatttgttcttcaataaatattaaggtgtgctttgagagaaaatgtgccataatcaacacacwtttgagaaacatcattggaagcttactgtgtacattaccaattcaaatactgttgttatc

SEQ ID NO: 332311 - DNA, 455 bp, Homo sapiens
ttataagccattatcttcagttattcagtggtttattaaatgcaaagtatatatttgaaatattaacataataaattattatgccaaaattaatcatattttacaaaaaaatgtgtcatcattttaatcaaatactgtatgtccaaatgttttatgaggatgaaaatcctctagtctttatccattaatgccaaacctacatatgattctaaaatatttctagtatcactgcattttaaaaatagtttcaaatatactgttttcaggttagcccaaaagattttccaggatttttcagaaatattctgttttatctttactatatgttcactagatccaggccaccatattcttgtataawaactttaatttcagtttgtttctttcttttgatttaaatttataggattttattcattctagtttcacctttcacagtttaaagccatatttaa

SEQ ID NO: 332312 - DNA, 582 bp, Homo sapiens
agcaaaaacgtgcttataagccattatcttcagttattcagtggtttattaaatgcaaagtatatatttgaaatattaacataataaattattatgccaaaattaatcatattttacaaaaaaatgtgtcatcattttaatcaaatactgtatgtccaaatgttttatgaggatgaaaatcctctagtctttatccattaatgccaaacctacatatgattctaaaatatttctagtatcactgcattttaaaaatagtttcaaatatactgttttcaggttagcccaaaagattttccaggatttttcagaaatattctgttttatctttactatatgttcactagatccaggccaccatattcttgtataataactttaatttyagtttgtttctttcttttgatttaaatttataggattttattcattctagtttcacctttcacagtttaaagccatatttaaagcctgtggtcttattgcaatttttagcctctttaatataaggcctagttccaaccaccctgtggattttttaatatagttcagtgtgactatcttaaacttttcagttttaag

SEQ ID NO: 332313 - DNA, 497 bp, Homo sapiens
cacttatagtttcataacctagatgtcagcagtgttaacattttggtaaatttcctactttagtgtgacttttttattcatgctataggtaccatatgtagtgagtattttccttaatattatgatatatatatttccatactattttattcacttcrttaacataattttatcactataatatttcatacatttcagcaaaaaaactataatatggtctattagtctgttctcacactgctaataaagacatgcccaagactgggtaatttataaaggagaggtttgactcacagttccacatggctgaggaagcctcacagtcatggcagaaggcaaatgaggagtaaagtcacgtcttgcatggtggcaggcaagagaacatgagcaggggaactcccatttataaaaccatcagatcttgtgaggcttactaccaggagaacagtatgggggaaactgcttccatgattcaattatccccacctggccccacc

SEQ ID NO: 332314 - DNA, 589 bp, Homo sapiens
ctgaactccagtttcaaatccagttcttggtgactctaaagcctgggctctctctattgcaacacaatttctctactgacatgggaataacattatgatgaaaacatccccactcaactggccagggctgtggatccaagcattactcggtcctggtcagaaattttctctcgagtgtaggagtttggataaagaggtggacaccttcatgataaaagtggtcatcatggatgaaaatgaaggttaggcattatttacatgaggaaaatgtgacgtcttgctaggacaagtgtgatgatgactgggcctggtgagctaggaatggctcagtgtgtgtccgtcattacagagaggagcacttttatatccccagtgcctagctccatgtggarcacactgtgttttgtgtaaatattcattcagtgaataaatgcatgaatgaagagcctaatggtagtgatagctttggattaaaaggaaaataaaaataaaaacacaattaaaggtgttggaacacccacatataatgagatgtaaaaatttcattcatcagaattttatttgttccgtctgtgttaaaaggcattac

SEQ ID NO: 332315 - DNA, 546 bp, Homo sapiens
taacctaaacaaactccagatagagaatgagaagcaaatcaaatagggaaccaaatagagttgagtgaaaaccaattaggaacaaattgaggagctcctttctgcatcacaaaggctgcctttgytctggaatgccaaggatgcacaggggctggaggcctccaggtggaaagaagacacaccctcctctgggagtacaaaggagcatcaggagtggatgcatccatcctgagctctcttagagatacaagctgccacagccttcgttgtcctgaaaaggaaattaacggaaaaccagaacctctgttaaccacattgaggacacttaagattaagagtttgtccgcttatttttaggatatgatatatttgtcttccttacaaaacctgaagctccataaaaactaagctatgcctgttctggttcactgtagtattgccagcatttagcctgtgttcctcaaagaccatctattgtaatatcctcctatgacacaagaagctgctgaggcttaaagaatcaaaggatcttcctgagatcacact

SEQ ID NO: 332316 - DNA, 546 bp, Homo sapiens
taacctaaacaaactccagatagagaatgagaagcaaatcaaatagggaaccaaatagagttgagtgaaaaccaattaggaacaaattgaggagctcctttctgcatcacaaaggctgcctttgttctggaatgccaaggatgcacaggggctggaggcctccaggtggaaagaagacacaccctcctctgggagtacaaaggagcatcaggagtggatgcatccatcctgagctctcttagagatacaagctgccrcagccttcgttgtcctgaaaaggaaattaacggaaaaccagaacctctgttaaccacattgaggacacttaagattaagagtttgtccgcttatttttaggatatgatatatttgtcttccttacaaaacctgaagctccataaaaactaagctatgcctgttctggttcactgtagtattgccagcatttagcctgtgttcctcaaagaccatctattgtaatatcctcctatgacacaagaagctgctgaggcttaaagaatcaaaggatcttcctgagatcacact

SEQ ID NO: 332317 - DNA, 565 bp, Homo sapiens
aggaggtggtttcaggagagaggaggtggtgtgaagagtttccttggagagtgggaagcacttatggaaatgttacatgattgttcaggagatacaagtgaatatttgaggctcaaggtcataaatgtgaagtgaaaccattaggcatggtagtgtgttgttctccagccacactcagatctgtgagaagagatatggagttaataggagagctggattcaacsaaggcaaaagacagatgcttcaccaaggagatatatgcatggcaaataaaggcataaaatgatgttcaacatcagtaacctttaggaaaatacaaattaataacacaaagagatactactacacaccttttaatatggctaaaatacaaaatattgatagtttcaaatattggtcacgatttggagaaattggatgttttataccctgccagtgagagagtaaaatggtagagctactctgaaaaactcttgcattaaaaaaaattaaacatagaatatttgacatacaactcagcaattcaattatgaaatttatcctagagactagaaaactatattca

SEQ ID NO: 332318 - DNA, 574 bp, Homo sapiens
gctctgtcaaaaggaattactgatatgtgaccaagtacctgaggttgaccactaatgtgcctttgaaatgaggctcaatgtggctttgctgagcatctaraaaatttttgtatgcagtgtcggggtagggtgtggatctgaactgaatttctcagcaatatagaagaggaaagaataagtgagggtgagatcggagtgccaccgaagggggacttctaagtgttctgctgggtatacacaatgcagacccactcgattttgtcacacagaagatttttggtagagtttttttgttgatagaaacaatgtttgagaggagtccacaaggggaaataggagttcagggcttggagcgtaaagacagatgttgatgtagatgtcaactggtgaaagggggctagcttatatcttggttaagatgcaaaggagctggaggcctctaagtggaaagaagacacatcctccactgggagtacagaggagcatcaggagtgaatgcatccatcatgagctctcttggagagaaaagctgccacagtgttggttggcctgaaaaggaaatgggaggaaaact

SEQ ID NO: 332319 - DNA, 649 bp, Homo sapiens
cttgttcactgtagtatcaccaacattcagcttgtattcctcaaagaccatctattgtaataccctcatataatacgccaagtagctgaggcttaaagaatcaaaggattttcctgagattgcaccacgaagagcagatccagcacagcccctcatccctggagccctgcatgagcattctctattgctctctaccccatcattcattatttctgaggagtttctgaaaaatctttgggtgagaacagaatctgctagataatcaggggctttagaatctactagattgccccaatatctattctccttttcagtcatatcactattctggactcgaaaagcagcacaaggacccacatcccagttttctttgatgctggatgacatcgtatgatcaggttctggtcaatgggaggtgagccaatgtgatgtaagaaagtyctggctcacaggatcaatagaaggagcatagcctccccttcccctctaaatctaagttcttctccataaggctggaatgctgatgtaactgacaaccatgtaataccacaaggatgagggcacctctctagacattggggagcagcaatttttggagtcctaatgcctgatgccttggagcctccaactcaggtcttaaatacagtca

SEQ ID NO: 332320 - DNA, 559 bp, Homo sapiens
caattttcttatataaaatgacatagtatttggatataacatatgcactttctcctttatactttaaatcattagtagatcacttataatacctaataaaatataaatgctatgtaaataattgttatactgctcatttaggaaataataaaaaggaaaaaataagtctgtacctgttcagtacctatacaattcctgccatatgctgctcttttggaatgttttctatctctggtttgttaaatttgcagattcaggacctactgacatggagggacaactttgttttcttgtcyaagatatttctactttgggtctctattagagaaaccaaacttacactctaaccaaaagaaatgttttctctttttgaaaattacacttcatttcctaggcatttttgatgaatgcatatatttctccataatactgaaacttgaacaagaatttttaaacagaaaaataactgtaatagagctgagatgagacatgatttaatgacgtttaaataaagaaaaccttaggaaggaggaggatatagaaaggtggaaggacagtc

SEQ ID NO: 332321 - DNA, 575 bp, Homo sapiens
aagcccttgcctccaggcaaacccaattcagcatctggaaatcccaggatatgtagggaagtaggatgtrcaagtgctagaatgggaagaacactcccctagtttaagggatttgggattctcaagctgactgcatggccaacatggatcacatgctcattccaggcaagccaagcagatagtgaggttatgggattgcccctgtctgaaactgtgccatttgtgcatttgtgctcaggtatctcttttcagaatatgtgggtaaagtgtgactttaccataaccatggactgaagataaatagtgttgtgatccagaccacctgagaaatttacgtctctacacagtgactataatcacagtaagcatatgttcttctcacccatgtggaagcgacctagaatccaaagagactgctctgatgcttgttctgtatgacggtgtggtatcagctgggcaccatttttgtcaatgtaccaatgctcactatagatacagatggcatttgtttgctgttatctagcagttacagtagagtataaaaaaagaaatctcaatgctcatgcccatcatat

SEQ ID NO: 332322 - DNA, 667 bp, Homo sapiens
cagttttgtaattaatgacatcacaaaacgaataggctgaatcttacaacagccctcggtctataatctaacatcataccaatgtacaattcctgaaaagattttcaagaggccttgcagttgcttaggcaacaggcattgcagaactacctactaccattacctgtgttccagcagaagaagcccttgcctccaggcaaacccaattcagcatctggaaatcccaggatatgtagggaagtaggatgtacaagtgctagaatgggaagaacactcccctagtttaagggatttgggattctcaagctgactgcatggccaacatggatcacatgctcattccaggcaagccaagcagatagtgaggttatgggattgcccctgtctgaaactgtgccatttgtgcatttgtgctcaggtatctcttttcagaatatgtgggtaaagtgtgactttaccataaccatggactgaagataaatagtrttgtgatccagaccacctgagaaatttacgtctctacacagtgactataatcacagtaagcatatgttcttctcacccatgtggaagcgacctagaatccaaagagactgctctgatgcttgttctgtatgacggtgtggtatcagctgggcaccatttttgtcaatgtaccaatgctcac

SEQ ID NO: 332323 - DNA, 574 bp, Homo sapiens
tcctgctgtgtttttcagctccatcagttcatttatgttcttctctaaactggttattctagttagcaattcctctaactttttttttctttcaaagttcttagcttccttgcattgggttagaacatgctcctttagctcagaggagtttattacccaccttctgaagcctacttctgccaattcgtcaaactcattgtccagttttgttcccttgctggcgaggagttgtgatcctttggaggcaaagasgtgttctggattttggaattttcagcgtttttgcactggtttttcctcatcttcatggattgatctacctttggtctttgatgttggtgatcttcagatggggtttctgtgtggacatcctttttgttgatgttgatgtgatttatttctgtagtttagtttttcttctaacagtcaggcccctctactgcaggtctgctgtagtttgctggaggtccactccagagcctgttttcctgggtatcaccagtggaggctgcagaatagaaaagattgctgtctgttccttcctctggaagcttcttcccaaaaaagtacccac

SEQ ID NO: 332324 - DNA, 510 bp, Homo sapiens
aacagtgattagaggggtttgggaagaagaatagtgtgggtgtggcagtagggggaacccaggggaaatcttctgtggtgaagaaacacttctatattcaatgtcgttctggttatatgatctacacatgtgacaaaatgttatggaatgaaacatagagaaatatctcactccaaaaatgagtgcatgcaaacactggtaaaatttggtaagatcgtactgtagatatttggtgaartctcataagatttgtagtgtagataattggatggtaccaatgtcattttcctggttttgataatacattcaattaaaaagtcagtattactgtgggttggttgatgggcatacaggaactctctgtactattttagtaacttcttaatagtctacaattaattctgaatgaaaacttaaaaacaactgagagactggtttgttgtgtggactcactccaagaatattgaagtcaccaagaatgaggacatggggtatgctggaagggagttt

SEQ ID NO: 332325 - DNA, 510 bp, Homo sapiens
aacagtgattagaggggtttgggaagaagaatagtgtgggtgtggcagtagggggaacccaggggaaatcttctgtggtgaagaaacacttctatattcaatgtcgttctggttatatgatctacacatgtgacaaaatgttatggaatgaaacatagagaaatatctcactccaaaaatgagtgcatgcaaacactggtaaaatttggtaagatcgtactgtagatatttggtgaagtctcataagatttgtagtgtagataattggatggtaccaatgtcattttcctggttttgataatacattcaattaaaaagtcagtattactgtgggttggttgatgggcatacaggaactctctgtactattttagtaacttcttaatagtctacaattaattctgaatgaaaacttaaaaacaactgagagactggtttgttgtgtggactsactccaagaatattgaagtcaccaagaatgaggacatggggtatgctggaagggagttt

SEQ ID NO: 332326 - DNA, 585 bp, Homo sapiens
caggatttaaaaatgtcaagtcactatagaaattacgttacaaagaggttctagacaacacagaatttgaataggaattttgggacatccatatcaaggctatgcagagtttagatttaaattttgatgtgacwattacaatggtgaatttaattcaaagattaactatctcccctactcccaatgtgggccttttgcaggtaaaaatgctgctccagagaaggggctgcattccattgcttctctcttctcccctaacccccacacttttttttgtatttttatccatgccttctgaccctggagggctggacatatccctgtgaggagggtgaggagagaagggaattgactttgtggcttgtcctgttggcctgacctgcctggccctctctggactttatattattatagagctcactcctatgaatatcacaaaactaacagcaagccctatcacttcaaggccacagaagatgatgctcattattcagagcactccagccttatgattctatataagaggaatattgccaccatgaccaaaatacatggagtgggagacacaaggaataaaactcatgt

SEQ ID NO: 332327 - DNA, 338 bp, Homo sapiens
gtctggattggacctccagcaaactgcagccgacctgcagaagagaggcctgactgttagaagaccaactagcaaacagaaagcaataacatcaacatcaactaaaaagacccccacacaaaaaccccacccaaaggttatcggcctaaaagatcaaatgtagataaatccagaaatatgaagaataagcagtgcaaaaataytgaaaattccaaaaaccagaatgccttttctcctccaaatgttagaagctcctctccagcaaagacacaaaactgcatggagaatgagactgatgaattgacagaagtaggcttcaaaagatgggtaataacaaa

SEQ ID NO: 332328 - DNA, 338 bp, Homo sapiens
gtctggattggacctccagcaaactgcagccgacctgcagaagagaggcctgactgttagaagaccaactagcaaacagaaagcaataacatcaacatcaactaaaaagacccccacacaaaaaccccacccaaaggttatcggcctaaaagatcaaatgtagataaatccagaaatatgaagaataagcagtgcaaaaatattgaaaattccaaaaaccagaatgccttttctcctccaaatgttagaagctcctctcmagcaaagacacaaaactgcatggagaatgagactgatgaattgacagaagtaggcttcaaaagatgggtaataacaaa

SEQ ID NO: 332329 - DNA, 396 bp, Homo sapiens
acaaaaatgaaagcacaatgtaagttattagaacacccatgtttaattaggtacagaaaatttcattcatcagaattctatttgtggacagctctatctgtgttgagaagaatgattgatgagtgcccaaaacctgaaattgaccactgatgtgcctttaaaataaggactcagtgtggctttgccgaacccctagaagmattttgtacacagtgttttgggtagggtgtgggtctgagctgaattgctcagcaatagaacagaggaaagagtaagtgagggtgagcctgagtgccactgcagcaggtaattaaagtgtgggaatatctgtggggcactactgagtattctgctgagtatacacaatataaacctatttcattctttctttcagga

SEQ ID NO: 332330 - DNA, 563 bp, Homo sapiens
tgctaatgtcaattatagtatctggataataacttacagttggtatagaattctaatacatgctgtgacatagakgaacctgaaaacattgtgctaaggaaaataagccaaaccaaagaacaatattgtaagttcaaattttatgagatattgaaactaggaaatttgtgaacacagaaaataagttaggaggagcctggtgctggatgatggagggaatgtgtagccattagttaatgagcaaagactttctgtgtggaataatgcaaagttcttaaaggggacagtggtaatggttacaacttattggaatatacttaatgaaacagaattttacaactaaaatagttgaagttgtaaaatgtatgttatgtaaattttacaattaaaaacatttaattataaacacaggatcagtacaaaattcagaactattctccaccagtgattatcccttccacagataactcaagcagacagaagagaccaccaagagatgtgacatcacagtaggctctgtgctgctcttagacagtgaggctgcccctcagattgaccctcac

SEQ ID NO: 332331 - DNA, 563 bp, Homo sapiens
tgctaatgtcaattatagtatctggataataacttacagttggtatagaattctaatacatgctgtgacatagatgaacctgaaaacattgtgctaaggaaaataagccaaacsaaagaacaatattgtaagttcaaattttatgagatattgaaactaggaaatttgtgaacacagaaaataagttaggaggagcctggtgctggatgatggagggaatgtgtagccattagttaatgagcaaagactttctgtgtggaataatgcaaagttcttaaaggggacagtggtaatggttacaacttattggaatatacttaatgaaacagaattttacaactaaaatagttgaagttgtaaaatgtatgttatgtaaattttacaattaaaaacatttaattataaacacaggatcagtacaaaattcagaactattctccaccagtgattatcccttccacagataactcaagcagacagaagagaccaccaagagatgtgacatcacagtaggctctgtgctgctcttagacagtgaggctgcccctcagattgaccctcac

SEQ ID NO: 332332 - DNA, 372 bp, Homo sapiens
atagacaatgattgatagatatgctttcagacagagtagaattctatatgccgaaccctacacaaaggattgttctacagcctagttctattgtagtgaattaattctaggtaaaattgaaatactcatgttacaaatgtatccttttttatgcatactgattaacagatattttcaattaatctatctacttacactcctgaatatatcattaagtgggctttacatagcaatatctctcactttttctactgtttgttgtataaatatatactgagcatcttttattctctagcktgcatgctagacacttgggagtcaaagtaaacatacccacattcacagagctcctagcctgtgaaggaaggacac

SEQ ID NO: 332333 - DNA, 596 bp, Homo sapiens
taagcagaagtgaggttatgggattgccccagtcatttgtgcatttgtgctcaggtatctcttttcagaacatgtgggtaaagtgtgactttaccataaccatggactgaagattactagtgttgtgatccaggttgcctgagaaattcatgtcactacacagcgaccagtaagcatatgttcttcccacctatgtggaagcgacctagaatccaaagagactgctctgatgcttgttctgtatgacggtgtggtatcatttgggcacaattagtgtcaatgtatcaatgctggctatagatatagacgacatttgtttgctgttatctagcagttacagcagagtatagaagaagaaatctcaatgctcaygcccatcatattggtccaaatttttctgaaaccttgcaggatgaaaacacaaggaaggagagcagagacagagcagatctcattcctgagtgtgtatgtagcagtgagtggatcatggaaggctttgtgtaataggtagaattttaactgatgactacaattgacccagcattattattatgattgtaccctctgtagattttgccagtcacttaaatgtttgt

SEQ ID NO: 332334 - DNA, 596 bp, Homo sapiens
taagcagaagtgaggttatgggattgccccagtcatttgtgcatttgtgctcaggtatctcttttcagaacatgtgggtaaagtgtgactttaccataaccatggactgaagattactagtgttgtgatccaggttgcctgagaaattcatgtcactacacagcgaccagtaagcatatgttcttcccacctatgtggaagcgacctagaatccaaagagactgctctgatgcttgttctgtatgacggtgtggtatcatttgggcacaattagtgtcaatgtatcaatgctggctatagatatagacgacatttgtttgctgttatctagcagttacagcagagtatagaagaagaaatctcaatgctcatgcccatcatattggtccaaatttttctgaaaccttgcaggatgaaaacacaaggaaggagagcagagacagagcagatctcattcctgagtgtgtatgtagcagtgagtggatcatggaaggctttgtgtaataggtagaattttaactgatgactacaattgacccagcattattattatgattgtaccctctgtarattttgccagtcacttaaatgtttgt

SEQ ID NO: 332335 - DNA, 593 bp, Homo sapiens
aatctcaatgctcatgcccatcatattggtccaaatttttctgaaaccttgcaggatgaaaacacaaggaaggagagcagagacagagcagatctcattcctgagtgtgtatgtagcagtgagtggatcatggaaggctttgtgtaataggtagaattttaactgatgactacaattgacccagcattattattatgattgtaccctctgtagattttgccagtcacttaaatgtttrtattgggcaaggattggtaaataggatctggactaatggaaatggcagaagagataatttacagtggctctgttaataaaagcacagagtttttttagggaatggtgaataattcacaccagagttttattccttgtgtcaccctgtgtatttggtcatgatggcaagatccctcttaaatagaatcacaagactggagtgctctgaataatgagcatcatctttcgtgaccttgaagtgatagagcttgatgttagttttgtgatattcataggagtgaactctataataatgtaaagtccagagagggccaggcaagtcaggccaacaggacatgccacaaagtcaatgccat

SEQ ID NO: 332336 - DNA, 656 bp, Homo sapiens
ccagtacatgtaaaagttatgcttatactatattgtagtctattgagtgcgcaatgacattatgtctaaagcaatctacatgcattacttaaaaaatccttttttactaggaaatggtaaccatcatcagaacctttatcaagccaaacgctttgctgctggagggtcttgcttgatattgatggctgctgaagtggctgctgaaggtaagacaggctgtgccaatatcttaaaacaagacaacagtgaagtttgccacgtcgattgactcatccttttatgaaagattttaatgtagcatgcaatgctgtttgatagcattttatacacagtagaacttcttttaaaatggaagtcagttctctcaaaccttgccactgtttttatcaagcaagttgaataagatggaatgtgatgggagaggcttatatatattggatatgggacagaggccaagaatcatctcaggtagggtttgtgtctccaatatctctggcygctgatttgtccatagtcctcatacaagaaataacaagtctgtccagcatcttcataagcctggattgaccaccagctttgactccagctcctgtaggcatctcctgaattaagcaacacagaagagtcctctgaagtcactgaatcccagaaaggcc

SEQ ID NO: 332337 - DNA, 581 bp, Homo sapiens
tgaattatagacttgtaatattggaagggacctcaaaatttctttttgcacaccttataagttcatatagaggtatatctaaaccagccaatatggtttagccattgtctaaaccaatggattccaaagccttgatcatcagaaataccagaacttgaaaaaaagagactcctaagtcacacttctggagttttggttaaggagatttaagacaggacctgggaaatggcatttaaaaactgctatgtgatttccatcccagatagatctgggaaccactggttgagaggaagactttcaaatgttcattacttcaatttaaacttcacttaractttgtgtcgatgtcgatgttgagatcacttttgtaatttcaggtcaggtgctccagaagcagaatccaaggtgaggaatcatatgcatgtgacttgttaaggagtgccctcaggggaagcctgtaagggagtggggaaaagaggacagggaaggggacaaaaactgggcagaaatatgatttcagaaaagtctagcttcagctggctcctgtaggcagccctgagtatagactgcactgtagattt

SEQ ID NO: 332338 - DNA, 581 bp, Homo sapiens
tgaattatagacttgtaatattggaagggacctcaaaatttctttttgcacaccttataagttcatatagaggtatatctaaaccagccaatatggtttagccattgtctaaaccaatggattccaaagccttgatcatcagaaataccagaacttgaaaaaaagagactcctaagtcacacttctggagttttggttaaggagatttaagacaggacctgggaaatggcatttaaaaactgctatgtgatttccatcccagatagatctgggaaccactggttgagaggaagactttcaaatgttcattacttcaatttaaacttcacttagactttgtgtcratgtcgatgttgagatcacttttgtaatttcaggtcaggtgctccagaagcagaatccaaggtgaggaatcatatgcatgtgacttgttaaggagtgccctcaggggaagcctgtaagggagtggggaaaagaggacagggaaggggacaaaaactgggcagaaatatgatttcagaaaagtctagcttcagctggctcctgtaggcagccctgagtatagactgcactgtagattt

SEQ ID NO: 332339 - DNA, 461 bp, Homo sapiens
aaccaatatgaagcttttgctgactgctaagtaagtccataccaatgatacatttcagaactggagagatgaccaytagtagatttgtggacctagtggctcagacagatctgacccaagactcaatttgtttcttaattccatgtgccacttcactaacagggtgatgatggtgctttgtgtccctaggtttctgtgtcagctcaaatgagaaataatagccctcattagatctaggtattctcctttatccaaatactggcactatagttaccaaaatactggcaataggtctcttcagggaaggactagaggaatcactattacacagtggtatttcagggcccttccttaagtggacttagcttctctttctctaaaataaaatgtagattattttaaacttttttcttttgaaatgatttcaaagttacagaaaagttacaacaatagttctaaaa

SEQ ID NO: 332340 - DNA, 575 bp, Homo sapiens
atcagcattccagcgtgatggaaaaggatgaagaaaaggaggtgctttgctcttttgattgattctatgagccaggacttgcttacttcacttttgtgcacctttcaytgaacagcacctggtcatacaatggcacccagcatcaaggaaaactggaatgtgggtccttgtgctgcctttagactcggtcgtgaccaaagaggaaaatcaacattggagcaacctagcagttccttcagcccctcactgtctctgattctgtgctcacatcaagatttttttcaggagctcctctgaaataatgaatgatggggcagagaacagtacagaagtttcatgcagggctccagggaccaggggcgggtactggacctactcttcttgttgtgatcacaggaaaacactttactagtctaggccacagcttcatcttatgttatatgaggataataccacagatggtctttaaggaacacaggctaaatgttggtgataccacagtgaaaaagacaggcacgacttactccttaatggagcttcaagtttcataaggaagacaaacatatcaaaccata

SEQ ID NO: 332341 - DNA, 575 bp, Homo sapiens
atcagcattccagcgtgatggaaaaggatgaagaaaaggaggtgctttgctcttttgattgattctatgagccaggacttgcttacttcacttttgtgcacctttcactgaacagcacctggtcatacaatggcacccagcatcaaggaaaactggaatgtgggtccttgtgctgcctttagactcggtcgtgaccaaagaggaaaatcaacattggagcaacctagcagttccttcagcccctcactgtctctgattctgtgctcacatcaagatttttttcaggagctcctctgaaataatgaatgatggggcagagaacagtacagaagtttcatgcagggctccagggaccaggggcgggtactggacctactcttcttgttgtgatcacaggaaaacactttactagtctaggccacagcttcatcttatgttatatgaggataataccacagatggtctttaaggaacacargctaaatgttggtgataccacagtgaaaaagacaggcacgacttactccttaatggagcttcaagtttcataaggaagacaaacatatcaaaccata

SEQ ID NO: 332342 - DNA, 484 bp, Homo sapiens
ccagagcaaaggtggcctctgataggcaaaaaggaactcctgaattcattcctaaatgccttcactctcctctatattgttccctatttgatttgcttctcattctctatctgaaatttgtttaggttagtttttttttttcaacccacaattttgcctgccaacttggatttaatcttaagaatcactcctctgctttaccccctctaacatgtataatcaacacagagtggcwctgggtgtaaagggctgctccaagactggatcatgagtcagccctgctggcctcaaatcatactatataagtcccagaacaaataattcactctttttgtgtaccaatgtattattgtccatatgggaataacactcattcttacctgctaggctcttcagataatgaaaagagacaatatcttaaacactctcaatcagctgctgttattctcccagattagacccagtcctcattctccagttgaaa

SEQ ID NO: 332343 - DNA, 633 bp, Homo sapiens
cccgcctgtaaatcacaggtttatccaacatcttgcaaaggctagctgagtctctagttctcactggaactcctataggcacctccaacttcatagagtgtcctctgcagttggttgttctgagaacagctgttccctttcattgcaggtctgttcactgcctttgggaagaagaatggaggggatgtgggagtctgctcatgagctgccttctttccaaggtcaatgatatcacttcctcttggtttcatatcaaggaggagcatgcaggacatccaggagtgttctccagaaagtaagaaaatacatgaaagtctgttggcacttttgggagctgccatttataactatattttaggcatgaattcaacaaacattgaattctaattcatcaggcactgtgctagttctacataaaagcaacagcttttaaataactctctcactaatacayttctatgtctataaccaatcctttccacttcatgaagaaaatatattgattgatgccgagcaaatgctgagccttcgtggccattcactgatgctgtagtacacctgggcacaagagcactgagtcatcacactcgcaagaaccaactggatctgcttcctgtcctgcttttgccaatt

SEQ ID NO: 332344 - DNA, 587 bp, Homo sapiens
tcaaatgcccatcaatcaatgagtagatgaagaaacttggtatatatacagatggaatactacacagccataaaaaggaatgaattaacagcatttgcagtgacctggatgagattggagactattattctaacttaagtaactcaggaatgagaaaaccaaatgttgtatgttctcactgatatgtgggatctaagctatgaggatgcaaaggcataagartgatacaatggaatttggggagttgggggaattagtgggagggggcgaaagataagactacaaatatggtgcaatgtatactgctcgggtgatgggtgcaccaggatctcacaaatcaccactaaagtacttactcatgtaaccaaatgccacctgtaccccaataatttatggaaaaattttaaaaagatgcacaaaaatatatttatactatcccatcatctattgagtgcaatggcatgatgtctaaagaaaagtacataccttaattaaagaatactttattgctaagaaatgctaacgatcatctgagccttcaatgagtcataaacttttttactgttggagggtcttgcctcaatgtt

SEQ ID NO: 332345 - DNA, 587 bp, Homo sapiens
tcaaatgcccatcaatcaatgagtagatgaagaaacttggtatatatacagatggaatactacacagccataaaaaggaatgaattaacagcatttgcagtgacctggatgagattggagactattattctaacttaagtaactcaggaatgagaaaaccaaatgttgtatgttctcactgatatgtgggatctaagctatgaggatgcaaaggcataagaatgatacaayggaatttggggagttgggggaattagtgggagggggcgaaagataagactacaaatatggtgcaatgtatactgctcgggtgatgggtgcaccaggatctcacaaatcaccactaaagtacttactcatgtaaccaaatgccacctgtaccccaataatttatggaaaaattttaaaaagatgcacaaaaatatatttatactatcccatcatctattgagtgcaatggcatgatgtctaaagaaaagtacataccttaattaaagaatactttattgctaagaaatgctaacgatcatctgagccttcaatgagtcataaacttttttactgttggagggtcttgcctcaatgtt

SEQ ID NO: 332346 - DNA, 587 bp, Homo sapiens
tcaaatgcccatcaatcaatgagtagatgaagaaacttggtatatatacagatggaatactacacagccataaaaaggaatgaattaacagcatttgcagtgacctggatgagattggagactattattctaacttaagtaactcaggaatgagaaaaccaaatgttgtatgttctcactgatatgtgggatctaagctatgaggatgcaaaggcataagaatgatacaatggaatttggggagttggggraattagtgggagggggcgaaagataagactacaaatatggtgcaatgtatactgctcgggtgatgggtgcaccaggatctcacaaatcaccactaaagtacttactcatgtaaccaaatgccacctgtaccccaataatttatggaaaaattttaaaaagatgcacaaaaatatatttatactatcccatcatctattgagtgcaatggcatgatgtctaaagaaaagtacataccttaattaaagaatactttattgctaagaaatgctaacgatcatctgagccttcaatgagtcataaacttttttactgttggagggtcttgcctcaatgtt

SEQ ID NO: 332347 - DNA, 639 bp, Homo sapiens
accatccatgtaagatgtgacttgcttctccttgtcttctgccatgattgtgaggcctccccagccacatggaaatgtaagtccatgaaacctctttttcttcccagtctcaagtatgtctttatcagcagtgtgaaaatggactaatacatagagattgggcaatttataagaaaagaagttcaattgactcacagttctgcatggctggggaggcctcaggaagctcacaattatggcagaaggcacctcttcacaggtcagcaagagagagaatgagtgccaagcaaacagggaaaagccccttataaagccatcagatttcataagaacccattcactgtaacaagaacagcgtgggggtaaccacccccatgatgcaattacctcctacttggtcaacatgtagggattataggaactacaattcaagatgagatttgggtggggacagagccaaactatatcaaacagaaaaccaaatacctcatgttctcacttataagtgggagcttgttgcgggaagtcacrgacaccaaatggagggaccggctgaagccatggcagaagaacgtgaattgtgaagatttcatggacatttattagttccccaaattaatacttctataatttcttaca

SEQ ID NO: 332348 - DNA, 639 bp, Homo sapiens
accatccatgtaagatgtgacttgcttctccttgtcttctgccatgattgtgaggcctccccagccacatggaaatgtaagtccatgaaacctctttttcttcccagtctcaagtatgtctttatcagcagtgtgaaaatggactaatacatagagattgggcaatttataagaaaagaagttcaattgactcacagttctgcatggctggggaggcctcaggaagctcacaattatggcagaaggcacctcttcacaggtcagcaagagagagaatgagtgccaagcaaacagggaaaagccccttataaagccatcagatttcataagaacccattcactgtaacaagaacagcgtgggggtaaccacccccatgatgcaattacctcctacttggtcaacatgtagggattataggaactacaattcaagatgagatttgggtggggacagagccaaactatatcaaacagaaaaccaaatacctcatgttctcacttataagtgggagcttgttgcgggaagtcacggacaccaaatgragggaccggctgaagccatggcagaagaacgtgaattgtgaagatttcatggacatttattagttccccaaattaatacttctataatttcttaca

SEQ ID NO: 332349 - DNA, 565 bp, Homo sapiens
atcttttttctgagtacaagatctcaacagcgggcttaaaacattcagtaattgatgctgtaaacagatgtgctgtcatccaggctttgttgttgcatgtatagaggattggtgagatctgtttaccttagtttttaagggctgtggtgtttttagaatggtaaatgaccattggcttcaagttaaagtcaccagctgcattcgcctctaataagagrgtcagcctgttctttgaagccaggcattgagtctcttctttagctatgaaggttttagatggcatcttcttccaatagaaggctgtttagtctacattgaaaatcgttgtttaatgtagccaccttcatcgattatcttagcaggaccttctgcataacatactgcagcttctccatcagcacttgctgctttacctggaacttttatgttttttacttaaacctcatgaactaaatttttcttctggagcttcctcacctctctcacccttcatagacttgaagagaggaagggccttgctctggatgaggctttggtttgagggaatgttgcagctggttttatt

SEQ ID NO: 332350 - DNA, 565 bp, Homo sapiens
atcttttttctgagtacaagatctcaacagcgggcttaaaacattcagtaattgatgctgtaaacagatgtgctgtcatccaggctttgttgttgcatgtatagaggattggtgagatctgtttaccttagtttttaagggctgtggtgtttttagaatggtaaatgaccattggcttcaagttaaagtcaccagctgcattcgcctctaataagagagtcagcctgttctttgaagccaggcattgagtctcttctttagctatgaaggttttagatggcatcttcttccaatagaaggctgtttagtctacattgaaaatcgttgtttaatgtagccaccttcatcgattatcttagcaggaccttctgcataacatactgcagcttctccatcagcacttgctgctttacctggaacttttatgttttttacttaaacctcatgaactaaatttttcttctggagcttyctcacctctctcacccttcatagacttgaagagaggaagggccttgctctggatgaggctttggtttgagggaatgttgcagctggttttatt

SEQ ID NO: 332351 - DNA, 539 bp, Homo sapiens
gacttcaccaaatgaaatagacaaggcaccaggaacaaatcctggagaaacggatatgtgaccttacagagaattcaaaatagctgtgttgaggaaactcaaagatattcaggataacacagaggaagaattcagagtttcatcagataaatttaacaaagagattgaaataattttaaaaactcaagcagaaattctggaactgaaaaatgcaattggcttactgaagaatgcatgacagtcatttaacagcaaaatgggtcaaacagaggaaagcattagtgagcttgaagaaaggctatttgaaaatacacagagaagacaaaaataaacaatgaagcacagctgcaggatctagaaaatagctgcaaaaaagcaaatctaagaattattggccttaaagaagagacagagaaagagatggtgtaragagtttattcaaagggttaataacagagaacttcccaaacctagagaaagatattaatgtccaagtacaagaaggttatagaacaccaagaagatttaacccaaataag

SEQ ID NO: 332352 - DNA, 544 bp, Homo sapiens
gattttatcaataccagacccattctacaagacatgctaaatggagtatttcaatcagaaagaaaatgggattaatgagcaataaataatctcctgaaggtacaaaatgtactggtaataataaatacacaraaaaacacagattattataacactgtaagtggggtgtgtaaagttcttttatcctaagtagataaacaatgagccaatcaaaagtaatgacaacaacctttcaagacatggtcactatattaacatataaatagaaacaacaaaacagaaagccagggaatgaagttaaagagagtttttattagttttctttttgcttgtttgttcatgtaaatagtgttaagttgttattaggtaacaataatgggttataaaagtatttgcaagccttttggtaacctcaaatcaaaaaatatagaatacacaaaaaataaaaagtaaaaagccaaatgatattatcagaaaaattatcttcactagaggaagacaggaatgaaagaaagaagaaagagacgactacaaaaccaccaga

SEQ ID NO: 332353 - DNA, 580 bp, Homo sapiens
atgaccaaatctaagaataattggagttcccaatatgttaaacgaccaaacgtaagactaattggtgttcctgaggaagaagaaaaatctaaaagttgggaaaacatatttgagggaataatcaaggaaaatttctctggccttgctagagatctggacacccaaatacaagaagctcaaaaaacatcccataaaattcatcacagaaagaccaccacctaggcacacagtcatcacgttatagaaagtcaagatgraggaaagaaccttaagagtggtgaggcaaaagcacaaggtaatctataaaggaaaacatatcaaattaacagcagatttctcagcagaaaccctacaagctagaagggattggggccccatctttagcctccttaaacaaaaccattaccaggcaagaatattgtatccaatgaaactaagctccataaatgaaggaaagatgcagtcttttttagacaaacaaatgctgagagatttccccactaccaaaccagcactacacgaactactgaaaggagctctaaatcttcaaataaaaccttgaaatacaccaaaatagaac

SEQ ID NO: 332354 - DNA, 509 bp, Homo sapiens
gtaaactgaacacaggacattttgatggaatatttgctgtggagagggaagaagtagtggggaactgattgaattgggttcaagagagagtaagaggagaaaaattaccagtgaatataaacaatttcatggagaagttttgctgtcaagaggttcagagaaatggagcagtagttggagggakatatggcatcaaaagatttttgtttttattttattttaatttaaaaagtttttttttttttgagacaggtctttctctgtcacccccaactggagtgcagtagcatgattctgcctcactgctgcagccttgaactcaaaggctcaagcgatcctcctgcctctgcctctggagtagctggaactagagatgcacaccactacgcccggctagtctttaaaaaaattttttttttttctggagactgagtcttgcttttttgcctaggctggtgttgaactcctggcctcaagggatcctcccacctcagcctcccaaaatgctg

SEQ ID NO: 332355 - DNA, 481 bp, Homo sapiens
ggatccacctcgtagggctctaaattccagtggagtcaaaaaaatatgtgctccaaatggcatttctggcccttgtgctaacaaatctgtccaaatcctagtgttcaaatttatttaaatattgatggagataataataacaaacatatacacaaattgttcatatttttcttctttaccagaaaattaggatagtgccccaacctcaggtttatagtctgtcagtgattcttcaaaggtttttagagaataagaggaagaccacagaaaggccaagataagacgaaatgtcagraaaggaaaggtctggagaaaaagccttttaaatacaatgtttggccaggcacaggggctcacgcccataatcccaacactttgggaggctgaggcaggaggatgacttgaagcctggagttcaagaccagcctggacaaaaagtgagagcctggctctacaaaaattttttaaacatagccaggta

SEQ ID NO: 332356 - DNA, 561 bp, Homo sapiens
aacttagaataaaaagtagtttgtatagaatagcatgcatgaaggcttcatggacagcaaagaaggaaggagaaatcgttaaattaacacatgaaatagcaagtcagagaatcaaaagrccaatacattgattaattcctatgatgatgtagagtatctattcagcagtcaattaaccgtttaacatattcttgatataaaggaagttaaaaaaatctccaaactcatataaagctataatccataattggagttttaatgcctctcttaatataaggttgaatacagagttttaatctattctcaaagaataaaatgctttacattttaatgaaggtgtggttttgataataacaaacctgagaaaaagtagcttttaattcgcaacactttaaaatcaaggaaactacctttgaacctttttttctaaatgaaatttttagcagacacatgtttttttagcaatgaataaaatggatgagaattcttttttgttctataagaagcagcaataccctattaattttgacagacaacttggcattagccattttaaaatcc

SEQ ID NO: 332357 - DNA, 594 bp, Homo sapiens
ccaccctgcccattgtttcatccgcttccctccccctccctccaggcctgtgcaagaagacttatttcctgtgtgggaaatgaagcagaaagtggcagtggacgagccaccgtcatttctgagccgcactgcccacctagcatggtttgggctctcagaacagctaactggcacctttgctccccggggcagtatttgaaagtagcgtcagctcccmgtacccagttaaaattcacaccttttatcctccacaatcatttgagattcatatcattaagtttgattctgggaagatgcctcgatattctaaattatttgtcagcctggcacggcaaaaaaatatttgtgaaatccatttcaaaagatgttaacactggtgaaacccacatgcccccagagggattatacaaatttccatgtcaaatatttgaggcaaagcacttgtagagaaacagtgtttttttgtgttttgatgcctttcatttccataaactagattactttctgaaattactttcacacagagaacagtttctattgaattccagtcagtgaactcctctgagtgtgaggtgaataaaatattttggggct

SEQ ID NO: 332358 - DNA, 589 bp, Homo sapiens
cactctggctgcttgaagagcacattgctttgttctttcactgacagagttctagtggccacagttttggggatctggggtgctaacagcttaatactaacaattttatattcattatcatttaatctacaaaacaaatctctgaggcaagaactgccctttccatggacgagaagaccaaatgaatggagactttcaggtccttgtcccacacagctagtagtaagtggtggacgatcccagattccaaacatgatgccaaattcaggccccgagcccattttctgtgctgtaagtaggtttttctctctctgtccagtaggtaaggaaacacaayagacttcttcaaacagaagaaggcttttgctagatcagcgggcagccctgcaccatgcttctttggctgcttcaattccaactccaatacagctgggggtcctgaaattaacctgaagaaaacacatggtatcatagagccattgtggcttgaacttgctcaaggtcataatgtgaccctgacctatacttaaccctagttcagtcacataggcctgagagggacaccattataggacttaaagtcgcctgg

SEQ ID NO: 332359 - DNA, 455 bp, Homo sapiens
ccattttctgtgctgtaagtaggtttttctctctctgtccagtaggtaaggaaacacaatagacttcttcaaacagaagaaggcttttgctagatcagcgggcagccctgcaccatgcttctttggctgcttcaattccaactccaatacagctgggggtcctgaaattaacctgaagaaaacacatggtatcatagagccatygtggcttgaacttgctcaaggtcataatgtgaccctgacctatacttaaccctagttcagtcacataggcctgagagggacaccattataggacttaaagtcgcctggtcctcgctactcttaagggaaaagaagctatctgagcgtttctccacaaatgatctcgggagtggccacttggttaatcttgatggccagagatattgaccttatgtgggttattagctaacaggattggttttcttattcct

SEQ ID NO: 332360 - DNA, 455 bp, Homo sapiens
ccattttctgtgctgtaagtaggtttttctctctctgtccagtaggtaaggaaacacaatagacttcttcaaacagaagaaggcttttgctagatcagcgggcagccctgcaccatgcttctttggctgcttcaattccaactccaatacagctgggggtcctgaaattaacctgaagaaaacacatggtatcatagagccattgtggcttgaacttgctcaaggtcataatgtgaccctgacctatacttaaccctagttcagtcacataggcctgagagggacrccattataggacttaaagtcgcctggtcctcgctactcttaagggaaaagaagctatctgagcgtttctccacaaatgatctcgggagtggccacttggttaatcttgatggccagagatattgaccttatgtgggttattagctaacaggattggttttcttattcct

SEQ ID NO: 332361 - DNA, 595 bp, Homo sapiens
tttttctttctttctttctttytttcttttttaatcaggagtcatttgaggcaattggagagggtgaaggagtgggtagtttcaaagacatttagccaaagccaagcttgttagcagcaactgtcacacaacagggccaggacacatgacaccatatggagcttcagcagccacagacaccaagacccacatgtgttctcagtgcggagcaccttgtgtgcaccaacctccttccacacatctgggacacccagagagaaacagagacttgggtaaggagtagcacacactgtgcttccttctctccattagaagctgaattctattcaaatgtatcttgaaaaataagtgttattattcattagagtgctgaccaacatgaagcttctggtattatttccatttccatacacctttaaacccactgctgtttcctttggactcagaagtttctggctcctgtaatcaccacccatcattatgttctcccttaacaacagatgtgaattccagggaagctgaaaccttgtgtgttctagacattgaatggtgtgtggtacagagaagaccctcaaatatttgctgaatgaataga

SEQ ID NO: 332362 - DNA, 610 bp, Homo sapiens
atgctgactcttaagtaactacatttcccatgtaacaagtgcaaatccacatgaacctacagaaatccctttggcaawaacatcattaatgacacagctgtcaagagaattttaaaaataagtttttaagaagcatactgttagataaaatgtagatagaaactcacacctaacaggtcatttaatagtaagcccaaacctctgttaatgctggacagttccccatggcttacttccaagagttcttccttccctagttttgaatgttctaaactgaagtttctgtcacttggccttgagggactcttctgtagcttgtgagaggtcatcactgagagatttcttgttttcatctctttactccaaattagccccttggatgaccctggacaattcttctgcctgcctggtgggtggtgcctttttagacacttgtaggtggttatcaggtccttgctccattgcaaacatcacaaaaaagatcttgcctcctgcttgtgccctgggacacgttttgattttgcaatctcaaacaaattgcttgtttgcacggacctgtgtgctgaagaactgctgaagctggcaactaaagaaagctttgcttttggca

SEQ ID NO: 332363 - DNA, 609 bp, Homo sapiens
gcaattccccttctaggaatttttcttatggacatactagtttgtgtatgaaatagcttctccatatcaataggaaactgtttacaatgccttatcagtatagctgttaaaaaaaagggagggggaagctttatgcatataatatggaatgatctgccagttatagttctaggttaggaaaacaaagggcaaacatttgtgtgcaatatactactatgtttctaaaatggtgtagggtgatagagtgcagaaacacaggcaagtaagtttgaatgcacataaaatgtctctgcaatgataacccwgcaacagttgacattgtttacctttggtaaagggaactggtagtctgggaacaagtacagaagggagacttctttctataccctttcgttatcttttaagttttgcatcctgggcaattagcttatgcaaaacaagcaagtaagaaagtaaagaaatgtcttaaatggtgatttgtgcattctagatgctatcactctaggcaccaagatttgcttgatctgctggttgtgaagcactgtattcccatttttcatgattttaatgcaaagaaatgccatattgcacttctgaagtggtttcagg

SEQ ID NO: 332364 - DNA, 500 bp, Homo sapiens
gtaaattttaagaccagaagagcaatttttaagtccctccaacaaaccccacaactatctactggactattaggtctatttcataggcatttccttagtatcattaggggaataaagggtgagtaggaatattctgccacataaggttataactgatagctggttaagacagrgcatctgttccctccgcccttgtagcttcccttatgtagttataggcagataatcatctactagtacctttcactgatactcccctttttttaaattttgttttttactttgagtcctccccgtagattgcagggggactagtagtccttaactagaaggattacaccaaggtcagagaaagcaaaactcagaagtatgtaaaaatgtacaaaacaagggggaggagaaagctaagttgtcttcctaggcatgatgctattcacagtatgcagatgcagcaaatgagaaagtagagaagtagagaatttggtaagtttctagccaca

SEQ ID NO: 332365 - DNA, 622 bp, Homo sapiens
ggacatttgggctggttccaagtctttgctattgtgaatagtgccacaataaacatatgtgaaaagcagacttattttagttgtaatttaaagtaccctgattttcagtacagttaaaatatctaatagaaagactaatacyagtgtacccctatttttattgtccaaattatgatgaacaacattcccattaacttataaatattgcttactttcgaaaaatttcaacttgctagattaaatacatgggtaaatattctgagtagttttctagtaattaaaattattactaatcttgtttgcaaagatagttgtatctttattttagagaccatgtaaaatgtctttccttcataatccatatttgttttagcaaatttagaaaataagaaaataaagatggtcaatatacttcctccaacacacttgtataaatccacctattagcccattacctagagataatcactatcaacattttggtagatactcttccagtcctcatcatcttttcttctccttttcctccccttctttctcctcttcctcccttttcttctctatttccctctccctctctttatatacagtatatcatatgataggtgtatgacataaatat

SEQ ID NO: 332366 - DNA, 622 bp, Homo sapiens
ggacatttgggctggttccaagtctttgctattgtgaatagtgccacaataaacatatgtgaaaagcagacttattttagttgtaatttaaagtaccctgattttcagtacagttaaaatatctaatagaaagactaataccagtgtacccctatttttattgtccaaattatgatgaacaacattcccattaacttataaatattgcttactttcraaaaatttcaacttgctagattaaatacatgggtaaatattctgagtagttttctagtaattaaaattattactaatcttgtttgcaaagatagttgtatctttattttagagaccatgtaaaatgtctttccttcataatccatatttgttttagcaaatttagaaaataagaaaataaagatggtcaatatacttcctccaacacacttgtataaatccacctattagcccattacctagagataatcactatcaacattttggtagatactcttccagtcctcatcatcttttcttctccttttcctccccttctttctcctcttcctcccttttcttctctatttccctctccctctctttatatacagtatatcatatgataggtgtatgacataaatat

SEQ ID NO: 332367 - DNA, 585 bp, Homo sapiens
gccttgttggaatgtttggcaaagcaatattcaggtccttcatttactctcacttggcacccacaaatgtcattagtggctagttttagaaatgcaattgaacttgggttaaagatatgtctgcggctgttgtttaggataacatctggaaaccttcactgtaggttttttttgctagttgtggcattgttgagcctagcctaggatatggagtkgttttaggcaaaggtcagagttcagagaataaatttttttctgaacccatgtctggtctaaatgatatggttgctctgaagaatggggaataccagtattcaaggtcatgtgtcagattactctgggagattgtgagatttttattaatgactgagaggacttacacagcaggatttccaactaccaaagattgggtaatttaaagtgacagagatatcaacttcctgtagggtgattacctagatgatatgttctcatgatgaattcaagagtatatatcttttctttctaccccacaaagagagaatggtgtgacttggagtaggtatcatgctttcccacattgtcattgagaatcagtcacactca

SEQ ID NO: 332368 - DNA, 622 bp, Homo sapiens
actagacattggagactcagaagcgggaagggtgagagatagatgagggataaaaaagtcagctattgggtacactgtacactattcagtgataggtaccctaaaagcccagacttcaccattatacatggataaatttatttatgtaaacaaaaccacttatactcataaarctattgaaattaagaaaagagatgttcaaaaatgtaaaataatgccactcttctaattttttgtgaggaaatatatttatggaaaatatatctatcaaagaaataatatcagaaaaacttccaaactgaaggacacatgtttccagattaaaatgaccttctgaatgcttaacacagtaaataaaaaacaggaagaggaagagataaaataaaaaatgaagacatacaaggccatgttatgaaacttcatcacactgtagatcccatgagcagcacaaggtcagagataaccagcaccatgcacagttgtgtctttccatgatgtctgacttttattggtgccatctcaatcataaaagcctcaagctacatggatttcccaaggaggcaattctccttagtacttcccattcacttggtagtcagagctgcaggcacagagcctgaca

SEQ ID NO: 332369 - DNA, 548 bp, Homo sapiens
agcacaaggtcagagataaccagcaccatgcacagttgtgtctttccatgatgtctgacttttattggtgccatctcaatcataaaagcctcaagctacatggatttcccaagkaggcaattctccttagtacttcccattcacttggtagtcagagctgcaggcacagagcctgacaagccattccaaaagtcagtcaatattgcaaatcctacataatagtacacttaatcaatatataaatgttatagattaaacgttctatagcaaacaaagtaatatttaacatcaagaaaaaggggataggaaaagaggttaacaaaccaagcaatgtagacaaaaagaatttccttgtctgggccaggtggtccattggtcttgcaagaaagcgtctttgatgtgggcagagcctttggtggcagattccaggtgcttatcacaagtgacaacaagacagtgtctgttaagacagctgattggagctgctgaagtcctgttctttttatggccacagagtcctctggtgaggactgatagaggaggcatgt

SEQ ID NO: 332370 - DNA, 606 bp, Homo sapiens
atttatggcttaaatttgtcagttaccgtagtgagctacaccaaagctgaaaaaggctctatttagacttgattgtgtaaggattggtatttacccattctatgctatttgagaatcaagataattgcaaatgttacgttaactgttataagtcctttaaaagataaagttagttgtgtcattagtcagcataagctgcattttgctgtggtaacatatgaattctgaactctcagtggtttaacacatacarttttatttcctgttcaagccaaatctgctgagctgtgggttgggtgatcctctagggaactgttctccatgtagttactcagcaatccagactgttgcttctgtatagctgtttcatatcagtttgtgtctcccaggtttgctgcagcagagaaaaataaagctggggagtagcttgctggctcctaaatggttatgcctcaatgtgacatatatcacttctgcaaatgtggctctccttaaaaaggagtgggctggaaaacatagtggtagcacatagatatttcatgaccagaaaatgggttagccacaattaagaaaaactcatctccttggaataaattgtttactaaa

SEQ ID NO: 332371 - DNA, 513 bp, Homo sapiens
aaacatacaatgggcccataaaaattaaaaagcaagaaacaaatcatatcaccagagaaaattattttcactaatgaagaataggaaggaaagaaagaactgacacaggagctagaaagaaattatttaggcatatagtgagcataagggagtcattggtaargtttccattgttcataaaaagcagccccaaaatcatttcttttctaacaaagaacagcctgaaaaatcaagatgcagacatagaaaagcaagctggaagtttgcatgggtgaatgctggcagctgtgccaataggaaaagtctacctgggggccagtcatagtcaacatggaggctccatcttcccttttctttgtcaaccacatgtgcagtaaagaagcaggcaacatggcactgaccaggtagagaacccctttgtataataaaagattatggtgggcagccagcttcttcacataccaatcttttgtgccctatgtaaatcagacactgcctcctcaacctcatcta

SEQ ID NO: 332372 - DNA, 566 bp, Homo sapiens
ctatcacaaatttcctcctttcctatctgtgattgccatgtctcctatcatctctatatatgcaatgctctggaaatttttacagttcagtgaaatagtcctgttaggaaaggtcagcaaatgccatagtaacagggaatatagcttaagagaatgctgtttttgtgattttctaggaacagaggatcttcccccataccctacagtgagcatctctctctgcacttggtctggaaagcacatgctcaacggcgccacctacaggaacaggaatcctctccatgaggcacattgttggcccttttccgaaacactttagcttcccaattttcctccctttttgtgcccctctactagagaccaagctttatgccttttctgtgaaagggaaaaactctgccttcaacagtgatgaggaaaatgtcctccaaaatcaaattttagtctcgatagtgtcccatcagcaggaaaaccaccatttggtccctacattcttttaaggcacctactctgtctccaattaaaatggtacttayatagtaaggagacttaagagtaaatgcttt

SEQ ID NO: 332373 - DNA, 576 bp, Homo sapiens
tcttcaggttatattttagtgaataatattaatatatgatccacaattgtatgggatttataaaattctattgtctgagtatgtgctattaattataatgaaggttgttaagtcattgtacaccactaagataaccaaacttctctgtcagtcatgtttttaattttaacttccctggaaattttgtcattcacagacaattgttgtcttgctttgttcytttcaaaagatggtttaaaatcaagctataggaatttaacacatgttctcaaatgcaggattcttatagctttgacaattgcaacattggaagagagaaaaaatgtccaggacacatgaagagctgaaacgttcatgaatatcaaacaggagttaactccatcaaatacactaataaaagtctgaattaatctcttctgcaaacaccaccatcctatcgtaatttggttttactcaaaatgaggactggagatggaaaattatgctccaaaacttatacatttgtcattaaattatagtctcattggttgtttttaattttttttgcatacattttaggctaaccctgcctattcc

SEQ ID NO: 332374 - DNA, 576 bp, Homo sapiens
tcttcaggttatattttagtgaataatattaatatatgatccacaattgtatgggatttataaaattctattgtctgagtatgtgctattaattataatgaaggttgttaagtcattgtacaccactaagataaccaaacttctctgtcagtcatgtttttaattttaacttccctggaaattttgtcattcacagacaattgttgtcttgctttgttcttttcaaaagatggtttaaaatcaagctataggaatttaacacatgttctcaaatgcaggattcttatagctttgacaattgcaacattggaagagagaaaaaatgtccaggacacatgaagagctgaaacgttcatgaatatcaaacaggagttaactccatcaaatacactaataaaagtctgaattaatctcttctgcaaacaccaccatcctatcgtaatttggttttactcaaaatgaggactggagatggaaaattatgctccaaaacttatacatttgtcattaaattatagtctcattggttgtttttaawtttttttgcatacattttaggctaaccctgcctattcc

SEQ ID NO: 332375 - DNA, 529 bp, Homo sapiens
tttgttgatactccccagtacaagtctgggagcatggcagctccactgggtgactagacccaaaaaagcaaaaacaataactgcggtttggctctcaataaggcccatccatagggaaatggggagaacaccacaacaaaggagcacattgtgggacaaaagaatctgaacagcagctcttgagccccagatcttccctctgacatagtctacccaaatgagaaggaaccagaaaaacaattctggtgatatgacaaaaccaggttctttaacacccccaaaagatcacaccagctcaccaacagtggatccaaacccagatgaatctctgaattgccagaaaaaaaattcagaagtttattattaagctaatcaaggaggcaacagagaaatgggaagttaaacttaaagaaatccaaracatgataaaggatatgaaaggaaaattatttaatgaaatggatagcataaattaaaaaatcacaacttctggaaatcaaggacacacttagggaaatgcacactggaa

SEQ ID NO: 332376 - DNA, 471 bp, Homo sapiens
tgccaatcctggtggttggaacttgagttcccacaagcctaaccactatgggctaaattgttctggggctccaaataaactggaaaggctgactagccacaaggactgcaacatttaagtgagtcccagtgctgaactgagtccagagacagtggacttggggggtcatatgacctactgagacactagccagggtggctctgagagtgctggcatcactcctcccataactccaggctgcacagcttgaggctccaaaagagayctcttcctaccagctgaaaagagatggaagagtgggaatgattttgttttgcatcttggataccagctcagccaagcaggatagggaaccagtcagaggcatgagggccctttccaggcctagcccttggacatttctagacatactcttggtcagaagaaaacctgctgccttgaaaggaatgacccaatccttatagtgttcat

SEQ ID NO: 332377 - DNA, 485 bp, Homo sapiens
acacctaaccaaatcaaaggtatcccattacttgtattttatgagataactcatatgcatcttctcatatgtgcttccttttctgtaaattgcctatcatatcttttgcctattattctattgatttatttgaattaaaaaatagatttctaagagttttgtgtatatttggactaatcctttgtcagttaygtatcagttataagattaacttgtggcttatcttttcattttattctgtgctaaacacttttattttcaatgtagttagttttaaattttccattgttagtgctttttgtgcttgtttaaaaaatatctttctttttatggagctgtcataaatgggattaatcctcctttaaaaaagactgtagagagcaccctcacccctaccaccatgtgaggacacagaaagaagacggccatctataaaccaggaagcaggtccccagctcaccagatatcaaagctgccagtgcttg

SEQ ID NO: 332378 - DNA, 496 bp, Homo sapiens
ggttaggaacaaacaggaaaggttgaggcaattagtatcagccatgtggtggtagtcatcawgatccctgctttgcagagaacgctagcatttatgccactgagataaccaagagccattcccaccaggaaaccctagagagggagacacaactgtactgcctccacctgcaagaagcagatgctattgagctactttggaaaaggagctgccacctccccaacaccatgcaaaccccaaactgcagctgccccttgagagctcacactcagacccagggtctgggactgcactgcacccacccatgtatcagacactgggccatcactagagcaagctctgggccctggagtcaaggtctctctgggcatgcccacactttgggcaccagttcaccctccacagaaagttagtccctaccccaactccagagccattgtaactctacatatatctatgctcccattcttggctccctggctgcttcaaagcattc

SEQ ID NO: 332379 - DNA, 496 bp, Homo sapiens
ggttaggaacaaacaggaaaggttgaggcaattagtatcagccatgtggtggtagtcatcaagatccctgctttgcagagaacgctagcatttatgccactgagataaccaagagccattcccaccaggaaaccctagagagggagacacaactgtactgcctccacctgcaagaagcagatgctattgagctactttggaaaaggagctgccacctccccaacaccatgcaaaccccaaactgcagctgccccttgagagctcacactcagacccagggtctgggactgcactgcacccacccatgtatcagacactgggccatcactagagcaagctctgggccctggagtcaaggtctctctgggcatgcccacactttgggcaccagttcaccctccacagaaagttagtccctaccccaactccagagccattgtaactctacatatatctatgctcccattcttggctycctggctgcttcaaagcattc

SEQ ID NO: 332380 - DNA, 621 bp, Homo sapiens
ttttgggaaggacacaaatttttgacaatagtgtgtgcacacacacatgtgaacacacacacatgtatacttatatataggcatgtatatatatgtataattcagttttcaataacaagaaaaatataatacatgaaaaaacaagaaagtacagcccttacataggggactaatgcagttgacagaaactgtctctggggaagcctagacttcagayttactaagcaaaaactttcaattagttattttgaatatatttaaggaaataaaactatgtctaagaactaaagaaaattatcagaatgatatctcagcaaatagatcatttcaataaagagatagaaattataaaaaagaaccaaatgaaaattctagaggtaaaatgtacactaattgaaatgacaaattcactagaggagctcagtagcagatttgagtaggcagaataaagaagaagtgaacttgggtaggccaatggaaatcatctagtctgaggagcagaaagagaaagaaaggaagaaaaaatgaacaggacctcagagacctatcaagcaccattaaaaataccaccatatgtataagagggtttccagagggagagaaaagaaagaggcagaaaga

SEQ ID NO: 332381 - DNA, 630 bp, Homo sapiens
ggagattccaataaatcacacagatactccagcaatcagttttccaaaactgcctatctataatggggtagcctttgtccacctgcaccccagagggttatttcctccttgccagtccaggctacagttcctcatttaccagcctcagcccaccagtatcccagtgaaagtctccctgctggccagtcccagacaagtttcttgtggggcagctctggcccaagactacccagtgaatttctccatcatccaatgggcaacaactacattttyttcaaaatattggaatctcagccttgggaagggagcccagctcccagatgtgttcctttcttagatactcatctctcagtcacagggcattctttacttctttatagttaatccctcgatataattaataattttatgtaaattttcactgctcatatcggggaagctgtgtgatctgtctcctgattgaaccctaactgatacaatatggaaaaaacttaatataatgcagccttgcaggcattagatgaacagtacatctttttacaatacaaccaatatatagtgaccaataaaatttacaaaagaaagtatgtatatattaagccagagtccaaagtaaagaaatatcattaa

SEQ ID NO: 332382 - DNA, 542 bp, Homo sapiens
tgtgattgatgccttatcctattgtggttgggtgatatccaagatgtgagacaaaagtcctctttatctttctctcctctcctaaagtggacagaagggtcacttttggagtcacaagctgtgctgcctgrattttgggaaaaggtggcacaagcattttcatagcagcccaggcaagtgtcttactagtttgtgtgcccttaagtccacggactctgagcccagcttagcactaggaattgcaatccttgttgtccagactgcctttcaagtgtatttagggccccaaaacactttagcccatagtagccgaaggaacattttttttgaggaacatccatgctattgtccataatggacagaactaatttacattctcaccaactgtgtgtaaggtcccccccctttttttaaaacatccttgcaacacttgctattttttgtctttttggtaatagtcattttaacagtgtgaggtgatagctcattgtggttttaattttcattttttgatgattagtgatgttgagccttttatcatt

SEQ ID NO: 332383 - DNA, 623 bp, Homo sapiens
ccaatgccatgcttgttcagcctgaagaactgtgagccaattaaacctcttttgtttataaattacccggtcccaggtattcctttatagcaacgtaagaatggtctaacatattcaccatcataaaaacatgcaaaagtataaaatttacaggtcttataaagcagttacacaactgaaactacaaagccattaggtaacaattaccattatgacaggaacaaaagctcacatatcaatatcaactatgaatgtaaatgattaagtgctccacttaaaggatatagactggtggaagggactaaaaaaaaatccaggccgggcacagtggctcatgcctgtaatcccagcactttgagagaccaaggcatatggatcacctgatatcaggagtttgagaccagcctgtccaacatggcaaaaccctgtttctactaaatatatgaaaattagctgagtgtggtggcacacatctgtaatcccagctacttgggaggctgaggtaggagagttgcttgaaccygggaggcagagattgcagtgagcagagattgtgccgcagcactccagcctgggagatggagctagattccatctcaaaaaaaaattcaaccagatgctgc

SEQ ID NO: 332384 - DNA, 218 bp, Homo sapiens
ataacagacttttaagtcaacaacagtaaaaaaagaaagacaaagaagrttattatctaatgacaatgtataaattcaacaagaagttacaacaatcacaaatacataagcactcaacatgagagcacccagatacataaaacaaatactactagacctaagaaaaggtgtacagtggaataggaacagctccagtctgcagctcccagtgagactga

SEQ ID NO: 332385 - DNA, 636 bp, Homo sapiens
aaaaaaatactcagtataaacagaagctatttccaagggttcccaaatgttggacttaacagacagacttcaaagcagccaataaaaatacatcttcaaagaacaaaagaaaaccgtgtttaatcaaagcatgaaaacaatgactaatcagagaacacttaataaagagatcaacattttttaaaaaatggaaattctggarttgaaaagtaactaaagtgaaagcttcattagagggacaacagcaaacttgaatgcagaaggaagaatcagtgaactcaaagataaatcaatacaaattacacaatctgaagaacagaagtgagaatgaaaaatgaaccaagtaggaaatctgtgggttacaatcaataccaacatatgcataatgggaatcccagaagaaaagaatagtgagggccatacaagttttgacatcttttgaagagtcatagaagtttttaatgtctgaaaacattccaaatttagtaagaagtataaatctgtatatccaagtatctcaataaaatccaagtagaataaacattaaaatatccacaccgatacacatcaaaatcttgaaagcagcaagagaaaaatggacttatcatgcacaggggaaccccagtaaaattagca

SEQ ID NO: 332386 - DNA, 529 bp, Homo sapiens
ctcacacacacccccttgacaagaactaataaatgagctcaggaaggttgcaggatacaaagccaatatacaaaaattaattatacatatattatcaatgaacaattcaaaaatgacattaaggaaaaaactccatttacaactgcacctgaaagaattaaaaatttaggaataaatttaacgaaagatttgtaaactgaaaacaatgttttgaaagtaatcttttatacacactgagagaaactaatcaagatataaacaaataaacattccatgttcacagattcgcagactcaatataagcatggcarttctccccaaattcatctacagatttaacacaatccctgtaaaaatcccaaaaggcatttttgcagaagtgggtaagctgaccttaaaatttatgtggatatggaaagggctcagaataccccaaaaaaattttgaaaaagaacaaaattgaagggtttaacagttccatatttgaaagtttgttgtaagtaaagccacagtaattaagaccactgga

SEQ ID NO: 332387 - DNA, 556 bp, Homo sapiens
caatgtagttaatgtgtttctcctagggtatgaattagctcttctgaaactacatgtatattacactgacacaacaacaaaaaaacagtaagtaaatacactgcagacaagaggcaggttacccatattggaaaaaataacaaataaggaaaaccagaaattaatcctgtggtgttaaattagaatcagaagtatcagtacaaaactcatgagtttttaataagcagacacataaatgtatattcattaatacacatacatrtatttcccagctgtatctcctgaaaggcccaagaggcaatgacaccctattggcaattagtatacttaaatgaacaaatgttggtttctaaataccattttccaattaaaggaaccagggttccttgaagtggttgtttccagggctgggagaggaaaaatagatggtcctgtagtattttgtggtgccagtaagaaagtgttcaaaaaaatatgggaacttgttaaagaacctaggagttaactcaaaggagttcctaatgggcaaatgcagaagaatttgagcaacaaaaca

SEQ ID NO: 332388 - DNA, 530 bp, Homo sapiens
catccttttggacaaaaatgaaatcagattgtacctgttcatttaatactatacctaccctgtatcattaactaacagttcctctttacctcattccatacattttgctgtatgtcagacatttaacttttaggattactaaatgagacctggaactattttttttttaaataaataattgctacatsactgagagtatagctctgaactcaaaatatatccttgctaagatgatatatctgttattttactgctccttagtaaaattactgcaaaacttagtggcttgaaacaaccaccatttacttgcacatgattcagtgggtgtgcatattaagctgggctcacctgtgtggttcttctgctagtcttgtgtgggctcactgctttggttgcagccagttggtggctgggtcagctttgttgtccagaatgacctcaccctcaagtctggtggttagtgctgttggttgagcctctgcctccatgtgctcttttgtccagcttactttctatgggcatctcagcag

SEQ ID NO: 332389 - DNA, 594 bp, Homo sapiens
tatggtatgcacaatatcacagctggcacaaaactgcctgtatttagtttgaaacacaaaaacaatgcatatgaacagtattctttgaaaagtaattcaaaatgctgccactgcatcataaaggcaaacttagataagagtgttgacagtattcagagaattcacaaaacaagctgatattaaagtattcagacagttaccttgatttttttcaaataccackggtaagggtaaaagaacttgttgccaaagtaactcaggataccttatttcaaactacatgtaacctattttgctatagatactctaaacaaatgaacaactaggttttaggatgtaaattcccatttcctagacagggcctagtctttctgttgcaatctggcagctttaaactttgaaaccctctttccagtttcttcagatgcttccaacagaacttcctttcgttctggaatagtgggtagtgcgggatgagcaatggctgggggtggtgttaaggaaggtgatacaaattctttttctataacagttccagaaaaagcctagaaaacaaaagtcaggttatggtaataaaatgcaaataagacaccc

SEQ ID NO: 332390 - DNA, 567 bp, Homo sapiens
ccaagaaaaatcacaagatccaaaactggttttaaaaaatgaatagtattagttaatcaaaaagacctaagaatttataggtgaaacactaggaaaaagaaacttttatgcttcctgccctatttttcacagaaactaattattgcatatggtacatcatttaagcaaaataatatagaacttctcgagtagcagatttcatttagcattttaacaattctaagtgtgtgctaatgtgtatttcaaacagcaatttcgtaaagtttctcatacatatagctatctgaccagattacaaattacctgctccaaagtttataaaaggaaagcaagaataaacattttactgtatcaaatttaaattcaaagtgtatttttgtttttcacaacacattcaaagatagagcactatcytgggtgtggcataaaaatacttcatttaaaatttaacattatatatattaaatccatgattattaaaagtcaactatctggtataattaattatataaaataggccataataaaaaatgaagatgttgatcttaagtatttaagtacatgtac

SEQ ID NO: 332391 - DNA, 577 bp, Homo sapiens
ttttacggtatataatcaaccatttccaagttaaactgcataacaacacaacacacagcctttcaacatctcctaaataccaccctctattaacctatttgaggaaaaattttaatttgagaatagacacaaacatttctctacccaatactggacaaatgcaacaagtaattcatgtttctgtaatcagagtagaaatctctgctaagcagtaaatggcaccatctaaaaaatacatggggtttctaactataattatatgctgaacaataycctacttttctccaaatacagaatttttatggccaagcgctgataaagaataatagacagtgatatgatacctcctcccccagatgctctgtgatttcctactgttttacaacaggcactcaatcagtaagcagatcagaagaggatggaggagaaaagtacatagttctttctctaccaatgatgaatgcaggtctggcaaaggtctaagcagttaaaataacttttaaaagaatgaaaataaggaagggagttaaaagtgaaatatcaccacatatgaagggcttctcgagagtggcacatg

SEQ ID NO: 332392 - DNA, 496 bp, Homo sapiens
aaaagtacattttataaaacacttcgcattaaaagccttacataactgaatttttttatttatacattgggaaaaataaaatgccrgcttcacagaaattcaacactatattaaaattttactaggaaaatctaaagaaaattgctttatgttcataaatcaatgttaaaacaggaaaataaatccacaccatatttacatatagctcttaaagaaagtagtactgtctcggcatgtttatacttttcattcacttgcaaatctaagtgaaagcaactagtagtgaaacattgtcaatgcaaaatacttttgataaagaaaactaaaaattattttcaataaagtagacacttttgcaaagcaggaattagtaaacaaatagctttaatggatctatctagctatatatacaaaatacttggactagtataaaagaacaaagtcttcataagaaagaacattcatgcaatgaaaggctctaatccagggctcatga

SEQ ID NO: 332393 - DNA, 627 bp, Homo sapiens
tatagtattatattgtactctatttagccagtcctttactgataggcctttagatcgtcttcctttttttttgctgttaaaatcaatgctgcagtgaataacctctgtgtgtatgtgtgtgtgtgtgtgtatcatttgtacttgtgtgtatctgtagtataaatgacttaagatacaattgctggcatgaagtgaagtagatttttaactttgacagtgctggctttaacagactgactacacctttgccaacccaatgtgtttgcaaacttgttttgaacctgatcctttattgtaggccccctggcactgctaactagctaacttactgtcttttcctccttttcctcccctcccctcccttcccttcccctcattcacatggttggtcagctataaccaccatccatctccagatatttttcatcttctcarattaaaactgtaccagttaggtgataactccccattttttccttcctccccccatcccctggtaaccactattctactttccatatgaatttggctattctagataccttacataagtggaatcctacagcatttgtccttttgtgtctggattatttcacatagcataatgttttctaggttcatctgtgt

SEQ ID NO: 332394 - DNA, 622 bp, Homo sapiens
tttttgcctatgtgtttacctttatcagagatctgtgttttcatatagctttgagttactgtcttttcatttctacccgaagaacttcctttagcatttcttggattgcaggtctagtggtgaggaatgccctcaactcttgtttatctgggaatatcttaaatttcccctmatttttaaaagactgttgttttgctaaacatagaattcttggatgaagtattttgtttctctctcagcactttttaaatatatgtcatcccataaccttctgtgcttcagggtttctgctgagaaatctgataatcttgttgaagatttcttgtttgtgatgagttgtttttctcttgatgctttcaagattctctctttgttgttgttcaacagtttgattatagtgtgtcttggtgtgggtctgggtttatcctacttggatttcgttgagcttcttggatttgtagattcgtaccttatcaagcaatgtgtatgctcttgagtatctccaataaggcatttcaaaatacaaatttatgattttagtttatgatagatgtatatagctttaaataaccacaaaccatcttaagatgttatttaaaaaaaagagcagcattcacttatc

SEQ ID NO: 332395 - DNA, 622 bp, Homo sapiens
tttttgcctatgtgtttacctttatcagagatctgtgttttcatatagctttgagttactgtcttttcatttctacccgaagaacttcctttagcatttcttggattgcaggtctagtggtgaggaatgccctcaactcttgtttatctgggaatatcttaaatttcccctcatttttaaaagactgttgttttgctaaacatagaattcttggatgaagtattttgtttctctctcagcactttttaaatatatgtcatcccataaccttctgtgcttcagggtttctgctgagaaatctgataatcttgttgaagatttcttgtttgtgatgagttgtttttctcttgatgctttcaagattctctctttgttgttgttcaacagtttgattatagtgtgtcttggtgtgggtctgggtttatcctacttggatttcgttgagcttcttggatttgtagattcgtaccttatcaagcaatgtgtatgctcttgagtatctccaataaggcatttcaaaatacaaatttatgattttagtttatgatagatgtatatagctttaaataaccacaaaccatcttaagaygttatttaaaaaaaagagcagcattcacttatc

SEQ ID NO: 332396 - DNA, 605 bp, Homo sapiens
atgtgcctgcgcctttctgtgtgtctgtgtgcaggagcagctatgggtgcgtctgtccaggcgtatacgtgtttctgaatgctggcgcccttgtgtggtgggcgttgggagtctagagagctatgctgaggtcctgagccatcactcaagaaggaatgtgragcagacagtcactcagtgggttactaacatgaatactggagcccactgtgacgaatggtgacacgcctgccttttcagaggaagaaggaaaatgcttccagcatgggtgaggcagggtggcctagggaggagcagccctggtggccacagggctggagactgagttccaggcctgcccctaccctgtcgagtcatgattttgggctgctcttctgagcctcagttttccatcccctaaaatgagcaaaatgagggtggcagagaaacaaggtggccaagaaggctggctggctatggactccagctgggctctgagaacctccttggctgtgctacttaacctctctggacttgaatgtattcatctgtccaatgggcgcataaacaaagtacctggtggggtttgcaggagggaatgagataacccatgtgacttgcttagg

SEQ ID NO: 332397 - DNA, 541 bp, Homo sapiens
cagccatgcccccctctcctagatggctgcctctgtcaccccataagctagccccaaccctcctcctgcaggccataccctcaagcagcacagttgaacttgggactgcccgctacctacttctcctgggtcctctgagaacctgagtctgcccacagtgaccttgcactgaagccctgcaggagtggggacatttttctrtgtgacactcaaagactccacaacaccctcgcttcagaacccctttaccaggcgaacaagaacaggcttgtgtttgggagaaacggcccctctccacgggggtgacagatgcgggacccgggtcagggcgcagtcttgtgcctgatgctcaggcaggaagaaggctgatatctgtgcataaacgaggtctgtttgtcaaatacaagtacctcgtaaatgaaatggcaggaggccaaaaccaatcgcgccacagccccatggacgctctgacagatttccacatttaagttactgtgactgctcgctccaggttgaaaatccaccagctttgacaagagca

SEQ ID NO: 332398 - DNA, 564 bp, Homo sapiens
acatcaacaaggtaaagaagaaaaaaatcacatgatcacatcaatagatgaagaaaaagcatttggcaaaatccaacacctgctaataataaaaactcacagtaaactaggaatagggtgaagttcctcaatttaatttttaaaaatctacaaaaacccacgctaacatcatacttaatggtgagaaacttgaagccttcccactaatcaggaacaaggcaaggatatcccctctcaccactccttttcaacttcatattgcaagtccttgataatacagaaaaagagataaaaggtatacacatttggaaggaggaagccaaacwgtctttgtacatagatgacagtcatctttgtagaaaactggaaagaatcaaccaaaaaagaaaacctcctgaaacttataagtgattatagcaaggttacaatggtcaatcacttccctatacaccagcagtgaacaagtggaatttgaaattataaacacaataccatctacagtagcaccctcaaaatgaaatacttaggtttaaatctaataagttatgtacaagacttatatac

SEQ ID NO: 332399 - DNA, 475 bp, Homo sapiens
aacacaataagaaaacaacctgactaaaaaaggggccaaagtccttaacagacacctcaccagaagacacacagatggcaaataagcatctgaaaagatgatccatatcatgttttatcaggtaaatgctaattaaaatgacaatgagttaccactacacacctattagaatagccaaaatccagaacagtgacaccaccaaatattggctagaatgtggagcaacaggaactttcattcattgctggtgggaatgcaaaatagtacagctagattggaagacggtttggcagtttcttacaaaacayagtcttaccatatgatctgtcaatcataccacttggtatttacccaaagaagctgaaaacgtatgtccacacaaaaagccacacactgatgtttatagcagttttacttgtacttgccaaaacttgaaagcaaccaagatgtccttcagtaggtgaatggatgaact

SEQ ID NO: 332400 - DNA, 556 bp, Homo sapiens
tatagctgggccaaccaagagatcagaagaaaaaaattttctgcctggagatttaacagaaacaatcaggaagtgagacaatcatagtccttgataagcttacattttgaaaggtaatgggcatattagggtatgaacatgctgagagaccagagaaggctctaactatatacatayccccagggaagactcgtaaactgcataaattttcagtgtgttcctcaaacaaaacagagactttgacaaaggatgaaagtcttaccaaaacaagatgcctaagtacaatctctgaccagtcaccagctgatcactaagatatattgatccaaggtgacccataagtagtcaaacataactgaggagagacatcagaggccacacgctgtagagaaaaactcattattaatcttggccaagtcataaaacaaacaaaaaaagggacaataacccctggcaggagagtatcagaaataaatgctgttacaatgtattatttaaaatgtccagttttaaacaggaaagtatggcttatctagtataaaaaaaaaaatactca

SEQ ID NO: 332401 - DNA, 556 bp, Homo sapiens
tatagctgggccaaccaagagatcagaagaaaaaaattttctgcctggagatttaacagaaacaatcaggaagtgagacaatcatagtccttgataagcttacattttgaaaggtaatgggcatattagggtatgaacatgctgagagaccagagaaggctctaactatatacatatccccaggraagactcgtaaactgcataaattttcagtgtgttcctcaaacaaaacagagactttgacaaaggatgaaagtcttaccaaaacaagatgcctaagtacaatctctgaccagtcaccagctgatcactaagatatattgatccaaggtgacccataagtagtcaaacataactgaggagagacatcagaggccacacgctgtagagaaaaactcattattaatcttggccaagtcataaaacaaacaaaaaaagggacaataacccctggcaggagagtatcagaaataaatgctgttacaatgtattatttaaaatgtccagttttaaacaggaaagtatggcttatctagtataaaaaaaaaaatactca

SEQ ID NO: 332402 - DNA, 557 bp, Homo sapiens
ttctgtatgtgtctgttagattcatttggtcaaaaatgtagtttaagtctgatgttttcttattaattttctgtctggataatctgtccatttgtaaaaatggatattgaggtccctgctattattacattatagtctatctcttcatttatatccgttgatatttgctttatatatgtagatgttccaatcttgggtgcatatatatttacaaccattacaattgwtccctctacttctttgtctcattttacagttcttaacttaaagtctattttatctgatataagtctagctatccctgctgtcctttggttttgatttgcatagaatatctttttccatcctttcaccttcagtctctgtgtattcttaaatgtgaagtgagtttcttgcaggcagcatatacttgggtctttaaaagattctttcatccaagctatgtcttttgattggagaatttaatccatttacattcaagataattttttttttcttaaagaaagtatggttacatttgccttttattgctagatttctccattggcctaataggg

SEQ ID NO: 332403 - DNA, 557 bp, Homo sapiens
ttctgtatgtgtctgttagattcatttggtcaaaaatgtagtttaagtctgatgttttcttattaattttctgtctggataatctgtccatttgtaaaaatggatattgaggtccctgctattattacattatagtctatctcttcatttatatccgttgatatttgctttatatatgtagatgttccaatcttgggtgcatatatatttacaaccattacaattgttccctctacttctttgtctcattttacagttcttaacttaaagtctattttatctgatataagtctagctatccctgctgtcctttggttttgatttgcrtagaatatctttttccatcctttcaccttcagtctctgtgtattcttaaatgtgaagtgagtttcttgcaggcagcatatacttgggtctttaaaagattctttcatccaagctatgtcttttgattggagaatttaatccatttacattcaagataattttttttttcttaaagaaagtatggttacatttgccttttattgctagatttctccattggcctaataggg

SEQ ID NO: 332404 - DNA, 221 bp, Homo sapiens
tgggaatgggaggctcagtcccaaatcactccatagcatccactgcacacagctcttcagaagaaattctcacagagagaagagcctcgagaggaagtcagtgtggatggaactaaatttttagaaatckaggctcttagaattcttgatttgctatttcagatcttcaagtgtgtaattatctcagtaggtgaggccccagccagaaatcaggaatcact

SEQ ID NO: 332405 - DNA, 587 bp, Homo sapiens
cttccagactgctttctatgcatgaacctacatgtgcatgtgtgtgtatgtaaatatacatgtctgcaacttgctttttgtagttaactgcacaccagtggcatcctgccttctcatagagtggattcttttcatttctaaccactgcccagcactgctcaaatgggtacattataccttcttcagcccacccctgatcataggctccatgctattgtcaatttttattataaatacgtggtaaaaaaaatactgtttgtatatctgtaaagatccttgtaggatagattgttcaaagaagaattagtgcatgaaaacatatagacatatacattttaggagagattgtcaattaccttggaagatayagtaaccaatttcctttaattgaccatttccccataaccttgctaccattggacatacaatcttgtagatttttgttgatctgatgtgtaatttgcaactttttggtggctagtatggttgagcatcttttccatatttattgaacatctatatttactaaattgcatgttcatatcctttttctattcttattttgggtatttttttcttattggttt

SEQ ID NO: 332406 - DNA, 449 bp, Homo sapiens
cctgagctcaggagttcaaaaccagcctgggaaacatggcaaaaccctgtctgtatcaaaaaatacaaaaaaattagccgagtgtggtggcacatgcctgtggtcccaactgctcaggaggctgaggtaggaggattgcttgagcctgggaggcagaggctgcagtgagctgaggtcaaaccactgtactctgcactccagcctaagtaacagagctaaaccccatctcaaaaaaacaaaaagaaaaaaaaaaaggaatagaaaatcctacaaggggttacacaagtaactgaagtctcaggtaaagcatggacaaataaatgacagcacaggccctaggagacaaccgccagacaaatgtggaaagaaacagcmagtcagtgagagccatcgtgaacggaagtccaagacacaggtttaagacacaaagagaagtttcaaaagagtat

SEQ ID NO: 332407 - DNA, 536 bp, Homo sapiens
cataatgattgtgaacctgggggataatggaatagcaagaaagaaggagccttcacccttcacaatgtcatagaactgcaataccaactatgcagaaaagaattggacttctatcttattttggctactttatttttgggtctttggctttggctgcctacttgatctacatattcatttccttggtaggcaagtcctatggataccatctctgaaatatattttgcatttgactgctgwgcccctaccatttggtccaatccaccatcatctttccctggatgctgaaccacttactggccttgttactttcattcttgacctatagaatttgttttctaattgaaataattttttaaaaagattatattacctcctgcttaaaatcctctagtgacattgtcaatgccttccacctaaagaccaccagcaatgcacctgcagtaaaaaaaagttgggtttattgcttgtggctgcataccacggggagtcctggggtgttccagtaagagtatgttagaagggactttactatg

SEQ ID NO: 332408 - DNA, 536 bp, Homo sapiens
cataatgattgtgaacctgggggataatggaatagcaagaaagaaggagccttcacccttcacaatgtcatagaactgcaataccaactatgcagaaaagaattggacttctatcttattttggctactttatttttgggtctttggctttggctgcctacttgatctacatattcatttccttggtaggcaagtcctatggataccatctctgaaatatattttgcatttgactgctgtgcccctaccatttggtccaatccaccatcatctttccctggatgctgaaccacttactggccttgttactttcattcttgacctatagaatttgttttctaattgaaataattttttaaaaagattatattacctcctgcttaaaatcctctagtgacattgtcaatgccttccacctaaagaccaccagcaatgcacctgcagtaaaaaaaagttgggtttattgcttgtggctgcataccayggggagtcctggggtgttccagtaagagtatgttagaagggactttactatg

SEQ ID NO: 332409 - DNA, 505 bp, Homo sapiens
gtgcagggaggtggtgtaagaaggggcagaggaggcaggaaatgaagctgtcggggggaatgatggccctgcataatattcttaagacttttaaatagtgtgcaaaagtatttgaaggatgcactgaaagatattaatctgggccttgacgtcttagtctcacagttgaggtagatcccaccggcagatgcctacagcattaactagcagtgggcttgaggctattaacatttttaaatatatatacatatatatatactttatttccataggttattgggaaacaggtggtgtttggttacataaataagttctttagtggtgatttgtgaaattttggtgcacctatcacctgagcagtatacactgcaccctatttgtagtctttcatccctcaccctcttcccaccatttccccttgagtccattctgtcattcttatgcckttgcatcctacagcttagctcccatttatgagtgagaacatacaatgtttggttttcca

SEQ ID NO: 332410 - DNA, 571 bp, Homo sapiens
cctgagcagtatacactgcaccctatttgtagtctttcatccctcaccctcttcccaccatttccccttgagtccattctgtcattcttatgcctttgcatcctayagcttagctcccatttatgagtgagaacatacaatgtttggttttccattcctgagttacttcacttagaatatacttatgatagaataatactcagccataaaaatgaatgaattagtgacattcgcagtgacctggatgaggctattaacattcatctgatagagcaaactctaggtaagcaggaaagctcttgattctccctatcgccaaccctcactcccacagtcacttctagagttttgtctgttactgaaggcagaattatttgaatgcctacttatctacatgccatctttgttgttgggcctccttcctttactgtaactaattgattttgggagcgtatatccttcttaccgagagtcttttatggtcctgatcggaatgtggactcctctttggtgagtaaaatttaggtaagtacaagcttttgctctcgactgtctgagctgctgagaatat

SEQ ID NO: 332411 - DNA, 567 bp, Homo sapiens
gctttctggcaccaccacctactcttggcctcccatcagatactttaccacactgttaatgtgaagttgcctgtttgtatgtcagaagcttaaacctaaatcgaaaaaaaaaaaaagtgtattttagatcamctggctacaagtttatgaagacaacacaactgtgtatagcagaagatagcaaactgtggttcacagatcaaatctggcttgttgcatgtttttgtatggcccatgaactaagactagtttttacatttttaaactgctgaaaaatatcaaaataaagataacattccatgctatatgaaaactgtaggaagtaaaaattccattttatgggaacacagccatgctcattcatttatgcatcatttatagttgttttcattctacaatggcagagttgactatttgcaacaaggactgtgtatggtgttttcaatgctacacagtgctctccagcaacccactaatcacgaggatgagattacaactccacagcatttaaagtgcatatctctctctatggtaacatttaaaaaaattaccagtgctatagccacc

SEQ ID NO: 332412 - DNA, 581 bp, Homo sapiens
tggaaaatatctaaatctgtgatgttattgaatcagtggtatcaaaggttaattttattagcttttctggacttttaaccattgcccatttggtaaacatttttttcagaaatagaaartaaatatcctgtcagatcagcattaacatatgaatatttgaatcaatttcgataaggcacattaactttgaactccaataaggtgaaatgtgatatcattcccaaaatgtatttttttttgccttactaagctagtattacaaaaaatactcattcacatgatattttgaattttattaataaaaaaaatttagaaccttttttctttctttacataagtacctgcatcctacatatatacttgattttgctttctggactgcaaagactaaaatactatctgtgactttacagaaaatgtttggcatcctctattgtatagtcccaatttataacattgttgtgatagctagttttgtgagtcaacttggcaaggctatggcccagttattcaatcaaataccaatcttcacaatcttcacaggggttgctgtgaagtactttgtagatgtgattaacatc

SEQ ID NO: 332413 - DNA, 556 bp, Homo sapiens
cgttcaggctgggtataacatgattggactgatacttcacaaagaccgtcctggcagtgatgcagagaagggaccacggggggrcaaggatgaaagctcagggtccacccaggaggctggtgcaggactgctgataaggagagagataaagcacaagtaggtagggcccaggcactggggctgggcagaagatgaaggatgagaggagggttgatgcaggacggttgctgggacctgatgatcactgagccacagaggctgaaagaggcaaaggcttcaaacggattcccaggtttctgacttcagaagcagggtagatggtgctgccattccctgcaacataaaacacaggaggaggaggagtgggtttgagggaaagatgatggctttaagtctgaacatggttttgaggtgcctgtaggccaacggttctcaaactgtggtccccagaccaacagcatcagcatcactgggaactggttagaaatgcacattctcaggccctgactaatcaggagatctgtgggtgggcccagcaatctgggttttaataaac

SEQ ID NO: 332414 - DNA, 608 bp, Homo sapiens
aatggggttgtgcgaaaagcagatattgtctcaactgttctgaagttgaacaatgttactttcaggtgaatagactgttgagactattttgagttgttgatggcaaccaaaaaaaaagggggaaggggtggaattacagtcactttcctccagcatccagtggtccttaaaacttycaccctcaaatctccaaatatgctggcttctaagaagtgctttccaagaccgaatatacttcttgatcagggtaagtgatgaaaatgtgtatttaacaaggggaggggatcttgaaatagcctgaattatgcatgctgtggcctatctacccccaccgtgctaatggctcagcctataaagttttcagaatcagaaaaataatcagagatgctagtttctgaaggagcgacggaggactaggatgactagctaactcaaggtgcatgtagactttctgctgttcttactttaggaaaggtttcttggaagactggaccagggagttcctaattcttccctggaccatctcaggggcatcctcggtgtgagtggaagcatgcttggatgcagcagcctgaatgaatgtcaagttcactgcatctccaccacaa

SEQ ID NO: 332415 - DNA, 588 bp, Homo sapiens
gctggcggcctcgtctgtatttatttagtgctctgggggagtttttctctttacgcagcgcctgtagtcacggctggaaccttggctgggggactctgagggataagaggggattcggggggaatccgaactgtacctgttcagagatccgcgaccttgcagccggggctggcggaactctgatagggagatagagggataggacaggcaggcggggaggctccgggtgctggggcgacaggaaaggggtggaggctgggctccgggatccgggtgcccctctgcggtccccttctcgccctccacacacttctctcggggctgagttgggggatcgcggacggtctggagaaatggagacacgagtccrggggcgcggaggggcgggcagcgcgcggagtggtgagactgagccgcgatggaacgcgctggggagacccagcctgttcggctccagggttcggagacatcctgggctgaaggcggcggcgaaccgaagaagccggcatattctgcccttcgcgaatctttttgcggtctgggcttgctgtacataactcaatagccggaagcccttaccccaaaaag

SEQ ID NO: 332416 - DNA, 508 bp, Homo sapiens
gagtcaatctatcttttaggctaagtattcttggtaaagtcgatggttccatggagggaagggaggtttgtgttggagctggacagtataagatcacaatgccagggctcacagcaaagacggatttcctctggtgcttttgactaccaggcacaatcatagctggacaggtcagggattcattgagaaggaaagaccagtccacttctggccctgttgggttggtagactggctgcttccatgtagcacagcaaggggctttatagcaggyagttctgttgagatctttagtgaaggagaaattgggaggctgaaaggctcaaaacagacatggataggtctgtgtgcaaaggtttcaccccagttctgagtctttctgagcatttttcttccctgctttcagcatcttcagaattcttacttgcaatgaggaaggccagaactttttcatttagggcaaaggggcatttactgattttagaactgatcagctactaaaaaaactgg

SEQ ID NO: 332417 - DNA, 467 bp, Homo sapiens
agttttatgataattcattaatatgtttatttgggggcagtgcaccactttcttctgctattcataaattcattccttaatttgaaaataagaatatttttgagttaatattttttgttagaaatatagttttcagttaaaatatttttccagatacaattttaaactgagagcatttttaaactaattttatttttaatagtttatgttttaacactaggttgatttcatstcaaattttttttctgtatgtgctcataggttataaaatttatagatcttaatataacacatcaaaacaggttgttttatttataatatttatacttatgaagggattatacatgacattaaatagtgactgttatttatttactgctttgctttttggcaaaattttgtgtgtgtgtttttttaatgcaggaaggcctataataaattaaagtagtagattctgacatttactt

SEQ ID NO: 332418 - DNA, 556 bp, Homo sapiens
gatgcctcatgggtacaaaaatacagttagatagaatgaatacgatctagtatttggaagcaccataaggtaattaaagtcaacaacaatttattatattttaaatgttacctaacagagtagaattggaatattcctaacacaaagaagtaataatggctcggggtgatgaataccccatttaccctaatttcatcattaaatgttgtatgcctgtatcacatgtaccccataaatatatacaactattatgtactcgtaataatttaaaaaaatcagagctgggtcttctgaacaargacttccgtgataacaaatgaactttctaccaggaaaagagtatatcctgagggggaggtggggatagtttatggctaccaaaaaactagaaagaatgaataagacctactatttgatagcacaatagggtgactgtagtcaataataacttaattttatatttttaaataactcaaagaatgtaataggattgtttgtaactcaaaggataaatgttttaggggatgaataccccattcttcatgatgtgcttatt

SEQ ID NO: 332419 - DNA, 584 bp, Homo sapiens
cagaccccctcatgcaggaatagacaccctcatgcatttcttcatctctgggattctggggttcaattagctctgtctccttatctccatctcatttacctggctccctgataccatactcaagcaccacctcacctttctctcacatgacattagtgctcagtgctttttgcttcagaccaaccactctgatgtggagcctattggctatggaacatcctgacccatatggccataggttgaatgtgccctctctctccatgttctaatatatataatttcctgttataaatatcttataaacagctgtctaagaagttctaaattgttgctgaataccccatactacttcttccctcatttctcaaacctgatctcctctgccttcctcggcggcagctccacgtccttttcstcactttcagagagactgtgtcctcctccttcgtgccctcgcccagtgggtctgcaggggagggagggatgcaggtactgggatctccttgcctcccagcccagcagatgctcagactgttgtacaggagaatggtgcatcttagaggagcacccatggatgatggtcc

SEQ ID NO: 332420 - DNA, 614 bp, Homo sapiens
cctatagggattttgtaaggtttaaatgagttaatacatgtagtatacttaaaaattcctgactcatagtaagtattcaaatcctagcttctaattattttaaatttatttggtatatatatatatatatgcactgttttagtagaagttaggaatctgagtattttttcaagaatgagaaagcaattcttacatccttgattaaattttaaacaatttcttcactgattcactttaattatattctgagattccatttgtatagtgatctgtttccaacgtttgtaattttatgyctctaatctttacaccaattttttattttagttttgaacatataaagaaactgaggcttggagagcttctatcaaaagataaagttagcaagattattaatgatttgaagtttacacccacatctcccaaaaatggctacattcttagaggtggtcttgcttcttcaaaggatatgtacgttaaagatgatgtttccaccatataaaacttccttttattataaaatacttacgaatggattgtatttttagttgttatatcttttcttctttgacacattgtttttgtaatgtgatattatattattcatttttttg

SEQ ID NO: 332421 - DNA, 614 bp, Homo sapiens
cctatagggattttgtaaggtttaaatgagttaatacatgtagtatacttaaaaattcctgactcatagtaagtattcaaatcctagcttctaattattttaaatttatttggtatatatatatatatatgcactgttttagtagaagttaggaatctgagtattttttcaagaatgagaaagcaattcttacatccttgattaaattttaaacaatttcttcactgattcactttaattatattctgagattccatttgtatagtgatctgtttccaacgtttgtaattttatgcctctaatctttacaccaattttttattttagttttgaacatataaagaaactgaggcttggagagcttctatcaaaagataaagttagcaagattattaatgatttgaagtttacacccacatctcccaaaaatggctacattcttagaggtggtcttgcttcttcaaaggatatgtacgttaaagatgatgtttccaccatataaaacttccttttattataaaatacttaygaatggattgtatttttagttgttatatcttttcttctttgacacattgtttttgtaatgtgatattatattattcatttttttg

SEQ ID NO: 332422 - DNA, 479 bp, Homo sapiens
aataaatgggaaaaataagcgggaaacttcttcccaaaaagaagtccttgggaacataggaagaaatggaattcttcccaatgtgagttctgaaatgaaatgtaaaattacagtcattaccagggcatacatttctcccactataatgcaacatgaaaagataagattggtacagatgcagaaaaaatattttcaacttaggactctgtgacaaaatgaaagtatgaggcacatccacaaaaatagagggaacagaagggacagtttgcagtctgaggatgggagagaagctatgaaataatatttgcagaaawgagactgagagctcaataaagttgcaaaatttctaggaagtgttgcagagacatttgaatctatggtgttatcaatctgcctaattatttatgaaagaaatgctggtagcagtaactattttattattaaaaatataatctagtagtttgagaagattgggatag

SEQ ID NO: 332423 - DNA, 539 bp, Homo sapiens
atgaacccatttgaggaaggactgcaggtcacagagaggtctgctcagtcaagcctgagtatttaaagtgttaccagcagacgctaaggagagtgatgcatgagaaaatagagcagtcagataattgttagaagatggactcacaaaagtgattgggaagtgcacagccatgtgagagagcctccacaggaattgatggctgtgtaaaagttaaaaacaacccaggccttaaaarggaagtcataacgctagaaaccaattttagaaacaaaaagaaagtgttggtgttcaaaaaagatataccaaaccaccaggagacaaaaaggaagtagtggggggaaacagacacatttgaaagtacattctctccctgaggtcatagattttctttctcagccccatgccctgaagtgtactgagtttaggaccaaaaggaaaatgccctatttgaagtctgaagggaattaaaatgcagtacaacatttcctcttctgtttttagtttgcagcctctgggcaactgccaactaccagtaaaaa

SEQ ID NO: 332424 - DNA, 539 bp, Homo sapiens
atgaacccatttgaggaaggactgcaggtcacagagaggtctgctcagtcaagcctgagtatttaaagtgttaccagcagacgctaaggagagtgatgcatgagaaaatagagcagtcagataattgttagaagatggactcacaaaagtgattgggaagtgcacagccatgtgagagagcctccacaggaattgatggctgtgtaaaagttaaaaacaacccaggccttaaaaaggaagtcataacgctagaaaccaattttagaaacaaaaagaaagtgttggtgttcaaaaaagatataccaaaccaccaggagacaaaaaggaagtagyggggggaaacagacacatttgaaagtacattctctccctgaggtcatagattttctttctcagccccatgccctgaagtgtactgagtttaggaccaaaaggaaaatgccctatttgaagtctgaagggaattaaaatgcagtacaacatttcctcttctgtttttagtttgcagcctctgggcaactgccaactaccagtaaaaa

SEQ ID NO: 332425 - DNA, 592 bp, Homo sapiens
aaaatgccctatttgaagtctgaagggaattaaaatgcagtacaacatttcctcttctgtttttagtttgcagcctctgggcaactgccaactaccagtaaaaagctccctatctcagggcatataattctggtacgaaataggcgggcggtgcaaatgagaccttgactgcaacttttatgtttatacaaatttgtttccctgttctgtgtgtgttgagctggaaagacagtggcttatttagacctcaggaagtgatgatgtaggttgtcttagagtttggaattaatacactcacgacaagagagatttaagtaccacggaaaaacttccaaatgcttctatcatggggttagtttcttaaaaggcctttaaaagagtaaaaatgatctgtcaaaaggcttggtaatgttttgatatktggatacgcaagggaacgatatgaatcttccaatggaaatgggaacctacaaaaaacttccatatgctttaaaataattttcaatgtagctaatgcccctcataaatgagcacaattttattttcatttcgtagcctctggttggctgtcagtcctcatctgaacactctc

SEQ ID NO: 332426 - DNA, 633 bp, Homo sapiens
ctattacccagggatcagagakagaatcagtggtaggtgaaaagaacagttccctcctgttctgtcacctctctgcaataaatgcactttggtgatattgaccttttggtaaaaacctaattctctattccacatcttctcatcctccagagaagagaaataatctaacccataactttattaatgaatgaaccttatttagaaaacagttataggcattacctataccagcagccaccactgtattacttataaaatagtgctttctgctagaaaaatcaataatcctggagtattatgacaatgactttggtttcctcttaagtaattacaaatccaagtaatcagattgctattattagaatgacaatgctttatgagatttcaccttaatcgttcacaataactcccttttattcagtgatagtttaaatgatgtccttgctgtatatcattatttttcacagaaaattgcatgagatcttatgcagtagttttgaaattactgcttgttgtcaccactatatacaaccacataaacagtatgtggtttgtacagtagatcatttttcttgtttatattcagcaagctgtcagtgctacacactaacaccagctgttaaaaaatgacag

SEQ ID NO: 332427 - DNA, 633 bp, Homo sapiens
ctattacccagggatcagagatagaatcagtggtaggtgaaaagaacagttccctcctgttctgtcacctctctgcaataaatgcactttggtgatattgaccttttggtaaaaacctaattctctattccacatcttctcatcctccagagaagagaaataatctaacmcataactttattaatgaatgaaccttatttagaaaacagttataggcattacctataccagcagccaccactgtattacttataaaatagtgctttctgctagaaaaatcaataatcctggagtattatgacaatgactttggtttcctcttaagtaattacaaatccaagtaatcagattgctattattagaatgacaatgctttatgagatttcaccttaatcgttcacaataactcccttttattcagtgatagtttaaatgatgtccttgctgtatatcattatttttcacagaaaattgcatgagatcttatgcagtagttttgaaattactgcttgttgtcaccactatatacaaccacataaacagtatgtggtttgtacagtagatcatttttcttgtttatattcagcaagctgtcagtgctacacactaacaccagctgttaaaaaatgacag

SEQ ID NO: 332428 - DNA, 408 bp, Homo sapiens
ttgtgtgtactatatatgtgtatatattttcatatgcatgtttatatctttatttgaaatgggtgggtttatgtaaaaaccttcaaaggttgatgactgctccattgcaggggaagctatctagacaaactttggctttcttatatctattttaagtatacatttaaacatatatagacatatctgacttctattatattgtgacattttggtgatattctatgaatagcaatgtagtgatatgctttttagtaacacaacttgtccaaagatctcataaccagttaccgtatcaggaatttatcacmaatttttctggacaactacaacgggtattataagatatacttaacccgttatgagagaaccccataggttgtcactcaagatccatttaattccagctta

SEQ ID NO: 332429 - DNA, 553 bp, Homo sapiens
catagtgggtgttcaattagcatgtgctaaatttcgaaaagaatccatgaatcgtaagacagtaatggaccttactcggctatgatggtagcagggagaacatgtaattcatttttgcctgacactaacaaagtgtccttctgcttttctgggcagccactaaaatgtataaaactgctctggatgattatttagagtcctctcaacctgttcttttctatttttaagtatgtaataatttacgttaaagaaaaaggaaggggaattttgaaattatttgtaacttgtgacctcttggtttttatcttggtgcagtttgtctaaaggatgaaacagcatamataaccatacacatttttattgttaataatttattatttcttatgaagtgttggaccacatgtaaggtgcttgtttatgttaattcactgattcattgtgactcttggcaattactttcattattaggattttgtagacaaagaaactggggtttgagaggttacctgtcataactagaaagtaaggatttgagatgtgatctcaagcagca

SEQ ID NO: 332430 - DNA, 534 bp, Homo sapiens
tattgccctttattaaaatccacttgccttattcttatttaggaattactatgttaccaaagtttcagaatcttccagactgaaagagccatgaatgaactttttgtctgactccaaatgcaccagtttctttattctccttctacactggcctcgttgttgcagcccaaaatggcagctgtatggttcaagtgggtatcctctctctgaaaatcaaagagaaaatacattctgtttcagcataacacaactattatacacttatattttacttattcttcccctattgtcgggctttcataccagaggaaatgtaaggctactgtctggtcctcaaaggagcttttgagtcaacacgatcatccagtgtaaaaaggccaagcatattccactgctgatcctatttctttccttaggatgccctatagatgaggctactggcaagaaagaacgctttttttcctactcagtctgaatttctgttttccttacagccaacacattgwgtacaggtctacatatatacgcatatat

SEQ ID NO: 332431 - DNA, 631 bp, Homo sapiens
tgagtcaaccctaaaagattattcctgcaatatttcacttcaaattatgtaatgttctattctttttgcgataaacaaatatgaaatgatggtgaataaatcagacagaaagcatatgatttatgactaggtgaaccttacacctttgcagatttgaacaattgcaagctttgcagattgaacaagttacttaacatctctccatcagtatctttatatgtataataaatatactaataccagctttctaactttatttttaagattaaataaagtaatttaactaaaagaattagggcagatttttggcacattataagctttctatgatttttaatgtcaacattcccatcctattaaaattcacatttggaaagaatattaaagatatctattcaaatattttattatatttaacatgagattgtatggctaaaaatatgcagctttacttcttytcatataatgtttaagcaaattaataccatgacttcctgaaatattatatttatctttatagtaatggatatctaccatacttctgatatagaaggttgtatgctttgatttttcatctgaactttttcctaaataaaaagacattacaaaaattagagcctccaagtattgc

SEQ ID NO: 332432 - DNA, 637 bp, Homo sapiens
tatacacaaaagagcaagagtttcaaagttacccaggggaggcctgtatctaaaatctagctgtggcacttattagctatgtagctttagataaagttattttacctttcctaatgtcaatttcctcatctatacaacagatagaataaataataygcaacttgaagggtattatgagatttcaatgacatgttcctttgaaagcatctcaatcagtgctcaaaaatgttagtttgctgtcattattgttgtagtctttgtcatccttatcattttgtcactgtaactggaggatgactgtgaactaaataggtagataaaatgaagggggctatgtttccagaagcatgtgcaaaggcacttaggcatagtggtgaattagatgtggattacatagggtcatgctttggagccatttatctggcttcggaaatgcttacttgcttgctagctacccaaaagacatgctgacctttgaggttttttgccctttgttcattgttactgttctgctgagataacaaaattcagtgaaaactttcagctcagtatttccaataaagatctttgaccttgggtaggattttttttggtacatgacccaagacttgctctgcttgattgttaatccatatta

SEQ ID NO: 332433 - DNA, 558 bp, Homo sapiens
tattcatccattccttcaaattccagaacaagtcctcatctacttttcccacttaaagtgctttgaaaggatgatgtgtcatatgccatatattattaatttatcttcttggaatgtaattttaccaagagaaaacatcatttatttacatataatctgagtagatacaataaaaatttacatcctatcagtatgaaacacaaatactgaataagtacattttactaagaagcatattacaagatatttttatattattttaaagcttctgtgctagaaataggaaataagttattatggtctgcaaccttagtaactctgtgcaaagattatataaatattacatwgatgtgtatttcttgttaataagggtgtagttggacactgtagctaataattgtgataattgaaataaaataattgtgataaatgaaataaaaataaatgtatatataacacatattaatagaactttttagtttgtttgcttttttttaatgtattttacaatagtccaaggttattcattaaacatttaaaaaagagcttcttcaagcc

SEQ ID NO: 332434 - DNA, 529 bp, Homo sapiens
gaaaatactatacgtttggctaaattcttcataaaagaagatttttaaaatgtcatcttgcctaaaatttctgcagtgaaaaggaacaagctcgtcattatctgaattatttgtgttttttgaaaaattgccttcatgctttgtaaaattttgaataaatgttaaaaacccttattacaacctcctacacagctttctagtaagccacgttgatgaggtacctggtgagtgtasagcactgtattttatatatattctacatctttatacagattaaaagagtctttgaaaaggtattcagcattccaaatcacaggcactttcaaaagcactttctataccaggatactaacgtgaggaaaagggtaagtaagccagttttaaatcttttatttctgcagggttttgttttgttttgttttgttttgtttaaagtgaagactttccgttttctgtttgtttatggccgctacacacattctagagttttatagcctaatccatgtatttatctaaactaatgtttatc

SEQ ID NO: 332435 - DNA, 616 bp, Homo sapiens
agtaatacaagtaagaagtaattcagctaagatcaatcttagctgtagactatgtttacgcactaatggattctggcaatctctaatcagtatcttcaagacctaagtaggtcaacagcctgaaaaataggaaatcatcttcagcgtaagatcacaataacaaaaatcaatatgctgctcagttgttatattttaaaacagcgctatgaatctattcaaggccayaaggaataaaaatatcaagaactgataaatagaggtacctcatttttgtcccaagtctacagaccagagtatctttttgtcaatagtcttgctcctaactttagccttaggttattaatattatctagtattggttttaagaaactcaagaaaaaacgattgctaaaattttaatgtaaaattttaaattgttttggtacactattttgatgcatcataattaaatattaatacttgaagtttggccatttttttaaagatttaaaaatattattctccatcactattatgtttctttcatttcttaaatttaaaattttttacttgttttaggaatggtgaatatttttccagaaatttgttaaatgattattctcagagaaaaatacta

SEQ ID NO: 332436 - DNA, 616 bp, Homo sapiens
ctgttcttgttatcacatcccattaaaaatgatatcattcatccaattagatgtatcattatttttaagaagtgctttctttatggttaaaagtcagtattaatttgggtagtagatatctgttgtaattttaagaaatgggtatgcattggtgtgataaagtaaatttgttttaaatagggaatagttttatcattgccagcaccatgcattgaatattgtaggtgcatggtaaatgacagcttttattgatcatgagratgaaaaagtaattgaaaattgaggcacaattggcctaaactgcattctagaaatctgtgataaattcatttgaaaaatacattttcctacttacctatataatattgtataatataaataattgtttttagtcttacagaatttaggatattgtaaaatttgtaaagttcgaggtagaaacaaatcgtttcatccaagttccttattttgcatccaaaaaaacagaaactctgagaatttaaatggattttccatgatccaaaaccttgaactgtacccttaacttcagactaaggctaagttcttctggttataccacctgccttcttaattgctttgggctttgtgcttactc

SEQ ID NO: 332437 - DNA, 350 bp, Homo sapiens
gaaatgaggatataaatgtaagtaaaacaaagctcccagcctccaggaatctacaatttaaatggagagatgtgttatacacagaaacacttttaacattgggtcaaaaataataggtaagttatataaaagaggaaaaaggatgtataatggaggctgagaagtcgattcaatctaagctgacckagagaattcagggaaggatttatgagcacggtgtcacacgaactatgtcagaggctaagaggtacctttcttttaggaaacctaagataacatttcagtcatttggataaagctttttggaatggacccagagatttcttttccatatccaatagctatccact

SEQ ID NO: 332438 - DNA, 510 bp, Homo sapiens
ctgagaagtcgattcaatctaagctgacctagagaattcagggaaggatttatgagcacggtgtcacacgaactatgtcagaggctaagaggtacctttcttttaggaaacctaagataacatttcagtcatttggataaagctttttggaatggacccagagatttcttttccatatccaatagctatccacttatctaaaactcagagaggcaatggactgagtttttcttactccytcagtatagtactaattaatttactattactccccactactgacctctactacacgttcatgattctgttttgcagattactcactaaacctgatgtctgcatttgcatacttaatattatctctggcaatctctacatagctccataataagggccagagaatacagactttgaagtgtagatcagatcttcacaggcacctgcaagggtattccaggcagagaaagttgcacaaccgctggcttcactccgtaaaacaaagtaagaagt

SEQ ID NO: 332439 - DNA, 510 bp, Homo sapiens
ctgagaagtcgattcaatctaagctgacctagagaattcagggaaggatttatgagcacggtgtcacacgaactatgtcagaggctaagaggtacctttcttttaggaaacctaagataacatttcagtcatttggataaagctttttggaatggacccagagatttcttttccatatccaatagctatccacttatctaaaactcagagaggcaatggactgagtttttcttactccctcagtatagtactaattaatttactattactccccactactgacctctactacacgttcatgattctgttttgcagattactcactaaacctgatgtctgcatttgcatacttaatattatctctggcaatctctacatagctccatawtaagggccagagaatacagactttgaagtgtagatcagatcttcacaggcacctgcaagggtattccaggcagagaaagttgcacaaccgctggcttcactccgtaaaacaaagtaagaagt

SEQ ID NO: 332440 - DNA, 510 bp, Homo sapiens
ctgagaagtcgattcaatctaagctgacctagagaattcagggaaggatttatgagcacggtgtcacacgaactatgtcagaggctaagaggtacctttcttttaggaaacctaagataacatttcagtcatttggataaagctttttggaatggacccagagatttcttttccatatccaatagctatccacttatctaaaactcagagaggcaatggactgagtttttcttactccctcagtatagtactaattaatttactattactccccactactgacctctactacacgttcatgattctgttttgcagattactcactaaacctgatgtctgcatttgcatacttaatattatctctggcaatctctacatagctccataataagggccagagaatacagactttgaagtgtagatcagatcttcacaggcacctgcaagggtattccaggcagagaaasttgcacaaccgctggcttcactccgtaaaacaaagtaagaagt

SEQ ID NO: 332441 - DNA, 578 bp, Homo sapiens
  misc_feature (1)...(578): n = A,T,C or G
ttgatgatatttctatatatatacacatataygtatgtgcagaaatacatacgaaatttaataactccatgcattactattcctaaaacccttttttacacaaaaatgccgtctctctcaaaagaaagaatttccatttgagcatttatatcttccagttccaatctcagcaaaacaatgattttttaaaatcctaagttccttggatttaggctgtattttatgtttacaaatattanngtcacttttttccttttaccagcaggtgtgttgggtaggtaaaacatacttttcattttatgaaagaggaaaataagccttgagtaaaatctaaagtccttcccctattcatgaaatccttcttccagaactcttatccctgatgcattaaagattctgaagctcactgaatacagcactctctgtgctcaaaagcaaccttttcagagaggccttctagaaccaccttatctaaaataacatttccatcatgttgcctgctcagttactgatttcttccattatcctgacttatttctttttagtattttcaccatccttacattatacatttactt

SEQ ID NO: 332442 - DNA, 618 bp, Homo sapiens
aatacacaatacataaagttgagaaacattggtcagagatttattgtattccacgaactagagcacaaaacactttttctaaaggattgggtcctagagtaatggtggtggtagaactgggaagaggaggggatggtgagttgtgagtgatgatgcaggtgagtatctgttggcatcagggtttaaagtgaatgggtgaactagaagctgtagtctgaatgaactgcaaacgtaaccaccattagatccagagccaaccctcatgtttctgactttgctgagcaggaaaagtcaatgtctgctacctaccacagcacctaatagcagggtctctgcccataaaataagaaaaatttctttattcattggattcttttcctcatggattcagggtgcaactagatggccctttacaaacacagaactctgtccacccctgttttgtacctgtgcctacaagattctgagacacaggagtccaggcagttataccagtccctcttgtgttcagtgctgtcacaaggaagtggtttagttggcatccgaacagaacctggggtcagctgytggcatctcctgattagggttgagctgtccatatatccacattaatcagga

SEQ ID NO: 332443 - DNA, 530 bp, Homo sapiens
gcacacctatatctataccggcacttggagtctatcctccttccttaaatatgagctctgtaatttagtcttagttttatttccaaagtactacaatgttgtccccattttctggctcaacattgatcagcttcacaatactgcaaaaactcaggaagcttttaagtttaaaatagatcctaaacatatagtatctgtctgtctgtcagtatctatctatctatctatctatctatctatctatctatcttaataacagcacatgaaatgcctctaaccacatcacatgtttctacaaactgtgctacatcttctcytggcagattgccactgttgaaatctctccatgctgtacctataagtaccatatcttgttgatgtgcaattatggattcaacatatgaatgcagacaaatcacttgccgtctacagtttctaggccagtgaagcatgttgtaatacaaacaaaaatcaggtgacttttagaccacaaacaatactaacgttaactgtaggccttcaccttgatg

SEQ ID NO: 332444 - DNA, 597 bp, Homo sapiens
accttaccatattatttctttaagtccgtaattgtgtataccatagttacttaaaaagatagatctttcatcaggtactcttcaggtaagtttcttctctcaaaactcatctagaggagcaatcatataacatattctgaagaaaacttcttgaggatactactataattaaaaatattttctttaggaaaaggcctaacattgaagttctgatgaacaattgtcatagattctaagacccagttttgtaaggagattgccttaggagtctggctagattccagggatgcaattgcattaaatcttcctaattcttcacagaagattcaaatgaatacagttttgtaccctgtacttaagtatgaaaagctaccmaaaacaaaacaaacaattaagaaacaacttctgtgtatgaaatgtatatcgatggatggtcgatagatggtccatggaaatgtcattttttataacagggaacaccatttactaaagcagcaaatctttacataatgaaactattatataaattttatataaattatacaaaatggttggtcagataagacagataatctaatatcaaaacttgtgaaatgt

SEQ ID NO: 332445 - DNA, 594 bp, Homo sapiens
gtgggccagtagtctcttgcggcacgtaaggtggcccgggtgggaacgttgccagccagaggttcctggctggcaaagtgaccaagaaaaatcctgcgtcactatggagcacattcgatttgctatatatatttgtgcaaattggcaaacaaaagaggactatggcccacaagcaaatccagtctgcagcctgttttgtatgacacttgagataacaatggttttgtatttttaaagggtataaaaaacaaaaggaagaaaacaaagaagaatattgattggggacatatgtggcccacaaatcctaaaatatttatcatctagccttstacaaaaaaaaatgctgacacctaatttaagttttatttttattttattttttttgaaaaaggtcctatttgagtggattcatcatggttaatatggggcagaattatgtaagtcctgtttgaatcttctctatattctcaggtttatgggatcattaaagggctgatacctctatagctaagtcaggtaaaatcacctggaactccaggcctcaagccaggtccctttaagcagaatggcctagagctgggctggaactggcag

SEQ ID NO: 332446 - DNA, 594 bp, Homo sapiens
gtgggccagtagtctcttgcggcacgtaaggtggcccgggtgggaacgttgccagccagaggttcctggctggcaaagtgaccaagaaaaatcctgcgtcactatggagcacattcgatttgctatatatatttgtgcaaattggcaaacaaaagaggactatggcccacaagcaaatccagtctgcagcctgttttgtatgacacttgagataacaatggttttgtatttttaaagggtataaaaaacaaaaggaagaaaacaaagaagaatattgattggggacatatgtggcccacaaatcctaaaatatttatcatctagccttgtacaaaaaaaaatgctgacacctaatttaagttttatttttattttattttttttgaaaaaggtcctatttgagtggattcatcatggttaatatggggcagaattatgtaagtcctgtttgaatcttctctatattctcaggtttatgggatcattaaagggctgatacctctatagctaagtcaggtaaaaycacctggaactccaggcctcaagccaggtccctttaagcagaatggcctagagctgggctggaactggcag

SEQ ID NO: 332447 - DNA, 558 bp, Homo sapiens
aattgcctaaatattgtcaactaagattycccaaatttcttctcccagttcctatttgcatataattagaaaggaaaatcagggtagagtttccaacagttacatcttagcttttatattcattttgtcaaatttaaaagagaattccatgtttgtattgaaatgtatgtatgtatatgtgtgcatttgaaaaccaaatgtatatagtgtagagagatataattcattacaagtaaacttaatttatgaaataaaatttatcataaaatttgtttaagagccaacttatacatctcctcccatgggtaatgtttcatctcgaatttaagagaggaatcaatctgcaaatgctcattgagggcctgtgatacacagtgctgtgctatgtgatatgaaaagaataatacatgtaaaacgatgagttaatcaattcatttaattaatacgttgggagcatcttctacataccagacactttgctgctcattgggtgtatagcaacaactaggactagttacaacccaccaagaagtttataattcagttatttagaaaact

SEQ ID NO: 332448 - DNA, 546 bp, Homo sapiens
tctgtgaacagaaaaccaaacactgcgtgttctcactcataagtgggtgttgaacattgagaacacatggacacagagaggggaacaacatayaccagggcctgttggggagcgggggatgaggggagggaacttagaggacgggtcaataggtgcagcagatcaccatgacacatgtatatctatgtagtaaacctacacgttctgtacatgtatccctctttttttttagaagaagaagaaatttaaaaaaattttaaacattagccaggtttagttgtacatgcctatggttccagttagttgagaggctgaggagagagaaaaccttgagtgtaggaaatcaaggctgcagtgaggtataatcctgctactgcatgccagcctaggcagcagagtgagcccctgtctcaaaaaaaaaaaaaaaaaagcttcagtctgaccctgaagcatacattaatactcaggtcttttcttttttttttttaaatttttttgtagagatggagtcttgctgttttgcccaggttgttttcgaactcctga

SEQ ID NO: 332449 - DNA, 546 bp, Homo sapiens
tctgtgaacagaaaaccaaacactgcgtgttctcactcataagtgggtgttgaacattgagaacacatggacacagagaggggaacaacatacaccagggcctgttggggagcgggggatgaggggagggaacttagaggacgggtcaataggtgcagcagatcaccatgacacatgtatatctatgtagtaaacctacacgttctgtacatgtatccctctwtttttttagaagaagaagaaatttaaaaaaattttaaacattagccaggtttagttgtacatgcctatggttccagttagttgagaggctgaggagagagaaaaccttgagtgtaggaaatcaaggctgcagtgaggtataatcctgctactgcatgccagcctaggcagcagagtgagcccctgtctcaaaaaaaaaaaaaaaaaagcttcagtctgaccctgaagcatacattaatactcaggtcttttcttttttttttttaaatttttttgtagagatggagtcttgctgttttgcccaggttgttttcgaactcctga

SEQ ID NO: 332450 - DNA, 546 bp, Homo sapiens
tctgtgaacagaaaaccaaacactgcgtgttctcactcataagtgggtgttgaacattgagaacacatggacacagagaggggaacaacatacaccagggcctgttggggagcgggggatgaggggagggaacttagaggacgggtcaataggtgcagcagatcaccatgacacatgtatatctatgtagtaaacctacacgttctgtacatgtatccctctttttttttagaagaagaagaaatttaaaaaaattttaaacattagccaggtttagttgtacatgcctatggttccagttagttgagaggctgaggagagagaaaaccttgagtgtaggaaatcaaggctgcagtgaggtataatcctgctactgcatgccagcctaggcagcagagtgagcccctgtctcaaaaaaaaaaaaaaaaaagcttcagtctgaccctgaagcatacattaatactcaggtcttttcttttttttttttwaatttttttgtagagatggagtcttgctgttttgcccaggttgttttcgaactcctga

SEQ ID NO: 332451 - DNA, 541 bp, Homo sapiens
acaaactgtacgaaaagtagacgagggtcttatggaaggaattacctaacaaatacttggagtgagtgtttatcaggtatacttgacagcatttgcctcagctctcttattagagcataggstacatgaagtcatgaaactggtctgccttattaaactattgagtctctagaacataggcaggcacttcttaattatttgctgaaatttaagggaacactgactttttaaaacctttgttatctttctgttagaaatatctccttgaaaggaggatgaaaaaggacatgcctaacagtgcattttcaaatctgattaagcctgccatgaaaaaggaagaaaagaaaattgcaattgtaaatgatactgcaaatgatgccaaattgtacccttaaagtatgagtgcaaattaagcatatctatccaaacttaaaatgcacctacaggttgactcagcaattttcctgtatctgtatataaaagtggtttatacaaaggtgcaatgtaaaaaaaatggtcagtgcagcattctttattatag

SEQ ID NO: 332452 - DNA, 344 bp, Homo sapiens
tgtcaaaactctacgtaaaaatcttgcactgacttgccctaatgcttattaaattgagtttaaaaaatatttttacaaagcttctcaatgtcatctaccttttccttgcttgactcaaaccaagcaaaggcwttttaggatctgtaagcaatcctcatgctttctcatctcttactgcttgatttttctccttctttctaaaactttggccaggtttttctcctttcatattctttattatatcacatacaaagcttttcaaaaattatctcccaaagtataagttttctattctggtttcaaactcagtttgtatacttactctgccacttcaaagtggacag

SEQ ID NO: 332453 - DNA, 595 bp, Homo sapiens
agcggcagaatttttatgagtttgtttgaagacaacacacacacacacacacacacacacacacacaaacacaggctcctacattcctatactcccatctgccacctgctgtgctcaggcttctgaatgactgactaaactgaagacatgtatgtgtattaacaggtattacaaatgcaaatttccacagtattctaggctggagaataccacacagcagtctctttataatttgatggtggtgttatagaacagaaagagtccctctaaagttccaacagagactcagagaggttaagtgaattacccaaggtcacacagctgcacggtggcaatgccaggacacaaacagaagacttctgatttgaagcccaatgttttgttaacactacactgcctcttgtgatatgaaacatcccgttaaaggcaaattcacagaagaaaatgtaatttcctaaacagaaaatatacctctactggtccatcttgttggcctttaaatgtctgtggygccttgaattttgtagacattaaaaaggaccacaattcacaggaactaaacaaatgatcaccatctagctgcttatacaaatag

SEQ ID NO: 332454 - DNA, 576 bp, Homo sapiens
ataatttgttacattgcaataaataaccaatacgtggtgctatcaagttagtgtaattataataacagaggtactcaaacttggaaactgctaagcaaattatgatatattatcttgatgaactcatggatattgttaaaattacaagcatttttgtgttttctctaagcatgtgtgtacaaaatggcttgaaaaaacagagtgcagatacatgcactaattaaacaatatagaaagtatgcatgtatgcattttctyaaagatcactgaaaatttggaattaaataaatagctacccttaatcatttcctggattacttttaaatatacagaactatacaaagaaagaaaaaaaaatctgcaaatacaaattgcaaatgcactatttaatgtgaatggtgaatgttaaagatcatagcactgtgacctgacattgcagaatgagggaactgatgtctctccatgaataatcgtggtagattaacggagattttaaaacatgcctgcaacctctctgacactccttgcaccaagaggtgagatgtattttgcctccctttgaattcgggcttacta

SEQ ID NO: 332455 - DNA, 541 bp, Homo sapiens
taaataagtaaagtcaattaatattctaccaaatgtatttacaagtattagacccattgtttatcatcaggttgggtaattgagtttaactgcagtgagtcaaaactgaattggaatccaccacttactagccctatatatgacttcgggaaagtatttaagcaatctgggtctcagttccaccccacctactttcttttttttattttttttaagagatagggctgtactctgtgcaggctggaatgcagtggcacaatcatagctctctgcagccttaaactccttggctcaaacaatcttcttgcctcarcctgccgagtagctgggaccacatgcatgagccaccgcactcagctagttttccttatttttaaaataggggataacaattgttctcatctctgagggttactgttaggattatatgacttcttatttgtcgggcacttagcacagtgtcttgcttccgataagcactatataaatgtctgctaagtgaaaatagaaaatacaatgcctggcactcagaagggattct

SEQ ID NO: 332456 - DNA, 573 bp, Homo sapiens
ggtcaccatttttcatacctcaggcattaaaataaaaactggctgaaaatgctcctgcatgagaccacaggcccacggcggtgctccctctcctgcacacacaggtgggcccaaggaggggcccgctctaaaggcagcagcatcccagtgctgagggactccaaagygcaggtgacagcaattagcagcagatgacagcagcccttgaatctgtgccagatggcagcgaagggtcactgggagccatcaaccttccacaaggaagcccttgtgtttggcgactatcaaactctaaagctcttagaaacaaactaattattcagccagcagaagacaactgctaggtcacaacactaatatcagaataccattaaagcacttagagtgcacttattctaaatgtaattacacatattagctgataaaaacaggcatgctgcataatgacgaaaaggttgccctaaactcaaggagctaaaattctagtaattagtgaattgtcttgtggcaaaatacagtcaacaggttctaactttggatgaatgctgcttgtagttagagctagaaacagcc

SEQ ID NO: 332457 - DNA, 573 bp, Homo sapiens
ggtcaccatttttcatacctcaggcattaaaataaaaactggctgaaaatgctcctgcatgagaccacaggcccacggcggtgctccctctcctgcacacacaggtgggcccaaggaggggcccgctctaaaggcagcagcatcccagtgctgagggactccaaagtgcaggtgacagcaattagcagcagatgacagcagcccttgaatctgtgccagatggcagcgaagggtcactgggagccatcaaccttccacaaggaagcccttgtgtttggcgactatcaaactctaaagctcttagaaacaaactaattattcagccagcagaagacaactgctaggtcacaacactaatatcagaataccrttaaagcacttagagtgcacttattctaaatgtaattacacatattagctgataaaaacaggcatgctgcataatgacgaaaaggttgccctaaactcaaggagctaaaattctagtaattagtgaattgtcttgtggcaaaatacagtcaacaggttctaactttggatgaatgctgcttgtagttagagctagaaacagcc

SEQ ID NO: 332458 - DNA, 568 bp, Homo sapiens
ttagccaggcacggtggcacgttcctgtaaccccagctactggggaggctgaagcaggagaatcgcttgaacctgggagttgggaagtggagttcacagtgagccgagatgaygccagtgcattccagcctgggtgacagagcaagactatgtcaaaaaaaaaaaaaaaaaaaaaaaaagaaaaagaaaaaaagaaagaaatgccagcctgcttgccaaagtggctgtaccatgtggtattcccatcaacaatgagtggaagcgtcatttgttcccatgctcacaggtgttctgggttgacaggctttgtagtttgtttatgtgttttaagccattctaatatgtgtgtaatggtatctcactgtggcttaaatttggatttctctaatgactaaagatattgagtatcttttcatgggcatatttgccatatgtatattttctttggtaaagtgtcttttcaaatcttttgctcaactgtatttttttttcttgagtgttttagagttctttaaatcttctacatacaagtccttaatcacaatatattgctatggtttttgctttc

SEQ ID NO: 332459 - DNA, 516 bp, Homo sapiens
tccctacatggccctgtgtggcgtggcaggctgccttcctcttgggatctgtgagtaacaaactatttatacaatggcaatcttctcctgattggttggcctcatcatacttgaataataataaaacctatatttttaaacagttccttacccatctggaccttaatttcctcatctttacaatggtaataaaaagagtatttgcctcctagggttgtaactgggatcaaatgagttaatacctataagtgcaaagcacackgtcccgcacatagtaagtgcttattaaatgttagtgatgttaattacaactgatataggcactgtggaattacagtagaaagggcaggattctaaggtcagaggttcagttcctgactccaacactccctagcaaggtgactgggttattgaactttttttaaaattttaattgagacaaggtctcactgtcgaccaggctggagtgtagcagcaccatctcagctcactagaacctccgcctcctgggttcaa

SEQ ID NO: 332460 - DNA, 516 bp, Homo sapiens
tccctacatggccctgtgtggcgtggcaggctgccttcctcttgggatctgtgagtaacaaactatttatacaatggcaatcttctcctgattggttggcctcatcatacttgaataataataaaacctatatttttaaacagttccttacccatctggaccttaatttcctcatctttacaatggtaataaaaagagtatttgcctcctagggttgtaactgggatcaaatgagttaatacctataagtgcaaagcacacggtcccgcacatagtaagtgcttattaaatgttagtgatgttaattacaactgatataggcactgtggaattacagtagaaagggcaggattctaaggtcagaggttcagttcctgactccaacactccctagcarggtgactgggttattgaactttttttaaaattttaattgagacaaggtctcactgtcgaccaggctggagtgtagcagcaccatctcagctcactagaacctccgcctcctgggttcaa

SEQ ID NO: 332461 - DNA, 475 bp, Homo sapiens
atattggccaggctggtcttgaactcctgacctcaaatgatctgtccacctcggcctcccaaagtgctggggtwacaggcatgagccaccacgcctggcctgttttttattttttattttttgcttttgtcacttgtgactgaattttgtgaaaaacctttgtttcccagtccagggagagggggagtttagggcctcgccctgttgcccaggctggaatgcaatggtgcaatcacacctcactgcagccttgaacccctgggctcaagcaaacctcccacctcagcctctggagtagctggttctacaggtgcacgctaccacatcccactaattttttaattctttgtagagatggggtctcattatgttgcccaagctggtcttgaactcctgacctcaagcaatcctctcacctcagcctcagctgaatgagtcttgccttgttgctgatgaccttgactagaagatgttg

SEQ ID NO: 332462 - DNA, 559 bp, Homo sapiens
tatgaatttatactttattcctgatcttcctcactaggtgcctataattttgagagaaggtattatacctgccttctttatcactgtatccccagcacctggaccattcctggaacacagctgacattcagtaaatatctatgcatcaattaataacaaactaaattctcatataatcacataactgttcattttcaattattgtccaatttcaattctgatgccaaacagctctgaaggaacaaaaatgcagtcctaggcagaccctcagtgcaaatacaacagcaaatcaagccaaagagcacgcttgatcattactagtcattgccacaagagggaccagtacctttttattatccacaactttatggacatagatggtggcttgagtgtattcacgcaggtccctctgctgctgacacaataagccttctctgcattctggacagagttctttgggggaaaaaaaaaagggaaaacagaagtggctgaggaatcattgttaaagaatcaaagatctaaaaacataygtcaaagttactagtgaatattcattaaa

SEQ ID NO: 332463 - DNA, 506 bp, Homo sapiens
tgctcgtttgcaatcatcttatgtaaggcttcattttcttccccttctctttctaaaatctgaaagagaatgaagcaatcaactgtctcctgctgacagcacatgacctgcctcctccctacacccccgtcagaagtacagtgttaattcccctgggaagtcaacccagggaggtggcatgccatttccccagatgtcagtagcgttcagtaccttgcactgtgaacagcactctttgtaacttggaaactcaggagcctttggaaagtactgctgcagtttgctccaagcctctttagaaacaagccttctttcattttcagatatgcataactcacctgagtttaaaaaaatatatttggaaaaaaaaaaaacagctgaaaaaaagtcattatctatttcctatttcttaaacttaagaaaaatccacaggtacgcttttcttgctttgctamagtttggtatttctagctctcttttcttgttttcaaaaacttctgaatttc

SEQ ID NO: 332464 - DNA, 268 bp, Homo sapiens
tcacattgctggccgataaacagagctgagattccaacctaacaccatgaatgtctatacccaggttctctctactgctacaaaggctatttttgtatggttctggttgggtagcttgtatatgcataatactacaaatctgggaakgcctgaccagggatactagcttgagaaaagggctctctaaataggcaacataaactctcttaacatttctaagtacagttattgcatttctggtacgtgggactttttcctttagctcact

SEQ ID NO: 332465 - DNA, 554 bp, Homo sapiens
tgaaaagtctgagaaaaggagacaatttcaaaagtagcaagagaaaatgacttatcatatayaaggcaaattcacaagactatcagcagatttctcaacagaaatcttgcaggccaggaaagtgtgaaatgatatattcaaagtattggaggaaaaagattgctaaacaatagtattataccctgcaaagctattttttaatagctgctctttaaaaatgaaggggagacaaattctttccaagagagagggactttgtcactacttaacctatcttacaaaaaatgcttaaggaaggccttcaagcaatgtaaaagcatatgaaggtagaaatctcacaggcaaagtaatacacagtcaaatacagaataataaacactgtaatggtggtgtctaaaatacttacaacacgcaagataaaggtttggttaaattattaaaaataactatactaaaatttgataatgaatttagaatataaatttgataaataattcacaatgaatgaaatcagagtaatctctgacttgaacatgtagtgtgaatggggcagg

SEQ ID NO: 332466 - DNA, 554 bp, Homo sapiens
tgaaaagtctgagaaaaggagacaatttcaaaagtagcaagagaaaatgacttatcatatacaaggcaaattcacaagactatcagcagatttctcracagaaatcttgcaggccaggaaagtgtgaaatgatatattcaaagtattggaggaaaaagattgctaaacaatagtattataccctgcaaagctattttttaatagctgctctttaaaaatgaaggggagacaaattctttccaagagagagggactttgtcactacttaacctatcttacaaaaaatgcttaaggaaggccttcaagcaatgtaaaagcatatgaaggtagaaatctcacaggcaaagtaatacacagtcaaatacagaataataaacactgtaatggtggtgtctaaaatacttacaacacgcaagataaaggtttggttaaattattaaaaataactatactaaaatttgataatgaatttagaatataaatttgataaataattcacaatgaatgaaatcagagtaatctctgacttgaacatgtagtgtgaatggggcagg

SEQ ID NO: 332467 - DNA, 554 bp, Homo sapiens
tgaaaagtctgagaaaaggagacaatttcaaaagtagcaagagaaaatgacttatcatatacaaggcaaattcacaagactatcagcagatttctcaacagaaatcttgcaggccaggaaagtgtgaaatgatatattcaaagtattrgaggaaaaagattgctaaacaatagtattataccctgcaaagctattttttaatagctgctctttaaaaatgaaggggagacaaattctttccaagagagagggactttgtcactacttaacctatcttacaaaaaatgcttaaggaaggccttcaagcaatgtaaaagcatatgaaggtagaaatctcacaggcaaagtaatacacagtcaaatacagaataataaacactgtaatggtggtgtctaaaatacttacaacacgcaagataaaggtttggttaaattattaaaaataactatactaaaatttgataatgaatttagaatataaatttgataaataattcacaatgaatgaaatcagagtaatctctgacttgaacatgtagtgtgaatggggcagg

SEQ ID NO: 332468 - DNA, 554 bp, Homo sapiens
tgaaaagtctgagaaaaggagacaatttcaaaagtagcaagagaaaatgacttatcatatacaaggcaaattcacaagactatcagcagatttctcaacagaaatcttgcaggccaggaaagtgtgaaatgatatattcaaagtattggaggaaaaagattgctaaacaatagtattataccctgcaaagctattttttaatagctgctctttaaaaatgaaggggagacaaattctttccaagasagagggactttgtcactacttaacctatcttacaaaaaatgcttaaggaaggccttcaagcaatgtaaaagcatatgaaggtagaaatctcacaggcaaagtaatacacagtcaaatacagaataataaacactgtaatggtggtgtctaaaatacttacaacacgcaagataaaggtttggttaaattattaaaaataactatactaaaatttgataatgaatttagaatataaatttgataaataattcacaatgaatgaaatcagagtaatctctgacttgaacatgtagtgtgaatggggcagg

SEQ ID NO: 332469 - DNA, 520 bp, Homo sapiens
cttacagattgtgggtattaaaccttggccaaatgcatactttgcaaatactttctcccattatgtaggatgtctgtttactttgttgacagtttcttttgcttgcagaaactcttcagtataattaagtcccatttgtctacttttaatttgttacatttgctttttgagccttcttcataaatcattttcctagattaatgtctagaagagtatttcctaggctttcttctaggatttttatagtttgagaacttacatttaagtctttaaaccatcttcagttaatttttgtacacagtgagaggtatgtgtacmgtttcattcttctgcatatggatagccagttttcccagtaccatttattgaacagggtatcacttccccattatttttgttgactttgtcaaagatcagtcggttataggtgtgcagctttatttcagggatctccattctgttccattggtctacatgtttatttttgtactagtacctgctatttcagttactgtgacca

SEQ ID NO: 332470 - DNA, 538 bp, Homo sapiens
agacaccacacttgccagccccttgatcttggactttccagcctctggaactatgagaaataaatttctgttcttcataaattaaaaaaaaaaagaaggggaccaccatcccacccccagctcaagagcagcagctcagagattttgctctggtcacaagaacagagctctgtagcttttatcaaggaaactgacttcatttaaaattgagtgtagggctcttcaagtctaaggttactgttaaaaaacaatgaagaattttgtagaaagttattaaaaggaagctggtagctccatgagaacagcaagctaaactgaaggccagctattttaccagaaagaactaaagaaagagacagatttttaaatgcctccaaggggtcagagcaaaactaaaaaaatgtgcctgtaaatgctatcagacctcagagaaatgtgtgccctagggcattgttgaaaatamagcaattagtcagctattagtgcagcctaacagctataggtgataccatcagaagtagacagttaaatagaaaga

SEQ ID NO: 332471 - DNA, 537 bp, Homo sapiens
taaaaatgagataagccaactggcatctactagaatccagcccatcaccctgttcagattgtctcatgtctctcatggagtccattctgtcactgcattttcaagrtggtgactggctacaatttctttcaaaaagctttatataggcaggttcaataaataagaaatggtcccccttgctgcaattggtatcaagatcataactgaaatctatcactttcttttcaaccatccattctaaatttctctcactcacccagtactcctgcagaactaagttgcttgcctggtagcatgtctcatatcttcaagcctgagggatctgtcctggttaccttgccatttttaagccatggttgctacaattgtccatccacagttttcaccaggcatagaaacacaaaggaacaacccagtggatcctgaaattgtagacatactctcctcttcgctcctgatggcaatcaaaatgatgctcaaaaatacatcccatttttgtgctgaaataaagagtccaaaataaacaatcagagctcc

SEQ ID NO: 332472 - DNA, 497 bp, Homo sapiens
ccattctaaatttctctcactcacccagtactcctgcagaactaagttgcttgcctggtagcatgtctcatatcttcaagcctgagggatctgtcctggttaccttgccatttttaagccatggttgctacaattgtccatccacagttttcaccaggcatagaaacacaaaggaacaacccagtggatcctgaaattgtagacatactctcctcttcgctcctgatggcaatcaaawtgatgctcaaaaatacatcccatttttgtgctgaaataaagagtccaaaataaacaatcagagctccagtttgaggggaaatgtcctttccctgatgtcttttcccttgccactactccctctgctcccagcacagacctttaatccagtgggcctaagatctgtattatacgtattctgaagatgtgttgccggcagtgatggggtgggaggtaattctatcggtatctttgttgaatgcagacatctaataatacct

SEQ ID NO: 332473 - DNA, 607 bp, Homo sapiens
ctctgctggttttatgtatttctatacattacatacaataggcaatgtgctttatacattgcctggtgcataggaaatgctctgtaaatatccctgtggatgagagcttttagccagctgggactttgccatcttctctatcktcccagaatgcacctctgccatgcatccttcacagcctctgaattgtccttgaatgtgcttagtcagagttaattgcccagtaatatttgtggaccaaatatagtcttatgtaagacactgccagatatcttgagaaaatacaatgtcttctgcatttctcttcatgtatcagtctaggaaccctgttgaagaagagtcacttaaatcttacatggcttacaattagaagatacatgatatacctttctaacttttcccaaacattttggtaaatctctttcaactcttccatagatagaatctatagttagtagaatcagactggtggccatctataatttttggatataaagctcatgctgtttcagatcttcaaagaaccctgtccaaggcaggattgatgtgcaagagatttattgaggaaatgccacagagcataaggggtgggggaagtgggagaaaa

SEQ ID NO: 332474 - DNA, 607 bp, Homo sapiens
taaatacatagtaaaagaaatatatttcagcattcgctgtccaatatctacgacaggtgagctgcacctttcatagagcttagttaaaaacatgttaccacagctacaccacccccctacagacacctcttaacacatttatctcagcattctagtgtcataggtgctttgctcacagatggtttgaatgtggtatggaaaggaagttaactaaacttcgtttccactgtgagaaaaaatgctgattttctttgagagaatgttctctatttatttatttatttacttatgtatttctttctttttagatagagagtgtcactctgtctcccatgttggagtgagtggtggcatcatagtacactgcagtctygatctcctgggctcaagcaatcctcccacctcagcttcccaagtagctggggctagaggcacaactcaccacacctggctaaaattttttgtagagatgaggtttcgctatgttgcccagactgatctggaactcctggactcaagcaatcctcctaccttggcttcccaaagtgctaggattacaggcataagccactgtacccagtcagatgttctctacaataaaaaatat

SEQ ID NO: 332475 - DNA, 487 bp, Homo sapiens
tccagttgttaaatgcttaccatcaccccaatatttctaccatccaaaaactcttgattatggaaaaactgtttatgaatatcaacttcctcacctgcaaacaaatgaaatgagtatctacctcacaggatagttttaaaagtcaaaagaaatgtttatgtcaaagtcctgtrtggattgcaaatgttatgtattatcaaaaattcagcaaatatgtttcagctcctaatatgagctctaagaacttgcagagtttgtaaagatcactagtactatggtccctaccctcaagttgcttacaatctagtggtgagaaatatgtgtaaataacttaaaattatttaagagtgtatcaaatgttttataacagaggaaaaagcgaagtgctatgagattataggaatataagggattttacctggagcaccaaggaagacttcattaaaaaatggaattttaagataagctttgacaaataagttgcatt

SEQ ID NO: 332476 - DNA, 588 bp, Homo sapiens
caaagtcctgtatggattgcaaatgttatgtattatcaaaaattcagcaaatatgtttcagctcctaatatgagctctaagaacttgcagagtttgtaaagatcactagtactatggtccctaccctcaagttgcttacaatctagtggtgagaaatatgtgtaaataacttaaaattatttaagagtgtatcaaatgttttataacagaggaaaaagcgaagtgctatgagattataggaatrtaagggattttacctggagcaccaaggaagacttcattaaaaaatggaattttaagataagctttgacaaataagttgcatttgtatcaactaagaaagtggaaagaaggggcatgcttggctgatggatgaaatctcaaaaacattatcatcacaatgcctgttaagaaaatcataattgcattgataaatctgctacataaaaaccttacttgttatttccatgtaaaatagaaattaggcattatagattatgcaatccagcatgcctatctataatcttacattgaatcaagggttgactcaatgtttagtcagtttttccaacttataagccatgtcca

SEQ ID NO: 332477 - DNA, 588 bp, Homo sapiens
caaagtcctgtatggattgcaaatgttatgtattatcaaaaattcagcaaatatgtttcagctcctaatatgagctctaagaacttgcagagtttgtaaagatcactagtactatggtccctaccctcaagttgcttacaatctagtggtgagaaatatgtgtaaataacttaaaattatttaagagtgtatcaaatgttttataacagaggaaaaagcgaagtgctatgagattataggaatataagggattttacctggagcaccaaggaagacttcattaaaaaatggaattttaagataagctttgacaaataagttgcatttgtatcaactaagaaagtggaaagaaggggcatgcttggctgatggatgaaatctcaaaaacattatcatcacaatgcctgttaagaaaatcataattgcattgataaatctgctacataaaaaccttacttgttatttccatgtaaaatagaaattaggcattatagattatgcaatccagcrtgcctatctataatcttacattgaatcaagggttgactcaatgtttagtcagtttttccaacttataagccatgtcca

SEQ ID NO: 332478 - DNA, 558 bp, Homo sapiens
gcgatgcacccgcccagggcgccgggactagccaggacgccgcggggagacctggcttaaggttcttttctcacataccctttgaaatcctcaccgggagggagaaaagagaagtcgaggaagaagaagatgcgtagctttttctagaaatgsagaaggtttccggaataggtataaatatatcttcacagaaataaattgagaaggatttggaaagaagatctcggatagttaagatacggacaaactctctctgaatcctgtggaaactctcctgctctctcccacctaataaaacagagcggaggcgttctgcagaggatgaaatttcatcagggctcaaagacagattttatgggcgcatttgttgtacctggtggaactgcgcaaggagctcaaaagcacaccagaacagggaacaagcctgcaggccaattatctcagaaaaggctgttttcagaatttggcacagaaaccctgtttctagcccactgctgccctcctgggttcttggcggtaggttggtaagaaaaggcaagacatctttgcgtttttaat

SEQ ID NO: 332479 - DNA, 562 bp, Homo sapiens
aattatcagatcataaatttaaaacaactataactaatgtgctaagcggtctaatagaaaaaacagacaacatgcaagaacagatggacaatgtaagcagaaagatggaaattctgagccaatcaaaaagaaatgctaaagttcaaaaacgctgtaacagaaatgaagaatgtctttgatagattccttagtaaacttgacatggctgaggaaaggaatcactgagcttgaggatatgtcaatagaaactaccaaaactgaaaaacaaagtgaaaaagactaacaaaaaactggaacagaatatccaaaacttgtgacatgatgacaaaaggaataacttacatgtaataggaatmccagaagtagatagatgaaagagagaaagaaacagaagaaatatttaaagcaggaattactgacaatttctcaaaattaatgtcagacaccaaagtacagatcaaggaagctcagagcacaccaagaaggatgaatgtcaaaaatactacacctagacatatcataaactgcaaaaaaaagaaggtaaataaatcatgttaaaaga

SEQ ID NO: 332480 - DNA, 548 bp, Homo sapiens
agaagtagctattcttatatcagacaaaacaaagctttaaagcaacagcagttaaaaaagacaaagagaggcattatataatgataaaaggactagtccaacaagaaaataycacaattctaaataaatatgcacctaacactggaactcccaaatttacaaaacaattactactaaacctgagaaatgaaatagacaacacaataatagttgtggaatttaatactccactgacagcactagacagatcatcaagacagaaagtcaacaaagaaacagtggacttaaactatacaacaaatgggcttaacagatatttacagaacattctgcccaacaactacagaatgtacattctattcatcagcacatggaatattctccaaaacagaccatacagtaggacacaaaaaaagtcttagtaaatttttaaaaattgaaattgtatcaagtactcactcagaccacagtggaataaaattgtaaatcaactccagaaggacccttcaaagccatgcaaatacatggaaattaaataacctgctcct

SEQ ID NO: 332481 - DNA, 594 bp, Homo sapiens
tttcattaggataaaagtatttggaagagaaatgtctggtatgtgagtcacttgaatgttagttcccttccttgtttaaaggagtacgagttaactcttatctacaaaaggagaaaagagggagaaggaggaggtgaaatgtttttatgcacaccagcttggtaaatctagatattaatattactaactgatattcatgacaccatattatattagaatatcctagaggctgaccaaaggtcttacggtagaagaacaaaaacaaactataaaacacaaaaattcaagatcattctctagaacgctaattatgaaacaaactattaaacagaggtggctaaataattgctccaaagataaatatgactcatttgttttgctgacccacacagtgctttaatttcttaaattaattaaattgtggaaaaaatggaagttaccacataaaaatccaattttcagccttctcttgataaactccagagtttcagttcccatgcaaagcaacaattagctgaagctgagtattggycacttgttttaatcaacactctcccctccattcacaacatccccacccagcctgctgcccct

SEQ ID NO: 332482 - DNA, 555 bp, Homo sapiens
aaaaataaggatataaaaaataaaatatttttatacagatgtacaatgtatctgttttaaaatgtgctataacaaaaaagtcaaaaagtttaaaaaactaaaaagtttataaaatacaaaataatagtaagttaaggttaatttattattgaagraaaacatcttagataattttagtgtacagtgtttataaaatctacagtagtgtacagtaatgtcctaggccttcatattcactcgccactcactcactggctcacctaaaattcagtaacttgcagtcctgcaggctccattcatgataaattctttatacaagtgtaccttttaaaaatcttttataccatatttgtactgtacatttactatgtttagacgtttaaatacacaactactgttttgttacaattgtgtaccttattcagtacagtaacatgctgtacaggtttgtagcttaggagcaataggctttacaatctagcctacgtgtgtagcaagctacactatctgggtttgtgtaagtatattctgtgatgttcacagaatgataaaatc

SEQ ID NO: 332483 - DNA, 555 bp, Homo sapiens
aaaaataaggatataaaaaataaaatatttttatacagatgtacaatgtatctgttttaaaatgtgctataacaaaaaagtcaaaaagtttaaaaaactaaaaagtttataaaatacaaaataatagtaagttaaggttaatttattattgaaggaaaacatcttarataattttagtgtacagtgtttataaaatctacagtagtgtacagtaatgtcctaggccttcatattcactcgccactcactcactggctcacctaaaattcagtaacttgcagtcctgcaggctccattcatgataaattctttatacaagtgtaccttttaaaaatcttttataccatatttgtactgtacatttactatgtttagacgtttaaatacacaactactgttttgttacaattgtgtaccttattcagtacagtaacatgctgtacaggtttgtagcttaggagcaataggctttacaatctagcctacgtgtgtagcaagctacactatctgggtttgtgtaagtatattctgtgatgttcacagaatgataaaatc

SEQ ID NO: 332484 - DNA, 553 bp, Homo sapiens
aaaaataaggatataaaaaataaaatatttttatacagatgtacaatgtatctgttttaaaatgtgctataacaaaaaagtcaaaaagtttaaaaaactaaaaagtttataaaatacaaaataatagtaagttaaggttaatttattattgaaggaaaacatcttagataattttagtgtacagtgtttataaaatctacagtagtgtacagtaatgtcctaggccttcatattcactcgccactcactcactggctcacctaaaattcagtaacttgcagtcctgcaggctccattcatgataaattctttatacaagtgtaccttttaaaaatcttttataccatatttgtactgtacatttactatgtttagacgtttaaatacacaactactgttttgttacaattgtgtaccttattcagtacagtaacatgctgtacaggtttgtagcttaggagcaataggctttacaatctagcctasgtgtgtagcaagctacactatctgggtttgtgtaagtatattctgtgatgttcacagaatgataaaa

SEQ ID NO: 332485 - DNA, 556 bp, Homo sapiens
gcttatagataaaactcccatcgccctgggacagagcacctgggggaaggagtgactgtgagtatagcttcagccaactaaaacattcctgcctgctggccctgaagagtgctatggatctcccagcacagagctccagctcagctaagggacagactgcctccttaagtggttcagtgacccccatgcctcctgactgagagacacctcccagcagrggtcaacagacacctaatacaggagagctctggcaggcatcttgcaggtgcccctgtgggatgaaacttccagaggaatgaacaggcagcaatctttgctgttctatatcctgtgctggtgatacccaggcaaacagggtctggagtagacctactgaaaactccagcagacctacaacagaagggcctgactgttagaaggaaaactaacaaactgaaaggaatagcatcagcattaacaaaaataacacccacacagataccccatctgaaagacaccaacatcaaagactgaaggtagataaatcatgaatataaggaaaaaacagcacaaaaga

SEQ ID NO: 332486 - DNA, 556 bp, Homo sapiens
gcttatagataaaactcccatcgccctgggacagagcacctgggggaaggagtgactgtgagtatagcttcagccaactaaaacattcctgcctgctggccctgaagagtgctatggatctcccagcacagagctccagctcagctaagggacagactgcctccttaagtggttcagtgacccccatgcctcctgactgagagacacctcccagcagaggtcaacagacacctaatacaggagagmtctggcaggcatcttgcaggtgcccctgtgggatgaaacttccagaggaatgaacaggcagcaatctttgctgttctatatcctgtgctggtgatacccaggcaaacagggtctggagtagacctactgaaaactccagcagacctacaacagaagggcctgactgttagaaggaaaactaacaaactgaaaggaatagcatcagcattaacaaaaataacacccacacagataccccatctgaaagacaccaacatcaaagactgaaggtagataaatcatgaatataaggaaaaaacagcacaaaaga

SEQ ID NO: 332487 - DNA, 579 bp, Homo sapiens
tatttctttcttttcttcttctaacttgacccaacctacttaggaaaatgtatgggtttgtccccgttttctctttttcttcctttctcttttatctgtatgctaaacaacatactctgcttcatactcatccatgtccttattgtttctagagcccatactccagcctcatctcatgcaactttccrctttgctcgctgaatttctgccacaccgtcttgcactttgcaggtttttcttgcctaaaatatgtgtgaacatttccaacaatcctctgttgtggttatctggacaatatgtccttcctagtgaattgtaagttccatgtagacaaaggcctcgtctgtttcactactattatttgccagcagccaacacagttactgatacacatttgatgttcagaaattatttattcaataactaattagaaatgtgaataccatcaaagttaagtgaaaaattaggaatagagatgtatctatccacaaaaaagtgaaacatgttaaaatgaaattataactagttcccaatgtcacactaactattaaagcctgtcaaaatgcccagaaattgttt

SEQ ID NO: 332488 - DNA, 463 bp, Homo sapiens
ttggggactcgggggaatggatgagggggtgagggataaagactacatattgagtaaagtgtacactgctcaggtgatgggtgcaccaaaatctcagaaatcaccactaaagaacttattcatgtaaacaaacaccacctgttccccaataacctattgaaataawaaaaaatcttgttttctaattgtctttactactaactagtactactacaactattccttacatattatgagatttgcaattatttttaaataatcttgtttctcctgcagacagtaagctaactaagggcaggggcaaggttttatgtcatgtataccaacctccttctacagtgcttggtttattgtagagtctcaataaatgtggggccttcttttgtcattgtattatttttagtaaaactgcattggataatactggaaaataatgctcagataggtaggagaagagaccagc

SEQ ID NO: 332489 - DNA, 590 bp, Homo sapiens
ctagaggtcaggctaagaatagtcctgctttgtatattatgaaccacataagatattataaatactttagatattttgacttttttaagagtttttgaatttccattataattgttacattactcattcacactttgtcaacaataaaggtaatgaaagtttttttctaaacactaagaaaactgaaaatataaaaagtatgtctttgatgtgtgtgctaatattacaaataaaaattcaacagattttttaagtaaatcaacaacttaaactttcttcacctaaatatatcattattatatacattttcctaaccttagccatttatttttcttttactttttcatattttccccctgcagaattacaagcactatgacaaaagtaacaatttaccacaaccttgaaataaccttgaaaatcaaacaaaagcaaaaataaagatgcaaaattaatagcatcactttaagcttaaggctctaggaagccttttgaacttgccaggartttaggtgaactttatacattaccaatctcacatccaaatgcacacaaaaatagacttaacactattttacagagaattagta

SEQ ID NO: 332490 - DNA, 602 bp, Homo sapiens
tttgctgatgattcccccccagtcatctcttggttttaaagctctgatagattcttcaaaaagaactgtgagcactgtacaacctgggttcttgaatgtttacaatcatttttttcacagccttgatacctaaatggtagttttgctgaatgtaaaatatttgattcacttttttttccatgaaaatgctgctatattattgttttgctttttatgttgctttaaagaaatctgattatcttgtccttttaaattactgatctttttgcctataagtcaaaaggatttgcttggtaaggattttttaaatcattacagtcttacagatttattaacatacttcttggggctggccattgctaaagtctaaccttgccagttctctctcctttgagggtatcccatgtcaaaacacacctcaccaaggccagtgagggcaagaaattcaaaagttcactactcattcagggaaacttaaagtaaaggagtccccttgatgtcatttgacatcaagaccaagggagakaaatggaggtcctggatgggtacacaggcacacacacacatcctgggaatttataaataatgccaaagtagattaa

SEQ ID NO: 332491 - DNA, 586 bp, Homo sapiens
tcctaagtatatttcaaccatttgaacattttttgtttaattttttacattttactttttgggtttatttttagcaagttctagtttgtctgaatttttacatttctctgttttcttgtttattttaattatggtctttatattgtatttttatttttgctaaatatacttttwgtttttcttgactagcagaaaatatgttaggagtaactatttaaataactcataccctagttctaatagttttaatcctttatttggccttcatggatctttggccctttctatgtctttttgtagcaaaatagataatgcaaaaatccatggtctttgcctgtgtaattatgaatcaaaatacaggtcatgcaatagttggcagtttaacaaaagagagaggttggctgataattctattgatgaaaggtacctctctcctggataaatttaatcaaacagtaagtgtttgaaagatacttgggattcctttgatattcctatatgctaaggcaacattgactagggcaggggttatataattttggaataaagacagtttactcttctggagattacctgataaacaaaa

SEQ ID NO: 332492 - DNA, 550 bp, Homo sapiens
gactttataaaatcccagataaagattttaaagaagctcagagagatacaagagaattgtgtaaaaaatatagagaaattagaaaacaattaagaatatgaattagaaatttaccaaagacacagacgtgtaaaagacraccaaacagaaattctggaactgaataattcatcaaattaattacaaaatacacctgaaagctccaacaatagactggatcaaacataagaaaggatctcagaatttgaagacagaacttgtcaaataacatagtcagacaaaagttcaagaaaaagtctataaaataataagcaaagcctttgtaaaatttgggacaacattataattttcaatgtctctaggagcaaaaggagaacaaaagcatcagaaaacctgcttaacaaaataattaataaactcaaataggcatgtaacgcaatgaatattgctgaatgaatggatataattaagaacttttagcaagtgtgagaaaggctctgagagagaagtctgaatcacaagacaagggccatcactctagaatctgaac

SEQ ID NO: 332493 - DNA, 503 bp, Homo sapiens
tgtcaccacccccagctatacggttcccattctcctgggagctggggctaaagaaagcccagacagtatccaacccaatttcctgcctgtctgttgccccttcccatctccttgaccaagcagcttgagggaggggggatgcccagacagagcccccagtacccagccctgttcagcctgcatgacagcccctccctcaccagaccttagtgtcagtagtagcgatgggggagacaggkgtgggggatgattcagagctgtgactgcagggcgctgacaccatttagctggcacagtttagattaaaattagaaataatttaaagtacagacaaaaagataaagccaaggatgcctctgcccccagggaatggtgatgggggtctccagctgggggaggggttcacatctggggagcagaatctttcttagaggcttgagctggccttcagagaaaatgcttaggcctttcagccaggagacacagagtaccttgctaccttt

SEQ ID NO: 332494 - DNA, 487 bp, Homo sapiens
ttgcaccaggacataaagtggtggtactttgttgcaccctaggactcctaaacctgcaaggcaacctcccacagacaggagggtcaggaacaggtttttgctgtgttattggcttcctcaccaggctggaaatgtgctcagggcagggacacagtgttccagcccctaccatggagtggacaaatagtggtgcccaggaaaagttgggcccaacaccacatttcaaggaagggaaagccacatccagagagacccgaggttttaggkccaggagagactgaactgggcccgtcagccatgctgggactggtagacggggagagcctgtttggcggtgcctcccggctcagctgtttcctcctgttcctacaggtctgcagggaactggccaggcaagggggcaggcccgtttctcctggtggttggtgcgttgtagcagcagcgggagccaggactaaggacaagcaggagctgggagccccaggta

SEQ ID NO: 332495 - DNA, 487 bp, Homo sapiens
ttgcaccaggacataaagtggtggtactttgttgcaccctaggactcctaaacctgcaaggcaacctcccacagacaggagggtcaggaacaggtttttgctgtgttattggcttcctcaccaggctggaaatgtgctcagggcagggacacagtgttccagcccctaccatggagtggacaaatagtggtgcccaggaaaagttgggcccaacaccacatttcaaggaagggaaagccacatccagagagacccgaggttttaggtccaggagagactgaactgggcccgtcagccatgctgggactggtagacggggagagcctgtttggyggtgcctcccggctcagctgtttcctcctgttcctacaggtctgcagggaactggccaggcaagggggcaggcccgtttctcctggtggttggtgcgttgtagcagcagcgggagccaggactaaggacaagcaggagctgggagccccaggta

SEQ ID NO: 332496 - DNA, 618 bp, Homo sapiens
gtgactgggtgaccgggccccagtgaacagggtwctggtggtgggtatgggtgctaatgaagctggagcctcggagtaacagtggggggatagcaaagaccgtctttcctccaggagtgctccctgagcagaccctcacagccaaccctactggctgttacgcacctataggtctgtgagtagagccataaaggctgggcttcctgggcctgactctgggttgggggcagaagggaggtcagggccttcactctggggtaggagttgggacagaacaggagcagtcttcactgggccttctgtgtattggacctgtccctaaacctggtgtggaggaagtaaagcgcctttggctgtctaggggcctctgccacctaagttctgaagagccagccctttccgtcactcagccttgttttgtaaggagtttgattagtcttggagacagcccactgtaaaccctcagacatcaccctccagctgcacagacatatgcgtgctcacacagggatatggcaagctaggctgcagtgggcatgcacacccacagactcatgagttcctgtacgtgcaccacacatgtgggcatgcaggtacacaggtgctcacatgcagcca

SEQ ID NO: 332497 - DNA, 621 bp, Homo sapiens
tcacaacaaagccagttcccaatggctcttgttctcattggaagtgaaggccatattctatatgtatgtatcctctctgccttcagtagagaaggcaggaacactgggaggaaggaagaaggtaaaaaaatctttattaaaatgcctcctgacatgtccacttggactctactaggcaaatcaaatgtcctacattccatccgagctcctgatcatctatcctaaaacctgagcacactgcgcctccccatcccctgcccagttaagtttctccacttcagtggatggccactccatccttccagttgctcagaccaaaatctttgcatcagcctggactcctcactttctctccccctccataccctgtagatcagcaaatcctattggctctaccttcaaaatacatccagcatctgtccactcatcaccactccactttcccatcctggtctgtcctccacctgaattgttgcaatggcctgtaaagcagcctccctgctcctagtctagtctcaacccaggagccagagtggcygtggtccctttcaaacctgaatcaggtcatgggacttctctgatggcaaactgccagtggcttcctaactcatgcaaaaaaag

SEQ ID NO: 332498 - DNA, 496 bp, Homo sapiens
attagcttttaattaaactgacttttaaccattgagctccatttaaaaaaaaacctttttaatctcattaccatattttaactaggataaattgctgatatttcaaaagtaacacaaatatcaaaccagaaagggctttagaaaccaaacccagactgtcttgatgaaaaaaaagtgggggcagaagcttagctatggaactgctgcatggggcgacagccattactctttcagtttggcttsgctaacaaaaactggccttattatgtaaataaagccctcagggtagtcaaaatcaagaacctttctcttttatccccttttgctggactgtttttccttctccctgctttttttttttttttttccagctgtggaatttagccaattcagaggtcttgttccccgtaatgtggaactttccttcagatttgatcaagttggatagagttggtcaaacccaattgtcaggcctctgagctcaagctaagccatc

SEQ ID NO: 332499 - DNA, 564 bp, Homo sapiens
tatgagtcagtgtggggatatatgttcctgctatgtaggacttgggagtcgacagtatttttcacagatacaaagaggacattaggtttacccttagaatgagagaacgttgggattgaaggagaccctatgactgtttctcttccccccaggacaaaacaggccaaggtagcttaagtaagccccgaaggtcacacagtttagtctgggatttctgcaaattttgaattgaccaagacaaataaagcaaaaataaaggaaataaaaagagactcactaaaggacctttgagattgagctggcttcattttgaaatctcgcaaatttgtcaaccatcacagccacatttscagccttccagtggttggaattttaaagctattttattctttcaggagaacaacacagcttttgggctgtgtatgcaaagattgagtgtgtatgggggggaggtggggttcaaaatcttcacaaactttgagtctctcggctgtgtaagagacccattatagtcagaatcaggtattgtctcctttaaatgcacaaggaaggtctgtttatttt

SEQ ID NO: 332500 - DNA, 564 bp, Homo sapiens
tatgagtcagtgtggggatatatgttcctgctatgtaggacttgggagtcgacagtatttttcacagatacaaagaggacattaggtttacccttagaatgagagaacgttgggattgaaggagaccctatgactgtttctcttccccccaggacaaaacaggccaaggtagcttaagtaagccccgaaggtcacacagtttagtctgggatttctgcaaattttgaattgaccaagacaaataaagcaaaaataaaggaaataaaaagagactcactaaaggacctttgagattgagctggcttcattttgaaatctcgcaaatttgtcaaccatcacagccacatttgcagccttccagtggttggaattttaaagctaytttattctttcaggagaacaacacagcttttgggctgtgtatgcaaagattgagtgtgtatgggggggaggtggggttcaaaatcttcacaaactttgagtctctcggctgtgtaagagacccattatagtcagaatcaggtattgtctcctttaaatgcacaaggaaggtctgtttatttt

SEQ ID NO: 332501 - DNA, 566 bp, Homo sapiens
atttagtagactagctatatcttgyaacctcagctataagcccttttaaacaatatctgattccattcttaccctatggagtgagtactaatatccccattttactactaaagaaattgaggctccgagaatttaagcaatttgctcttaatcaaatgcccaggtctgtctaccaagtctttccaccgaggcctatctctgccttatctttagttgaagtatctttctccaggactcccacccagagcggacccacatggtgcaaagaggaaggcgagcagggggtggcaggaaagcaaagaggagtgaaagaacaccctcgcctgtgctcagtgctgagtgccgtgctgctaattgtcctgtttgctttattgatccgatggaaactttagagccaaaagaaatgtaaaaggggatctcattcaacccagtttcccttctgtggcttgaattttcctctacaacatcccctccaagtggttactcagcctccacacagccagggaacaatacggaagcagagaatcttcgagttaacgcagggggcaatgagtagcttagcttgg

SEQ ID NO: 332502 - DNA, 598 bp, Homo sapiens
agaatgagatagaaagaccctgagtggatttttttttaattacaatgcaaaaaccttgtgaaattaaagtctgaccacagaaatatgaagagtctctgcttatcaaacaggttgttattttaaacaaaatgcatattcttagattagataaagattttacagtatactcttaataaaaaagacttggaaaacacagtgtaaaccctctctaatacaggtgtgagaacagaatttaaatttctaatattccacaacttttttaaattagagataagctcttgctatattgccaagcttggtcttaaactcctgggatcaagaaattctcctggcttgatctcttgaataggtgggactacaggcacatggtaccatgtctagttaaatttccacaatttctaatattattttagtctaattatatagaaccaagaataaaaataaagaaatagctctctgcaaaaatactgtatgatgttaaaataggtgtacaagaaataaaaagaamctatatgctatgtgtacacatgattcccataataaatcatctgatgtaacaaacattcatttaaacagaggtattattagtcatactcat

SEQ ID NO: 332503 - DNA, 598 bp, Homo sapiens
agaatgagatagaaagaccctgagtggatttttttttaattacaatgcaaaaaccttgtgaaattaaagtctgaccacagaaatatgaagagtctctgcttatcaaacaggttgttattttaaacaaaatgcatattcttagattagataaagattttacagtatactcttaataaaaaagacttggaaaacacagtgtaaaccctctctaatacaggtgtgagaacagaatttaaatttctaatattccacaacttttttaaattagagataagctcttgctatattgccaagcttggtcttaaactcctgggatcaagaaattctcctggcttgatctcttgaataggtgggactacaggcacatggtaccatgtctagttaaatttccacaatttctaatattattttagtctaattatatagaaccaagaataaaaataaagaaatagctctctgcaaaaatactgtatgatgttaaaataggtgtacaagaaataaaaagaaactatatgctatgtgtacacatgattcccataataartcatctgatgtaacaaacattcatttaaacagaggtattattagtcatactcat

SEQ ID NO: 332504 - DNA, 644 bp, Homo sapiens
aaacattaaaaattataaaatccaattaatgtcattatatagatcctgccttattcaggtcyacaaaaaccagcaagcttaagaaccttcatagacactcagatactcaagagacagactgctggaaaagtctccctcctgagtacttacagcttaatttcattcatcactatctaaatatcttccttcctatgggctcccccttctggatccctcttctgcagggatccatggcaatctccaatctacatcttcaaatttgtctgtcctctgcaaattccattcttatccactttcattgggttcaacagctcattattccattctcatccttttccactgtgttcactagagccaactccctctttctaaaactaaaatcactcaatgacagaatgatgtaaaagaagactgggttttgaactagaattattagatatgtcatgcatattatgttacctgtaacattccattataaaaaaaacccatttccttgtttgttgatttacatgaaaaactactaaaatgcttcttacatgcaagaccttattctgtgtattccaggatacatacaaataggttttctagtttcaagtggctcgtagtaatgcaggagctttacaattattttttcaataactaag

SEQ ID NO: 332505 - DNA, 644 bp, Homo sapiens
aaacattaaaaattataaaatccaattaatgtcattatatagatcctgccttattcaggtctacaaaaaccagcaagcttaagaaccttcatagacactcagatactcaagagacagactgctggaaaagtctccctcctgagtacttacagcttaatttcattcatcactatctaaatatcttccttcctatgggctcccccttctggatccctcttctgcagggatccatggcaatctccaatctacatcttcaaatttgtctgtccyctgcaaattccattcttatccactttcattgggttcaacagctcattattccattctcatccttttccactgtgttcactagagccaactccctctttctaaaactaaaatcactcaatgacagaatgatgtaaaagaagactgggttttgaactagaattattagatatgtcatgcatattatgttacctgtaacattccattataaaaaaaacccatttccttgtttgttgatttacatgaaaaactactaaaatgcttcttacatgcaagaccttattctgtgtattccaggatacatacaaataggttttctagtttcaagtggctcgtagtaatgcaggagctttacaattattttttcaataactaag

SEQ ID NO: 332506 - DNA, 479 bp, Homo sapiens
acaccacattcctatctgctccagagactctttccagtggctcaaattcttttaacatttttcaataaaaccttgaagtttgtcagttcctccagttaaacaaacaaaaagacagcaacctcttcagaactccttgaatgccgtattctaatatgcctttcttgatagctcccaacatcctgtgttttcaattcccttatctttatcaaacttgcattaaaccaaatattcagattttttcctaaaaccttcatttctatycaactaagagtttgtttctcttcaaatttggctgtcccctgcaaattccattcttatccactttcattgggttcaacagctcattccattctcatcctcttccactgtgttcactagagccactccctcttcctaaaactaaaatctctcaatgacagaatgatgtaaaagaagactgggttttgaactaagaaacctgagtgcaattctcatttctc

SEQ ID NO: 332507 - DNA, 263 bp, Homo sapiens
gccctgttgtaaatctggacacagttttctccagtaggaaggctgggcactgagggccttagaaccttctgcttcaccttttgacatatagggcccaattttaatgcatttaaatgttgcctccactccaaaatgaacatrggacatatgtaatgtgtgaaataggtgtgtcttacccccttcatgaatattcatagagccttctataacctgttgaatatgtacatttagccaaccctttcagcataacttcctgtctcatc

SEQ ID NO: 332508 - DNA, 498 bp, Homo sapiens
tgttggttttctaatgacatttygaacgagtgctgaggtggactgcatcacttcagaactttgattgctgtcactcagtgattttaaaattgaattgttttgttcttaaagagtcagaatatgtcactgtcttcagaaatattctcaaaattatggggaggaagtgatacacattcttatacaattatagagcactaaaaaaaagaaacgtattttgtttttaatataaaattaacaggttttttaatagggaatagaaaaaaacagaaaggagaaagattatgcttcatgcttctcagaagactttgttcccttgcagaattatttgacaataaaattatttctagaaaaactcacttttcttgcttatatttatctcgtctccattctctcctttcttttcacctccctgtttctttcttccaatgaattcttttagaagccatggattctggtcaaggtagatgcaacactttggagttagtgagaagaggtcat

SEQ ID NO: 332509 - DNA, 498 bp, Homo sapiens
tgttggttttctaatgacattttgaacgagtgctgaggyggactgcatcacttcagaactttgattgctgtcactcagtgattttaaaattgaattgttttgttcttaaagagtcagaatatgtcactgtcttcagaaatattctcaaaattatggggaggaagtgatacacattcttatacaattatagagcactaaaaaaaagaaacgtattttgtttttaatataaaattaacaggttttttaatagggaatagaaaaaaacagaaaggagaaagattatgcttcatgcttctcagaagactttgttcccttgcagaattatttgacaataaaattatttctagaaaaactcacttttcttgcttatatttatctcgtctccattctctcctttcttttcacctccctgtttctttcttccaatgaattcttttagaagccatggattctggtcaaggtagatgcaacactttggagttagtgagaagaggtcat

SEQ ID NO: 332510 - DNA, 498 bp, Homo sapiens
tgttggttttctaatgacattttgaacgagtgctgaggtgractgcatcacttcagaactttgattgctgtcactcagtgattttaaaattgaattgttttgttcttaaagagtcagaatatgtcactgtcttcagaaatattctcaaaattatggggaggaagtgatacacattcttatacaattatagagcactaaaaaaaagaaacgtattttgtttttaatataaaattaacaggttttttaatagggaatagaaaaaaacagaaaggagaaagattatgcttcatgcttctcagaagactttgttcccttgcagaattatttgacaataaaattatttctagaaaaactcacttttcttgcttatatttatctcgtctccattctctcctttcttttcacctccctgtttctttcttccaatgaattcttttagaagccatggattctggtcaaggtagatgcaacactttggagttagtgagaagaggtcat

SEQ ID NO: 332511 - DNA, 498 bp, Homo sapiens
tgttggttttctaatgacattttgaacgagtgctgaggtggactgcatcacttcagaactttgattgctgtcactcagtgattttaaaattgaattgttttgttcttaaagagtcagaatatgtcactgtcttcagaaatattctcaaaattatgggraggaagtgatacacattcttatacaattatagagcactaaaaaaaagaaacgtattttgtttttaatataaaattaacaggttttttaatagggaatagaaaaaaacagaaaggagaaagattatgcttcatgcttctcagaagactttgttcccttgcagaattatttgacaataaaattatttctagaaaaactcacttttcttgcttatatttatctcgtctccattctctcctttcttttcacctccctgtttctttcttccaatgaattcttttagaagccatggattctggtcaaggtagatgcaacactttggagttagtgagaagaggtcat

SEQ ID NO: 332512 - DNA, 661 bp, Homo sapiens
cctgtttctttcttccaatgaattcttttagaagccatggattctggtcaaggtagatgcaacactttggagttagtgagaagaggtcattcctccatccagctttctgctttctgatctctcttccctctgctgaccaacctgttgcccaatggatataataaaagaaagactacttgccactggcttatattatattggattttaatattcccaagagaatgtgttaaatatatattgtgccactgaccagaagcaaaacatgattataacagacatgcttctaagtatttgctcagcccacagcctactctgctyctgctgcccaaggggcatcccacccacccatccacaaatatgaatcatttgattaaatcggagcaccagaaccaactcatccatatgcattgagctggacaaacacattctctctttttctcctcttttccctctttcctctccctctctacaaattcagctaaggtgaatgctaaccatttgcaatggtgtttaaagcagaacagtggtgttctgtggcagaactctgtgctacaggactctgaagggaaattatgcccactgcctccccacccacccctcttgcccacccccaccacagttccagcagcatctcagtctatacagtgcatctcaggcagtg

SEQ ID NO: 332513 - DNA, 661 bp, Homo sapiens
cctgtttctttcttccaatgaattcttttagaagccatggattctggtcaaggtagatgcaacactttggagttagtgagaagaggtcattcctccatccagctttctgctttctgatctctcttccctctgctgaccaacctgttgcccaatggatataataaaagaaagactacttgccactggcttatattatattggattttaatattcccaagagaatgtgttaaatatatattgtgccactgaccagaagcaaaacatgattataacagacatgcttctaagtatttgctcagcccacagcctactctgcttctgctgcccaaggggcatcccacccacccatccacaaatatgaatcatttgattaaatcggagcaccagaaccaactcatccatatgcattgagctggacaaayacattctctctttttctcctcttttccctctttcctctccctctctacaaattcagctaaggtgaatgctaaccatttgcaatggtgtttaaagcagaacagtggtgttctgtggcagaactctgtgctacaggactctgaagggaaattatgcccactgcctccccacccacccctcttgcccacccccaccacagttccagcagcatctcagtctatacagtgcatctcaggcagtg

SEQ ID NO: 332514 - DNA, 240 bp, Homo sapiens
cagaaagggctcccctttgagtcagtaatggtaatgcccccttgagaagagggacctttggcccctgactccygacggtgccatactcacagtttcacttctctccttcacctctctgtgcttccgcttctcactagttcagctgttacctccacttttgtttctttctaattctactctggttctgtagttgagtttctcacagtggaaactacctgtgctctcactggttgggtcagt

SEQ ID NO: 332515 - DNA, 240 bp, Homo sapiens
cagaaagggctcccctttgagtcagtaatggtaatgcccccttgagaagagggacctttggcccctgactcccgacggtgccrtactcacagtttcacttctctccttcacctctctgtgcttccgcttctcactagttcagctgttacctccacttttgtttctttctaattctactctggttctgtagttgagtttctcacagtggaaactacctgtgctctcactggttgggtcagt

SEQ ID NO: 332516 - DNA, 240 bp, Homo sapiens
cagaaagggctcccctttgagtcagtaatggtaatgcccccttgagaagagggacctttggcccctgactcccgacggtgccatactcacartttcacttctctccttcacctctctgtgcttccgcttctcactagttcagctgttacctccacttttgtttctttctaattctactctggttctgtagttgagtttctcacagtggaaactacctgtgctctcactggttgggtcagt

SEQ ID NO: 332517 - DNA, 240 bp, Homo sapiens
cagaaagggctcccctttgagtcagtaatggtaatgcccccttgagaagagggacctttggcccctgactcccgacggtgccatactcacagttycacttctctccttcacctctctgtgcttccgcttctcactagttcagctgttacctccacttttgtttctttctaattctactctggttctgtagttgagtttctcacagtggaaactacctgtgctctcactggttgggtcagt

SEQ ID NO: 332518 - DNA, 582 bp, Homo sapiens
tgggcagaattctgctattagacctcccagagcccattggtaaacctaagattgtaaaaatgtaaaacttttctctcctcaacgtcatctgtaataatgaaacccccaaaatatttactctatgtatcctgtagttttgcacaactttgtggttacctttggccaagttacagattcttgatcagttcgatcatggttacttaccagggtcacatgacagaaagtcaacaacttatggaaaaagaacagtctttgctgctttgctcagaaggtaatatgtacaaacttgcattattgcatatatcacaatacagcttgtttcygcatagcccagtcccctacaagactagaaccgtgaggccagtggtatttcctatatttgcatgttcagcatgtaacatactgcctggtacatggtagattctcaataaagctctgttgaagttaattgaaatgaaagtaaaatcaaaatacctgaattctaattttgctatttctttgctatctgaactaagataagttacttaatctttctgaacctccctttcttcttatgtaaaaagacatagttgtggtaaatat

SEQ ID NO: 332519 - DNA, 502 bp, Homo sapiens
acactggcttgcaagtattactgggccaccatgagcagtgctgggacacagctccactggacagccacccctttctgtaacctgagagccgccaccctactcacacctcaggctcctcatcaagcatgtgagaaatttgtactagatgaccttctggttcaaatatgagcctgtgttgagcgagagaaaacatgggggttagaaacgcaggatgaatatttgtggagaatctgagaatgacaaacagaaagcaagcaagctaacaaatacactatgaagctggaagagttttccagctgacccaagtgtagaagcagttgccccatttagaatatttggaacattttccctcccattatcaggaccctaacaccgggctgccctctgttctaccctctggaaaatccaagggaaaaagctrccaaagcagacaagcaaggatagaaacggtggtggcattgcaggctggtctgcattgcggctatagaacaaaaatttccaa

SEQ ID NO: 332520 - DNA, 534 bp, Homo sapiens
ggttattctagttagcaattcatctawcattttttcaaggttcttagcttccttgccttgggttagaacatgctcctttagctcagaggagtttgttattacccaccttctgaagcctacttctgtcaatttgtcaaactcattctctgtacagttttgttcccttgctggtgaggagttgtgatcctttggaggagaagaggcattctggtttttggaattttcagacttttcacgctggtttcaccccatcttcatggatttatctccctttggtgtttgatgttggtgaccttcagatggggtttctgagtggacatcctttttgttgatgttgatactattccttcctgtttgttagttttccttctaacagtcaggcccctctgctgcaggtctgctggagtttgctggagttccactccagaccctgtttgcctgggtatcaccagtggaggctacagagcagcaaagattgctgcctgttccttcctctggaagcttcatcccagaggggcacccaccagatgccag

SEQ ID NO: 332521 - DNA, 607 bp, Homo sapiens
gctccatcaggtcatttatgttcttctctaaagtggttattctagttagcaattcatctaacattttttcaasgttcttagcttccttgccttgggttagaacatgctcctttagctcagaggagtttgttattacccaccttctgaagcctacttctgtcaatttgtcaaactcattctctgtacagttttgttcccttgctggtgaggagttgtgatcctttggaggagaagaggcattctggtttttggaattttcagacttttcacgctggtttcaccccatcttcatggatttatctccctttggtgtttgatgttggtgaccttcagatggggtttctgagtggacatcctttttgttgatgttgatactattccttcctgtttgttagttttccttctaacagtcaggcccctctgctgcaggtctgctggagtttgctggagttccactccagaccctgtttgcctgggtatcaccagtggaggctacagagcagcaaagattgctgcctgttccttcctctggaagcttcatcccagaggggcacccaccagatgccagccagagctttcctgtatgaggtgtctgttggcccctgat

SEQ ID NO: 332522 - DNA, 534 bp, Homo sapiens
ggttattctagttagcaattcatctaacattttttcaaggttcttagcttccttgccttgggttagaacatgctcctttagctcagaggagtttgttattacccaccttctgaagcctacttctgtcaatttgtcaaactcattctctgtacagttttgttcccttgctggtgaggagttgtgatcctttggaggagaagaggcattctggtttttggaattttcagmcttttcacgctggtttcaccccatcttcatggatttatctccctttggtgtttgatgttggtgaccttcagatggggtttctgagtggacatcctttttgttgatgttgatactattccttcctgtttgttagttttccttctaacagtcaggcccctctgctgcaggtctgctggagtttgctggagttccactccagaccctgtttgcctgggtatcaccagtggaggctacagagcagcaaagattgctgcctgttccttcctctggaagcttcatcccagaggggcacccaccagatgccag

SEQ ID NO: 332523 - DNA, 534 bp, Homo sapiens
ggttattctagttagcaattcatctaacattttttcaaggttcttagcttccttgccttgggttagaacatgctcctttagctcagaggagtttgttattacccaccttctgaagcctacttctgtcaatttgtcaaactcattctctgtacagttttgttcccttgctggtgaggagttgtgatcctttggaggagaagaggcattctggtttttggaattttcagacttttyacgctggtttcaccccatcttcatggatttatctccctttggtgtttgatgttggtgaccttcagatggggtttctgagtggacatcctttttgttgatgttgatactattccttcctgtttgttagttttccttctaacagtcaggcccctctgctgcaggtctgctggagtttgctggagttccactccagaccctgtttgcctgggtatcaccagtggaggctacagagcagcaaagattgctgcctgttccttcctctggaagcttcatcccagaggggcacccaccagatgccag

SEQ ID NO: 332524 - DNA, 534 bp, Homo sapiens
ggttattctagttagcaattcatctaacattttttcaaggttcttagcttccttgccttgggttagaacatgctcctttagctcagaggagtttgttattacccaccttctgaagcctacttctgtcaatttgtcaaactcattctctgtacagttttgttcccttgctggtgaggagttgtgatcctttggaggagaagaggcattctggtttttggaattttcagacttttcacgctggtttcaccccatcttcatggatttatctccctttggtgtttgatgttggtgaccttcagatggggtttctgagtggacatcctttttgttgatgttgatactattccttcctgtttgttagttttccttctaacagtcaggcccctctgctgcaggtctgctggagtttgcwggagttccactccagaccctgtttgcctgggtatcaccagtggaggctacagagcagcaaagattgctgcctgttccttcctctggaagcttcatcccagaggggcacccaccagatgccag

SEQ ID NO: 332525 - DNA, 490 bp, Homo sapiens
tgatcctcttccttggagctgaaggtttttggtgtgtggccctccagagccctctccaccctcctctgctctgctgactcyttggcctgggaggctgaccttcatggattattgtatcatatgggtttccttggtctctgtttcattttagggtttggccaatggaaagtatcagcagaaattaagaggatgaaagaaaagagtgtgttatttattctccagctcaccccctgtagattggcagtggctgctttcctctaccaaaggtcccagttaagtcagacagcctctgctaaactacaagtctctctagggtccagtcagtgctcccttcccttgcctccttaggcctgaggatggtcatggctctctgcagttactggctccagaatgcccccctaattctgcttgcacctttgtaaatagcctcttcattaatttttcttcaatcactcctttggagtaagcaattagtctactacatggactc

SEQ ID NO: 332526 - DNA, 490 bp, Homo sapiens
tgatcctcttccttggagctgaaggtttttggtgtgtggccctccagagccctctccaccctcctctgctctgctgactctktggcctgggaggctgaccttcatggattattgtatcatatgggtttccttggtctctgtttcattttagggtttggccaatggaaagtatcagcagaaattaagaggatgaaagaaaagagtgtgttatttattctccagctcaccccctgtagattggcagtggctgctttcctctaccaaaggtcccagttaagtcagacagcctctgctaaactacaagtctctctagggtccagtcagtgctcccttcccttgcctccttaggcctgaggatggtcatggctctctgcagttactggctccagaatgcccccctaattctgcttgcacctttgtaaatagcctcttcattaatttttcttcaatcactcctttggagtaagcaattagtctactacatggactc

SEQ ID NO: 332527 - DNA, 490 bp, Homo sapiens
tgatcctcttccttggagctgaaggtttttggtgtgtggccctccagagccctctccaccctcctctgctctgctgactctttggcctgggaggctgaccttcatggattattgtatcatatgggtttccttggtctctgtttcattttagggtttggccaatggaaagtatcagcagaaattaagaggatgaaagaaaagagtgtgttatttattctccagctcaccccctgtagattggcagtggctgctttcctctaccaaaggkcccagttaagtcagacagcctctgctaaactacaagtctctctagggtccagtcagtgctcccttcccttgcctccttaggcctgaggatggtcatggctctctgcagttactggctccagaatgcccccctaattctgcttgcacctttgtaaatagcctcttcattaatttttcttcaatcactcctttggagtaagcaattagtctactacatggactc

SEQ ID NO: 332528 - DNA, 650 bp, Homo sapiens
atggtggatacatgacattttacatctgtcaaggcccacagactgcacaacacaaagatgagccctgatgtaaactgtggacttcatttaataataatgtatmcatactgattgatcaattgtaacaaatatacctcagtaatgccagatattaatagtaaaacaaactgcagggagaagaaagtataggtaagtaggaatcctcttcactttcaggccaatttttatgtaaacctaaaatcgttctaaaaataattttttgtgacattaccagaccaaaatgaattaattaatttaaaaagtaaaatacaaataattttttaaatcagtctggataagttatgtgaaagtatttgacaaactctaaagagctaaataaacataaggcataatacccaaatgatcttaaagaacttaattgtgaaagttcatttggggatctgacaagtagagccccaggtgatgtcttaattacctgtctccatgccttcgaagttggttgagatagaagggtgggtaggacttctatgaccagtttgccttcattgctgactgaaaagatttctacaaaatccaaatcatggtacaaatattctacccttcacacaactactacctctttgaaattgctcaggaaagtttaatacaca

SEQ ID NO: 332529 - DNA, 650 bp, Homo sapiens
atggtggatacatgacattttacatctgtcaaggcccacagactgcacaacacaaagatgagccctgatgtaaactgtggacttcatttaataataatgtatacatactgattgatcaattgtaacaaatatacctcagtaatgccagatattaatagtaaaacaaactgcagggagaagaaagtataggtaagtaggaatcctcttcactttcaggccaatttttatgtaaacctaaaatcgttctaaaaataattttttgtgacattaccagrccaaaatgaattaattaatttaaaaagtaaaatacaaataattttttaaatcagtctggataagttatgtgaaagtatttgacaaactctaaagagctaaataaacataaggcataatacccaaatgatcttaaagaacttaattgtgaaagttcatttggggatctgacaagtagagccccaggtgatgtcttaattacctgtctccatgccttcgaagttggttgagatagaagggtgggtaggacttctatgaccagtttgccttcattgctgactgaaaagatttctacaaaatccaaatcatggtacaaatattctacccttcacacaactactacctctttgaaattgctcaggaaagtttaatacaca

SEQ ID NO: 332530 - DNA, 650 bp, Homo sapiens
atggtggatacatgacattttacatctgtcaaggcccacagactgcacaacacaaagatgagccctgatgtaaactgtggacttcatttaataataatgtatacatactgattgatcaattgtaacaaatatacctcagtaatgccagatattaatagtaaaacaaactgcagggagaagaaagtataggtaagtaggaatcctcttcactttcaggccaatttttatgtaaacctaaaatcgttctaaaaataattttttgtgacattaccagaccaaaatgaattaattaatttaaaaagtaaaatacaaataattttttaaatcagtytggataagttatgtgaaagtatttgacaaactctaaagagctaaataaacataaggcataatacccaaatgatcttaaagaacttaattgtgaaagttcatttggggatctgacaagtagagccccaggtgatgtcttaattacctgtctccatgccttcgaagttggttgagatagaagggtgggtaggacttctatgaccagtttgccttcattgctgactgaaaagatttctacaaaatccaaatcatggtacaaatattctacccttcacacaactactacctctttgaaattgctcaggaaagtttaatacaca

SEQ ID NO: 332531 - DNA, 601 bp, Homo sapiens
tttgtccctgggcctttatatcctcagcatgacattgaactgataggaccagaaggtactgggagaaatgtaaakatgggatgtgactgaatttggggtgggtgatttgcttcacaggaattctttggtttttggagaagaaggccaaactgattttgtcatgaagctgtcatgaaactggcattttgtgatcattttaaaacttccattatagttttaaataagttcctggcagtcttcaacttttacaaagtcttcctggaaacagggtcagaaaacaaaaagggtgaagccaaatccctttcccctgacatttgctgtgctagaaagacagaccggggtccctctcaaagctggctgcccgtcacttcccagttcccctggttcctgtgtgccattcagacaccccactgcagtgctttcagcccacaggatagaaaggaaaagctcatggctattgttataaaacacagttataagatcaatggaatggttttgaatgcatttgcttgctaatgggaatttttacaagagggaaatagaagagaaattagttcaaatttccctagacagatgtcttaaagaaatctgagccttccaa

SEQ ID NO: 332532 - DNA, 601 bp, Homo sapiens
tttgtccctgggcctttatatcctcagcatgacattgaactgataggaccagaaggtactgggagaaatgtaaatatgggatgtgactgaatttggggtgggtgatttgcttcacaggaattctttggtttttggagaagaaggccaaactgattttgtcatgaagctgtcatgaaactggcattttrtgatcattttaaaacttccattatagttttaaataagttcctggcagtcttcaacttttacaaagtcttcctggaaacagggtcagaaaacaaaaagggtgaagccaaatccctttcccctgacatttgctgtgctagaaagacagaccggggtccctctcaaagctggctgcccgtcacttcccagttcccctggttcctgtgtgccattcagacaccccactgcagtgctttcagcccacaggatagaaaggaaaagctcatggctattgttataaaacacagttataagatcaatggaatggttttgaatgcatttgcttgctaatgggaatttttacaagagggaaatagaagagaaattagttcaaatttccctagacagatgtcttaaagaaatctgagccttccaa

SEQ ID NO: 332533 - DNA, 601 bp, Homo sapiens
tttgtccctgggcctttatatcctcagcatgacattgaactgataggaccagaaggtactgggagaaatgtaaatatgggatgtgactgaatttggggtgggtgatttgcttcacaggaattctttggtttttggagaagaaggccaaactgattttgtcatgaagctgtcatgaaactggcattttgtgatcattttaaaacttccattatagttttaaataagttcctggcagtcttcaacttttacaaagtcttcctggaaacagggtcagaaaacaaaaagggtgaagccaaatccctttcccctgacatttgctgtgctagaaagacagaccggggtccctctcaaagctggctgcccstcacttcccagttcccctggttcctgtgtgccattcagacaccccactgcagtgctttcagcccacaggatagaaaggaaaagctcatggctattgttataaaacacagttataagatcaatggaatggttttgaatgcatttgcttgctaatgggaatttttacaagagggaaatagaagagaaattagttcaaatttccctagacagatgtcttaaagaaatctgagccttccaa

SEQ ID NO: 332534 - DNA, 452 bp, Homo sapiens
tcatggctattgttataaaacacagttataagatcaatggaatggttttgaatgcatttgcttgctaatgggaatttttacaagagggaaataraagagaaattagttcaaatttccctagacagatgtcttaaagaaatctgagccttccaaaatgctaccaaaaagcttttctaaattctgcaaacgaagcaaaattgttgttagttaaatgcgtaatgtttattatcaccagcatatcagttttagagcaaatttacaccacagtggagttgtattttcatgtactatgagtacattttgtcaatcgttagggtccctgctaaaatcaaagtaacaatatagtaagcccattttaaagaagctagaaaacagttttactattttttttttattggtttagaaacttgtgctgctgtgttttttatttaatgatatcattaagtatccgg

SEQ ID NO: 332535 - DNA, 452 bp, Homo sapiens
tcatggctattgttataaaacacagttataagatcaatggaatggttttgaatgcatttgcttgctaatgggaatttttacaagagggaaatagaagagaaattagttcaaatttccctagacagatgtcttaaagaaatctgagccttccaaaatgctaccaaaaagcttttctaaattctgcaaacgaagcaaaattgttgttagttaaatgcgtaatgtttattatcaccagcatatyagttttagagcaaatttacaccacagtggagttgtattttcatgtactatgagtacattttgtcaatcgttagggtccctgctaaaatcaaagtaacaatatagtaagcccattttaaagaagctagaaaacagttttactattttttttttattggtttagaaacttgtgctgctgtgttttttatttaatgatatcattaagtatccgg

SEQ ID NO: 332536 - DNA, 452 bp, Homo sapiens
tcatggctattgttataaaacacagttataagatcaatggaatggttttgaatgcatttgcttgctaatgggaatttttacaagagggaaatagaagagaaattagttcaaatttccctagacagatgtcttaaagaaatctgagccttccaaaatgctaccaaaaagcttttctaaattctgcaaacgaagcaaaattgttgttagttaaatgcgtaatgtttattatcaccagcatatcagttttagagcaaatttacaccacagtggagttgtattttcatgtactatgagtacattttgtcaatcgttagggtccctgctaaaatcaaagtaacaatatagtaagcccattttaaagaagctagaaaacagttttactattttttttttattggtttrgaaacttgtgctgctgtgttttttatttaatgatatcattaagtatccgg

SEQ ID NO: 332537 - DNA, 452 bp, Homo sapiens
tcatggctattgttataaaacacagttataagatcaatggaatggttttgaatgcatttgcttgctaatgggaatttttacaagagggaaatagaagagaaattagttcaaatttccctagacagatgtcttaaagaaatctgagccttccaaaatgctaccaaaaagcttttctaaattctgcaaacgaagcaaaattgttgttagttaaatgcgtaatgtttattatcaccagcatatcagttttagagcaaatttacaccacagtggagttgtattttcatgtactatgagtacattttgtcaatcgttagggtccctgctaaaatcaaagtaacaatatagtaagcccattttaaagaagctagaaaacagttttactattttttttttattggtttagaaacttgtgctgctgtgttttttmtttaatgatatcattaagtatccgg

SEQ ID NO: 332538 - DNA, 332 bp, Homo sapiens
aattgcaatacatcatgctttataatgtgaccgtcaaaaggaaaatatgattgtaatcttatactacatctatcaatgtctytgattcataagactatagagtaagcccctagttttcaaagccaacttatgaggcagtgacatcttatgcaagtttgctgctttctgccacagtggtccttggtcagctggcacaaattgttttacaaatgccactaggtctaaaaaaagtttggatcacaatgaacacagaaaaaccttcatcccttcagaaatacctatcaattacttccaatacagaatgaaaaattgacaaaggaaatatgttgatt

SEQ ID NO: 332539 - DNA, 332 bp, Homo sapiens
aattgcaatacatcatgctttataatgtgaccgtcaaaaggaaaatatgattgtaatcttatactacatctatcaatgtctctgattcataagactatagagtaagcccctagttttcaaagscaacttatgaggcagtgacatcttatgcaagtttgctgctttctgccacagtggtccttggtcagctggcacaaattgttttacaaatgccactaggtctaaaaaaagtttggatcacaatgaacacagaaaaaccttcatcccttcagaaatacctatcaattacttccaatacagaatgaaaaattgacaaaggaaatatgttgatt

SEQ ID NO: 332540 - DNA, 332 bp, Homo sapiens
aattgcaatacatcatgctttataatgtgaccgtcaaaaggaaaatatgattgtaatcttatactacatctatcaatgtctctgattcataagactatagagtaagcccctagttttcaaagccaacttatgaggcagtgacatcttatgcaagtttgctgctttctgccacagtggtccttggtcagctggcacaaattgttttacaaatgccactaggtctaaaaawagtttggatcacaatgaacacagaaaaaccttcatcccttcagaaatacctatcaattacttccaatacagaatgaaaaattgacaaaggaaatatgttgatt

SEQ ID NO: 332541 - DNA, 332 bp, Homo sapiens
aattgcaatacatcatgctttataatgtgaccgtcaaaaggaaaatatgattgtaatcttatactacatctatcaatgtctctgattcataagactatagagtaagcccctagttttcaaagccaacttatgaggcagtgacatcttatgcaagtttgctgctttctgccacagtggtccttggtcagctggcacaaattgttttacaaatgccactaggtctaaaaaaagtttggatcacaatgaacacagaaamaccttcatcccttcagaaatacctatcaattacttccaatacagaatgaaaaattgacaaaggaaatatgttgatt

SEQ ID NO: 332542 - DNA, 500 bp, Homo sapiens
tcaaggtgttctcttgggccttaatgtagcttccaggggctggagaagaatcaaagaggaagctgcagggcacccactctctctccatacactgctgtctcccctcaacctattttccatgttggggatgaaagatttagctgaaaagaactgtgaaaatctcaggactgattagtgcacagggcccttccagcagcaatgatataaaacgccgtaaaagaagaagattcatggtaggctctctggctggcatctttagaggcagggatggtacggatggagagaagatcgtacaaggggacccaytggacagtccagaacaaaggcatgtggccaaggagcaccccaggaagggttggcgggaagtttgaagagaacatgaggaggtgtgagcaaaacaggttgtgtctttgggggctctgcaaggcctccttttccctagaggacccagtctttgtcttatgctttgaattcttccacttggatcctggttctatagt

SEQ ID NO: 332543 - DNA, 598 bp, Homo sapiens
cacgtggctctctgccgcgccctggttttcaygtgacaccagagagtccactggtccagaggcgaccccagacctggtgacaaagccgctccatgtgaaccggggaggggccgccccgccagccctgacttctcccctgcagccccgctgcgtggagaggcagccccgccctcctcagggttgcgcaggatttgccctttctgcagccctccggggagctgaggaggtggataacagggtttcaaagggcaccggcactgcagataaacagggggagcggaaatgtcaacagaacagacacttcgcgtcaataaactttaggtttatccggagcagatctcatttccctgagtacgatccagaggaggccagaagtaagaagccttcccatgcagagcatttaaagcgatgcctgtttacgatatgcatgccgggctctgggtgaggggcagcgggagcggctggtgtttgcaaagtgcaagtgcctggcaggtgtaggtgctgggaagcgcctgcgctcacgctgcgaggtttcaagcttgaaacctccgctcctcctagacctggggagaggcgcttccccagtgggcggggggtg

SEQ ID NO: 332544 - DNA, 598 bp, Homo sapiens
cacgtggctctctgccgcgccctggttttcatgtgacaccagagagtccactggtccagaggcgaccccagacctggtgacaaagccgctccatgtgaacyggggaggggccgccccgccagccctgacttctcccctgcagccccgctgcgtggagaggcagccccgccctcctcagggttgcgcaggatttgccctttctgcagccctccggggagctgaggaggtggataacagggtttcaaagggcaccggcactgcagataaacagggggagcggaaatgtcaacagaacagacacttcgcgtcaataaactttaggtttatccggagcagatctcatttccctgagtacgatccagaggaggccagaagtaagaagccttcccatgcagagcatttaaagcgatgcctgtttacgatatgcatgccgggctctgggtgaggggcagcgggagcggctggtgtttgcaaagtgcaagtgcctggcaggtgtaggtgctgggaagcgcctgcgctcacgctgcgaggtttcaagcttgaaacctccgctcctcctagacctggggagaggcgcttccccagtgggcggggggtg

SEQ ID NO: 332545 - DNA, 477 bp, Homo sapiens
tactaaaacagttcctctcaagcatcctcaagccggatcttgggattttgctttaggaaatagttctgttggttcttttgaagtttgacctttcgtttttcccccctcgatgtcagcacaggagrttttctgtaagtgtgcctttaaggacgagctgtcacctatttgggatcctgatgggagagctctgtcttgttactgctgtctcctggccagagaaggaggcctgtacccagagggtctgggtggttttgcatcacaatgggcacctggggactctgagccaaagggttgcaagttcaaggtctggaaatgcactttttctttcaagacagcccttcacctttgcttgcaagccactccgcggctccctaggtgagcactgggcgtcttgctgccaagcttggagcctggttaggacaggtagacactgagcctccagctggggtggcagaaggcctggcttgctccaccatg

SEQ ID NO: 332546 - DNA, 579 bp, Homo sapiens
aacccagaggccctcactaactcagcccaggccacgcagctactatgtgcagagtggaggctggaacctggatgtgtctgactccagaatccacgtccaggtgaccactgggtgccacctgcatttgccttcatgtggctcactctgaggtggctccaggcctgggctgggcagcagagactggggcctggggtatctttaaagctttgctgcagcccgtggtcctccacagtgagtggcatctccaccrcctgtctcatgcctcccgaggagtgacagacaagtctgggctgcagctccatccaagctctttcctgcactcacagagtgcccgagtctccctggagatgaaggctctgggtgtgaaatatctctgctgcctccaggagaaggccatgtccccacatctacagggagcagccaccaacacggtattaactctcacttataaccaaaaataaatcaatacctccctgaggcacatcacacacagacacgcagcgagagaggatgtggggcaatttgtccaaattataaacaggaaggcttttcagaggatctatcgcaattaatgccaat

SEQ ID NO: 332547 - DNA, 579 bp, Homo sapiens
aacccagaggccctcactaactcagcccaggccacgcagctactatgtgcagagtggaggctggaacctggatgtgtctgactccagaatccacgtccaggtgaccactgggtgccacctgcatttgccttcatgtggctcactctgaggtggctccaggcctgggctgggcagcagagactggggcctggggtatctttaaagctttgctgcagcccgtggtcctccacagtgagtggcatctccaccgcctgtctcatgcctcccgaggagtgacagacaagtctgggctgcagctccatccaagctctttcctgcactcacagagtgcccgagtctccctggagatgaaggctctgggtgtgaaatatctctgctgcctccaggagaaggccatgtccccacatctacagggagcagccaccaacacggtattaactctcacttataaccaaaaataaatcaatacctccctgaggcacatcacacacagacacgcrgcgagagaggatgtggggcaatttgtccaaattataaacaggaaggcttttcagaggatctatcgcaattaatgccaat

SEQ ID NO: 332548 - DNA, 592 bp, Homo sapiens
gagtgcccgagtctccctggagatgaaggctctgggtgtgaaatatctctgctgcctccaggagaaggccatgtccccacatctacagggagcagccaccaacacggtattaactctcacttataaccaaaaataaatcaatacctccctgaggcacatcacacacagacacgcagcgagagaggatgtggggcaatttgtccaaattataaacaggaaggcttttcagaggatctatcgcaattaatgccaatgccttaattccaaaggttttctgacaggaggagctgcaaacccggagcaaacctgcccctccctcccctcgacggtgattgggtctgtaacgagctrataaatggcactgtcttccaggaaccacctgcattcattccccaattatgcttttattgagcacctaccgtggcccgtggagctgagcatgtggtcagtgtctcctgggcctgcccaggtggatccaagagtgaacagaagggtagggcctgactccaaggagctgggatcaagcagcgcttctggggttttccaccaatgggctcccactcccctgaagccgtgtttgcagcctgggcag

SEQ ID NO: 332549 - DNA, 592 bp, Homo sapiens
gagtgcccgagtctccctggagatgaaggctctgggtgtgaaatatctctgctgcctccaggagaaggccatgtccccacatctacagggagcagccaccaacacggtattaactctcacttataaccaaaaataaatcaatacctccctgaggcacatcacacacagacacgcagcgagagaggatgtggggcaatttgtccaaattataaacaggaaggcttttcagaggatctatcgcaattaatgccaatgccttaattccaaaggttttctgacaggaggagctgcaaacccggagcaaacctgcccctccctcccctcgacggtgattgggtctgtaacgagctgataaatggcactgtcttccaggarccacctgcattcattccccaattatgcttttattgagcacctaccgtggcccgtggagctgagcatgtggtcagtgtctcctgggcctgcccaggtggatccaagagtgaacagaagggtagggcctgactccaaggagctgggatcaagcagcgcttctggggttttccaccaatgggctcccactcccctgaagccgtgtttgcagcctgggcag

SEQ ID NO: 332550 - DNA, 646 bp, Homo sapiens
agcttcatgacatatcaccttaacagttaccatctattttttttttcctacctactggccatacctcctcttctaagcattgcatgttggaattcctcggctctgtgtcctctgtctaaattctcagtcaactttctctccctaagtaatctcattcagtcacatgggttcatttcttatcartaaactgagtcctaaatttatacttatagtgtagttctcttctgccccatagagatccacttgaattttacataggcacttatacatcattctctacggcttatttcaataactggcatcaacaaccacagagctgctcaaaactgaacctctgaaattattcttaacttctctctcctcactcctggagagccaaccaccaagtcctgttggtgccaccttctaaacatctctggaatctttttttctcatcattacattctctacactagttcaagctaccattatctgtcacacagattatggactattgcaatggccccttgataggtctttcccctctcacgcttatcccttctaatcaattattcacaaagcaatcatttaaaaacacaaccttcccaagctctcaacataaaacccatgatgtttaagcggttattggcccagcagatctgatccc

SEQ ID NO: 332551 - DNA, 604 bp, Homo sapiens
tgggattttttttttctagttttaatgaagtggcagcaactataactacgaaaattcataactgcttaagatcacaacagacaagttatcttgaaagtagtgtacttgaatgaatcccaaaacataagtagaatttaaaagagggagaaatggtacaaaaaagcaagaaaaacgaaaataagttgggcctatctgacaaatttcagttaccaaagagcttgtcccatctcagatgaatagaagtatatataactgggtggtccttttctgatayattttgaggctgaaactactttagcaacaataaaactgtaggatgaaaataatatgtggaagaaggaagaattttacttttcaagaatgtgctttagaatgtaacacagatacgttacctggaaattccacatgattaatcaagcaagggtgcaattccaaactgattaattttgacagtaattagctaacctattaaaagtaaatgaaagtttaaaactcattccaaatcttgacacattccaattttttgtttttcttttttttaagaacttgatttagctagggaacaattacaacctgagctgcttaaatcaccttgctcgtaatc

SEQ ID NO: 332552 - DNA, 604 bp, Homo sapiens
tgggattttttttttctagttttaatgaagtggcagcaactataactacgaaaattcataactgcttaagatcacaacagacaagttatcttgaaagtagtgtacttgaatgaatcccaaaacataagtagaatttaaaagagggagaaatggtacaaaaaagcaagaaaaacgaaaataagttgggcctatctgacaaatttcagttaccaaagagcttgtcccatctcagatgaatagaagtatatataactgggtggtccttttctgatatattttgaggctgaaactactttagcaacaataaaactgtaggatgaaaataatatgtggaagaaggaagaattttacttttcaagaatgtgctttagaatgtaacacagatacgttayctggaaattccacatgattaatcaagcaagggtgcaattccaaactgattaattttgacagtaattagctaacctattaaaagtaaatgaaagtttaaaactcattccaaatcttgacacattccaattttttgtttttcttttttttaagaacttgatttagctagggaacaattacaacctgagctgcttaaatcaccttgctcgtaatc

SEQ ID NO: 332553 - DNA, 640 bp, Homo sapiens
tagaagtatatataactgggtggtccttttctgatatattttgaggctgaaactactttagcaacaataaaactgtaggatgaaaataatatgtggaagaaggaagaattttacttttcaagaatgtgctttagaatgtaacacagatacgttacctggaaattccacatgattaatcaagcaagggtgcaattccaaactgattaattttgacagtaattagytaacctattaaaagtaaatgaaagtttaaaactcattccaaatcttgacacattccaattttttgtttttcttttttttaagaacttgatttagctagggaacaattacaacctgagctgcttaaatcaccttgctcgtaatctgtccgtgatcaacttacttgaaaagaggtgattaaaaaatccatagaagagattggcatggtattagagacaatgtatttaaactgaaaaggtgtaaaattatcttatctagcaggcaacttttaaatagtttattcaggccgggaacagtggctcaggcctgtgatcttagtactttgggaggccgaggcgggtagatcacctgaggtaacgagtttgaaaccagcctggccaacatggcgaaatctcatctctactaaaatacaaaactc

SEQ ID NO: 332554 - DNA, 640 bp, Homo sapiens
tagaagtatatataactgggtggtccttttctgatatattttgaggctgaaactactttagcaacaataaaactgtaggatgaaaataatatgtggaagaaggaagaattttacttttcaagaatgtgctttagaatgtaacacagatacgttacctggaaattccacatgattaatcaagcaagggtgcaattccaaactgattaattttgacagtaattagctaacctattaaaagtaaatgaaagtttaaaactcattccaaatcttgacacattccaattttttgtttttcttttttttaagaacttgatttagctagggaacaattacaacctgagctgcttaaatcaccttgctcgtaatctgtccgtgatcaacttacttgaaaagaggtgattaaaaaatccatagaagagattggcatggtattagagacaatgtatttaaactgaaaaggtgtaaaattatcttatctagcaggcaacttttaaatagtttattcaggccgggmacagtggctcaggcctgtgatcttagtactttgggaggccgaggcgggtagatcacctgaggtaacgagtttgaaaccagcctggccaacatggcgaaatctcatctctactaaaatacaaaactc

SEQ ID NO: 332555 - DNA, 608 bp, Homo sapiens
  misc_feature (1)...(608): n = A,T,C or G
nnnnnnnnnnnnnnnnnnnnnnnnnnntccaaaggtaaattattattattatttaagacagggtcttgctcatgttacccaggctggagtgcagtgttgagatcatagctcactgcagcctccacctcctgggctcaagtgactctttcacttcagcttcctgagtagctgggattataggcgtgtgccaccaagcctagttaattttctttttttttttgtgaagacagtctctcactatgttgtgagcagtcatcctgcctcagtctcctgaagtgctgggattatgggwgtgagccactgcagctggcaaaaccacctttttaatcagtgttgaatctcatgttggttcacttaaacatatagcattgttaaatgtgttcttatacttacaggatacattaaattgccttaaatattatattcatagtagtcactcttagaggagtatttctgaatgttttttcattatgtaccctataatcacattacctgtgtatatttttatatattattcttatatacctggattttgtatttataaaaactatagctaaagccagaagataataataaatgcatgacttaaatttttcccctttatgtag

SEQ ID NO: 332556 - DNA, 604 bp, Homo sapiens
agagttgtgaagaccacaggcttcatatacactgagaactccatttaaatgtggctcttccatttttttcttaagtcatcttaaatgatacatacttaacttccctaaacctcagtttcttgatacagtgattgtaccgattatacagaattatgagaattaaatgagataatgactgtaaaatttttagcacagcatgtggtatatgcccaataaatgttaaatattttttattttaactactgttgtagtgattatcaaaatgagcttttggaattctttctttttttacyttctactctttcactttgaagtagactgactttcccttattttggaaaacaggacatcatctatcagtgccttaaaaatcaacttactagattctccataaggcagacaaaaattcataatgttttgtaggggggagcaaaaattaccatcacactactgtatttcttttcagttgaatctctaggaaatattactgtatataaaatactagctgctttctaagtgtttctttctaacttcaaccaaggtgaaaaccatcacttagttttcagaaacttcaaatggcaggttaagttgacgtcctgtttca

SEQ ID NO: 332557 - DNA, 604 bp, Homo sapiens
agagttgtgaagaccacaggcttcatatacactgagaactccatttaaatgtggctcttccatttttttcttaagtcatcttaaatgatacatacttaacttccctaaacctcagtttcttgatacagtgattgtaccgattatacagaattatgagaattaaatgagataatgactgtaaaatttttagcacagcatgtggtatatgcccaataaatgttaaatattttttattttaactactgttgtagtgattatcaaaatgagcttttggaattctttctttttttaccttctactctttcactttgaagtagactgactttcccttattttggaaaacaggacatcatctatcagtgccttaaaaatcaacttactagattctccataaggcagacaaaaattcataatgttttgtaggggggagcaaaaattaccatcacactactgtatttcttttcagttgaatctctaggaaatattactgtatataaaatactagctgctttctaagtgtttctttstaacttcaaccaaggtgaaaaccatcacttagttttcagaaacttcaaatggcaggttaagttgacgtcctgtttca

SEQ ID NO: 332558 - DNA, 437 bp, Homo sapiens
agttcacattttttcaaataagtaaggaaggtttacatttttggagacagtttttatccataaaaaacatttatgggcagcactrtaacaccattgccattttttttaagaatttactatttagagcgagaagagacttgtgtaagaattgagcttggagccaggttttctctgcaagaaagagtggttctgtctttgctcaaatttaaatatagggagaagacccttttgtttattatcttccaactttatacactatagtttttaaatatttttaacaatattttaatgtatttttaaataaaaatattggtaaaaatgagattgaaaaaagtaaacagaaaacctatttatctaatgtccatcagttgtaatatgtttactaaatattgtgtatatttttatatgtattttattgaattgtaatctatatacaa

SEQ ID NO: 332559 - DNA, 597 bp, Homo sapiens
ggtaaaactaattttagtaatacatttaattaaaccaacatatccaagacatttcaacatgtagtcagtataaaaaattgcttgtgagatattttacgcaagaatttaaaacctgatatgtattttacacagattgcstgagctgcatctcagttgctcagtgaccacacatggctggtggctgcatattaaacagcacatgctagactctttccctatcagttgctgcaaattctttttaaaaacaagtcagagtataaataattttattcacatgtaaataaatgtaaaattgttagtgtaattatgacagtcatcctccaagacaggtgttacccacctttgctgtaaggttaaggaagtagtagcggtgtttttaggtataatgaataaatgcagtactagggggtgtgcctgtgttagggatattagtatcagttcttgacaagatacgttattgaagtttgatttcatttgtttgagtttcaaagaaggctacataaatggtgtttgtcctgtgggaaaaaatagcgtgtttgtctgaaaggtggattacagacattttcaagattttagttttgagtggcgtttggatac

SEQ ID NO: 332560 - DNA, 512 bp, Homo sapiens
ggttagagtgagctgagatcacgccactgcactccagcctgagtgacagagggagtgtgtgtgtttcaaaacacacacagacacacacacacacacacttaagaataagttaacaaaactatataacctgtgctatatgaagaaaaaaggcataatattgagagacataaaagatttgaattcatagagaggtctattttttgagtagaaaaaatatatgaagtgccaattctctcctcattataaatttaatgccattctatcaaaatatttgcagaaattttgtaaagaacttgccaaaatttagacttaatctagaggaataaactcctgagaacagtcaggaaaactatggaaagtaagggagggaaaaaaaccacatgggatattaggctgtattacaaagttacagtaactctaacactggttccagctcagcaggagactggcaggacaatgaaacagaatagggtggcctagaactggacctycaagcttctggcaatttacac

SEQ ID NO: 332561 - DNA, 535 bp, Homo sapiens
atgtagcaagaacagaaataaaggacaaattgagaggaaagtacaatatatataataagcaaagagtttatagattcctctagtaaagaaaaagcccttataaatcaataagaaaaagatgaatagtacaacagaaaaattgggcaaaggacattagaggcaaatcacaaaagaaattagtgaagcaagtgaaaaattcttaatgttttttccttttttttagttctttatagtagtcagtacagcaagtgaaaatttgctctatttcackaataaaaaatacaaaataaagtaacaatcagttataaattttgcctatcagattagaaaataatagaaaatttataatatccagtgtccatgagaaactggtactctcataaactgttgatgagaatatacattggcataatgtttttgaagaaaatggcagcatctattaaatgtttaaagcctttatcctttgaaagatgttatgagttaaactgtgtcccttccttcccctacttcacctgctccccacacagaaaagata

SEQ ID NO: 332562 - DNA, 535 bp, Homo sapiens
atgtagcaagaacagaaataaaggacaaattgagaggaaagtacaatatatataataagcaaagagtttatagattcctctagtaaagaaaaagcccttataaatcaataagaaaaagatgaatagtacaacagaaaaattgggcaaaggacattagaggcaaatcacaaaagaaattagtgaagcaagtgaaaaattcttaatgttttttccttttttttagttctttatagtagtcagtacagcaagtgaaaatttgctctatttcactaataaaaaatacaaaataaagtaacaatsagttataaattttgcctatcagattagaaaataatagaaaatttataatatccagtgtccatgagaaactggtactctcataaactgttgatgagaatatacattggcataatgtttttgaagaaaatggcagcatctattaaatgtttaaagcctttatcctttgaaagatgttatgagttaaactgtgtcccttccttcccctacttcacctgctccccacacagaaaagata

SEQ ID NO: 332563 - DNA, 589 bp, Homo sapiens
tccttgtgacatagacacttcccataaggccccacctcccaatactgttgtattggggattaaatttctaacacaagcattttgggggacacattcaaaccatagcaccctccttctgagtttttgagtcagtttccttagaacagccacaataatttcttaactttccagaattcatccttctgacaatctctctatccagaaagttggcaagaacaaggaaattcagcaggacacatraaagtcctatttgctccctcagagatactcccttagaaactatttacctctactttacactcaatgtggagacctgttattctcatttttatgaatattttaatattcatacttatattcatagttcttatgaatatagcagtttaaaagagggaaatggaattgctagtggtaggtacactgacaacagaaaataatgttttcagaaaaattatagatataaaaaaactaacattgcaaaccagcctgggcaacagagcaagagaccctgtctctacaaaaaaaatttgttttaattagctgggcaagatggtgcatgcctgtagtccttgttacttgtggggtggag

SEQ ID NO: 332564 - DNA, 484 bp, Homo sapiens
ctttaaccacctcccattagggaggagaggaagggagagaagggaagagaaaaagagatacataacacttacacacatacttaaacacacacacacacacacacacacacacatacacacacacacacagagacagacagagagacagagagaattgtccatgagaacattttaaaaatcaggatagatctacacaaagtwgggctatggcagcatggttgcaatcactctacttaggagaaaatgtatgtgctacattcaccaatttccccttgttctataactagagctaagatttaagttaagctgagatttaatgtgcaattcactttttgttttctttctctctcctcttttaaaaaagctggtaaccaacattaaagacattgtggttggtatctttataactaaaatatagcttcatttctgctcatggaaatatgtagtcaattagccataatgtggtccagactccctttgatat

SEQ ID NO: 332565 - DNA, 581 bp, Homo sapiens
aaatggctctgcagtttaagttttctcagctttcagaactcattgtttgctagcaagctaggctgctttaaccacctcccattagggaggagaggaagggagagaagggaagagaaaaagagatacataacacttacacacatacttaaacacacacacacacacacacacacacacatacacacacacacacagagacagacagagagacagagagaattgtccatgagaacattttaaaaatcaggatagatctacacaaagtagggctatggcagcatggttgcaatcactstacttaggagaaaatgtatgtgctacattcaccaatttccccttgttctataactagagctaagatttaagttaagctgagatttaatgtgcaattcactttttgttttctttctctctcctcttttaaaaaagctggtaaccaacattaaagacattgtggttggtatctttataactaaaatatagcttcatttctgctcatggaaatatgtagtcaattagccataatgtggtccagactccctttgatattctaaaataaaaacattccaagttatttactt

SEQ ID NO: 332566 - DNA, 424 bp, Homo sapiens
agggtgtatgcagtaccacaaaggagatcaaactggctagaatggtgggacagattacagagggccttaaaagctcagctgagaagtttgtacttgatacatcaatgcatattttgtatgtttgttgctagaattccagacagtagactgtttatacacttacccttgaaactctagaattgtgttgyccaatatgacagcaactagtcactgtggctatgaagcacttgaaatgtggctagtctgaactgagatgtgctgtaagtataaaacacatactagatttcaaagatttagtgcaaaaaaaataaaatatttacattatttgttgaaatgatactattttgatatattgagctaaattttagatattattaaaattaatttatctgtttcttttcctttttaaaataaggctactaaa

SEQ ID NO: 332567 - DNA, 591 bp, Homo sapiens
caaagatttagtgcaaaaaaaataaaatatttacattatttgttgaaatgatactattttgatatattgagctaaattttagatattattaaaattaatttatctgtttcttttcctttttaaaataaggctactaaaaacttaaagttacataaggggcttgcattacatttctttcaacagtactgttctagaatgtcaagatgggtattaaagaattttatttgcacaaggagcytgggagaaagaaacagatagacatttaggtagatagctatgaagatgcctaggaggccagaattaacagtattgtatattgtatccccctcaccacacacagacacacacctgggatatacattgaagtcaaggcagtggaacctggtcctgggccaatgagtaaagaatgatataaagcattatttttgtgtgcaatactgagggatatccttccacgagaagagccactaagaaactgagagagcaagtaatgtacaagaactgtaataggattcatgtttaagcatcagagcaataaaagtcataaatctgaatgagagaaagagacctgtcccacttcagaagaatatc

SEQ ID NO: 332568 - DNA, 591 bp, Homo sapiens
caaagatttagtgcaaaaaaaataaaatatttacattatttgttgaaatgatactattttgatatattgagctaaattttagatattattaaaattaatttatctgtttcttttcctttttaaaataaggctactaaaaacttaaagttacataaggggcttgcattacatttctttcaacagtactgttctagaatgtcaagatgggtattaaagaattttatttgcacaaggagcctgggagaaagaaacagatagacatttaggtagatagctatgaagatgcytaggaggccagaattaacagtattgtatattgtatccccctcaccacacacagacacacacctgggatatacattgaagtcaaggcagtggaacctggtcctgggccaatgagtaaagaatgatataaagcattatttttgtgtgcaatactgagggatatccttccacgagaagagccactaagaaactgagagagcaagtaatgtacaagaactgtaataggattcatgtttaagcatcagagcaataaaagtcataaatctgaatgagagaaagagacctgtcccacttcagaagaatatc

SEQ ID NO: 332569 - DNA, 559 bp, Homo sapiens
aaagtggccaaatgatatgaaaagataattcaaaataagatatacaaatggccaataaacacatgaaaaaatgttcaacatcactcattatcagggaaatacaaattaaaaccataatgagctaccaccttatttatgattttaaattatggcaagaatggccacattttaataaattaataaataaatwaattaatttttattaattaataattaattaattaataattaataaaaaggatgttggcatggatgtgataaaaagggaacacttttttacacagcttatgggaatgtaaactagtacaaacactatggaaaacagtatggagacttcttaaggaactaaaaatagaactaccatttgatccagcaatcccactactgggtatctacccagagaaaaagaagtcataagactctcgcatacacgtgtttatagcagaacaattcacagttgcaaaaatatggaaccagtctaaatgtccatcaaccaacgaacagactaaagaacatgtgatatatatatgtatatatatatatatatatatacaccatg

SEQ ID NO: 332570 - DNA, 559 bp, Homo sapiens
aaagtggccaaatgatatgaaaagataattcaaaataagatatacaaatggccaataaacacatgaaaaaatgttcaacatcactcattatcagggaaatacaaattaaaaccataatgagctaccaccttatttatgattttaaattatggcaagaatggccacattttaataaattaataaataaattaattaatttttattaattaataattaattaattaataattaataaaaaggatgttggcatggatgtgataaaaagggaacacttttttacacagcttatgggaatgtaaactagtacaaacactatggaaaacagtatggagacttcttaaggaactaaaaatagaactaccatttgatccagcaatcccactactgggtatctacccagagaaaaagaagtcataagactctcgcatacacgtgtttmtagcagaacaattcacagttgcaaaaatatggaaccagtctaaatgtccatcaaccaacgaacagactaaagaacatgtgatatatatatgtatatatatatatatatatatacaccatg

SEQ ID NO: 332571 - DNA, 569 bp, Homo sapiens
ccaaaaggcttagagtagaatctcctttctcttcccaaataaactatacatagttccttcaagactaaacatatctaaaaccaaaaagaaatagtacaaatatataaaatgccccctgccttattttgtaagtaatttatcatgaaaaccttccmccatcaattcattttctgtagcatcctttttaatgtttcaaaattcacttatacttccctgtcttcccactgttgagcatataggttttctccagttgttggacatgatgaacattttacacctaactctgtacacacaaagcatgatttctatattataaggaacacagccttggtaaatagggaggaggcccctagaaggcctgttatgcagctttattttgtgtgtgtgcctgaggtgacctttcttttaacaatatctgctcaccttggcttacagtcatagttggggactgacttggggaaagggcttggggcctgataaaccttgatatttgtgtctaaaaattcacttttattgtatatacttctttttatcagtttcaataaaagcgggtgaaatcgagccaaaat

SEQ ID NO: 332572 - DNA, 595 bp, Homo sapiens
agagtggggacttgatcatgtctgagtgaagacacacctggagggtatgatatagccattgctcctaggctacaaacctgtacagcatattactgtactgaatactataggcaactgtaacacaatggtaaatatcttgtatctaaacatagaaaaggtatagtaataattctttataaaaagctttttaaaatggcacacctgtatagggcacttaacacgaatggakcttgcaggctggaagttgctctgggtgagttcagttagtgagtgagaggtgagtgaatgggaaggcctaggacatactgtacactactgtagactttataaacatggtacatttaggctacactaaattgatttttaatttttttcagtaataaattaaccttagcttactgtaacatttttaccttagaaacttaaaaaaaaaaactctcttttttgcaataacatttagctcaaaacacacatatacagctgtacaaaaatattttctttctttatatccttattttataacctttgttctaatttttaatttttttatttttattttttactttttaaattttgttaaaaaaaaaaaaaaaaa

SEQ ID NO: 332573 - DNA, 485 bp, Homo sapiens
tgatgtcaaaacaagtttgtaggccagccgtagcctcagtgggagcggacaacactggggagtgcaaaaccgagctgggatgttcctgctggcctcactggctctgtgctttctcagaccgtacactaaagatgttttctaaggttctgtgattttccaaagatcacatggagtaktggaaacaggttttggagcccagaaggtcttggttcaaatttgcaaatatatcgctttctatgtaacctccaccttaggttccttaacctttctgagctgctgttccctcatctgaaaattgcgctagcatatggaacttgcacagttacagggaaaattagagaaaatgtatacagtgccagccgctctataattgggagtttttgtgttagttttatcaaaaagttaggctgaatttagcagtataaaatgaaatggagttgaggtgacatcgaagaacactcaggctaaggatccagtgttctctg

SEQ ID NO: 332574 - DNA, 608 bp, Homo sapiens
actccttacccttcaataactgcaaaataaagctatttcccttctttaatattagggctacaccgtgaggcacgtatgctaaggattaagaaagctatttgctatagttttcccatttagaggggaagcctcgagtaattaattctcaactcttggagtcaagagaccattagagagttctgctaagggaaaactttctagcgattatgcgtttaacaaagccttagagtgctttgctaacagtgaatatattaaggttatttatagaataaatgtacatgcaatgaatgaacgaatgcagtgaatgctttgtagggatagaagggacaagagaaaccatcaaaactctcattctacaaatgagatactcagagtgggcaactagagacttgcacaggtgcacacagctagtaggtggcagtgasagaactagagtccagggcccctgacccttagcacttaacactgctaagatctgttgtgacttcacagaatcaagaaggagctgtggtgtgtcagatcccttctgtctccaggccaagtccagtaagggccacttggatgcaatcactagctgttggcaggacactgtttaaggctgtggttta

SEQ ID NO: 332575 - DNA, 538 bp, Homo sapiens
tggcctcccaaaatgctgggatacaggtgtgagccaccacacccagccaaaattagccattttaaagagaagatttcrggcatttagtgtagccacaaagttgtgcaaataccacttctttctagttccaaaacattttcctcatatcaaaaggaaacccaaaaccctatttgttaagcagttgcttttcattctcccctcccaccagctcctggcaactatcaatctgccttatgtttctatggatttacctattctgaatatttcataaaatagaattataaaatacgtgtctttttgtctggcttttttcccttagcatgcttttgagtttcatcaatattgtagcatgtatcagtacttcattcctttttatggctgaatatttcattgtgtatatataccacacttaatacattcatttgttgatggatgtattagtccattctcacactgctataagggttgtacccaagaagaggtaatttataaagcaaagaggtttaattgactcacagttctgcatggctggggagtc

SEQ ID NO: 332576 - DNA, 515 bp, Homo sapiens
ggtcagttggtgggtgtaaaaagttgttgagtcctctggactcaytgggtccattctgggcagtgaacttacttacatcggaacaacttttcaagaataggtccctggcatccgtaaccagaactcagcaggctccgaacttgtccattctctcgcaggctttcccaaatacacacccttgccctttgttattcctgaacacaaatgccttattcccttattatctcatacagtgaggttaggtgacccatagagaagaacttatttgtaagtatgtagccaaccttgttagtaagaaataaaaatgctggtgtcagaaattaagagaatctacagaggtggaagtatttacatttcatgagcaatctcattactttagagtacggattttaacaactgtcaaggaggatggccaagtgtcgaagtctcttgtacatggagacaggttatacctggtcttcctacagagcatgggtcaggccttcatccctgggttatgaatgtcaaaagagtca

SEQ ID NO: 332577 - DNA, 614 bp, Homo sapiens
tttaataaaatgtgacgtttatttattttaataaataaaatatgacgttaatttatttkaataaataaaatgtgaagttaatttatttgaataaataaaatgtgacgttaatttatttgaataaataaaatgtgacgtttatttatttgaataaataaaatgtgatgtttatttgaataaataaaatgtgatgtttatttgaataaataaaatgtgatgtttatttgaataaataaaatgtgatgtttatttgaataaataaaatgtgatgtttatttgaataaataaaatgtgatgtttatttatttgaataaataaaatgtgatgtttatttatttgaataaataaaatgtgatgtttatttatttgaataaataaaatgtgatgtttatttatttgaataaataaaatgtgatgtttatttatttgaataaataaaatgtgatgtttatttatttgaataaataaaatgtgatgtttatttatttgaataaataaaatgtgatgtttatttatttgaataaataaaatgtgatgtttatttatttgaataaataaaatgtgatgtttatttatttgaataaataaaatgtgacatttattctctctccctc

SEQ ID NO: 332578 - DNA, 614 bp, Homo sapiens
tttaataaaatgtgacgtttatttattttaataaataaaatatgacgttaatttattttaataaataaaatgtgaagttaatttatttgaataaataaaatgtgacgttaatttatttgaataaataaaatgtgaygtttatttatttgaataaataaaatgtgatgtttatttgaataaataaaatgtgatgtttatttgaataaataaaatgtgatgtttatttgaataaataaaatgtgatgtttatttgaataaataaaatgtgatgtttatttgaataaataaaatgtgatgtttatttatttgaataaataaaatgtgatgtttatttatttgaataaataaaatgtgatgtttatttatttgaataaataaaatgtgatgtttatttatttgaataaataaaatgtgatgtttatttatttgaataaataaaatgtgatgtttatttatttgaataaataaaatgtgatgtttatttatttgaataaataaaatgtgatgtttatttatttgaataaataaaatgtgatgtttatttatttgaataaataaaatgtgatgtttatttatttgaataaataaaatgtgacatttattctctctccctc

SEQ ID NO: 332579 - DNA, 614 bp, Homo sapiens
tttaataaaatgtgacgtttatttattttaataaataaaatatgacgttaatttattttaataaataaaatgtgaagttaatttatttgaataaataaaatgtgacgttaatttatttgaataaataaaatgtgacgtttatttatttgaataaataaaatgtgatgtttatttgaataaataaaatgtgatgtttatttgaataaataaaatgtgatgtttatttgaataaataaaatgtgatgtttatttgaataaataaaatgtgatgtttatttgaataaataaaatgtgatgtttatttatttgaataaataaaatgtgatgtttatttatttgaataaataaaatgtgatgtttatttatttgaataaataaaatgtgatgtttatttatttgaataaataaaatgtgatgtttatttatttgaataaataaaatgtgatgtttatttatttgaataaataaaatgtgatgtttatttatttgaataaataaaatgtgatgtttatttatttgaataaataaaatgtgaygtttatttatttgaataaataaaatgtgatgtttatttatttgaataaataaaatgtgacatttattctctctccctc

SEQ ID NO: 332580 - DNA, 614 bp, Homo sapiens
tttaataaaatgtgacgtttatttattttaataaataaaatatgacgttaatttattttaataaataaaatgtgaagttaatttatttgaataaataaaatgtgacgttaatttatttgaataaataaaatgtgacgtttatttatttgaataaataaaatgtgatgtttatttgaataaataaaatgtgatgtttatttgaataaataaaatgtgatgtttatttgaataaataaaatgtgatgtttatttgaataaataaaatgtgatgtttatttgaataaataaaatgtgatgtttatttatttgaataaataaaatgtgatgtttatttatttgaataaataaaatgtgatgtttatttatttgaataaataaaatgtgatgtttatttatttgaataaataaaatgtgatgtttatttatttgaataaataaaatgtgatgtttatttatttgaataaataaaatgtgatgtttatttatttgaataaataaaatgtgatgtttatttatttgaataaataaaatgtgatrtttatttatttgaataaataaaatgtgatgtttatttatttgaataaataaaatgtgacatttattctctctccctc

SEQ ID NO: 332581 - DNA, 618 bp, Homo sapiens
agtttattgacagctcttgcatatttcatgttaattcaatacacatttgatacaattaattaaatggtaaatgcctatgggtgtagagtaatttaaagctagtaaaatactctcacaaatattatcacatatttttgactagtccaattggtgtcaatgatgaagatatttactaataacctacattttactattgtctgcstttagtttgctttgtctctgagccaatgtgaccccttatcttatagataacataacagatgttaatataataatcaaattatctgtcaataggattttgaatgattaaaaaggaattggattgtaagattttctccaaaacatgcatcatgttcattataacacacctgatattttacttaaatatttttcaagcccaatttattattgaaaatatttgggagtttttgacattgttttgcagcagaagcctattaatattagtatatttacaggaagtttaaaataaaatcaaaataaccatctaaaagaactttgcacattatgtttcagaaaccatgaaagagataaaactaattcatttatacgtattaggcacaataaaatcatattagaagcagagctcatttataattt

SEQ ID NO: 332582 - DNA, 606 bp, Homo sapiens
gtatatgaggtatatacacacacacacacacatagttcatagggcatatagtatgcttaataaatcacctttttaaaaattatttctygatgatgggaattcttttttcagaattaacgtttaattttcatatgaatcatttaagcagcctgtaatagtaagagaccccttttctaaattgggtgcagctaactgccatttcccctccatgaacttatttctcaatttacagctcagagaacgtctgagatgattattcagatttatggcctctgtctctagtctaaatttatagtaactctcctggaaagactgacaagccagggaatccaatgagattcacatggagagaccttgatagatgtctagtggtatcttatgccaagttgattgcctaccaggagtctcagtgcattttcaaagtttttctggattctgcctttgatgtttacaataggcctcaattttgtatggttgttttccatttttaactgcatgaattttgaagatactcaaggggactatgagggtagcatactggtcatctttgctacacaaagagaacaacatagagctgggcaaaaacatttaaaatagccattaagt

SEQ ID NO: 332583 - DNA, 579 bp, Homo sapiens
tggtaaccccaaaggtttgggggaaaatattagttctacctggtttaaagtatctagagaggaccctgcagtctttgaaccacagtggtccaatctaaagatatagtcaatgcattattcagtgtgttttaatggaatgggagacagaggtgagtgggagacagaggtgagtaggagacatcgtatatgacacaggacatttgacaaagactagagacatttttgatttggagcgcactgatggcatctagttggtagaggccagagatgcttgtaaacatcctacaatgcacacgacagcccctgccactacaaagaattatcagtccccaaataccaatagtgtcaaggttgagaaagcacgctggaaatccatatgatctctccaacggaagagactgctgcttctatatcttgcttagaagacagggtaccttagttccagacttccttgattcagaactgcttttccaagctaggatcccatcacctccgctggtccctttgatatacctgttaaattaccatctatttcacaaggatttkccaaatcttgcaattttgcatgatttctagctc

SEQ ID NO: 332584 - DNA, 623 bp, Homo sapiens
tcttctgtgttgctacagtatatgcatatctctattgaagcacttacgatcatttattaaaattagttgggaatatgtaccattattttctggactctgaggttcatagtgggaagaaacgtcctatagtttggggtttacctttcgtatagcttaccaacagaaattaaatcatgatttattggcctttatttgaattcaagaatgaatgaattgcaagccatattaaattcttccttctaattaatttttaaaattaaatttcaggggaagtaaataaattagccatctgccaccaactatatatggtgatcactgttccctgctattaatatattctttgctatattcttctgaaagcttccttggttcagagtgcagtgatttatttaaatatagctagccttgcattccatagccttctcactgaatctttatgaatgttggggcacagtgctagctgtggaaaaagaatttaatcaaatatcttgacaatatctgcagtacygtttttccctaaaaaatctgttaaagaatagggaggaagcgaatctttctaaatgtaatagagctatctgattctttagagaacatatatgctcatcagctttcaattcaaaagc

SEQ ID NO: 332585 - DNA, 515 bp, Homo sapiens
gggcatttagtgctataaatttccctctacacactgctttaaatgtgtaccacagattctggtaygttgtgtctttgttctcgttggtttcaaagaacatctttatttctgccttcatttccttatgtacccagtagtcattcaggagcagatccaaccccacatttcccctcagcactccactagcagaggttatccgtgatggctgagcccctgcagcagacttctacctggacatccagatgtttccatacatcctctgaaatctaggcagaggttcccaaacctcaactcttgtcttctgtgcacccacaggcccaacactatggagaagctgccaaggcttgggtttgcactctctgaaacaatggcctgagctgtaccttggccccttttagccacagctggagctgcagcagctgggatgcagggtgccatgtcccaaggctgcacagagcagtgggggcctggacctggcccatgacaccatttttccctcttaggcctctgggcct

SEQ ID NO: 332586 - DNA, 568 bp, Homo sapiens
tggggaatctctgggtcagagtctccaaggtacagtagtggcctggagtcttacaaccacaaggctatcttgtttgtggttggcagatgcagggtgaatwtttacaggacacgcaaagcaggaaggtctaaattgctgaaaatcttcttcttcagggtatttttatttaaaaataattagatgtgtaaaaatttgaatttggtggaagcaggctttttagctcacaagtctcagccagcagtgaagaaataaaccacctaagagtcaatacacagacatcatctttggctcatttttgtaacatgccacctaaagaaggggcaatgccacagagccgaatatcccactgcatatgcactgatgtggcactacagcactcctgtatatcactgagtggaaaaatcaaaacaaggtgaatgacactaagatgtattgcaagccatggattagaatgagaaaaacttcctagacaaagtagaatcacagacccctccttctgcttctttgatgacataggttgtccatggtgatgggacagcatttcaagtgttggttggcatgaatctag

SEQ ID NO: 332587 - DNA, 613 bp, Homo sapiens
atgtgtgggagtttaggagagaagcagcaggagggaggcaaagacagggaaagagagaaacagagagacaggcaggagtgagagggagagtgatccttttgagatgggaaagtttcacggaaagatgagttcagcagccagcaactggcgtcaagtcttgaaatatttgggaagtggacttggaggaaaactatcgcaaaaatatcttcttcaaaagaacatatgtacagagctgttacctacccactgatttgccaatttgcaaagcatttacaattaccaatttcatcaagataatcataccagaagatgatttcttcccactcccaagtcatgtgatcttagaattttaaggacctggatggatgcggtggctcacgcctgtaatcccagcactttgggaggccgaggtgggcggatcatgaggtcagttgttcgagaccaacctggtcaacatggtgaaaccctgtctctactaaaaatacaaaaattagccgggcktggtggcaggcacctgtagtcccagctgctcgggaggctgaggcaggagaatcacttgaacctgggaggtggaggttgcagtgagccaagatcatcaaaatcatgccactgc

SEQ ID NO: 332588 - DNA, 613 bp, Homo sapiens
atgtgtgggagtttaggagagaagcagcaggagggaggcaaagacagggaaagagagaaacagagagacaggcaggagtgagagggagagtgatccttttgagatgggaaagtttcacggaaagatgagttcagcagccagcaactggcgtcaagtcttgaaatatttgggaagtggacttggaggaaaactatcgcaaaaatatcttcttcaaaagaacatatgtacagagctgttacctacccactgatttgccaatttgcaaagcatttacaattaccaatttcatcaagataatcataccagaagatgatttcttcccactcccaagtcatgtgatcttagaattttaaggacctggatggatgcggtggctcacgcctgtaatcccagcactttgggaggccgaggtgggcggatcatgaggtcagttgttcgagaccaacctggtcaacatggtgaaaccctgtctctactaaaaatacaaaaattagccgggcgtggtggcrggcacctgtagtcccagctgctcgggaggctgaggcaggagaatcacttgaacctgggaggtggaggttgcagtgagccaagatcatcaaaatcatgccactgc

SEQ ID NO: 332589 - DNA, 479 bp, Homo sapiens
tcaggcttttttcactcacctactacatagtaaatactcaagcccagacaggatgccaaagactgcagggattaagagactatgagctattaaacggacaggcaataaggttgagtaccggtgcataaacccagaaactatttatacagtggatcagatgagcagaagttcattctggggcttcagcagctggagagatgccagaattggaggtggtaacagtgagccaggaagagacgtgaaggcctgagaagtagcaataagtgaaacagaaagargtgagctttggaaagagtcttgaaacatcagccagaaaatatttaacctctcttttagactatggttgtaaaatcttggagggtaaagatatcagggatctgaaagggttacctttatttggtatttacaggtagttgtccaggccagaatataaggacaaataaatacaaatccagcatcttctgtgtggcaggcagcaa

SEQ ID NO: 332590 - DNA, 577 bp, Homo sapiens
ggggatgtctccaatgtgaggctgtctcgatgaccagccttccaaatgaggtctccactgtgtgtgctcaggccacggggaagctgcagaggggatgccacatgggtgagaatgtggatgcggtgatctccaagaggtccttaaagttctaagatcacatgacttggaggagggcagaaatcatcctctggcctgattatcactgacagaggtggtaactgataatgctttgcaaatcaacaaatcaaagggtgatagctctttacatatgttatattaaaggatagttgactacttccctttttcctgtcaggtccattttaacagaagcattggacagcaaccctgtgatcttccagctccttsctcatgctgttttccccacctgcaatggtttccctccaacggcacatgcccagatatttcacaacttgactcaaatgctgactgatgaattaatccttccttgaaacttctccatctaaaaagaatctctctctccttcttcctctcttctgctctcctcttctgtctctttctctctctctctctctcctcaccccctaaactatcaata

SEQ ID NO: 332591 - DNA, 488 bp, Homo sapiens
tatctgggtaacttgtagaaagtcagttgaccatatatagttggatctattttttttaacttttaagttcaggggtacatgtgcaggtttgttacacaggtaaacttgtatcatgggggtttgttgtacagattatttcatctccaagatattaagcctagtacccatatgtaattgtgtagatcagtgacttttttattactgagtagtattccattgtataaagacaccgtgatttgttcattctttcacttttgatagttttggggatgtatccagttttagaccatgaattgttgaaaaatgctatccttttcactatttaattatctgggtaacttgtagaaaaataaccctagttatttttcctgatcctctccctcctcccattctctaccttccaatagtccccagtgtgtgttgctcccctctgtgtccaggygttctcctatacaccaacaacagtcaagcagagagccaagtcagga

SEQ ID NO: 332592 - DNA, 567 bp, Homo sapiens
tttgttcccgctgggcttacattctactgctgtgcaatgcaacacagtaaccactagccacatgtggctatttagatttagtaaagttaaatacaatttaaaattgagatcccctgtcacactggccacatttcaagtgctcagtggccataagtagctagcggctactgtataggaccacacaggtatagactattttcatcattgcagamagttctatgggacaataatgtccattcatactcttcagcaaccaactcttgtcgcttaatctagcgtggtcatcttcttttatcaataaatcaaacacattgatttgtatcctcctattaatggatatttaattccagtttttcactattataaataatattgccatgaacttccttggaacttatatccttgtgcatttctccaaccttttttaacataaattttgcaaagtgcaatcagataatacaggtgatgtgctgaaaacccagtaagagctcagtacatgctgactatgactatgtgaagctttgcagaaggccctggaggtgcatttctaggagctgcaattcctag

SEQ ID NO: 332593 - DNA, 556 bp, Homo sapiens
gcaggaagtggcacatcagatatgcttcctggagggcaggagggatcagcctccatcaggtctctaaaggaccatccacagaagatgcatctgggcttccatgtcactctctctgagatgctggactggcccattcattctgaaactatacactggggraatactatttcctgctaaaatcaaattatggcagtcttttcccaattcaaagaaaaataaagtaagcagattaaaatttcctcactgtaagttttcatctgtcctgtgttttcttaactttgttgctgcttcatcttttgcagcaccctgcactccccacccggaagcggaggggggtggtgggaaacaagaagtaagcaaatattaacaggaatactgccagctgtgcttaactcatgggcatgttgtgataactcttttgtgtaccttgttttctcctagttcagaagacgaaagcagttggtaataacgtcatagtgttcttctatcaggtgcagcatagctccccaggctctaccacccaacagcttttgaaaacaaccagatccaagtagtc

SEQ ID NO: 332594 - DNA, 556 bp, Homo sapiens
gcaggaagtggcacatcagatatgcttcctggagggcaggagggatcagcctccatcaggtctctaaaggaccatccacagaagatgcatctgggcttccatgtcactctctctgagatgctggactggcccattcattctgaaactatacactgggggaatactatttcctgctaaaatcaaattatggcagtcttttcccaattcaaagaaaaataaagtaagcagattaaaatttcctcactgtaagttttcatctgtcctgtgttttcttaactttgttgctgcttcatcttttgcagcaccctgcactccccacccggargcggaggggggtggtgggaaacaagaagtaagcaaatattaacaggaatactgccagctgtgcttaactcatgggcatgttgtgataactcttttgtgtaccttgttttctcctagttcagaagacgaaagcagttggtaataacgtcatagtgttcttctatcaggtgcagcatagctccccaggctctaccacccaacagcttttgaaaacaaccagatccaagtagtc

SEQ ID NO: 332595 - DNA, 556 bp, Homo sapiens
gcaggaagtggcacatcagatatgcttcctggagggcaggagggatcagcctccatcaggtctctaaaggaccatccacagaagatgcatctgggcttccatgtcactctctctgagatgctggactggcccattcattctgaaactatacactgggggaatactatttcctgctaaaatcaaattatggcagtcttttcccaattcaaagaaaaataaagtaagcagattaaaatttcctcactgtaagttttcatctgtcctgtgttttcttaactttgttgctgcttcatcttttgcagcaccctgcactccccacccggaagcggaggggggtggtgggaaacaagaagtaagcaaatattaacaggaawactgccagctgtgcttaactcatgggcatgttgtgataactcttttgtgtaccttgttttctcctagttcagaagacgaaagcagttggtaataacgtcatagtgttcttctatcaggtgcagcatagctccccaggctctaccacccaacagcttttgaaaacaaccagatccaagtagtc

SEQ ID NO: 332596 - DNA, 588 bp, Homo sapiens
tacagaatatagtgtttttgcttaattacagagccacctttgtgctgtgtatgatctctttttcagaatcactactcttcctttttgtacaggacatcttatggagaatgacaatctattttttttttttatgggttaaggggttgcattagtccgttctcatgctgctaataaagacattccygagactgagtaatttataaagaaaagaggtttaattgactcacagttccacagggcttgggaggcctcaggaaacttacaatcatggcagaaggggaagcaaacgtgctcttcttcacagcagcatcagggataagtgctgagcaaaagggggaaaagctgcttgtaaaaccatcggatctcataagaactctcccactgtcatgagaacagcatgagtgtaaccgcccccatgactaaactacctcccaccaggtccctcctgctgcatgtggggattatgggagctacaattcaagatgagatttgggtagggacacagccaaaccatatcaggggtatattttcttctctcttaaatatgacagcctatgtgtatttctctgtgattctgctaatgagttt

SEQ ID NO: 332597 - DNA, 599 bp, Homo sapiens
tgtttttaaatctaaccaccctgccctgttccttatcttaaattgaactacttcaaatatgagtatataaggtacagttacacactcaactgtctgcaaaagtctctccatcaaatgaactcaaattccccttttctagccatgattatttatttttcctcaggaatggggaaaaatagctcctttgagacaggattytcttctgtaaatttggtgagcaacagcctacatctttctctcagcctcagtttcacactccaaaagatacactattggtaaaaacagaggtgaggggaggataaaatgttgccttttggtttcataagttggacaagaagcaatggctgcgcaacattaaaagttccatattgtgtcattatctgaatagttaatcaaatacctgaaaatcaagagatgcctaagaaaaattacacatgagaatgaaggactagtcatacatttgtccttgccaaattacatttttctcttgtcattaattgggaaaaagaataatataaagattgtattcaattatttccattgaaaagctcaataatggattaattaagaccaacacatcttttcctgaagcaggccac

SEQ ID NO: 332598 - DNA, 599 bp, Homo sapiens
tgtttttaaatctaaccaccctgccctgttccttatcttaaattgaactacttcaaatatgagtatataaggtacagttacacactcaactgtctgcaaaagtctctccatcaaatgaactcaaattccccttttctagccatgattatttatttttcctcaggaatggggaaaaatagctcctttgagacaggattctcttctgtaaatttggtgagcaacagcctacatctttctctcagcctcagtttcacactccaaaagatacactattggtaaaaacagaggtgaggggaggataaaatgttgccttttggtttcataagttggacaagaagcaatggctgcgcaacattaaaagttccatattgtgtcattatctgaatagttaatcaaatacctgaaaatcaagagatgcctaagaaaaattacacatgagaatgaaggactagtcatacatttgtccttgccaaattacatttttctcttgtcattaattgggaaaaagaataatataaagattgtattcmattatttccattgaaaagctcaataatggattaattaagaccaacacatcttttcctgaagcaggccac

SEQ ID NO: 332599 - DNA, 533 bp, Homo sapiens
ttagctatctttggtatttgatgttggtaaccttcagatggggtctttgagtggatgtgctcttcctttctgcttgttagtttcccttctaacaagcccttctgctgccagtctgctggagtttgttggaggtccattcctgaccctgtttgcctgggtatcaccagtggaggctgcagaacagcaaagattgctgactttcctctggaagcttcatcccacaggggcacctaccagatgccagccagagctctcctggatgtagccttttaaatatagcttctttcactttgcataatgcatttgttatgtgtgtcaagagtttaattatttttatagaaaagaagtcttctgctgtgtgggagtaccaatgtatttattcattagccaggtgaattgaattatttccagtttttgaaattatcaataatrccattataaatatgcatgtattggcttttatatgtccatcaactttaatttcacttgggtgaatgttcaagattggaattacagggtcatataggtaagta

SEQ ID NO: 332600 - DNA, 576 bp, Homo sapiens
taacctttgcagtattgtcttgacctgaaaaaatgaagatactaggtgtagtggctcatgcctgtaatcccagcattttgggaggctgaggcaggaagatcccttgagcccaggagtttgagaacagcctaggaaacatagggagaccctgtctctacagaaaataaaaataaaaaattagccatgggtggtggtgcatatctgtggtcccagctactaagtaggttgaagtggacagatcgctcgagcctgaaaggtcagggctgcagggagctgtgtatctcaaatgttttatttcgayggccctccaggccctgggtcatctggctcctgcctctcttctcattgggcttcagccatgctgcctgcattcctccaactcccagtgccccttcttgcttcctctaaagctgctcacatcctctgcctccccatttcctgtcatctgtcaggtggaagcttagggaggccttccctggactccacacaccactacactccagcctgggtgactgagcgagacctagtctcaaataaataaataaataaataataaaaataaagcatcaaaacatt

SEQ ID NO: 332601 - DNA, 573 bp, Homo sapiens
aattgatctagcaattcagtacaatttcaatgaaaatcacaaagtgaagtgtgtatgtataattttacaaattgattctaagacacctatgcgagagcatatggttaagaataaccatgaaaaatttgaagaagaacagactcattatacatatatagtaattaagacagggtggtattggcacagggatagacacatttagatgaatgaaacaaagcagagggcccacaaacagttccacgcacatatggaaacttgatatactaccaagatggcactgaaattcagtaggggcaaggatgaactacttagcaaatggtgttcgcaaaaaaacgatataaaatttcatccctagattacaaatttcatggaaaaaaaatacaggtgtactaaatgtgaaaaggccaaaacttyaaaattaaaaaaaaaaaattgaaagataccatgaacagagtgaaaagctaagccttaagctagtataaggtatttgtaacataaaaccaacaaaggattacataagtaaacaaagaaatcaataagaaaatcaattggaaaaatacaaacaaccaagta

SEQ ID NO: 332602 - DNA, 514 bp, Homo sapiens
aataacacattcctactcattgccatgtgactggaagtgattccctgtaagagaagtatacttccctaggtggcttactgggttggccctattacttgcttggacctgkaacgtgtgaacggtgtaacagtgtgttacttctgtgaaccctttaagtgtcattagatatatcctcccttcatcttctcatttccttcagtaacgaaaacagcatgtcccaaagaaagactgattcttccctaagtaccaaatgtgaaaacatgcaacaaagatgcaggcatccactagcagctgcagacatctaacatgacagaaaaagaaatgcttactgttggaggccactgagatttttgattacttgttacctccatagtatattgagaaaatacacttaaagctgcagcaataggggtgaagaaaacctggattaaaaggcatataagcagatgattgacaggaataaataagaaaaatgaaagatgattctcaatcatccatgtgagtaactaaccac

SEQ ID NO: 332603 - DNA, 553 bp, Homo sapiens
aaacaaaacttcaaataaatcatcaaagcaaaacaactcttagccacaaagtacattatgttggtactgcctaaggagaaaaaaaagagatacattccctcttatgtcactgaaaaccagcattcaatatggccacttcaatgcaattgctgtcaatggacactaaaataacagtagagaccagggaaagacttaattgtccattaagagacaacagtggagtttctattccggatggaggagtgtattgtcaggggaacaaaagagaaagggaagagtaggatattaaagggagaagaaacgatggggaggggaagaaagagagagaaagagagagagagagagaaagagaaagagagggagagacaggaagagagggagagaatagtctagaaaggaataacaatgatgtttaacaaacgactgttgcacctgccaacaggaaccacacctgtggcaagagtcscaataacagataataaagaagcaaaatacctcaatgagttacacaggagaatagcagaaatacctagtaaaaaagacatttattttt

SEQ ID NO: 332604 - DNA, 601 bp, Homo sapiens
gaagataaagctgagaaataattttaaaactctcgtccaaacatttaaagacactacgaatatttgagttatccatttaattgaacttgcctttatgtatgtgaatcctgtttggaataaatcattttcaccactcagtctcaccacttaagaactatggagctgatactaaagcggaggaagtgaaactgtcatgggtttatttacttaagcagaaatatctgagttgatagtctcacatctcaaaacaagaggtctttttaaatagatctatatcataaatgcccaggaagaaaatacaccagcccagattttaagaaaatgatacaaataattcccagattaatttagagctttatcrcttgatgaggtaattgatgaatctagcaaaataaagtagtgtgatattaatcctactggaagaaggcacaataatgttagaataaatattttgaaaagcacaacaaaaaaaatttaaacaaacatatttgaagcatacgttttaataaaactctagaagttctaataaaaattgaaagcggccacggagatgttggattatcatctgagaggatgaatcaaatgacatacatagactgag

SEQ ID NO: 332605 - DNA, 601 bp, Homo sapiens
gaagataaagctgagaaataattttaaaactctcgtccaaacatttaaagacactacgaatatttgagttatccatttaattgaacttgcctttatgtatgtgaatcctgtttggaataaatcattttcaccactcagtctcaccacttaagaactatggagctgatactaaagcggaggaagtgaaactgtcatgggtttatttacttaagcagaaatatctgagttgatagtctcacatctcaaaacaagaggtctttttaaatagatctatatcataaatgcccaggaagaaaatacaccagcccagattttaagaaaatgatacaaataattcccagattaatttagagctttatcgcttgatgaggtaattgatgaatctagcaaaataaagtagtgtgatattaatcctactggaagaaggcacaataatgttagaataaatattttgaaaagcacaacaaaaaaaatttaaacaaacatatttgaagcatacgttttaataaaactctagaagttctaataaaaattgaaagcggccacggagatgttggattatcatctgagagratgaatcaaatgacatacatagactgag

SEQ ID NO: 332606 - DNA, 637 bp, Homo sapiens
ccccttgcagctctgcacctggatcacttttggtaggcatgggatcccrgccagtagcactgcctgaacgcagcctgccgggccgagtgggtaaaacgagaccagcagatgcaagcaaaactcaagaggaggcactgcctgccacagaggtttctagcaggtgaagcaacactgtcaggatcccgtgacactaatgcagcttgggtcacctgcattcccaatgttcagtcatctttgattgtgaaatggggtcatgtggcctgtacacaattactctagacgaggatcaacaattgcactggtatctctgagaaatcttcatgatgtgtcagcctccataattagcaggtgaactataaaatataattattttctgctataattatattttgagttaaggtatctatacagtatttactatctaaaatgtgatgactctgtgtaactacatattagatactacctctgtgaaatacgcatttcagttaaacatttaagtccttgtagcacagacaaaagaatttaagtctctgcacatattttcttctgagatattattttgctattactactataatatttaaaattattcatagtaaatatgttctagatggaacagaatttttataaaatctgt

SEQ ID NO: 332607 - DNA, 637 bp, Homo sapiens
ccccttgcagctctgcacctggatcacttttggtaggcatgggatcccagccrgtagcactgcctgaacgcagcctgccgggccgagtgggtaaaacgagaccagcagatgcaagcaaaactcaagaggaggcactgcctgccacagaggtttctagcaggtgaagcaacactgtcaggatcccgtgacactaatgcagcttgggtcacctgcattcccaatgttcagtcatctttgattgtgaaatggggtcatgtggcctgtacacaattactctagacgaggatcaacaattgcactggtatctctgagaaatcttcatgatgtgtcagcctccataattagcaggtgaactataaaatataattattttctgctataattatattttgagttaaggtatctatacagtatttactatctaaaatgtgatgactctgtgtaactacatattagatactacctctgtgaaatacgcatttcagttaaacatttaagtccttgtagcacagacaaaagaatttaagtctctgcacatattttcttctgagatattattttgctattactactataatatttaaaattattcatagtaaatatgttctagatggaacagaatttttataaaatctgt

SEQ ID NO: 332608 - DNA, 637 bp, Homo sapiens
ccccttgcagctctgcacctggatcacttttggtaggcatgggatcccagccagtagcactgcctgaacgcagcctgccgggccgagtgggtaaaacgagaccagcagatgcaagcaaaactcaagaggaggcactgcctgccacagaggtttctagcaggtgaagcaacactgtcaggatcccgtgacactaatgcagcttgggtcacctgcattcccaatgttcagtcatctttgattgtgaaatggggtcatgtggcctgtacacaattactctagacgaggatcaacaattgcaytggtatctctgagaaatcttcatgatgtgtcagcctccataattagcaggtgaactataaaatataattattttctgctataattatattttgagttaaggtatctatacagtatttactatctaaaatgtgatgactctgtgtaactacatattagatactacctctgtgaaatacgcatttcagttaaacatttaagtccttgtagcacagacaaaagaatttaagtctctgcacatattttcttctgagatattattttgctattactactataatatttaaaattattcatagtaaatatgttctagatggaacagaatttttataaaatctgt

SEQ ID NO: 332609 - DNA, 637 bp, Homo sapiens
ccccttgcagctctgcacctggatcacttttggtaggcatgggatcccagccagtagcactgcctgaacgcagcctgccgggccgagtgggtaaaacgagaccagcagatgcaagcaaaactcaagaggaggcactgcctgccacagaggtttctagcaggtgaagcaacactgtcaggatcccgtgacactaatgcagcttgggtcacctgcattcccaatgttcagtcatctttgattgtgaaatggggtcatgtggcctgtacacaattactctagacgaggatcaacaattgcactggtatctctgagaaatcttcatgatgtgtcagcctccataattagcaggtgaactataaaatataattattttctgctataattatattttgagttaaggtatctatacagtatttactatctaaaatgtgatgactctgtgtaactacatattagatactacctctgtgaaatacgcatttcagttaaacatttaagtccttgtagcacagacaaaagaatttaagtctctgyacatattttcttctgagatattattttgctattactactataatatttaaaattattcatagtaaatatgttctagatggaacagaatttttataaaatctgt

SEQ ID NO: 332610 - DNA, 559 bp, Homo sapiens
atatttgtaagctcttttgagctttccctgctttcatttcccctctcttacctatagagcgatcaatattctgagttttttatatataacaagtattttttctcgcttatcttcacagctttatcacatatttaatgtacaaatacaatacaaagtattttaggtttttgttctttgtaaaattgtaaccatattacacaaatatttttaagcttggctttttgcacatagcattaggtgtctgaaatatatttatgttgttaaatgtagttgtagttaaatttctattgctggtattccatggaacaaatgcaccaaaaatttattcatctattctgatgttgatagacattttagtaaatttctgtactttgctatcacaaaaagtgctgctataaataattttgtatatatcttttcatggattttttgyaagtttttctctagggcgtatatctgtatatatataacctgaactctttcagattacttaagactttcactaggagtggaattgctgtcttaagatatgaacattgtgaactttactatataatgt

SEQ ID NO: 332611 - DNA, 474 bp, Homo sapiens
tattgatggattactctgttctaagagaacatttctaggaactttctctatatttattttataattttatcttctgagcattaatatgtctatgaaggaactgagttactaagacattatgtaaactctcaaggacacacaagtaatgagaagtgaaactaggatgcaaaaccggacaatattaccaggaagcaattttatccacgttcctctagcccattgattattggagacatagatacatttagacatagaaaaacgttttgatgttagtttatttgcggtcatgtcacactataggcctattcctggggaagaaaataatcacctcaatgatgagattgcatttaatagcagattataaattatttctcaattaagaagataaaataaatctaatgagcactgcataactactctctgtgtgcytcataaattattgcctattgatttccttaaaaatgtaaaagctca

SEQ ID NO: 332612 - DNA, 574 bp, Homo sapiens
gctgacttctgtctactgtcaaaagatttagcatatacatacatacatatatatatatatatatatatatatatatatatatatatatatawaatttggatgcttttatactgcaatcaatactattaaaatgttattaaaatgttcttaactatcagaagcactacaagaaataaacaatgtttaataaaaatgataaggtgacaaattggctatttcatagtatattgggcagaatattagaggatatatgaagatatcgagttagggcttgaccttactgaagactagccttagcgtctcggttaatcactgtatgtgagtgaatgtttccttaggtggaaaattatggagaagacaagatgaaattttataattcctttcatttattctataagcatttttaaactgattgtttctatcaggaagaagttatgtgtttctagtacaaacttatttaataaaatgctataaaattgcttcactgtggccaaaattaaggattttttgtttttgtttttgcttgaggaataatgtgttttatgttaatgtcactcgcaatatttctaacctc

SEQ ID NO: 332613 - DNA, 646 bp, Homo sapiens
gattctggatattagaactttgtcagatgcatagtttgtgaacatcttctctcatccgtagcttgtctgtttattcttttgatagtttcttttgctgtgcagaagctctttagtttaattaggtcccacttgttcaatttttgtttttgttgcaatttcttttgggaatttagatttttcacattgctctctctgtactttgagttagcaaaaatatagtagtattttcaatcagccatatgttattgatgtaatttcaatataaaaatcaatcacatcaaaggtcctattttattaaaaaatattttttccttttatttactaaaatacataaatatataatttcaatttatttcactgttgatcacatgcatttttccctttcacattattccaagaataactagaactatgcagaaaatgaaaatgccatttctaatatctctaaattacactaaaaatttttttgcctattgaccaaacttgtctattttcatgtacaaaatattgcaatttgatccagtttattctaaacaaatggatcacattaatgyataatctgatgttattacaggaaacttgaattttaatgagccctgcttgatttggatgagtgaagacaggcataacacaattgagtcaatta

SEQ ID NO: 332614 - DNA, 570 bp, Homo sapiens
ctgaagatatcaaaatattacacaatttgtatatggtatatatatatacacaactgaaataaaagctaacttcatagctagttgttctttattgtaggcttttaatacctatttctttatcttgatatcgttagtttgttctatagtctcatattattattattgctttaagctaatgaccagacaactataattttgataatggaaaataaaaggcaaaaataaaagaaaagcacgggcctgtacattagttcaaattgtattacttcaccattctgcaaatcgtatgacaatctatcttctctaagaaattgctactaggtgtttactaattattagcataaaagtcactataatttttcaggttataattagttatggtgactgattcagttcaaggactcagccatcagctgtcttagattataaacrcaagatattatttgctctcttccagtcaaggcaattcattagttatgctgtttgacagcagctgtaccctttgagatgtgatttattcagattccctcaatattactgcggaagcatggggagataagtgatttgatg

SEQ ID NO: 332615 - DNA, 614 bp, Homo sapiens
tgaagcagccagtgctcaaatctgagcctttggagtctatgctcaaggctcatgacatttttacaggctccttcaaaaagaaaagaaatgttccaatgaccatatattcagtgtcctattaaggtgtgcaaactgaggattcagccatggctataactaaaaaatattgcagttctatgtagaatagttatgaaagtatatttcccttatatttattaagtttatttacaaatgattttcctagcataattcagattttttttcttttcacaagatagaccactgtcagtttcaaaagatctggagaaatgagccaaatgacaaaaggtgaggggcagaggaagcaggaagaagcaaagagagataaagagaattgcttaggctaggacttagagtttggcaataccaacagcaaccaccacaagaccgaaatctaaagtaaacttctacaaacatyagttataggcctttctacattcaaagtgctgaactaagaaatttgaatgcaatatggtcttaaatgtgtactttctggaggaggaaacatacataaatatttacaatacagtaatatgagaacctaaaatttggtaagagatatagaaaacggcaat

SEQ ID NO: 332616 - DNA, 592 bp, Homo sapiens
aataaacattccataaagagaataaggatcattctcaattaaatattaaatatttatctttctagaagtcataattataataaaagctaacatgtaaatatttagtatgtgccaagcacatgtataatataacttayaattttaatcatttgcgaaggactgtttttttattgactaactcatacaaattttattaactcacttaacctctcaacaactcatgagtttggagtggttattacaccattttatagacaaggaaactgacacagagttgctaagtaatttccccactacacccatgactaagcaaatggtagagccagtgaacacgtccaatcaaagttacttcagagctaacatttttaacagtattttactccgcctcctttagggtcatacataaaactatgactgttagtgaatatatatcatctacacctatcaatagtaagcaaagaaaaatttaaaacagaggtttcttaagccatcaacatgctgttattcacaattagaaactcaagaatgtcaaataaactttatgaaaaaagtggaacaaaatattttataatcaaattgctttcaaatccaa

SEQ ID NO: 332617 - DNA, 651 bp, Homo sapiens
atatttagtatgtgccaagcacatgtataatataacttacaattttaatcatttgcgaaggactgtttttttattgactaactcatacaaattttattaactcacttaacctctcaacaactcatgagtttggagtggttattacaccattttatagacaaggaaactgacacagagttgctaagtaatttccccactacacccatgactaagcaaatggtagagccagtgaacacgtccaatcaaagttacttcagagctaacatttttaacagtattttactccgcctcctttagggtcatacataaaactatgactgttagtgaatatatatcatctacacctatcaatagtaagcaaagaaaaatttaaaacagaggtttcttaagccatcaacatgctgttattcacaattagaaactcaagaatgtcaaataarctttatgaaaaaagtggaacaaaatattttataatcaaattgctttcaaatccaaacacagtattttgcaagttcactcacttaagaagtagagggtttttagcagttgcttatgtaagattagtaaatcattgtaagaagaagagtagaaaatgcagcttggttattatgcacaattttctttgattgtatagttgagggaaaaacttcc

SEQ ID NO: 332618 - DNA, 290 bp, Homo sapiens
ctttgttgggtatgggcatagaaggtcgtttctcccaaattgtacctagtatccttcacttcattcatggcgtattttaacaaacaaaaggtcttgatttcagctgaattacatgtattttagttttctctttgatttatgctctttgtgtcttatttaaaatattttttctaaccaagatcacaaagatattttcctaatgtatatcataagyactatatgattttatatttctatttagatttatgacccatctggaataaatttttgtatatatagtgaattaattg

SEQ ID NO: 332619 - DNA, 410 bp, Homo sapiens
gtaatccattatgtgtatgtaccacatttgctttatccatttatctgttgatggatgcctaggtagcttctaaaccttagctattgtgaatagtactgcaataagcatgggagtgcagatatgtcttcaacactggtttcttttctttgggctacatamccagcagtgggattgttggatcatgtgatagctctatttctagtttttgaggaaactccaaattgttttccacagtgtttgtatgaatttacgtttccaccaacagtgtatgaggattccatttactccacaacctcaccagcatttgccattgatggcagcagcagcccatctggagtggctgctgtgtagacaccagctgcaatgaaagaggtgtgactggggctgtgggctccatggagccagcagga

SEQ ID NO: 332620 - DNA, 410 bp, Homo sapiens
gtaatccattatgtgtatgtaccacatttgctttatccatttatctgttgatggatgcctaggtagcttctaaaccttagctattgtgaatagtactgcaataagcatgggagtgcagatatgtcttcaacactggtttcttttctttgggctacataaccagcagtgggattgttggatcatrtgatagctctatttctagtttttgaggaaactccaaattgttttccacagtgtttgtatgaatttacgtttccaccaacagtgtatgaggattccatttactccacaacctcaccagcatttgccattgatggcagcagcagcccatctggagtggctgctgtgtagacaccagctgcaatgaaagaggtgtgactggggctgtgggctccatggagccagcagga

SEQ ID NO: 332621 - DNA, 637 bp, Homo sapiens
gcatggacttcctcccttctaaagctcataaaaaccctggactcacacaggctcaggcagacattgcgatgaactgcctggagataggagctacccactctgggtcccctctccactgagggctccacatcctgccaggcygcatgggcaaaataagcccagcgggcatgagcaatactcaggcagaaggtgccactggtcacagaggattcaggctggcaaagtgacacctctaagatcccatgatattattgcctgtcttttgcatataaaccattttaactggggtgaaagatatctcattgtagttttgtttcacatttctctgacgatcaatgatattgagcaccttattatatgcctctttgctatttgtatcccttcttctgagagttgtctattcaaatattttgcccactttttgattggattattagatttttcctatagagttgtttgagctctttatatattctggttatgaatcccttgtcagatgggtaatttgcaaatattttctcccattctgtggcttgtcttttcattttgttgattgcttcctttgctatgcagaaacttttgaacttgatgtaatctgatttgttcatttttgctttggttgcctgtgcttgtatgg

SEQ ID NO: 332622 - DNA, 594 bp, Homo sapiens
ccattttaactggggtgaaagatatctcattgtagttttgtttcacatttctctgacgatcaatgatattgagcaccttattatatgcctctttgctatttgtatcccttcttctgagagttgtctattcaaatattttgcccactttttgattggattattagatttttcctatagagttgtttgagctctttatatattctggttatgaatcccttgtcagatgggtaatttgcaaatattttctcccattctgtggcttgtcttttcattttgttgattgcttcctttgctatgcagaaacttttgaacttgatgtaatctgatttgttcatttttgctttggttgcctgtgcttgtatggtattgctcaagaaatttttgcccagaccagtatcctggagattttccccrgtgttttcttatagtacgttcacagtttgaaccttagatttaagtctttaatctatttgaattttatttttgtatatggcaagagataaagggctagtttcattcttctttaaatggatatccggttttcccagaaccattaattgaagaaactgtcttttcctcagtgtatattcttta

SEQ ID NO: 332623 - DNA, 502 bp, Homo sapiens
acagtctattttccatactgtcctcagaatattagtttattgtatatcttctttattgcttctttcagctttttccttcctttccttgtttattcattactttttcctccctccctccctttgttccttcctttcttccctctttccttccttcttcctttcttctttccctccttctcctctcaaatgaatcasattgcaagtctcctcttctttaatcttttatattaagttccgttatatgtacagtaaaatcaaaattctaccatggccaacaatttgaccctacctcactctccaagcttaatcatgcaccagtctgttctttctcaatatattccaggtatagctcagttacatctcagagtctctgcatttactctttaccttgtaaaaatcttcctcaggttctgagcatgacactcccaattatcattcagtttttcaaatgttaccatctctagagaaagtgcttgcctggccactctatttacaattctgt

SEQ ID NO: 332624 - DNA, 597 bp, Homo sapiens
cgcccagctgtctgcctgcctgccttctttctttcctgcctgtcttccttttttcyttccctccttccctttctattttctcccttcttctttccttctttgtacttcaaaagagagtggcattttgtttcatatatacagtgacccctcttgttataaatgcataagtatgctatattaaatatgtttacaatattaataaaattgacagaaaattttaaaagtgtaaataaacaataataatcctttcaatatataagaaggcacccaaaagaaaaataggcagaatacaagaacaggcatttctctttagagaaaacataaatggttacttatcatagaaaatttagctaactttgttggtaaacaggaaatacaaattgaaaccaaaatgtgacattttacgtcttcctgaatggatcaattaaaaaggctcataacatgctgatcccagattttcataatcagtttgtaaaataattttgtattacctagtaagttttagcagatacacccctacaatgtggtggttctattcattggtacaattataatgattccatagataattagccaaatagtgtattgtttaggaaa

SEQ ID NO: 332625 - DNA, 569 bp, Homo sapiens
tccacactaggcaacagggtgagatcttgtctcaaataaataaataaataaataaataaatgaaattcattaagattatttattttaaaaattattttattttccaatgcctagacaagtcttttcatattttaaatactgaaacatatacttgtattgaattagtaaataaattaaggaagaaatgaactaagaaatgctaaaaacaaatttattcaaaagacatgttctctgtgaagttctctgtgcaggcttagcttttccaacttctcttccttgaagtcttycattagttgagaattttatctaccctgttatgatttatctagtttgttgatccttgagaaatcagaaacactgataccaaatctaagtgatacagaactgatgtcaaatgtaccttgcagtagtgcaatattttcttcttttagtatcaacaaaaagtaatgcaaaaacatgaagtattatgtcactataatgtatctaataaagttaacatttatttccccaaactttttagttttaatcattagtataataaaacataggaagagaataaaatgaagtag

SEQ ID NO: 332626 - DNA, 551 bp, Homo sapiens
atttaaacaagtatatgctgtgatcagatttacatttcaatcagattctatgatgctcatagtgaaacactgtttaagaaagtcaaacagggagattatttaggagagattttatgtttctgaaataatgcaatatgaaatgaattgttctaattaaaaatatttagcaatatgattggtgataattcatgattattagatataaataatgtgaaaaaatcatttatttcagcagcaccacgaatggcctttctaacctcagcaatagaaaacatcttgaggcaagaaaattctggataaaaaaatgtagaatgaggaggaggagggcttctggaacgactgagtaagaggcttggttaatgccatcccccaaaagcagaaacaacacttagcaaagttgtcaaaagcaaccagttamagatttaataaattgagaaacattcaagaaggcctattaaatcttggtaaaagtgagagtccaaggcatttcagcctgagattgctctcacctcctcaacatgcaggacaggaatctcacctccccaacatgt

SEQ ID NO: 332627 - DNA, 654 bp, Homo sapiens
accatgttgttcaagggtcaattgtgtgtgtatgtgtctgtgtgtgtgtgtgtrtatatatgaatatcataggcttgtgtgtattatatatataagtataaatattatttttcagccttgttaaagaaggagatactgccatttacaacaattagatggatcctgagtaccttatgttaagtaaaataagccaaacacacacacacaaaaagacataatctcacttatatgtggaatctagaaaaaaaaaatgttgaaccaatagaaacagtagaaaggtggttaccagaggcagggagcaggaggaaatgggagagaagtaggtcaaagtgtacacatttgcagttatgtaggatgcataagtctagagatgtaatgcaaccatgaagactagagttaatattattatattgtatattaaagatctactaagagagaagattttaggcactcacacaacaaaaagtaaccatagatggtagatattttaatgtgtttgactatagtaattatgtcacttatgtatatgtcatagtatgtttgaaaacatcatgttgtatgccttaaatgcacacagtaaaaataaacactgaaaataaatacttcgatgaagttattatcctctagacatttcaactaattacttcatatttt

SEQ ID NO: 332628 - DNA, 414 bp, Homo sapiens
aattcctagcccacagaaatgataaagtaaatttgtgttgttttaaaagtcactacgttttgaaataatttgttatatagcaattgttaatttttacagtacagttgacagttccatgcaccaccaacttcctcaagctataggaaacctctaagctgcatgcaaatatatcccagaagtatttccctcagccaaatgtgtttasttgtgaatgggcaaatgcctcagtcttctcatcctcctatggggcaattttgatgtattgttctttgtgacctatcagaaagtctacaatatgattgagtgttcttttctcatatgccacagataaagaagataacaggacctggaggaaatatggtgtattatgttgcatggagtaaacagggtaacaaatagcaatataatcaatat

SEQ ID NO: 332629 - DNA, 535 bp, Homo sapiens
ctggaattaaggaaaataaagtgttagctagtcatttcatgcatatctagttttctgttccttttcttttttatcaagtaactggattcagcctagattattaggcatttcttgtgggaaagaggcggcaaattatagtctgcctttcagttgcttctaatttcattaatactctccattggtataacaatctgcaaattttgctcaagaaggtgagctataatttcatgtctgcacttatatttttctatttttgtcttttaatattaaaattaatgtcatctactaaaaccgaaagatcaacaaaagaaaataaattgaggagtctgcgtcccatcttttatctgtgggsttacctacattgcaatattttatcaactgtcttccttggtaatcatgatgggtagtcttatgtgtcaacttgcctgagctattgtacccagttatttaatcaaacatgaatctaggtgctgcagttaaggtgctctgttgtcattgttatatcttcattcagctgattttaagtaaagattaa

SEQ ID NO: 332630 - DNA, 611 bp, Homo sapiens
tagctcactcttgctttatacttctgggatctaagctataggtgaccccaaggcatccatgaacctttgagccggcaagatttccccagggagcagacagagacaagacttgggatggcacagagcaacttcagtggagagcagccatagatgcccattcctcagggatgcagtggaagtggggcatgcatccctctacaaggccagtccagaatgggtgtgacacatctttctgctgcagcctctgctcaatgcccccccttcctcccagcagcctggaacatctaaacaaagaaacacaagaaacgacacagtgccaatgaacagagagggaaccaacatggcccaggagcagatctggtgagggtttcatctctttatccccccacagtacacagcatgcctatgaatgtgagaaagtacaagagagcrgtgtggctggatattagtctagctattggccattactcttaagcaccatctactgcatcacagcccaaaccaaaccaccaaaaattttcctgatgatatatacatatgggaagcaaaaacaagaattcagccacacaaaaatcctatacagaggcctggccctctgaaggcatccagaa

SEQ ID NO: 332631 - DNA, 638 bp, Homo sapiens
acaaagaagaaattgtaacaatccggtggaaagtattccaaaaaaatgaagaagagggactccaccctaacttattctatgaggccatcagcaggctaacaacaaaatctagcagagacatgacaaagaaagcgaatttcaggccaatatccctgatgaatatagaagcaaaaattcctcaagaaaatactggcaaattgaattcagcagcacattaattcatcataatcaastagacctaattccagggattcaaggttgagtcaatatatgcaaaacaataaagatgattgaccacctaaacagaattaaaataaaaaatcatatgatcatctcaatagatatagaataagctttcgataaatcccaacatctcttcataataaaaaccatcaacacactgggcattgaaggaatataccttaaaatcataagagctatctatgacaaacccacagctcacatcacactgaatgggcaaaaggtggagccgtttcccttaagaagtggaactctcatcactcttattcaacatagcactggaagtcctagtcagaacagccaggcaagatgaataaataaaaggcatccaaacagaaaaagaaaaagtcaaactatccttctttgctgactgcatg

SEQ ID NO: 332632 - DNA, 638 bp, Homo sapiens
acaaagaagaaattgtaacaatccggtggaaagtattccaaaaaaatgaagaagagggactccaccctaacttattctatgaggccatcagcaggctaacaacaaaatctagcagagacatgacaaagaaagcgaatttcaggccaatatccctgatgaatatagaagcaaaaattcctcaagaaaatactggcaaattgaattcagcagcacattaattcatcataatcaagtagacctaattccagggattcaaggttgartcaatatatgcaaaacaataaagatgattgaccacctaaacagaattaaaataaaaaatcatatgatcatctcaatagatatagaataagctttcgataaatcccaacatctcttcataataaaaaccatcaacacactgggcattgaaggaatataccttaaaatcataagagctatctatgacaaacccacagctcacatcacactgaatgggcaaaaggtggagccgtttcccttaagaagtggaactctcatcactcttattcaacatagcactggaagtcctagtcagaacagccaggcaagatgaataaataaaaggcatccaaacagaaaaagaaaaagtcaaactatccttctttgctgactgcatg

SEQ ID NO: 332633 - DNA, 470 bp, Homo sapiens
tgtgtatgtgttgttgctgctgtcagaaatagcgggcagacaataaaaaccagtatcaggttataaacagctcggtgtagagaatttaaaggagtgaaatgatagaactagtttaaattgggccattgggaagcctctgtggaggtgacatttgaattggaaacagagataaaagagccaaccactgtatgatcagacagracatgtttccagaagggggaaaagctgggcaaaggcccaaaaccagaaataagcctgaatatctgagacccaggcagatgctcagtgtggctggagataatgggcagaaaagaattgattggaatgaagctagcaacgttggcgaagccagatcttacgtggctttgtgaaccataataagtagtttgagtttaatttaaatacagtgggagaatatctgtgggttttaaggagaggagtaacctgatctgagttatatttgaaaaatg

SEQ ID NO: 332634 - DNA, 590 bp, Homo sapiens
attgggaaaacttcagaattatcaatggccccacaaatatcaattgtttctgttcgttttcttgacttaatctcaaaattattaaacattcaactaaaattccagttccaagtgatgctatttagttagtgagaatagcttctattcattagtggaagaaagycattaatatgtaacattattatctctaactttaccctagtaaaggccagttggtatttattaacatttggaatacagatattttgctaagcttacttaacaagactgcatcagttaatgttgacgttagtttcggtttggcactgagtcacagctctttgttatttcaaggagtaagaataagtgaactagtagtgtttcagtgaatattaaaatgtgaaaagcaaaacacagtgaaaaacatgacttctaagtatttgcaataactcatagtttttttttataattttggagatggtgagagtctagttgtccttctgtcttctaaaataaactgtatttggaactttggcttaagcctatttttaattcattttggtaagtactactacaagctttatcagtacaagtgcctttcaaaacacaac

SEQ ID NO: 332635 - DNA, 354 bp, Homo sapiens
ttttaaatagaaatttatcccaaagaaattaggtaatgcacacaaacatgtgtagtccagaataattattcttgattatgaaagcaaaccattgagacaacaccaacaattaacaataagatcttatttatgagataaattgtggtatatccctaaaacaagttacaattagtcaatgaaaatttaattttaagagactaattaatgatatggaaaatgttcataatatatttgtaaaataaaagcaaattaaaaaatatatgcaagtgtggttgtatatggttataagtgtgtgaaaatttakgctgaatgaaagatgctagacacaaaagagtatacatggtgtgactccac

SEQ ID NO: 332636 - DNA, 354 bp, Homo sapiens
ttttaaatagaaatttatcccaaagaaattaggtaatgcacacaaacatgtgtagtccagaataattattcttgattatgaaagcaaaccattgagacaacaccaacaattaacaataagatcttatttatgagataaattgtggtatatccctaaaacaagttacaattagtcaatgaaaatttaattttaagagactaattaatgatatggaaaatgttcataatatatttgtaaaataaaagcaaattaaaaaatatatgcaagtgtggttgtatatggttataagtgtgtgaaaatttatgctgaakgaaagatgctagacacaaaagagtatacatggtgtgactccac

SEQ ID NO: 332637 - DNA, 354 bp, Homo sapiens
ttttaaatagaaatttatcccaaagaaattaggtaatgcacacaaacatgtgtagtccagaataattattcttgattatgaaagcaaaccattgagacaacaccaacaattaacaataagatcttatttatgagataaattgtggtatatccctaaaacaagttacaattagtcaatgaaaatttaattttaagagactaattaatgatatggaaaatgttcataatatatttgtaaaataaaagcaaattaaaaaatatatgcaagtgtggttgtatatggttataagtgtgtgaaaatttatgctgaatgaaagakgctagacacaaaagagtatacatggtgtgactccac

SEQ ID NO: 332638 - DNA, 591 bp, Homo sapiens
attcagtgttattcagatctttatgttgcttttcaccatcattgtataagatatgtgtatcatatatttcctttaactaccaacaagatgttgctttacttacccctagaaattgatctgcctttcattaatttaaatttaattaccatgttaattattataactttaaaaatacttttctatatacaaactatgaaagtctcttggccatgaacctttcttataggctttaacaaaaaaaaaacctgtgttgtagtagaggtgccttgctggcacttttaacmtgatcttctatttatgattatgtacctttaatggattaaacagatacttcatcaatgaagacaattcatttaacaatttctcatgtgaataggatcacttggccttgtaaatatttcttgcactgctgtgaaagccacgcagattgtgaaattttccctaagtatgtgataataaaaatgatggcaatggtgattagtctggaagcaattttaaaatgtctgataacaattctccagtgactttgaatgacccagaatgaatttccagttctcacactcgacttaagaacactgttctagcactgtc

SEQ ID NO: 332639 - DNA, 591 bp, Homo sapiens
attcagtgttattcagatctttatgttgcttttcaccatcattgtataagatatgtgtatcatatatttcctttaactaccaacaagatgttgctttacttacccctagaaattgatctgcctttcattaatttaaatttaattaccatgttaattattataactttaaaaatacttttctatatacaaactatgaaagtctcttggccatgaacctttcttataggctttaacaaaaaaaaaacctgtgttgtagtagaggtgccttgctggcacttttaacatgatcttctatttatgattatgtacctttaatggattaaacagatacttcatcaatgaagacaattcatttaacaatttctcatgtgaataggatcactyggccttgtaaatatttcttgcactgctgtgaaagccacgcagattgtgaaattttccctaagtatgtgataataaaaatgatggcaatggtgattagtctggaagcaattttaaaatgtctgataacaattctccagtgactttgaatgacccagaatgaatttccagttctcacactcgacttaagaacactgttctagcactgtc

SEQ ID NO: 332640 - DNA, 504 bp, Homo sapiens
agcctctaaaggaacaacttaattcaaaaaagctgaaaggtacagaaaaggcacataggtaccatagaatatgtgatccacagcagggcccaataggggataagactgaaaatgtaaatgtccctatattttctttggacgcaagtgttactttattctttattcataggcattggtgatccatcaaatgtatttataattctagctatagaattatatatgcaattgagaagcataattaaagaatacttagatttgaggaagataaatctcactgatataagcttggaaattgtttctccaactgtctactcagmctttcacttggatgttcattgacatgtcaaatatagctaatcaaaaatgaaactattgatttctaacttctcccctccctgccgcacttacctaggcctttcccactcattatttgcaataccattcatttaggtccttaggcttgaaatctcggggtcatttttaatttccctttttttctctcac

SEQ ID NO: 332641 - DNA, 610 bp, Homo sapiens
tatttgcaataccattcatttaggtccttaggcttgaaatctcggggtcatttttaatttccctttttttctctcacatataagcgaacccttacagaaagtcctatgagatttgtcctcaagatagagccccagcccaaccactttcaccatcttcattcctcccagtctagtcaaagccacaattatctctcctgtgaagtgctgacctcctcattggtggctcctcattgaagagtctattcctcacactgaaactacgtgattcttcacaattgtaaataagatcacattacttctgtaccaagccttccaatgttttcccatctcatttaaaaaagtacagagtcctcattatggtctacaaacccctcaccacttggccctcttcagcctcatctatcatttccctatraaatcatgctgctctagtcacactgaccatgctttgcattttctcctcctttggcctctagtactcttcctgcagataggtccatgactgggcccttcacttagattcttcattcaggtatctgctccagtgtacccaagacaggcagatagatgctctctgtacccccaaacagatactggcatccaacagaca

SEQ ID NO: 332642 - DNA, 610 bp, Homo sapiens
tatttgcaataccattcatttaggtccttaggcttgaaatctcggggtcatttttaatttccctttttttctctcacatataagcgaacccttacagaaagtcctatgagatttgtcctcaagatagagccccagcccaaccactttcaccatcttcattcctcccagtctagtcaaagccacaattatctctcctgtgaagtgctgacctcctcattggtggctcctcattgaagagtctattcctcacactgaaactacgtgattcttcacaattgtaaataagatcacattacttctgtaccaagccttccaatgttttcccatctcatttaaaaaagtacagagtcctcattatggtctacaaacccctcaccacttggccctcttcagcctcatctatcatttccctataaaatcatgctgctstagtcacactgaccatgctttgcattttctcctcctttggcctctagtactcttcctgcagataggtccatgactgggcccttcacttagattcttcattcaggtatctgctccagtgtacccaagacaggcagatagatgctctctgtacccccaaacagatactggcatccaacagaca

SEQ ID NO: 332643 - DNA, 589 bp, Homo sapiens
tgtgataaacatctactgaccttggacaagcataggggaaataccaaggatgragtctctagggcttaactcaggggagtgtaataaggtgctcatgaggccaaaaccaaggctctgcatggtcagcagccctccccagctgttatgggtaaagtttagcgtccttgatttattattgtcacctttcctccccatgtgatcatatggccttttcacagaaaatcgtatctaagatcctgcctcttcctcattgacacgtgtcaactctctcccactcttaaacctagcccttgggactttcaaggtgactatttgccaatcattaagccaatctgtgcttatatggaaagctctctttcctaaagtcttctttcttttctagccaatacacactcttcaaaagtgacctagaaatcacacatctacatatttttctagatagaagtgactcgcctgaagactagttcttttcatttcactatctggataattaattccaccactgtgcatgacctagccaaattgctcagcctatcctacatggcttctgtgttctgcgttctccgtgtgtaaatttcatccccaacta

SEQ ID NO: 332644 - DNA, 612 bp, Homo sapiens
aagcatactaattttaattgtttgggtaagatgtaatctttaagacaggactctaaaataaataaaaaatttacttagatatatagggtcagccccattttccttctcattgttttggaaaatagagacatctacacaaatttctaactgactgtgataaacatctactgaccttggacaagcataggggaaataccaaggatggagtctctagggcttaactcaggggagtgtaataaggtgctcatgaggccaaaaccaaggctctgcatggtcagcagccctccccagctgttrtgggtaaagtttagcgtccttgatttattattgtcacctttcctccccatgtgatcatatggccttttcacagaaaatcgtatctaagatcctgcctcttcctcattgacacgtgtcaactctctcccactcttaaacctagcccttgggactttcaaggtgactatttgccaatcattaagccaatctgtgcttatatggaaagctctctttcctaaagtcttctttcttttctagccaatacacactcttcaaaagtgacctagaaatcacacatctacatatttttctagatagaagtgactcgcctgaaga

SEQ ID NO: 332645 - DNA, 591 bp, Homo sapiens
gcggcaagctgaatgagctgagtggcttagtactggttgaaagttgtcccttgaaaagtgaagcactacagatttcctccttcttgtactttgaactcttgagggcatgagctgtrtcctagttgttgatccttatgtgctttcatgtacctggtgcctggcatatgttaggcatctgatcaatgtatgctgagtgaaggaatgaatgagtgaatgaatgaatgaataaaagaggactaggtaaatatgaaaaatagaggtagataagtatcagaagggaaccccaagggtgaaaaggagcatgaggctataaagggtaaggtagtcctccaaaaattaatttcctctgcctcccagttttttaatgttccttcccaggttcaccataaagctgatgggaaaagtccagtgttacatcttagaaagtgagccctgctgcttagaatttacataaaatacctggatgaaattatttcaatgtaggcagcctgttatgtctgcagaaatccacggcctagggggtctagggctccacagatgctgcaaatggtgcatctggcccacactgtagcacctgctcagcatcacact

SEQ ID NO: 332646 - DNA, 590 bp, Homo sapiens
aggcacaatgtcctactttgtggttttcacaccaggcttgggagactgcaaacacttattaatcttatgcatgtggctgggtgcacaaaagccagcccatgcatttggcctttggataggaaacccacaactcacaccaggaggacatatgtcctaaaatttccttgaagagaggtaggcaaattcttatttcacaggcttttggagcaactgggttaagtgatcccttctgtctgtctccttgttcttctgccacaatgccaatggtccaggctcttcacaggggtaagacaaattcctgagtgcccaatgggcactctacactggagatggaatcagggcaccatcttggatccagtgagcaccctaggaaagtaaatctcactcaaagatgagagggctgagttccctccacccttcctagtcagctgccttgaattgtctattggctacttctgggatgtttttgtatttcctgggctggtctgattttctgtttgtttggtattttgtyggttttgttttgatatttatctagatgtcactatgacaactatttattattacaaatattgtgcatgtcagtgagg

SEQ ID NO: 332647 - DNA, 474 bp, Homo sapiens
catcctgtgacttagaatgccttaaccatctgggaatgcaacccagtaggtttcaaccatatttaaccagcttctattcaagatggagttgctctggttcaaacgcctctgacagttttcagagattattgtcaattcaggagtcaaatcattagagactttacaaaaaatcagatgagggtaataaaacttatgataatataatattgacattttaacactaggtataaatattgttctaagcattttaactaatttaatcctgaaaaaaaaartcctctatagttattactatttttatgcctattttacagataaggaagctgaagctttgagaatttaatttgctcaaggggaggccaggacaagaaataatgaagagtccgatgtggcaggaatgtaggaaacaagtcaatgatggaagataaatatggagacgtgatgaaggcaaaattctgaagggtcttagagccc

SEQ ID NO: 332648 - DNA, 610 bp, Homo sapiens
ctctgtggaatgatgcagttgctaagaagagctgttaatgtcatgacctcaatgaataaaaaagacttccttttctccatgcccactcaagtaaaaggcttctctctgaactcctgctaatttttcatcagcaaaggtgcacagccttttggaagtgaaatgattactagtgaagaaaaagaaaraacctaacacttattttacagtaagtagcaagttgatctccattagggtcaaccctctggggtgctctggcccttccctttatgttctgagacagatacatccctgagaaaattctagtctcttctaatcctggaataatttagggaagcaagtcttgaacttcttccatcaaagcccaagaagtaaccataaaagatgtcttaagggttctagaaacacatcaccaaggggattggataaaaatgtgaaatttgtttaaaacctgaaatgttcacttttaaaaagcatgcaaattgtgactacccttccacaatgtatttgttttactgcaaaaataatttaaatgtctttcagattaaattatgaaaatatttacctccaaattttggcatgaagttaaaactcctggataatgtgctatgtt

SEQ ID NO: 332649 - DNA, 535 bp, Homo sapiens
ttcttggtgaattgcagagcctcccagtgaccactcttcagacaaaacttcttataatagcttccttccctgaatcttttgcgaaacatcaaatcacaaagagatcttattgtgagtattacctaaaattttttcctgtcttatgtagcaaagagggaagtcactgagtcagcttagatatgtgtatgtgttctaaaaaaaatgaatgtatccatgtgacttttttttcttttttttttttttttgagatggagttttgctctgtcacccaggctggagtgcagtggcgtgatctctgctcactgcaacctccacctcctgggttcaagtgattctcctgcctcagcttcccgagtagcctgccaccacacgtggttaattttgtatttttagtagaaatgggttttcaccatgttagccaggctcgtctcaaatttctaaccttcagtgatctgcctrccttggcctcccaaagagctgggattacaggaatgagccaccgcacctggccccatgtgactttaatattttactg

SEQ ID NO: 332650 - DNA, 571 bp, Homo sapiens
ggccagactggtgcaaaagcaacttgtagtgaggagctattgcagagtgtttctcagctttacttgcacattggaatcagctcctcaaatatttgggcccaamttccagatattcagatttaattgatagggtgtggcatggggcattaggatttttccagataattctaacatgcagccaagagttgagaatgcctgattcaggaagagtttttgtggataataatatcattgcttatagactctgtacctttttcttctctcataaggcagatagcttgctctataccattctatatggatctgattcccaacactgctgagtatttttaccctgcaattatgctacatccttatcctttatatagttgtgaacttgaaataaactgtgattttaccttgtaatcacaggcagattatctactggagtatattgggaacatgagagattaatacttattttccaacctttccttctaattagtattatctgaggaaaacatacctgaatcctcagctccattagaggaaaatagagcaaagcagattcatctgcaaggggatataatat

SEQ ID NO: 332651 - DNA, 571 bp, Homo sapiens
ggccagactggtgcaaaagcaacttgtagtgaggagctattgcagagtgtttctcagctttacttgcacattggaatcagctcctcaaatatttgggcccaaattccagatattcagatttaattgatagggtgtggcatggggcattaggatttttccagataattctaacatgcagccaagagttgagaatgcytgattcaggaagagtttttgtggataataatatcattgcttatagactctgtacctttttcttctctcataaggcagatagcttgctctataccattctatatggatctgattcccaacactgctgagtatttttaccctgcaattatgctacatccttatcctttatatagttgtgaacttgaaataaactgtgattttaccttgtaatcacaggcagattatctactggagtatattgggaacatgagagattaatacttattttccaacctttccttctaattagtattatctgaggaaaacatacctgaatcctcagctccattagaggaaaatagagcaaagcagattcatctgcaaggggatataatat

SEQ ID NO: 332652 - DNA, 571 bp, Homo sapiens
ggccagactggtgcaaaagcaacttgtagtgaggagctattgcagagtgtttctcagctttacttgcacattggaatcagctcctcaaatatttgggcccaaattccagatattcagatttaattgatagggtgtggcatggggcattaggatttttccagataattctaacatgcagccaagagttgagaatgcctgattcaggaagagtttttgtggataataatatcattgcttatagactctgtacctttttcttctctcataaggcagatagcttgctctataccattctatatggatctgattcccaacactgctgagtatttttaccctgcaattatgctacatccttatcctttatatagttgtgaacttgaaataaactgtgattttaccttgtaatcacaggcagattatctactggagtatattgggaacatgagagattaatacttattttccaacctttccttctaattagtattatctgaggaaaacatacytgaatcctcagctccattagaggaaaatagagcaaagcagattcatctgcaaggggatataatat

SEQ ID NO: 332653 - DNA, 532 bp, Homo sapiens
ataagttttaatctcccaaggaattgagattaaaaaaaattaaaggcattgcagagtattttccccaaattcacctctttgctgggttttgctttctactgtgaatgcagagtttggagccagaaaaatactgttgctgaattaatcattgtaaagccaacttagatactatgctgtaataaaagatcaaatttttattaccattgacattaatcagttaggttagtttaatctcccatcatttgaaggaattctaggacttctttctcttggatgggaaaaggagtaagctagaattcctagtaattactagccttcctgcaggccaataatcacytaggtcctttgaacaattgaacaatgactagatattcaactagtttattgaaagatatctagatacattaagtcttggctcttagctcatataaatacttctttaaaatagattaacttcaaaataataaaataatcatttaaaaaagaaagcaatccaagctatcaactgggctctctggacttttcagattag

SEQ ID NO: 332654 - DNA, 532 bp, Homo sapiens
ataagttttaatctcccaaggaattgagattaaaaaaaattaaaggcattgcagagtattttccccaaattcacctctttgctgggttttgctttctactgtgaatgcagagtttggagccagaaaaatactgttgctgaattaatcattgtaaagccaacttagatactatgctgtaataaaagatcaaatttttattaccattgacattaatcagttaggttagtttaatctcccatcatttgaaggaattctaggacttctttctcttggatgggaaaaggagtaagctagaattcctagtaattactagccttcctgcaggccaataatcacttaggtcctttgaacaattgaacaatkactagatattcaactagtttattgaaagatatctagatacattaagtcttggctcttagctcatataaatacttctttaaaatagattaacttcaaaataataaaataatcatttaaaaaagaaagcaatccaagctatcaactgggctctctggacttttcagattag

SEQ ID NO: 332655 - DNA, 621 bp, Homo sapiens
actgttatgtttatgggcctccactctaaagagcttactttgaagtttcagacacttatctctgaagcttacaaatagtttagggttgagttaccaaaactagagggagagtygtttactatttgtccataaatgggtctacatattggaaaattatatttcagtagagaaaataaatgggtgcatataggcatggggagcaagttctcatcattcattgcgagtttcttcacagaaaaagtgaagaggcaggcaaaggagaggtttcaggagaaatttcaggagattctgaattaatcatcaatcatacagagttataaaagaaagatggagcaatggtcaggaagcaacattaaagaccagaattcatgtctcaaatgtcactatgtgagctcagccaaattgctttgtcatttatttgggagcctccattgcctcatctgtaaaggtgaataatgggtaactctctaatctaccttatgacattgacataaggtttgactgtgtccccacccaaatctcattttgaattgtaactcccataatccccacatgtcatggaagggacccagtgggaaacaattgaatcatggcattgggtttttctgtgctgttcatgtg

SEQ ID NO: 332656 - DNA, 484 bp, Homo sapiens
cttaaattatgctgaaatgagttaagactttgggggactgttggaaaagcatgcttgcrttttgagttttgaggacatgagatttgagagggactgtggcaaaatgatatggtttggctgtgtccccacccaaatctcatcttaaattgtagctcccataatatcacatgtcctgggagggacccagtgggaagtaattgaattataggggcaggttttcccattctattctcataatagtgaatacgtctcacaagatctgatagttttacaaagggcagttctgcacatactttcttgcctgccaccatggaagacatgcctttgctcctctttcaccttccaccatgattgtgaggcctcaccagcaatgtgcaactgtgagaccattaaaactcctttcctttgttaattacccagcctcgggtatgtctctattagcagcagtatgaaaatagactaatacagatgttaaagataacaa

SEQ ID NO: 332657 - DNA, 484 bp, Homo sapiens
cttaaattatgctgaaatgagttaagactttgggggactgttggaaaagcatgcttgcattttgagttttgaggacatgagatttgagagggactgtggcaaaatgatatggtttggctgtgtccccacccaaatctcatcttaaattgtagctcccataatatcacatgtcctgggagggacccagtgggaagtaattgaattataggggcaggttttcccattctattctcataatagtgaatacrtctcacaagatctgatagttttacaaagggcagttctgcacatactttcttgcctgccaccatggaagacatgcctttgctcctctttcaccttccaccatgattgtgaggcctcaccagcaatgtgcaactgtgagaccattaaaactcctttcctttgttaattacccagcctcgggtatgtctctattagcagcagtatgaaaatagactaatacagatgttaaagataacaa

SEQ ID NO: 332658 - DNA, 605 bp, Homo sapiens
gggtgcaagccccaagctttggcagattccacatggtgttgagtccgtgaatgcacagaagtcaagaattctggtttgggaacctccgcctagatttcagaggatgtatggaaacacctgtatgtccaggcagaagtttgctgcaggggcagggctctcatggagaacttctgccaggrcagtgcagaagggaaatgtgggattgaaacccccacacagagtccccattagggcactgcctagtggagctgtgagaagagggccactgtcctccaaaccccaaaatggtagatccattgacagcttgcaccatgcacctggaaaagccacagacactcaatgccagcccactaaagtacccatggtgggggtctgtaccctgcaaagccacagggctggagtggcccaaggccataggagcccacctcttgcatcagtgtaacctggatgtgagacacggagtcagaggagatcattttggaactttaaggtttaatgactgccctattgaattttgaacttgcatgggacctgtggcccgtttgttttagctattttctcccatttggaacaggtgtatttatccaatgcctgtacccctgttg

SEQ ID NO: 332659 - DNA, 596 bp, Homo sapiens
gtgacagtttcccccatgttgtgatagcgagtgagctctcacaagatccaatggttttataaggggtttcccccttcactcagtacttattctctctcctgccaccctgtgaagaggtgccttctgccttgattgtaaatttcctgaggcctctccagccatgcagaactgtgagtcaattaaacctatttttcttttataaattacccagtcttaggtctttcatcatagtagcatgagaatggactaatacaacgtgtgtrtgttaaatcatccctgcatccctcatatgaaacccacttgatcatgatgcattatctttttgatatgctgttggatttggttagttagtattttgttaaggattttggcatctgtattcatcagggatattggtctgtagtttcctttttatgttatgtcctttcctggttttggtattagagtgatactggcttcattgaatgatttagggaggattccctctttctctctgttgtggaatagtgtcgataggattgataccaattcttctttgattatctgatagaattcagctatgaatccatctagttctggactttttttgttggtaa

SEQ ID NO: 332660 - DNA, 606 bp, Homo sapiens
atagtctttgaaatgtagatataaattatcagggcaggctgagagtcctgagttaagtggaatgaaattctcaaaaacaaagtttcaaagaaacaaatgagaattgcattcttcaagggtttttttttttttccacattacagtactgatctttgtatgcctgaactaggaaaaacagtgcatattcatagataatacaagacccttccacagaatgcagccctgtgtggagtgtgtgagaccgaaagtgatatagacatacccaagtcatggtttgttctaagtyacaactgctgcttttctattactttaaatccatctctatctattcaaccaaccagtggctaaaaataattttgaaaattaagtggacatgaaggttaaatcaagcatattaactcaatagtaaatttataggataatgcatattgcatagctgtagacaatgaaaattgggagaaaaggactgtttattgagcagcctctatgtacaggtatagtgatggaggcctcacacagttggcctcacttagcctttatgtcaccccatttaaaatagagattattgtattcattttacaaatcaaaaagtggtatctcagaata

SEQ ID NO: 332661 - DNA, 607 bp, Homo sapiens
cctgtgtggagtgtgtgagaccgaaagtgatatagacatacccaagtcatggtttgttctaagttacaactgctgcttttctattactttaaatccatctctatctattcaaccaaccagtggctaaaaataattttgaaaattaagtggacatgaaggttaaatcaagcatattaactcaatagtaaatttataggakaatgcatattgcatagctgtagacaatgaaaattgggagaaaaggactgtttattgagcagcctctatgtacaggtatagtgatggaggcctcacacagttggcctcacttagcctttatgtcaccccatttaaaatagagattattgtattcattttacaaatcaaaaagtggtatctcagaataattggtaattgatggatacggcattctatcctaggttctgcctgattccacagcctagaatcagatagatagagatttaggtaggaacttataagaactctataaacttctagcaacatctacatctaactgtgtgtctttggtgaattaaatatttttttgagttcttgtttcttcatgaatgaaacaacagaagcaggctgatttctaagatttctgcta

SEQ ID NO: 332662 - DNA, 607 bp, Homo sapiens
cctgtgtggagtgtgtgagaccgaaagtgatatagacatacccaagtcatggtttgttctaagttacaactgctgcttttctattactttaaatccatctctatctattcaaccaaccagtggctaaaaataattttgaaaattaagtggacatgaaggttaaatcaagcatattaactcaatagtaaatttataggataatgcatattgcatagctgtagacaatgaaaattgggagaaaaggactgtttattgagcagcctctatgtacaggtatagtgatggaggcctcacacagttggcctcacttagcctttatgtcaccccatttaaaatagagattattgtattcattttacaaatcaaaaagtggtatctcagaataattggtaattgatggatayggcattctatcctaggttctgcctgattccacagcctagaatcagatagatagagatttaggtaggaacttataagaactctataaacttctagcaacatctacatctaactgtgtgtctttggtgaattaaatatttttttgagttcttgtttcttcatgaatgaaacaacagaagcaggctgatttctaagatttctgcta

SEQ ID NO: 332663 - DNA, 613 bp, Homo sapiens
tggcccctatgaaatgtccagttgttttttattcccaacagttctactgcagatgcttaagcataaagtttctaggactgagtttgagccaatatagttagaagggtgaaggtcagaagctggcaaatatgttcccatgaaaggctgtgtggaactgggggcataattagagctggccctgggcctggtggcaataacagagccctaggagaagatggctctcccatctttctctggcgcccagccccagcctggtgccccgagacattgtggtattagaggcactgccacccagcacccaagcacttggtgttctcaggacaggcactggcagagtagcaggggagaggtgttttcaggtggctctgggacagtgtagatcagcaagtgggagttgcaggaaaagaggaaaagaatatgatgagggctgcctggtgtccacagtgactaatgtgtttgtggactcaggtgggaataagtataaatgcttctatgggagctcagttcttcagtagatgcctggggrcattataatttctgcgtaaatgtgaagccaggtggcagtagattagattagtttagaacagaggaaagttcatggtgtagagagcag

SEQ ID NO: 332664 - DNA, 602 bp, Homo sapiens
gatcctcgcagacttaatttttatcatcatttgccacagttctgagaaggctagccaagaacttggcctgatgtgtaaatgtgcaatctcaacgatttacaacatcaaataataaacctcaatcttttcactgggaaatcagtgtctcctacccttgtctgcatggtagctatgtgaacgtgcaattgcaaagacatttgggggaaaaaaaatcatggaaacatttgcatcccttcagtcagagccatttctgcagttcttactggaacattcctaagggtgagcttgctgaattttgacaacaagaaaatgtcagccagagaatgatatttaactcatttgcactgtagtttgcagtgcacaaggtgccaattaaaaagccagaggagaggcagaagagcctgtctctcagcttggctggagtragatatgatattaattattaaagggactcaaaattaacaacagctaagacagaagaagtgctactttcaagtacaacaggagctgaaatgctgcactgagaattgagttaagctgaaatggtttctagctgcaacaaaagggagttagaaagctgtcaagaaatgttccccagcagg

SEQ ID NO: 332665 - DNA, 571 bp, Homo sapiens
aaatatttatattaggcaatggtttcttagatatgacacctaaagcacaagaaaccaaagaaaaataatagataagttggacttcatcaaaattaaagactgttgtgctacaaaacatactctcaggaaagtaaaaagacaaccctctagagtggaagaaaatatttacgaatcatttatctgatacgaatatgrtatccagaatatagaaacaactcttagaactcaacaattggaacacaaataattcaataataaaggtgaacaaagaacttaaatagatatttctacaaaaaaatgttcaaatggccaataagcacatgaaaagatgctcaagataattattaaggaaatgcaaatcaaaaccatctagagatacaactttatagcccattgtttgcaataacaaaaaaaactgggagccacttagtcattcatcgtcatggactctgttagacacaatcatataatgaaaaaatatagtcattaaaacgtgagctagaactgtatgtcctgatatgggaaagccttcaagatatgtagtctgttttcacactgctataaagaactg

SEQ ID NO: 332666 - DNA, 506 bp, Homo sapiens
ctctgtgtaagtccttgaaaatttgatttatgaatctgggtgcttctgttttgggtgcatatatattaaggatagttaggtcttcttgttgaattgagccctttaccattatgaaacgctgttcttttttttattgctgttggtttaaagtctgttttgtttgaaattagaatagcaactcctgcttttttctgttttctatttctttggtaggatttttctatccctttactttgagcatatgggtgtcattgtatgagagatgattctcttgaagacagcrtgcagttgagtcttgcctctttatccaacttgccactctgtgccttttaactgcagcatttagcccatttgtcttcaaggttaatgttgatatgtgcaaatttgatcctgtcaccatgttgttagctggttatttagcaggcttaattgtgtgattgctttacagtggcaatggtctatatacttaagtgtgtttatgtggtggctggtaatggtctttactt

SEQ ID NO: 332667 - DNA, 506 bp, Homo sapiens
ctctgtgtaagtccttgaaaatttgatttatgaatctgggtgcttctgttttgggtgcatatatattaaggatagttaggtcttcttgttgaattgagccctttaccattatgaaacgctgttcttttttttattgctgttggtttaaagtctgttttgtttgaaattagaatagcaactcctgcttttttctgttttctatttctttggtaggatttttctatccctttactttgagcatatgggtgtcattgtatgagagatgattctcttgaagacagcgtgcagttgagtcttgcctctttatccaacttgccactctgtgccttttaactgcagcatttagcccatttgycttcaaggttaatgttgatatgtgcaaatttgatcctgtcaccatgttgttagctggttatttagcaggcttaattgtgtgattgctttacagtggcaatggtctatatacttaagtgtgtttatgtggtggctggtaatggtctttactt

SEQ ID NO: 332668 - DNA, 476 bp, Homo sapiens
acacccaaatatcactgcttcactagtatgtatattcaaggtatgtgtgtgtgcatgtgtgtgtaactgtgtatacatctgtgtgaggatataaatgtccttattctctccacttggtgttagtgggrattaatcaataatccacatcatgcatgagaaactatatagtccaaagacaagaaggagcttgggagaggaacactgtaatttattttccacttatgagaaaatgattccttaaatgagaaaataaagtgagcattgattaaaagtaaatgctggataatttgagttttaattgtggaaaacttaacagagctcaataagcattaagacccttcatgacacaggagcattatgggtaaggaagagcagaagggattcaggctgaagatgatttacccgaaatcctcaataatcttcaatggaaataaaatccatgttttttttttaaccataaaaatgtgcttcaaaca

SEQ ID NO: 332669 - DNA, 567 bp, Homo sapiens
agattgctcagataagtagataatctatagaaaataatttttatacaatcaaaatgtgttcagtattttgtagaatagcaagaattttcactatgaataaaattgacagcgcacagtgaatctcaagaaatatgagttttaacaaggtttaaatgtttaaattttaactgaattatactatggtttctcttcagatcatataaatttttcgccttttaaatttawctgaattttatttatctaagaaattgaaatgttttatattgtatcaattttgtttataaactaaattatttaaaattagttctttgttaagtaaaactatatgtatatacatatatatgtatgcatacacacatatcctgtttttgtatcatacaaaatgtttctttttatattgcaataacaatttggttaatatcaattatgccgtttctattgaaaaaaatgtaaaaattaacatataaattgattttgtcaaagtatttaccaaagaaagtttttatctgaataatgctcttttatatgaaaaattttatttctaggaaattatgtgtaaattttatt

SEQ ID NO: 332670 - DNA, 529 bp, Homo sapiens
ttgtgttggaagcatttcaaatcctttcttctagctattttgaaatatacaatatatgttaattgttaattatagtcaccctactatgctgtcacacagtagaagctacttctgttatctaactctatgtttctacccattaactaacccctcttcattccttcactgttgttcccagcctctgctaaatattatactctgtaccttcatgagattaactttttaaagtgttaaacttctttttaaacccccacacatgaatgagaacatgcagtatttgtctttcaatgcctggcgtttttcagttaatataatgacttctagttccatctatgttgctgcaaatagttgattctatagcttggttattgtgaatagtgttgcaataatcatgaggatgcaggtatccctttgatatactgatttgttttccattggataaatacccagggtggaagtctggaatttataaaaattctatttttgttttytgagacactctctattgttttccataatgtctgtacta

SEQ ID NO: 332671 - DNA, 582 bp, Homo sapiens
tctttttcattgagatctgttgccagagaattactacatttcttgtcatgatttctcattttatcatgtttcttgcctcaatatgctgatatctgcagatctgatgtaacagttgcttcttctaattttatggattggctttcatggcaaaaattttttcctgtagatgtccctgtagtgtttgttgggcagggcactttgcctttgattcttggtgggtgcagtattgtagtctctgtatgatttatgctgtaatcagcatccgtattgtctrtgtggtactcagaggcttaggctgcacttgtaggtgaaggctgtggtgaggctttactggaaattagaacatcaggtgggtaatgcttagacatcagtagtgtcagcagcaggccatgtgtgccagtcattgggtgcccaggtggtgtatgcaggcacccaggtggtatattccaggtaggatgattcttgggcctcttggtggcttctcatgtgcttacagtgacagtattcagctggttaggcaggtgggtactcaggcctcttgctttggggtgttcatgccagtcctgtctgtgggccaaccct

SEQ ID NO: 332672 - DNA, 547 bp, Homo sapiens
tctacaatgacacatcataatccccacagtccacagtttacaatggggttcactcatggtgttgtacgttctataagtttggacaaatttataatgacatatatctaacattatagtattatgcacagtgttttcactgcactaaaaatcctctgtgcttcacaccccatccccactggcaaccactaatcttttagctgtcatcattgttttgccttcccagaaartcatatggttgaaatcatagtatgcaaccttttcagattgcattttttcacttagtaatgcacatttaaattccctgaatgtcttttcatgggttaatagcttatttctctttagtgctgaataacattccactgtccctgtgtaacagtttgtccattcacctactgaaagacatcttggttgtttgcaagtactggcaattgtggatgcagctgccataaacatctttatgcagatttatgtgtggacataagttttcagctcatttgagtagataccaaggagcatgactgctgtactgtatggtaagaatatattt

SEQ ID NO: 332673 - DNA, 605 bp, Homo sapiens
tctttttattttcttggcaccagtttggtacttattttcrtatagtagaaattttaattttaatgaattccatcttattaattttttttcaaaagatctttgccaaatccaaggtcatgaagattttgttgttataccataagagttctatagttttgtttatagttttagtgtagtttatagttttacatttaggtctgatatttattttgagttaatttgtgtgaaatgtgtaagatgagtctaaatccttttttttttttttgcatgtggatgtctagttgctccagcactatttgatgaaaagactatattttctacattatgttgcctttgttcctttgtcaaagatcagttgactgtatttagataactttatttgtgggttttcaattctgtatcattgatacatttgttttttctttcactaatatcacattttcttgcttgctatagctatagaggaatccttgaagtaaggtgacgtcagttcttcaacctggttcttatttgtcaatattgttttagctaggctggatcttttgcctcttcatatatactttagaaacagtttgctaatatgcacaaaataacttgctgggatt

SEQ ID NO: 332674 - DNA, 605 bp, Homo sapiens
tctttttattttcttggcaccagtttggtacttattttcatatagtagaaattttaattttaatgaattccatcttattaattttttttcaaaagatctttgccaaatccaaggtcatgaagattttgttgttataccataagagttctatagttttgtttatagttttagtgtagtttatagttttacatttaggtctgatatttattttgagttaatttgtgtgaaatgtgtaagatgagtctaaatccttttttttttttttgcatgtggatgtctagttgctccagcactatttgatgaaaagactatattttctacattatgttgcctttgttcctttgtcaaagatcagttgactgtatttagataactttatttgtgggttttcaattctgtatcattgatacatttgttttttctttcactaatatcacattttcttgcttgctrtagctatagaggaatccttgaagtaaggtgacgtcagttcttcaacctggttcttatttgtcaatattgttttagctaggctggatcttttgcctcttcatatatactttagaaacagtttgctaatatgcacaaaataacttgctgggatt

SEQ ID NO: 332675 - DNA, 619 bp, Homo sapiens
gttttagctaggctggatcttttgcctcttcatatatactttagaaacagtttgctaatatgcacaaaataacttgctgggattttagtagggattgcattacatctgtacatctatttggaaggaattgacatcttgaaaatactgaatcttcctatccactaacataaagtatctctccatatatttagttctttagtttctttcacatccagagtattttagttttcctcatgctggttatgtaaatgttttgttagatttatacctaagtattttaatttttattagtaatgaaaattacataaatacaaataaataaatataaataatgtgaatatgcataaataacaattacacatgattgttttatatataattttgaattgctcttattcattagtaggatatacaatatagtaacatgactgactttcatatattaacctkgtatcctgaaaccttgctgcaaatccatcataattccaggggttctttctgttttcttttactgtttgtttccttgggtttttccagaccaattatttcagatattctacatagacaaacatgccatcttcaaagacttttaatttttccttgcctatctgtaaactct

SEQ ID NO: 332676 - DNA, 433 bp, Homo sapiens
tcatgctggttatgtaaatgttttgttagatttatacctaagtattttaatttttattagtaatgaaaattacataaatacaaataaataaatataaataatgtgaatatgcataaataacaattacacatgattgttttatatataattttgaattgctcttattcattagtaggatatacaatatagtaacatgactgactttcatatattaaccttgtatcctgaaaccttgctgcaaatccatcataattccaggggttctttctgttttcttttactgtttgtttccttgggtttttccagrccaattatttcagatattctacatagacaaacatgccatcttcaaagacttttaatttttccttgcctatctgtaaactctttatttcctttttttcacattagctagaacttccagtaagatgcc

SEQ ID NO: 332677 - DNA, 614 bp, Homo sapiens
ttattgattcaatttttaaayaaatatatgcctattcaaaaatgaaagataatttaaattgttcttggaaactgaaaattggtgacaaattaggttattttagcaaatatttgttctatccctcctctttattagaaagggagggctggtggacattggacttagctttttggtttgcttcagccaatggaatatgaacagaagaagtatgtccatgttaagccttgctttacaaagcattataaatgttcatatacctgggagctactgacttctacctgatgagtgtatgttctcaaagctgctggttcttactgttttagttttgtcccggtatttgcctgttacaggtctcacttatctggcttagaagccaggcagctacaattattccaactgaacaaacacattaataaactttgcataaaaaattgaggctccttacataattaaagtgaatgaactttagcacatgaattttggagtaagtatttttgatgcaaagagactttgtttaacctcacaaggttataaatgttcaaatcgctgtgttccctctctgggcatttctctcagagggaatgttttatatcttcaacatgtcaaagtggagc

SEQ ID NO: 332678 - DNA, 579 bp, Homo sapiens
tacataattaaagtgaatgaactttagcacatgaattttggagtaagtatttttgatgcaaagagactttgtttaacctcacaaggttataaatgttcaaatcgctgtgttccctctctgggcatttctctcagagggaatgttttatatcttcaacatgtcaaagtggagcatgatcatgtaacttgattggcctgtgaaatgtaacaggaagttacaagtttagcatataagcagaagttttaagagccattatgagtccaccacatttctgttcattctacttggaaactgacaataataaagacaaaagctgtttaatttaatctgctccataatgaataggtctttgaggaaagctacagttcatccacattgagcatgtcatataagtgagcattagacttttgttattgtacattattgattatttggagtcattgcttactttaaactgagcagtcctcttattaattrtattgtccaagtagtgtggttttattttaagataactagaataaatctactgacgtaaagaaacctcacatcctatatccctgagagataacagatttaaaa

SEQ ID NO: 332679 - DNA, 623 bp, Homo sapiens
tctatactgacaaagcagaagtcatctgcaacattgactgtttctaaggcaaaagctaaaagaaaaggtaattaaattaggttaggttcttccagcttcggtctggtgataaatgtatgcattccacccatatttcatcagcacaaaacatgttacttcagggaggtaggtgaattaaatcctaccatgttcccgtatgagaaccagttaaaaaccataataaaaatagtaatatttatttgcgtctacacttctgatcaccaactatttagtccaatctcctttacattttcgagatacacacagcatatcctcaagaaatgcaaaaccccttctaatcatgacatcgagctcaaactccagactctctgaatgatataagatatgcctatttaacctagcaacctatgaactaaaagacattatctgctttcctagagcccattacctayccccaagcatttggggagaaaacaataattttaaggcttataaagtattttttttagtcgaggctgatagatattttgaatttaagacttaaactctgcttttatatttattgtctgtcagcttcacaagctttcatataaactcttctctcctgaaatgtattgctgtaa

SEQ ID NO: 332680 - DNA, 643 bp, Homo sapiens
gcttagtatgaaacaacccaggtaataaacatagtagccaatagtgagtttcttattcttactctccttctaccctccaccctcaagtaggccccagtgtctattgttcccttttatgtgtccatatgtaatcaatgtttagatcctatttataagtaagaacatgcagtatttggttttctgttcctcagttaattcacttaggataatggcctccagcttcttccatgttgctacaaaggacatgagtctgtttttttatggctgtgtagtattccatggtatacatgtatcatgttgactatatccagtctatcactgatgggcatttaggttgattccatgtctttgctattgtgaatactgctgtgatgaatatacatgtgcatgtatttgtctttctagtagaacaatttatattcctgtggaaatatgaatggaatttctgggctgaatggtagttctgctttaarttctttgagaaatctccaactgctttcctcaatgattgaatgaatgtacatttccaccaggagtacataagtattcccttttctctagaaccttgccagcatttgctaatttttgactttaatagtaaccattctgactattaatgtgtgatggtttctcattgtggatt

SEQ ID NO: 332681 - DNA, 587 bp, Homo sapiens
tgttattattaaatttgtaaatttgaatttgtatctatgtcctaatttattcaaggctctgtgccatagccatttcctagggaaaattttcttatggaaggttgtatttctcaggtgcgtctaatgagaaaactcatatcattaaataatatagtttggatgttgtccctgctcaaatctcatgtgaaatggaatctccaatactggagatgtagcctggtgggagggaaatgaatcatggggtcagatttctcgtgaatgatttaatatcattctcttggtactgtcctcaaaaaagtgagtgagttctcacaagatctggttgtttaaaggtgtgtcacatctcttctctctgtctctttgttcttattttcaccrtatgatacacctgctccctcttcaccttctgtctaattgtaagattcctgaggcctccccataagcaggtgccatgccactatacttcctgtacggcccacagaactatgggacaattaaacctctttcctttataaattacccagtctcaggtattttttatagcaatgtgagaacagcctaatgcagggtgaagtattgcacacctg

SEQ ID NO: 332682 - DNA, 587 bp, Homo sapiens
tgttattattaaatttgtaaatttgaatttgtatctatgtcctaatttattcaaggctctgtgccatagccatttcctagggaaaattttcttatggaaggttgtatttctcaggtgcgtctaatgagaaaactcatatcattaaataatatagtttggatgttgtccctgctcaaatctcatgtgaaatggaatctccaatactggagatgtagcctggtgggagggaaatgaatcatggggtcagatttctcgtgaatgatttaatatcattctcttggtactgtcctcaaaaaagtgagtgagttctcacaagatctggttgtttaaaggtgtgtcacatctcttctctctgtctctttgttcttattttcaccatatgatacacctgctccctcttcaccttctgtctaattgtaagattcctgaggcctccccataagcaggtgccatgccactatacttcctgtayggcccacagaactatgggacaattaaacctctttcctttataaattacccagtctcaggtattttttatagcaatgtgagaacagcctaatgcagggtgaagtattgcacacctg

SEQ ID NO: 332683 - DNA, 526 bp, Homo sapiens
aaggcatgatggtattttgaaatgtgacaagggcatgagattttggagggaccaagggcagaaaaaatatagtttgggaatttgtccctgcccaaatctcatgtataaatggaatccccagtgttgcaggtggggcctggtgggaagtgattggatcatgggggaagatttctcatgaatggtttagtaccattctcttggcactgtcctcttcatagtgagtgagttcttgcaggatctgattgtttaaaagtgtgtgccatctcccctctcttcctcttttctcctgctttggtcatgggaagtgcctgctccccsttagcattctgcaacaattggaaacttcctgaggcctccccagaagcagatgccactaggcttcctgtacagcctgcagaactgtgagccaattaaacatcttttctatataaattacccagtctcagatatttcttcatagcaatgtgagaatggcccaatgcaacaaatataagggaaaacataataagtttgcccagtgtcacaa

SEQ ID NO: 332684 - DNA, 526 bp, Homo sapiens
aaggcatgatggtattttgaaatgtgacaagggcatgagattttggagggaccaagggcagaaaaaatatagtttgggaatttgtccctgcccaaatctcatgtataaatggaatccccagtgttgcaggtggggcctggtgggaagtgattggatcatgggggaagatttctcatgaatggtttagtaccattctcttggcactgtcctcttcatagtgagtgagttcttgcaggatctgattgtttaaaagtgtgtgccatctcccctctcttcctcttttctcctgctttggtcatgggaagtgcctgctccccgttagcattctgcaacaattggaaacttcctgaggcctccccagaarcagatgccactaggcttcctgtacagcctgcagaactgtgagccaattaaacatcttttctatataaattacccagtctcagatatttcttcatagcaatgtgagaatggcccaatgcaacaaatataagggaaaacataataagtttgcccagtgtcacaa

SEQ ID NO: 332685 - DNA, 549 bp, Homo sapiens
ctttattttattcataagaaatatttaaaaagcttttgagagttttaccaaaaaaaaaaaaaaaacaataggagaaagagagctcttgaggtcaggttacttggagaaaagattgaagaaaatagaatgagatgatattggaaacatttaccatttatcaactcaggctcttagagttcttgcatgctcttcaatcattgacttatcagtagataagcttctgacattttacaagaaagaaatgagacaacagcaggcagcaactggaaatggttcattgttatatttttaaaatttatttttcctacaatctcttatttttaatgttccaacaaatacttgaaaatggtatttaacaattattttaaatctgctctccattttgttatccatgattagttattttaatcattcatgggaactagctaaatgagctaaataaatattcccatctgctttatgaaaatmttattaaaattgtcatcagaacatgactgtctattaatgaattatacactaacacaaagttaaattatatgtatttgtttt

SEQ ID NO: 332686 - DNA, 435 bp, Homo sapiens
tacaaacttccagtctgtggtttctcttcgaggacctcacaataaaaattgtgtttttaatctatgctaaatgctacccaaatatatgttggaagacactgaacctggggatgggcaggtgaaagagaaaacaaaataggactctaaaggcaaaccacttgccctgtattattttgtgtcagtattcatgcaaaaatgttacatattagataaaaagaattggaattcaggaagttacrtaatgagcagattttcaaaatactgtatacatcaagctacattattgttagatgtaggcaaacacataggtaagaaagatacatatagaaaatggcatcatttactggaaattgtatggattcaagaagctctttcttctaaagagttatatgatctcaagatttctattaactgatacatttttataacattatg

SEQ ID NO: 332687 - DNA, 557 bp, Homo sapiens
aagactgagatttggagttttcactttaatattgctttcccttatgtactcagctaatactggttttatgatgtatactgatattatgttacataaagtggttttccatcaggaaaacaacatattgatcacacatgcatgctgctcaaaattacatattggtattacactacttttcagttcaacttcaaaaaatttatctcatttttaagataaatttttagataactaaagtatttaatggtcmtttataatacttttcaaatatataaattatgtgtctgaagagaatccaagaaaggatacttcaaagtcatggtatcctgctcttctggttcaaatttgattaagaaaaaaataaagtttctttttcaaaattttgcttaatcattaaacttggttatacactctatttcagtgaatatattttgaaaaattgaaataaatattttttctgcttttctacttaataattacataaaatttggagactgaatctcagattgaaacaaataagttgactctttaattagttctttgttgctgtcattagtcat

SEQ ID NO: 332688 - DNA, 533 bp, Homo sapiens
gtatgttggaagtaactaacttgtctttgacaatacagtctcataggtggaagggaccagctttgtctcaaatgagactttggatttgggacttttgagttaatattgaaataaattaagacttttcaggactgttgagaagggatgattgctattttgaaatgtgagaaggacataggatttgggaggggccaggggtaaaataatatggtttggcaatgtgtcctcactcaaatctcaaattgaattttaatccccaatgtttgaggtaaggctagatggaagttgattggatcatggcactcaccaagcacagcaaagagctccccgttgctgttcttgtgatagtgagtgarttctcatgagatctggtggtttataagagtgtggcacctttcccctcaccctcttctgcttctccagtcatgtaagatgtgcctgcttcccattcaccttctgccataattgtaagttttctgaggcttctccagccatgctttctgtacagactgtggaactgtgagtaaattaaa

SEQ ID NO: 332689 - DNA, 643 bp, Homo sapiens
tttgggttttgggttttcctattcaattgggatctccactccttgctgaaggtcttttcactgtcatttcttgctatacactagcttcctatatctcatggaaaattggtctaccaaaagctggcaatatttasagtctagccactctgagtaacatacaaatcaattatcccttggccttcaagatcaagaatcctgaagacagaacaaactctgctaatgttcaggaaagatcacatgcatataaaatattttttaaattttgatgttatctacaacttagtaaatccggaaatgattattataatgcaattactattaacttatactgtctctaacactgtagtataacatatatgctgtgtattttaggcagggcctgagtgtgaattttccaatagattagttaaaaagaaaatttcataaaatactgttcattttttaaaatcctataaatgcttaatatagtgtctagcacagagaagattctcaataaaatgtagaaaattctgaataattaattttgctaaaagtccattcaactaaaatttgattttcataatactgaatataatctggttagagttcattcaagcttcagctgattatacatccacttaatttgtattcctgaaaagtttta

SEQ ID NO: 332690 - DNA, 553 bp, Homo sapiens
aaatgcttcctctttgggttgcttagatttctggggaccgtgggacccttgcaaattcccaacttggttactaagttgttttagttgtaaactcataattttagagactgttttcttttctttcttaatgattgtgacatttggtcagcttgggtgactaggtggctaatgggcaagaaagcctaagctgcattattcctcttcattagggttgctaactccttatctaaaccttgagtaaagccagaagttagtaagttgtcacttctactgtgctcaaagttttcaggaaatactcctgaaaactgtttgaatgacttttcaaacctgatgtaaaagccagacatggttttgttaggttacattctacattgttgcacctttgcccaatctataaccttggggaatatctgtgaataggttcacagaggtgattgcaaagctctctgcatttctctcttccagttgtatctattctgtcaaaatcttctaaaagctgtttccaacctgcyactttaaaccattcttcagttttgtttttgggaaccagtaa

SEQ ID NO: 332691 - DNA, 558 bp, Homo sapiens
caagcaatacatcaaagctccatccacatcctttatacaatagtcttgacaaaccactaggtttgttgtgtaccccagttccaggcccatacttgggagggaatatccaaagaccaggttgtgcttgtgttaatttggtcaggaaattcagggcccttaagtggctgaagcatgatctagaaagatatgtcatgggatctagttaggtatttcctgtcctcttggccctatatattcctctccctttgataagggacataatcatggaaagccaaggacaatggtccctttttcttgagtctgaacgctatgattattgatacatctagattttatcaagtcattttttcaaaatctcwtattcatgggaccacattttaaaaatagaatgccaatgatctgttctttgaagttggcaagcatgatagaagggtagaaactaaccccttttctaagggtgctaatagatgtatattggaaacatattttcagcacactttcaagtgatacaaagccagctgaattttttgtcctttttaacattttcttgttcttata

SEQ ID NO: 332692 - DNA, 616 bp, Homo sapiens
gttcggtggggtgattgtcatgcctgctccatggagtgagaggctggggtctgcagccacagtttggatggctgcagtagaacccagggaactcctgcccctacttataaggggtgaatctcccgctttttcctgcttctgccagctccatggagcatgcagtcctgcttcacctccctactgcagctggcatgatggcaacagcctctacagatgacctgatgctgccatcagtatcaggaaaattmtctctgtatagagtaattcagtaactcagaaagtcaaatagttgagtaaaacgaggtttacggttgctcatagtgagaccaagagagaagagggcaaagtaaagtaggtacgttcctcaggttgtgatttgttatggatcctataatttagtccagaatagcatgaaatttaggagaaatgaggaatttatgatcgtgaaaatagtagaataattcttggaaaatcaaggaatgttttagagagaattattagtgtaaataagcagaaaggagagatggtgattataagaagtaagatatttgaaatctctagtttgggggtagtgcatttcttagtataagacgcggggaaagagttgcagagcaga

SEQ ID NO: 332693 - DNA, 614 bp, Homo sapiens
tcatgatgccttattaattaaaatttatataattactttcatgttatttaaacagcatctggaagttcagctgaattccagacagttttgccttgtaggcctgaaactaattcttttaaattagttggaacaaaattatgcaaaataagaatttttaagagaaccttcttataaaacataagatggaataaaatactccttaggcactcagataattccaaccctttacttagaaattatctttagattcaagtaataacaytcttgaaacactaccaaatttctaacaactttatacgtaacatgtggcatataagaccaaattactctctggaaatatgataacagttaatcgttaacgctaagaaaaatattccatgatgttgataatttgtgaagcattgcacacagatataatctataatggcatatgtttccaatatgatttttggaaggataggtaaccacatatttatcattaccccatattatttccacgtttttgggacagataacttaaatcttttcttctgttcaagaattcattacagtaagttgaaacactgagattaaagtaaaagtgagtttaaactgtaaccaacattgagaattgg

SEQ ID NO: 332694 - DNA, 632 bp, Homo sapiens
acaggaagatattaaaaatgaaaaggctgttgccattttgtcttatatcctggaaaatatgtttttattgtgtcaaagattgaagccaaagtgtctcaactgtacttattactatcaacacctgatatgattctctgagaaattcattacctccttttttccccactctctcaatttcataattaattcatgcaatttttaatggaatttcccttataamcactcctccttctaatgtaccttcaggtccatcagctctgtttgctatttctatgctacttttatgcttaaaataatttttctcctgcttcagcacttgttatcctgtgaagttaatatctatcttcataaatgcaaaccaatttatttctggaagcttgccttatttttggagctttatctaggaattggcataatatcttatatttcaattcccctaagtatttctaaaagttttacttcctccttggtgttttgtctgtggagtgggttttagggtttctatctctgatagcgtaatataccattcacctatttcttcatctatccctttgcccatccaatcatccatcattttaacaatatttcttgaacatctgttgtgtgttagttgatatttctagtgcaagaat

SEQ ID NO: 332695 - DNA, 522 bp, Homo sapiens
caaagtattcctatacctttctccatgtttgttcacatctttttttataccagtaagaatcatctttctctgtttaaaaccctccacttaattatcaagatatatatgcctttgggctaagaaaattttcctcactcyttcaatctgtactctcattttttctatataatttaaatattatagttaatcacaatgtgtagcacttgttgtcaaatacaatgtcttataacatcactacatgtcctactctactttgcattaacatttataatactactaataaaaacaattaacttttttcaaaatttattatgtgccacggacctaaaatatttctattgtagcacagttttaaaataattgtgacaatactatgatcatttaggtacaattataatttttatctttcagataaaaatctttaaagaaatattatataacttgccccaggtcacgcagctaataagtgacaaagatggaatttaatctcaggcagtgtgactctgtaccctgtactatgac

SEQ ID NO: 332696 - DNA, 522 bp, Homo sapiens
caaagtattcctatacctttctccatgtttgttcacatctttttttataccagtaagaatcatctttctctgtttaaaaccctccacttaattatcaagatatatatgcctttgggctaagaaaattttcctcactctttcaatctgtactctcattttttctatataatttaaatattatagttaatcacaatgtgtagcacttgttgtcaaatacaatgtcttataacatcactacatgtcctactctactttgcattaacatttataatactamtaataaaaacaattaacttttttcaaaatttattatgtgccacggacctaaaatatttctattgtagcacagttttaaaataattgtgacaatactatgatcatttaggtacaattataatttttatctttcagataaaaatctttaaagaaatattatataacttgccccaggtcacgcagctaataagtgacaaagatggaatttaatctcaggcagtgtgactctgtaccctgtactatgac

SEQ ID NO: 332697 - DNA, 574 bp, Homo sapiens
ggttgatttcataactttgctattgtgaatagtgctgcagtgaacatgagtacatgtgtctctttggtagaatgacatattccttcrggcatatacatagtaacggtattgctgggccaaacgatagttctgttgtaaattcattgggaaatctccaactgtgactgaaccaatttacaccaccaccaatagtgtataagtgtcccctgttctctacaacttgccaacatctgttatatggtgactttttaacaatagccattttgactggtgtgagattgttaattcattgtggttttgatttgcatctctctaatgattagtgacactgagcttttttcatatgcatgtgtatcatcttttacatgtctattaacgttattttcccatttttaatgcagtcgtttgttatatgcttattcaattgtttaagttcctgctaggagctggatactagacctttgtcagatgcatagtttgcaaatattttctcccattctgtaggttgttcattcacttcattgatagtttcttttgctttgcagaagctctttagtttaattagatcagattt

SEQ ID NO: 332698 - DNA, 558 bp, Homo sapiens
cattattttgaggtatgttccttttatgtatagcttttttttttttaacatgaagcaatactgaatttaacgaaaagcctttttgcrtctattgagatgatcatgtgagttttggttttagttctgtttatatgataaattgcatttattgacttgtgtaccttgaaccacctgttcaatatcctgtgaagcttattttattatggccaattctgatgtgctgctgaattcagtttgttactgttttgtcgacaattttgaacatatcttcatcggggttattgtcctcaggttttcttattttgttatgtctctgccagattttggtatcggaataatgctggcctcatagaatgagttagggaggagtccttcttcctcaatgaaaaaaaaatagttttagtagcactggtgccagttcgttttgaaagtctggtagagtttggctgcaattctgtctggctagggctttttctggttggtaggttttgtattcctgattcaattttggattttattattggtctgtacaggatttcaatttatttttttcaattt

SEQ ID NO: 332699 - DNA, 558 bp, Homo sapiens
cattattttgaggtatgttccttttatgtatagcttttttttttttaacatgaagcaatactgaatttaacgaaaagcctttttgcatctattgagatgatcatgtgagttttggttttagttctgtttatatgataaattgcatttattgacttgtgtaccttgaaccacctgttcaatatcctgtgaagcttattttattatggccaattctgatgtgctgctgaattcagtttgttactgttttgtcgacaattttgaacatatcttcatcggggttattgtcctcaggttttcttattttgttatgtctctgccagattttggtatcrgaataatgctggcctcatagaatgagttagggaggagtccttcttcctcaatgaaaaaaaaatagttttagtagcactggtgccagttcgttttgaaagtctggtagagtttggctgcaattctgtctggctagggctttttctggttggtaggttttgtattcctgattcaattttggattttattattggtctgtacaggatttcaatttatttttttcaattt

SEQ ID NO: 332700 - DNA, 619 bp, Homo sapiens
gtttatatgataaattgcatttattgacttgtgtaccttgaaccacctgttcaatatcctgtgaagcttattttattatggccaattctgatgtgctgctgaattcagtttgttactgttttgtcgacaattttgaacatatcttcatcggggttattgtcctcaggttttcttattttgttatgtctctgccagattttggtatcggaataatgctggcctcatagaatgagttagggaggagtccttcttcctcaatgaaaaaaaaatagttttagtagcactggtgccagttcgttttgaaagtctggtagagtttggctgcaattctgtctggctagggctttttctggttggtaggttttgtattcctgattcaattttggattttattattggtctgtacaggatttcaatttatttttttcaatttcaatctggggaggctgtatgtttccaggaatttatcgatttcttctaggtgttctagtttctgtgcacataggtrtttgtaatagtctctgagtttctttttgtatttctttggggtaatgttatctatatcatttctgctcatgtttgtttggaacttctctcttttgttcttcattatctagct

SEQ ID NO: 332701 - DNA, 564 bp, Homo sapiens
gctagcttctaacaccattcatcaatatttctttaaatatttgtcttagaatttgaacaaaaatagttttaacttaagaattggaaaatgatatggcaatcaatattagttcaatttttcttttcagggctaggtaggccttgatccaaatgcttaacataaatgcttattttgcattaaggatctgatgtcagtgctttgagcagattaattagtaagatttaaggcattcaatggattggtattaggcatattttgctctatactgmattagactaatttataaagtgtagttcacaaatgccctccataaataacatataccatttactatgcaattagactgccacgctttttattaaaaatgtttgtcatgtacaatgttttaaaatcttttttatcaattcataataatttacatattcatggagtacacgtggtattttgttacatgcatagaatttgtaatggtcaagtcagggtatttatagtatacatcaccttatttatcatttctattaatatatattgggaaaatttaaagttgtccctttggctgggcac

SEQ ID NO: 332702 - DNA, 552 bp, Homo sapiens
gtggaaccatgactcaatgaaagctcctttgttcataaattacccagtcttgggtagtgttttatagcagtatgaaaacagactactacggtaaattggtaccyggagtggggcactgctataaacataacatgaaaatgtggaagcaactttggaactgggtagtgagtagaagttgacacagtctagaggctcagaagaagacaggaagatgtgagaaagtttgaaacttcctagagacttgctgactggttgtcgtcaaaatgccagaggactgttggaaagtcatgattggttttaatgtgaaaagacattagatttgggaggcgccatggggtaaatgatatggtttggctctgtgtcccaacccaaacctcatctcaattataatccctgcatgtcaagggagggacctgtaatccccacatacagagagaggaggttactggatcatgggggccgtttcctccttgctgttcttatgatagtgaatgagttgtgatgacacatgatggctttataaatggcaatttcccgtgtgctttatttttc

SEQ ID NO: 332703 - DNA, 552 bp, Homo sapiens
gtggaaccatgactcaatgaaagctcctttgttcataaattacccagtcttgggtagtgttttatagcagtatgaaaacagactactacggtaaattggtacccggagtggggcactgctataaacataacatgaaaatgtggaagcaactttggaactgggtartgagtagaagttgacacagtctagaggctcagaagaagacaggaagatgtgagaaagtttgaaacttcctagagacttgctgactggttgtcgtcaaaatgccagaggactgttggaaagtcatgattggttttaatgtgaaaagacattagatttgggaggcgccatggggtaaatgatatggtttggctctgtgtcccaacccaaacctcatctcaattataatccctgcatgtcaagggagggacctgtaatccccacatacagagagaggaggttactggatcatgggggccgtttcctccttgctgttcttatgatagtgaatgagttgtgatgacacatgatggctttataaatggcaatttcccgtgtgctttatttttc

SEQ ID NO: 332704 - DNA, 594 bp, Homo sapiens
tgtcttccatgacatgggagagaagaagaaacaccattcctcccatgaagtcagcagaggcaatgctgaaaaataataatgcagcgaagacattctcacatcctacaaggaaaaacaaattaaagtggaatgttttctttgctctagtgtatattgattttgaaaagacatattttattcggaacagcagtatagaaaatagacactctccattaaacatcttttcatggaagacattttatatcatgttattgaacttaatttgatgtcaaataattgagatgggtggcgttattcctatttcacagatgagacaactagagagcagaaaaaactgaacaaacaatatggcctaaatcacacagctaggaagagaccccrgcccctgacttggagagtgtgaccttcccatttctccacaatttctcttctagttgggctattttcttcactggatttagatctttgcctaagaagctgaacactccacacccaccattgtccactcttccagtagagcattcccatcagcttgtccaccacagccactcaagaacactgagaaggacacagattcagcagaattcagagcag

SEQ ID NO: 332705 - DNA, 540 bp, Homo sapiens
ggggagcaagcatcttacgtggcagagagggagcaaaagagagagaataggaggagaggttccacacatctaaacaascagatctcatgagaactcactcactatcacgaggacagcaccaaaccatgagagatctaccgccatgacccaaacacctcccaccaggccccacctccaacatgagggattacaattcaacatgagatttggtggggacacatattcaaacgatatcaagtacatttttaaaaattaccattttcaggtggcagagagaaacatttgcaaaagagaatagacaaatagctaggaggtgagatcaggtagagatagcttgctggcttagcctggaaaaatctgtattaataacgccatcaacaacagtgtctcttctgcttccctttctgggaaccatcctcaaaaattctgagcaaactggaaagggagattagaataaaaagcctagtttatgtacctgcctgtgactaagataaagataatagtgtgtaaatttatctgtggtgagttgaatcatgcccc

SEQ ID NO: 332706 - DNA, 607 bp, Homo sapiens
tgccatgtggtttcaataggtgctgtcactcagataaactgctgccctagccacatgagtaaaactctgatctgaatgggccaatcagactgcttcacttttcttgccaaaatgatttggcttaaagagttgtgttaggcagaactatgacctcccaaggacagtcgcatcctgatcccaagaagctctgaatgtgttatgttacatggcaaaagggaattcaagtggcagatagaattgaagttgttaatcaactcactttaaaatagagagagtaccttggattacccaggtggacccaatgtaatcacaagcatacttaaaaatggaagaggyacacagaagagcagtttggatcaatatgatatgaaaactcaatctgctgttgttggctttgaacttggaggaagggggccatggacacaggaatgcaggtgacctctagaagctagaaaaccaaggagatgcattttcccttagagcctccagaaaggaataaagttctactggcatcttgattttggctcagagatcgatttcagacttccaaactgcagaaccataaggtaataaatttgtattgttaaaaccactaagtttgtcatat

SEQ ID NO: 332707 - DNA, 607 bp, Homo sapiens
tgccatgtggtttcaataggtgctgtcactcagataaactgctgccctagccacatgagtaaaactctgatctgaatgggccaatcagactgcttcacttttcttgccaaaatgatttggcttaaagagttgtgttaggcagaactatgacctcccaaggacagtcgcatcctgatcccaagaagctctgaatgtgttatgttacatggcaaaagggaattcaagtggcagatagaattgaagttgttaatcaactcactttaaaatagagagagtaccttggattacccaggtggacccaatgtaatcacaagcatacttaaaaatggaagaggcacacagaagagmagtttggatcaatatgatatgaaaactcaatctgctgttgttggctttgaacttggaggaagggggccatggacacaggaatgcaggtgacctctagaagctagaaaaccaaggagatgcattttcccttagagcctccagaaaggaataaagttctactggcatcttgattttggctcagagatcgatttcagacttccaaactgcagaaccataaggtaataaatttgtattgttaaaaccactaagtttgtcatat

SEQ ID NO: 332708 - DNA, 535 bp, Homo sapiens
tgggcatccgtggatgctattcctccagttcctttatgaggtctgcaacgtttgggctgagatccaccaagcagttgtttgaagtgtgcaatggagtaggattctgcaagacagagacagaatcccaaccccaaacatggcagagtgatgaaaataccggagtccctagaacatggatgtgggactgggcctctactctgctacctgccacttccataactttgaggaagttccttatgccctaagcaactcagtgacctcatctggaaaatgaggagggaaacctcacactatcacgattaagtgagttcatatataaatcttatagagcccaatagyaactctgccatttattacttgcatgaactggcaaatgcttctttgagcctcagttagggttgccagatttagcaaataaaaatcccacatgtccagctaaaacaacaaacaatttttggtatgaaaaatgtctcatgtaaattggaatatactgtactccaaaaagtatttgtcatttatttgaaattcaaattta

SEQ ID NO: 332709 - DNA, 439 bp, Homo sapiens
gccattttcttttatatttatcatgtcctcacaytggggtgagaagccatggctcggtcccattgctggctagaatttatagcagctccattattaggagattgcagtgaaatggggtagaggtatggttttctgagaacgttacgatagtctcctacattatacacttgacaggtttgtcagctcttagtaacaagccttgtaaagtactttaatatcattagcactattttcttaatgtgtctgctctcctcgaagcttgaaaatatcatatatcataggctggagggtagcatgaactgctatctccttgtttctggtttcttaaatgtgactttatagtaacacgtagagttgatgttttaatcaaaataatgcagccattttcctttattgattatcaagtaaatatgtataaatacgtagttaggggtgggct

SEQ ID NO: 332710 - DNA, 530 bp, Homo sapiens
agcttcacgtgctgtatcccatcaccagctcaaagagacccctggygtttcctcactttaccacgtccatgctattctgttaaagcacaacaaggaaacagaaataaacacacaactctatccatgggacttcttgttcctttctttggttatcttattttatttttgttagtggagcggtggtgaaagttgaaatgactggctaaatgagacttagggattacatggggatttattttcaaacgttctctccatttacagacctagtacagatttggctgtatttttattgtgcattaaatagccgaggaaattagactttttagagaacactcaaaaggcagatgaaggcatttgcatccgaattcgtactcataaatgctgtgtcctccagaaacccagagcttccaactctcagacaaccaacccagttgccatagcaaataatataaacatatggttgctttaagattgcgcttcacaatgctgattctgcttagtgcgactgctgtctacacaagccatcctcc

SEQ ID NO: 332711 - DNA, 604 bp, Homo sapiens
acgcagacaagcaaaacaagttaaaatcacttgtacttctgtattactgtacgtgtgtatttataaagattgacacacacacacaactactgtcccatcacaactgctgaatggccatggagactctggaggctaaaggagatccccagcaatgagggtggtctaccctgtgagtacgccaccctttgcagaggtggagtggaactccaggacgcagaggcgccatccagcagtagggcgccagcctggagaggcctccatgttgggtgttcctgacaggctccttggttgagcccagccccactgtgtagtagctgccacgtgaggctctcgggggacctggctatcaggaatctgtctccagcacyggtcccctgtgtgcactgaggacgggagtctggagcccaggggcctgccacagtcccgcccttcctccctgccctcggtgctcctcagaggtgctgtcctctgggcgtctcctgcattgatcacgacaagggtggggttctatgcctcgagtatgtacccggagaaatgtgtgtgaacagtgatgatatgagatcatgacagctctgctctagcctgagtgctggaaaacacacac

SEQ ID NO: 332712 - DNA, 600 bp, Homo sapiens
tgtaggctgtgaaatgctagtgtgctgagttggggctgagagctgggcctggctggctgtgggcttctacagagtagttgcagccctgtgcacaggcagggggggtgtcaccgactcgcatgtgggcaggtctttgctgcgcatcaggtgctttaagcttcggaacaactgtgcaggattctattttagtattctggaagcatcattgaggaagtagtccagtgaagttagctctaaaaaaactctttactctawcaattaaaagaaatatgccaaaggatccataagggatgaataaattattaaactattaagaagttgctataaatatgcagtgttaattcaataattcataacggactggtacaacaagattttttaaggctcataaaatactgctggctttggcagtagctagtgtcctggggctcatgccaattgcttctttacacagcagcctgggtgtggggggcacagggagccttcccctggctggctgcccaaggactccaggtagaggacagcgcagggcgtggctgtggggatgtgccttcactgcctctccagccttgctgggggccaggcactggcttgtctcta

SEQ ID NO: 332713 - DNA, 646 bp, Homo sapiens
gaaaccatcaggctctctattatgattggatctaacaccacaatgtctaaagagaaaggacatggratgctttcaaatgcatttataaacaaaatatcaatggtcataactcatagtgacttttaaaatattttttattattatttttgagatggaatttcactcgtgttgcccaggctggagtgcaatggcatgatctcagctcactgcaacctctgcctcccaggttcaggcaattctcctgcctcagcctcccaaataggtgggattacaggcatgtgccaccatgcctggctaattttttgtatttagtagagacggggtttcaccatgttagtcaggctcgtctcaaactactgacttcaggtgatccatctgccctggcctcccaaagtgctgggattacaggcatgagacaccgcgtctgtcctcatattggctttaaaataaagacatttgtaaaaatctgtagtaaatatcctgagtagaacaggcatggagctaattaatatcataactcaaaattcccatgaagcatccaggttctttgatgacatctttcatccccaccattcttagcttgtctattttggcgtttcatctatcttgccccaagtcacaatatggtatagcaactccagtttgc

SEQ ID NO: 332714 - DNA, 546 bp, Homo sapiens
tagctcaagctcagatgcaaaatttgaggatgaatctgcttgtgttaaccactatctccttcatgaatttctctcaaagaatataagataatcctgaggtgtaattaaaattgtggcamaaatttctaagagtggacaattaatggtcactgtgtatatattttcaatttatcctgtggcttggatatattcttttataaaaccaatggcattgtgcatcttaatctattaccattttggctaattacaaataataggttaaattagttttaaaaatagccagacagtttttataccttatacgtaattgaacagtagttaattgatggaaaattttcttcattatattcaagattgtttttgttataaatcctttatagagttgttcggagtaatcctccacaatcacaaaattgtacagataaaacaccagaaagataattgttggaaacaggtattactgctaagtagaatataatatgaaagtttcctttagcaatgaaatttcgtattatgatattgattataatctgaataaacaatgcc

SEQ ID NO: 332715 - DNA, 546 bp, Homo sapiens
tagctcaagctcagatgcaaaatttgaggatgaatctgcttgtgttaaccactatctccttcatgaatttctctcaaagaatataagataatcctgaggtgtaattaaaattgtggcaaaaatttctaagagtggacaattaatggtcactgtgtatatattttcaatttatcctgtggcttggatatattcttttataaaaccaatggcattgtgcatcttaatctattaccattttggctaattacaaataataggttaaattagttttaaaaatagccagacagtttttataccttatacgtaattgaacagtagttaattgatggaaaattttcttcattatattcaagattgtttttgttataaatcctttatagagttgttcggagtaatcctccacaatcacaaaattgtacagataaaacaccagaaagataattgttggaaacaggtattactgctaagtagaatataatatgaaagtttcctttagcaatgaaatttygtattatgatattgattataatctgaataaacaatgcc

SEQ ID NO: 332716 - DNA, 593 bp, Homo sapiens
ttggggtgatataaatgtatcttkggaataatatggagcacaatttgctagatttattttattgcagatttatttaaattattatttttaattccacaattatttattaatcctttacttagccttatccacatagcctgaaggtaactttatgcaatatattaattaattttgtgcatgaaacaaagtttgcattaagtactcgtgcagaatttttcacttgtggcatcatggcagtgctcaaaatgttttggattttggagcatttcagattttcatattagagatcctcagcctgtatataaagggcatatagtctaatgaagagggcagacaaataaacaggcaattatgccccagcatgataaatgctaaaataaaacaaaggaagctttgggaacatataaggaagggatttccaatacaatcccaaagcatgcagggaaggttttcaggaggaattaaaggccatgctgagacctaagtttttaaagaagctggataaaattatagtaaggtgaaaaaaaggtcaagaaatccaacagtaaattgatgcctcccttgtcttagttttcttgggctacttaaacaat

SEQ ID NO: 332717 - DNA, 589 bp, Homo sapiens
aagttacagaataaaattccaggtcttgaggaaattatgcagggcctctataagaaggtaaggragtggtgaaagctaggctggggttctctatttttcatgaattcaagatctgacatggtgtattcctaaatgattaataagtactacctatatataaatgtcatgttaacacttatgaaattttatcagaacatggaaatacataaccaagtataacaaaccaagacaaacacttcatttgtccaacctcatctaaaaattttagataatcactgaatttctaggcacctttatcatgcttcacaagcagcagattaagctaacacacatcatatgtcatgagtgttacaccagctactcctacatcatgtctagctatcatatccagcattttactacaaatcatttcttagaagaaacccttcagtacaggcagaataagcactagagatgcactagaggcagggagccatttttaccctcccaaaacccactctctctctcaccaaaactctgtgtatgtgtgtgtgtgtgtgtgtgtgtgtgagagagagaggataggtgtgacaaataagctaaatcaagc

SEQ ID NO: 332718 - DNA, 396 bp, Homo sapiens
atagttatatcatatcctagttccatcacttacttactatgtaaccttgggcaaatgatttagattcacgaaattgcatttcctaataagcaaaattatgacaagtatttacctcaaggaattgtagaataaatagtaatgtacgtagagaccatcttagatattactttctatttagctgttatacaatacatgcttcttattattatgatgattggatagagaggatattttaattttattttaaatgtaatacttaaaagttgagatctttgcatcayagcaattagaggatctctatttccaaccttaaacccattgcttaatttactactaaaagtatgaatttaatatttctaaattgtatatgataggaattggaattagaagatcact

SEQ ID NO: 332719 - DNA, 628 bp, Homo sapiens
acctcagaattattaagggtcacaaggaagaaatgcacaaaagacaagcatagttattaaggatgccaagtcattttacatatggcaaatatataataatagaagtaacctagggcctaagatagtctcaaatcaagtgataccataagactgccctgagataagcactaggcaggaatgggaacctgtgtattgtaaagagatgggacaaaagaaagattatttttaattgtcatttgtgtatgtttgattggttgtttgataagtatgcactctccaggctgctagctgataactatttagtatttaaatggtaacagtagaagcagatactgttcagctgttcttctgtctagaagctctggacccacccagtggagaaaagaggagtacagcatggagtcaatcaagtgatactaaactcatctagggattcagagaaaacatgttttatcagcagcatactcaggttaaatgaattcagyttggacacacagatttgggatgtttgtgtaaagctgagtagagacaaatgcctccatatagataagatgagaagtcaagagagaggcctcttttttagatgaatgatattcaactctgttcacctaaataattgagagtaacc

SEQ ID NO: 332720 - DNA, 554 bp, Homo sapiens
gcctccatatagataagatgagaagtcaagagagaggcctcttttttagatgaatgatattcaactctgttcacctaaataattgagagtaacccaggtttgtttttagtctgttgattgttttttgggaaggtgaggcatggaggagggagacaagattracaaataactaagatggtattggagtgagacctgtgatagttcactcaatagtaagactatgtaagattttctcctgcttagtctattgagtggtagctcagagtccctgtgatgccttcagatttatgttatgataggctaatattggcgaattggccataaagatttgctttctgaaactgttgttctttttcccatggtctaattgattaatatctagggtatgctgcaaagttcaggtatttactgttttttcttacactttggcaacaatttgttgagcttcaaaatatgtgaatcctgctttaagattgcctttaatttttgtattgtacattcatagagatattgttgatcatttagtttcctaaaaaaagataatttattatgaa

SEQ ID NO: 332721 - DNA, 588 bp, Homo sapiens
tctgaactaatttactacttcatgaggcatwcattgcaaatatttttttctttctgttgaattgaaatttgtcttctggaaatttcaatccttctatcctaaaaatcctgctttaatttgagtgtttttagatgtttttattaatttttattggtaatatgctttcttatttatttcttaattattatgataatttagagataagaactatacaactagatgtatgcctacaaaactttttcatgatatatagaccctatgtgcacagttttcattttaacatatcgaggacagaagaaaaatcacagctgatgttaaaatatgtgataactgctgctacacttctacatcagattctgagaagtccatcaagctgtaataggttttctttttttcttatagataaccaaattacttgcccaaagaagctctcattatcagaaggtatactataatacttaactacatagtatcaaactaggaaacctaaaaaacttagcgtttttacccaaaagcatcaataaagtcactgttgaaattgctgaactctcatttattcattcaacaattgcttactgaatatttgtt

SEQ ID NO: 332722 - DNA, 588 bp, Homo sapiens
tctgaactaatttactacttcatgaggcattcattgcaaatatttttttctttctgttgaattgaaatttgtcttctggaaatttcaatccttctatcctaaaaatcctgctttaatttgagtgtttttagatgtttttawtaatttttattggtaatatgctttcttatttatttcttaattattatgataatttagagataagaactatacaactagatgtatgcctacaaaactttttcatgatatatagaccctatgtgcacagttttcattttaacatatcgaggacagaagaaaaatcacagctgatgttaaaatatgtgataactgctgctacacttctacatcagattctgagaagtccatcaagctgtaataggttttctttttttcttatagataaccaaattacttgcccaaagaagctctcattatcagaaggtatactataatacttaactacatagtatcaaactaggaaacctaaaaaacttagcgtttttacccaaaagcatcaataaagtcactgttgaaattgctgaactctcatttattcattcaacaattgcttactgaatatttgtt

SEQ ID NO: 332723 - DNA, 464 bp, Homo sapiens
tttttagatgtttttattaatttttattggtaatatgctttcttatttatttcttaattattatgataatttagagataagaactatacaactagatgtatgcctacaaaactttttcatgatatatagaccctatgtgcacagttttcattttaacatatcgaggacagaagaaaaatcacagctgatgttaaaatatgtgataactgctgctacacttctacatcagattctgagaagtccatcaagctgtaataggttttctttttttcttatagataaccaaattacttgcccaaagaagctctcattatcagaaggtatactataatacttaactacatagtatcaaactasgaaacctaaaaaacttagcgtttttacccaaaagcatcaataaagtcactgttgaaattgctgaactctcatttattcattcaacaattgcttactgaatatttgtt

SEQ ID NO: 332724 - DNA, 587 bp, Homo sapiens
tcgcctccccaaagattgtctgtctgcctttcttcctattttgggctaaagggactttcaggaattacatatgtwcatatttcatgttccacaatgggaacgcttgtatctcacgtcaaaacaaaagttaaagaaaaatgaaaaacctcatgaattgtccttttaaaaattctctgtttcctgaaaaacaaacaaaacaccaaaacaaaaaactcagacgaaataaaaccctggtgaaaacctccaactgggagtacttgctgcctgatctcctggctgagggaaagggaagtagtgtttctaatccattattaccagacgctgagcttctgggaagaaagaaatgcatcttaaattgttattttcctcttcttcttttcccagtcttgactcctttttcttttgcattgtttggcagcttcagatttcataccaagggagcttgctcaagggactaagaggagtttgagggtgctctttctgggtttagatctgtaggtacctgctggcctctgacacccttaaaaccagtgagagaaaagagatgggggcccagtacccgggccctgctgggagctctcctcaga

SEQ ID NO: 332725 - DNA, 587 bp, Homo sapiens
tcgcctccccaaagattgtctgtctgcctttcttcctattttgggctaaagggactttcaggaattacatatgtacatatttcatgttccacaatgggaacrcttgtatctcacgtcaaaacaaaagttaaagaaaaatgaaaaacctcatgaattgtccttttaaaaattctctgtttcctgaaaaacaaacaaaacaccaaaacaaaaaactcagacgaaataaaaccctggtgaaaacctccaactgggagtacttgctgcctgatctcctggctgagggaaagggaagtagtgtttctaatccattattaccagacgctgagcttctgggaagaaagaaatgcatcttaaattgttattttcctcttcttcttttcccagtcttgactcctttttcttttgcattgtttggcagcttcagatttcataccaagggagcttgctcaagggactaagaggagtttgagggtgctctttctgggtttagatctgtaggtacctgctggcctctgacacccttaaaaccagtgagagaaaagagatgggggcccagtacccgggccctgctgggagctctcctcaga

SEQ ID NO: 332726 - DNA, 587 bp, Homo sapiens
tcgcctccccaaagattgtctgtctgcctttcttcctattttgggctaaagggactttcaggaattacatatgtacatatttcatgttccacaatgggaacgcttgtatctcacgtcaaaacaaaagttaaagaaaaatgaaaaacctcatgaattgtccttttaaaaattctctgtttcctgaaaaacaaacaaaacaccaaaacaaaaaactcagacgaaataaaaccctggtgaaaacctccaactgggagtacttgctgcctgatctcctggctgagggaaagggaagtagtgtttctaatccattattaccagacgctgagcttctgggaagaaagaaatgcatcttaaattgttattttcctcttcttcttttcccagtcttgactcctttttcttttgcattgtttggcagcttcagatttcataccaagggagcttgctcaagggactaagaggagtttgagggtgctctttctgggtttagatctgtaggtacctgctggcctctgacacccttaaaaccagtgagagaaaagagatgggggcccagtacccrggccctgctgggagctctcctcaga

SEQ ID NO: 332727 - DNA, 599 bp, Homo sapiens
atttaaatatttcacgttttctaatcactagattaaacaataaaaagatcagatctttcatatctaataatttttcgtcatattatttgatacttctaatcacagakatattaaatgtttctagtttctgtggacataattttggtgaattccttttcttttgtatttaaaaattcttaaaattgtacatatttttggggcacatttggtgttttgatccatgtatacaatgtgtaatgatctcatcagagtaattgagatatccatcacctcaaacatttatcttttccatgtgctggacacattacaagtcttgtcttccagctattttgaaatatacagtaaattacatttaactaacagttatagctgatgaaaattataatgataaatttaaaagaaaaaaattcattgttatttaatcaggtatggaaataaaccccagagctatcatactgttcaaggattgctaatctttaatatctaaaacaaactaagagtctgtattcttttttttcctctttatttgagacagggtctgactctgtcacccgggctggagtgcattagtgcgatcctggctcgctgcagcctcgacc

SEQ ID NO: 332728 - DNA, 450 bp, Homo sapiens
gcagagatgactcctgacctagacccttgaatgagcttgttcccctgtgaaggatggagataagtggagttggagttcctcaggggtgcctaataacctacctaggataactcagagaagagagctatggtggagtgttgaaatactagcccttgtgaactgtacctactggtatgcatgcccttacttatgtagtttcctttcacattgctctaggcttggccaaataacttgctttggtcaattggacattagtaaacatgatacaggctgaagtttgataaactcttgagtttaggccttgccckcttggaattctaaaacgatgcaaagagaaacccaggaaacagcatcaacagccaggcaggtgagcctggtcatactagaccatcccatgccagctgagctatcagatgactgtggacatgaatgtccctagccaagacagca

SEQ ID NO: 332729 - DNA, 540 bp, Homo sapiens
catgctgtgactgtcacctactccttacttttctttaggaatgaagtcattacagcctgacagtgaatggtgggtatttctgggatgctgtgggaggcatatggatgatattcttttcatttgaattatgtaaaatacctctcattattaatggatgccaactgatcaggtttctcctgctgatggttctgttggatgtctaggatgtgtgtgtgtgtgcgtctaggatgtgtgtgtgtgtgcatgtgtgagtgtgtttgtgcgtgtgtttactgggtggtcctgggtggtggygaggcaactagatgcttcatgagaaatataatgagactgtttatctttagtttccatgttcagggaagttgtctgtttcaagttaaaggataaatgctcaggtcaagctaatcccaatcattttcttttttttttttttctggggcattctatttcagttcaatcatcattccttttgaattcattctgttttactaaaaagaaaatgctcacaactcttcagtccttattggggaaggttttcct

SEQ ID NO: 332730 - DNA, 583 bp, Homo sapiens
accccaaaccagtgaagtgtgtggggtctcctggccaacctaactgtagattaataatggacagtcaggtctgtgggtggtgaggagttggggagtcccttctcaaggagcccagagacctctttggaaagattaccaaaccttgttaaaaacagacatccttggggccagacacggtggctcacgcctgtaatcccagcactttgggaggcygaggcaggtggatcatgaggtcaggagatcgagaccatcctggccaacatggtgaaaccctgtctctactaaaaatacaaaaaatttagctgggcgtggtggcaagcacctgtagtcccagctacttgagaggctgaggcaggagaatggcacgaacctgggaggcggagcttgcagtgaggcgagatcgtgccactgcactccagcctgggtgacagagcaagactctgtctcaaaaaagaaaaaacacccttggggttgtcaaattagtgaatgtaaagatttcccaagggtttcaaagagtggcctgccagccagcttttgaggaaactgttaattcagaggcaggagcctctatctggtttgctgg

SEQ ID NO: 332731 - DNA, 584 bp, Homo sapiens
gcgtccaaaacttgtaaacacaaaaatacaactttataatacattgtattacaattgctaggatgtcccaaagcaaggaccacagtcacatctttgtatccccagcacctagcacaaggctcatcccaggtttgcagaaagaatttgcaaagactcacagaaaccacacaacctcaacaatggatcgttccagaggaagaaaggmgaggaagtcacgtgtcagtttttgaaaacaggactcgctttctttcactgcatgtttctgatgagcagacactgacttagggtttttagttgctttatcttactcaagtctcaggacaatgaggaacattctcccgcgcaactatttcgcaaatacagggaaaggcaacaaggctgttacgtggggaggatctgtccagatccacgtcagttcccccaaccaatgggctccaagctttcgtgcaggtccagcccacactgagcctgggtccacatatcctggggcctgggaccttgtcagtggttttgaccatttcagaaattaaaagacaggagaaggcttacagtgaccaacggtgaggaagaagggaggggcaggt

SEQ ID NO: 332732 - DNA, 584 bp, Homo sapiens
gcgtccaaaacttgtaaacacaaaaatacaactttataatacattgtattacaattgctaggatgtcccaaagcaaggaccacagtcacatctttgtatccccagcacctagcacaaggctcatcccaggtttgcagaaagaatttgcaaagactcacagaaaccacacaacctcaacaatggatcgttccagaggaagaaaggcgaggaagtcacgtgtcagtttttgaaaacaggactcgctttctttcactgcatgtttctgatgagcagacactgacttagggtttttagttgctttatcttactcaagtctcaggacaatgaggaacattctcccgcgcaactatttcgcaaatacagggaaaggcaacaaggctgttacgtggggaggatctgtccagatccacgtcagttcccccaaccaatgggctccaagctttcgtgcaggtccagcccacamtgagcctgggtccacatatcctggggcctgggaccttgtcagtggttttgaccatttcagaaattaaaagacaggagaaggcttacagtgaccaacggtgaggaagaagggaggggcaggt

SEQ ID NO: 332733 - DNA, 574 bp, Homo sapiens
gtataaacgctgtgtgctggattcaggcaggccggaatgtgcatcctggcctcattgcgtgatattgggcaagctaattcagctcttgaagacctactttcctcatttgaaaaatggggataattatagttgtggggagtggacgaggtgatccacgggaagcattggcactgggcctggcaccggctatgttcccagccaatgtcagctattaacgaatttcattgattccragatgctcttttttgcatattaacatctttgaaatcagtctgcttctaaaaattgatggcatgtcatggtctcagtggtagcattttacccccttcttagggtctctaaaacaatggtgcaccttacaatagacagtgtctagacttagtgaaatacagggtgtgtaagggtccccggggtgcagtattgatgaccacagggcctcgtggaggagtgctggaaatttggaaatgtcaggtctgcctaagctgtgtccagctccccagtgttctgcgcacacaggagtaagtcaaagggaaggtgaataaacaaggtgggtgggtctgcttctcttggatag

SEQ ID NO: 332734 - DNA, 621 bp, Homo sapiens
ttcctatttcaaaccctttcaattagacccttggggtttcccaggcctgcctgggggagtctttctccaagcttcctttccttcctttcccaaaccctgggacaaatgtttgtttttctcacatattcatcaaggcccaaggccttcagaaagtactgaggcgctgggctttgacatgggaagctggagcctgtctggggagcgttgagcccgagaacagtacttggcaggcttgcttcctgccccatgctgccattcactgtggacagcttgggggtggggacggtgcagtgggcgggggttgggggtgcttggcacatttgctgaatccactggaagccctcagtttggagagggaaagggactttctcatggatttccagctccaagagcatcaatcagcctcagagcaacactagtgaggaaaggaattgtttatagcaggaaaggtgattacaaaggccacccgctcactgtgtatcttttgttcctgttggcrccttgaccagaattctggggcagccctcgtgcagactttgcctgcctgggtctgtggatcctggaggtcgaggaggaagggaaaagatgcccagagaagcagggagaagcccggctctggag

SEQ ID NO: 332735 - DNA, 584 bp, Homo sapiens
accaaaatgtacaaaagttataacaggcatgaaacaacttatcagccaagacaataaatataaatgattaaaactcttttacagaggcttttgagttgtatttcaaaagcagcgaattatattctgttaacaaggaatacatctaaactaraacgtggcaagattgaaaataaaataaactaacattgattaggcaagcacagattccaggaaagcagggttagcaatgttactttccaaaaagtgatcttcatggtaaaaaacattacatggaaaacatggagtcatttcatatggataatgtgtatattttataatacatgtactttttgagtgtgtataatgtgccagttactgtgtgaggcacttgtcttggattatttctctaaagccctgaggtaggagttaccttgttttcatccctgtttcaggggaagggaaactgaggactagagaatctatctcataactaatcaaaggcagaccaggagtctgcactggagtctggtgcttggccaatacactctccatcatgcacacaacagatggacaaaactacagattcatctaatgttcgaaatgca

SEQ ID NO: 332736 - DNA, 584 bp, Homo sapiens
accaaaatgtacaaaagttataacaggcatgaaacaacttatcagccaagacaataaatataaatgattaaaactcttttacagaggcttttgagttgtatttcaaaagcagcgaattatattctgttaacaaggaatacatctaaactagaacgtggcaagattgaaaataaaataaactaacattgattaggcaagcacagattccaggaaagcagggttagcaatgttactttccaaaaagtgatcttcatggtaaaaaacattacatggaaaacatggagtcatttcatatggataatgtgtatattttataatacatgtactttttgagtgtgtataatgtgccagttactgtgtgaggcacttgtcttggattatttctctaaagccctgaggtaggagttaccttgttttcatccctgtttcaggggaagggaaactgaggactagagaatctatctcataactaatcaaaggcagaccaggagtctgcactggagtctggtgcttggccaatacactctccatcatgcacacaacagatggacaaaamtacagattcatctaatgttcgaaatgca

SEQ ID NO: 332737 - DNA, 510 bp, Homo sapiens
taatgttcgaaatgcaaggagaagttaacggtgaagtagcataatggttttaacaatctttatcaacttttgccagaaatgattaaaagataaattgccacaaagaaaatgtcaggagatccaaaatttattgtagaaactgtacaagccatgttttctaactctagtgctatgaatattgaaactaacagtaaaaattaaacaaaaaaatctatacaataacttaagaagtaaaataataaaatgcccagaccctccaaaatctaaattcattttcttaatagtttggttagaaaatactaaaagatgatacttgtatcaaacacatgaaatgtagctraagttgtacttagaggcaaatgaattcattttttaaacaaagaatacaaatgaatgaaagaagtggtcacttcaagaaaataggtagaagaacaagaagaattccaatcaaagagtggaaaagaaattataattgcagcataaattctgatttaaaaaacatagaaaacc

SEQ ID NO: 332738 - DNA, 557 bp, Homo sapiens
atttgaattggaatttttttgtgggaacttgacaagatgcatctctacagtacatgggctatgggggggacgaraataaaagaatgatgaccagatttgtaaaatgggtaaagctgcaatgatcaaaccagtacacctatgagtgacagacagagcagttagtcctcaaactcaagtctacataagggcttagtgtataaacaaggatcatcagacagggggggatagatggaaactttcaacactgtggaaaaatcaagccagagcctcttcttacttcaaacaccaaaataaattccagatggagtcaacatttaaatgcaaaaatattctgcagcactagtaatcaagcaaatgtaaattaaaataaaatgtcactttttgttctgtttattggcaaaggtttttttaaaaaacacttgattttggaagagtgtggtgaagaatgcaatttgcagactcctggtagggacttaaaaggatttgctcttcttaagagtggcacttactaaaaatctcaaaaatattcacactctctgacctacaaattccaagtc

SEQ ID NO: 332739 - DNA, 557 bp, Homo sapiens
atttgaattggaatttttttgtgggaacttgacaagatgcatctctacagtacatgggctatgggggggacgagaataaaagaatgatgaccagatttgtaaaatgggtaaagctgcaatkatcaaaccagtacacctatgagtgacagacagagcagttagtcctcaaactcaagtctacataagggcttagtgtataaacaaggatcatcagacagggggggatagatggaaactttcaacactgtggaaaaatcaagccagagcctcttcttacttcaaacaccaaaataaattccagatggagtcaacatttaaatgcaaaaatattctgcagcactagtaatcaagcaaatgtaaattaaaataaaatgtcactttttgttctgtttattggcaaaggtttttttaaaaaacacttgattttggaagagtgtggtgaagaatgcaatttgcagactcctggtagggacttaaaaggatttgctcttcttaagagtggcacttactaaaaatctcaaaaatattcacactctctgacctacaaattccaagtc

SEQ ID NO: 332740 - DNA, 512 bp, Homo sapiens
gaagtatcagagaagttaggtggacatttgatgggttacaaactgagccacattggttgaattttctatattgtgtttacttccttctcctcctgatgtatttttatcttaattttgtttagtttgagtctgtggagttctaggttggcagttctagatatagtttcttcttttatcaggtaaaaatgatgctacacatttaaccagacgtgactgggccattttgaggataaaagtttcacgtctagtcagccaatgttwaaacagtgacaatcagccaatgttaggcaaacattacactctaacattagaagattccacaaaatgactcaaaatatgaaaagcacggtcaagggtccaacacctaagattatccaatctcaaactgcagcttcagtgggagaaaggagccgtctcacagaaatgcccactgcagtcgaaatccacattgttaccgtcatctttcagagcggtgggaacagaacagcacccacactgtagaaaccacaggg

SEQ ID NO: 332741 - DNA, 512 bp, Homo sapiens
gaagtatcagagaagttaggtggacatttgatgggttacaaactgagccacattggttgaattttctatattgtgtttacttccttctcctcctgatgtatttttatcttaattttgtttagtttgagtctgtggagttctaggttggcagttctagatatagtttcttcttttatcaggtaaaaatgatgctacacatttaaccagacgtgactgggccattttgaggataaaagtttcacgtctagtcagccaatgttaaaacagtgacaatcagccaatgttaggcaaacattacactctaacattagaagattccacaaaatgactcaaaatatgaaaagcacggtcaagggtccaacacctaagattatccaatctcaaactgcagcttcagtgggagaaaggagccgtctcacagaaatgcccactgcagtcgaaatccacattgttaccgtcatctttcagagcgktgggaacagaacagcacccacactgtagaaaccacaggg

SEQ ID NO: 332742 - DNA, 580 bp, Homo sapiens
agttaagactttgggggacagttggaaaggcatgattgtgttttgaaatgttaggacatgagatttgggaagggtcggggtmgattgatatggtttggctgtgtccccacccaaatctcatcttgaattgtagttcccataaactccacatgtcatgggaaggaccagatggagataattgaatcatgggggtggtttccctcatcctattctcatgagagtgagtgagttctcatgagatttgatggttttataaggagcttcttccttcactgggcactcacactttttcctgccaccatgtgaagaaggatgtgtttgcttccccttccaccatgattgtaagtttcctgaggccttctcaaccatgctgaactgtgagtcaattaaacctctttcctttataaattacctggtctcgggtatgtcttcacagcagtgttaaaagggactaatgcaggctcttttttattaaatttagttttcaaaaaatttttattatgttgcaaaatattcactagatagatgtttttattcctagaataatgtcaccaaaacatattgagtacctattttaaaa

SEQ ID NO: 332743 - DNA, 584 bp, Homo sapiens
aaaagaaagaaggttaatgtaataaaatttttgaaggacaattgtagaagtgtgattggtatacttctccaattgtatttcttgatgattatattttaagggagttagaattaaatcttaaaatatatgtgacatatattcagacttgaagggaaagtagaaaattgaagatgtggtaaatggttatgtttaagagcaaaaggtctgtattagagtttcatccttatatgaaattttgcagatcttgtttttgtagtgggaacttaaatctatctgtggtacttggtgcaggtaatgaggctgaacttgttattgattgatctcaaaatttttgtgaagtctttatacaatatgactgccacgtactttagaaatatataattactaatgacaacaaaaatatagaaaggatttgttctgtgccaagttttatttcaaatactttagatatagtaatttgcttaatcctcaccacagttctatgaagttggtrttattgttatctttattttatagatgaagaaaggaaggcccacagaggttaggaaacttgcccagttacatagtttataagcgatggcaca

SEQ ID NO: 332744 - DNA, 577 bp, Homo sapiens
ccgagtagctatcatatgcaactatgatattatattaaagatctactgcaattagctgtatctgaggaatgaataaaatattgagaggaagaggaaatggtgagaatgtttcatgaacaaggtaacagttaatcaacatcttaaaaatcctaaggactctgccagcagagttgaggagacaagccattctaagtgggaagaagagagagcaaagacatggagtaggaaagcatatagtgctctgggtatgaaagccatatttaaggaagaagctttaaattttttttttttgaaatggcatctcactctatctcacccaggctggagtgtagtggtgccatctcagctcactgcaacctctgcttcctgggtttaagcagattctcctgcctcagcctcctgagtagyggggattacaggcacctgccaccatgcctagctaatttttgtatttttggtagtgatagggtttccccatgttgatcaggctggtctcaaactcctgacctcaaatgatctgcccgtcttgacctcccaaattgctgggattacaggtgtgagccaccatgcctggcca

SEQ ID NO: 332745 - DNA, 558 bp, Homo sapiens
acctctggccatctgactccaattgtcctaccctaacattttaattattagaaacttccattaacctgcctgccacacaggcctactctgtgtcctccaatgaacctttgtcatttccattatacttccagctttattttttgaatattttttccctttttgattaaataactcctgtatatcctttaagttcagtagtccagttcrgtagttcaattcagaatgcttccacaaaggagttcagtttattatctcttcctttggtactattttgacacacatggcacaagttttttacttaaaatgtcacttaacattggtgctactgagtgtgtacacatataaatataacttacacacacatacgtgaatatattgtctcctcaattagattttaagttccttgaaggtggaagcgatgtatcatgtttgtttctttctcaataactttatcatactagtggttctagtaatactagtgatactttatcactagtgttccataatagtaattgtaaatacttacgtagcacttgctaggtaccaggtgctgtccta

SEQ ID NO: 332746 - DNA, 558 bp, Homo sapiens
acctctggccatctgactccaattgtcctaccctaacattttaattattagaaacttccattaacctgcctgccacacaggcctactctgtgtcctccaatgaacctttgtcatttccattatacttccagctttattttttgaatattttttccctttttgattaaataactcctgtatatcctttaagttcagtagtccagttcagtagttcaattcagaatgcttccacaaaggagttcagtttattatctcttcctttggtactattttgacacacatggcacaagttttttacttaaaatrtcacttaacattggtgctactgagtgtgtacacatataaatataacttacacacacatacgtgaatatattgtctcctcaattagattttaagttccttgaaggtggaagcgatgtatcatgtttgtttctttctcaataactttatcatactagtggttctagtaatactagtgatactttatcactagtgttccataatagtaattgtaaatacttacgtagcacttgctaggtaccaggtgctgtccta

SEQ ID NO: 332747 - DNA, 558 bp, Homo sapiens
acctctggccatctgactccaattgtcctaccctaacattttaattattagaaacttccattaacctgcctgccacacaggcctactctgtgtcctccaatgaacctttgtcatttccattatacttccagctttattttttgaatattttttccctttttgattaaataactcctgtatatcctttaagttcagtagtccagttcagtagttcaattcagaatgcttccacaaaggagttcagtttattatctcttcctttggtactattttgacacacatggcacaagttttttacttaaaatgtcacttaacattggtgctactgagtgtgtacacayataaatataacttacacacacatacgtgaatatattgtctcctcaattagattttaagttccttgaaggtggaagcgatgtatcatgtttgtttctttctcaataactttatcatactagtggttctagtaatactagtgatactttatcactagtgttccataatagtaattgtaaatacttacgtagcacttgctaggtaccaggtgctgtccta

SEQ ID NO: 332748 - DNA, 585 bp, Homo sapiens
tttgtttctttctcaataactttatcatactagtggttctagtaatactagtgatactttatcactagtgttccataatagtaattgtaaatacttacgtagcacttgctaggtaccaggtgctgtcctaagtaccttatatgtacatatttatgtgcatatatgtatatgtgtatatatgtataatttgtttcttttctgtttctgtttctgtttctgtttctttttctttttcttttgagttgaagtttccctctgctgcccaggctggagtgcaatggctcactgcaacctctgcctcccgggttcaagygattctcctgcctcagcctcctgagtagctgggattacaggtgcatgccgccatgcccgggtaatttttgtatttttagtagagatgaggtttcaccatgttggccagactggtctcgaactcctgacctcaggtgatccgtctgccttgacttcccaaattgctgggattacaggtgtgagccactgcacccggcctaatttgtgtatttctaacaatacttacataaggcaggaactattattatttctatttggcaggtaagaaaacta

SEQ ID NO: 332749 - DNA, 519 bp, Homo sapiens
atcatgtgtcatttgtttgaakaataataattaataatgatctaataatattagtaatggatgacatttatttagcaattactatgttccagtattttaaattaagtatttgatatttgaacaaatgtttgaggttgataccataatgtatacatatatataatattatgtatatatatatggattttttttatatggggtctcactctgtcatccagcctggagtgcagtggcatgatcttggctgtctgtaacctctgcctcctgggctcaagcagtcctcccacctcagcctctcaagtagctgggactacagatgcttaccaccatgcgtggctaatttttgtatttttctagagacagggtttcacaatgttgcccaagctgatttcaaactcttggacttaggggatacacccacctcgaccttccaaagtgctggcattacaggcatgagccaccgcgcacagtcgaggttggtactattaaatctcattttatggaaaaaacctcttaggc

SEQ ID NO: 332750 - DNA, 579 bp, Homo sapiens
caggcacagaaaaacaaactttgcatattctcacttatttgtaggagctaaaaatcaaaataattaaactcatagagatggagaatagaagactggttaccagaggctgggaaaggtagtgggggtgggagaagtaggagggaaatggggttggttaatgagtacaaaataaaaatagaaacaatgaataagacttagcatttgatagcacaacagggtgactatagtcaataatttaattatacattttaaagtaacaaaagaatgtaattggtttgtaacacaaaggataaatgcttgaagcgatggataccccatttaccctgatgggattattacacattgtatgcctgtatcagggtattttgtatactccattaatacatacatctactatgtacccacaaatattaaaaatctttcataatacaataacatttttacatwttttagttcctccactatggtttatattttcatttcattttgtgattctgagaagcaattatcctattactcagagaagcagttttttagtaaggtatctcaaagtctccctctctgcttggagacatgctt

SEQ ID NO: 332751 - DNA, 163 bp, Homo sapiens
ttggttttcctagggttgggggctggtgggagaatgtctttacatggccacacaaaacccawcacaatctggtgagcccttggagtgtcttgcttaaaagggttctcgtcactgggagtactcactgaagccaagccagttccctgtggaatgctggtgtctg

SEQ ID NO: 332752 - DNA, 552 bp, Homo sapiens
tcccataatagtggaacatctaaaaagctgccctctgcgttgctggggaaaagctgctaatggggagatactsatgaaatgtgctgcctctgaaccctgctggtgtcctgtgaatgctgcctaccttatactacagaagtaaccagaaaacacacagaaaccagaaagaacagccctttcctcctccagtgtccctccagtgccctctactgcaaaaagggaacattgtgcaagctggcaagggagaaatgtcccactatcaaaagcagggcaatgaagcgtagattaggaagtgagaggcaatagcctaataactgacatagtccacccctttggtcactgagcttctatgtgcacccatctgcacgcaaatgaacttctttacaacaaccatgcaagtctgtttccacctaacaatgtatagctatccttcatataagggaagatgttcttatcctttccccaaaatgaagagacatagaatgccaacagtcattataaccatcattagccatattaattactcctcaaattcagtcatagtcccactaa

SEQ ID NO: 332753 - DNA, 529 bp, Homo sapiens
taaaaattacacaagtaacagttaaacttaatcatttcactctccttccccaaatagggaaattggacaatttaagtttaattcatgtctctcccacctcagccagttaataagaattgagtatcccaaagtcaatgaggaaaaaaaaataacttaaattttaaaatatagtcaatgagaagaggactaaagagaagcagrctagatcattcgcccatggaaagtgaagacttgccaatacaatgtgcctttttagtgttttcctttaattgttacaaatctgtgatttgttatatttgacccagtggaagtcctgcaagtcacactgacctattaatagaaacccagactccaaacaaccaagaaacagagctcaggcctgcttcatttctctacttgcacctcaagagcagcagtgacctttgcctatcatccgacaacaatgtggatggcatcatatttctaccaacatctctgtttggtgtgtgaagttatttccaaaaagcttcattcatttaatcctccagct

SEQ ID NO: 332754 - DNA, 529 bp, Homo sapiens
taaaaattacacaagtaacagttaaacttaatcatttcactctccttccccaaatagggaaattggacaatttaagtttaattcatgtctctcccacctcagccagttaataagaattgagtatcccaaagtcaatgaggaaaaaaaaataacttaaattttaaaatatagtcaatgagaagaggactaaagagaagcagactagatcattcgcccatggaaagtgaagacttgccaatacaatgtgcctttttagtgttttccttyaattgttacaaatctgtgatttgttatatttgacccagtggaagtcctgcaagtcacactgacctattaatagaaacccagactccaaacaaccaagaaacagagctcaggcctgcttcatttctctacttgcacctcaagagcagcagtgacctttgcctatcatccgacaacaatgtggatggcatcatatttctaccaacatctctgtttggtgtgtgaagttatttccaaaaagcttcattcatttaatcctccagct

SEQ ID NO: 332755 - DNA, 571 bp, Homo sapiens
gtacttcaaaattagacagacctgtgcaaattctagcacctaacctaaaaagcaccaggttcgttttcctcatgtatggaaaggggcgaaatcacatttacttgcaggtgtattatatgacttaagtgaaaaatcaggtgagaatgcctaatattgttaaattgagacatggcagtctctcaatagataacacttctgatcctcttggatcagaattgtagtcaaaggttgttttccgaaattatttggtttgctcttcccaactgtgtcattaggtgctggcctaaagaggctaamgttttctctctcccaaagaattttgataactggaaaatcctcattgtctaacaattaaaacttcatgataaatttctgaccccataacaagaggaagaagcaatgatatgttgaggtgtgagtacctgagtagtacctaaaatgaagtaaatatatagtttctactaaagaaaaaagaaacaaaataaagcccaattgcgtttattcccagaatgtttcaacatttaagcaattcacttagcattttttttgtgacataaagtgaagcaggaaa

SEQ ID NO: 332756 - DNA, 427 bp, Homo sapiens
ctggaaaatcctcattgtctaacaattaaaacttcatgataaatttctgaccccwtaacaagaggaagaagcaatgatatgttgaggtgtgagtacctgagtagtacctaaaatgaagtaaatatatagtttctactaaagaaaaaagaaacaaaataaagcccaattgcgtttattcccagaatgtttcaacatttaagcaattcacttagcattttttttgtgacataaagtgaagcaggaaaatatctacaatctatattatatctattaatccttgcagtttacaacatgcttattttgtgtcaagtgctgtgctgagctgttgacatctaccaactcatttagcccttccagaagcccttccttcactagcatgtccaactggattatgaagtgaggatgggagcctccatctgatatttat

SEQ ID NO: 332757 - DNA, 535 bp, Homo sapiens
tagtttctactaaagaaaaaagaaacaaaataaagcccaattgcgtttattcccagaatgtttcaacatttaagcaattcacttagcattttttttgtgacataaagtgaagcaggaaaatatctacaatctatattatatctattaatccttgcagtttacaacatgcttattttgtgtcaagtgctgtgctgagctgttgacatctaccaactcatttagcccttccagaagcccttccttcactagcatgtccaactggattatgaagtgaggatgggagcctccatctgatatttatgaccgtcccttcctttgtgcaacaagtgaaactgtgtaatgctgactcatctcacccagataagcagagttgtaaggactcctggaggtgttgggtggtgtctgggccagtttcatctgggaaatgattatcacaagtttcagatcaattttggggagctttctycaaacaagatccagaatcatcttatcttcaccctctttcaagtatcgataaaagggacaaaggctcttt

SEQ ID NO: 332758 - DNA, 548 bp, Homo sapiens
accatggggtggataggcaaaacaatttggttgataaggcgcagatcctgaactaacttgtaaggcttgtctggttttaggacaggtaaaatgggggaattgtaaggagagtttatgggctttaaaaggccatgctgtagcaagccagtgataacaggctttaatcctttcaaagcatgctgtgggatgggatattggcattgagcgggataaggctgattaggttttaatgagatggtaaggggtgcatgatcggtcgccaaggagggagtagaggtatcttatacttgtgggttaaggttggggaatacaagaggaggacatgaaggaggctttggattgggaagaagggaggcaatgagatgtagctgtagtccaggaatagtcagggaagcagataatttagttaaagtgtctcggcctaataaggaaactgggcaggtggggataactaaaaggagtgcwtaaaagagtgttgtctaagttggcaccagagttggggagttttaagaggtttagaagcctggctgtcaatacctacaacagtt

SEQ ID NO: 332759 - DNA, 569 bp, Homo sapiens
aaggtggagagaatctgagtccccagtgacagtgataagctgctgaatcaaccagccctggcaccgtgattacatttggacttgcagatattattattatgcctggaaatttgtgttttttgaaggtgaatacatactgatttttcattaagtattctgaaagttttctacaaaaaaatttaaatttcrtgattattaaaaagctagtgagatttatcaagccaattagatgatacaggcttttgtattttatttaaaccaagcatagaaatacgtatttcttgagtcatagtcacaatctcattcattttctgagatgtatattaacagtttagaatgagaaatttatgagaaagaagataaaggaattctggctgtaaagtgaaagtaatatttacctacttcataaagtgatagtgagaactgaatgagttatattgaaagctcatagagcagtggccggcaggttgtgagttcaacaattattactaacaatagcaattataattattattcttttttgtggcttttgttgctaaaatacttgctatcttaattttaattgtctt

SEQ ID NO: 332760 - DNA, 624 bp, Homo sapiens
aggtatgtgtgtctatatgtgtacacatacacgttatatcttagatacccacacacatactacacactgtaaatatattcctttctattttagttttgaagcttcatctgctgcaaaacataaaaaagcaaggcagagtcaacctcaatttgttgtatactaagatatattggcaagccctctctgctcttttttcagaagcccttaaatgtcatatcctaaaatcagtaagatgggtcattccatccagaatgtatttatcagtttaataggcctctaaaatatattgtcaattccattggaggaagtggaatagagaggagagaaaatgacttttgctccctcctttccccatctctatcctcctgrttagagtcaagctgatgcatttttaagtccaaaagagagtgtagcatttttttccaagtttacattttttctattgggaaaatagaaagattaaaggatgaacagtaaaaattaccaaggtcgtaataactcagaagtaaaaacttctaagactgaggagtgtatttttaagccgaggattaaatctctaactagtgacgaaatctcaataaattttcatcggtgcaaatagcatgaagatttagaagaagaatt

SEQ ID NO: 332761 - DNA, 624 bp, Homo sapiens
aggtatgtgtgtctatatgtgtacacatacacgttatatcttagatacccacacacatactacacactgtaaatatattcctttctattttagttttgaagcttcatctgctgcaaaacataaaaaagcaaggcagagtcaacctcaatttgttgtatactaagatatattggcaagccctctctgctcttttttcagaagcccttaaatgtcatatcctaaaatcagtaagatgggtcattccatccagaatgtatttatcagtttaataggcctctaaaatatattgtcaattccattggaggaagtggaatagagaggagagaaaatgacttttgctccctcctttccccatctctatcctcctgattagagtcaagctgatgcatttttaagtccaaaagagagtgtagcatttttttccaagtttacattttttctattgggaaaatagaaagattaaaggatgaacagtaaaaattaccaaggtcgtartaactcagaagtaaaaacttctaagactgaggagtgtatttttaagccgaggattaaatctctaactagtgacgaaatctcaataaattttcatcggtgcaaatagcatgaagatttagaagaagaatt

SEQ ID NO: 332762 - DNA, 624 bp, Homo sapiens
aggtatgtgtgtctatatgtgtacacatacacgttatatcttagatacccacacacatactacacactgtaaatatattcctttctattttagttttgaagcttcatctgctgcaaaacataaaaaagcaaggcagagtcaacctcaatttgttgtatactaagatatattggcaagccctctctgctcttttttcagaagcccttaaatgtcatatcctaaaatcagtaagatgggtcattccatccagaatgtatttatcagtttaataggcctctaaaatatattgtcaattccattggaggaagtggaatagagaggagagaaaatgacttttgctccctcctttccccatctctatcctcctgattagagtcaagctgatgcatttttaagtccaaaagagagtgtagcatttttttccaagtttacattttttctattgggaaaatagaaagattaaaggatgaacagtaaaaattaccaaggtcgtaataactcagaagtaaaaacttctaagactgaggagtgtatttttaagccsaggattaaatctctaactagtgacgaaatctcaataaattttcatcggtgcaaatagcatgaagatttagaagaagaatt

SEQ ID NO: 332763 - DNA, 559 bp, Homo sapiens
atcctcccttcctgctttagttgtctctgaaaatgtctcctcatctgcctttgagtggtatggaatcactgctgagcctccactattggtgccatcaaagacctcagtgatgccaaggtaatgacactgatgccctccaagagcatcctatctttgctgctgcctgtgataccaatgttgtgtgtggtcytccccagtttcttgtttcactgagctgcagattagtctgttcactgcttgcgccctggaattgaacacttgaatgtgctttaaccttgttgtatcttctacccctcttgttacactctcttacataattatatttccatagatttaccacaaaaaagagatccttctgactttatttttgttttactataatttactgacaagcccttcttcctagaactcaagttcaagtctatgcaggctggactggaggctatcttttctctcccaagcctgatgccatttgatagctcagctgtgctttggtgatctttattcttatgatgaagtttttcctaagagatgtcttcattcctcatgcatagactcc

SEQ ID NO: 332764 - DNA, 596 bp, Homo sapiens
catttctaaatgataggttaatagtgggcccttcaccgatttctaccttcttatgtattcatgatcatccaatgagtcctaactttccagctcagaaatggtgacctccaaagaaaaagaaaaaaaaaaaaaaaaaaaggtccaaagaagaagaaaatgaaatcactctggatttcttaaataaaacataaaagtatatccaactgcatggaccagatactagtaagcttctcaaactaggaagcaatagtttgggctgtgaattaaagacttatttttcatatgtcctttcttttatacatgtgatctttcacaaaaaragagagagaaatagaaggtactatttggttccaataagtaccttgtccaaaagacaacacagcaatgggcactgtgcaccatttgctcaggagtggttctgtagcatcaggaccaagtgggaggactggaattagcaggagccctactcacctacttctgtgactttgggatgaaagagaatccaaatgagcccctgctctgtatggaattgtgactaccattatctacagctacaactccagagttagaaaagataaccctatctgtgaagataa

SEQ ID NO: 332765 - DNA, 562 bp, Homo sapiens
agaaaatgatgcaatgctacatggcgcttaatttaaaatgtatataccgagagtaccaatggcatggtgagaaattatgtgtgggtgtttcattattgttcaaatcatcagaaagctgttatttgtcaaaaaaatactaggaaatatattggttgcctagatgctagtatatttggaatacatgatgaaaacataaagagaacaagataatggactatattatcagtcttaatatatcctgctatcatgaatacaactattttccccctataaactacatcatcccagttgaaattcaaacttggcaaggtcataattacatgaaataactaaagcttgcttagagaataaaaagatttggrggggggggtgggttctttttgtttctaacaaaggaatttcaactctatgtccagtattttttttttttaaagtagctatgaggtcctgtgggattttccctgatcttaactccagggagaaagcatatttatagttaaagcaaagatttgcaaaatattaggcgctgttttgaaatgtttgaaacatcaggcccctggtg

SEQ ID NO: 332766 - DNA, 589 bp, Homo sapiens
aagtgttttgtacaggcagagattttaagagatgttattctgatattaactaagtaaaatggtctccaaacttcaacagtcctctgatattacttattttatggccattctaaggccaggccttgggaaggagctaagtgtatagatagcaaagaaagaagtaaggaaaggagcctctggcatgggtgagggcatgggccccagaaaatcacaggagacctaggtctaagggggaaattggccagagggctcacctgggatagagcaggaccaatagacttcatgaccagcgcttgctctagagctatgtgtgttgcacagcttttgtgatctctgcaagcttcagtaaagctgctkaaccatggaaacctaacgtgactcctgtgacaacctggggaatagaagaagagtctgtgtctgtgcttggggaagaaggaggagccatagcctatagaagtgctgcctggaaggccagtggcaacaatagagcagtttgggggtagtacagcctgggaagagactggacagacaatgaatggaacatctaagcacctaccaggaatccacaaaacaatccagtggcagggtt

SEQ ID NO: 332767 - DNA, 607 bp, Homo sapiens
aatacttaggtgatgggttgatctgtgcagcaaaccaccatagcacacatttatctatgtaacaaacctgcacatcctgcatatatacccctgaacttaaaagttggaaaatatgtatatttgattaaatatatatatcaaatatatatttgatttcattatttcagggaggtatatacaaacatatatataatgaacttggcttttctctcaccaaaaatcagacaaaaaattttgcacaagcagaatcatgaacttaagtatttgggggtaaacatttttcaaagtagccactgaaatggatagtggaagaccaataaaccctctggaaagagtgtgaggagacaaaggccccacatactccatcaagaaagtaatcatcaatttctctgtaaggtttctaaagggaacacsagagaaatttcatatagtagaatccttattagtaaaaaaattgtggctatcttgacatttggccacttcattaattattgtgattcaattaaagcagttttttaaagacaggaggagagttgactgattttttcaatgaattaatttttgttcagcttaaatattcttattatttttgtaatcatttaacaac

SEQ ID NO: 332768 - DNA, 466 bp, Homo sapiens
agaattgtccgggtgttttgggcatgcattcttcataagttcggtattttaaaatcagaagtgagtcaatgacagactttctttctttaaaaaggaaaaaaaatagtgatttttaatattttaaattaggagtaattaaaatgtcctacagaaaggcctgtgctgattctaactttcactcagtgaaattgaaataatctaactccagaggaagcttcaagcaattgaaagaagccatgagccttccatttaaaccagttcaatgtccatctctgstgtcagaaacttgaagaacattcacattttccatttgctttatcaatagctacctcaatgtttctaaactatccatcacaatagtgcttaggtaattagacagaggcgctctggcactgtattatttaaacatcatttccacgcagcacagtcagccctaccatgtgccattattttgatgggcttctca

SEQ ID NO: 332769 - DNA, 533 bp, Homo sapiens
tgctatcaggagggacagtcaatattagataatcaatatcaccagcaaatgtaaaactgcatctgtgacatggtactccactccacatcccaccttccaaaaaatcctgttgtctctgyctctgtcttcataatatagggaatcctcactttgtggttggtaggcttgaatttcagttaccacagtttagttaaataataccagttcaccaaaaacatggttcaaatttcagttaccacaatatattaactgagtaatactaactcttcagttcgtaaatctctacaaaaataatagctgctcatcataatcaatgatcaatcatgtgacttctttcagagcttgtcagtgactcatcatagcacatctcttatgcccagcaaagtgtgcagttgtgttgactccttgtctcttagtgataaatagatatgacattttacaaaaatgtgtaattgaaagaagaaattgacccataaagatgaaagtgtggcaaaaaaaaaaaaacccaaaatgataataatggtggaagtgaa

SEQ ID NO: 332770 - DNA, 592 bp, Homo sapiens
ggtccttttattttctggtaagtttcataaactgtatactgcagaaatgtgtggatgctcaaagcgactcctaaaattgagtatccaaggagggcaattacatcaattcactacaaaatgtactatagtatctttgtcagagttaaatgcctaaatgataaagaatattaatttaaaaattttctggctgatgtaattgtacttattctaagatgatgtaatgtaggctgaaacttcctatgatgcaatgtgaacaaaactcaatatataatatgctttccccttctgaatctcagtcacttgtattcagaatgtatcttattcttttgtagatgcccagtgcctgtgccatagtaggaacgcaatgattatctgttgaattaatgactagagagaggttaataaatacttagggaattcatgacagacaatgaatcattcattcacctttttttttctttagaagcaagctcaattatccagtaccttcaataatataatcaggtcagaatatggagcataataaagaagaacatttggtttgggctggatgcccaggagtagtatkgcatttgtgccacttactagttgt

SEQ ID NO: 332771 - DNA, 558 bp, Homo sapiens
ccttacctaaacagaagaaggctaactgggagatcaaacaacctgttgttttttctcgttcagatacccttgatctatataatgttttgtcttgatgttcttgttttgggtgtgtgtggtgttttttttcattgttgtttttttgcttgtttgtttgcttttctttgacaggctcttgctctgttgctcaggctagtgtgcaragaaatgatcaggactcactgcagcctcaaactcctggactcaagggatcctcccgcctcagcttcgcaagcatctaggactatagacacgcaccacaatgcccggctaacatttttatattttgtagagatggagtctcactatgttgcccaggctggtctcaaaatcttggcctcaagtgattctcctgccttgacatcccaaagtgctgacatgacaggcatgggccactgaacccagcctgttttgtgttttttatttgaatacttattcacacaaaggaaaataagataaaacaaaaaattcactcctctggctttgggtaaaagttaggaaaactgacaatattggaca

SEQ ID NO: 332772 - DNA, 582 bp, Homo sapiens
accgctgggtatattcaagcacttgacctgaaaagcaaagttgttagataaattttaatgtacttgctttgtatgaagtcattcagcttggacagaggtagtgaaagacgagatttgaactaaagaaataaagtctaagacttggtttcaggcacaaagtgtgattatagatgattaggatatatgctctaaagatttacctgaggacaaaactaagagaggatctaagaggaatgactgagaatgagaaatggtatcttagaagaggtacaatttaactttgtgcctctcaaagcaaagcaatttggtgtcatcatttttttccttgggtttgtgcatgtaaggcactacatttttagtgtggtatttatctttgcccattgcattcttctcaaaaagacagcaatcaactgagtagtgataggaaacaraactccagaaaattagctgtagctcattaaaaagtgaatcaggcttttaattgatcttaaactgataattaatttttcaaacaacaaaaataattaaatgcatttcctcaagtatttgttagtttcataacaatcaggatacagacagtaa

SEQ ID NO: 332773 - DNA, 576 bp, Homo sapiens
tgtgattaaccataatacaaatggggacacattatgcatataaatgaataaatatatctttcaaaaggtattacataatgtagtttcttgcattatatttgtcattatggttgtatttgtcctttaataaattttacattttcagaagagtcccattattttacattttgcacaccagagcacctacttagagtagacacaatatatatccatctttttttaaaaactctaagttctgggatacatgtgcagaatgtgcaggtttgttacatacgtatacgtgtaccatggtggtttgctgcacctgtcaacccatcacctaggttttaagccccgcatgcattaactatttgtcctgatgctctcccttccctcccctgccctgctgacaggtctggtatgtgttgttcccctccctgtgtccatgtgttctcattgtttaactcccatttatgagtgagaaaatgtggtgtttggttttctgtaccygtgttagtttgctgaggatgatggcttccagcttaatcaatgtccctgcaaaggacatgatctcattctttttatggctgcatagta

SEQ ID NO: 332774 - DNA, 367 bp, Homo sapiens
ttgtttatctcaaccacttttatcttaagcctttgctatctacacaaagggcacatgtcaacacatgcaataaggtagatccagaagttccctccgtgcaactgtgaggctgatgtgaaatgtactgacaactgtccctaaccctggtgccaaaaacatagtcccatctcgctgctgctgcmggcagggtgggctgtactttgctgcaagtattcctacatacttctaatttgaatttttgcaaagcatttaaagtatttctgtaaacatatcagaaatacaggaaagcttgccacaccctgtttaagaggttattgtctctgatactgtagtacattttaatagggttgttttccatctattctta

SEQ ID NO: 332775 - DNA, 526 bp, Homo sapiens
ttggaccatctttccaaggatattggtataacaaacagcccaggataatagatattttctcccttggagaagagggaaagtgtgcttactatctgttatttaaaaattgggttccttatgcaaacttaggtttatcttctgtaatgcaacctactgagtgtgtaagcactatctgggcccatctgcatcttacccctgagatctggtggcaaggcgaagcgacccaaacatgctgatgtctatgctttttgctgtattataaataataaagtcatttttctttatctcaggagtcttgagtcttctgttaacatccacgaaactgtggtaccttctgaccctgatgtctcaggtattcaatcagcatccataaaactgacttacgttaccttgttaacatgccagttgggtaaaaactcagactcttcacagtttttgaaagataactcaggaawatgttattttaatactataataaatatttctcttatatgctattttaaaaaatactatcctgtattaattt

SEQ ID NO: 332776 - DNA, 647 bp, Homo sapiens
tcacaccttatatctccttatgctacgtttgaacaaatgatcattgaaactcaaatacacaagttttcagttctgctattatatttcatcttgyttattttgaccttgagtgacacactgttgagataattctgaatcttgattctactttgtgactatagaagggttccaacataattttatgatcatgagatatcctgtagaaattactgaataagttttacaattatattttgaaacaataattatgtggaagctttagtttgctacctgtggaagtttagcaaagcctggcatgggcggggtggaacccaagtacaaaacctctgatgaccattgcacagatttcatattcctgtgatatttccttttgctatttttaggagtatgataaattgatgatctgatgtctctttaaagaaatgaattaggaagattatatcttccaaaatgtacagaacaaaggaattaaaccacaccagattcagtgttatcaatgataatatatggctattggagctaaaaagctttcatatgccctcttcatttctctgagtaattagatcctctcattagaacacaatcaatttatcatgttcaatgtacagataatgtgatgactgatgtctttgccacaagctacatga

SEQ ID NO: 332777 - DNA, 557 bp, Homo sapiens
ttaattgatttctgacttaatttttgatgagaaaactgtggtaatctttgctcctatgtacaaaatatgtattttctcctctgactactttcaaaattttctttttttcactggtattcaacaatttcattagaaaatactttggtatcgttgtcttcagatttatccagtaaggttttttacagatcttgaatcagtaagtttatttgtttcatagaatatggaatttttttaagcacttatttttctctctttttgaactccaatccaygtatgtttaacatcttgatatttttaagctgtttactgaagttcctgtcagttctcaccatttatctttctctcttcttcactttggatatttgctattgctgtattttctctgatctcttttgaatagtgttaaatcagctattaatcccatccacagaattcttcacttctgataattgtctttttcacccacacaagttcaattttttcttttatatacttttcatttctctcttcgttatttttatgcttttcttttaattttaggcttgcttatattatct

SEQ ID NO: 332778 - DNA, 596 bp, Homo sapiens
ttcacacagcttttatctgacagtttttaggtctttctgaggagaatttatgacagaaacgccatcagacaagcaggccaacagttgcgtttggcgtaattacgcacttccttgagggaaggaaacagtcaatctcacagtttttagtcaggctgacactatccacatattttgcaaggtacattcacaaagttcaagtagttgattgactgaagctgagcaggaaaggctaaatgtcaggcttttaaggtgaaactagtggcagctctgtagcagcgtggcaggtagagtgaagtctggaattaagagtgacagacgaatggygggtggtaaagaaaagactgtgtttgctggcagagaaggaagttgggctgtgctcagagcattcatggggtttgattagtgatagaaaggctaaaatatatacagatttaagtgttcaaaattatcttaacattccaaagaaaaactgtcagaattttactaaaataataacttttaatccctttacttttaaaatgttaatatgaattccccttttttttaaacagttttcaagatgttgagatttttgtctaaagattattgtacttatt

SEQ ID NO: 332779 - DNA, 483 bp, Homo sapiens
tactaaaataataacttttaatccctttacttttaaaatgttaatatgaattccccttttttttaaacagttttcaagatgttgagatttttgtctaaagattattgtacttattgcattttgtcactctagtctctgctttaagagctagggaaatgtgagaaaatataaattatatcttaaaggggcagagattagagtaaatacatttaaagataatgagaaaattaagaaaatttgtgaaaagttttgaytcatcatatttttgtgtgaaaatgaaaaagatatcctaagccaatcaagattttgaatagtctaacaaaacatagtaaatagagcacccttaacttaataaaataaagtatctaatgtgacactggcatgggaaacttagggtattgcttttacagctggaaacctctgtggctggtggtgcctttgcctgagtttttgcttcggcccactgggcttgttccacccact

SEQ ID NO: 332780 - DNA, 571 bp, Homo sapiens
ttttaaaaagaatcacaattacataatatatacacatacataacaatgtcttcaaattttttcagttaggtatggctatgttgcccagactggtgttgaaattttgggcttcagcaatcyttccacatcagcctcctgaatagctagaactacagatgtgtgaaatgatagccaatttaaattttttttcgtgtgtgtttatagtgttccaaattagcctaccctgctgattgactgttaccaaatttctgtaaattattgtatgtgttttccttgtaggataaaataaaatcaaggggtatatattaaaaataaaaatttattagactagaaaaaagaatggggtgttgcttgattctagaatcacaattaaaaccaattaggtctttagaaaaccttcagcatggggcttagaaagttatggctgatggctataccatggcacctctaaaatatttgtaaaaatttatgatattttaaaaagtgatggtatacctaatgatattcagttacatcaaggaacaggaggaaatatccttagaggactgtttgtatactgaaggtgttgatc

SEQ ID NO: 332781 - DNA, 571 bp, Homo sapiens
ttttaaaaagaatcacaattacataatatatacacatacataacaatgtcttcaaattttttcagttaggtatggctatgttgcccagactggtgttgaaattttgggcttcagcaatccttccacatcagcctcytgaatagctagaactacagatgtgtgaaatgatagccaatttaaattttttttcgtgtgtgtttatagtgttccaaattagcctaccctgctgattgactgttaccaaatttctgtaaattattgtatgtgttttccttgtaggataaaataaaatcaaggggtatatattaaaaataaaaatttattagactagaaaaaagaatggggtgttgcttgattctagaatcacaattaaaaccaattaggtctttagaaaaccttcagcatggggcttagaaagttatggctgatggctataccatggcacctctaaaatatttgtaaaaatttatgatattttaaaaagtgatggtatacctaatgatattcagttacatcaaggaacaggaggaaatatccttagaggactgtttgtatactgaaggtgttgatc

SEQ ID NO: 332782 - DNA, 571 bp, Homo sapiens
ttttaaaaagaatcacaattacataatatatacacatacataacaatgtcttcaaattttttcagttaggtatggctatgttgcccagactggtgttgaaattttgggcttcagcaatccttccacatcagcctcctgaatagctagaactacagatgtgtgaaatgatagccaattwaaattttttttcgtgtgtgtttatagtgttccaaattagcctaccctgctgattgactgttaccaaatttctgtaaattattgtatgtgttttccttgtaggataaaataaaatcaaggggtatatattaaaaataaaaatttattagactagaaaaaagaatggggtgttgcttgattctagaatcacaattaaaaccaattaggtctttagaaaaccttcagcatggggcttagaaagttatggctgatggctataccatggcacctctaaaatatttgtaaaaatttatgatattttaaaaagtgatggtatacctaatgatattcagttacatcaaggaacaggaggaaatatccttagaggactgtttgtatactgaaggtgttgatc

SEQ ID NO: 332783 - DNA, 604 bp, Homo sapiens
tcagtgtcaaacaaataattttcaaaatcagggccttggcatttgctgtgtgccttgcctggaatattcttccctggttctttctcatctttcgagtcttagctgaaatttgaactcaactaccaaatctcctaaaagcttagactaactaccttaattaaagtaatttccttcttccagtttttctatttgtttctttcttatcataattcaacattatttttgttacttcatttattatttatatttcattattgagtatctagtatgtgccaagcactgtcaaatagaccatgttcccatctaaaagaattgtcagggctgtaatctcctaaaagcttgggctaactaccttaactaaagtgatttccttcttccaggttttctgtttgtttctttcttaccataattcaacattatttttgttacttcatttattatttatatttacttattgagcatctaatatgtgtcaagcactattaaatagaccatgctcccatctaaaagaattgccaggggctggacagggtcacgcctgtaatccyagcactttgggaggccaaggcaggagaatcacttgagcccatgtgttcaagaccag

SEQ ID NO: 332784 - DNA, 600 bp, Homo sapiens
taataaaaatgacctgaccatgctcactgagtacatgaccttttttttgtaacacgacatgccggctgccaacgggaaaggtgctcatatgactttatgaaatgtgaaatgagatttaaaaaacattgttttaaacacacatctataatttcaagtgcttgttcaagtggaatatctaagtgatatactcagaatcttaagtgctctaaatatgcttcctcagcactaaaataccacaaggtttaatgctttgaatgaagtaccaggrtttttgaaacaccaccaaaccatgagacaaaattcccataaataatttcctctacttgttaagaaaaaaaaatcaatgaagtacaactctagggcatatttataaaacacatcccactgctattacaaaacatgtagaaatacttacgaccttactgccatcaaagattggattaggaacaattcacacctagctcctcagttgtaaattcaactctttagctttggagcgtgatatacttgtttgactttcatttgatgaattgatgaaagaagtcccatgagacaactctccataatttctggctaattctcttatttgaatactagagc

SEQ ID NO: 332785 - DNA, 600 bp, Homo sapiens
taataaaaatgacctgaccatgctcactgagtacatgaccttttttttgtaacacgacatgccggctgccaacgggaaaggtgctcatatgactttatgaaatgtgaaatgagatttaaaaaacattgttttaaacacacatctataatttcaagtgcttgttcaagtggaatatctaagtgatatactcagaatcttaagtgctctaaatatgcttcctcagcactaaaataccacaaggtttaatgctttgaatgaagtaccaggatttttgaaacaccaccaaaccatgagacaaaattcccataaataatttcctctacttgttaagaaaaaaaaatcaatgaagtacaactctagggcatatttayaaaacacatcccactgctattacaaaacatgtagaaatacttacgaccttactgccatcaaagattggattaggaacaattcacacctagctcctcagttgtaaattcaactctttagctttggagcgtgatatacttgtttgactttcatttgatgaattgatgaaagaagtcccatgagacaactctccataatttctggctaattctcttatttgaatactagagc

SEQ ID NO: 332786 - DNA, 585 bp, Homo sapiens
ataacttatgccaagccttaggatgaatgctgagtcagcagatatattaaacaaacttaagacagtatggttcatggctaaaaatactacttatattgtcttattctgtatcttcatttggtgtgaaacatgtacttaaaaaacattatgaataagtaaatgagtgaataaacagagaaagtaaaatagggaaaaaagatgaaaatgaaaaaaaaaaccaaaagaataaaattataagtatctagatggctgacaaagaatgacacttcccatttataaacaatgtatctttttgtcattgaataatacactgaagaattggcctccttgcactttggtcaatagagactttgattgattatgtctgttggaatgtgtaaagaagacaagaactccgagattcctaaaagcagagtagccaatactatcttatgcttaccaatttttaaacatgatatgtgaatatggatatggattacaagaaaacagggaaaattataatttttrtgattaaaagtggcagtcagtgtaatacttattttttctatgtaatataaaatagggttataagacaaaatgtaataa

SEQ ID NO: 332787 - DNA, 611 bp, Homo sapiens
gagagcaggaagggatgctagcctttggtaaatgaggaaaaactttgtattacattttacctcatttattccttcattcaacaaatataaacaggtaccctgacctgagtactatgctatgttttcagaagaatggcatgaacaaaactgatatgatccttatcttcatgcaaattatagccttgtcagagttctgtatactcacttacttgaatacattctcaatattttctttacatgattgagttaaatactacattaaaaattaggaaagatattgctattagasaaggtactctgataataaattctcaatagaaagtaattcttagtatcaattccataaaaaatatagttaagtgtatttttgcttaataagtacagaattctcttaatctttgcttaaacttggaatcctaaagtcaaatatactctacttcaatttttctctatgatgactttatttttgtgcctgtctttaaaaaaaattaactatactgtcaaaattttcccactttccaagtgtatagaatcaataggttatctaacttttgcaatctggagtctgtagttataaatataattctagcagttcttttttatatttgaac

SEQ ID NO: 332788 - DNA, 648 bp, Homo sapiens
acaaatttcattaaggggtgacgtctggtggctagtaatataattttgaggggagatttagcacaggagagaggctattacagtgacagaaaacacagtgagaaaatamagtgatgagaaacaaaagatgtatagaaggcatagaaagtaattccgaagactgttgcaatatttttcaaatgtcagtcatacttgttctaccttaataattttgtcgtattttccatatttgcacatacatatttataatatttgcatgttttttaaaaactattttaaatatttcctatcacatcatacagttttattccttaaatatatttacttttagacaattttggctcaagcaacatacacttgcctctcacagttctggaggctgaaaagttaaagatgaaggtactgggaggttcacttcttagtgaaggccttcttcctggcttgaagacagctactttctgcatcctcacgtggcaaagagaggaagagccggtgttttttccttttgttataaggacactaatcccatcattgaggctctgctcttatgacctcatctaagcctaattacctccaaaaggctctgcctccgaataccattatattgcatactaagatttcagcatatgaattttatgtggacacaaa

SEQ ID NO: 332789 - DNA, 556 bp, Homo sapiens
ctttttttaaatttatttttgtaaattgacagaactgacagatatatagatatggattttttattttttgtagagaaagggtctcactatgttgaccaggccactctgaaactcctgggcttaaacaatcttcctgccttggcctcccaaagtactgagattataggtgtgagccactgtgatagataaaattgtatttactatgtataatgtgatgtttgttttaaagtatatgtacattgtggaatgactaaatatcactaattwaaaaatgcattatgtcacatagttataattcttgtggttagaatacttttttagaactttttgagaatatattattcactgtaattatatagtcaccatgttgtacaattgatctcttaaacttatatcttctaactaagattttgtgttctttgaccaatatctccctaaccaccattgcttcctactgccccagcctctggtacccaccattctactgtctacttgtatgaggtcaactgttttagaaataagtcatgcacaaaaaagacaaatatgatacagtatt

SEQ ID NO: 332790 - DNA, 556 bp, Homo sapiens
ctttttttaaatttatttttgtaaattgacagaactgacagatatatagatatggattttttattttttgtagagaaagggtctcactatgttgaccaggccactctgaaactcctgggcttaaacaatcttcctgccttggcctcccaaagtactgagattataggtgtgagccactgtgatagataaaattgtatttactatgtataatgtgatgtttgttttaaagtatatgtacattgtggaatgactaaatatcactaatttaaaaatgcaktatgtcacatagttataattcttgtggttagaatacttttttagaactttttgagaatatattattcactgtaattatatagtcaccatgttgtacaattgatctcttaaacttatatcttctaactaagattttgtgttctttgaccaatatctccctaaccaccattgcttcctactgccccagcctctggtacccaccattctactgtctacttgtatgaggtcaactgttttagaaataagtcatgcacaaaaaagacaaatatgatacagtatt

SEQ ID NO: 332791 - DNA, 585 bp, Homo sapiens
tattcactgtaattatatagtcaccatgttgtacaattgatctcttaaacttatatcttctaactaagattttgtgttctttgaccaatatctccctaaccaccattgcttcctactgccccagcctctggtacccaccattctactgtctacttgtatgaggtcaactgttttagaaataagtcatgcacaaaaaagacaaatatgatacagtatttgtctttttgtgactggcttatttcacttaatataatgtcctccagattcayctatattgtcacaaatgacatgattttcttcctcttcatggttctgtagcagtggtccacaacctttttgggaccagaaactggtttcatggaagacaatttttccatggactggggttgggggatggttttgagacgattcaagcacattacatttattgtgcaccttatttctattattattacattgcaatatataataaaataattatgcaactcatcataatgtagaattggtccctaagcttgttttcctgcaactagatggtcccatctggagatgatgagagacagtgacagatcatcaggcattaga

SEQ ID NO: 332792 - DNA, 604 bp, Homo sapiens
aattaagattaataattaacagttaagattgttttgccactagatttactgaaaaattgcaaagtaaaaatttagttaagaattaaactcgattctccagccaagatggctgactagaaagcaactagagtgtgccactctcagggagagaagaaagaatggtgagtaaacacaaagtcttcaacgggatcatccaggggtrcacactaggcttcaccaagaaattaaggtgacctactgagaacagagaggagtgagataggacaatggcctgagagtggcatggagccaggggaggccccccaccacagagaaaaggtgaggaagtgagagtccccaaggacccacacttctgccttgaacctttgcaaccttgagctaaagagatccctcatgagctcctcagtggggccttcagactgacatggagagctgtgtggtctcggcagagctgccattcaggcacacaaggagttccaggagccatggatccctgagcaccatggcaccagtggctacagctctagcaaggggtgaggccaggctccttcacatgcccccagaataggggccatatccacagggctagacaatggatggactg

SEQ ID NO: 332793 - DNA, 591 bp, Homo sapiens
ggggccatatccacagggctagacaatggatggactgtgggcctagtcttcactgaacctcatcagatggtgcccactgcactggcaccctagcacagccaccccaggtccacctgagctctctggccaggagcagctttgcacttccctggtatggagctcccagggaagtgggagtaggcaggtcaccatttctcctgctttgcagccctagctcctattgtcctcaggctcaggggggagcatagtgatcacagactaacagggacacccagcaccttgcagctgccttacggaaaagcagtcagattgttttccatgtagggcctcctctactatgcctcactggacagggccccctgacytggtaccccaaggacccttccaccagggctttgggtcggtagcagctctgtgcttccctgggagggagctcccagagggagccagcaggctgctatttttgctgctcagcaaatcctatgaatatacacaccatggaatgctacacaggcacaaaaaaagaataagatcttgtcatgtcaagggaggtgattggaatatgggggcagtttctaccatgctgttttc

SEQ ID NO: 332794 - DNA, 591 bp, Homo sapiens
ggggccatatccacagggctagacaatggatggactgtgggcctagtcttcactgaacctcatcagatggtgcccactgcactggcaccctagcacagccaccccaggtccacctgagctctctggccaggagcagctttgcacttccctggtatggagctcccagggaagtgggagtaggcaggtcaccatttctcctgctttgcagccctagctcctattgtcctcaggctcaggggggagcatagtgatcacagactaacagggacacccagcaccttgcagctgccttacggaaaagcagtcagattgttttccatgtagggcctcctctactatgcctcactggacagggccccctgacctggtaccccaaggacccttccaccagggctttgggtcggtagcagctctgtgcttccctgggagggagctcccagagggagccagcaggctgctatttttgctgctcagcaaatcctatgaatatacacaccatggaatgctacacaggcacraaaaaagaataagatcttgtcatgtcaagggaggtgattggaatatgggggcagtttctaccatgctgttttc

SEQ ID NO: 332795 - DNA, 591 bp, Homo sapiens
ggggccatatccacagggctagacaatggatggactgtgggcctagtcttcactgaacctcatcagatggtgcccactgcactggcaccctagcacagccaccccaggtccacctgagctctctggccaggagcagctttgcacttccctggtatggagctcccagggaagtgggagtaggcaggtcaccatttctcctgctttgcagccctagctcctattgtcctcaggctcaggggggagcatagtgatcacagactaacagggacacccagcaccttgcagctgccttacggaaaagcagtcagattgttttccatgtagggcctcctctactatgcctcactggacagggccccctgacctggtaccccaaggacccttccaccagggctttgggtcggtagcagctctgtgcttccctgggagggagctcccagagggagccagcaggctgctatttttgctgctcagcaaatcctatgaatatacacaccatggaatgctacacaggcacaaraaaagaataagatcttgtcatgtcaagggaggtgattggaatatgggggcagtttctaccatgctgttttc

SEQ ID NO: 332796 - DNA, 574 bp, Homo sapiens
ttcctctttctgatcattttcttacgtcagtctccctcccaaactgataatatgacaaaagaaatgtgtggctattcraaagcttactaatttatataaaagatcagagagcctgaaaatagcctaagatatttacctagtcaagaaccaaaggaagatgtaagtgagggagaaaagagtattgagatgtagcttcttatgaataagggagaagtagaccacatcaagaaagtatttttatgcatgtttatctttcatcaaaactctggactgaagaatggagatgagagcaattgtgctatctttccctgccctgtggaattgcttggtatcaagttttgaacctgaaacttttaagtaattaaccatgtattacagttattttttaggtttgttttgcttcattattacaattatattctcttcggaggcaggaacttagtcttaaacttctgaatctgctaactagtggatggatatatcatggtattgaatgaatattaattaattgattaaggtcaagatgcagagttgaaattattcaattagcagataacccagattgccatgttca

SEQ ID NO: 332797 - DNA, 614 bp, Homo sapiens
ctcctccacccccatcttatgaagggtatatttcattatatagttttgtgtctaagaattgtttcattacattttgttatacttatcctttttcttttctttttaaaagataattcaccatcttgaattacctctatttctgaaaatttgatcacatattaaaaacaaatagactactttgactatataatacaccataaaagtaacaatacattataaaccacaaaattaactaactatttctatgcttttggtgacatccttttttcattttgctttgtttttcaagaaagcatgagaagcacagagtaggtacttgtactggctgttgaatgaactgttgttatatttatgttaagtctataaaaaaagaaagctattaatttattatttttgtctctaaagscactgaccatatcaagacttatattttttcaatatttactttcaaattttatgtttatattttaattttgattgaaaaagtttaattgtatatgcttttgggataaaatatgatacaatgatgtatgtatacaatgtgtactgattaaatcaaacttattaacatacccatcagcttccttacccgtaatttttttatggtgagataa

SEQ ID NO: 332798 - DNA, 614 bp, Homo sapiens
ctcctccacccccatcttatgaagggtatatttcattatatagttttgtgtctaagaattgtttcattacattttgttatacttatcctttttcttttctttttaaaagataattcaccatcttgaattacctctatttctgaaaatttgatcacatattaaaaacaaatagactactttgactatataatacaccataaaagtaacaatacattataaaccacaaaattaactaactatttctatgcttttggtgacatccttttttcattttgctttgtttttcaagaaagcatgagaagcacagagtaggtacttgtactggctgttgaatgaactgttgttatatttatgttaagtctataaaaaaagaaagctattaatttattatttttgtctctaaagccactgaccatatcaagmcttatattttttcaatatttactttcaaattttatgtttatattttaattttgattgaaaaagtttaattgtatatgcttttgggataaaatatgatacaatgatgtatgtatacaatgtgtactgattaaatcaaacttattaacatacccatcagcttccttacccgtaatttttttatggtgagataa

SEQ ID NO: 332799 - DNA, 576 bp, Homo sapiens
tattgatagtgtaatggtttccatttgtttatttatacttctttaattttattttaaaaaagcttttggtttattccattttaaattttaatcattatattaattaactttaatatttctattaaaatttttttatgctttcttatcttaatgaccagcaagaggctagtgcaagtaggtggtattgttgagtatttgatagaaatttacattaaaaataagacytgattgtaagacctcctttcagctgctgcaaccattgttctgactcctccagggaaatgtcatttttttctaaacataggactactaaagcgcaaagcccattgtaattcacagacacctaattaataatcctcagtacaaaatgactctctccatatagacaatatattgaattactttgaaggtgctgtttctaaatttatgaggaaaacagtgtcctaaattttaagctatacgataggccatgcaaataaaatgtcacagtacagagggagaaagtacatgaaagttgtatcgggacaggattattctcatatgtattcctgccctgaccctgtgtaggaatcaggt

SEQ ID NO: 332800 - DNA, 576 bp, Homo sapiens
tattgatagtgtaatggtttccatttgtttatttatacttctttaattttattttaaaaaagcttttggtttattccattttaaattttaatcattatattaattaactttaatatttctattaaaatttttttatgctttcttatcttaatgaccagcaagaggctagtgcaagtaggtggtattgttgagtatttgatagaaatttacattaaaaataagacctgattgtaagacctcctttcagctgctgcaaccattgttctgactcctccagggaaatgtcatttttttctaaacataggactactaaagcgcaaagcccattgtaattcacagacacctaattaataatcctcagtacaaaatgactctctccatatagacaatatattgaattactttgaaggtgctgtttctaaatttatgaggaaaacagtgtcctaaattttaagctatacgataggccatgcaaataaaatgtcacagtacagagggagaaagtacatgaaagttgtatcggsacaggattattctcatatgtattcctgccctgaccctgtgtaggaatcaggt

SEQ ID NO: 332801 - DNA, 594 bp, Homo sapiens
acgaggcattgaggaccacactttaaaataataagagccatctatggaaactcaatagccagcatcattctaaacaggcaaaagctggaaacattaccctcaaaaaccagaacaagacaaggatgcactctctctctctcataattcctattcaacataataatggacatcctagccagagcaatcaggcaatagaaagaaataaaaggaggccaagcacggtggctcacgcctgtaatcccagcactttgagaggctgaggtgggtggatcacgaggtcaggagatcgagaccatccaggctaacatggtgaaaccctgtctctactaaaaatacaaaaaattagccaggtgtggtagtacacacctgtcatcccagctgcttgggaggctgaggcaggagaatcgcytgaacctgtgaggcagagcttgcagtaagctgagatcatgccactgcattctagcttgggcaacagagtgagactccatctcaaaaaaagaaagaaagaaaagaaaaaagaaataaaagacatacaaacaggaagagagcaagtcaaactattgctgtctgcagacaatatgcttttgtaactag

SEQ ID NO: 332802 - DNA, 194 bp, Homo sapiens
tatcagagaggcttactaatgttgcaccccatgcattatcattttttctcttattgacttggtaccctcttcattgcttttctcaccacttgacattatatatatatatatatatatatatatatatatatttatatacgcctatgtctatgtctatatcgctaaccctatatctgkgtgtacatctatattta

SEQ ID NO: 332803 - DNA, 539 bp, Homo sapiens
gccctttccctagagacagctgaaatacaaaggctggttgaagcagaggtgcaaataatcagatctctctcatcaatttgggacaactccaaagcttcctacttctctgctttgtsactccttcctaggtgtttttctccagtgaattaccgaatacatttctgcactcacatcccctttcagagtgtttcttgaggaatcttacctaagacatcacagaaagattaaacggctttattaggtttcatttacacacaataaattgcacatatttcaactacacagtttaagttctgacataggtatacatccatggaaccattattacaacagcatattgtacctatccattctttccaaaagattaatcatgcctctttgttgtccctgcctgctgctccactcaccaaactcctgatctgaattctgttactaagcattagtttatgtttcctgaaattttatgtatgttgaatcacacagtatgcaatctttttggtctggcttctttcacttagcatatgtattttgagattcgt

SEQ ID NO: 332804 - DNA, 539 bp, Homo sapiens
gccctttccctagagacagctgaaatacaaaggctggttgaagcagaggtgcaaataatcagatctctctcatcaatttgggacaactccaaagcttcctacttctctgctttgtcactccttcctaggtgtttttctccagtgaattaccgaatacatttctgcactcacatcccctttcagagtgtttcttgaggaatcttacctaagacatcacagaaagattaaacggctttattaggtttcatttacacacaataaattgcacatatttcaactacacartttaagttctgacataggtatacatccatggaaccattattacaacagcatattgtacctatccattctttccaaaagattaatcatgcctctttgttgtccctgcctgctgctccactcaccaaactcctgatctgaattctgttactaagcattagtttatgtttcctgaaattttatgtatgttgaatcacacagtatgcaatctttttggtctggcttctttcacttagcatatgtattttgagattcgt

SEQ ID NO: 332805 - DNA, 539 bp, Homo sapiens
gccctttccctagagacagctgaaatacaaaggctggttgaagcagaggtgcaaataatcagatctctctcatcaatttgggacaactccaaagcttcctacttctctgctttgtcactccttcctaggtgtttttctccagtgaattaccgaatacatttctgcactcacatcccctttcagagtgtttcttgaggaatcttacctaagacatcacagaaagattaaacggctttattaggtttcatttacacacaataaattgcacatatttcaactacacagtttaagttctgacataggtatacatccatggaaccattattacaacagcatattgtacctatccattctttccaaaagattaatcatgcctctttgktgtccctgcctgctgctccactcaccaaactcctgatctgaattctgttactaagcattagtttatgtttcctgaaattttatgtatgttgaatcacacagtatgcaatctttttggtctggcttctttcacttagcatatgtattttgagattcgt

SEQ ID NO: 332806 - DNA, 490 bp, Homo sapiens
tagttttacatatattatcttccaattatttggattcctcatttcatttctctcctcatagtgtgggaagaggaaagatttgagatgaaatggagaaacatcaagatgaaatgcagagtatttagacaagattatccaaatttgttgaaataaagattgggattccttggaatacctctgatttctaacatttcaaactagtgctgctatttaggcaatgatcatagttttcagtgacttactggcatatacaccatagtccaagtcacacttggaaagttgagcaagtttgtcattctggtctgtgtaactttcattcctgaacaatgatcaccacctccttctctttcatctaagacatgtggtacatatttctctctgacaggtcaaagtcaccaccttgtcactctaagcygatctattcttgtacccaaaatatatcctcttcctctgtaacttgagaattcaggcagataatattatttaataa

SEQ ID NO: 332807 - DNA, 621 bp, Homo sapiens
attcttgtacccaaaatatatcctcttcctctgtaacttgagaattcaggcagataatattatttaataaagctgcagaatttcacagaagcatggaaatgaatttaacttttgtagttatattttggggtttggttgggctgctatatgacattacagttagagatagcttgatatattctgggaattttaaatagctccatattactaaagagcaagagtgaggagtacaatatgaacaagttgagatatttttaataatccagattaagatacctgctggtactcctaaatttctaacttgaaaraaaaaagaataaccataatattgaccaaaactagggaaaaaaattgaagtctttgtgatagggtgtcttgagttgagttctctggaagcagattttgagtaaaagatttgagtgaaagtggtttattgaggacgtattgccataggacactgacaaggaagtgggggaagtaaataaggaaggtgaaaaaaagctcagtgagcatgcaacctcaggtaaagttcctaaatgagatttctggaatatgaagcctcagagatagcctatctgaaggcaaggcaactaggcttctctacacccttgctcacagtca

SEQ ID NO: 332808 - DNA, 557 bp, Homo sapiens
ctagtcaccaactagtcttctgagcagcagttgagttcacagctcttggagcagcatggagagaggaaacacctccatgacaaaggaagcagaccagtcactccaccccacagaaactcacaaatgttggatctgtggataggcaatacaacccctgaagaactcaaaaatactgagagataagttttaaawttttgcaagggcaacacttccttcagaagcagactgtattcaaaatacaattagattggttacactatcactgtcactacgttgtgtgatctactgcttcatatttcaaaggacatctttacatgtattattttattaaaataatctagaaaaatgaacattcacccatttctccagttttaccagtgagttccaagtgaagtacactaattcagtaaagaagcagtaaaaagtgtggcatgaacataatgaaattgcctacctttctgggtgaagctaagaattatgaggcttcagagcatttccccagaatgagaactagattctcctgcttcatatgtcccaatcaatggcacaactgccca

SEQ ID NO: 332809 - DNA, 557 bp, Homo sapiens
ctagtcaccaactagtcttctgagcagcagttgagttcacagctcttggagcagcatggagagaggaaacacctccatgacaaaggaagcagaccagtcactccaccccacagaaactcacaaatgttggatctgtggataggcaatacaacccctgaagaactcaaaaatactgagagataagttttaaaattttgcaagggcaacacttccttcagaagcagactgtattcaaaatacaattagattggttacactatcactgtcactacgttgtgtgatctactgcttcatatttcaaaggacatctttacatgtattattttattaaaataatctagaaaaatgaacattcacccrtttctccagttttaccagtgagttccaagtgaagtacactaattcagtaaagaagcagtaaaaagtgtggcatgaacataatgaaattgcctacctttctgggtgaagctaagaattatgaggcttcagagcatttccccagaatgagaactagattctcctgcttcatatgtcccaatcaatggcacaactgccca

SEQ ID NO: 332810 - DNA, 589 bp, Homo sapiens
aaaagaccattatctgataaagaaatttgacataagcaacagagaaagcagtattaacacagaaaacttaaaactactaagctctttgttaacagttattagtacagtgtgaagtagtctgtcaaaaataaggttttgttatcactaaacctktctgaacagaatttaaagaatagatatattttgaaattgaaagaagttgcaaatacaattcagaaataggtaagaatttttacagataatatttcataaaacaactgtttgggtgaattaaattaaataaacttttttttttactagtaaacctattgtagaatgctagcttatataactaaagggtaagtctattcagttctttttgtcactacattacaagttactattgcatcaacaaaatatgactggtttcatattaatgtaattatattattggacaatttcttagccataaataaaatttagtttttttctttatcttctacctaatcatatcagtctctttctaatgtccctccaaaccccattcatgtgacatgaatatgaaggtaaaataaatacagaaagaaaaggaagcctgagaaaaccaagc

SEQ ID NO: 332811 - DNA, 581 bp, Homo sapiens
gcacatagacattttttctgaggaaaagtgtaaaagtgtgcatcagattttcaaagaggtgtaagacttcaaaaacattaataaccactattctaagaggtcataaaaagttaaagacttatttttgtcagtagtgaaaacaaacaaaaaaaagtatcagaaaaggaaaaaaattaaacagaaaccattgcccaagaaatgaaatttaattgccttagccatgatataaataagtttacttttcaaacactgagccaatgtctactgaatgcgccattctatcttgtttatattaatcttgaaagaaggaacacctgacctcaaaactggagattccttacaaaagctagtattgagycatcattgctacacattttgttatatatgtttgttatttaaacattgtctcacatatttcttgctagcctgactataagctcccttgaataagatccatgccttttggatctcctgtaccagttatgatagatttgtcttcgataaataccagtcagtgtgaaataacatttttatttgatggagagattaaaatggtatctatttaataggcttgcattaag

SEQ ID NO: 332812 - DNA, 644 bp, Homo sapiens
ttgctagcctgactataagctcccttgaataagatccatgccttttggatctcctgtaccagttatgatagatttgtcttcgataaataccagtcagtgtgaaataacatttttatttgatggagagattaaaatggtatctatttaataggcttgcattaagacagtctaatcctaacagagtcrctacatcatatgcaattaaaatagagcttcaaatatgtgaataagtgtatattacaataagtaataagtaagattatttaaaaacaagaaagctcaaattacacaaagtcctttttgtgaagggcgagtccttgacttatcaagattcctgatgacagtaacaaagtatgacactgtttcaacaacaaagagtaatgtttggaggaaaaaacttttcttgcagttcaatgaactgaaaatcagaataaaatcatcccaggcaatagaaagtttctgcagaattttactttttctaacttcaactatcttaaagatttatttatggttattattttaatctacatgctgttacaaatatcttctttactggcaacttatgtttttctatttaacctagtttctggtttagttagcactttgaatgatgcagagattaagtacctggcaatattagcttg

SEQ ID NO: 332813 - DNA, 644 bp, Homo sapiens
ttgctagcctgactataagctcccttgaataagatccatgccttttggatctcctgtaccagttatgatagatttgtcttcgataaataccagtcagtgtgaaataacatttttatttgatggagagattaaaatggtatctatttaataggcttgcattaagacagtctaatcctaacagagtcactacatcatatgcaattaaaatagagcttcaaatatgtgaataagtgtatattacaataagtaataagtaagattatttaaaaacaagaaagctcaaattacacaaagtcctttttgtgaagggcgagtccttgacttatcaagattcctgatgacagtaacaaagtatgacactgtttcaacaacaaagagtaatgtttggaggaaaaaacttttcttgcagttcaatgaactgaaaatcagaataaaatcatcccaggcaatagaaagtttctgcagaattttactttttctaacttcaactatcttaaagatttatttatggttattattttaatctacatgctgttacaartatcttctttactggcaacttatgtttttctatttaacctagtttctggtttagttagcactttgaatgatgcagagattaagtacctggcaatattagcttg

SEQ ID NO: 332814 - DNA, 630 bp, Homo sapiens
aatctctaccacttgtaaaaaaaaaaaaaaaaaaaagcgccaacatttagttgataattaatatgatggctactaatttaaaatacttatatgagcattaaatatgtttatttctttataacatgtgaactaaacaaaagattttactatataacatgtcagtaattagtgcatagtttactctgggttataacattttgtcaaaacaacgttctcattttwaaaattaagttcttagtaatatttttatcagtattctaaatgtttctattatgttttaatttacgtgctcttctgtgatattttataatatgaagataactttttaacttttgaggtattctaagattaacgatagtgatagtaatcatagttaagttgttccattagcagaaatcaagtacatatagggtatatgttcgcatgtacagttatatgtaactcttgtattttgttttgttttgttttcatagagatgctacaagaacaattttatatacaggaagattagaaattttattctggtattagtttcagagggtagtaagaactgcaatttggtcttttcaaattataaagagaaagatccttctataggcatttgaagataatatttaattgataaatcca

SEQ ID NO: 332815 - DNA, 630 bp, Homo sapiens
aatctctaccacttgtaaaaaaaaaaaaaaaaaaaagcgccaacatttagttgataattaatatgatggctactaatttaaaatacttatatgagcattaaatatgtttatttctttataacatgtgaactaaacaaaagattttactatataacatgtcagtaattagtgcatagtttactctgggttataacattttgtcaaaacaacgttctcattttaaaaattaagttcttagtaatatttttatcagtattctaaatgtttctattatgttttaatttacgtgctcttctgtgatattttataatatgaagataactttttaacttttgaggtattctaagattaacgatagtgatagtaatcatagttaagttgttccattagcagaaatcaagtacatatagggtatatgttcgcatgtacagttatatgtaactcttgtattttgttttgttttgttttcatagagatgctacaagaacaattttatatacaggaagattagaaattttattctggtattagtttcagagggtagtaagaamtgcaatttggtcttttcaaattataaagagaaagatccttctataggcatttgaagataatatttaattgataaatcca

SEQ ID NO: 332816 - DNA, 575 bp, Homo sapiens
cttgtttttattatatccaattggtccatttaggtaattgtttcataatgatttttttccagtaagtttgatatttgaattgtgtttctcctattgacacaaaagatgttgaaagactatgccaaaacaaatacatccttctctgccagatgtaagggcctctggaactgttcagttttctaatttgttattaatttctgcttttcttgtatttgaaaatatttctaaaaattgattttacattttaaaatatattaaggttttttttattgcttaattcataattttccttgggaacttaaaagtatacatacacaactacatatacgcttactaaaataaaggtttatatatacattttatgtactttatatttataaaatgtatgtatatatctatgtatttctgtatgtatatccatatctatattttcatcctgaaacttctaattacgttactcaaggrttctgtattcctcgcatgctttttctttactagctctattatggactgactgaaaagattaagtaatatccttcactcttcgtgatttccatctcaattttattgcattt

SEQ ID NO: 332817 - DNA, 534 bp, Homo sapiens
ctgcatgtgtatatatagtacatactatatatatatatatatatatatatacacacacaagaactattttcactgaaaaaaacagaagctaaaaattrattttaaaaagttactagtaaatctccaaatatttgcaaattaaacaatagcacacactagtggatataaaaataaaccacaaaggaaattagaaactaatttaaataaaaaaaattaaaatataccatattaaaacttctgagatgcagctaaagtagtgcttagaaggaaatttattgcagtaatgcttatattaggggaaaaacataatttcaaaacaattatctaagtttcctcaagaaactagaaagggaagaacaaattacacccaaagtaaacagaaagaataaaagcaaatataagagcagatatcaaagaaattgagactggaaaaagaaatagagaaaagaactgacaccaaaagcaagttgtctgaaaagatagaaaataaaattatacttgcaacactcttcccaatagtcaagatttggaagc

SEQ ID NO: 332818 - DNA, 577 bp, Homo sapiens
cctacacatgccactatgtcatctcagaataaagaaaatgcctaattgctactatactgtgaaggtttcttccaaaggggattttatgcatttctgctgctaaagttctccacacagtaatgacactgaaagtctggattaaacaagtagataaataagataagtaaagttaataaaaagtaatttcagaacaaagaaaagattacatatattttatcaatttcatattgyatatttctccatggtgacaacgttgcttttttcttaatgcattatctgtttttaaactgtattattttggcatttattcagtgtttcctatgagatctgtactgtgctatgtactaggaatataaaggtattgcttcatttttaaagctttgaaatataagtgaatttgtatttagttttaattattaattgcaatataatgtaactgatgctgtggtatgggtacccataagttgcatacacgtttttgtttagaacacagggaagttgatgagctttatcaacatgaatggttagttttctgaaagcgtgctgaaatttacatttatatagaaagcatactttt

SEQ ID NO: 332819 - DNA, 587 bp, Homo sapiens
tactagctttacttcctctttctgtcccttaaataaatacaaatataactaaatttccttttgtgtacctcgttcaacttcatacccctcctctttatgaatgtgaccactttcacaacttcagttgtctctatggtgatgtatccccaaattctcaactgaactttgcactctttcccagccccaaacctgtttgaatcattgaacagaacacatctacttttccaagctctcaatctcacttgtcaaaaatttttctttgctcaccaagctaactcatctaattgacttttacataatttttggttaaggactccaacattattttaattgtcccagcttcaaatattacaggtatctttacttataccttcagatttaatggtcatgtccatctcgttgccagaattaagggtttctcttcccaagttcagttagtccctatgaattgcttgtatagactgtcatgaaaacktattgttttcatctctccaatttgttgttccaacattgctgtcaaatgaatatttataatgtatagttatcatcatatctctctgatgaaaacggaccttcaatgacttgta

SEQ ID NO: 332820 - DNA, 584 bp, Homo sapiens
ttaaaacttcattaaaaatatccattaatttatcttagtctctttttgttgctataacaaaatacctgactgggtaatttataaagaacagagatttactgtacatttctggagactgggaaatccaagatcaaggtgccagcctttggtgtctggtgagggacttcttgctgtgtcctcatatgatggaaggcagaaaaacagaaaaggatgaacrccgtgtcttcacctggtggaagagtggacgagcaaaagtgccttagttagttccctcaagcccttttcatggcacactaatccattcatgaggcagagcctttatgatgtgttcacttcccaaaggccccacctcttaatactaccacaatgggtaataagtttcaacatgaattttggaaggacacctccaaaccatagcagtcatatacaagttccttctatcatttactaagggttcagagtgtgctgtgtttctttagctctcatttgaaacacctgtttctagatctatcaagcttctctgttttcccacatgtattcataacacttattgctcagctggatgaagaaataagaaataaaac

SEQ ID NO: 332821 - DNA, 558 bp, Homo sapiens
agaaacagaaccactggaaaatrtatatgtatgaaattggcttactggctcacatgatgatggaaattgagaatacccaaaatctcttgactgcaagatgaagataattctggagagccgagagtagttggtgtagtttcattccaagtctgaaggcctgagatctaacagagctatttgtatatgttccagtattattgtgcgagaagactgatgtccaggtttgaaaacaggcaggcagagtgagcaaattctcactccaaccttcattctttgtactatttcagcctgcaatggactgggtaaggaccatccagactggggagggccatagctttacccaatccattgattcctatgttaatctcatatgaatcaccctcattctcatatgaatctcatatgaaacacccttacaaacatacttagaataatgtttaatcaaatatctgggcaccccgtggcctagtcaaactgacacataaaatcaaccatctcatctggttaggtccatgtcttgctattattatttgctgttgttgtttttttgttgcttgt

SEQ ID NO: 332822 - DNA, 587 bp, Homo sapiens
agttaacctttaagaaatatttattcttttaaatgatgttttaggggctgatgtggtgattctaccattttgagtctgatctcagactgtagtttttagcatttgcctcttttgaaagattcatttatgatcatacattgagtagtttagtgatactgcagatactgtgtgcagtgtactgtgaaagacaggaaagaaagattccaccagtgctattatacagaaggggaaagtgcagcaaaagaaacatgggtctctatcccaacatcacaaagaaactaaaaattctttcagatcctggtgagaccttactaatatataataatcaataaaaacttcgactttccatgctgycaggccactaatatgccatcacatacttccatagtcactgaaaaacagttgaggctcctgggcatttgttttatttttcacactctaataacacttggggaacacaatttgctctatgttttcttgttgacaagaaaggagttcccttagataaattgatgactctcagtcatgtctcgatttttctttcttaaatttatcatataaagctttcttaatcactgaagagagca

SEQ ID NO: 332823 - DNA, 582 bp, Homo sapiens
cttttacaaactagttctataatcgagcctacttctcacataggaagcatggaaaatcctatctggaaatgccacttaagccagagatgacactctgatatcaattgcagattatatctggattttctatatgcctttaaataatttcttgaatctgtggcctccaatttaaatattaaccctgctactgtgggccttttctgtcactgcagctcttctcggtttgcctaaatcagaaatctagcatgcattctggccccattaatactgacagtgtcagtcagaaaatgtgggatttgcaccgacttcttattccagcagagttttatatgattatgacatcattaaaactggagagatccattttgaataattaattggtcttgatgatagaagrgtaaaccaaagtaatatgagtaattcttcttctcacattgcagacattatccagaactataatttttaggctgtctttactcactttataatttgtcaagaaatgtgctagtggtttatttttgaattctgtattttgttccgttggtctagtgtctgtctttatgacagtactgtattttttaa

SEQ ID NO: 332824 - DNA, 562 bp, Homo sapiens
ccacatatgtagttaaaattctttagaattcataatacataggtatattgagtgatgctggtattgtaccaaagttatatgaagtgagaaaaatgaaatatagattgattaccatgtataaattttaatttcctcaactatgaagcataagtagctatttttttatraaattgttttgaagcctaaaggagatgctacctgtgggaattctcatatgattttaaagaactaaataattatattatgccattttatatcatacatttcatatagtaagtgctcagttaatgtttctggaatctatcagtaaaaggaaaaagtttttaaaaagacaaaaatcaaaagtgtagttttaaattcttctggaaaaatctgggtgagaaaatatagatagattattttacttgataatgagtttcctcctgaggaaattatagcacctgcagagaaagaagcttatgctagtgggggaggtagacattatggcaggtaattgcaggtggcctgacagttcctgctgatctgacatcttctcaacagctagatttacataatgaaaaga

SEQ ID NO: 332825 - DNA, 605 bp, Homo sapiens
attttgtcagaagcccaaaaatgaacattcarttgacagaaatctccctaataatctcctccactgcagtttccctattcaaaacttgtatgtgctttgtaaaacaagttcagtttttttctactaggtttgttcctttttaatctattccttcccattttacttaactttatttcagcaatactccccaaaatgccccttaaactcttatcaggagagtggcttttaatcttcctggaaaacgttatgttattacctattacaagattaaaaattttacaaatgtcatcaaaaatcatgttaatcattccaaaatttgtgctctctggataattcctcagtagcgtccgagactttaaacaggttactcttaatcaattaagtggggaagaaatatataaatgttcatataatgtcaatgtttgtaatcttggatcaatccatggcataaaattgaagaagaaattttaggcagttatagaagaaatatgggccaaaataatttttatttctcctgaactggctataatttataaagagaaatagacagtgatcatctccttgtgaagctccatactgtttgataaccagtcaaaagtataagc

SEQ ID NO: 332826 - DNA, 605 bp, Homo sapiens
attttgtcagaagcccaaaaatgaacattcagttgacagaaatctccctaataatctcctccactgcagtttccctattcaaaacttgtatgtgctttgtaaaacaagttcagtttttttctactaggtttgttcctttttaatctattccttcccattttacttaactttatttcagcaatactccccaaaatgccccttaaactcttatcaggagagtggcttttaatcttcctggaaaacgttatgttattayctattacaagattaaaaattttacaaatgtcatcaaaaatcatgttaatcattccaaaatttgtgctctctggataattcctcagtagcgtccgagactttaaacaggttactcttaatcaattaagtggggaagaaatatataaatgttcatataatgtcaatgtttgtaatcttggatcaatccatggcataaaattgaagaagaaattttaggcagttatagaagaaatatgggccaaaataatttttatttctcctgaactggctataatttataaagagaaatagacagtgatcatctccttgtgaagctccatactgtttgataaccagtcaaaagtataagc

SEQ ID NO: 332827 - DNA, 605 bp, Homo sapiens
attttgtcagaagcccaaaaatgaacattcagttgacagaaatctccctaataatctcctccactgcagtttccctattcaaaacttgtatgtgctttgtaaaacaagttcagtttttttctactaggtttgttcctttttaatctattccttcccattttacttaactttatttcagcaatactccccaaaatgccccttaaactcttatcaggagagtggcttttaatcttcctggaaaacgttatgttattacctattacaagattaaaaattttacaaatgtcatcaaaaatcatgttaatcattccaaaatttgtgctctctkgataattcctcagtagcgtccgagactttaaacaggttactcttaatcaattaagtggggaagaaatatataaatgttcatataatgtcaatgtttgtaatcttggatcaatccatggcataaaattgaagaagaaattttaggcagttatagaagaaatatgggccaaaataatttttatttctcctgaactggctataatttataaagagaaatagacagtgatcatctccttgtgaagctccatactgtttgataaccagtcaaaagtataagc

SEQ ID NO: 332828 - DNA, 568 bp, Homo sapiens
ataacttagtgtcaaaagtaacccccaacaacagaggatgattactcccacagaggaaagcaatagcacaagaaatgagtgccaggcttccacagccatgcaacacactgcccaagagacacacttctttctcatgccattcagaaagttaaggtgagttgcaggggctgggagcagggagggatggctscatactctaataactgcttcacaaactccatcaagaatgctgatataagtcagggatgtcttgcctatggaccccacccaaaatgacaatgggcaccccaaataacctcatgggaattaaattcccacatagaagacagcctctcaagtgagccactgcagacagcaagtgcaagtatctcacacagacagccagcttgactatatgagatttcaaaaaggcaaacagctgagcaatttagggcaccactccataaaaaaacaaacaaacaggagctccctgcatctaatcaagctttgcaagattgagagaagcacaaaatttaatccctcatttcaagataaaacaagatgtatagagtgagaacatccacagata

SEQ ID NO: 332829 - DNA, 508 bp, Homo sapiens
aactacccagtgtgatctatagattccatgcaacccctacaaagagtcccatggcatttttcacgtaaataggagaagaaatcctaaaatatgtatgaaaccacaaaagtccccaaagcaatcttgagtaacaacaaaactgagggcataatatttcctgatttcaaattgtataaaaaagtatatttattaaaacagcatggtacacagaccaatggaacagaataggagacgtagaaataaatctatgcatttattgtcaatttcttttcaacataggcatcaaaaatgtacaatggagaaaggattgtctcataaataaatggtgttgagaaaacwagatatctacatgttaaaaaaatgaaatttgatccctatcttacactgtatacaaataaccaactcaaagtgcaataaaaacttaagatccaaaactgtaaaactcttagaataaaacatgggaaacgttccatgacattggtctcagttgttatgattttttaaaaat

SEQ ID NO: 332830 - DNA, 637 bp, Homo sapiens
agtttcctcaaaacattgaatagagaaccaccttactattgagcaatctcacttcttastatatatccaaaggaaataaaatcattatcacaaagacatatctacattcccatgttcattacagccttattcacagtagccaagatatagaaacaacttaagtgtctgtcactggataaatgaataaaggaaatgtggtttatatatttgtatatggaatataatataataaatacagcataatataattgaatgttattcatccttagaaaagaagcaaatcctgccatttataacaacatggataaacctggagaacattacactaaatgaaataagccagatacagaaagacaaatactgcatgaactcactcatatgtggaatctaaaaaagtagaaacagaaagtagaaaggtagctaccttgggtcagggacaggggaaaatggggagatgtcggtaaatggttaaaattttcagtcattatgaaataagttccttatatttaatgtaaaacatggtaattacagttaataacaatgtattgcatatttgaaatttgctgaacctgtatcttcagcattttcacaacacacacaaaaagataactatgttagctgatgtttatgtacatca

SEQ ID NO: 332831 - DNA, 580 bp, Homo sapiens
tcatttgcaaatcctgttagtctatcctcaccaactctgctttgctgctgtaacctaaaccatatcgtttcttgctcagactactgcagtagtactcaaactggtccctgttcccactttgcaccctctacagtctcttcacacaacagcttgagtaatattttaaagacataaattagggtatatcaaccccagctgcaaactatctactagcttcccctcccacttaatcaaactccacagccttaccatagtttgccagcccctggctacctctttggcttcatcttccatcaatttccccttgcccatgcaccttcaataacactagctttcttacaactgtttcaaagttctaagtatgttcctgcctacagcttttgtagttggctattctttgtgcctgtaacacacttttcatgtggctttctctctttattaagggctttatttttcctcatagtatgtatmacaaccaaacattgtattataaatatatgtatttgtgtacactagaatataagctctaggagggtagaaaactttgttttgttcactgctatgcccccaagaacctaca

SEQ ID NO: 332832 - DNA, 452 bp, Homo sapiens
tgaagttagaactgataaaagaaaatgcacatttaaaaccaacatgtcttcagattccaggctggataaatgactaaagagtcaaccgtcctgagttatgtcacacagggctaataaagtcccactttactgatccraaaattgaagcaaaaatgcctggcaatcaaaacatgtatttatgatacagtaagacagggtagtccctactgaaatgaatacaatgagttcctgactcaaattggatgaagatttgtgtaaggaacacttaaaatggccaaaatactgatttcggggaagtgatagttttgtaacaactaaagaaaattggttaccattttgaaaagaagtgtccatgaaaaagaaatagctctggaccatcacatgatgacaaactagtccattataaaataaagtcagtgaacagagttggtagttctcaccccaaaacgctg

SEQ ID NO: 332833 - DNA, 596 bp, Homo sapiens
taacctgtgccagcctttcttcctctatttaactcattaaacacttactgatgactacttatgtgtcaagtagcagcctaaatattgttgttacatcaataaattagagatctagtgttcttgtcctcatgcagcttattttctactacagaataggacaagtataaaaatcatgaaaatgcagtgtggtaagtgctgctatgagaggaatagtggctatgggagcatataggtgggcggcctaccttgggctagagggggtagtgtcagagaaggataacttcaggtcattatatgcaatctgagacctggaagataacaatgaaccaagaaaataagggagtggggagacatcatccctgcagagggaaatatatactcaaagacccagcattgagagataacatggcttagttgagaaactcagaaatgtttaggtgaaagtaataagtagttttaggcggagtgcagtctccacaaggaaaagaaccatgactgtagaaccatgtctgtagaaccattaatgtacattcagcccttggtacttggatatcaakaaatatccaagtatccaataagtgaataaatgaagataa

SEQ ID NO: 332834 - DNA, 617 bp, Homo sapiens
ctaagaaaaaaagaacaaaactggaagaatcacattccctgacttcaaattatgctacagagctatagtaaccaaaacagtatgatactggcataaaaacagacacatagacaaaggtaacagaatagacagcccagaaacaaatctatacatctagaatcaactcatttttgacaaaggtgccaaaacatacactggtgaaaagacagtctcttcaataaatggtgctggggaaactggatatccataggcagaagaatgaaactagacccctaactattgccatatacaaaaatcaaatcaaaaggsattaaagacttaaatctaagacctgaaaccatgaaactactctaagaaaacattggggaagatttctatgacattggtttgggcaaaaatttcttgaacaataccccacaggcaaatacaatcaaagcagttaatggacaaatgggatcacaacaagttaaaaggcttctgatagtaaaggaaacaatcaacaaagtgaagagacagtccagagaatgggagaaaatgtttgtaaactacccatttgacaagtgattagtaacaagaatatgtaaggaactcaaacaactctaagaaaaaaaacaata

SEQ ID NO: 332835 - DNA, 381 bp, Homo sapiens
aaaaactaaaagtaaaaaaaaaaaaataaaaaataaaaatacttaaargggtgaaaaactattatcagacttactgccttatttctgactatacatttaaaaaccttttatgctcaattcaggcattctattactacacatttcaagtgaccatcatgggcacttttaagcacctaacacatttttctttctacaaacctcacaaaaagacctgtcaagaaaatcattctaggtccaacaatgcacagcacctcatgccttatttctacttctttctttatgatagaaaatgtagtcagcctttaacttggcctgataaaaactgtaaagactatgccaaataagaccaggtgcagtggctcacacctgtaatcccagcat

SEQ ID NO: 332836 - DNA, 442 bp, Homo sapiens
cagctactcgggaggctgaggcatgaagaatcacttgaacccgggaggtggaggtttcagtgagctgagatcccaccactgcactccagcctgggcgacagagtgagaccccatctcaaaaaaaagaaaaaaagaaagaaaggaatacaattaaagtggaggaggagcacactctggtcttggaattccatttgagaatttagaagtgtcatgtttataatttttcaattttgtttgttgttggcttgctgtaaagcaatataaaatatttttgttataaaataaataaaaaatacatcaaatyaggagcagcctaatgatggctgactagaggagttttgtacttgtctcctccacaccaaagaaccaaagtagtgagtagataatcacacttcgtatagttccctgaagagaaaatactggaatgtaataaattcaacag

SEQ ID NO: 332837 - DNA, 659 bp, Homo sapiens
agtgatgtaaacattcccgccttgccagcagtccaaccttccacagtggcaggacagcagtgtggctactaccagtcacacctgagcattctgctggtggcctgggaatcatgacacctctgcctaccatagctgatgctggcatccaccattaggaagcctgaggacaagcctgcctggcctggctttgtcccttcttccaccctctgggccagggcccagcccagtctatcaccattggtaggtgaaaaaatcctcccatgtgcttgagattgggtctacctagccagccacttactcctcagctggcacctacctgcatgtaccacctgtgggcctggagactggctagcccagcccatcacagccactgccaatgccagtgtataccactcaggacctagagggttgtcctaccactatcaytgccattgtccatgccatgccaagttcccaggggcctaataacctgcccacctgcctggctcactgctgcaactactgacactgaataagtcaactggaggcccaagaattggcccacctagaccccctaacattagtgtaaccatacagtatactggggctcaagaacagacatgctcagctcactgctgccacccctggggcccaaagattggactgcttggcatcccact

SEQ ID NO: 332838 - DNA, 564 bp, Homo sapiens
tggctttgtcccttcttccaccctctgggccagggcccagcccagtctatcaccattggtaggtgaaaaaatcctcccatgtgcttgagattgggtctacctagccagccacttactcctcagctggcacctacctgcatgtaccacctgtgggcctggagactggctagcccagcccatcacagccactgccaatgccagtgtataccactcaggacctagagggttgtcctaccactatcactgccattgtccatgccatgccaagttcccaggggcctaataacctgcccacctgcctggctcactgctgcaactactgacactgaataagtcaactggaggcccaagaattggcccacctagaccccytaacattagtgtaaccatacagtatactggggctcaagaacagacatgctcagctcactgctgccacccctggggcccaaagattggactgcttggcatcccactccccagtagaacttcatcgtatcctccacttataactgcactgtacaccaccaaggaaatcacagatgcaaataatgctgtttaaag

SEQ ID NO: 332839 - DNA, 576 bp, Homo sapiens
cttcataataaaaatgttcaacaagctaggcagagaaaaaatatacttccaaataataaaggccatatatgactaacacacagctaacatcatactgaatggagaaaagttgaaagtttctctctaataactggaacaagataagaatgcccacaaaatactacaccaaaaaactcttagatctaataaattcagtaaagttagaggatacaaaatcaatataaaaaatcagtagcatttctgtamaacaataatagtcaaaaaacaaattcagaaggcaatttcatttacaatggttacagaaaccaaatacctaggaacagatttaaccaagaaagggaaagatctctacaaggaaaactacaaaacactgatgaaagaaattaaagaggacataaatggaaagacatttcatgctcatgggttgaaagaattaacataattaaaatgagctaacttcccaaagcaatctacagattcaatgcaatccctataaaaataccagagtcatttttttttacagaaatgagaaaaagaattctaaaatttatatagaatcaaaaaaaaaaaagagcc

SEQ ID NO: 332840 - DNA, 568 bp, Homo sapiens
tgtttaaattcctatgtgaacatagatatcagagtgattgcagaacgttattgaagtgatatttcagttaatagaactgatttgacctctttaatagcctacagcaatagtagtattacataacagaagtctccagctgggcgtggtggctcacacctgtaatctcagcactttgggaggccgaggtggttggatcatgaggtcagaagttcgagatcagcctggccaatgtggtgaaaccccatctctactaaaaatacaaaaatcagctgggtatggtggtgcacgcctgtaattccagctacttgggaggctgaggcaggagaattccttgaaccagggagatagaggttgcagtgagctgagtttgcaccactgagctccaacctgggtgacagagtgggactgcgtctcaaaaaaaaaaaaaaaaaaaaaaaagctcccctacttcagttaaaaacttccttaattaaccaaaactcataactgtcttgactggacctggagatgctaactkctcatggctagaaagctgctcttgagtatatcttcacaatgctctgcaaac

SEQ ID NO: 332841 - DNA, 371 bp, Homo sapiens
tcttgttgcccaggctggagtgcaattggctcacctcaacctccgcctaccgggttcaagcgattctcctgcctcagcctcccaggtagctgggactacaggcatgtgccaccacacctggctaattctgtatttttagtagagacggggtttctccatgttggtcaggctggtcttaaactcccaacctcagatgatctgcccgcctcggcttcccaaagtgctgggattacaggtgtgagtcaccccacctggacaaaacaaccgcttcttactgaacacatcaggaaagaagcaaccttcratgcaggcaccattacagatgaaaaatactttcaagtgttaccaccattatatccacagatgccctt

SEQ ID NO: 332842 - DNA, 536 bp, Homo sapiens
tatatctgatatagtaacatgtgatcagtggtcattgatgttactatcacaatagttttggggtgccacagaatatgcccrtataagatgatgaacttaactgataaatgtgtgtgttcttactctaccaaaaatatgtccttacctgttctcgctccctcttcttgggcttaccctattccccaagaccccgaggctaaataataacccttaaatggcctccaaatgttcaattgaaaggagtaatcacacacatatcctttaaatcaaaatctagaaatcattatgcttagtgaggaaggcatgttgaaagctgaggtaggtagaaagctaggcctcctatgccaaacagccaagttgtaaatacaaaggaagagttcttgaaggaaattgaaagtgtgactccattgaaagcaaaagagctttatcactgatgtggagaaagttttagtggtcgagataaatatcaaactagccacaccagtctcttaagctaaagcctaacccagagcaaggccctaaatctcttcaagttt

SEQ ID NO: 332843 - DNA, 536 bp, Homo sapiens
tatatctgatatagtaacatgtgatcagtggtcattgatgttactatcacaatagttttggggtgccacagaatatgcccgtataagatgatgaacttaactgataaatgtgtgtgttcttactctaccaaaaatatgtccttacctgttctcgctccctcttcttgggcttaccctattccccaagaccccgaggctaaataataacccttaaatggcctccaaatgttcaaktgaaaggagtaatcacacacatatcctttaaatcaaaatctagaaatcattatgcttagtgaggaaggcatgttgaaagctgaggtaggtagaaagctaggcctcctatgccaaacagccaagttgtaaatacaaaggaagagttcttgaaggaaattgaaagtgtgactccattgaaagcaaaagagctttatcactgatgtggagaaagttttagtggtcgagataaatatcaaactagccacaccagtctcttaagctaaagcctaacccagagcaaggccctaaatctcttcaagttt

SEQ ID NO: 332844 - DNA, 536 bp, Homo sapiens
tatatctgatatagtaacatgtgatcagtggtcattgatgttactatcacaatagttttggggtgccacagaatatgcccgtataagatgatgaacttaactgataaatgtgtgtgttcttactctaccaaaaatatgtccttacctgttctcgctccctcttcttgggcttaccctattccccaagaccccgaggctaaataataacccttaaatggcctccaaatgttcaattgaaaggagtaatcacacacatatcctttaaatcaaaatctagaaatsattatgcttagtgaggaaggcatgttgaaagctgaggtaggtagaaagctaggcctcctatgccaaacagccaagttgtaaatacaaaggaagagttcttgaaggaaattgaaagtgtgactccattgaaagcaaaagagctttatcactgatgtggagaaagttttagtggtcgagataaatatcaaactagccacaccagtctcttaagctaaagcctaacccagagcaaggccctaaatctcttcaagttt

SEQ ID NO: 332845 - DNA, 452 bp, Homo sapiens
tatatcatttccattgagttcccaagcaaaaatactcacttttatcaagacgaaccatttgtacttgcatttaatgaagtcaaatgaatataccagggactctcttatgtatacagtacacttgacaaggggtgggggaaattaatatataccctctattataccacaaattcactaaaaaggacaatataaataatggaagaatccatttactgccacttgagaatacagtggtgaawcttaattttggaataaaatatgaaaacgacaataaatagattctgctctgctccaataaacttatatcttattgaaggtatctagttgaaatagcagccataaaagttacagaggtagacgatttaagcaattagccatggcaggacattatagggtttactgctgtccgtagctggtctgcttaaacaaggctgaaagccatcaacgcagct

SEQ ID NO: 332846 - DNA, 452 bp, Homo sapiens
tatatcatttccattgagttcccaagcaaaaatactcacttttatcaagacgaaccatttgtacttgcatttaatgaagtcaaatgaatataccagggactctcttatgtatacagtacacttgacaaggggtgggggaaattaatatataccctctattataccacaaattcactaaaaaggacaatataaataatggaagaatccatttactgccacttgagaatacagtggtgaaacttaattttggaataaaatatgaaaacgacaataaatagattctgctctgctccawtaaacttatatcttattgaaggtatctagttgaaatagcagccataaaagttacagaggtagacgatttaagcaattagccatggcaggacattatagggtttactgctgtccgtagctggtctgcttaaacaaggctgaaagccatcaacgcagct

SEQ ID NO: 332847 - DNA, 452 bp, Homo sapiens
tatatcatttccattgagttcccaagcaaaaatactcacttttatcaagacgaaccatttgtacttgcatttaatgaagtcaaatgaatataccagggactctcttatgtatacagtacacttgacaaggggtgggggaaattaatatataccctctattataccacaaattcactaaaaaggacaatataaataatggaagaatccatttactgccacttgagaatacagtggtgaaacttaattttggaataaaatatgaaaacgacaataaatagattctgctctgctccaataaacttatatcttattgaaggtatctagttgaaatagcagccataaaagttacagagktagacgatttaagcaattagccatggcaggacattatagggtttactgctgtccgtagctggtctgcttaaacaaggctgaaagccatcaacgcagct

SEQ ID NO: 332848 - DNA, 462 bp, Homo sapiens
ttgcagctgataatgggatagaaaataaaatcccattttctcagaagaaattcaagccagctgcagaaatgtgcataagtaatgaggagctgaatgttaatccctaagaaaatgggggaaatgtctctagggcatgtcagaggtcttgatggcagcccctcccatcacagagccagaggccaaagagaaaaaagtggttttgtgggctggtcccagggtacstctggtgtatgcagcctagggacttggtgccttgtgtcccagccactctagccatggctaaaagaggccaacatagagcttgggctgtggcttctgagggtgcaagccccaagccttggcagcttccatgttgtactgagcctgtgagtgcacagaggtcaagaattgaggatttggaacctccacctagatttcagaggatatatggaaatacctggatgcccaggcagaagtttgctg

SEQ ID NO: 332849 - DNA, 575 bp, Homo sapiens
tagactgaaaatgaagtaaaaaatctgaggtccttcattgttcttgacattcattcccttgcttaaaccagcttaatctactttcagtatcatcccatgcatttaggataaaattgctagtaataataataataccctaaaacaacaataataatggctaatatttaatgagtggcaaacattgtactaagcatattacatgtcatataatcctcacattgatcctattgggtagatgtgattgatatcaccacttagtaggtgaggaaactgaggcaggggctcagtggtttggaagaaataagggtcatgatacatattagtccaactgttaagcagtttctctcacttttgatctgattcttacccatcctctggggctccattaaatggaacttccttacaaaaaccttcctttgaccttccctctagtcttatttcctcaaggaactctggtcttttcctttgcagcacttatcacaatttatgttaattgtatgactaacygaggaatcctgtgatggcttatatatggtatgtcttccatcttacagagacccacagcaaagggatga

SEQ ID NO: 332850 - DNA, 555 bp, Homo sapiens
aatctcagctctggtagctatcatctttatcagtgaaatagaaataaaaatacctactgtatagatttattattaggattagtgattatttttgcaaaacaccaaacaaaaagtagttagtaaatgagaactatagccatgttaaaaatgtaaaaatctgaaaaccttcttctgaataatttatttgaataacctttcatagacaaattaaaactttttaaaattattttttattatttttatctgaatatttgacattataaggacatagtattaatgtcactgtggctatataaattatttaacttttaagtaagaattttaagtaagctttattgagatataatttacctacagtaaaatcacytatttaaagtgcattgttcagtggcttttagtatatttacagaattgtgcaaccatcatgacggtcaacttttaaaacattttcataatctcccaaagaaatcccatacccatgatcagcatctcctaattcccatagcctctccctctagccccaggaaatcactaatctattttctgactctacag

SEQ ID NO: 332851 - DNA, 555 bp, Homo sapiens
aatctcagctctggtagctatcatctttatcagtgaaatagaaataaaaatacctactgtatagatttattattaggattagtgattatttttgcaaaacaccaaacaaaaagtagttagtaaatgagaactatagccatgttaaaaatgtaaaaatctgaaaaccttcttctgaataatttatttgaataacctttcatagacaaattaaaactttttaaaattattttttattatttttatctgaatatttgacattataaggacatagtattaatgtcactgtggctatataaattatttaacttttaagtaagaattttaagtaagctttattgagatataatttacctacagtaaaatcacctatttaaagtgcattgttcagtggcttttagtatatttacagaattgtgcaaccatcatgayggtcaacttttaaaacattttcataatctcccaaagaaatcccatacccatgatcagcatctcctaattcccatagcctctccctctagccccaggaaatcactaatctattttctgactctacag

SEQ ID NO: 332852 - DNA, 582 bp, Homo sapiens
caaagcaattgggacagtgacaaaggtgagaagagtaaggaagttcttgtaagtgaggagatttctatgggaaaacaataaggaaagtgttgtattgtgaaagtgtggaaatggttgcctaggacatcttgtgattcaccaacaggccctataaggagggaaagaataaccacagaactccagcaattataatggtagaaatctggtaaaggctctgttttatatttcacagctgctttcctcatgtccagtgtagcttagggtctacaggtaccataggccctgtactatttcactgatggtgagaatagtaagaacttaccaagtaactggtcagatagaaaggaaaacggggctactatctgaccttcaggtttcccatgcagagtctctgaatacccagcattcaataaatacaaatctatatatagctatggaaaaaaatcaggctggatccaaaataaataaggcagaagctgattaaaattcatacatatttgaaatattctatccataataaatttctagaccttttattttcttatttctcyttttttacattacaggtggctgttgactata

SEQ ID NO: 332853 - DNA, 589 bp, Homo sapiens
aaacagtcttttataacagtcttttgaaaaaaattcattctcacctcagcctgaggtatctattgggggggtcayaatacatcatctcacatatacaaatataatgatagctaaaatttatggagcacttcatatttatcaggtattgctctcagcactttatataaaacctcttgaaatccttataggtacctcatgagattgatactacaataattgctaccttttagaaaagtcccttgctcaagtttacaaagctagaaattgtggaggcaaaattcaaactctaatattttgtgttctagagtctagtttcctaaccatatattcattgtctgtctatctatctatcttcatatatcaatcagtcatctgttgatatatcacctatctactaaaaagatgtgactattgtttaatggggtgtactttcctctgaagcagaattcaatacttgaagaattactactataatattcagtcaatatttattaagcacatttaaaaacacagactctagtaccagcctagttaggttcaaattctaccttagaaaggttagctaactgtttcatcacctgcaaaacgg

SEQ ID NO: 332854 - DNA, 589 bp, Homo sapiens
aaacagtcttttataacagtcttttgaaaaaaattcattctcacctcagcctgaggtatctattgggggggtcataatacatcatctcacatatacaaatataatgatagctaaaatttatggagcacttcatatttatcaggtattgctctcagcactttatataaaacctcttgaaatccttataggtaccycatgagattgatactacaataattgctaccttttagaaaagtcccttgctcaagtttacaaagctagaaattgtggaggcaaaattcaaactctaatattttgtgttctagagtctagtttcctaaccatatattcattgtctgtctatctatctatcttcatatatcaatcagtcatctgttgatatatcacctatctactaaaaagatgtgactattgtttaatggggtgtactttcctctgaagcagaattcaatacttgaagaattactactataatattcagtcaatatttattaagcacatttaaaaacacagactctagtaccagcctagttaggttcaaattctaccttagaaaggttagctaactgtttcatcacctgcaaaacgg

SEQ ID NO: 332855 - DNA, 535 bp, Homo sapiens
acctacttcaaaaagggagtgacagcgtttgaaaaataagctactacataaacttagaaaggggctatgccttgtgagtcattctcagagggctcagtctcttggttttaattaaaagtgaaataaagaattctttaagattatatcagccttttaagggcataagaaggtcactgatttgtaagcatcttctttctttttctaatggtgctgtttcccagattgaatcgtgtgaacaaggctcaaatttcctttcagaatctacagattcgtggcagagtggatgtgggaagtggggaacagagtgaraagctacagtgtacagagtgaacgtgattaaggctctgtgagaagatgagcttggatgtgagaatgccttgggtacagcccagattcctccaattgctagatcaaaacacacactttgcaaaattaatgagattattagaaacaataaactacctatgtaaagtgcctggctactgatctgtgtaccataaagcggctattattttgtccacactcctgagaagaa

SEQ ID NO: 332856 - DNA, 359 bp, Homo sapiens
tcagccacacaggtagtctggtagtcccagaaggcattgtgtgcctttatataacacgatgcttaacttattcctatttcttttacttggaacacatctcttccctaatcctactgataagctcagtgtcttcatgawaatgcccagaaaaacaagggcagagttaggtaattcctcctatgtttacctttagagacttacatgcacttctattagagattagttttggaatttgtatttgattttgtatttacagactttgaaacagttaaaacattaaaggcccagtaaattttctgccactctgcaaggaaagaaagcttgccaaagataagttttagtattcaatttggaacaca

SEQ ID NO: 332857 - DNA, 472 bp, Homo sapiens
ctacctagagattaggtacatttgagaaactgaggccttttagcagatatatatcacatggtaagtaattcttcatttatatgtctgtgagatatttaaggggagagaccatgtttttttcacctttgaatccctaacattaaggatgatgcctggtaactagttgaagtcccatgaatatatatatccttcagtgagtgaagatgttttatgacgatatagtgcttcacagttcatttcccatccaaaacctgccaatatattttaattagccttcatctggtttatctcagcctctgttatcaactgcaaaataacaataattaggaccttttatgtaaaaggacaaataaatgtatgccataaatattgataaaacagccaagaatactattctccttgccctagaaatatcaaaagctgaaaaacttaytctcccaaagtagaaaaaccaattaaaacatcaaaatta

SEQ ID NO: 332858 - DNA, 580 bp, Homo sapiens
taaaaatgaaagcgtacaactataaaggaaattgggtaaattgacctatattaaaattcggaaattctattcattaaatgatgtcattgacagagtaaaacaggaagacatagagtggagaaaatattcccagtaaatttatcatacatttatataatgttcagccttattcataataaaataattgcaagttaaaagtacaagatgccatttttttaactatcaaattgcccacattcaaaaattgtgacgatgcactgtgttaggaggtgtggtaaaagaggctctttctgagagctgaaggaggctggtggagtataaattgttccatattcttggagagcaataccaaaatatctttaactttataactgcttaaaccctttggcatagtgattctacttctaggaatttatcctatatatgtacctgcctatgagtgaaatggcaatattaattgcaacagtgtttccagtggcaaaaatcgaaccaaaaaaatctaaatgacaaaagaatagctacaataattktattgcatccatatagtatactgtaatgccattcagctttttaaaaatga

SEQ ID NO: 332859 - DNA, 615 bp, Homo sapiens
ccgcgcccggcatatctaatggttttattacagcgctaggattctgtcatatattctatcatatagtatgtatattatgtactagagcacagtacagtatacagaaagtacaacataggctacartctgaacacagaaatggcacatagtaggtatttggtaaatgtttgaatgaatagataattttttttttttttagccattctttgcagagggaaattttaaaaaaccttctggttctttcaagggagccataagctactctaaatttttcaggccattataaattctcacaggttataccagaagaaccagaatcccaatgttatcatgaactgagtggctttaagtacttaattatagcatgtgcgcatggttcatctgccctcaaagggataggtttcttgtgcgtttgagtttagccactgaaatgcctgcccatagttcctgtgagagtcgctccaatgggcacagtgggctcctcacagacttctcggccctgagttccagaaggcctaatactgggagccagcattcttagtctttccctgcagttatattctgtgtgacctctgcccatcagacaaacaagaaatgccgttttataaaccatca

SEQ ID NO: 332860 - DNA, 615 bp, Homo sapiens
ccgcgcccggcatatctaatggttttattacagcgctaggattctgtcatatattctatcatatagtatgtatattatgtactagagcacagtacagtatacagaaagtacaacataggctacagwctgaacacagaaatggcacatagtaggtatttggtaaatgtttgaatgaatagataattttttttttttttagccattctttgcagagggaaattttaaaaaaccttctggttctttcaagggagccataagctactctaaatttttcaggccattataaattctcacaggttataccagaagaaccagaatcccaatgttatcatgaactgagtggctttaagtacttaattatagcatgtgcgcatggttcatctgccctcaaagggataggtttcttgtgcgtttgagtttagccactgaaatgcctgcccatagttcctgtgagagtcgctccaatgggcacagtgggctcctcacagacttctcggccctgagttccagaaggcctaatactgggagccagcattcttagtctttccctgcagttatattctgtgtgacctctgcccatcagacaaacaagaaatgccgttttataaaccatca

SEQ ID NO: 332861 - DNA, 594 bp, Homo sapiens
tctcacaaatttaaattcggtataaccttattagagctactctcaatattatatggatttagatgtatactctgtatgaaacttcgacagtatatgatcgaaactaatattatgcagtgaagccatggaattaatgccactcctaggaactggaaagcgtcatgatagatgttgctatgcatatatttaatttctgtgctcatataatgatggtctacaaaaataaccactgcatttactttttaaagtttatgatacctgaatgggaaatctgaatatttggggaatgcaaatatttgtgattactcaacattctagattttttttttaagtttttaaatgaataatcagtttctttaacatagacttttctttttgcatgacttttacaattaggcctggtttttgacagattcttcttaattaacatcagtatatgtttttaaaaggcattgaaatatagagaaaacatcactgaatcaatataaagtcacaaaatctattcttaatacaggtacaagtgtagygtaaatgtatgttttattaggctagctgtaagagtgtttcccccgcattcacttcttaacctcactc

SEQ ID NO: 332862 - DNA, 564 bp, Homo sapiens
cagtggctcacgcctgtaatcccaggactttgggaggctgaggtgggtggatcacttcaggtcaggagttcgagaccagcctgaccaaaatggtgaaaccctgcctctactaaaaatacaagattagctgggcatggtggtgcatgcctgtaatcctagctacttgggaggctgaggcagtagaatagcttgaatgcgagagaygaggtttcagtgagctgagatcgtgccattgcactccagcctgggcaagaagagtgaaaccctgtctcaaaaaacaaacaaacaaacaaaaataagcaaatggcttgggccacagaatgaatagaactcctgcttaagtatccttgcatgtaacttttacaatattgtctcccattataccctggaccctactgaagctgtcacaaggaagtcttagatactagtggctaattcctattgttcttttccaatctcagtcaccccctggaagaagctgttcctgactcatcagtctggattagatgccttttctgagctccacatagctttcagtactgctctccaacacagcatgtatca

SEQ ID NO: 332863 - DNA, 552 bp, Homo sapiens
aatatttatttccttgaaagcaaacagcagcttaacgtgttttctaatatatatttggatgttccccttgaattaagatttgttagattcgccattagcatacccactctctctgcttcctacttctagtaggatagttctatgaatsattcttcatggtttatataagtaaacctatgtggtttaaagttttgtgtggtcagttttctctttattgtttatttacattaataaagagaaaactctccttgaggcttccacataatgatctatctgtctcactagttttgtctcactcccccctttcatttctacactttgcttcaaaacatacattatagtaccagtctctatgttggagaaatcagaaatgcaacacagagcaaaacaaaatctcagagacatttgttcatgaacctttaatttggttaagttttataatgaactttgtaaagtctgtaaggagtctgatgtcatgttttgcagaactttttaagggaaaagctacctagagttagctattgagagtcactatgaattttttaaaagggc

SEQ ID NO: 332864 - DNA, 552 bp, Homo sapiens
aatatttatttccttgaaagcaaacagcagcttaacgtgttttctaatatatatttggatgttccccttgaattaagatttgttagattcgccattagcatacccactctctctgcttcctacttctagtaggatagttctatgaatgattcttcatggtttatataagtaaacctatgtggtttaaagttttgtgtggtcagttttctctttattgtttatttacattaataaagagaaaactctccttgaggcttccacataatgatctatctktctcactagttttgtctcactcccccctttcatttctacactttgcttcaaaacatacattatagtaccagtctctatgttggagaaatcagaaatgcaacacagagcaaaacaaaatctcagagacatttgttcatgaacctttaatttggttaagttttataatgaactttgtaaagtctgtaaggagtctgatgtcatgttttgcagaactttttaagggaaaagctacctagagttagctattgagagtcactatgaattttttaaaagggc

SEQ ID NO: 332865 - DNA, 588 bp, Homo sapiens
tagggaacaggcattggggaatccattgatttacacattttttttttttgcctcaattgratagttcttagatgctatttcttattcatttgtgcatctctagtgcagcaccaggtgtcttataggaagtattcaattaatatttatgaatgagaaagtgaatctgcctctgagcaaatacctctgagacccatggtaacgcctacagtgtgaagcacctatgagagaacaccaacaatggtaagagagtggtggaggggtgtgtatgtgtatgtttatgtgtgtgaactaacataatttactttaacagtttgccaggcaccaaccattctgattttgtagggaaatactagtgagactgtcctctaggggaacaggaaaggaggcaggggcaggatctaagatattgaggcatatctcacgtgtaccgtaaaaatatttcatgtgacatctgaagtggattaagattacagtaagtatagttactgtaaatagataacattcgttgagtacttataatgtgccaggcacctttctaagttctttgcattcattagctcacttaatcatcacaacaacctattgaga

SEQ ID NO: 332866 - DNA, 588 bp, Homo sapiens
tagggaacaggcattggggaatccattgatttacacattttttttttttgcctcaattgaatagttcttaratgctatttcttattcatttgtgcatctctagtgcagcaccaggtgtcttataggaagtattcaattaatatttatgaatgagaaagtgaatctgcctctgagcaaatacctctgagacccatggtaacgcctacagtgtgaagcacctatgagagaacaccaacaatggtaagagagtggtggaggggtgtgtatgtgtatgtttatgtgtgtgaactaacataatttactttaacagtttgccaggcaccaaccattctgattttgtagggaaatactagtgagactgtcctctaggggaacaggaaaggaggcaggggcaggatctaagatattgaggcatatctcacgtgtaccgtaaaaatatttcatgtgacatctgaagtggattaagattacagtaagtatagttactgtaaatagataacattcgttgagtacttataatgtgccaggcacctttctaagttctttgcattcattagctcacttaatcatcacaacaacctattgaga

SEQ ID NO: 332867 - DNA, 588 bp, Homo sapiens
tagggaacaggcattggggaatccattgatttacacattttttttttttgcctcaattgaatagttcttagatgctatttcttattcatttgtgcatctctagtgcagcaccaggtgtcttataggaagtattcaattaatatttatgaatgagaaagtgaatctgcctctgagcaaatacctctgagacccatggtaaygcctacagtgtgaagcacctatgagagaacaccaacaatggtaagagagtggtggaggggtgtgtatgtgtatgtttatgtgtgtgaactaacataatttactttaacagtttgccaggcaccaaccattctgattttgtagggaaatactagtgagactgtcctctaggggaacaggaaaggaggcaggggcaggatctaagatattgaggcatatctcacgtgtaccgtaaaaatatttcatgtgacatctgaagtggattaagattacagtaagtatagttactgtaaatagataacattcgttgagtacttataatgtgccaggcacctttctaagttctttgcattcattagctcacttaatcatcacaacaacctattgaga

SEQ ID NO: 332868 - DNA, 588 bp, Homo sapiens
tagggaacaggcattggggaatccattgatttacacattttttttttttgcctcaattgaatagttcttagatgctatttcttattcatttgtgcatctctagtgcagcaccaggtgtcttataggaagtattcaattaatatttatgaatgagaaagtgaatctgcctctgagcaaatacctctgagacccatggtaacgcctacagtgtgaagcacctatgagagaacaccaacaatggtaagagagtggtggaggggtgtgtatgtgtatgtttatgtgtgtgaactaacataatttactttaacagtttgccaggcaccaaccattctgattttgtagggaaatactagtgagactgtcctctaggggaacaggaaaggaggcaggggcaggatctaagatattgaggcatatctcaygtgtaccgtaaaaatatttcatgtgacatctgaagtggattaagattacagtaagtatagttactgtaaatagataacattcgttgagtacttataatgtgccaggcacctttctaagttctttgcattcattagctcacttaatcatcacaacaacctattgaga

SEQ ID NO: 332869 - DNA, 547 bp, Homo sapiens
gaacagaaagatcaaagcatccacatataccagtgaggaaagctttcctctccggcagaaagtctctactttttgaaaggctgacaaatgacttcagttagacaggcagggtataaaaccaaaacaacccatctatcattctttacacacaaacacatatcgaaattaagcacacatatgtatacatgtaatctcatttttgataaaagtattgttcatggagaaaaattgtggaacaatgtgtaaaacataaactyattttgtaaaaataatgtcaggccccacgtatatctgaaaatacatttgtatatgtttgtaagaacatggagaaggtatgaaaggtttatgccaggtcgtcaccttgggtaccctgggacaggtcactctggagggagtttgggggaaatttttgttccttgatcttctttgtattcctttgccaaatgtaatgaccagttaaagacaaaaagtttttacatttacatttctttattattcatttacccattgaattccactaaccaaatatataatattggcatgctac

SEQ ID NO: 332870 - DNA, 541 bp, Homo sapiens
ttgtacatactgaaattactcaatacttatttgttaggtttattagaktcgttttctcccttttctgtctttgacattgaccttatatgccctgcatgaagtggctcacagactatcagggctgattttgctacattcttccagtttgaaaaactctgaaagttaaaactctttcatattctaaggtaagtctgatctcaatttactgccagcttgaaaacatacatattttggaggtaagttgtttcagaatcatcattaagaaaagcaatagctaatgcaatgggcaggaaataaaattgttcaacacatttctctcaagagaaacatgtaagtctgagagaacttgaacaatttgcttgagaccatagtactaattaatggccagttctgaagacgttccaagtttccagtctcacaaatggactctcaacatttcagaatgagcaagcttactactgttgacacaactatcccttacatttacataacaaagtaaattgcttctaaatctagtcttcaaagacagaaacttagttaa

SEQ ID NO: 332871 - DNA, 529 bp, Homo sapiens
atctatcaattataggtaacctgaaggtaaacaaattggattatcagaaataagatggaatttggcaagtgcatatgttacccagcacatatagatataaaagtgaataccacaggtataaggaagggctggttataaaaataatggaaagataaacataaaaataatgtccttagggaaagttttttatgaaacacartgtgcatactactaaagaactgttttccagattatgagaacaggttattttctccttcagtaactcacaaaatgagtaaaacttagggacaattagcaaccaaaaccattagaaaattttgcctacagtgacaaaagaagcagtggagcacaacttaatgcaatacacttaaaaacctgtgactaaaagaaggaaattgtagcagaaaggcttagagaggctcagatgctacctgactcccatttccctcctgagattgtacgggtgattgacaaaatcctaagacttctcactgataccattaaatccagagaagagcacactgagcta

SEQ ID NO: 332872 - DNA, 621 bp, Homo sapiens
ttctcttattttctttgtcaaaacttagttgaccatatatgtttgaatttatttggctactatttctttaatgacataattgtttaattactttccactggtataatgtaaaattaaaataaatgtcccaaaagcattggactgaattcctatagtacacattatctatactatctaattagcacttcagctataccatactttgcagcactactattcgtaatctttattattttgctccatgttgctatgtaagttccatgtgctagttaatccttggtgatgtagcccaggttagggactgtggaactggagagaattgaacctgactgatgtgtttgaatgctggctgtgagttctccattaagccgtaagcttctctagcacctctcacatttctcttctagataagacatgttcccttaaatcktttttcatttcagtgtctggcatttgtttattcactgatcaaatgtttactgcatacctgttatgtgtcagactctgggccagatattagagatatgataaataataaaaatgataatcaataatcatagtaaacacatatagcccatattacatgccaggcactattttaaagtattttacatatattaa

SEQ ID NO: 332873 - DNA, 572 bp, Homo sapiens
gtcattaactataatgaagacagacatccttactttcaaaattaacattaggatcagaaaggcatggaagagtaaattaccatgctgttcaatctgacacaattccgttttaatttgtggtgatttataaacacataagcatgtggaagatgtgcatctactgatgtaaactcatgttaagtcatgggctgcagcaggatggatgagcaggacacaaatctggaaacaagatttaccagtcagggtgaaacaggtggggctaatcataggacaacaaatcccaattgttgtttttgtgtagaccaaggaactgtgatcatattcatagagaaaatgaatccagccaaggctggacrtctcagatcaaattaatcataaaaagaaaaactatttaaacatcaagttttgaatttaaatccaagattaaattttgaatttggaatttggcaggaaacctgttcagaagacaaacagaataacaacgatcagagaaagaagcatagtaacccccggtccactgatgatctgctgtgaaaactttgtattgttagatataccccacttcccagggc

SEQ ID NO: 332874 - DNA, 464 bp, Homo sapiens
tgcttcgatggctgtgtgcttctagagctcctccttgtacttctacagcccctctgtctactataaagatagcagatttaattattttttcctagctatgtgatcttgggcacttagctccctttactgaggtaccattttttggcttattaaacaatgatactgtatacctccacggtgcttttgtgagaataaaagagataatacacatgaagtgtgaccataggcacatactaggaactcaacaaatgttactatttgccctcttcactcacatatttactgtaaaagtaaacattgagtctacttattaacttttcagaagtgaattaatttrtattttgactgattcatagagcacaaatattaacattagcttaatggcaaaataaagccaatttacaaacatacacttgtatctatatttcatatttggcaatccacttttagctgagaaaataaat

SEQ ID NO: 332875 - DNA, 546 bp, Homo sapiens
actatttaagatttcccagaagatgtcttataatatttctattgaatcccatgaccagaacttttatttgatgttgcaactagctgcaagagaggctgtgtagtgtagtctctgtttgcaggcagccacgtactcagctaaagattatggaagtggaggtgggtaagtaagagtctccaccataacatttcttattttaaccaccataatagaagaaaattggtcaaaagtgaatttcagcttttcactagaggattcttaaaatagctttttagaagtagaaaaactggttactggtgcaaataaactagaaaatctagaagaaattgataaattcctggatacatacagtctcccaagactaaaccaggaagaagtcgaatccctgaataaaacaattacaagttctgaaattgaggcagtaattaataggctaccaaccaaaaaatgcctaggaccagatggaytcacagccgaattctaccagaggaacaaagaggacttggtaccattccttctgaaactattccaaacaatagagaaaga

SEQ ID NO: 332876 - DNA, 628 bp, Homo sapiens
caacctatggccaatagactatatgtttcagagaccaatgaattttaatttatatttattttcagcataaagtcatttcattattcatgttagttttattctaggatgcactagaaacactgaattacttaatacttaaccattgatcccaagagaaacagatgtgtgtgtatgtgtattgatcctgcattggagatacacacacacacacacatattctttgtgtgtgtaataatgtgatattgcatttatacaacacacacacatatgtatgtgtgtgtatatatatattctttatttttcaaaagagaaaagcaagttgacagtaktaaatcacttgcctgaggccattccactacaggtaccagagttggattttacacctgctccaactggtcccagagcaagagcttcttgcactacattgccctgccctcgaccatttttattctctggtcatctctgtatgagatctaaaacaagaaggtggagtgatatggttttgatgtatccccacccaaatctcgtcttgaattgtaactcccacaattcctatgtgttgtgggaggaactcagtaggaggtgattgaattatggggatggatctttcctgcgctgttcttgtgat

SEQ ID NO: 332877 - DNA, 628 bp, Homo sapiens
caacctatggccaatagactatatgtttcagagaccaatgaattttaatttatatttattttcagcataaagtcatttcattattcatgttagttttattctaggatgcactagaaacactgaattacttaatacttaaccattgatcccaagagaaacagatgtgtgtgtatgtgtattgatcctgcattggagatacacacacacacacacatattctttgtgtgtgtaataatgtgatattgcatttatacaacacacacacatatgtatgtgtgtgtatatatatattctttatttttcaaaagagaaaagcaagttgacagtattaaatcacttgcctgaggccattccactacaggtaccagagttggattttacacctgctccaactggtcccagagcaagagcttcttgcactacattgccctgccctcgaccatttttattctctggycatctctgtatgagatctaaaacaagaaggtggagtgatatggttttgatgtatccccacccaaatctcgtcttgaattgtaactcccacaattcctatgtgttgtgggaggaactcagtaggaggtgattgaattatggggatggatctttcctgcgctgttcttgtgat

SEQ ID NO: 332878 - DNA, 575 bp, Homo sapiens
gagtgccgggtaaaatagatttatatagaactaaacgtctcctaacataatatttgaaatacacaagatacaattgaaaatctgttgtcataccaagatccaagtaaagcacaacataacaaaagtaaatcaattggcacaaatacctagatgaatcagatattagtgctatctgacaatgattttaaagcaacaatcttaaaattaaattaattcaacaaataattaagcatgtatttgggacaagtaaaaagtgggaaatgtcggcaaatacattatttataaaactaaaccaaatagaaattaaaaacaaaatatgataacttaaaagctcattggaagagatcaaaggtaataagacaatgacagaatcagtgaagttgagaatagatcaataaaatgyattaaatcaaaaaaattgagaaaatatactgaaaataaaaatgaatgaacatctaaaaaccaataggaaaatagcaaaattcaaatatctctatccttagggttcaagaaagaagaggaggaatgtgggactgaacggtattcaaagaaataatgggtaaaaaagttcctaa

SEQ ID NO: 332879 - DNA, 542 bp, Homo sapiens
aacagcaccatacacactttcatcagtttgtttatttaatcaaaatatgttttagcattaaagatgtaaataaacaggcacaaaatgatttctgacactaaaagggaggggagacatggtagtattaaaaaagtttcccaaagaggcactgataagtattaattatcaagagagaggtaagggaaaataatctttgaagtccacattttatacgcatgaactacaaatgacctgtatcagaatgaactagatattcattaaaataattttggatccacacttgtgcccactcaatcagaatctctaaggatatgacttatgatcttcatttctgcaaatttgaagttgcmcaggagtttcttatgcatgctaaagtttgcaaacctctgttcttaacagactctaacagaacaaaatagccagatgggcactacgaaggattcatatagccacagaatttagcaaataaagaactttttaaaattttattttaattgacatataataattatacatatttatggggtacagactgacatttc

SEQ ID NO: 332880 - DNA, 583 bp, Homo sapiens
cagaatctctaaggatatgacttatgatcttcatttctgcaaatttgaagttgcccaggagtttcttatgcatgctaaagtttgcaaacctctgttcttaacagactctaacagaacaaaatagccagatgggcactacgaaggattcatatagccacagaatttagcaaataaagaactttttaaaattttattttaattgacatataataattatacatatttatggggtacagastgacatttcaatagatacattcaatgtgtaatgatcaaattcagagtaattagcatatgcatcacctcaaacatttatcatttctctgtattggacatattcaaaatcctttcctcttgccctttaaagataaattatacattagtgttaactatggtcaccctacagtaccatagaaaactagaatttatcgcttctgtttagctataattttgtatctgctaaccatcctttttatacctctcctcctccctcttcttcctagcctctagtaaccagtattctaccctctaatatggggtagaatacttattagagcaactttttagctctcacatatgagtg

SEQ ID NO: 332881 - DNA, 583 bp, Homo sapiens
cagaatctctaaggatatgacttatgatcttcatttctgcaaatttgaagttgcccaggagtttcttatgcatgctaaagtttgcaaacctctgttcttaacagactctaacagaacaaaatagccagatgggcactacgaaggattcatatagccacagaatttagcaaataaagaactttttaaaattttattttaattgacatataataattatacatatttatggggtacagactgacatttcaatagatacattcaatgtgtaatgatcaaattcagagtaattagcatatgcatcacctcaaacatttatcatttctctgtattggacatattcaaaatcctttcctcttgccctttaaagataaattatacattagtgttaactatggtcaccctacagtaccatagaaaactagaatttatcgcttctgtttagctataattttgtatctgctaaccatcctttttatacctctcctcctccctcttcttcctagcctctagtaaccagtattctaccctctaatatggggtagaatacttrttagagcaactttttagctctcacatatgagtg

SEQ ID NO: 332882 - DNA, 420 bp, Homo sapiens
gttatttcaagctcattctataaggccagcattaccttgataccaagatcagacaagggtacaacaaaaaagaaaactacaagccaatacccctgattaacatagatgcaaaaatacttaacaaaacactagcaaaccaaagccaacagtacatcaagaagattatccaccaagatcaagtggaatttaacccagggaagcgagaatgaaaawcccaaatgatcatctaaatagacacaacaaaaaagcatttgttaaaatttgacatcccttcataatttaaaaaacacagtaaattaggtatcaaaggactatgtcaacaaaataaaggccatatatgacaaacgcagagcaaacttcatactgaatggtgaaaagttgaaaggctttcctctaagaactggaacaagacaaagctgc

SEQ ID NO: 332883 - DNA, 573 bp, Homo sapiens
agcagaaactacaggggcgtgccaccacgccccactaattttttgtatttttagtagagacggggtttcatcctgttagccagaatggtctggatctcctgacctcatacccgcctgccttggcctcccaaagtgttgggattacaggcatgagccaccgcgcccggccctagtttataattttaatgaagtgcaacctaccaattatttctttcacagaacatgcctttggtatcatatrtaaaaataattgccatattgaagatcactatattttcttccacatgatgtctatctatatgttaacataggtaggttaccatttaggacttttgtatttttgaattctgcgtgacgtcctataatctattttgagtttgtttttattatggtacaaggtctgtgtccaaatttatttattttgcatgcgcatgttcaggtgtttctgtacccttagttgaaaaggctatctttgttcaactgtattacctttggtcctctatcaaaaatcagttgattacatttatgcaggcttatttctgagctctctgttctgttccattggtttatttg

SEQ ID NO: 332884 - DNA, 632 bp, Homo sapiens
ccatgccttgtattaagcttaaactaggctaagataaaggctatattagacccatcaaaacagagtctataaacaggctattaaatgtttaaaattatccacaagcaagttagcttcttcccaggccaatcttcagcagtcttacagaagaaaacaaaattaaacaaacaacagcatagccatcacaatgcttaacaccaaatcaggggacaaaacagtagatatgacatgtaactagaaaaattagaaaaraaaacccagaagtgacagagataatggtagtagcaaaggccattttttgacttgtgaagtattattaacttttatcatatatatttataagctacaacatgatgttttgatgtatacatcaaatatgatgtatacattgtggaatgattatatcaagttaaataacatatccaccaactcacatactttctttttttgtgtgtggtaagaatacttaaaatcttactctcagcaatttttaagtgcatagcacgttattactaactgtagtggccacatggtaattcctcctgtctaatataaactgttccttttctccagcaaacaaaggcttttaaacatctactgtaaatgttgcaagtatgctgaggcatttaaag

SEQ ID NO: 332885 - DNA, 632 bp, Homo sapiens
ccatgccttgtattaagcttaaactaggctaagataaaggctatattagacccatcaaaacagagtctataaacaggctattaaatgtttaaaattatccacaagcaagttagcttcttcccaggccaatcttcagcagtcttacagaagaaaacaaaattaaacaaacaacagcatagccatcacaatgcttaacaccaaatcaggggacaaaacagtagatatgacatgtaactagaaaaattagaaaagaaaacccagaagtgacagagataatggtagtagcaaaggccattttttgacttgtgaagtattattaayttttatcatatatatttataagctacaacatgatgttttgatgtatacatcaaatatgatgtatacattgtggaatgattatatcaagttaaataacatatccaccaactcacatactttctttttttgtgtgtggtaagaatacttaaaatcttactctcagcaatttttaagtgcatagcacgttattactaactgtagtggccacatggtaattcctcctgtctaatataaactgttccttttctccagcaaacaaaggcttttaaacatctactgtaaatgttgcaagtatgctgaggcatttaaag

SEQ ID NO: 332886 - DNA, 581 bp, Homo sapiens
gaggccagattttattcctttctcccttctatgttttatcttaaatctcaaaagtcaccttttcacaaggggacctgcttcacggtctaattcactgagttccactgcatgtcctgatataaatgttaacgttccaaatcttttgcttttaatgtaactccaagaataggaaatatagcctatttattattttaagccattttattcaaagctggaaaatatattaataacatattaagagagtactaaaattacttatttgaagttcacatttaacagcccaaagttcaagactataaatattgacacatatttgccaccaatatctgcctctagtaatagccccgtggtttatatcatcttctgtcattttctagattatggtatctttattagatgttaatttagagataacttattttcagactccagatttcattatactttttcagtgaaaaagtaaagcatcaaacaatttaagrttggtttattaaaagagaagtagggtcgtcagtgacttccatatttctaaatgtaatggcattttcaattgtcacagtacttgactgttagcaaacttt

SEQ ID NO: 332887 - DNA, 651 bp, Homo sapiens
tcagaataaaggccaacatttatttaatgtggctgtcttagttttgtgttgctataacagaacacctgaggctgggcaatttataaacaaaagagatttatatggcttattaatcttgtggcttgaaagttcaagactgggcagctgcatctagcgagggccccatgctagttcaactcatggcagaaagtggaaaggtgaaagtcttgtgcagagatcacatggtgaaawaggaagcaaaagagagaaaccaagggaaccagactctctttttgtaacctgctttcacataaaccaatttattccatatgagaaggagaactcactgacccctgagggacggcattaatctattgatgtgtaatctgttcccataacccaaacacctcccactaagccccacttctcaatactgccacattgggaatcatattttaatatgagttttgcgggggacaaattgtattcaaaccatagcaatggcctacaagaccttgcatggcctggcttctacccacttccttagcatcatcttatactacacctccttgattcctagctctaagaacaagtttctttgatttgtcaaacaagctatagttgaacctacagcataaactttgtgtatgttgtcctttcgccaacaatgca

SEQ ID NO: 332888 - DNA, 621 bp, Homo sapiens
cagtttttctacacccctaagactgaggttgttttgtacatttgtaatacatttagataattttttcacattctgcattctatcccagaatcctccagttaagtgattaaaaaaatttgcacagattgtttcacgctttgagtcacataattctccagattttaacaaattatctttaaaaatttctgattactcttaaaaaacttacgaaagttattgtgaaggtggttctggattattgcaatcttctctgatcttccaaatttctattcattgctactttgctctttatggtttcacttattcctgctatgtatgaataatamatttagtagagaacatggcaactcctgtggccaagaaatataatgactgggagatttcagcttttctctttggctatacaattgatctaaattaaatacaattaattaatttaatacaagaattgggtagctgagaataacatagagttaaggaggcatctagaaaagaaggaaaagcagcgctgagaatcagaatacactgaaagaggaattgggaacacatgtttagctgtcaatttgctagacttgtacaggatacacttcaagattttattaaggttaaacttattaggat

SEQ ID NO: 332889 - DNA, 518 bp, Homo sapiens
aagaaaaaagtagagtgaaaaaagagtgagtcacattgagaatgttttttactgatacaaacttatgaagcacagtctgttctcaaaaaggttattatctttaagtgttaatgtaaatctattctcaaattataatttattattaataatttatgatgataacactactgacaatttattgaatatttactatgtcaggcattgtgttaatctttttctagacattacttcattgaattctctcaaggattttgtgagactagtatatttatctcaagacatgtcctgacacaggcaccaaggcttaaaaagtttccatgtttgcagtttatgttgagctaagaaattaagattcagtgttcaattcaacgttttaccacaaactcactgttaaatagtatatttatagatgtatacattgtatgtattaaaaataatgtctcaaccttctrtacttcctagatgtgtttatctaccaacacaacgaagaaaaaattttcaaaggatcagaaagcata

SEQ ID NO: 332890 - DNA, 661 bp, Homo sapiens
taccttaataaaattgtttgattctgcaacccattctcctaattcaatggaaaggaaaaaacatgagtctatgaggaagtagctaaggtcaatctgagtgattaacactcaacttcccttcaaatcacccacctgtggccataccttggatggagcttgaacacctcaactggcttttccttggtgaaggcctctttcaattgaggctcctttttttccttttgctcattgtcacctggcagttttgttctgcagactttccaggcatgactcttcctctcaccaccatcaccaacatatcaaggaaacaccactggtaccacagataaaatatcaccatactactgaagctgyagaataaaatcgttataaaattacattggcatcaaagatttcttgtcattggtcactattgaacattggaaaagaataggtaacagtggggtgagtaccctattcgaaccacaatgggacatcccattttcttctggattagccaattacaggaaatgtttctatgccacaaacacccttctagatactgcattgtctgagaccccacatttcatttaggaatatcttcttgggatgtctaaaggagggttatccagagtaagagaattagctggatgctgagagaaatgtcagggcacagaagcac

SEQ ID NO: 332891 - DNA, 661 bp, Homo sapiens
taccttaataaaattgtttgattctgcaacccattctcctaattcaatggaaaggaaaaaacatgagtctatgaggaagtagctaaggtcaatctgagtgattaacactcaacttcccttcaaatcacccacctgtggccataccttggatggagcttgaacacctcaactggcttttccttggtgaaggcctctttcaattgaggctcctttttttccttttgctcattgtcacctggcagttttgttctgcagactttccaggcatgactcttcctctcaccaccatcaccaacatatcaaggaaacaccactggtaccacagataaaatatcaccatactactgaagctgcagaataaaatcgttataaaattacattggcatcaaagatttcttgtcattggtcactattgaacattggaaaagaataggtaamagtggggtgagtaccctattcgaaccacaatgggacatcccattttcttctggattagccaattacaggaaatgtttctatgccacaaacacccttctagatactgcattgtctgagaccccacatttcatttaggaatatcttcttgggatgtctaaaggagggttatccagagtaagagaattagctggatgctgagagaaatgtcagggcacagaagcac

SEQ ID NO: 332892 - DNA, 661 bp, Homo sapiens
taccttaataaaattgtttgattctgcaacccattctcctaattcaatggaaaggaaaaaacatgagtctatgaggaagtagctaaggtcaatctgagtgattaacactcaacttcccttcaaatcacccacctgtggccataccttggatggagcttgaacacctcaactggcttttccttggtgaaggcctctttcaattgaggctcctttttttccttttgctcattgtcacctggcagttttgttctgcagactttccaggcatgactcttcctctcaccaccatcaccaacatatcaaggaaacaccactggtaccacagataaaatatcaccatactactgaagctgcagaataaaatcgttataaaattacattggcatcaaagatttcttgtcattggtcactattgaacattggaaaagaataggtaacagtrgggtgagtaccctattcgaaccacaatgggacatcccattttcttctggattagccaattacaggaaatgtttctatgccacaaacacccttctagatactgcattgtctgagaccccacatttcatttaggaatatcttcttgggatgtctaaaggagggttatccagagtaagagaattagctggatgctgagagaaatgtcagggcacagaagcac

SEQ ID NO: 332893 - DNA, 617 bp, Homo sapiens
ggggtgcagaaataagggattggggcacagagataagaggtcggggtgcagaaataagggattgggggttcttgccccctagaaaagcrggacttgccactaagggtgaaggagaaggggttcagggatacttgcccctcccccagaaaagcgggacttgccgctaagggtgaaggagaaggggttgaggggtagtgagggagattggagaagagagtaaaaagaggccgcttaccggatttgaaattggtgagatgtttcttgggctggtcggtctgaggacctgaggtcgtaggtggatctttctcatggagcaaagagcaggaggacaggggattgatctcccaagggaggtcccccgatcggagtcacggcaccaaatttcatgcgcgtctgtgtgaagagaccaccaaacaggctttgtgtgagcaacatggctgtttatttcattgggtgcaggcgggctgagtctgaaaagagagtcagtgaagggagataggggtggggccgttttataggatttggggaggtaatggaaaattacagtcaaagggggttctctggtgggcaggggtgggggtcacaaggtgcttagttggggagcttctgagccagga

SEQ ID NO: 332894 - DNA, 617 bp, Homo sapiens
ggggtgcagaaataagggattggggcacagagataagaggtcggggtgcagaaataagggattgggggttcttgccccctagaaaagcaggacttgccactaagggtgaaggagaaggggttcagggatacttgcccctcccccagaaaagcrggacttgccgctaagggtgaaggagaaggggttgaggggtagtgagggagattggagaagagagtaaaaagaggccgcttaccggatttgaaattggtgagatgtttcttgggctggtcggtctgaggacctgaggtcgtaggtggatctttctcatggagcaaagagcaggaggacaggggattgatctcccaagggaggtcccccgatcggagtcacggcaccaaatttcatgcgcgtctgtgtgaagagaccaccaaacaggctttgtgtgagcaacatggctgtttatttcattgggtgcaggcgggctgagtctgaaaagagagtcagtgaagggagataggggtggggccgttttataggatttggggaggtaatggaaaattacagtcaaagggggttctctggtgggcaggggtgggggtcacaaggtgcttagttggggagcttctgagccagga

SEQ ID NO: 332895 - DNA, 570 bp, Homo sapiens
aacatcacacaccagggcctgttgttggatggagggagcagggagggatagcattaggagatatacctaacataaatgacaagttaatgggtgcagcacaccagtatggcacatgtatacataggtaacaaacctgcatgttgtacacatgtaccctagaayttaaagtataattaaaaaaaaaaaaaggccatatgctttgacacagcaattggatttgtgggaattcattctatgaaaaatacattcaaatgttaactgcagtaaaattactgcaatggtaagaaataaggaacaacaatgtacatcaacattagactggttaaataaattatgtcatgtccaaacagcaaatgcaatatattcattaaaatgttttatatgtaaatgatgtttacagtatatcatggaaaaataaagaagtttttggaattctatattcaaaacaaacaaaaaaaagagtaggaagagcacattctaggcaagaaaaataacatgtgcaaaaagcatttacaaaatttatgagctgaaaagagtgtggagtgtcctatgagctgatataagcccagt

SEQ ID NO: 332896 - DNA, 593 bp, Homo sapiens
atggttaatattgagtgtcaagctgattggattgaagggttcaaagtattgttcctgggtgtgtctgtgagggtgttgccaaaggagattaacatttgagtsagtggactgggaaaggcagacccaccctcagtcttggtgggcatcatctaatcaactgccagcacagctagaaaaaagcaggcagaaggtggaaagagcaaacttgctgaggcttccaagccttcatctttctcctgtgctggatgcttcctgcctttgaacactgaactccaagttcttcagcttttgcactcttggacttaaataccagtggtttgccatgggcttttgggcttttggccacggactgaagactgtactgtcagcttccctacttttgaggttttgagacttggactggtttccttgctcctcagcttgcagatgtcctactgtgggacttcaccatgtgatcgcatgggtcaatactccttagtaaactcccctaatctatacatctctcctattagttctgtccctctagagaacgctgactaatgccaattttggtactaggagtgattctagtggttacagaattttaaggatgg

SEQ ID NO: 332897 - DNA, 396 bp, Homo sapiens
tggcaacatcccctctcctacccacactgccatcagcctttccacctttgtctgaggagattaaccatgtactgcctgaggcaacagggttgacctcccctgaggcagttgccaggccagacaatgctgatccttctcaaaacccacacccaacacctctgttttcatctagacctataactagactcaagtcatgacaggcccctaaaggtgagattcagagtgtgacacatgaggaagtgcactrcactccaaatgaactgctagggttttctaatttatataagtagaaatctggagaacaggcataggaacggatattacgggtgagggataatggtggaaggagcataaagttggagaaggctgaatttattaatattggcccactaagca

SEQ ID NO: 332898 - DNA, 400 bp, Homo sapiens
tgccatatgatctacattttatatactataactgtattactatactatagtatactataatatactacccatattgaggactggatcctgctactcatcatttcttcttcaacttattaacatattaatatattaatatttacttcttaacatattaatgttaagattaaataatcataacaatatgattaatagttcattcataagataagcatgaagaattttgttatgtggaatgcactwtcttaacagttatgaaaatcttggcctttaccctcctttcattttgaagtttcttcaacatttaaataaaaccttaataattcaggaataattctggaaaaaacactatcttacaatttcttcctctcgagtaaaacacatttttgaatgcaagcat

SEQ ID NO: 332899 - DNA, 597 bp, Homo sapiens
ggattcatactgacatttagacttattataaagctacaataattgagaaagtgtggtttttccaaaagaataggaacagaggttagtagaacaaaatatagtgccaagaaatagatccatgaaaaatatggtcaactgatcttagacaaagtagcaatggcaattccaggtagaaagaatratctttttagaagataataacaggaaaatagacatacacacaaaaaatgaacatagacacagaaccttgtaattttcagaaattttagctcaaaatatacattacatctaatgtaaaacacaaaactaaaaaatttctaaaagaaaaatagaagaaaatctaagtgacttctgcattatcattgagtttttagtcacaacactaactaaaagtactacccatgaaagaaaaaattaataaattggattttgtcaaaattgaaaacctctgctctgtgaaagacactgctaggaggacaaaaagacaaaccaaagtctgggagaaaatatttggaaaacacatatatggtaaacagcttgcatctaaaatatacaaaaaccacttaacactcaatgataagaaaataatcgaattta

SEQ ID NO: 332900 - DNA, 631 bp, Homo sapiens
aatcatttctctacagcactggccatctgcgtggccaattcaacccgctcaatttaacatagytggagttggtaaagcccctgaagtatatcaaagtggttatattttgcactgtgaagggcccgatggacaacctgggactattcaaccaattataacttctgtacctataaatttatggggaagagatttattacaacaatgaggagcacaagttctaattcctgaacaattatatagccctcaaagtcaatatatgatgcatgaaatggggtatgtccccggtatgggactaggaaaaaatttgcaaggtttaaaggaactgcttcaaggggaaagacaaagttctcaccaaggtttagggtatcatttttgatggcagccattgttaagcctccagaacctataccttcaaaatggttaacagacaagccaatttggatagaacaatggccactgagtaaaaagaaactggaggctttagaggacttaaaattggcctttaatagtcatagatttaaaagattgtttctttactatccccttagctgagcaagactgaacaatttgcatttacaattcctgcagtaaacaacctgcagcctactaagcgttttcattgttttacaga

SEQ ID NO: 332901 - DNA, 631 bp, Homo sapiens
aatcatttctctacagcactggccatctgcgtggccaattcaacccgctcaatttaacatagctggagttggtaaagcccctgaagtatatcaaagtggttatattttgcactgtgaagggcccgatggacaacctgggactattcaaccaattataacttctgtacctataaatttatggggaagagatttattacaacaatgaggagcacaagttctaattcctgaacaattatatagccctcaaagtcaatatatgatgcatgaaatggggtatgtccccggtatgggactaggaaaaaatttgcaaggtttaaaggaactgcttcaaggggaaagacaaagttctcaccaaggtttagggtatcatttttgatggcagccattgttaagcctccagaacctataccttcaaaatggttaacagacaagccaatttggatagaacaatggccactgagtaaaaagaaactggaggctttagaggacttaaaattggcctttaatagtcatagatttaaaagattstttctttactatccccttagctgagcaagactgaacaatttgcatttacaattcctgcagtaaacaacctgcagcctactaagcgttttcattgttttacaga

SEQ ID NO: 332902 - DNA, 585 bp, Homo sapiens
tgtaaacaagtcatatgcagggtaaccttgaatatatgacactgtagagaaaggagaagtagatggcaagtctctgtctccaaaggtatagcccacaagttgcacacgttgtttttcttcacaagtgcttgcctgcatattattccattgccayatatatcttaaaactaggctgcaaaaaatcacatctttattctggaaaacttgatattcagctaacaatcctacttaaaaatctctaaaaaggggaaaaatggatgtgggctggcaagtggcagtgtctgctacgtcattagaaagtatgcatggccaatcatcacatcccgcctttaacaacaaaaatgtcctttaaaaattcattctctcccttattaaggaaatgacactataaatagatatttatatccaatgatttagttttccattttcctttaaaccctatacatctggcttgtgattcagcagtgatttattgcacataagcatgtgtgactacgaaagcaagttttattttgggaacaattttaagtgttgttcattatccatttttattaaagatattttaggtggcctgagtgacataag

SEQ ID NO: 332903 - DNA, 585 bp, Homo sapiens
tgtaaacaagtcatatgcagggtaaccttgaatatatgacactgtagagaaaggagaagtagatggcaagtctctgtctccaaaggtatagcccacaagttgcacacgttgtttttcttcacaagtgcttgcctgcatattattccattgccatatatatcttaaaactaggctgcaaaaaatcacatctttattctggaaaacttgatattyagctaacaatcctacttaaaaatctctaaaaaggggaaaaatggatgtgggctggcaagtggcagtgtctgctacgtcattagaaagtatgcatggccaatcatcacatcccgcctttaacaacaaaaatgtcctttaaaaattcattctctcccttattaaggaaatgacactataaatagatatttatatccaatgatttagttttccattttcctttaaaccctatacatctggcttgtgattcagcagtgatttattgcacataagcatgtgtgactacgaaagcaagttttattttgggaacaattttaagtgttgttcattatccatttttattaaagatattttaggtggcctgagtgacataag

SEQ ID NO: 332904 - DNA, 545 bp, Homo sapiens
tcattcctcttaaattatgaagtaaccaattttttaataattttagcccttttatttagttgataatttctcaattaattcatattgtgtatttgaatttctattctggttaaaaagtactcagaaaatattcatagtttatgcctgtaggcattccagccaaaataagttaattagttctatagaaatactataaaaatatgaagaaagaaaaatatgcaggccctgccacttaaatagttatrgtctagtgaaagatatgatgtcactgaataatccaagaattattggattaacaacaaccacactcattagtcagccagtcttgagcatctagagttcctagccttgagaaattttatacagggcctgagattgaaaaaaaaaacaaaaaagtgaggaccataaactattttttacacttcttctagaaagtcctttttggattgtttgtttataaattcatactttccagtggcaatggtaattttctaaagttaattaaccattacagacacatagtaagttttaaacaatgctgctga

SEQ ID NO: 332905 - DNA, 545 bp, Homo sapiens
tcattcctcttaaattatgaagtaaccaattttttaataattttagcccttttatttagttgataatttctcaattaattcatattgtgtatttgaatttctattctggttaaaaagtactcagaaaatattcatagtttatgcctgtaggcattccagccaaaataagttaattagttctatagaaatactataaaaatatgaagaaagaaaaatatgcaggccctgccacttaaatagttatagtctagtgaaagatatgatgtcactgaataatccaagaattattggattaacaacaaccacactcattagtcagccagtcttgagcatctagagttcctagccttgagaaaytttatacagggcctgagattgaaaaaaaaaacaaaaaagtgaggaccataaactattttttacacttcttctagaaagtcctttttggattgtttgtttataaattcatactttccagtggcaatggtaattttctaaagttaattaaccattacagacacatagtaagttttaaacaatgctgctga

SEQ ID NO: 332906 - DNA, 600 bp, Homo sapiens
cttgaattaaatggtatatatctggagacaaactcaggaagacctctacttttgcccttatcagattggttggcccttatttctatcttgagtctagtgaaatcttagttcttccaactcattaaaagaaacaagtggttctataaatccctaaagttacataagtaaaactcatttaaattggttttatgatatgctttatatatttatatttaatatggctttttgtggtgtcctgagaawttacaatatgtccaaacaaagaaagaggctatacacacagtcctaacgtagaagcagcttggtaggagtctggtttccacaagtgggaaacaatcgcatcagaatttctagagtcatttattatgttttgttttgtattgtttatacatttaaatgctagtgagagaaacaaaagtttggctcttctaatataagcacttttaaaagtcattaattttaactgtagatctaaaataaataatattttagagaattggaggaggacagaatgtctgtactcattggaggaggacagaatgtctgtactcatatatgtaaatcaaggcaattaaaataatgacagataatagccctaat

SEQ ID NO: 332907 - DNA, 612 bp, Homo sapiens
tctaaacatagtttgatctatctagtacagcctacatggaaatgtccaaattattctgtaaggctattttttaactgataaagtcataaatcccaaggtaatgccaattactaatgattctgcctagtttacagcaattttcagattcagtccaattttggataaaatattaaactgtgcatgtctgagatgcagtgataaatagaagtaatcttttagcaatagcagtttcatgtaggaagcagttgtaatcatggtaaccagtagccagtgacattaccagatatacaacccattgtttgtagcagcagtagaagagaactgccctttattagcagttttgagacacttcagggayccatatggaaaaaaggagtgttctgaaatgaactgggagtctgtgatttggttgatggatataaatcagagatttttatgcttatttcaaattacagctacactattgagtcatttggggtggggcactttggaggaacattataacaatttattaaagctcaactaaattttattacagtttcacatttgtatatcataggaagtgtgacattttagttgtgctaaattatacaactttttagaataatttac

SEQ ID NO: 332908 - DNA, 641 bp, Homo sapiens
acacagcaatatataagtatagaatattgtgacattcactatcttagccttcctctgttacagttattttattttattcttgttattttgcatttgcatcctacttttggtttattaagtattatatatccctgaaagtctctttcaatcactttgcatcttttaaaacaaagcagggtatgyagaaactttttttgaaaaaattttaaatcaaaaagtgtgtggttaccttacacaaacttacatgtctctttgcagtttttcagcacatttctacatgttgtttttagtaaagccttagaataaatcaagagcgaatgagccagaaaaactgttacaaagacagtctgctagatagatatcttagatttcttgcacatatttcaatctaaattgccattaagacaattgccatacccttctgactggtgttcccttggtcacctttaaggaatatatcttgttgcctaacatttgaagtgtctcatgtgcaatactgatggagcttctcaagatgccagatgtgttatctgtgttagttcaggttgtgaaatcaatttatttaatttttgatgtgatcactgatttgaagacttttatgtgggctttaatttagtgcaagtttgacatgagtctctgtc

SEQ ID NO: 332909 - DNA, 641 bp, Homo sapiens
acacagcaatatataagtatagaatattgtgacattcactatcttagccttcctctgttacagttattttattttattcttgttattttgcatttgcatcctacttttggtttattaagtattatatatccctgaaagtctctttcaatcactttgcatcttttaaaacaaagcagggtatgtagaaactttttttraaaaaattttaaatcaaaaagtgtgtggttaccttacacaaacttacatgtctctttgcagtttttcagcacatttctacatgttgtttttagtaaagccttagaataaatcaagagcgaatgagccagaaaaactgttacaaagacagtctgctagatagatatcttagatttcttgcacatatttcaatctaaattgccattaagacaattgccatacccttctgactggtgttcccttggtcacctttaaggaatatatcttgttgcctaacatttgaagtgtctcatgtgcaatactgatggagcttctcaagatgccagatgtgttatctgtgttagttcaggttgtgaaatcaatttatttaatttttgatgtgatcactgatttgaagacttttatgtgggctttaatttagtgcaagtttgacatgagtctctgtc

SEQ ID NO: 332910 - DNA, 641 bp, Homo sapiens
acacagcaatatataagtatagaatattgtgacattcactatcttagccttcctctgttacagttattttattttattcttgttattttgcatttgcatcctacttttggtttattaagtattatatatccctgaaagtctctttcaatcactttgcatcttttaaaacaaagcagggtatgtagaaactttttttgaaaaaattttaaatcaaaaagtgtgtggttaccttacacaaacttacatgtctctttgcagtttttcagcacatttctacatgttgtttttagtaaagccttagaataaatcaagagcgaatgagccagaaaaactgttacaaagacagtctgctagatagatatcttagatttcttgcacatatttcaatctaaattgccrttaagacaattgccatacccttctgactggtgttcccttggtcacctttaaggaatatatcttgttgcctaacatttgaagtgtctcatgtgcaatactgatggagcttctcaagatgccagatgtgttatctgtgttagttcaggttgtgaaatcaatttatttaatttttgatgtgatcactgatttgaagacttttatgtgggctttaatttagtgcaagtttgacatgagtctctgtc

SEQ ID NO: 332911 - DNA, 396 bp, Homo sapiens
catagaagtcaagaactgaggtttgggaacctccacctagatttcagaggatgtatggaaatgcctggatgtccaggcagagatgtgctgcaggggtggaaccctcatggagaacctctgctaggacagtctggaagggaaatgtggggtgcaatcccacatgtagagtccccactggggcactgcctaggggagctgtgagaagaggcccaccatcctccagaccccagaatgatagatccacttatagcttgcactgtgcaagaaagttgactgaaggacagattgtcattttaaaaaayaagtgataaataattatagctactgaatgctgctttcatgagttcttcattaaatattaggtcaataaaggatttaagttaaagggaggttaaa

SEQ ID NO: 332912 - DNA, 396 bp, Homo sapiens
catagaagtcaagaactgaggtttgggaacctccacctagatttcagaggatgtatggaaatgcctggatgtccaggcagagatgtgctgcaggggtggaaccctcatggagaacctctgctaggacagtctggaagggaaatgtggggtgcaatcccacatgtagagtccccactggggcactgcctaggggagctgtgagaagaggcccaccatcctccagaccccagaatgatagatccacttatagcttgcactgtgcaagaaagttgactgaaggacagattgtcattttaaaaaacaagtgataaatarttatagctactgaatgctgctttcatgagttcttcattaaatattaggtcaataaaggatttaagttaaagggaggttaaa

SEQ ID NO: 332913 - DNA, 533 bp, Homo sapiens
taaattcagtaaattataaaatcattattgaaaatgacatattaatataatttcactttccacaaatattacagttttagagtaaactgaaaaacgcaagtacttyatcaatggggtacttaggtataacttgaagcatacaagtgatgagtaatatatttactaaatgcatatctgggaaaactaaaatatgttttcatagatgaagaaaactgtaataactggataatttgtttttctataatggcaatatgacacaaagacgtgataaagcaacagaagtcaaaattatacttcaccatcatatttgtatataaatgacatttggtaaataaaaatgtgtaaactatctcaagatcagttaactttatataatggtgactgtttaaaatgtctctgacggcctgtatggagattacatttggttaaatgtacatgcagccacaggcacagggcctcacacattttaagacttcagttatgtttgtatttcttggggtgtgtctttttccttctccaaatggttagagcaa

SEQ ID NO: 332914 - DNA, 630 bp, Homo sapiens
cagggtaagaaagtaaactgtgctgggaaccatggatggaaaggggcaagacaggttagagaaatgtggcagaactagagtctgtgagacctaatgattgtctagatgttggaagcaagagggtaggagaatagtcaacttttaaatccaggtagaaacttgaaagcaaatcagaaaaataaaaggaggaatggtaacggtggtgaaggtgtacatgctggattcaaggtatctgtaggacacccagataaggaygccccaaaaatgtttgaaaagataaagtttaggtgtggtggcacacacctgtaatcccagcactttgggaggccgaggcaggcggatctcttgcgctcaggagtttgagaccagcctgggcaacatggcaaaatcccgtctctacaaaaaaatacaaaaattagctggacatggtcgtgagcacctggagctactcaggaggctgaggtgggaggatcacttgaccccaagaggttgaagctgcagtgagctgagatcacgccacctgggtgatgcaatcctatctgggtgacaaagcgagaacctgtctcgaaaaaaagaaaagacacgataagatgagaaccaaaataagggcacattccaacgtatggcaag

SEQ ID NO: 332915 - DNA, 630 bp, Homo sapiens
cagggtaagaaagtaaactgtgctgggaaccatggatggaaaggggcaagacaggttagagaaatgtggcagaactagagtctgtgagacctaatgattgtctagatgttggaagcaagagggtaggagaatagtcaacttttaaatccaggtagaaacttgaaagcaaatcagaaaaataaaaggaggaatggtaacggtggtgaaggtgtacatgctggattcaaggtatctgtaggacacccagataaggacgcccmaaaaatgtttgaaaagataaagtttaggtgtggtggcacacacctgtaatcccagcactttgggaggccgaggcaggcggatctcttgcgctcaggagtttgagaccagcctgggcaacatggcaaaatcccgtctctacaaaaaaatacaaaaattagctggacatggtcgtgagcacctggagctactcaggaggctgaggtgggaggatcacttgaccccaagaggttgaagctgcagtgagctgagatcacgccacctgggtgatgcaatcctatctgggtgacaaagcgagaacctgtctcgaaaaaaagaaaagacacgataagatgagaaccaaaataagggcacattccaacgtatggcaag

SEQ ID NO: 332916 - DNA, 625 bp, Homo sapiens
ctgaatgaatgaatgaatgaatgaatgaatgaatgttttcgtgctgaagcactgttatactgctataaacgtctctacatgcttgctctcaatttctgtacttacctggttttggatttgtccacagaccacactttgagtaacaatggtttacatgacaaatgaaaaaacgcatacaggacactttctgaaagtaaggctaattttaagtcattcttagagataaaaggacagtgataactgagcttagaaaatgtaaaggaaacaccttcacccgtttcacttataaactccctaaggttatacagattagatgactggggaagattcaggatgattgattttcacttgtgctatttcaaggtatcagagacaaagtcagtaactgcctgtaaaccaaagtagaccaagtctcttgtagacggaacctcctgcctgagtcttaccagtcattgttattattttcatactcaattcatttctcattgatttgttcataagaaacagcaytgaacacaggttcttgcccacacaaggacatgctttactctgtttagttcaaaaagatctattccttcccaacagtggtaaaatgtagaagttgagaatgaaaccagagtcagtc

SEQ ID NO: 332917 - DNA, 618 bp, Homo sapiens
gcaccgggacagcggccagaactgctgggcgggggatcggtgagctccccagctcccgggccaaactccggagtctgatcgctgattggctggccccaccccagaaagggagggaccggggyagaaggggagatcgacgaggcggggcggcggagggggacccaagagccgagcgccccacccttcccgggatggttggaatagttggagcgggagactagggcctccgctggcggcgggagcgggacgggcggaggaatgcgagctgaggaacggaatcaggttctaagagtgttgctctctgtttccctctcacttgaattgctcatccgaaaatcctcaagatctgggagccgggtggaccaggagattctgaaattataggcaaaatcttgtatttgcctttacctagattttgagcacaaaaggacccttgtcctttacaatattttctaagaggcctctcggatttcctcatcaccaaccccaaccaggttactaactcaggggtaagcttagggggttgtttgtggggggcggggggagaaagagagaacgtatttggggtcacggtggtggtgaagggctgcgaagctcctctaagttctttttagaatt

SEQ ID NO: 332918 - DNA, 618 bp, Homo sapiens
gcaccgggacagcggccagaactgctgggcgggggatcggtgagctccccagctcccgggccaaactccggagtctgatcgctgattggctggccccaccccagaaagggagggaccggggtagaaggggagatcgacgaggcggggcggcggagggggacccaagagccgagcgccccacccttcccgggatggttggaatagttggagcgggagactagggcctccgctggcggcgggagcgggacgggcggaggaatgcgagctgaggaacggaatcaggttctaagagtgttgctctctgtttccctctcacttgaattgctcatccgaaaatcctcaagatctgggagccgggtggaccaggagattctgaaattataggcaaaatcttgtatttgcctttacctagattttgagcacaaaaggacccttgycctttacaatattttctaagaggcctctcggatttcctcatcaccaaccccaaccaggttactaactcaggggtaagcttagggggttgtttgtggggggcggggggagaaagagagaacgtatttggggtcacggtggtggtgaagggctgcgaagctcctctaagttctttttagaatt

SEQ ID NO: 332919 - DNA, 577 bp, Homo sapiens
caaattacgaaccactactttatttacgtagggtatacaccaagtaaccaatgggaaacctctagagggtagttaaaccccagaaaattctataacacggctcttgagctgctgtgctccaccgctcccaccctgtggagtgtactttcattttcaaagaatctctagttgcttcattctttccttcctttgtgcgttttgtcaattctttgttcaagatgccaagaacctgcacaccttcaaccagtcacatatacacaggattcaaaaatttagaagttagttcatctgaartggaggcatttttctgcctaccacacttacaaaaagtaatggatgaatagtcaaagataaaaacaaattcttcattctagttgatttaccctttattagtagttctatttaaagttactggatcagaaaatggaggtttaattatactaaaagtcataatctgagcaatagagaagaaaaatataattagtgaaaattataaaaaagacttgatgagtaggtgagaataatgtaacaggctaaatttccaatactttatactattaatattatatataaacat

SEQ ID NO: 332920 - DNA, 595 bp, Homo sapiens
tagaatttatcattcttactgtgtttttcacaacagtttgaacaaactacaaatttattatgctcattgctatagggtttaaaatatgaaatattaacacatatgttaaatggaaatatataaatttaaaagatgccaagtgactgtacttgattaattgttagataaaaggataagtgctgtgaattcaaaacaaagagaagtcactgcaggggaaaaagtctggaacacttttcacttttctgctagaataggagctgaagttgagcttcgaaagttgaatatgtatttgaattgtaatcaactttttaattttgtytcaggtataccttatataaataagcatataacaagaaatatacatatgaatatatagagagaaataaatgtattattgaaatataatctataatatgtgacatatgttatatatacatatttatattatatattctatatataatcttaattatatatttatgttatatattatatatacaattataattatttatatatttctatatagtagaaatatgtaatatatatttgtatgtatatacatatataggtattttataggcttatttctgcc

SEQ ID NO: 332921 - DNA, 639 bp, Homo sapiens
tagtaattctactcagttacataaatttgatagtaagaaaagccatggaatgttggtgattttcatagcacaggacttcttcatttataacttatttcacataaagaatggtcatgtccagggtacattagttatttttgcttatttgcttcagagatcacttaacattctttttgtctacccagcatcttaatctacatattgtgtttgtaaaattcccaaccacttaggtatatccagtttcttgtttagaagccaagtataccagagtcttactttcccagtccctcacagaaaaattacaaacacctaactaaggttgtgctgattccacattgactttgaaacggttgctagttgcctgaagaagaagggacacaacgacatgctttctggtgataggtagctgcagtgagtgcagctaaacccagaggacagtctcagcagagctgcattaggagagactgtttctatgactctgactcagcggttcccatgacataaacaggtatcatctcatttccagagacagagttatgtctttggtggactagatgtgcagcatgatttgagcattgcttttggctgyttggtctccaaagctggttctctacatctctggagatcttatgagctatc

SEQ ID NO: 332922 - DNA, 579 bp, Homo sapiens
aatttaagacttacaaattgtttttgtcaaagaagcctttccagatgtttcgtttgaatattttataaatttatgcstgtaaattttatgtaattcaataaaataggtagtttttatataagattttccctatatgcttatttcaaatataatataccaaatatcatgcattaaagaatcaacatgcatgcttacactgtacttactaagtattctatattgtgtttctaattttatgaggtacaaagaaagtttgtttaatgcttagaagaaatatagttcttaaaccttttaatatagttgttaacaagactattcctttaatatcccattatattatacattctagtataaataaatgatatttaaaataggaatacatgaaatgatattagtcaaattatctgtaatttttaattcttcaaataaaaaaagttaatggaagtttttgaattcatataaaaaagagatccatattctattttctagtcttattcttggcatagttaaaattctttagcagttcagcttgtgcaaacattaaaggtttttattctggtgttgttgctgtgggtttat

SEQ ID NO: 332923 - DNA, 565 bp, Homo sapiens
ctttacacaggatcatcataagggtaggaccactgcctggcgggttgtgggtgtcggggagagacagactgggctcaacactgaatacagcatgggcagttaggaacttataaccaaagagtacagtggggtggaggtcagtggatcagggtaagggggattctggctaaatgattcaaacaggattctttctaagactagccagggtgatcagaacaacctaagggatgttggaaaatgaggaactgcattagatatcaaggatgatcaaatagcaagratggggtttctggtaaactgatttagctgggttctttgctaaaactgaagtttacaaggaagtgcatagaagtgcctaggagaaggttcagaatctcagctgacgtttggccaggtgaataatctttgtcagtgtttataaaagtcatgttatctccatgcattattgcattcagcagatatttattatgggtaaataaaaacagttgagatttattaattcagccattcaatatttaatgggcaccagtcaagccatttagaagataattctgaaaaaaagaga

SEQ ID NO: 332924 - DNA, 532 bp, Homo sapiens
aattaatatttttattgtgctatatcaaattaagtgttcaaaggcatgacttgtctaacatgcttccctctaaggacttttaacctttattatcttttcttcctttgattttgccatgattcaaataaatcctctttatgattttccagctatgaatatgtatttcctagcctcctcctttcacaagggcacgttccattctatttatcattctaagaggatctggacgtttttttcttcctagctcaagcccctgttttgttttgtggggtttcttttttcttatatgacaccatctgcctaataggctttacctttttagatcaccattgtagattcttctgtacatccctagagaccatggtccatgttttctcatctttaatgaaaatccttcttatttgaagcagattttagcaaygcaattttctgcatgcacttaaacatttacatacaaaacagcctgataattttctattcttctggcattaacatattttgaatgggcaggaatctcctttccccacccagt

SEQ ID NO: 332925 - DNA, 607 bp, Homo sapiens
gtagcattttacatacgttgcagacttgttatatagagactatattttttttaattctttcctatagaatatgaacttcctattggcattatttccacatagtagatgttcagcaaatgtccatctcatgaataaatgaacaggtggtgtcattctgaggtttgaaaagacgttaatattttctttgtggaagcaacccaaaagcaactgtcaaagatataattcagccaaaaggccaaatccgtgatccatgggttgaataaagttggcataagatatattttctattctaatggactgtataatttaattcatcagacaagagcttggctctgccaaatgaaaactctccttatcacatggtttggaargagttttctttgtttacttagtgagttcagcttgattttctcctgaatgcagccaactttgaaagaatggcagagagatgaatgcaactgtaaccatatacaaaataattatgaattcacccaagggctattgagtactagatactattggaaaacagccttgtaaagccatctaaaatgaaacctggcacataattcagaaatcaatacatttctcatatttcaaaaatacctac

SEQ ID NO: 332926 - DNA, 607 bp, Homo sapiens
gtagcattttacatacgttgcagacttgttatatagagactatattttttttaattctttcctatagaatatgaacttcctattggcattatttccacatagtagatgttcagcaaatgtccatctcatgaataaatgaacaggtggtgtcattctgaggtttgaaaagacgttaatattttctttgtggaagcaacccaaaagcaactgtcaaagatataattcagccaaaaggccaaatccgtgatccatgggttgaataaagttggcataagatatattttctattctaatggactgtataatttaattcatcagacaagagcttggctctgccaaatgaaaactctccttatcacatggtttggaaggagttttctttgtttacttagtgagttcagcttgattttctcctgaatgcagccaactttgaaagaatggcagagagatgaatgcaactgtaaccatatacaaaataattatgaattcacccaagggctattgagtactagatactattggaaaacagccttgtaawgccatctaaaatgaaacctggcacataattcagaaatcaatacatttctcatatttcaaaaatacctac

SEQ ID NO: 332927 - DNA, 661 bp, Homo sapiens
aatcacttaaaaatacctgccatcagtgagggagattccatgagtgacagatatggatagcatgtcattctgatcccacacctggatactatcgtcttcctctgcatgagatcagcattttgaagtctcttgcctgaaccgttttgttttggttcctcatagaatcattttttttttctgaatttcaagttatgttatgatattgacataccttaaaataaatatctctaaaagtcatagttttgctcactttaagtatatggtgaagataataggaaaaatactgctttctggttctttttgcttgtttgaaacaggatctcattctgtcgtccagcctggagtgtaatggagcaatttgctgcagcattgacctcccaggctcaagcgatcctcccatctcagcctcytgagtagctaagactacaggctcatgccaccacacctggctacttttcgtactttttgtagagatggggttttgccatgttgcccaggctggtctccatttcctgggttccagggatcctcctgcctcagccttccagagggctgggatcacaggcgtgagccacgtgcctggcccgctttcagatttctacttgggagacttgagttttcaaacagttttgtttttatcttagggagactatacatttta

SEQ ID NO: 332928 - DNA, 524 bp, Homo sapiens
tgttctttttgcttagtcttgttttgtctatacagacttattttttttcattcaatatgaattctaagattgtcttttctagttctgtgaagaatggtagtggtgttttaatggggattgcactgaatttgtagattactcttggcagtatggtcattttcacaataatgattctacccatccatgagcacgggatgtgtttccatttgtttgtgtcatctatgatctctttcagcagtgttttgtagtttttcatgtagaggtctctcacctccttggttaggtatattcctaagtattttaatttatttttttgcatctattgtaaaagrggttgaattcttgatttgattctcagcgtggtcactgctggtggatagcagagctactgatttgtgtacattaattttgtatcttgaaactttgctgaattcgattatcagttcttggagctttttggaggagccattagggttttctaggtatactatcatatcatcagcaaacagctacagtttgacttc

SEQ ID NO: 332929 - DNA, 666 bp, Homo sapiens
attcatatagattttgcttttataacttaatatttaaaggtagaaataaaatattttcaataatttgattagatttttaaatagcataggcatttttttctgttgattaaaatatatctatattctctgaggagaaaacaatggaaggaaagctattgtgtcctttttggaataataatatattgtcattttaaggaccacagcaataacaaaaacaaatcaaaaacattcacttttatagttttaaaatttctgacataattctaaccaagagtttaaatgaaaaagagaactcccacctttctgctttggttaaaaaagaaaaaaaaaaggaccagcatttgtctgtggtsctaactaaaatttaaattcaacataattttttcacccttactgtagaaaaacatccagattcttgtgaaaacagtataaaaaatgatgacccaagttttttttttccccctcttcaatatatttgctctgagggtgctagaattcttttgaaaattagtggtcccaaacatgttgtcatatatcacttagttaataaaaaacaaaaaccaaacaagaaaaacaaacacaaaacaagtttagtgctgccaaagtataaacaaaaggaagtcaaagcaaatgtgcattactatgaaccgtgaggataataatcaa

SEQ ID NO: 332930 - DNA, 516 bp, Homo sapiens
ctcagtgtaaatgtttactaacaggattatcaattaacaaatcccctgagaccagagcctctttgccaaagtggagctgatggttgaggaggagattttggcctcagcccagtcactggcagaggagaacgttctactcaggccccatgcagtatgacctcacgccctgagataagagtctgggatctgatctctcctcacctgaaggagagcaagaaagagaagaaaagaaatggcctctccagagggcaaggaaaggaaatattgtcccactgaagtacagtgagcagggcatgtgtgttcccaaaatacttcccagggctgtttaacctctgatagcagagtctcaaagatattaggatgcactttctttatcagaagaaataccgtaccagttgcaataktctcttaaattaggcaattatccccagtattgctggcttaaggagtctttatgtaggaaaccttatttaggaagagtaaattatgacctttcacaatctataagtgaagggc

SEQ ID NO: 332931 - DNA, 603 bp, Homo sapiens
gtgaaaccccatctctactaaaaatacaaaaattagcctgacgtgcacctgtaatcccagctacttgggaggctgaggcaggagaattgcttaaacccgggaggtggaggttgcactgagctgagatcctgccattgtactccggcctgggcaacaagagtgaaactccgtatcaaaaaataaaaaaattaaaaattaaaaaaatctgacctcagagtgtagtagaaatgataaataataattatatagtcacacaaatgtgtagttgcaacttcatacaggtcaatgaaggaatgttacatcatgctaggacagcatataccataagaaaagagggctgttcagcagaagctgtgatctgaaagacaagtggcagctagatgaagcaggaaaggaaatagcatgggcacagaggtgasgggggtgggcatagcctgttccaggttctgaagaatatggcttgagaaagaggacaagagatgtctgatgagggatgagccaggaaagaagggtaggggctagatcttacaaagcccttgtggtttagcaaataaaaatacaagatgccaggtcaaatttaatttcagataaacaatgaataat

SEQ ID NO: 332932 - DNA, 545 bp, Homo sapiens
atgcaagggcaagccagaacctctgcactttctcaccaggtgaaggtaggggaacctgtctcatggtaatgcacagagctaaaagagaattctagcagagggaatttgtggaagttacggttttgactcaaacccctctatagtctttcatttttccaaggatatgtctcctcctttctaagtactttcgtggcttgttttacgtgtcttgcaatcgtataatccagcatcactgaatagtcttatagtttcccagatgtccttgtggcatttccttctaggtatattgaaacttgcccttttttattcttgaattttgtctttggctcaaggttttacattttactgactcttcatactacttttctccccttayttagaaatggactcagaactcaaggaagaaattcctgtgcatgaggaattcattttgtgtggtggagccgaaacccaggttctaaaatgtgggccctggacagacctctttcatgatcaaagtgtcaaaaggcctaagctgcttattttcattattcctggtgagcgta

SEQ ID NO: 332933 - DNA, 617 bp, Homo sapiens
tgttacaactatctcctagattcattgaagatagaagttacgtttgtttcatagtctcctcattggcttgtagcaatttttcaaaagaaggaaggaaacatttttaccttacaataaaagtctgaaaccacatattttatggtgatctataggaggactaactggaaccagtcacagggtactgtccctaacagaatgtgcatctttcatgcagtaattatattttactagtggaaactacattccaggaaacctttacataaaggttttacaatgttgaaaataaaagatatgctttttacctttaaaaagaaaggtggaacttaattgagaatattatagaattatttcaaaatcagactgcttttaaaaaaacttcaacttttattttagataccgggggtacatgtgcaggtttgtcaaacgggaatattgcatgatgytgaggtttgcgatacagatcctgtgacccaggtagtgagcatagtacccaataggtagtttttcaatccccccatcctcaagtggtccatagtgtttattgttcccatatttatgtccatatgtgctcaatgtttaacttccttttgcaggtgagaacatgcagcatttggttt

SEQ ID NO: 332934 - DNA, 552 bp, Homo sapiens
tttatttgaattattttttttcctgaactctgaaaagtagaatgaaactcaaaatgagcatggaatgaaaatagtctgcttaccttgaaaactaggctttcctcttagctggtgataattacctgtgttcacagccttattaatgtaacatctgtatccttaaacattatattaataggaattctatttacattgtatccttttcaaccagtgaagagttttataagcacagtttctatgtgtcttttactgaatattacttttaaatgtcattgttttgatggcatttattaggcgttataaggacctacctcttcatcaaacttcagtamatttaagtttcaaatttatttagataaataatacctagataaatatgaaaattataatttacattagttcggtccattgtgctttacaaagccatctcaagtacactatggtatctgatccttaaaccaatcatttgaaagaggtaggatgagagtttctgagtttaaatccaacttccattaaatgttgaagttgagatgacaacttggatatctagtc

SEQ ID NO: 332935 - DNA, 572 bp, Homo sapiens
ccttctgtaggaactgcagcccctggaaatcaagcagttacccaactccatgtgaaagaagtatcagagctccccagatcttgccagggtgcctaggtgcctgggtgctggctacaatcagctgggctaggtcagggactaacactttcttctaaacttcagcacaaatttgatcagatggagcatcagaaatatgattatctgactaattcaagtaaagacagaattttgattgacccacgagtgaacagactgagatcatccactcctataaacattcgtccaaagttctttttcagttcagaaccctgtggtttcctgcagagaactaatatctgagggaaaatagagaagattctggggattttgaatgaatacaggaaactagaactccaattcttgtgtttgccttgcagaatccatgaagttawtgtaatcagttattgcaagaagaagggggttcaaatcattgttttctaagttcgtgtgtgtgtgatcaggtttattttaagcaacaggactgatttgcagaagaatgacagaaatgttcctttctcccttggtggtttacg

SEQ ID NO: 332936 - DNA, 564 bp, Homo sapiens
tgtgcttgctttgtggttttgcttatagactccaccacacctccacaactaagcccacaggctattaggtaaattctatttcttattctaactccccgccctatatgagttactaccttgaggtggtatataagttcctgtctttgtctctatggagaagtgttcttttatttgaatgttttcttgcttttctgggtctatttatttttttcccctcttttcccttcattgcttcttcctcttactcctttttcccttctccttagcaaagttttgaaagcctttttaaaccctcagttaagaatgatttttaaaacatataatagttccctacaaattcctgtcccaaataactctaactttttattaattaagtttctagggaagtagtattaatgagaaaaagcaggaattttaatatcagaagtgagtccatcactcacgagttaggtagatttagtgctctcgttagtttgccttagyctcagtttccccatctctcaaatgggcccattatgcctgcttgcaagggtacaaggattgcctgggctgtcaggtgggaca

SEQ ID NO: 332937 - DNA, 664 bp, Homo sapiens
tctgaatgttgcacaacttttaaaattaatataattaatatgttttattttagtaaaatatgtacagcacaaaatttaccaatttaaccattttaaagtatacaatttagtggcattaaacacattcccaacgttgtgcaatcatcaccgctacctagttctagaatagcacaatagttttgtgatttataacacagctgttttattatatttgagggggatgggggatcaagtgtactacaaatataatatggattttaagaaatacataggaactaatcaagccacaaaactcctcattacatttgaataagtacttttactctattctcatattaaattgtagcccaatgagacatcatggtaagaggatagtatagrgagataagatactggtgaggacaccatcctgtcaggattctgatgatctaatctgcctgcttgaatctcaggacctgggatacagttgtcaattggaatgtaactggcttgctcatcctcaccatgaatatttaaagctgtttctaactacgaactttaaaggtaaaaaaaacaaaaggattgtggattaccatagcccacactagaacaagagctgcatataatatagtaaacatttaacttcagcataattgtattatacagtgcaaatacaaaggatata

SEQ ID NO: 332938 - DNA, 549 bp, Homo sapiens
tcttgtccatgggcaggtgtcaaaattggtgtgtgtgtgtatgtgtgtgtaagttggggggttatgaattagggtgaagactcctattctaccattttgctgacattactcttccacttgattccttcataaagttttaaatttcccatagccctgtttaaagaaattaaaatttaatagcccagatctttgtttttwaaaaaaaagaaaaatcttaagaaacatatttataataaactttttatatggaaagattacaagcatttatacaaacactacaaacattctacaggaagtgcctcctctgtctgagagcccagaacagacttatgacacctgtggacagtcaacgggttaataacccgctcctttgagaaataattggcttctccttaccccagtgtaggtgtgaatttatgcttacagtatatccattagtacctcaaaagggtcctatagattagcacttcttaaaatttggtccaggcaacccttggagactctgtaaggtaagattgtatttataacaatataaagatattattggcc

SEQ ID NO: 332939 - DNA, 582 bp, Homo sapiens
tttacaaaggattgaaaatggaaaaatgattcatttagattggttttctgcagtttctttaaatatttgagtgattaaaaaatgaataatattaaagaatttgatatagaaatgattataaaggtcacattcatacatcagaaagtggaaaatgcaattacatttccgaaatctattaacagctcaataagttaatagatcagatgattagatgttgttcattaatggtgatttgtgtgtgtgcatgtgtatgtgtgtgcatgcatatgtgtgtgtgtatgtgtgtgatggaaaaatcacagctttttaatgtttaaaggcagagactcaggatgaagtggagttgagtgtactttttgttttaacatttttttgygggcttttcagtttgggaatgtacagtaatttggcttttccaaatttctcacttgtaaataacaacatttcctgaagtgtaaaagttaacactcaaaatcttcagcttcttcattacgcttaaagaaaaaaaaggtttaggacgattaactgcctaaaaatatcgttattaaagaaaattgtcaataaaatggaagcagagttttt

SEQ ID NO: 332940 - DNA, 578 bp, Homo sapiens
tcacattcacttatccattttagcttcaaggctcttggctctctctgcctgtcactcagggcaatggttagttactgtcagaatgcagctataattgggaaaggcacttgttaaacacagaagtttgggggaggtgagaattcatatccagcctagcaagtctgggaagttttccaatcctcccaatgctgtactaaagcacaaaagcaaattgaattttattacttaggtgacatcaaaccatatttacacaaggagactcattgagaacatccttcttgagaaactcatcgcgttaaacttcttttttccccctcaagctggtcttwaagtttgcattcattctgaagttccttccatttaaattctttactttttcacaaaaaactatcacaaaataatgataagcccatattgttattaagagaaaaattttgtgatataaatattctaagccatctggaaaaataagtgcaaaattagaaagtgtaactaaacggaatgttgttaataatgttagttgctaaaattgatgagtctgtgctcacagatttgaaaacttagtgtttttcttactt

SEQ ID NO: 332941 - DNA, 463 bp, Homo sapiens
tataatagtggtaaaagcagtgaaacaaagaaaggtttagttaccaatgatataaaatggctaaagttttggtcaattataatctgaacccactcctgatgcaagcaattaaaatggtagaaatgttaaataaatataacaaatatctctttaaaaagaaagcaaagcaaaagtccccagggactaatgttcgaagagtgatctggaagccagagttgagctgttgctgctgggctacagaagcaggggtgctaatgctggtatcagttttaggaatctacaggcatggattttagttatcatgggaattgttatggatgaaatgtttgtatccccgaaaattcctatgttgaaaccctaaactcyaatataattatattaagagatgaagtctttgggaggcaattaggtcataagggtgaaagctttctgaatagaattagcacccttgtaagaagagaca

SEQ ID NO: 332942 - DNA, 592 bp, Homo sapiens
atgaaatgtttgtatccccgaaaattcctatgttgaaaccctaaactctaatataattatattaagagatgaagtctttgggaggcaattaggtcataagggtgaaagctttctgaatagaattagcacccttgtaagaagagacacaagagcttgcttctttctctgttctcctccatgtgaggatataatgagaagattgctgtctgcaaatcaggaagctaatcttcaccagacgccagatctgctgcacttgatattagacttcctarcctccttaagtgtaagaaataaatattttttttgtctaagtcatggtgttctattatagcaatgcaaacagactaagataagaatgattggatgagcaggcctgaggcccatgcaaggcagaaagttggaacagacccccagacttaaaacttggacactgaaagggctgaggaaagaaaaaccagaaataatctgtctataaacacagaggtgaaaaagatcctggtctttcttggtctaggccctggatagaaaaatgaaagtctactctaagaatttttgaactttgcactagctacaaggtcagatatcctccaag

SEQ ID NO: 332943 - DNA, 520 bp, Homo sapiens
aagtataaaaaacaggttaaacataagaagtttgattaagaatttcagagagagtggagagaattgtaaggaaatattttaagagataatgactaaggaatttttgraactattaaaaatatgaatcttccgttctagagagtacacaaattctgaacaccataattactgagtaagtgctcctattatagagaaattgtagaatcccaaaaagagaatgagaaataatatgctactttgcaagggaatgacaattatttgtacagcagatttcttattacagtaatatatgtcagaagacaatggaataccatccaaatacagagagagaatgattataactggtatactttgaattatatacttagcacactatcattgaatagtgagagaaaagtaaagacattttcagacatgcaaagactattactatcaagagaccttaataaaagatttattgaggaaggaactttaggaagaaggaaattaaatcaaaaagtaaagaataagttaaaagagt

SEQ ID NO: 332944 - DNA, 547 bp, Homo sapiens
tttaggaaagaattttggagtacagtttgggctcatagttctagcccctgcctgattctattctcttgggcaatttgagtaggatcttacagcaggaaggccctggagaccacctatcccagcatagtagatatgtggagcaacaggactacagccttttaattaaattgtgttaaatcagataacaaatgaggcttgaaggcaaagtatcttcattaaaagagaaggcggcctggcgtggtggctcacacctgtaatcacagcactttgggaggccgagrcaggcagatcacgaggtcaagagatagagaccatcctggccaacatggtaaaaccccgtctctgctaaaaatacaaaaattagctgggcgtggtggcatgtgcctgttgtcccagctacttgggaagctgaggcaggagaatcgcttgaacctgggaggcggaggttgtggtgagccgagatcacgccattgcactccagcctggtgactgagcgagactctatttcaaaaaaaaggagagaagccatttttattaacaatttatc

SEQ ID NO: 332945 - DNA, 561 bp, Homo sapiens
tgaattaggtgaagacagaaaagggaggggaagaagcttccatgtaggaagaatctgaaaacytaaaaagtatctcctaaactcattagggtaagaatttttcagatttatcatgaagacctccagggaattattttgcactttcctttagcaacctattctagtgtgtgtttttgttgttgttgttgttgttgtgggggaggtggattataatatataatgcagaaaacgctatgtaactgtttgtagaatatagcctatggtaatatgcggcaatataatggattattaatttatcttttattcttattgcattttttcccttttctaaatgaaacagcctggtccttatgatcccttactgtgctgaaactctttgtttcaaaatgcaataaaaacttactgggatataaaggctagaagactgataaatttgaagcaactgtggttgtggaaaggaggtttaattaaaggtagaaggactatcaagaggaggagaagaaaaataaggaggaaaaatcttttgataatgtctaaaattgcattatcagttttattagg

SEQ ID NO: 332946 - DNA, 560 bp, Homo sapiens
ttgtctgtgtggcacacaatcagaaaattacttcctctctacaaaatactgttattaactttcttccagtgatcagaagtttaagagttcatacaatgcttaaattaatgaataaaaccctattagcatactatgtttccttattacaacagaaagtcttttgaaggagatatatccatcttcagttgcaaaatgatgttacttctattaccagggatgaattttaagcatattgagatgcatataaaacatttactctgtattctttatgtttcccatcagggactacttttctactttgaaatcagaatttttgtcttttctctctttttggcattccttattcctcctcccattatccccattcctccccamacaactccatgaacttatcttttgtctttatctttttgtttttctctatacactaatatgcacaagttcccacctgcctccccacaatgacctcactttttttttaagcattcactacctcccttttgaagaataaagaagctggagaagatggtacgtaactttctgtttttccacttctccta

SEQ ID NO: 332947 - DNA, 560 bp, Homo sapiens
ttgtctgtgtggcacacaatcagaaaattacttcctctctacaaaatactgttattaactttcttccagtgatcagaagtttaagagttcatacaatgcttaaattaatgaataaaaccctattagcatactatgtttccttattacaacagaaagtcttttgaaggagatatatccatcttcagttgcaaaatgatgttacttctattaccagggatgaattttaagcatattgagatgcatataaaacatttactctgtattctttatgtttcccatcagggactacttttctactttgaaatcagaatttttgtcttttctctctttttggcattccttattcctcctcccattatccccattcctccccacacaactccatgaacttatcttttgtctttatctttttgtttttctctatacactaatatgcacaagttcccacctgcctccccacaatgacctcactttttttttaagcattcactacctcccttttgaagaataaagaagytggagaagatggtacgtaactttctgtttttccacttctccta

SEQ ID NO: 332948 - DNA, 542 bp, Homo sapiens
tgcagtggcgcgatctctgctcactgcaaactctccccccgcgttcacgacattctcctgcctcaccctttggagtagctgggactacaggcgcccaccaccacrcccggctaattttttgtatttttagtacagacggggtttcaccgtgttagccaggatggtctcgatctcctgacctcatgatccacctgcctcggcctcccaagaaaagaacaatttttaagaaagaaaaacttctttgaaatgttcactagtttgtatttgctataatgactgtaaattaatgtcggtctaatatgaaaatttattcagctttgcttagtcaagccagttgtattgttaatatataatctatcccttttgaatttcttgtgtatagaagtagatggagtattagtaacaatcatggtaacatcaacaacagcaatgacagtgataatattgatagatataggtcaaacgtacagtgtttattttgtgccaagctctgtgctaagcacttcagtgttcccgtctcatcatcttgtttcatcctcacc

SEQ ID NO: 332949 - DNA, 542 bp, Homo sapiens
tgcagtggcgcgatctctgctcactgcaaactctccccccgcgttcacgacattctcctgcctcaccctttggagtagctgggactacaggcgcccaccaccacacccggctaattttttgtatttttagtacagacrgggtttcaccgtgttagccaggatggtctcgatctcctgacctcatgatccacctgcctcggcctcccaagaaaagaacaatttttaagaaagaaaaacttctttgaaatgttcactagtttgtatttgctataatgactgtaaattaatgtcggtctaatatgaaaatttattcagctttgcttagtcaagccagttgtattgttaatatataatctatcccttttgaatttcttgtgtatagaagtagatggagtattagtaacaatcatggtaacatcaacaacagcaatgacagtgataatattgatagatataggtcaaacgtacagtgtttattttgtgccaagctctgtgctaagcacttcagtgttcccgtctcatcatcttgtttcatcctcacc

SEQ ID NO: 332950 - DNA, 542 bp, Homo sapiens
tgcagtggcgcgatctctgctcactgcaaactctccccccgcgttcacgacattctcctgcctcaccctttggagtagctgggactacaggcgcccaccaccacacccggctaattttttgtatttttagtacagacggggtttcaccgtgttagccaggatggtctcgatctcctgacctcrtgatccacctgcctcggcctcccaagaaaagaacaatttttaagaaagaaaaacttctttgaaatgttcactagtttgtatttgctataatgactgtaaattaatgtcggtctaatatgaaaatttattcagctttgcttagtcaagccagttgtattgttaatatataatctatcccttttgaatttcttgtgtatagaagtagatggagtattagtaacaatcatggtaacatcaacaacagcaatgacagtgataatattgatagatataggtcaaacgtacagtgtttattttgtgccaagctctgtgctaagcacttcagtgttcccgtctcatcatcttgtttcatcctcacc

SEQ ID NO: 332951 - DNA, 540 bp, Homo sapiens
agcacatctacattgtacagttgctgctgcacttgttattgagtaaaaggaggcctacaaaaaataaagagtcttgaaaaagattattcctccctgtgattattatcktgacttcgtgaaaagatgcaggagttagtaaagagttgtatggggccatataggagttgagggttggggtgcagtgttagcttgtttgtctttacttttactttcctgaaatcataaatcttgctaacctcagcccatggaaaagtctgagagtctgaaatgtgtacgatgttcttatgctatacatacagatgtccatgttctgtgtctcctactgaacactactcatcaaggcaaggaccactgtgttccctctgctgtcctgcatatgaaaggatctcaataatacttactaaataaatagatattggggccttccctgtcaaatattggaacctaaatacaagatgcacaaatgaatcctctcactccttgttttcacaattaaactatttctaataactttatgaatatctattactacatagttga

SEQ ID NO: 332952 - DNA, 498 bp, Homo sapiens
cattgtacagttgctgctgcacttgttattgagtaaaaggaggcctacaaaaaataaagagtcttgaaaaagattattcctccctgtgattattatcttgacttcgtgaaaagatgcaggagttagtaaagagttgtatggggccatataggagttgagggttggggtgcagtgttagcttgtttgtctttacttttactttcctgaaatcataaatcttgctaacctcagcccatggaaaagtctgagagtctgaaatgtgtacgatgttcttatgctatacatacagatgtccatgttctgtgtctcctactgaacactackcatcaaggcaaggaccactgtgttccctctgctgtcctgcatatgaaaggatctcaataatacttactaaataaatagatattggggccttccctgtcaaatattggaacctaaatacaagatgcacaaatgaatcctctcactccttgttttcacaattaaactatttctaat

SEQ ID NO: 332953 - DNA, 601 bp, Homo sapiens
acatttcttttttactttttatttttctattatttttattttttatttattatcattttttttttttttttttttttttttttttggagagggagccccgctctgccgcccaggctggagggcaggggcgggatctkggcccacggcaagccccgcctaggggcccacgtattttttatttttttataaaacccaaagttctagggtacatgtgcacaacgtgcaggtatgttacatatgtatacatgtgccatgttggttcacagcaatatttcttaaactatcttccctttctccccaattctccatctcatagcttctccttagcctttcatctggaccctcttgccaatttctctcgcacatcttgccatggttctctctctctccatcctaactctcatatgtacaacgtcttagccttcctgagttctttaaaatgccctctctactttccaatgatccagattctcctcaataaagtctagactagacccagcaatctagaatccttacccttttcttcttttcttcctgtttctgtatgtctctttccattctcgtgattcagcattacaaaatgcctgaatatcaggccagc

SEQ ID NO: 332954 - DNA, 601 bp, Homo sapiens
acatttcttttttactttttatttttctattatttttattttttatttattatcattttttttttttttttttttttttttttttggagagggagccccgctctgccgcccaggctggagggcaggggcgggatctgggcccacggcaagccccgcctaggggcycacgtattttttatttttttataaaacccaaagttctagggtacatgtgcacaacgtgcaggtatgttacatatgtatacatgtgccatgttggttcacagcaatatttcttaaactatcttccctttctccccaattctccatctcatagcttctccttagcctttcatctggaccctcttgccaatttctctcgcacatcttgccatggttctctctctctccatcctaactctcatatgtacaacgtcttagccttcctgagttctttaaaatgccctctctactttccaatgatccagattctcctcaataaagtctagactagacccagcaatctagaatccttacccttttcttcttttcttcctgtttctgtatgtctctttccattctcgtgattcagcattacaaaatgcctgaatatcaggccagc

SEQ ID NO: 332955 - DNA, 569 bp, Homo sapiens
atggagcttattttacaagtatgtggtgcatctgctttgttgaactgtggatattaacatctgtatgataatttaaagtttgtcaaaagcgacataatatgaagtaaggtgataactataataacaccaataatagtaatgcagtatttcataaaagtcagaaagatttaaaaactccacacatggcccatgtgaaatgttcagcggtggactattataacatgggacatcatggctggcttacttggctgttastcatatgatctagacagtactttcatatgataatagcaagagccattgcgcttctgtctgcactcctcttacttttcttatttaaatgaattccatctgtttggaaagatttttttctttcagaagctcacagtatccatattactaatcagacaaaagaaatcttccagtaaaagaaaataataacattcactcccattattttgtccagtcatcttcgggaaggcttgcaaatgtccatactgatctttgactactatgaaaaccttcaagcagattgctgttttcatatttcaaaaatccatgtgttaatg

SEQ ID NO: 332956 - DNA, 483 bp, Homo sapiens
tgacagacaatgaagccagataatgaatcttttgaaatgactttcaagataaattctttaatatttccccttaaacaattgtttttctatcaaggcatgtttattggcytagaaaatataaaagccagtcccatgaagaatgctaagggaactttgtcagaaactttgaagtaagagaaattttggaagtcgaaggaagacctcatggccattcagtgctcttggaattttctctacaaagagcccttacagctttctcaaatcgcattttctcttgaggtttaatgacagtagtattttattgggcaacaatattgcaaaagttgattcttaagtgagcctatacaagaaggcttatgttgcctctttttgtcattcaaggggtcagggatcacagtgcaatttataaactttgttttcagcagttgttgcttctgcaagaatgggctcaatcttcctccaaaaatacctacattttaaaaa

SEQ ID NO: 332957 - DNA, 483 bp, Homo sapiens
tgacagacaatgaagccagataatgaatcttttgaaatgactttcaagataaattctttaatatttccccttaaacaattgtttttctatcaaggcatgtttattggcctagaaaatataaaagccagtcccatgaagaatgctaagggaactttgtcagaaactttgaagtaagagaaattttggaagtcgaaggaagacytcatggccattcagtgctcttggaattttctctacaaagagcccttacagctttctcaaatcgcattttctcttgaggtttaatgacagtagtattttattgggcaacaatattgcaaaagttgattcttaagtgagcctatacaagaaggcttatgttgcctctttttgtcattcaaggggtcagggatcacagtgcaatttataaactttgttttcagcagttgttgcttctgcaagaatgggctcaatcttcctccaaaaatacctacattttaaaaa

SEQ ID NO: 332958 - DNA, 483 bp, Homo sapiens
tgacagacaatgaagccagataatgaatcttttgaaatgactttcaagataaattctttaatatttccccttaaacaattgtttttctatcaaggcatgtttattggcctagaaaatataaaagccagtcccatgaagaatgctaagggaactttgtcagaaactttgaagtaagagaaattttggaagtcgaaggaagacctcatggccattcagtgctcttggaattttctctacaaagagcccttacagctttctcaaatcrcattttctcttgaggtttaatgacagtagtattttattgggcaacaatattgcaaaagttgattcttaagtgagcctatacaagaaggcttatgttgcctctttttgtcattcaaggggtcagggatcacagtgcaatttataaactttgttttcagcagttgttgcttctgcaagaatgggctcaatcttcctccaaaaatacctacattttaaaaa

SEQ ID NO: 332959 - DNA, 526 bp, Homo sapiens
tataaacctctcctgaaaatcagggcagtcatgggagttttgctggggccacactacccagatgcatgaatgcttgggatggtgcagaggctgygctcgctctgcttagcatacagctgagacaggttttaaacccactgcgtaatgtgaagaagagaggcaggcaggggctggaattccctgctcttggcaactcagttgccatcatgctacttgttgtaggatttaagacactaagaaagaacgaaaaagaatggcatttaaagtccagatagaatctaaaaatcaaagagagagagaggggaaatactttttaaaaatggttctagaaaactccagtaccatggctgaaatattttgaatatactagtttcttcacatgaacaaataagcaaaaactacttgtgaaggtaagagggtaaaggtcaatgggggcattgaactgcattattcaaaccacctggattctctgcagaaattctgtgttataaagtatcatttctgtggctgtcatgacacatggaat

SEQ ID NO: 332960 - DNA, 525 bp, Homo sapiens
aactacatttttgagaaacgcaatctaccggaatgcgytgggtaacagcagacagtcggcttcctgggatcaagggaattttctgagcctgctctgctagtgatgatgatattgagcattcatatgctaggagccatgctaagctttccacatgctttttcacactgaattttcacaataccacccagagagttagacactatttttatccccattttacaaatgagaaaactgaggctgagaggagctaagatcacccagtaacagggaaagcaaaaatttaaatccaggtgtatttggttccagaaagcaggctcctaactataattccagtttgacattgagacatggacgcttccattgcaaatagtgacaatgtttgatctctctgttcatcatgtgtacagtattctctggcaccattttaaggggatgtacccactctcctggtgccataggttttgctgtcgtttctggcaaagggtcatgttttagataaattctttgcacatgaaaaaaaataag

SEQ ID NO: 332961 - DNA, 525 bp, Homo sapiens
aactacatttttgagaaacgcaatctaccggaatgcgctgggtaacagcagacagtcggcttcctgggatcaagggaattttctgagcctgctctgctagtgatgatgatattgagcattcatatgctaggagccatgctaagctttccacatgctttttcacactgaattttcacaataccacccagagagttagacactatttttatccccattttacaaatgagaaaactgaggctgagaggagctaagatcacccagtaacagggaaagcaaaaatttaaatccaggtgtatttggttccagaaagcaggctcctaactataattcyagtttgacattgagacatggacgcttccattgcaaatagtgacaatgtttgatctctctgttcatcatgtgtacagtattctctggcaccattttaaggggatgtacccactctcctggtgccataggttttgctgtcgtttctggcaaagggtcatgttttagataaattctttgcacatgaaaaaaaataag

SEQ ID NO: 332962 - DNA, 525 bp, Homo sapiens
aactacatttttgagaaacgcaatctaccggaatgcgctgggtaacagcagacagtcggcttcctgggatcaagggaattttctgagcctgctctgctagtgatgatgatattgagcattcatatgctaggagccatgctaagctttccacatgctttttcacactgaattttcacaataccacccagagagttagacactatttttatccccattttacaaatgagaaaactgaggctgagaggagctaagatcacccagtaacagggaaagcaaaaatttaaatccaggtgtatttggttccagaaagcaggctcctaactataattccagtttgacattgagacatggacgcttccattgcaaatagtgacaatgtttgatctctctrttcatcatgtgtacagtattctctggcaccattttaaggggatgtacccactctcctggtgccataggttttgctgtcgtttctggcaaagggtcatgttttagataaattctttgcacatgaaaaaaaataag

SEQ ID NO: 332963 - DNA, 567 bp, Homo sapiens
ctaacaaattaggtttcccatctaatttttattacaaaactctgtaacaggtttttaattcctgaaacccactctgggaatccccacaggatcccccacatgattatgcccacctttctctacacggtcatgtgccccataacaacattttkgtcaaggatggaccacatatatggcagtagtttcataagattataatggagctgaaaaattcctcttgcctagtgacatcatagctgtcatcacatagcagcacaatacattattacaaaaacctatgataaaaaaagaaacagagcaagcaaatcaccatggacatatttttgaaaagagtgacacctcctcaagaagagcctcaggcaggtccttcaggagtttttccagaagaaggcattgttatcataggagatgacagctccatgcatgttattgcccctgaagaccttccagtgggacaagatgtggaggtggaggacagtgatattggtgatcctgattctaatgtgtgggtgtctctgttaacttttaacaaaaaaacgtttaaaattttaagaaaaaattaaaaat

SEQ ID NO: 332964 - DNA, 606 bp, Homo sapiens
tgacaactaataaatgtgaaaggaatgaaaaaattaggtgatcatccttttgctcgaacaccaagattggggcattatggagggacaagaagttcacatgtttcaaaatataccacagagtatttcctggttgcaaaaggaaaacaaggagatatgctctcacagttccaaataatcaaagtaaatattactaataatgagacaaacagacattatgtgccttctgatgtgatgcaatgcagaatccaagaagtgcctctgtagtattcttgcmgaaaatgtttaacttgaatataataatgagtctattgggctaatccagaattgaaggcatcctatgcgtcaattcatctggatttctggattcttcaaaaatgtcagcatcatgtaaaacaaacaaaaaggcaaggggctgtactagattaaaggagaccaaagttagatggcaaatagatgccaaatgtgattcttaattggattctaattcagggctgtaggcaggaaagggacagctgagagatgtttggggactactgtctatcagatgatagtactctgtcattgtcagtttgagagtgtggcaatgctgtgtttatgcaagaaaat

SEQ ID NO: 332965 - DNA, 606 bp, Homo sapiens
tgacaactaataaatgtgaaaggaatgaaaaaattaggtgatcatccttttgctcgaacaccaagattggggcattatggagggacaagaagttcacatgtttcaaaatataccacagagtatttcctggttgcaaaaggaaaacaaggagatatgctctcacagttccaaataatcaaagtaaatattactaataatgagacaaacagacattatgtgccttctgatgtgatgcaatgcagaatccaagaagtgcctctgtagtattcttgccgaaaatgtttaacttgaatataataatgagtctattgggctaatccagaattgaaggcatcctatgcgtcaattcatctggatttctggattcttcaaaaatgtcagcatcatgtaaaacaaacaaaaaggcaaggggctgtactagattaaaggaraccaaagttagatggcaaatagatgccaaatgtgattcttaattggattctaattcagggctgtaggcaggaaagggacagctgagagatgtttggggactactgtctatcagatgatagtactctgtcattgtcagtttgagagtgtggcaatgctgtgtttatgcaagaaaat

SEQ ID NO: 332966 - DNA, 594 bp, Homo sapiens
catagcaacgggagtgtagaaaaacaagcaggtgttaataaatttccaagaaacattaatctgtttctgcaaatacatcctgctgttcatttaaatggaatgatactctataaatttaccacttgagtcactctctgagctatcaaaatgtaatatataacaccttcgatgatcaaagtgaaagtaagtttagaaatccaatttgtttttttcaccatttaagctctttatttaactttygcattccagccctcattttaatcaagcttcaattttatttactcacattccgtgttgtaatgcaattataggtatgcttcaaaagttgtcctgaagtgttgcaattgccaaaaataaaatttcattctaagacaaatatatacaaataagaaaaaatatcctctgtcacatttgaagatttaaaataacttacaattgtgcgagtcaaaattggaaaacattgatggaatcagaggtaacctcaaaggaactgggaatagagctgtaattttttggattaaaaataaagaagtaatggatctgtgtggcttaagtaggcttcccctggttatcataacacatggccaatagttg

SEQ ID NO: 332967 - DNA, 547 bp, Homo sapiens
agagcttgttggacagaatctaatgtacagtacatatacttctgaaaattgacacaaagacttgctacaagagtaaaaaagaaaaacaacaaaaacaagtgagtgggctacatggagccattatctttctagaaatatgtagatagcctgttgtacaccaacaacatgatttcggagcaatgaagggttcattataattctgttcctgggaagaaaaattaattccataaagcatgtaaaggaatcaattgaaaatatgctggtcagacattgaaatccccaaatcaaaactaagataaccaataggctaataaaggcacagaccaacctagaaaaccataccttaaagtgcccaggatcaagcataaggccattcagccttgtcagtgaggttggccaaggaaagtgaggctacattcagaggtattctgggatggggcatgagttagagtgtttaactagactggcctctttaatcctttgtgaactacagatattaaatttgatgctgaaaccagtaytacttgaaaataatatttaatagcca

SEQ ID NO: 332968 - DNA, 541 bp, Homo sapiens
tctttccttccttcacaaaacacaatgccagtcttatagctgatatagatctagacaaggagaagtgggtttaatttctactgccttgacttctttccttccttcacaaacacaatcccagtcttatagctgatagagataagtaagcaagcaaatataatacagaacaatatgggctgcaatgagaataactgcacaggactgtgggakcccataggagagggatttagtctagatgtggaggtcagtgaaggcctctaggaataagcaatatctaaacaggaacccaggggacaaaagagttagccaaccaaaaggttggggtggaagaggaaagctcccgggcaaaggttttgttcaaatgaagcaccaagaaagagtatgaaccattgagagacctgcaagcagtgcagttgtagcctacggtgaaagtggaggaattgcagggaataagtttagaaagctatctagggactgggtgaaagaccagataatccctgtcttccagagtttgggttttatacagaaagtaatgtgtagc

SEQ ID NO: 332969 - DNA, 623 bp, Homo sapiens
tacagctctgtatttctcattgcttaaacttgaaggtttctggaaagatattcaagcagctacccttgcattcaggttctagagacttagacaaatcaggcatttgttagtacatgtgttaatggtgatgatgatttactccttttattttggaaaaatcctatctgaattttcccattagcctagggacacagctaatatgtcatggatattttatcaggtcactcagaggtctggatttcttgactgacacttcatttaaacaggtcagttagcagtagtaaacaaccttttgaattggttcctcccagggtaaaggtgtggcacaaaatgaaaaactcattcatatattcgctttcaccacataaaagaacattttattatttgttttattttagaattaactaggaatgctctggtaattaaacacagaaacactctgaatgtgtccaagaataaacacagctttgatataaaatattgatttggtttgtgtagagcttagactacaatgcaaaaatgaataaatsctgtttcaacctaatacacggtcaaagaaaaaccagagctggagggtagagtggtaaaaacagattttatttaggtttatcacattacaggaa

SEQ ID NO: 332970 - DNA, 523 bp, Homo sapiens
agtcttgggtatgtttttatcagcagcgtgagaacagactaatacacttggaatcaactatcatgaatactgctgtgataaatatgagagtgcagatatctctttactatactggtttccaatccagcagtgggattgctgggtcatatcayagttctatttttagttttttgaggtaactccattctgtttcccatactgattgtactaatttacattcacaccaacagtatatgagagttctccttctctgtattctcaccagcatctgttattttttgtctttttgatgatagccattttaactgtggtgagatgatatttcattgtggttttgatttgcatttccttgatgattggcaatactgggcattttttcatatatctgttggccatttatatgtttttatttgagaaatatctatgcaacttatttgccctgtgtttttattgttgttgttgtttgttttgttttgttttgacagggtctgtctccattgcccaggccagaatgcagtggtgc

SEQ ID NO: 332971 - DNA, 523 bp, Homo sapiens
agtcttgggtatgtttttatcagcagcgtgagaacagactaatacacttggaatcaactatcatgaatactgctgtgataaatatgagagtgcagatatctctttactatactggtttccaatccagcagtgggattgctgggtcatatcatagttctatttttagttttttgaggtaactccattctgtttcccatactgattgtactaatttacattcacaccaacagtatatgagagttctccttctctgtattctcaccagcatctgttattttttgtctttttgatgatagccattttaactgwggtgagatgatatttcattgtggttttgatttgcatttccttgatgattggcaatactgggcattttttcatatatctgttggccatttatatgtttttatttgagaaatatctatgcaacttatttgccctgtgtttttattgttgttgttgtttgttttgttttgttttgacagggtctgtctccattgcccaggccagaatgcagtggtgc

SEQ ID NO: 332972 - DNA, 603 bp, Homo sapiens
cttttttgtgtctgttgaagggattatataatttttatccttcactttgttattgtggtgtatcatatttgttgatttgcatatattgaaccattcttgcatcctagggatgaattccactgaatcatgatgaatagtccttttaatgtgatgttgaatttgatttgctagcattttgttgtagatttttccatctatatttatcagagacattgatctgtgattttcttwtcttgtagtattcttgtctggatttgggatgagcattatgctggtctcataaattaaacttggaagtgttcccttctctttaattttttgaaagagattgagaaaaatttgtgttaatttttctttaaatatttgatagaattcactcgtgatgccatctgttcctgggcttttctttgtttggattattgattcagtcttcttacacattattgctttttttcagatttttctattactttatgacttagtatattctatgtttttaggaatttgtcaatttcttttaggttatctaatttgttgatgtataattgttcatggtaattgcttatgatcttttgtctttctgttgtaatcagttgtgatgtc

SEQ ID NO: 332973 - DNA, 575 bp, Homo sapiens
tattgacatatttcttttgagttgagatgttctctgatcatatgcctttgaattatttctttctctacctcttctttaaggccagatactcttaaagttgccctttttaggctattttctacattctgtaggtgtgcttcattgttttttttaatcttttatcttttatctcctttgactgtgtattttcaaatagcctatcttctagttcactaattctttcttcttctcactcaacaattctgctattcatagactctgatgcatttttccatatgccagttgcattttcagctccagaatttctgcttgagtttttwaaattattttaatctctttgttatatttatctgatatagttttggattccttctctgtattttcttgaatttctttgagtttcctcaacatagctattttgaattacctgatggaaaggtcactatctctgtttctccaggatggcccctttgtccctgatttagttcatgtggcaaggtcatgttttctggatgatcttgatacttttggatgtttgtctgtttttgggtattgacgagttgtgtatttattgt

SEQ ID NO: 332974 - DNA, 636 bp, Homo sapiens
gtagccttttcagattggcttctctagtaatatacatttatgcatttaaggttgtccatgtctcttaatggctcgacagcttttttatttttatttttttattttttggaacctaatactattccattgtctggatataccacagtttatttatccatttacttactgaaagacatgttaattgcttccaggttttagcttttatgaacaaagcttcgtaacatttgtgtgtaagtttccgtgtggacgttaaattttcacttttggggggtaaatacaaaggagcawaattgcaatggctggatcatatgtaagactatgtttacttttgtaagaaactgccaaactgtcttccaaagtggctctaacattttgcattctcaccagcaataaatgggagttcctgttgctccacaacctggccagcatttggtattgtcagtgtttggaatttttgccattctaatagaaatgtagtggtatcttgttgttttaatttgccattctctaatgaaatatggcatttaacatattttcatatgcgtatttgtcatatacatatgttctttggttaggtgtctattcaggccttttgcccattctttaattagattgtttcttttcttattatggagt

SEQ ID NO: 332975 - DNA, 636 bp, Homo sapiens
gtagccttttcagattggcttctctagtaatatacatttatgcatttaaggttgtccatgtctcttaatggctcgacagcttttttatttttatttttttattttttggaacctaatactattccattgtctggatataccacagtttatttatccatttacttactgaaagacatgttaattgcttccaggttttagcttttatgaacaaagcttcgtaacatttgtgtgtaagtttccgtgtggacgttaaattttcacttttggggggtaaatacaaaggagcataattgcaatggctggatcatatgtaagactatgtttacttttgtaagaaactgccaaactgtcttccaaagtggctctaacattttgcattctcaccagcaataaatgggagttcctgttgctccacaacctggccagcatttggtattgtcagtgtttggaatttttgccattctaatagaaatgtagtggtatcttgttgttttaatttgccattctctaatgaaatatggcatttaacatattttcatatgygtatttgtcatatacatatgttctttggttaggtgtctattcaggccttttgcccattctttaattagattgtttcttttcttattatggagt

SEQ ID NO: 332976 - DNA, 636 bp, Homo sapiens
gtagccttttcagattggcttctctagtaatatacatttatgcatttaaggttgtccatgtctcttaatggctcgacagcttttttatttttatttttttattttttggaacctaatactattccattgtctggatataccacagtttatttatccatttacttactgaaagacatgttaattgcttccaggttttagcttttatgaacaaagcttcgtaacatttgtgtgtaagtttccgtgtggacgttaaattttcacttttggggggtaaatacaaaggagcataattgcaatggctggatcatatgtaagactatgtttacttttgtaagaaactgccaaactgtcttccaaagtggctctaacattttgcattctcaccagcaataaatgggagttcctgttgctccacaacctggccagcatttggtattgtcagtgtttggaatttttgccattctaatagaaatgtagtggtatcttgttgttttaatttgccattctctaatgaaatatggcatttaacatattttcatatgcstatttgtcatatacatatgttctttggttaggtgtctattcaggccttttgcccattctttaattagattgtttcttttcttattatggagt

SEQ ID NO: 332977 - DNA, 626 bp, Homo sapiens
ttttagcttttatgaacaaagcttcgtaacatttgtgtgtaagtttccgtgtggacgttaaattttcacttttggggggtaaatacaaaggagcataattgcaatggctggatcatatgtaagactatgtttacttttgtaagaaactgccaaactgtcttccaaagtggctctaacattttgcattctcaccagcaataaatgggagttcctgttgctccacaacctggccagcatttggtattgtcagtgtttggaatttttgccattctaatagaaatgtagtggtatcttgttgttttaatttgccattctctaatgaaatatggcatttaacatattttcatatgcgtatttgtcatatacatatgttctttggttaggtgtctattcaggccttttgcccattctttaattagattgtttcttttcttattatggagtttaaacttgtcacttaaamtatgtgcttgaaggtattggagaaataaaaggcagggagaaataacagaaataatctttaagtgaacacaaaaaatcaatgatgtgaacctagaatttggggctaaatttcccactaaaatgtctttcaactccagaaaaagtgtttgagagcttggtgaatt

SEQ ID NO: 332978 - DNA, 626 bp, Homo sapiens
ttttagcttttatgaacaaagcttcgtaacatttgtgtgtaagtttccgtgtggacgttaaattttcacttttggggggtaaatacaaaggagcataattgcaatggctggatcatatgtaagactatgtttacttttgtaagaaactgccaaactgtcttccaaagtggctctaacattttgcattctcaccagcaataaatgggagttcctgttgctccacaacctggccagcatttggtattgtcagtgtttggaatttttgccattctaatagaaatgtagtggtatcttgttgttttaatttgccattctctaatgaaatatggcatttaacatattttcatatgcgtatttgtcatatacatatgttctttggttaggtgtctattcaggccttttgcccattctttaattagattgtttcttttcttattatggagtttaaacttgtcacttaaacwatgtgcttgaaggtattggagaaataaaaggcagggagaaataacagaaataatctttaagtgaacacaaaaaatcaatgatgtgaacctagaatttggggctaaatttcccactaaaatgtctttcaactccagaaaaagtgtttgagagcttggtgaatt

SEQ ID NO: 332979 - DNA, 589 bp, Homo sapiens
ttgcccattctttaattagattgtttcttttcttattatggagtttaaacttgtcacttaaactatgtgcttgaaggtattggagaaataaaaggcagggagaaataacagaaataatctttaagtgaacacaaaaaatcaatgatgtgaacctagaatttggggctaaatttcccactaaaatgtctttcaactccagaaaaagtgtttgagagcttggtgaattcagagttcacaaaaaaaagagaagtataaacattcttattttgggatgacagtgcaaaagactatacycttaaagtaaactaaagaggaaagctccttctaggaatgtttctcagcttcaaggcattcttttagaactgcaagtctttttgattatttatttttattttggatctcattacttcttcattcaaaaatgaccacaaaaaataccaaatgcaaattgaatgcagaaaatggagttatcagacacagtctttagctagtcctgacattttcaagaagatgaatgaaactggtaatttgaactaaaaattttaaattgtaaaaaatgaaacaaatagaaaacatagaaccatgaaat

SEQ ID NO: 332980 - DNA, 672 bp, Homo sapiens
ggcagcccctcccatcaaaggcccggagacctaggaggaaaaaaatagtttcatgggccaggccagggccttgctgctttgtacagtcttgagacttggtgccctgcatcccagctatggctaaaagtggccaacatacaactcaggccattgcttcagaaggtacaagccccaagccttggcagcttccacatggtgttgagcctgtgggtggacagcagtaaagaattgaggtttgggaacctctgcctagatttgagagaatttatggaaactactaaatgtcttggcagaagtttcctgcagtagtggcgccctcatggagaatccctgctagggcagtgcagaagaaaaatgtggggttggatgccccacacagagtccccacttgggcactgcctagtggagctgtgagaagagggccaccatcctccagaccccagagtggtagatccactgacagcttgcactgtgcactcggaaaggctgcagacactcaaaaccagcctgtgaaaggagcctggaagggggctgtatcctgcaaagccacaggggcagagctttccaggactgtgggagcccacctcttgcattagtgtgccccagatgtgagacatggagtcaaaggarattattttggagctttaagatttaatgattgccctgctgggt

SEQ ID NO: 332981 - DNA, 560 bp, Homo sapiens
ttaggggactgttgggaaggtgtgattggttttgaaatgtgaggacatgagatttgggaggtgccagggacagaatgatatggtaggctttgtgtcyccatctaaatctcatcttgaattgtaatccccataatcctcatgtggccaaggagagacctggtaggtagaaggtattggataataggggcagtgtccagcatgctgttctcatgacagtgagtgagttcttacgagatctgatagttttataagtgtctgacaattcctccttcacacagtcactctctctctcctgctgccatgtaagacatgcctcttccacttctgccatgattttaagtatcctgaggcctcctgagtcaagcagaagtatgagtcagttaaacctcttttctttataaattacccagtctctggcagttctctattgcaatgtgagaatggactaagatattggaaaagaaactactttcttggtttctttttgagactgtttgctgtttgcctatagatatgctactgatttttgcacattgattttgtatcctgcaactttacta

SEQ ID NO: 332982 - DNA, 560 bp, Homo sapiens
ttaggggactgttgggaaggtgtgattggttttgaaatgtgaggacatgagatttgggaggtgccagggacagaatgatatggtaggctttgtgtccccatctaaatctcatcttgaattgtaatccccataatcctcatgtggccaaggagagacctggtaggtagaaggtattggataatrggggcagtgtccagcatgctgttctcatgacagtgagtgagttcttacgagatctgatagttttataagtgtctgacaattcctccttcacacagtcactctctctctcctgctgccatgtaagacatgcctcttccacttctgccatgattttaagtatcctgaggcctcctgagtcaagcagaagtatgagtcagttaaacctcttttctttataaattacccagtctctggcagttctctattgcaatgtgagaatggactaagatattggaaaagaaactactttcttggtttctttttgagactgtttgctgtttgcctatagatatgctactgatttttgcacattgattttgtatcctgcaactttacta

SEQ ID NO: 332983 - DNA, 560 bp, Homo sapiens
ttaggggactgttgggaaggtgtgattggttttgaaatgtgaggacatgagatttgggaggtgccagggacagaatgatatggtaggctttgtgtccccatctaaatctcatcttgaattgtaatccccataatcctcatgtggccaaggagagacctggtaggtagaaggtattggataataggggcagtgtccagcatgctgttctcatgacagtgagtgagttcttacgagatctgatagttttataagtgtctgacaattcctccttcacacagtcactctctctctcctgctgccatgtaagacatgcctcttccacttctgccatgattttaagtatcctgaggcctcctgagtcaagcagaagtatgagtcagttaaacctcttttctttayaaattacccagtctctggcagttctctattgcaatgtgagaatggactaagatattggaaaagaaactactttcttggtttctttttgagactgtttgctgtttgcctatagatatgctactgatttttgcacattgattttgtatcctgcaactttacta

SEQ ID NO: 332984 - DNA, 600 bp, Homo sapiens
aaattatcttgctttctatagagcacaactttctaatggctcaagtgccgatgcctctcaaatattgtctggataccatttcaatcattctataataataccgatttattattttgctttatttattctccccagattgcataaaaaatgccatgcccctgagagactacatttttttaaacaaattaaaattaattaaatcacaaacgtcttgctttacaacaaagttacagactgtctcttagggtgaattacttttacaaattattaatctcttcattatgaatttattattttactttaaaagaatgacattttatggtctggccctgagattcttcgagcatatgatatttggagctgggagctgctgtcctaacaatgaagacarcaataaatgaaatataaggctttagaacttttctgctttctagatttagaaaacaaatttttaagaaattattctgtctctctcccactgtgtgtgtgtgtatgtgtgtgcatgtgtctgtctctcctgcctctttttcttaaaaatcaggcaatgaaacaattatttttcatgcattaaataaaagtaaattgaatacatttgctagt

SEQ ID NO: 332985 - DNA, 602 bp, Homo sapiens
gatatttggagctgggagctgctgtcctaacaatgaagacaacaataaatgaaatataaggctttagaacttttctgctttctagatttagaaaacaaatttttaagaaattattctgtctctctcccactgtgtgtgtgtgtatgtgtgtgcatgtgtctgtctctcctgcctctttttcttaaaaatcaggcaatgaaacaattatttttcatgcattaaataaaastaaattgaatacatttgctagttattttagttccacgtaagtttaacatgaaggtaaaggaaaatagaatttgggatacctactgagttaatttccatatttctgttagattttggtcttatgccttctagcactttttaagaaactgggacaaaatagtgaaatgcagcatccaaatggaatatggaggttttggatttcctaatggaaaactgaaatatatacttttttcatacttagtgaaggctctttcaatagacagaatattatactttaggccataaatgaaagaaattaaatactgtatcagcaaatggtgaaagggaaaaaaacatacagacataaacatattcttacaaagaagcttttgggt

SEQ ID NO: 332986 - DNA, 602 bp, Homo sapiens
gatatttggagctgggagctgctgtcctaacaatgaagacaacaataaatgaaatataaggctttagaacttttctgctttctagatttagaaaacaaatttttaagaaattattctgtctctctcccactgtgtgtgtgtgtatgtgtgtgcatgtgtctgtctctcctgcctctttttcttaaaaatcaggcaatgaaacaattatttttcatgcattaaataaaagtaaattgaatacatttgctagttattttagttccacgtaagtttaacatgaaggtaaaggaaaatagaatttgggatacctactgagttaatttccatatttctgttagattttggtcttatgccttctagcactttttaagaaactgggacaaaatagtgaaatgcagcatccaaatggaatatggaggttttggatttcctaatggaaaactgaaatatatacttttttcatacttagtgaakgctctttcaatagacagaatattatactttaggccataaatgaaagaaattaaatactgtatcagcaaatggtgaaagggaaaaaaacatacagacataaacatattcttacaaagaagcttttgggt

SEQ ID NO: 332987 - DNA, 534 bp, Homo sapiens
ggtggtgcttgctgtccatgcctaaactccatctcatgttcctctccttcttaattaccctgtttcaactaacctrcccttcttttgttctgtgaagatattgtgcttttacttagctgacaaaatcctgtacattttctattccctttgccggaccactaatttctcccactgatttggggcagttcactcatttttcatacagttctcctattcagacctgctctgatcaccatttttccctcatctaagtcagtcttctttattttgttcttccaactttcctaataagcatttacacatccattaacatgattgctttcagataatttgcctcagtttgaaattatgcatttattagtgtgattatttgattaatgcctactttccctactgggctataagttcatctttttatcctcattgtattcacaacatttatctcagtatctgtcctaaaggaggcatataataagtaagtattaaataaaaggataaatgaacaatgtttctttctaggaagtatgattaaac

SEQ ID NO: 332988 - DNA, 472 bp, Homo sapiens
ctttgagggaatataaaaacacttctactttgggaaaaccttttagaagcacaatatgctttaacttgcttgtgaattgtggcacacaccacaaggtgtttcacactgctattctataaaaatcagcttggttgtttctgcaagccacttctctgcacagctgagccccctgggctactttgcacagcatcctgggcataagcctaatttagctttgaacagattttattagtgttttctgttcatttgtctgtccctcttttgactatgaattcttttagggggagtcatgatgtcttcatgagagccaacatttattaaggcttttattgggccacatgttatgttaaacactttaataaactcaaataattctaccaatgacactagctatgaggtaagtactatcaaatctaaaattcataagcckaaaataagaaagccagtaagtagctggggcaaagtttcattt

SEQ ID NO: 332989 - DNA, 597 bp, Homo sapiens
aactgaaacaataatgagtgtgtgctttaagctcaaattagcaaaaatcttattactggtgagaatgtagcaaaaagtacytgattttgataccgtttaaactagaatggtcattctggagaaacccgtaatccttgatgagattaaaattcatatagcccaaactttgaaaattccgctcttcataaattgtcatagagttcataaaataagctctttaaggacattttttgcagcattgattgtggcatcagggatctgaagacaatgtaggtagccctcactgaaaagatgaatatgtaaactgtagcggctccataccgtggtatatattatagctgtgtatgtacagcaacagggacactttctatcttcaaggccaatagatgtagttaaaataatataatctataccacaataacatttatgtaaatttacaaatttctttttttaaattttattattattatactttaagttttagggtacatgtgcacaaatttctaacagcgttgtgtattttactgacatatatatagtccattgtgtttctcgtttgctttcagatctgttctccattcttcacatttaggctgc

SEQ ID NO: 332990 - DNA, 597 bp, Homo sapiens
aactgaaacaataatgagtgtgtgctttaagctcaaattagcaaaaatcttattactggtgagaatgtagcaaaaagtacctgattttgataccgtttaaactagaatggtcattctggagaaacccgtaatccttgatgagattaaaattcatatagcccaaactttgaaaattccgctcttcataaattgtcatagagttcataaaataagctctttaaggacattttttgcagcattgattgtggcatcagggatctgaagacaatgtaggtagccctcactgaaaagatgaatatgtaaactgtagcggctccataccgtggtatatattatagctgtgtatgtacagcaacagggacactttctatcttcaaggccaatagatgtagttaaaakaatataatctataccacaataacatttatgtaaatttacaaatttctttttttaaattttattattattatactttaagttttagggtacatgtgcacaaatttctaacagcgttgtgtattttactgacatatatatagtccattgtgtttctcgtttgctttcagatctgttctccattcttcacatttaggctgc

SEQ ID NO: 332991 - DNA, 597 bp, Homo sapiens
aactgaaacaataatgagtgtgtgctttaagctcaaattagcaaaaatcttattactggtgagaatgtagcaaaaagtacctgattttgataccgtttaaactagaatggtcattctggagaaacccgtaatccttgatgagattaaaattcatatagcccaaactttgaaaattccgctcttcataaattgtcatagagttcataaaataagctctttaaggacattttttgcagcattgattgtggcatcagggatctgaagacaatgtaggtagccctcactgaaaagatgaatatgtaaactgtagcggctccataccgtggtatatattatagctgtgtatgtacagcaacagggacactttctatcttcaaggccaatagatgtagttaaaataatataatctataccacaataacatttatgtaaatttacaaatttctttttttwaattttattattattatactttaagttttagggtacatgtgcacaaatttctaacagcgttgtgtattttactgacatatatatagtccattgtgtttctcgtttgctttcagatctgttctccattcttcacatttaggctgc

SEQ ID NO: 332992 - DNA, 536 bp, Homo sapiens
ccatgaattagtaactctcctgtttccygtttccctattccctataatcaagagagatacattgtacacttaaaaaaattgttgacagggtagatctcatgttaagtattcttagcacaataagataaaactataaaagaaacaataaatggcttagaaaggtagctccttcagtaggatgtaaacctttagtactcttgtgtaatactacggaaaagaccacagattattctgcccccctgagtccttgcccattatacacccctcacactctgagtcccgtcttggtgatgcgccttgctttagtcagtggtttatagcaaatgcgatacaataaggtgcttgaaagtgtttatacccttactgctattggaatcctatgactaccatgtggaatgcctgagagagtcaactatggaataagtcacctgcattctagtcattcctctgaccccataccaacagcttccaaatgctacacatgtgaatgaggccttcttaggccacccagctgttaggacatccttgagtaaagt

SEQ ID NO: 332993 - DNA, 572 bp, Homo sapiens
agattcaacactatttctatcaaattgcccatgtcattttttacagaattaggaaaaaaaactattctaaaatgtatatggaaccaaaaaagagccccattagctaaggcaatcctaagcataaagaacaaagccagagttaccacactacctaacttcacactatactataaggctttagtaaataaaacagcatggtacagttacaaaaataaatkcatagaccaatggagcagaatagagactcctgaaataaagccacctacctacaaccaactgatctttcacaaacttaacaaaaataagcaattagaaaaagatatcttattcaataaatggtgctggaaaaccctgacaaccatatagagaggaatgaaactggacacctaatatctcaccatgcacaaaaattagcccaaaatggattaaagacttatatgtgaggcctcaaactataaaaattctagaagaagactctagaaaatactcttccaaacattggactagagaaacaatttatgatgaagatcacacaagtaaatgcaacaaaataaaaaatagaaaaatgagaa

SEQ ID NO: 332994 - DNA, 572 bp, Homo sapiens
agattcaacactatttctatcaaattgcccatgtcattttttacagaattaggaaaaaaaactattctaaaatgtatatggaaccaaaaaagagccccattagctaaggcaatcctaagcataaagaacaaagccagagttaccacactacctaacttcacactatactataaggctttagtaaataaaacagcatggtacagttacaaaaataaatgcatagaccaatggagcagaatagagactcctgaaataaagccacctacctacaaccaactgatctttcacaaacttaacaaaaataagcaattagaaaaagatatcttattcaataaatggtgctggaaaaccctgacaaccatatagagaggaatgaaactggacacctaatatctcaccatgcacaaaaattagcccaaaatggattaaagacttatatgtgaggcctcaaactataaaaattctagaagaagactctagaaaatactcttccaaacattggactagagaaacaatttatgatgaagatcacayaagtaaatgcaacaaaataaaaaatagaaaaatgagaa

SEQ ID NO: 332995 - DNA, 588 bp, Homo sapiens
gatctcaaggtaaatttgcaaatattttatgattttataattgctatttttttctgaacttctttttttttgtctaaaaatacagtctattctcacttgatttttttcttcccctttatttcccgtgcagaatgctactttctacaatagtaaaggaattgagaacttttaatttgggcatttaaagcagcatctgttagaataaaagtacagtacataataaccagggccacataaattatgtactacataagccaaattaaactggaaaattgtctaggagtaaagggtcagctctaataagctgaacataatctcctgtattctatccctaaagaaaattaaattttaattatcctgagagctcactgttcaggaatgtcactctaagtaatcatgtaaatgacagttaaactccggaatagagttaaaagttaaatattatctgcaattgccctttaagyccagagtttgctagttgcttcaggcaaactattaagaatatcagatattgacaagttaaaccaagatgcaagacgagtcctcatgtctgcaaaatgagtcactgctgaatgccttattgagtca

SEQ ID NO: 332996 - DNA, 489 bp, Homo sapiens
tagcaatgaacatagtttttagaactccttctttaaaatattctgtttcttggctctcttgatgccatgctttcttatttcccttgtctgactcttggtggttatttgcagacttcattactaagttttctactcaataggacctccacacatcaygttttcttaggctgtagccctaagtctcttttttgtctcaccctaaaatatgtacatagattatcttttttggtcacataatgtgatggttaattttaggggtcaaattgactggattaagggatacctacatagctgaaaaagcattatttctgggtacatctgtgaggctatttccacaggagattggcttgtgaatcagaggccttcatgggaaagacccacctttaatatgggaatggatccaatcagctggagccccagatagaataaaaaggcagaaaaaatctaaatttactctctctgtctctcctggagctgggacatccttct

SEQ ID NO: 332997 - DNA, 489 bp, Homo sapiens
tagcaatgaacatagtttttagaactccttctttaaaatattctgtttcttggctctcttgatgccatgctttcttatttcccttgtctgactcttggtggttatttgcagacttcattactaagttttctactcaataggacctccacacatcacgttttcttaggctgtagccctaagtctcttttttgtctcaccctaaaatatgtacatagattatcttttttggtcacataatgtgatggttaattttaggggtcaaattgactggattaagggatacctacatagctgaaaaagcattatttctgggtacatctgtgaggctatttccacaggagattggcttgtgaatcagaggccttcatgggaaagacccacctttaatatgggaatggatccaatcagctggagccccagatagaataaaaaggcagaaaaaatctaaatttactctctctgtctcycctggagctgggacatccttct

SEQ ID NO: 332998 - DNA, 594 bp, Homo sapiens
ctcgcatgtatctatatagatttatatcccattgattctatctttctggagaatcctgactaatacacatagctttaattggcacaggaagtcctcaacatcatcagaactacatatagcaggtcctcraataacataattttctccaacatcatcatttccttaaacccttgatcagagaaaaaaaaacgattttgttatacattgttttccttaaggtcacagttgccaagaactaatcaatgacattaagtgaggacttactatatttctatgttaagaaatatcaatgtctcccttgaattccaggctaatattttatactttttctcacgtgcatcaaataattgacatgacctggcccaccactgcttggtaaccacccaccatcatttttcacatttcagtaaatgacatcgactcaagctaactcacatgtttgggagttttctttatgcctctgtttgcctgctcgtatgcaatgcattaccaagctcatcagttttgcctaaaaaatgtatcaccatctgtccattatcatcccatcaccatcttagtctataccgtcatatttttgtctgttatactaaatac

SEQ ID NO: 332999 - DNA, 598 bp, Homo sapiens
ttaaggcattcaagttcatattgaagtaaaatatatacatgaaataaagactatatcttcattagaggataattattttctaaatagaagaaaattgattcctatttttaatttaagsaaaaagggtaactcttttcactacttaaatgcattgttttgaattatatattttagttttaaattttgtatgaattatatgaaatatcccaatcatcacttattataaatataaggaatcaaaatgcaatttctaaaacattttagaatatttctatacaactaagaatcaggtatgagatggccaattaaaactaaggagatttacttactgtagctgtcattcatcaataagaatggtattaggaataggaacactcttttggctcatgtttttgtattattttaagattccttgttctaagcataagttggatttgagaatatattttttggcagccaataaggatgctatcagagaaacatataatctagtcattacaaaagttttggaaaataaattgatagggattaaaagtgtaggtagatggatgagattggagactattactctaagtgaagtaactcaggaatggaaaac

SEQ ID NO: 333000 - DNA, 515 bp, Homo sapiens
tgtcggaggtaagctatgaggttgcaaaagcataagaatgatgtaatggactttggggacttgggaggaagagtgggaggagggcaaaagatagaagactacaaatagggtgcaatgtatactgctttggtgatgggtgcaccaacatctcacaaatcaccactaaagaacttactcatgcaaccaaataccacctgtaccccattaacttatggaaaaataaaaatgaaaataaaatatatgtagaaattrgctattgagtttttactatgtaaaattttggtttttatggattaaatataattaaaatgcaattttactttaaaaaattagaccaccaccacccatcaactaccaattccccacccccccaactctttttttgagacagggtcttgctctgtcacccatgctgtagtgcaggagcatgatcatggctccctgcagcctcaacctcctgggctttagcgatcctcctacctcagcctgaagagtaggtagggctacaagtgtat

SEQ ID NO: 333001 - DNA, 524 bp, Homo sapiens
tctaccagtcttgaattcctggataagtgcacagagccgcctcacctgactgaattgtaaacccattcagcacttttacagaagcaagcaataaaatcctattgtgtttaagccttcatatatcttaaatatatttgaaataacagctggcattatcctcactgtctagttactgataacgagagagaaaattcaagtaactaattaaatgagtagaatatatcaaacaattttaaattcctaagagttgtyttaacataattaataaagaagctcatattaagcactatgatcaaggaaaattaccaaatattacatacattgttcttttaccttgaagatacacatttacagatataaattcatataatcattcacaaccagaattatctagtaggataaagaaaaacaagaaattcacataattgtcaataatgtaatgaattgtttttctacatcattggttttcaaccctgtcttttcattagaaccatgtggaaaacttttagacacaccgattccta

SEQ ID NO: 333002 - DNA, 610 bp, Homo sapiens
agtagaatatatcaaacaattttaaattcctaagagttgtcttaacataattaataaagaagctcatattaagcactatgatcaaggaaaattaccaaatattacatacattgttcttttaccttgaagatacacatttacagatataaattcatataatcattcacaaccagaattatctagtaggataaagaaaaacaagaaattcacataattgtcaataatgtaatgaattgtttttctacatcattggttttcaaccytgtcttttcattagaaccatgtggaaaacttttagacacaccgattcctaataacaggttgttataatgctttaaaagcttctaaagagaatctgctgtgcagccagatttgagaactattggactccacatcaaaaaactcagcaagttacaagttgtatgtcttattttcattcctaaaatacgttaactacatgaatattatgcagtttactcatcactctcttagagcttcttaaacagaagaatgagtcagggtctgcaacttcctataaaaatatatatgtctgatttcatctgtgaaaattctgattcaatgggttcagaatagggagagctatagctaa

SEQ ID NO: 333003 - DNA, 610 bp, Homo sapiens
agtagaatatatcaaacaattttaaattcctaagagttgtcttaacataattaataaagaagctcatattaagcactatgatcaaggaaaattaccaaatattacatacattgttcttttaccttgaagatacacatttacagatataaattcatataatcattcacaaccagaattatctagtaggataaagaaaaacaagaaattcacataattgtcaataatgtaatgaattgtttttctacatcattggttttcaaccctgtcttttcattagaaccatgtggaaaacttttagacacaccgattcctaataacaggttgttataatgctttaaaagcttctaaagagaatctgctgtgcagccagatttgagaactattggactccacatcaaaaaactcagcaagttacaagttgtatgtcttattttcattcctaaaatacgttaactacatgaatattatgcagtttactcatcactctcttagagcttcttaaacagaagaatgagtcagggtctgcaacttcytataaaaatatatatgtctgatttcatctgtgaaaattctgattcaatgggttcagaatagggagagctatagctaa

SEQ ID NO: 333004 - DNA, 525 bp, Homo sapiens
cttattgttctgtttttttttkggggggggaatagatctgttccatatgtaacttggtttttctaattgctaattcaaaaaattcaaaaatttctgaatttccataatataattcatctttctaaacaacctgaggtactactctattttattgttacttatataaaaggagaaaaacacgtgttgttttcaagatatacaaaatattcaagatgaatatttaaaactatttttagaatcccaacaactatcttactcaatttctacccactgtagaaaaccttttcatctaaccattgtgtacgtggaacttctatttgatttaaactcattgtggatcactcaggccaatactttaaaaaagttcagtttctctacttcccaagttttctagaagtgactaaatttcactgaattaataagtgtctctcatttatggtcaccaccaattattataaaactattgtaaattatctctgcttattctgaacccagagctaaaatgttgtatctgaaaataaaatc

SEQ ID NO: 333005 - DNA, 469 bp, Homo sapiens
tcacttaaataatatacacttagctcatcaaacttaaataagattatagcaaaatacatattggtcaacattcaaaaaaccaaagtcttacacatatattttctttaatttttccaattaactacttttattttatattttattttttatgggtacataggtgtacatttttataagttacatgagatatgaaagagaggcagaaaatatgatacagactgaattatggattattgttaagattttttccatattagattgtggtgtttatacataattgtctagagctatcatgtcaatgatctttacatggaaataatataacaaagatgaccctaaaacacggaaaactttgggtttatgttattcatcatgataggtggcattatgctgcagtaaaaaagagtccctatagctcagtaacttcaaacaaccataggatayttcttgctcacattatatgtccttg

SEQ ID NO: 333006 - DNA, 536 bp, Homo sapiens
gcttgtaaggcagtgttaatctgtctctgctggcagttacatttcctcagtgtttccctccttgcctcagttttttcgtgtttttttcccactaacaaattattttcagagcagaactagatcagtaaacatatcgtattaaagtttatctggtaataattgctaagaggttcacattctgtcataagtttctttttgtttcctcctcttttcatattaatgggtgtaaaaggaacttcagctggtaaggcagtgatcacaaaaaaaaaagtagtagcttaaatagtgcagayggtttttttgtgggggtcaacaggcttcctcagctgcaagtccacgctgtcaaaggctcattggttatgagttagctgcgcttatattttggccttggagttccagattgaacatctctcctctggctgagttttattaccatgtaataaaataaaatccaaggtacttaaactctttttaatgaggactaccaaaatatttttaaagttatcctgtggctctccctttgtcctgtccatatt

SEQ ID NO: 333007 - DNA, 574 bp, Homo sapiens
acagatttaggtagtaataataatagcactagagccataaarctcaattgaatggttttaggtgtgtgtgtgtgtgtgtgtgtgtgtgtgtgtgtgtatgtgtgttctcatgtgatcatattaacttttatgaaggattctgtctgcggtgtaattggtattgccaacagtggatacgagcaaaccagtcaggaagtccagaaaagacagcaatgctattttatactaaacagtagtgacgatgagagaagtagacagatgacccaattactacttcagtaaaggatttagaggaatttaagcattaatatttatcaagtgcctataatgtgccaaatattcttttaggtactaagcatacaaaaatgaatacattaaaaatccctttccttaggaagctctctgtctactctgacattcccaagaatggtcaactatgcattcatgtaagagaagagtaacacaaagcaactgatgtcaggggattcgtattcacttacccttttgactttggggtataatatgtgactttttgcttttagaaatccttaagaatcaacagaaacaatgcatt

SEQ ID NO: 333008 - DNA, 650 bp, Homo sapiens
ttcatcatttctttcaggattacaaaatggtgatttttttttctaattccaccatcctttatgtatttagtagttggcattcttctaaaagaaaatttttctttcattaactacttagttgccttaaaatgtagtttatatggaactgacaggataaattcttgatacttttctctctaactcctttaaaattcaattttcgggataatgaattgctgccctgaccacctccaaggcaattcatggaatcttattagcttcttctaaacaataggacrgcattaccatgctattaaaaatagtggtgggatggggaatatttttgttgttgttgatgttcacattattaacaaattatcaggctctcatattagtaaaggggaatattggcagagcaggatgagtagataattcagcagcaggcaggagacaaagcaaaaatcagcctgattgtagtgcaaagtgggtcaatggagtatggcaggtgatggtctctatattggcaaaatcacaaaagagttacttgcatagattaagagatttgaaaccccagatttatgctacataggtgcattttagagctcttaattttcaaaatgggaacctggtcctttttagtcctattttccaaaaatgtgttattagaaatg

SEQ ID NO: 333009 - DNA, 650 bp, Homo sapiens
ttcatcatttctttcaggattacaaaatggtgatttttttttctaattccaccatcctttatgtatttagtagttggcattcttctaaaagaaaatttttctttcattaactacttagttgccttaaaatgtagtttatatggaactgacaggataaattcttgatacttttctctctaactcctttaaaattcaattttcgggataatgaattgctgccctgaccacctccaaggcaattcatggaatcttattagcttcttctaaacaataggacagcattaccatgctattaaaaatagtggtgggatggggaatatttttgttgttgttgatgttcacattattaacaaattatcaggctctcatattagtaaaggggaatattggcagagcaggaygagtagataattcagcagcaggcaggagacaaagcaaaaatcagcctgattgtagtgcaaagtgggtcaatggagtatggcaggtgatggtctctatattggcaaaatcacaaaagagttacttgcatagattaagagatttgaaaccccagatttatgctacataggtgcattttagagctcttaattttcaaaatgggaacctggtcctttttagtcctattttccaaaaatgtgttattagaaatg

SEQ ID NO: 333010 - DNA, 578 bp, Homo sapiens
tgaacaattgaatgccaacaaattatacaactttgatgaaatggacaaattccaaggaaaacccaaactaccaaagcaactaaaaaagaaatagataatctgaatagacccattagcaggaagagagattgaatrtttacataagaataccaaatcttcacaaattcattaaaaacataaaaaagtgggaacaattttcagctcattccatgaggccaatattaccctgctaacaaaactaaacaaagccataacaagaaaactacagaccaatatctcttatgaacatcaatacaaaaatcttcaacaaaaaactagcaaactgaatccagcagtgtataaaagaattataacgtaaacaagtgagacattgtaggaacaatgttggtttaacatctgaaaatcaattaatgtattatatcatatcaatttaataaaaaaccaaaaagccccacatgaagatctcaatagatgcaggaaaagcatttgacaaattcaacaccatttcatggtaaacacactcaacctactagaaatagaatgaaacttccttaatctgatgaagggcatctgtaaaa

SEQ ID NO: 333011 - DNA, 368 bp, Homo sapiens
aaattcacattcaagaaagtgaaaagacaaagcccagaataggaaaaaatatttgtaaatcatatatttgttaagggactcatatccagaatatataaagaatcgttacaactcaataataaaaagacccaattgacaaatggttaaagaggcttaacagatatttctccaaagaagatatacaaatggccaataagcacatgaaactttcttgacatcatttgtcatcagggaagtgaaaatcaaaaccacaatgaaataycacttcacacccagtaggatggctataataaaaaagtcagataatggcattggttggtgaggatgtgcagaaactggaattctcatacactgctggcagtaatgta

SEQ ID NO: 333012 - DNA, 506 bp, Homo sapiens
ctgaaaaaagaatttagtagatgattactgactcgaggaactgagtggaaacaaatagatcagaagctatgagtttaagggaagcacatttccagtaaaataataattgcagttttacaaaactccgtgattatgaaacaccccttggttccccaaacttacataggcagaaaatggacagcaatggttttgatatctgaaagttgtcgctgaaagtgtgctcactgaaaaatgtacttacttcagatatggtcatgtaggataatggacaagaaaaaaaaaacaraacaaaccttttaaccaaaacagcatcccagagggtagagtcagagcaatggagaagaatggacatagtagattctcctgaagagttgaatcagggacttagaacttgctgaactctgatgaattggggtttcactcttcctgcctagcaggatttcataattggaatggatctatgattgctgtatgtctacccttttcctcttttcacagttgggaac

SEQ ID NO: 333013 - DNA, 605 bp, Homo sapiens
cgtcatcactgggatagaaatttggtatgtcaatccaggtaaaaagattctctggcagtcctttaagatgaatcttcaagtatttccagtgaaatttggtgaattcarttcttttccccatagatagggtgaggaagggcttctgttctatcactgtgatgaaatttgtctgggccactccagacagaaaacaccacttctttctttatttctggttgatttcaagaccatcactcaaggattgtgaatatggcaagtgatacatcttctagctaatcttagaatgtgactgacatgtctttacacataatgttagaactttgagatgaaagagattggagctaagaatcaggagacttactattcttggtgatcaaatccttatggagggttgtgcctagttaagatcctcttggaagagatgtccttccttaagaaatctcttaaagtccccttaaggagatccttggaagaccagtgggcccaggggaagaagaaaagacagtgagcgaacttgcaagaacagtgagtcccctgttttttgaggaactgtggttggaaatgaggatgtttagtctggaaatgagatgctttatgggagccat

SEQ ID NO: 333014 - DNA, 563 bp, Homo sapiens
ttttccttgtcaaatttttcctttgtgttttacatttttttggtgattatgaatgaaatctctttatctctaaatcgtcattacataacatagaaacactggatttttgtaaatataattgtacttaggctatcagtttctattaattataatttaaaatttattataaaactggactttccagttatacaataataaaatctgcatgaagggataaatattactsttcaattaaaatagttataccacttatttttattccatattatgttgcattaattgaaccttcaggaagttaaatatatatatatatatatgtatgtatatgtatgtatatatacttcataacaacacttttcagctatatacctttagaatctgccattttgctagccgtaaagcttattatatacttaagcacagtgttagatgcttaatctgccatttcttatttcatcttcaaactagtacatgaagaaggtattcctcattttacagctgagcaaactgaatggcagaaagattaagaaacttgactgtgcttgggtagctagaaaatgaca

SEQ ID NO: 333015 - DNA, 592 bp, Homo sapiens
ataataattacagctaacatttattatgtgtcaggcataaatcctcatcataatcctataggagtaactactttaactttgccaatgggaaaattgaggcaaagaaaagttaagtacaaagtccaatctcaaatcccttccaaatgaagaagccagatatattagtctattctcatgattccaataaagacataccagagagtyggtaatttataaagaaaagaggtttaatggactcacagttccacatggctggggaggcctcacaatcatggtggaaaacaaagaaggaacaaagtcatgtctcacatagaggcaagcaaagagagcacgtgcaggggaactctattttataataccatcagatctcgtgacacttattcaccatcatgagaacagcatgggaaagacctgcccccatgattcaattaccccctactggttccctcccatgacatgtaggaattatgggagctacaattcaagatgagatttgggtggggacatagccaaaccatacctccagattagaatccaagtaatatgccccatagctttattatctgtcacaagacatcatttgaaaaaataa

SEQ ID NO: 333016 - DNA, 618 bp, Homo sapiens
tcctataggagtaactactttaactttgccaatgggaaaattgaggcaaagaaaagttaagtacaaagtccaatctcaaatcccttccaaatgaagaagccagatatattagtctattctcatgattccaataaagacataccagagagtcggtaatttataaagaaaagaggtttaatggactcacagttccacatggctggggaggcctcacaatcatggtggaaaacaaagaaggaacaaagtcatgtctcacatagaggcaagcaaagagagcacgtgcaggggaactctattttataataccatcagatctcgtgacacttattcaccatcatgagaacagcatgggaaagacctgcccccatgattcaattaccycctactggttccctcccatgacatgtaggaattatgggagctacaattcaagatgagatttgggtggggacatagccaaaccatacctccagattagaatccaagtaatatgccccatagctttattatctgtcacaagacatcatttgaaaaaataaatctgtttcaggactatatcaaaacaaagtaatgggacaattgctagcctaggcctacctggtaacctctagccacaca

SEQ ID NO: 333017 - DNA, 633 bp, Homo sapiens
agggtctgtacaatacctggttaggaaggaaatagactgtactcaaagaaattcacgaccttgccaggttttagcagtaggagattatgtagcacatataagtagcttcaaaaagtattgagtcaaggaggaaaaatataagattrtattgggataaatttatctatatgttgcatttacttgagttttagatgtaatgtgttgggtcaaccatctgggaatgatgtaaaaatagtgagtagaagactagactcaatggtcatctagagtcaatgatgaataaatgctggagcctccctggaatattttagtgaaagaagtcctaagatcagagaaatataaacgttgggatgcatctattacatataattcattcagccacccactacacatgtccctgagaagaaactcccttcacctgagcattcagaaatgtattggtttggaaaaacaacagcatttgcaatggctgttctttgcatgctgagatgatagtaggagataatgcattggcactggagtcctagatttcaatggaataatgggatcacagagtggtagaggccacatgtcactgcttaaccagcagaaacaagatgagtgcaattatcttaataagctgcaatgatggag

SEQ ID NO: 333018 - DNA, 521 bp, Homo sapiens
atgcaaaggaaggatgattgagttaaaaatcttgagacagggatattatcttggaatatctggtggacccaatgtaatcacgaggtttcttgtagaaagaaggcagaagggcagaaaagatgagtctgtggaagcagaaattagggtgatgtactttgaagatggaggtacggcccatgaatcaaggagtgcaggcagcctctagaagtgagaaaaagaaaggaaatggggttcccctggagcttccagaaggaaccaaccagccctgatgacattttgattttagcccagtgaggctgattttggacttctgacctccagaactttaagatracaaattggcattacgtgaagccattaagggtgtagcagtttgttataggagcagtaggaccacacagtggcaaaatgcaaagctgtaaaggaaatgggtgagaggccttgcttggctgtttaagttggcagaaaagtgaccgattaatttcactgcccacaaatacaagggtgtacatatcatttaa

SEQ ID NO: 333019 - DNA, 521 bp, Homo sapiens
atgcaaaggaaggatgattgagttaaaaatcttgagacagggatattatcttggaatatctggtggacccaatgtaatcacgaggtttcttgtagaaagaaggcagaagggcagaaaagatgagtctgtggaagcagaaattagggtgatgtactttgaagatggaggtacggcccatgaatcaaggagtgcaggcagcctctagaagtgagaaaaagaaaggaaatggggttcccctggagcttccagaaggaaccaaccagccctgatgacattttgattttagcccagtgaggctgattttggacttctgacctccagaactttaagatgacaaattggcattacgtgaagccattaagggtgtagcartttgttataggagcagtaggaccacacagtggcaaaatgcaaagctgtaaaggaaatgggtgagaggccttgcttggctgtttaagttggcagaaaagtgaccgattaatttcactgcccacaaatacaagggtgtacatatcatttaa

SEQ ID NO: 333020 - DNA, 521 bp, Homo sapiens
atgcaaaggaaggatgattgagttaaaaatcttgagacagggatattatcttggaatatctggtggacccaatgtaatcacgaggtttcttgtagaaagaaggcagaagggcagaaaagatgagtctgtggaagcagaaattagggtgatgtactttgaagatggaggtacggcccatgaatcaaggagtgcaggcagcctctagaagtgagaaaaagaaaggaaatggggttcccctggagcttccagaaggaaccaaccagccctgatgacattttgattttagcccagtgaggctgattttggacttctgacctccagaactttaagatgacaaattggcattacgtgaagccattaagggtgtagcagtttgttayaggagcagtaggaccacacagtggcaaaatgcaaagctgtaaaggaaatgggtgagaggccttgcttggctgtttaagttggcagaaaagtgaccgattaatttcactgcccacaaatacaagggtgtacatatcatttaa

SEQ ID NO: 333021 - DNA, 619 bp, Homo sapiens
caatgcaaaaatacttgaacagttcttttttttaaaccatacaataatagtcatatggtctgtaataccaataatcacargtttgttaatttactagaaacaattatgactttctttagagcaatgttaagtggagtaagctctggacttgatgagcgtaatttagttgttcaactctcagtagcactactgggactctgtgatggaagattccctcatggaattgagacgaaaagcatccataaatctggtgtcaagagaaaagtctgctattgtgtaagagatataacagtatctttgttacctcaggattatgaagattataatctttgatcattcatgttattgtctttctttatcaccagcagtatcttaactatatcgatcaatgctatatggatttgcttctggatatatggaaaaaagagactaagagaccaccactgattttcaaaagcaacaataatctaacagcaaatttcaaaaatagcaataacattttatttagtttttgaaatgtatgttttataatgctttctatttcaatttctaataaggttaaagccctaacccagcccaaaatgacctacagcccacaagttttatctcatgttttgag

SEQ ID NO: 333022 - DNA, 570 bp, Homo sapiens
ttagcacagcgacccgggccagcgcagggcgagcgcaggcggcgagagcgcagggcggcgcggcgtcggtcccgggagcagaacccggctttttcttggagcgacgctgtctctagtcgctgatcccaaatgcaccggctcatctttgtctacactctaatctgcgcaaacttttgcagctgtcgggacacttctgcaaccccgcagagcgcatccatcaaagctttgcgcaacgccaacctcaggcgagatggtaagagactcattttattttttaactgaaaaaaaaatcatgtttgctattgttattgttctttctatgtttttcccctttctttttgaatcttgaatgtgaactcgggctgaatgcattgtttggggagggaggtctcctgcctgtatccagtcctgagagagctccatttccggaatgggactgagaggtgtgggacgcgtgctgatggggataggataagccaggtggctcaycttgctgcaccctagagaagtcattttggtgtccaagcctctggtaccaggatgcggtgcctcatcccggagttggcgaaa

SEQ ID NO: 333023 - DNA, 585 bp, Homo sapiens
aagtatttggagatgtacaaagcaaattctcctagaatttggttgtataagtacttttggttaaagtcttcaagagaaaataatattgaagctaattttcaaaggccgagtgtgatttgatcgtatgaactatgccagtgccagctgggatcaatcagtgatgccaatagggccaagagttttaaacagtgacaccagggaattttatgtcactaccatctaagatatgtttaagaatattattgaaatagcctcaacattactttataaattcttaaaattataacaggtattaaattatataaattataataggttatgctttctttatatagtcttacctctgggtgttaggtcaaggaatttattccctactgtataaaaggatatttctcattacttgtctgaaagcttttatgacagtgttgtgtcatctcacttggggattttaccgagttcccacttttcagattttacagtaatgaagccagaccagggtaaacccctgaaagaaatacrttgttagcacttctttatccactgaaatatctgatcatttctgaactctacggatatatatgacaa

SEQ ID NO: 333024 - DNA, 585 bp, Homo sapiens
aagtatttggagatgtacaaagcaaattctcctagaatttggttgtataagtacttttggttaaagtcttcaagagaaaataatattgaagctaattttcaaaggccgagtgtgatttgatcgtatgaactatgccagtgccagctgggatcaatcagtgatgccaatagggccaagagttttaaacagtgacaccagggaattttatgtcactaccatctaagatatgtttaagaatattattgaaatagcctcaacattactttataaattcttaaaattataacaggtattaaattatataaattataataggttatgctttctttatatagtcttacctctgggtgttaggtcaaggaatttattccctactgtataaaaggatatttctcattacttgtctgaaagcttttatgacagtgttgtgtcatctcacttggggattttaccgagttcccacttttcagattttacagtaatgaagccagaccagggtaaacccctgaaagaaatacattgttagcacttctttatccactgaaatayctgatcatttctgaactctacggatatatatgacaa

SEQ ID NO: 333025 - DNA, 582 bp, Homo sapiens
tgtgagccaccatgcccagccggtttttttatgatattggaaatgtttacatttaatttccaagggttcactgctagtatataaaaaaatgcagtttatttttgtatgaaataattgctttaaatgttttattaaaatataaatatgaaaataattgttttaaaatgtaatttttgataacaagctatcttagaagcaactgttggtagggttgtgttgttttggaggctctgaggcagaatctgttccttgcctctctcccagcttctaactctcaggaatccttggtgttccttgacttggggctccattgctctaatctctgcttctatcctcacatggccttctccgttgtgtctctgtgtcccaaatcactgtctcctttctcttataatagcaccagtccccagatttagggcccaccctaaatccagaattatctcatcctaagatttaaaatttaattacatttgcagaaaccccatttycaaatagggtcccatccacagttatcggggttaagacttgaccgtatttttgttttggaagggacactattcaatccactacaaatgtctagat

SEQ ID NO: 333026 - DNA, 469 bp, Homo sapiens
tgctataattgaaatagcataacattcaaagataatagtgaagagaatgattagaatctattctgatgctagtggggaatttctcttcattgcaacgtaagaccaaagggactggaagcagctaaataaagaggccaggaataatgttcacactcatgtgagaaggctcaggtgtgtaagagcttggcatgttcatgaaaagaaatggaagccagtgtgactagagtttgagagcaaagaaaagaacaaaamaggagagaaaggcgggtccagatgttgcaatgtcctgggctacattaaaacatttcaatttcattaaaagaagggaagacactgaagcatttttctgagaccatgatttctatgctttttacatcttcagtctttttcatccttgtgcaacatacatgttagatagtgaataaaagttagagtcaaatggactgtttttaacattaccaatagagaa

SEQ ID NO: 333027 - DNA, 560 bp, Homo sapiens
gaattgactgtttgtgtggcagggagaagagagtagtccaaaatggtgcaatatgtatgaaattccagaaataagagaacatgctattttccataaattctatgtgacttagcacgccagaagcttaaggtataagtttgtggaaagactgggtgaaatgaggcttggaggggttgaagaagtcagatcatcagcattactcagaaggctatttggtggtattgaagaattttaagaagagraggtatctgatcaaatttctacctactccttgcagtgtggaggatggtggattagaggataacggagggtgggaaatctcagttcatatgggtgccattcaccaagatagagtgccaaagtcaaagctactttagaaaacactgggatgggtttggtcctgcacttaatgaatctgagatgcctgaaagacagctatgagctgaggtgtctataaggggactgaatgtaagggtctgagctcatgagagaggtctaggaatgggtggagagctaatgataaaatatattacacaccagctccaagagctttggaaaga

SEQ ID NO: 333028 - DNA, 514 bp, Homo sapiens
aaaaaaaaatggaataaagtagaatgactggcacacaaaaaaccttcatgggaactgggatatattgaccaaagctgaaatcacaagtatgcctacgaatagaaaatttatcrtattgtttctagaataaaaaatgtaaaagatatttggtaaattttacagtgatccaaaaagtactgagtctctttagtattccatactttacaatgttacggtcgagttgatagatctcactttgccacagaccaccctattgaagagactgatagtggcatttgacttgcacataacaaattatctgatgattataaacttccattgtatctaaaattattctatagtgatatagatcaccacttttttttttttttttttttttttttacattctaacctactggatatctggatttctctgtctggagttctgtccgacatttgacactcctgcctttcccaacaggcccacttaatacccagatcaagctgtttttgcaacttttgctgacaggcac

SEQ ID NO: 333029 - DNA, 514 bp, Homo sapiens
aaaaaaaaatggaataaagtagaatgactggcacacaaaaaaccttcatgggaactgggatatattgaccaaagctgaaatcacaagtatgcctacgaatagaaaatttatcgtattgtttctagaataaaaaatgtaaaagatatttggtaaattttacagtgatccraaaagtactgagtctctttagtattccatactttacaatgttacggtcgagttgatagatctcactttgccacagaccaccctattgaagagactgatagtggcatttgacttgcacataacaaattatctgatgattataaacttccattgtatctaaaattattctatagtgatatagatcaccacttttttttttttttttttttttttttacattctaacctactggatatctggatttctctgtctggagttctgtccgacatttgacactcctgcctttcccaacaggcccacttaatacccagatcaagctgtttttgcaacttttgctgacaggcac

SEQ ID NO: 333030 - DNA, 582 bp, Homo sapiens
cacacatcttcccatttgataattcatttatctgatctagcaataatgtagaattgtattatttccaatttacagataactcagaggcattatggagtaagaaagctggtaaggaattgtagaacaactgattcctaatgcaggaatctgatgcttcacactgcatcctctcagcatcctgagagcttcctcagagcataatayatggaggctgccggggatataacttctaatgaaacagctgaaaagtaaaatgagtaaagataacagacagttaatgggaaaagctgagcactaactgccccagtacaaattaactatctgataaacggtgaaagaacaggcttacatggatccaaactgaactagaaataggcttctgggacaacaatccgatcacaaacactaaagactaaagactaacacaaaagttacgtgtagtagctactgctttcaagtagatgcagggtaacccagtgattttttactttaaacaacaaagactttactcacaacatcattggaatcaactgcatatttccctgattcataaagaaaactcttccctagaaaccagcatta

SEQ ID NO: 333031 - DNA, 594 bp, Homo sapiens
gctcacacttataatcccaatactttgagagaattaggcaagaagatagcttgagtccaggagttggagaccagccttggcaacaaagcaagaccatacctctatttttgttaaaaaaaaaaaaaaaaaaagagggagagaaatacactatagaaaaaaatgtatttcttcagtaatccatctcaagcaaataatatatgctagggcaaaacaaaaatagattcacctctgacatacagaattattgaaagcagaagagagatgaaatggaaggaaaatgtttccagaattcctytcttgcttttaatagaataaaacataagtaacagtatcagaccagaacagagtctgggagtgggatgaagaaggataaaaatgaaaaatttgactcttcaagctttacttccaaggtggccaacaagtcatgcaaaggaagctatgagaccctgataggagtagaagaatatagctcctgttgccttcttgtaccttacagaggagcatcccaagctgaatggctatggcagccatcacagagtggagagccaccatgctaaagccacatgaaatcctgagctctcagccctatacacc

SEQ ID NO: 333032 - DNA, 547 bp, Homo sapiens
ttaaagtgttgtcaaacactagacaggttacctgcataattcacattaccttattgagacctcagatacagttacaaaataatatctgctgtgctgagygcagagcgacaaccagggcgaggggggtacctcagggatatcatgagggcaccaaggatttggggatttgggtttaagaaagtcattcatgtcccccactatcatattaaaaatgaaatgattccatctgtattcatgtgccacaggcagcagggatataggaagactggccctgatcacagcctcggccttgcggactattcaggaacactccacccagcagtcaaacacagaatgggccacgtctctgtctaaattacacctttcaatggcttaccacagctctcagcataatggccaagctcccttaacattactccccatgcctttcactggtggacacttgtttacctatattcacacctggaaatcttggcaagtgctgttctatcccccttctccctctcactgcacccaatgtctgaaatgacttgtccagaatcaaggc

SEQ ID NO: 333033 - DNA, 600 bp, Homo sapiens
catatattataacatattattcacctgttgggattaatgaaagactgcagtgttaaaagaccaaagagataatgaattacagtctttgaaagttctgcctttagatcagggcagtgctaacaacagattttaatgactcagacataaaaagccctcttttttctctctgtagaggacacactgtaccaatcctcttttcacttcatttagtcccagttagtgtagaattagtggggaagactaagagtaactcatagggattttcagccacattggtatrcatagacaataataccgtcagcaccattatcttttaattcaaagagcatggcatagaattcagagcatgtacaaaacgtataaatttatagagtttcattgctctgctcagaaatgtaagtttatagtatgcataaatgccattaaatcatattttcagccttctttatatctttaccattaataattcattcatggatgtggttatatatatatatctatgcaaagattaatttttcacctattctgtatcactatagatgtattggtaaaactagacagaacatttgtaaaaggcattgccaatagagattgaaagta

SEQ ID NO: 333034 - DNA, 508 bp, Homo sapiens
aagatctaattgcaccccattggggacaatattgccccrcttgaagaatgcatgctcatttaggaaaaagctgccatttgaaaattttctaaactaacaatccattatgaatattaacattttttactctatataaaacaaattttaatgtgtaactacgtttttctccttcctagtcttgcttgtaagatgacattgacattgaggaaagtattgagcaatcagaactaatcaaagagagtgtgtgtgtgtgtgtgtgtgtgtgtgtgtactgttaaagtaactgcaaaacagttttaactgaaatatgaagaaatgagaaatccagggtagtttttaaagctttcatgaaacatagcatttcccatatagactgaacagatgtatggagatgtatagagttttaacaatggaaactaaaatgagattattctctttcaaaaaaaaaaaaacctgctgagctacataacttggttttagtcagaatcttgggttaatgggcaatggt

SEQ ID NO: 333035 - DNA, 508 bp, Homo sapiens
aagatctaattgcaccccattggggacaatattgccccacttgaagaatgcatgctcatttaggaaaaagctgccatttgaaaattttctaaactaacaatccattatgaatattaacaytttttactctatataaaacaaattttaatgtgtaactacgtttttctccttcctagtcttgcttgtaagatgacattgacattgaggaaagtattgagcaatcagaactaatcaaagagagtgtgtgtgtgtgtgtgtgtgtgtgtgtgtactgttaaagtaactgcaaaacagttttaactgaaatatgaagaaatgagaaatccagggtagtttttaaagctttcatgaaacatagcatttcccatatagactgaacagatgtatggagatgtatagagttttaacaatggaaactaaaatgagattattctctttcaaaaaaaaaaaaacctgctgagctacataacttggttttagtcagaatcttgggttaatgggcaatggt

SEQ ID NO: 333036 - DNA, 583 bp, Homo sapiens
atagtatatttcaaaacaaaaaaaattaattttggtacaatacaacttagatacagaccttattcagattttatcagtttgtactttttttatatatattaaattttatcacatgtgtagaattgtgtcacccctatcaccattgttacagcactattctgtcaccacaaagaaacccccttgtgttatattttaatagccatacctttcatccaattttaacctctggtaaccactgatgggttctctataattttctcactttgaaaatgttatatgaatgctatattgttatataagtaggctgctttttatctcccctcagctaaacgtccttgaggtctatccaagttgctggtggattaatagttattcctctygaattgctgagcagaatcccaggtatgaatgtaccagtttgtttacccattcattcactgaacgacatttctgttccctttacactcctaaatattgatgactccaagtcgcttctgtttaaatgtattatatagacattttccatgttagaaattcaaacaaaggcatgtatttacttatttattcacttagaaatagcaat

SEQ ID NO: 333037 - DNA, 589 bp, Homo sapiens
accactgatgggttctctataattttctcactttgaaaatgttatatgaatgctatattgttatataagtaggctgctttttatctcccctcagctaaacgtccttgaggtctatccaagttgctggtggattaatagttattcctctcgaattgctgagcagaatcccaggtatgaatgtaccagtttgtttacccattcattcactgaacgacatttctgttccctttacactcctaaatattgatgactccaagtcgcttctgtttaaatgtattatatagacattttccaygttagaaattcaaacaaaggcatgtatttacttatttattcacttagaaatagcaataacaaacccattgcatgttaatagaaataacataattttatgaaaaatactgatattttcaaaatgaaagaaggtaaaaagaggggcattgttttacatttttgcacatcttttcaatgtccagcttaatagaaaacttctggttctcatatctccttctgcattcaatgtgttgggatagtgcatgttgcattatctctaggaaagccctctgcgcacacatgggagagtgagaga

SEQ ID NO: 333038 - DNA, 556 bp, Homo sapiens
taggggtttggacgataaagaggttggattttaaggggaaggaagcccactgtggaattttaagccgaaagtgacatgcctttactaccttttgaaagatcgcgcctctgacttctatgtgtgtaatgaatatctaaggtggctagtgacagcaaaagaggtctcccctggcaagagactgtggtggtttggactagaggagtagcagcaaaaacagcaatgatgtagtacatctttagtgagtagagtctataagtcttgctgattgaagaagatgtgggagatgagaaggaaagagggaaaactgggctaatttacatattttctacctgagcactcactcgtctatgtaaaaagcctggaggaacagcatgttttaggatgaattttgcaraaaagaagaaagtgtgtgcatttaatgggacatacaagttttttttccccagcttcttccaaagctgctattaaattgatggtacatcttataatcaatgatatcttatatttaagagactacatttcttctctattccaatatagcctaaaaacagattag

SEQ ID NO: 333039 - DNA, 614 bp, Homo sapiens
aattggcatctatctggtttccaattatcctttcagtctaatttttgtttaccrtgccactggattaacatttccaaaaagtatatttttatttgtcattcttagtttaaaatcctagtttaaaattcctagttaatcctacttaaattcctagtttaaaattgtcattcctagtttaaaaatctttagtgtgaccctattacagaatagcataagttcaaattcttgacctggcaccaacggccttcgatcatttatcctttttgttattcaatattatcttttaatatttccccaacaaaccttggcagccatcaaactatctgcaaagatcattttgtgtatgtttactatctcgagaatttgatggtattcttctctccatatggcacaatatcttcccattctgtttctttattaattatttctctcagtaaagagtcatccctgcagggggccctccattcctcttgaaatggtacttctgaactccttaggtttttcccactatcctgtcacaaggagccaactattgtgatttttttcccactatcctgtcacaaggagcctactactgtgattttttccccctttgtacatgccctactcccaaa

SEQ ID NO: 333040 - DNA, 569 bp, Homo sapiens
caataagttctaggatgaggttattcacaggttattaggtcttcatgcaggtaaaattctgtcattttattctttgtaagaacacacagggtatcttaartgtattcattctagaagtatagaaatttagaacttcagagatcttagagaatgataaaatagtgaacaagacacagatttgagcctcagggtttaaaatatagtgaaaaatatggacaagaaaagagaaaagtcagcacatgttttgggcatctaacgttactgagacatctaactgagtgaatgaggtagagatgagtatcagatatatttcaacatcaatgggctagaaattagattgatttcggtagaaaaatgtgctacaattctgggtatgtactaaataggaaaaatctagttattcattcattaataatggctttatttttctgaccagcatctctccaatttgaagaagatggcaaaacgttgcccttgcataacatcagaagatccctaatgtctgccttgaagagctctcgacagtagcagcaatgaactacaggctagtggaaagatattaacctact

SEQ ID NO: 333041 - DNA, 629 bp, Homo sapiens
cagttttctattgaggtgaaactattgtggacagggtaaatccacttaaatatttccacatcaagaaagcacaagaacttaaaagaacttaagagtctaccactgaagcaaaatgacctggcatagatcgttttttcccctcattagttaatacattctgtttaattggagtatcrtgctctttgatttaggctgcattttgtgcattaatgggtattaaaaatctcaggtgaatctcttccagaacttagtagacactcaagaagattaaaagccgaataggaaggaatggggcacaaaagcaaggatagggtaaagaaaaatggttcaaggcaattgctccagaagcctgagtttaattttattggagatattccttttagtgtgctgggagctagccttcatctaaagggcagtcattgaatgatgattgggccacttattgctatttttccttatgaaagtcttttgctgaaattagggaaaacatttgcttttcacaagagaggtatgttatttcttgaaacctttgcagaaataaaacataagtagcctgacattaacaaacggagtttctttcctctctgagcttctgctttaccatggatgcctttaaaaatgggcccatg

SEQ ID NO: 333042 - DNA, 566 bp, Homo sapiens
ttatctagtgggtggcccctgtggacaactgggctcaagtctactgaggacttatgggagataggacagaccatgcctsagggttacccaaccaaacgatgaaaaagttggcattttttttttctctaacactccgactgtcattgatttgatgactgtttgtaggacaacaattttctggcacttctggcttatatgcaagccaagcatgctctctcagccataaaaataggaatagtccttaagtaattgcagtaggaaggcttcatcctttagaggtgaattctgagggggatatgaacagtaatgtctgctatggaggcatcatgtagctatttgttcagtaaggtataatggaaaaagaatggattagagctggatagacctgggtttaaatcttgatttatttgcttattagctatgtgaccttggtaaaagttttaaactccttttgcctcagtttctttgtttataaacaaagacagtgcctgcattaaagggtagttgtaaagattaaatgggactatggatacacaggttaacacagagttaggtactcattagtg

SEQ ID NO: 333043 - DNA, 566 bp, Homo sapiens
ttatctagtgggtggcccctgtggacaactgggctcaagtctactgaggacttatgggagataggacagaccatgcctcagggttacccaaccaaacgatgaaaaagttggcattttttttttctctaacactccgactgtcattgatttgatgactgtttgtaggayaacaattttctggcacttctggcttatatgcaagccaagcatgctctctcagccataaaaataggaatagtccttaagtaattgcagtaggaaggcttcatcctttagaggtgaattctgagggggatatgaacagtaatgtctgctatggaggcatcatgtagctatttgttcagtaaggtataatggaaaaagaatggattagagctggatagacctgggtttaaatcttgatttatttgcttattagctatgtgaccttggtaaaagttttaaactccttttgcctcagtttctttgtttataaacaaagacagtgcctgcattaaagggtagttgtaaagattaaatgggactatggatacacaggttaacacagagttaggtactcattagtg

SEQ ID NO: 333044 - DNA, 565 bp, Homo sapiens
ggcagttatcaacatttgtactgcatatcaaatgcagacatttaatgcctaatacctgtttaaaggtaagtacaaagataagcacctttaatagcttacctttaatagattttgttcttaaagttttataatataatgcttttactttagttctgtgacaggaaagatgagatggcatgatagatagaagagcatgtgattaagtcagataacgtggatttctaattctgatgctagcataatccacctgtgacttggggtaaaaaaaaattgattgctctgagcctaagctttcttgtctataaaaaatggagaggatgatactgcatagggatgttgtgccaattaaatgaagtcacctttagaaattcaggactcaataaaaaggccaagggctttggaatcagaacaaatgaggatttaaatcatggatgcactttattactcatgcgatcttgagmaaattatctaatctctcccagctttcagtttcctaaactagaaaaaaggaattatgacattatggtatacttactccttgaatagatgtatatcacctaataat

SEQ ID NO: 333045 - DNA, 650 bp, Homo sapiens
ctttgttgcttcagttgctttaaagtaaaattgtctaaaatctgctrttgatcttggtctcctaatgcattgacagtcatgtcaagctcagtgaataattatgaaataactttaattgctgacttttttcccctctcttttcatgctatggtaccttcctccattcacccatttggcatgcgttgagtgcccactgaaggtaggaggctgttataggtgccagggattcagagaggaatgagacattggccttgccctcaattattacaatcaagcaagtagctgctcctgatggtttaagccactcaccccaaaacactgctttaatctattttgggcctcacatttcatgtgtttctcctcccaccctccccacacattaaaaacatacccatcatctggaccatttgtaaaaaatttccataagcaacagtaaactcacggtaattacgaagaatgcattcatttaaaggaaggtaaggtactctgaccaaaagactatattaaacaatatagtagctgtctggtgattgggggctaagaggagagacagaaggatgtgattcccaaggggtacaaggaagcttttagggatcgtgaatatattcattattgtgattatggtgatgttttcataggcatatacctaa

SEQ ID NO: 333046 - DNA, 495 bp, Homo sapiens
attagaaaggaattttaagccaatgcagggtatattagggcaggttggtattttgggtgttcctcatgtacattgcaaatgacttttatctacatgtgctgccatctggatttactgctaacccatagggaaatagaagccataggctggcatttgagctgctgctctgagtcattcyactttgtactcaaagagcttaactcttaaattttaatttctagattttaaatattaccatgcagaaactgttttctttctctaaatatcaagagactagtgaaagaaattaaaattccaaagagattgagataatagaaattactttcctattttttttaatcaggtgccatcccttcccgcataccctgcactctatatcctgaattattcatcatatcttcagcagaccatgccctctcatgcttcctccaggcctttgcattgccatttcctcaaattagactctttctctcatctcttcttggtcaatacaca

SEQ ID NO: 333047 - DNA, 495 bp, Homo sapiens
attagaaaggaattttaagccaatgcagggtatattagggcaggttggtattttgggtgttcctcatgtacattgcaaatgacttttatctacatgtgctgccatctggatttactgctaacccatagggaaatagaagccataggctggcatttgagctgctgctctgagtcattctactttgtactcaaagagcttaactcttaaattttaatttctagattttaaatattaccatgcagaaactgttttctttctctaaatatcaagagactagtgaaagaaattaaaattccaaagagattgagataatagaaattactttcctattttttttaatcaggtgccatcccttcccgcataccctgcactctatatcctgaattattcatcatatcttcagcagaccrtgccctctcatgcttcctccaggcctttgcattgccatttcctcaaattagactctttctctcatctcttcttggtcaatacaca

SEQ ID NO: 333048 - DNA, 569 bp, Homo sapiens
caactcagaccaattaaatcaggaactctgggagggggatccaagcatcagaatggtttgatgctccctaggtaattacaataggcagcaaaggctgagaaccacttagcataacctgcagttatagttctcacatgtggttgttccccatgataaaaactttaaattttaactctratgtatttggaagcaaccttatctgcttgtatctcacagggatcactggatactgcaaggcaatatagatggtagacgggcaagagtggaaggtaagtggacgagttaggtggcttttgatagagtaagttataattgtaacagtcaatgaatctaggaaaaaaacatattatatacttaattcccagttacccatatgattcagttaatgagacaaggtcacttttagagcactacagtaaattacagttttattgtacatatatgtcacatttgttatgctatatattgcttttaaatgtttgaaggaccaggtgtcaaaagctttatgtaattctgtctgacttgcaaacatctcacatatgtaatctgagatagccactgacttgtaa

SEQ ID NO: 333049 - DNA, 606 bp, Homo sapiens
tattatatacttaattcccagttacccatatgattcagttaatgagacaaggtcacttttagagcactacagtaaattacagttttattgtacatatatgtcacatttgttatgctatatattgcttttaaatgtttgaaggaccaggtgtcaaaagctttatgtaattctgtctgacttgcaaacatctcacatatgtaatctgagatagccactgacttgtaaacttttatagtgcattttaaagcatataaaatgtaataggattttgaataatcactttcatttaaaatttcataattaatatgcacacaaattaaagtttattaagaagtaaatgcctaatgagcagtggggcaaaataaagtgttgctgaattaagaaagaagcatttttattacacatttcattatatttcagtgctgttgtgtgacttttgcacttcagtgcttccatcaggtcctccaaattcttaaaagcctgccaagatgtgtcatgtagctgyttcatgttcttctgtccaaacctaaatgaagctttgtttaactgaaatcccattatgggacattgaatgtaccacccatttattcaccaaggaaatatcta

SEQ ID NO: 333050 - DNA, 612 bp, Homo sapiens
ctatgggagaacagagaagggagagattacatcaactggagaattgcaaggaaccagggacttcatgaagggcaagacattgtatatggaccctgaagcatgtgaaagattgtgtattcaaaaataagtgaaaatatgtttctttctaaagcacttacatgagcaaaggcaagaaggtaaaaaagcacagmattaaagtgtaactgtgtataactctaacaaaaatgtgttactcaaaatgcagtttttcctcacgggcacagtgcctttacttgattaataagtccatggtgaatgacagtctcttggaaagtttggcacttcaagaaaacggactgtgattacaaaatggccatcctccaaaacacgatatgttcagaattaagaaaagcctgctccatctctcccaacttgtcaattgataagtctaggtttgcttcattttgagttgcttaccataacctaataattatcttgcagtgagttgttttccaattttggattcttgcccttcttttcatttttgactgtccttcagtattgcatttatcctttaagacaaggcagtcttctatttgcttttgtactgtatagttagccctacctgcagca

SEQ ID NO: 333051 - DNA, 601 bp, Homo sapiens
tcacacaattatcaaaagattaaactggactccaaatctaggtccatcaaaagacaatgctcagatccacgacattatgccatgtctcataagactgaaaacactattcaaagctccactcatttgmctcagtccatcttcaggtttagtgctaatggtgcccagcctcccttatggaaacaagactttgatgacctgccatagctgctctatctggattcagcatctcttgagcagcagaattaaacagacagtctttagggcaatggacaattgggaagaagtttaaaatctcatcaacaaattgctggcctggttgggtacaaagtgcaatattctggcaaaattccacagcagcaattgcatgaagctctggaacacagcaatctcagcaaggtgaaacctgaggtctgagggaaggggcccattgtacacacctagaaacatgacagcagtggacccctagacaaatgacaggtggaacaagtccatagatccatgaaggaagaggttgtacgatactagcactttgcttttctgagcgtaaaataacagtattgcaaatagaggactgatcaatacttacagagaacactaataa

SEQ ID NO: 333052 - DNA, 369 bp, Homo sapiens
aacagacagtctttagggcaatggacaattgggaagaagtttaaaatctcatcaacaaattgctggcctggttgggtacaaagtgcaatattctggcaaaattccacagcagcaattgcatgaagctctggaacacagcaatctcagcaaggtgaaacctgaggtctgagggaaggggcccaytgtacacacctagaaacatgacagcagtggacccctagacaaatgacaggtggaacaagtccatagatccatgaaggaagaggttgtacgatactagcactttgcttttctgagcgtaaaataacagtattgcaaatagaggactgatcaatacttacagagaacactaataaggagctataagag

SEQ ID NO: 333053 - DNA, 544 bp, Homo sapiens
ttggcaaggatgggggaggggaggcaaacaaaaaacatatagtctaataacagaataacagagtgatgcatgtaatgtgaaaaataactcagartaggagggtggacagtgaaaacagctcatttcttttcagcactgaataatattccattgtttggatagcacagttcatttatccattcacctatgtacacaaggatatcttggttgcttccaagttttggcaattatgaacatagctgctataaacatccaactgcagtgtttttttttttttaatgaacataagctttcaactctttagagtaaataccactgagcaggactgctagatcatatgataagagtatgcttagtcttataagaaaaacgatcttccaatgtggctgtatcatgttgcattcctaccagctataatgaaagttcctgttgctccacattcttgtcagcatttggtgttatcactgctctggattttggccattctaataggtatgtagcggtatctcacttctgttttaatctgaatttccttgatgacatg

SEQ ID NO: 333054 - DNA, 621 bp, Homo sapiens
atttcctgttcatccccctaaaagacaaacaactgactaattcaattaggaaaaatatgggtagtatatatagtagccaaaaataaataagattaatggtgttattctactggaatcttttcgataagaaaaagagagatatccaaataaaaagactggtaaaggtgaaattcagataattcactgcacaaatattaagcacccagtatatgctagatggcattcyaagtggtgagagttaatactgaaataaataagatagtcgtgtcccctcctttcaggaagcttctattctcatgaggagacaattaaaaaagcaaacaggaggaaattacataaataaattatataatcttaggtgacaaacaaatgttatgggaaagtaggggaggtggttatagaataatggaagaagaggctatttaggatgaggaagccatatagaaagattctctgaggaggcagcatttggacagaacagaatggaatgtgaaagtgagccttgctaagatttgaaagcaaggatacatgacaggtagagaaaaaccaacagcatgatcaagatcctgaggtgaaaccaaagttagcatagcctaggaacagcaagaaccatgtggctgg

SEQ ID NO: 333055 - DNA, 587 bp, Homo sapiens
atcacagttttctaacatcatttcaataattatggattgttacattgggtaaggactatagagagcacttagtcaaaatactttgttttatggataaggaaactgagacctaagaaagatatgtggtctgccaagaacccaacaatgagtctatggtgagaaatggactacaacttcttttctttcttctcagccgatttgccagtattacagaacacctcctccaaccaaacagcaacatgacctacattctgagtaaaagggatatgtcagaagaagaataaatgactggsagaaacttctagtgtgtaggaagaaattggcccctagtgaaggagaaatgagaatagcaaaaagaccatcaattagcaatctgaccatctttggacagaactaagtgccaagatgaaagaaaaaaagaaaagaatcattaagagtcgagacatgcaggctagaggagcagccccacagagcatctagttttatgtgaacaaattcaaccagagcatgtacttgcaggggcataacatttagattagtgtaaaagtatttgcacttttggcaaaaacctcactaacctaatagaa

SEQ ID NO: 333056 - DNA, 587 bp, Homo sapiens
atcacagttttctaacatcatttcaataattatggattgttacattgggtaaggactatagagagcacttagtcaaaatactttgttttatggataaggaaactgagacctaagaaagatatgtggtctgccaagaacccaacaatgagtctatggtgagaaatggactacaacttcttttctttcttctcagccgatttgccagtattacagaacacctcctccaaccaaacagcaacatgacctacattctgagtaaaagggatatgtcagaagaagaataaatgactgggagaaacttctagtgtgtaggaagaaattggcccctagtgaaggagaaatgagaatagcaaaaagaccatcaattagcaatctgaccatctttggacagaactaagtgccaagatgaaagaaaaaaagaaaagaatcattaagagtcgagacatgcaggctagaggagcagccccacagagcatctagttttatgtgaacaarttcaaccagagcatgtacttgcaggggcataacatttagattagtgtaaaagtatttgcacttttggcaaaaacctcactaacctaatagaa

SEQ ID NO: 333057 - DNA, 611 bp, Homo sapiens
ctatgtaaccggcttatataggagccaacaaaagcagcttctggaagctatccttggcaagaggagttctactcttgccctgacatttgccttggggaccagcggaaagaaaaaagaaaagatatagattacaactccaaaaagraaaattaaaagccaaaacaggaactaactgtaactctttaaggaagaagaaaaattcatactatcttcctccactaccagggccacactgagaattaaaggagccccccaagaaattgtattggttagcattctagggaagggatggctgagaagccaaacagggtcactagaatctatgagcacagagcttgtggaggcctgaaacatggtgccagggctgctgctgtctctcaggcacctatttctgctcttcccttaacaatgtaacaaagacagagggaagcccaaatgcttcatttctggaaaaagaagaaggaaaggatctaacaatattctctcccctttttaaaacttctgctaagaatgtacagaaacgggccgggcgtggtggctcacgtctgtaatcctagcactttggaaggccgaggcaggtggattgcctgagctctggagttcgagaccag

SEQ ID NO: 333058 - DNA, 453 bp, Homo sapiens
tgttcttgacctagacctgagcaccactgcacagcattaaaatcttccctcttcctcctccttctggtcctcttgttgaattcaccaataccaactccatttctaaggcagtgcgacgtttgccstctagtgatttgccactctgcaagtctgtgaaaccaagatgaattgggtatactggtctcatcatttcctacagcacaaaagaagcacttctttttgaagaattttcagaaaatttccacatagaaaacattataactaaagaccactattttttctttttcttttttgagacggagtctcgctctatcgccaggctagagtgcagtggcacaatcttggctcactgcaacttccaactccctggttcaagcaattctcctgcttgtagcgtactttatgagttagcttatttcgcttattttttaaataagcctgggaatagcagaa

SEQ ID NO: 333059 - DNA, 604 bp, Homo sapiens
aacaccctgtcttggtgtctcaaaaaaaaaaaaaaaaaaaaaaaaaaaaccagcctgtaatgacactaatagtagggtttactctgtacatattacttctcaggcatagtctaagtgcttcacttaactactctatgtaaattttaacactccattcccaccgcttaataaaggtagatattgtcctaacttatttttaraataggaagtccggtttcaagaatggatcttcaaatttacagctgtctgttcccaaatcattgcacactgaaatccttaactccaagtagcaagtgaaggaaaaaatgatcagcagaaccaaatatgctgtggaagtctgaagataggaagggatcagttagagcagtggtgaccaaaagatgcttcaggaaggtaacagtttaagcttggcttccatgaagtgcaggatttgcacaatacatgatggaaatttcttccctggtttttcttcttcagaaaaattcctctggcttctaagacccgagaaggtgggatttgagaatttgaagacctcttacctttactgcctttgatagacattttttctttggttctctttgctgatgttcctggcaaagcaatt

SEQ ID NO: 333060 - DNA, 604 bp, Homo sapiens
aacaccctgtcttggtgtctcaaaaaaaaaaaaaaaaaaaaaaaaaaaaccagcctgtaatgacactaatagtagggtttactctgtacatattacttctcaggcatagtctaagtgcttcacttaactactctatgtaaattttaacactccattcccaccgcttaataaaggtagatattgtcctaacttatttttagaataggaagtccggtttcaagaatggatcttcaaatttacagctgtctgttcccaaatcattgcacactgaaatccttaactccaagtagcaagtgaaggaaaaaatgatcagcagaaccaaatatgctgtggaagtctgaarataggaagggatcagttagagcagtggtgaccaaaagatgcttcaggaaggtaacagtttaagcttggcttccatgaagtgcaggatttgcacaatacatgatggaaatttcttccctggtttttcttcttcagaaaaattcctctggcttctaagacccgagaaggtgggatttgagaatttgaagacctcttacctttactgcctttgatagacattttttctttggttctctttgctgatgttcctggcaaagcaatt

SEQ ID NO: 333061 - DNA, 604 bp, Homo sapiens
aacaccctgtcttggtgtctcaaaaaaaaaaaaaaaaaaaaaaaaaaaaccagcctgtaatgacactaatagtagggtttactctgtacatattacttctcaggcatagtctaagtgcttcacttaactactctatgtaaattttaacactccattcccaccgcttaataaaggtagatattgtcctaacttatttttagaataggaagtccggtttcaagaatggatcttcaaatttacagctgtctgttcccaaatcattgcacactgaaatccttaactccaagtagcaagtgaaggaaaaaatgatcagcagaaccaaatatgctgtggaagtctgaagataggaagggatcagttagagcagtggtgaccaaaagatgcttcaggaaggtaacagtttaagcttggcttccatgaagtgcaggatttgcacaatacatgatggaaatttcttccctggtttttcttcttcaraaaaattcctctggcttctaagacccgagaaggtgggatttgagaatttgaagacctcttacctttactgcctttgatagacattttttctttggttctctttgctgatgttcctggcaaagcaatt

SEQ ID NO: 333062 - DNA, 605 bp, Homo sapiens
agttcctaccatgtgattgcaaatgacagaatctcattcttttttatggctgaaaagtactacattgtgtataagtaccaaattttctttatccatttgtctgttgatgaacacagattgcttccgaatcttagctattgtgaatagtgctgcaataaacacaggaatacagrtatctctttgatatactgttttcctttcttttgggtatatacctagcagtggaatggcaggatcatatggtagctcaacttttaggtatttgaggaacctctaaactgttctccatagtggttgcactaatttacatttccacaaaagatgtacaagagttcccttttctctatatccctgccagcatttgttattgtctggcttttgaataaaagccatttttagtatgcatattaattttaacataaattttttgcatgaaacattcaagtaaaatggacacttcaaaaagatattcagtgagatgttcaatggcgttacaccatcctgtggagctacagattcacctcatccaaatttgagaaaagcaataaagaaaacacctacttctgatggcaccactagccgtgacaccagagtccacaagcagc

SEQ ID NO: 333063 - DNA, 605 bp, Homo sapiens
agttcctaccatgtgattgcaaatgacagaatctcattcttttttatggctgaaaagtactacattgtgtataagtaccaaattttctttatccatttgtctgttgatgaacacagattgcttccgaatcttagctattgtgaatagtgctgcaataaacacaggaatacagatatctctttgatatactgttttcctttcttttgggtatatacctagcagtggaatggcaggatcatatggtagctcaacttttaggtatttgaggaacctctaaactgttctccatagtggttgyactaatttacatttccacaaaagatgtacaagagttcccttttctctatatccctgccagcatttgttattgtctggcttttgaataaaagccatttttagtatgcatattaattttaacataaattttttgcatgaaacattcaagtaaaatggacacttcaaaaagatattcagtgagatgttcaatggcgttacaccatcctgtggagctacagattcacctcatccaaatttgagaaaagcaataaagaaaacacctacttctgatggcaccactagccgtgacaccagagtccacaagcagc

SEQ ID NO: 333064 - DNA, 592 bp, Homo sapiens
tgccgggcatgatggcacatgcctgtaatcccagctactcgggagactgaggcacgtgaatggcttgaactcaggaggcagaggttgcagtaagccaagattgtgccactgcacttcagcctgggcaacagagagaaactctgtctcaaaaaacaaacaacaaaaaaaggcatactttgttttactgtacttcactttatattttacagataattgtgttttttaccaattgaaggtttctggtaaccccatgtccaacaagtctaacagcaccatgttttttaacagcatgtgctcattttgtaactgtcacattttggtaattcctacaatattttaaactgtttcattattatattcattctgattawctgtaatcagtaatctttgatgttactattgtaattgttttggggtgccatgaaccaggcccatatgagatggtgaacttaattgataagcgttgattatgttctgactgctccaccgaccaaccattcccccgtctctctccctttcctcaggcttctgtattccctgagagacaataacattataattaggctaattaataatcctacaatcgtttctg

SEQ ID NO: 333065 - DNA, 580 bp, Homo sapiens
atttttgaatgcttttgtgttatgctatttgtcattagtccactgaccaaaataaaacgttttaggatctcctgcctctataggagagtckcatacttaatcaacaaaaaaaaatgccatctgtcatctatttgcagctagactgtaccatgttgaaaactgggtgagttgtgtaaggtcagagacaagagagtgttctgctggattttttgggatcttggtggaggctgcagatatactggaggggcctgggttgtccgctcactttcaatataacccaggacacttaagcttgggtgaacttcttcttagaaaaaaaaactgaactctcagcttcattttatttttctcctatgaaaatagtattatctaaaggacatgtagttaaaaggaaccaaaaatgaggctctgtagtccagaagtctagggttcctgtttcttccccagtccctgggaatcatttatatattgacaggatgcactcacccttgagtaacaagtcaaccctgaggatactaggaaaatcaaagcagagagaattagacagaggccaaatgtatctttagaaaggcatttaaag

SEQ ID NO: 333066 - DNA, 550 bp, Homo sapiens
gcagatgtacttttacagctggcttctggaagtaaccctttgacagatcttttcagtaagctaaagatcactcatgaaaaactcccccaacttctttttgcatataaatttttatttttttttatagactagggtgctcctatagtctagataaatgaagttcccagaaaaaatcacttatcttgtgagcacagaactcggtagaaaaygaaaaaagtgcaaagcttgaatttccacaaagtctaagaacaaacactttggaaaattaaattctgtttactaggcatttccactcaaatggcaggttgtggtgctagaaaagttacacaaaaaattatatctacttgatacagttggtttagaaagcaagttcaatatgaagggaaaatgctacgacacattgacaacagcaaaggatatgtcttatgtgccagagaagtatgagaaaaaatattattatcatggaaggtaataaccaaaaaactacttttcttcatttaaagctgtcaaaatggatggaatgggaagagattttggagtttaatctcct

SEQ ID NO: 333067 - DNA, 557 bp, Homo sapiens
ttgtttgtatttttcccctgaaatagctttctttttgtcagatattcaatgcttatggcaccacagtcgtcatttttggctttgtaaactggacttttctacatatattccaactctactttaaccttaagctatactaaagaataacttttcctgctgtatgtcgttctgtttctgttaaataccarttggtacccaggcctctaactgcctacctcaaagtgactcacaattttctaaaaatcatacctgctaaaataatcaacagaccaaaacaaaataaacatatttgccactctttgtcgatattatcgaatccttaatataggccctgaaaaatctttagtaaatatgttttccttaaaggtagatactaagtttagaggaacaaaatgcacccctcccccatcccctcttgtttatagagggcttttggttttggttttatttcttttctttgtttactcatttatttgcattttttctatagtaactttaaatatcttagttttggtatatattatttccttacttccccaaattttaaatcacaatta

SEQ ID NO: 333068 - DNA, 557 bp, Homo sapiens
ttgtttgtatttttcccctgaaatagctttctttttgtcagatattcaatgcttatggcaccacagtcgtcatttttggctttgtaaactggacttttctacatatattccaactctactttaaccttaagctatactaaagaataacttttcctgctgtatgtcgttctgtttctgttaaataccagttggtacccaggcctctaactgcctacctcaaagtgactcacaattttctaaaaatcatacctgctaaaataatcaacagaccaaaacaaaataaacatatttgmcactctttgtcgatattatcgaatccttaatataggccctgaaaaatctttagtaaatatgttttccttaaaggtagatactaagtttagaggaacaaaatgcacccctcccccatcccctcttgtttatagagggcttttggttttggttttatttcttttctttgtttactcatttatttgcattttttctatagtaactttaaatatcttagttttggtatatattatttccttacttccccaaattttaaatcacaatta

SEQ ID NO: 333069 - DNA, 583 bp, Homo sapiens
ttgtgtaattaatttttaatttttttgtgtacttcctaaacttatagtcctgcgagtctgggaacagatctgtttttcacttatcctgatttaatgacagtttccaacattgttttgttattacaagtaggggatctttttttttgcccgtttaatgaagatactaaaaataatgcactggaaggagtggaagagttggaaaatttgtaaccatcataatacaggtgtaataggtttgggaaagaatcctcaaaaatgttaaagcaagggaggaaagtttgttgagaagcaagatgttcttctctcctgcccgcccccgcsgttggttgttggtggtcagaattattgtgtaataaataatagacattttttcttatactatgtgtattgttccttttgtttcctttttaaacttctcccctgctttatttggatgggtcaagtttctgttctgtttccttcctttctattaatttggaaatgtccttggctttacgattctgcttgtagatacttcccctgtttctaacacatttcaataaacttaaatttctctatatacaaaataaattaataattggag

SEQ ID NO: 333070 - DNA, 583 bp, Homo sapiens
ttgtgtaattaatttttaatttttttgtgtacttcctaaacttatagtcctgcgagtctgggaacagatctgtttttcacttatcctgatttaatgacagtttccaacattgttttgttattacaagtaggggatctttttttttgcccgtttaatgaagatactaaaaataatgcactggaaggagtggaagagttggaaaatttgtaaccatcataatacaggtgtaataggtttgggaaagaatcctcaaaaatgttaaagcaagggaggaaagtttgttgagaagcaagatgttcttctctcctgcccgcccccgcggttggttgttggtggtcagaattattgtgtaataaataatagacattttttcttatactatgtgtattgttccttttgtttcctttttaaacttctcccctgctttatttggatgggtcaagtttctgttctgtttccttcctttctattaatttggaaatgtccttggctttacgattctgcttgtagatacttcccctgyttctaacacatttcaataaacttaaatttctctatatacaaaataaattaataattggag

SEQ ID NO: 333071 - DNA, 532 bp, Homo sapiens
caaaaaaaaaaagttttccataaaatgtgacagtgattctcatttagtccccaaaccaggagcatccatattagcctggaactttgaaatgcatattacttcatctcagacctactgaatgacacagggsgtggttcagcaatgtgttttcacaagtcctgcagaagagtgtaagaattgctaatcttggtgataaaaagtaaagctggttttccaaagggcggaagtaatgggaattgactggaagagccccaaaggaatttttctggtgatagaaatattttctatcttgattgggggaattggctaatcatttattttattttattttatttttgacatagtgtttcttgttgcccaggctggagtgcaatggctcgatcttggctgaccgcaacctccgcctcccaggttcaagtgattctcctgcctcagcctcccgagtagctgggattacaggcatgtgccaccactctctgctaattttttgtatttttagtagagacagagtttctccctgttggtcaggcta

SEQ ID NO: 333072 - DNA, 564 bp, Homo sapiens
gtgtattagtttgtttcttttcattattgtagtattttactttatggatatagtagaatcattctcttatggatgaatagacacctgggatgtttgctgtttytcacttctgtgagtagaaccgctatgagcattcttgtataaccttttttgtgagcatatgtttttatttctcttaggcaattagtaggagtgaaactgctagatcatagggtatgtgttcatttatttttatcagaaactgtgacaacattttgcaaagagatttcaccattttacactcccatcagcaagcatgagagttctggtttctccagatcctgggcaacacttgatgtcagtgtacttaattgtagtcattctggtggatgtataatgctacctcactatggtttccgtttgcatttccctgatgtctaatgatacttattttaatttaatttaaactttatttaaaaatagagtcatttggatcttcttgtaaaatacacagttacaaggaggttgcctttagcaatgtttctatttttaaagaaagtctgcacactctactgcactgggcag

SEQ ID NO: 333073 - DNA, 565 bp, Homo sapiens
acttggtgtaatccactaggtttggggcaggttgttgcacagcagcagatacctaatccagatttgggcacccaaaagttgggtgctgacataacaaaagcctaaatgggagtgtgggttgcacctatgcagttagctttgagaagagtcctagtagaagcctaaagtaccttgacgaaattattaccagaaacctttatgatcttaacctgtgggtgaggacttgtaggaaaatgaggtaaaaattattggaaactggaggagggggatccttgttaygtagtggcatagctgtagccacactgttgcctgaagttatgtggaaagtagaaaatgtacccaatcaatgaagtgatctagcaaaggagatgtccatcccgcaagttgaaggtgttgcctgccttcttattgtggctttcagtgatgtgcaagaagagagagagaatctcaaggaaagagcttttaatatgcaggacctggcagttaatatggttttgaagatccctgagctcttcatatggtcaatgtgttcatttctgagggcttctgtgacaaaccaccacag

SEQ ID NO: 333074 - DNA, 565 bp, Homo sapiens
acttggtgtaatccactaggtttggggcaggttgttgcacagcagcagatacctaatccagatttgggcacccaaaagttgggtgctgacataacaaaagcctaaatgggagtgtgggttgcacctatgcagttagctttgagaagagtcctagtagaagcctaaagtaccttgacgaaattattaccagaaacctttatgatcttaacctgtgggtgaggacttgtaggaaaatgaggtaaaaattattggaaactggaggagggggatccttgttacgtagtggcatagctgtagccacactgttgcctgaagttatgtggaaagtagaaaatgtacccaatcaatgaagtgatctagcaaaggagatgtccatcccgcaagttgaaggtgytgcctgccttcttattgtggctttcagtgatgtgcaagaagagagagagaatctcaaggaaagagcttttaatatgcaggacctggcagttaatatggttttgaagatccctgagctcttcatatggtcaatgtgttcatttctgagggcttctgtgacaaaccaccacag

SEQ ID NO: 333075 - DNA, 581 bp, Homo sapiens
atccctgcctcctgtagtcacrccctcatggagtgcccacattatatcgttgaaattgtcttagtctctgtctctctgtctctgtctttctctctctctctctctggaagccatgtcatgagcagcccatgttgcaaataacggaaacttatgaatgcacttggaagtgtttcctgtagccctaaccaaagcttcagagactgcaagcctgggacagacagccagcaactggactgtcatctcatgagagaatctgagccaaccatgcaaccaagatatgcccaggttcctaactctcatagactgtgagatgataattttttttattttaagatgctaaattttgggataatttgttatatagcaataggtaactaatataacatccaaaaacaaacaaacaaaaaactgttcaaaagttttggcattgatatacacatttttgaagcaaaatataaagaggaattgcaatatttttcaaccaatatttccatttaataatataatgtggttatctttctatgtcaataaaaacatgattgcatgaggttctgatgcttctgtgtttttagttatatgga

SEQ ID NO: 333076 - DNA, 581 bp, Homo sapiens
atccctgcctcctgtagtcacgccctcatggagtgcccacattatatcgttgaaattgtcttagtctctgtctctctgtctctgtctttctctctctctctctctggaagccatgtcatgagcagcccatgttgcaaataackgaaacttatgaatgcacttggaagtgtttcctgtagccctaaccaaagcttcagagactgcaagcctgggacagacagccagcaactggactgtcatctcatgagagaatctgagccaaccatgcaaccaagatatgcccaggttcctaactctcatagactgtgagatgataattttttttattttaagatgctaaattttgggataatttgttatatagcaataggtaactaatataacatccaaaaacaaacaaacaaaaaactgttcaaaagttttggcattgatatacacatttttgaagcaaaatataaagaggaattgcaatatttttcaaccaatatttccatttaataatataatgtggttatctttctatgtcaataaaaacatgattgcatgaggttctgatgcttctgtgtttttagttatatgga

SEQ ID NO: 333077 - DNA, 537 bp, Homo sapiens
catatcaagtgccttggaagatcaccaataggatgtccaccaatcagggatcttgatccaatagctttggtcaggtggtagctgctagatctagaggaactcagaagtgccattgatgatggacccagacagagaaaatccagtgctggtcggtttgtactgctctgagacattgwgggtagggacagggaacagagagtgatagcagccattctgtgtttgttacgtttttaaaaaccaatacagcggtctgaatggcagatgttttacaacaatctcatggcacagaaatatcaagagctttattccagagacagatcatcaaagacaggaaataaaattagtaaccagattttctgagctcacagtttgcattgagcttgatgtattttcttactcctgtggctgagttgagttaggaagatgacctgatggaggggctctctttgtatcttcagagcatcgatggctgcctgtgcaaaggtcacctcgtgtaaaagtgaggttccctctttgctcactggggcttgaaagtcc

SEQ ID NO: 333078 - DNA, 521 bp, Homo sapiens
caaagaaagctccaggtccagatggttttactgttgaattctatcaaacatttaaagacaaaatagtatcagtcttacataaaactctttcaaaaaccagtgtaagactgatacccaaaattagtaagtacagtacaaagaaaacaattacaaacaaatattctccacgaatataggtgaaaatacataatagaatacatcataacaaagtagtgtttattataagaatgcgaggttggtttaatagtcaaaacatrtcaataaaatatacaatactaacaaaggagagagcatatgattatattatggggaaaatatatttgatgaaatccaacatgagctgatgatgaaaagtctcagcagagcagaaatagaaaggaatttcctcaatttttggagagtatatctacaaaagaacctacagctaacctcatacctaatagtgaaatattacacacttttctcctaaagacggaacaaggcaagaatgtccagtttactacttttatttaacattgtat

SEQ ID NO: 333079 - DNA, 631 bp, Homo sapiens
aagggccaaattaataacattccagtgaaaactaaatgatcatattttggtctcaacagaagccagattttggtttctagcagggctgagaaatctattcccyggaaactccagcttcttttgatcaccacagacacactctgatgacctgcagctctcaactatatatagcaagaccctttctgtttgatcagtgagtctgggctgtgttttgcaaacagtaggctacaacacatgagcaggtcatgaaatcaacttactgtatcatgacttgctttttaaaagatgacacaaaataagaaaatatgagagcacctcacaatagtgaggccggtactgtttcataaaattccttttttcaatttcatacatgtgtctttgtaaatactgggttgtaaagatttgtaaaggaaagcataccttttacttcaggttaaggtcaaaataatttgaaaaccactggtctagaaactaattaagcattctgtgttcagctgctggtgggagtggaaattggtttaacctgtactgacaataccaatcatcatttacattaggggtgtccaatcttttggcttccctgggccacactggaagaacaagaattgtcttgggccacacataaaacacg

SEQ ID NO: 333080 - DNA, 602 bp, Homo sapiens
taagtttgagaggacgctggcccattatcctgcagtatagtcatcaccagacaaaagtccatctcactgtggctcatgaaatattaatgaagagctagaattacttgcactgacttcagcacaaatagaccaaaaaatcaaatcaaagctctatttccactatgtttgatacagaaagccaacagtttagtagctggtggatttttgtggaaattctaaactttgcttccaggcaaatctatgggttttcaaaaatttctgtcttttggttttattgtctgactatttgggttttattgtctattttaagaaaaagctggtccattgttttctagtaggggargtcaactggaagcttaatagtaacaaaagacttttgaattataattacttccagatggatgcttacagatgtcctcatcttttaaaaaaccacttaagcatcttaccatctgtttttcagtgacttatcatggaaatctttacacttttgtttatatagccgttgccaaatgtgtaagccccaggaggttttaagccagtgaaggctttaagactataataagagtgtctttctcttctcttctgccattactaaatga

SEQ ID NO: 333081 - DNA, 586 bp, Homo sapiens
ctaacaatgttgactatcttttcatgtatttatttgccatctgcatattctcttcagtaaaatggctgttcatgtcttttgcccatattcttgttggattgtttgtcttttacttttgagttttgagaattattctaggttcaaggtgtttggcagacatgggggtgaaagtattttcctgccatctgtatgctgtcttttaycctctcaatagagtctttggcaggacaaaagttttttagattctaatgaagtcttatttattgattttttttcttgaacggatcatgattttttggtgtctgtgtattcttcacctagccctacctcataaagattttctcccatttttttcctaaaagttctatagttctccgtgtagttgtaaatttaagcccatgttatatttgggggtaatttttgcatgaactgcaaagcttaggttgaggatttttggagaatttctgactgaccccttgacgtctagatacattttagctcacgttccctctttctgcctctatatatgttcttagacattatttcacgtctaccttagatttcactgctttcactctaacactgg

SEQ ID NO: 333082 - DNA, 533 bp, Homo sapiens
agagctacttagatgacttgtatgtctagagaagggaaacactcaaaggctctgtctgccttgcttctgcagagataactgggtcctctgttctcgccataggtattactagccaagtaagggacttagggtaggagatggtgttttttagtttttttggtttttttggtttttttttttttttttttttgacagagtcttattctgctgcccaggctggagtacagtggtgtgatctcggctcactgcaacctccacctcctgggttcaagcgattctcctgcctcagcctccttagtagctgggactacaggcatgtgccaccatgcccagctaatttttgtatttttagtagagatggggtttcaccatgttggccaggctgatctcaaacttctgacctcatgtaatcctcccaccttggcctcmcaaagtggtgggattataggtgtgagccaccatgccctgctggagatggtgctttgaaaacttattacataaaaaactgaacccttgttattcttctccgagct

SEQ ID NO: 333083 - DNA, 555 bp, Homo sapiens
tatccttcaaaacagttatccttgaaaatgtcactctacaggtgcagactttctttcttttttcttttttctgagacrgagtcttgctttgttggatcaccgggctcactgcagcctctaccgcctggcttcaagcaattcttatgcctcagcctccctagtagctgggattacaggtgtgtgccatgacgcccaactaattttttgtatttttagtagagacagggtttcatcatgttggccaggctggtcttgaactcctgttctcaagtgatccactctcctcggcctcctaaagggctgggattacaggtgtgagccactgcacccatcccggctccagactttctattgacttctcatttcagagtaaaatccaaaatccttactctagttctcaaggaactacgtgaatgattccactctgcctttgagatctcttcttcctctacagttcctctctgcaatacagttttttttctatagcacttgtcaccatctgacatagtatatattcacttgtttatttgtaagaactaagcaataattttgtct

SEQ ID NO: 333084 - DNA, 555 bp, Homo sapiens
tatccttcaaaacagttatccttgaaaatgtcactctacaggtgcagactttctttcttttttcttttttctgagacggagtcttgctttgttggatcaccgggctcactgcagcctctacygcctggcttcaagcaattcttatgcctcagcctccctagtagctgggattacaggtgtgtgccatgacgcccaactaattttttgtatttttagtagagacagggtttcatcatgttggccaggctggtcttgaactcctgttctcaagtgatccactctcctcggcctcctaaagggctgggattacaggtgtgagccactgcacccatcccggctccagactttctattgacttctcatttcagagtaaaatccaaaatccttactctagttctcaaggaactacgtgaatgattccactctgcctttgagatctcttcttcctctacagttcctctctgcaatacagttttttttctatagcacttgtcaccatctgacatagtatatattcacttgtttatttgtaagaactaagcaataattttgtct

SEQ ID NO: 333085 - DNA, 555 bp, Homo sapiens
tatccttcaaaacagttatccttgaaaatgtcactctacaggtgcagactttctttcttttttcttttttctgagacggagtcttgctttgttggatcaccgggctcactgcagcctctaccgcctggcttcaagcaattcttatgcctcagcctccctagtagctgggattacaggtgtgtgccatgacgcccaactaattttttgtatttttagtagagacagggtttcatcatgttggccaggctggtcttgaactcctgttctcaagtgatccactctcctcggcctcctaaagggctgggattacaggtgtgagccactgcacccatcccrgctccagactttctattgacttctcatttcagagtaaaatccaaaatccttactctagttctcaaggaactacgtgaatgattccactctgcctttgagatctcttcttcctctacagttcctctctgcaatacagttttttttctatagcacttgtcaccatctgacatagtatatattcacttgtttatttgtaagaactaagcaataattttgtct

SEQ ID NO: 333086 - DNA, 555 bp, Homo sapiens
tatccttcaaaacagttatccttgaaaatgtcactctacaggtgcagactttctttcttttttcttttttctgagacggagtcttgctttgttggatcaccgggctcactgcagcctctaccgcctggcttcaagcaattcttatgcctcagcctccctagtagctgggattacaggtgtgtgccatgacgcccaactaattttttgtatttttagtagagacagggtttcatcatgttggccaggctggtcttgaactcctgttctcaagtgatccactctcctcggcctcctaaagggctgggattacaggtgtgagccactgcacccatcccggctccagactttctattgacttctcatttcagagtaaaatccaaaatccttactctagttctcaaggaactacgtgaatgattccactctgcctttgagatctcttcttcctctacagttcctctctgcaatayagttttttttctatagcacttgtcaccatctgacatagtatatattcacttgtttatttgtaagaactaagcaataattttgtct

SEQ ID NO: 333087 - DNA, 554 bp, Homo sapiens
agccactagggatgaaatgaagccaagccacgccagggccctgccacttgtgtcccaaggagggtggctggagactgatgcagaagccccttcctccccacactccggggcaatgaggagcccgcgtgcaggtgcctaattccgctagccagtgggcgagggtcctgctggcaccgagggcaccaaggctggggttttgacaccaacgaaccccagccaggtgactggggaacgtggggagttcgacaargagcgataggcttttgccattttttttttttttttttgagacggagtcttgctctgtcgcccaggccggagggcagtggcgcgagcttttgccaagttacgagacggacaggaatcgaggagattcccctgtagcgctctccaccttccggacagaaatcctgtagaccacgttcacttctccactccgtgcatcgcccgtggcccgtgggcagcagctgctcccctgggatccccctcgcctgtccgcgagctctcgcacggccgcgtccctgctgctggggtcgctcgctggccctggctgc

SEQ ID NO: 333088 - DNA, 248 bp, Homo sapiens
gtggtctgtggtggaaaaggaactatactcaaataaaaactacacagaagtattctgagaaacttctttgtgatgtgtgcgttcatctcacagagttgaacctttggtttgattgagcaattttgagacaatcttcccatagaatctggaagtgaatatttggagaactttgagatccattttggagaaggagatatctttatataaaaaccayacagaagcattctgagaaacatctttgtgaggtg

SEQ ID NO: 333089 - DNA, 628 bp, Homo sapiens
taattatgagattactaactgttcgcctcaaaacagaaaaaaaaggaagtagccaaaatatgcaacagtatagaattagtttagatcattatggttcatccattaaatggaaaattacacaacggaactttccataaatgggaaataataataaattaattattttaaataccacagaaatatctttacaggcatagtagggaagggaagaatatacagttaaatgaaaagaacaaagatatgtacatatcacccctttttgtaaaaagttcacatttgtagaaataagtgtataagttattttatgcacagaaaaatatctagagaggtatacgctaagtgtaaacaagtcaccttgaacagagaaatattaggtagaataacttttttcttttgcttaatagtattttatttttctacaataaacttaccatgaaagaatgtaaaacatcaatatatgtaactaaacattttaaaccactgtatatgaaaaaactccacaacccttcaaagataaatagtaaaaaaggaaactatgtttgctataaatatggcaaacagtaataaatttygtatgtaaaaagactgtttatcaaaaagtaacaaaaccttatatattaaaataaaa

SEQ ID NO: 333090 - DNA, 612 bp, Homo sapiens
ggccttgtggctcaggtccttgggttctcagtgagcagtacttacttggtcttcctttgatggagaccataaggaagaccttgggtatgctctttgggaaagtgaaaaaaggtcttcaattattcagcctctaagctcacagaacccaggacaatccatgtgatattaagaacaaaaaaagaggggggatggagaaagggaagatgttggtcaaagggcacaaagtatcagtgagatgagagaaataaattttagtgatctattctacagtatggtgactgtagttaacacagcttgagcatccctaatctgaaagtccaaaatgcaaaatgctccaaaatctgaaactttttaagtgcagatatgacattcaaaaggaatgctcattggagcatttcagatttggatttttagattcgggatgccragccagtaaatataatgcaaatattccaaaagctgaaaaaaatctgaaatccaaaacacttctggttccaaacattttgtttaaggaatacttagcttgtaatcatgtatatttcaaagttgcaaaaagcaaatttttaactgtctcatcacaaaaaaaaaatagatgagatgatggatatgtta

SEQ ID NO: 333091 - DNA, 665 bp, Homo sapiens
gagctgcctcgggtcaggctcccagagctgggccctgagacgaagattcatgtacaagtgatttatgaaagaagagctcccaggagaagccagggatagcatgaagggctcaggacactgaagcaaaaaagcccagcaggattcaagcaaagaacccaggacagctttccctgagcccacaggagagcctgggaaggtgaggcactcagaactgtcccctccccaagagaagggacctgaacttgcataygtcctactacttctacccttaaccccaccctcttccaaagaagaccttgattattacatattcaaaaatctatcagtgtcccttctgggttttgtacatactactgctatatgccaaattgttttgtatagttcaaatttgcttctggactttgtaattcactattctgtcttcttacatcagtttcacactgttttaagcactgtaactttgttttcacacatgctcattttttaacattttaaactattctcatgcatttatttttttcaacaatttcttaattaccaacccaaaggagaattctgtctttctagatctctcttaggcaggtgacactatgactacatcttgacactctcttccttagcttccagattcttctcatcccactcaagtcactcatcttcactgc

SEQ ID NO: 333092 - DNA, 596 bp, Homo sapiens
aattcatactcttgttcttaatcagctgaagtgaggtatactttcattttaacttctaattgtttgtggctaggacatagaaatacactgtctttacatattgaccttgtatcctatcacctcactaaacgctctacaactttttagttgcagtaaggtggcaacttactttgtagattctttagatttttctttgggatcagagatatttctatcttctgaaagactttatgtagaactggtaacatttcttccttaaatgtttggtagaattcacaagtgaagccaccagggcctacagctttctctgtgggagggcttttaactatgacttcaatttctttcagaaataggggctattcaggttctttttcttcttgtgtgatcttcagcagtttgcgtttctcaaaatatttctccatttcatctaaattgtataatttcttggcataaagttattcaaaatattatcttaatctgtaagatctatattgatgtctactcyttcattcctgatactggtgatttacatcttttttctctttttataagtctgactggagagttatcatttttttgtttgtttgtcttcttta

SEQ ID NO: 333093 - DNA, 601 bp, Homo sapiens
gacatctccatggcttgggatccacaggagagcatcattgatgctggggacaatttaaacatatagaaacccacagggctaccttagacagggcacagggcacagcacccggggatgcagagtggaaagttcaccactacagcctggaattgcctctgtgatgccttcttcatgacacttggctgccttcgtggctggaaggctgaggcccagatcccaacatggccacaggctagcagcttgcttcaccttcctgaactgcaatttctccatctgagcctctctcctaagaggagtgtgcagggtcacttagcccatatgggccagaaaccccacacggtgccaggcacacagtagggcctcggcagatgctgcccccttctgtctccaccaccctcctggggctccctcctgaaacagcctccctcagcgccttgagtcttgcaccctaacagcctcttgcaygcagtgagagggaggcccccaggccagctgtctctgttcagaaagacctgggggtctccttgaccatgggctcagggctcagaccccaacacaaacaagccccgtgtgctgaagagaagcaagtcctttagctgag

SEQ ID NO: 333094 - DNA, 601 bp, Homo sapiens
gacatctccatggcttgggatccacaggagagcatcattgatgctggggacaatttaaacatatagaaacccacagggctaccttagacagggcacagggcacagcacccggggatgcagagtggaaagttcaccactacagcctggaattgcctctgtgatgccttcttcatgacacttggctgccttcgtggctggaaggctgaggcccagatcccaacatggccacaggctagcagcttgcttcaccttcctgaactgcaatttctccatctgagcctctctcctaagaggagtgtgcagggtcacttagcccatatgggccagaaaccccacacggtgccaggcacacagtagggcctcggcagatgctgcccccttctgtctccaccaccctcctggggctccctcctgaaacagcctccctcagcgccttgagtcttgcaccctaacagcctcttgcacgcagtgagagggaggcccccaggccagctgtctctgttcagaaagacctgggggtctccttgaccatgggctcagggctcagaccccaacacaaacaagccccgtgygctgaagagaagcaagtcctttagctgag

SEQ ID NO: 333095 - DNA, 641 bp, Homo sapiens
aatcaggttagaaccttgaagagagatctgcgccccatgtttattacaacactattcacaatacccaagatatggaaacagcctaagtgtccagcaacagatgaatggataaataaaatacatataaacaatggactattagccattcaaaagaagaaactcctgtcctggataaacctggaggacattacgctaagtgaaataagccagacaccgaaagacaagttttgtatgatctcacttatatgtgggatctaagagagtcaaactcataaaaacagatagtagaatggtggttgccaagggctggaggtggggaaaatgggaagctattaatcaaagggtgtaaactttcagttataagatgaacaaattctggagatttaatgtacagcataggtggtaatggatgtaataaatttgattgtgataattagtacacaatatatacatatatgaaatcatcacattgtatgcattaaatatacacaatccttgtcaactcaatatttttaaaaaaatktttaaaatgcctaggtcataagaattctgagaatgaaatacaacaacatacatgaatggacctgctacacagaaggtgctaaataggtttgttttgttttattttatttcaactctgg

SEQ ID NO: 333096 - DNA, 474 bp, Homo sapiens
tcatgtctagcaattagtcctaaggagatgatcagagatgtgtaaagagatttcattctaacagcatcctctgtagtggtatatgtcaggggctggtaagccatgtccagaggagcaggctgcatctagtccaccacctgtttttgtaaagtttatcagaacacagtcatgcccattcatttacaaattgtgtatggcttctttccctgcaacagcagagttgagtgttgcaacagaaacctatggcctgcagagtttaaaatatctaccctttggccttttataaaaaaagtttacwgattcctggtgagtatattaaaaagttaggaaaacctaaatcttccagagtggagaattagaaagtaagacgtgttgtatataagacagacagtttgtgtgtgcgtttatttataaatatattattctgaaataatgttgtcgacatatgttgcaggtcttaaaaattggtcaata

SEQ ID NO: 333097 - DNA, 474 bp, Homo sapiens
tcatgtctagcaattagtcctaaggagatgatcagagatgtgtaaagagatttcattctaacagcatcctctgtagtggtatatgtcaggggctggtaagccatgtccagaggagcaggctgcatctagtccaccacctgtttttgtaaagtttatcagaacacagtcatgcccattcatttacaaattgtgtatggcttctttccctgcaacagcagagttgagtgttgcaacagaaacctatggcctgcagagtttaaaatatctaccctttggccttttataaaaaaagtttactgattcctggtgagtatattaaaaagttaggaaaacctaaatcttcmagagtggagaattagaaagtaagacgtgttgtatataagacagacagtttgtgtgtgcgtttatttataaatatattattctgaaataatgttgtcgacatatgttgcaggtcttaaaaattggtcaata

SEQ ID NO: 333098 - DNA, 620 bp, Homo sapiens
gggaaaccctggggattcagctgggtttctgttgcatttctggtaacacacagttgtgaaaagccagtgttggccgttccccaggacagtctggggtagaggaggtcaggatttaactacttgagggtccggggaacagatgtggccacagtccttcctgactcactgttttcccttccacagtccccgtcttctcttcactgatgcacatagatgcctgaccagaggagagatttagttttcgtccaaggattatctgttatgttgcagttctgaaattcccataacgtttaggctagaacacaagtgatttcattatctccaatgtgtatggcttgatagaaatagattccattatgtagcaccttaaatccagataaaacataaggaatttctattccatgtttgtatgatcaatgttaataatctaagaaaatctaaaaagaagctacttcctmtattacagtatgaaataaatatgctgaatgatttgttttggggggtggaatggaaaggtataagactgaggagggtgcctgtgggaacagtgataggaatcctttcttaagggttgggttttacatacgtcttttaaaatagatgatatcattaataaatta

SEQ ID NO: 333099 - DNA, 551 bp, Homo sapiens
gtacttagggagtccaaagcgaggaattatctcattaattagtaaaccttacatcctctgttagccagaaaattaagaagagccttactgccctcctgagagatttttttagttasagtgcagaggagaatgtcatctacatattgtaaaactttcacctgaggataaaggaacttggagaagtctcttgaccgtgcctgcccaaaaaagtgggggctgtttcagaatgcctgaagtaacactatccagattaactgggtggtctggttagaggatcctcaaatgcaaacaaatactgggggtttatataacagtatgcagaagaagcataccattatatctttaggtccaggactgtgaaccttttagttccctcaggtatgtgagctagcaaggtatacagattgggagccactgggtgaattggaaccacagcctcattaacaagatgaaggtcctgaactagtctccattcccctttgggtttttgtacccccaatattggggtattacaagggctgttgcagagtttgaggaggtactgcaacctt

SEQ ID NO: 333100 - DNA, 596 bp, Homo sapiens
tttggggttcataaacattttattctctcagggatatgaagcagcaatgactttaataggatgacttagaacacaaaggagtctaacttatggtttaccctagaaggtaccattacgttttatttttttctttatatggcaatctttctaatttgccatacaaattgctatcctttcatggacagcgtagaacattattatctattataatttttaataaattgtgttttaagtttctttaaaactcttggtatggaggatatatgtaaattatatacagtgttaatatacaatattaatatatgaaatgcaatattatagattgtatgacatatcatgtttaatatattatgtaagtaatatataattaatgcaattrtaatatgaagctatagatgtggttttttaattacttgtttaaatgtaaaatgtagaaatgctgttttgttacatgaatatattgcatagtggtgaaatctaggcttttggtgtagccattacccaaatagtccaaatagtctacattgtacccattaagtaacttttttttttttttttccctgagacagagtcttgctctgtcacccaggctggag

SEQ ID NO: 333101 - DNA, 670 bp, Homo sapiens
tatgatttatttgtgtgtgtatttgtgtttttgttgtgtgtgttataaaggatttaaaggagagctaatatttataaatctcttaccatgtttcataaacctattgtttatttcttcagcttattaaatattgaaaaatatctttgggaaggaggtataattttacatataaggcaaatgagtcttggagattaaatacttggccaagattgtgctgttaataaacgcttgaagctaaatgtaactaattgtactgcttttacttgagattgtcattcttaaaattatccctatgaatcctatttcaatgcaatacagttaaacctttctattttgggatagacctatatataaaaaaatgcttatttkcagttgcctagtagtagccagtatagactatactgtatccattgcaagatgggaagttctgtcttctcaacatttgaataaataggttaataatttagatgccaggattcaattgaaaaatgtatttatcacagcaaataaaaatgtaaacaacttgaacaatataaaatgggagacagacttaaactttttctaaaatacaagcaataaaattgctatttgatttaaagaaaagattaattttactcacttttatagcaatttaaaacatttaaaaagtaaaattaaaacatgaaaggac

SEQ ID NO: 333102 - DNA, 620 bp, Homo sapiens
aaataacacgaataatattatcaaagggctgcagatcctgcaacatgacattaagtattttattaagataatatatttagttatcagtggattagttactgcagtgatactataaataatatatggacaattcagacatctaatattgtttccaaagtttgtaattaaaatgtattcagcatgtaattgatggagatagtgagtgaagaagacagatctgtctacactgatatgcaagacagaaaaatatgtaactcctttaatatagaactattaactgtgkagtcccagaagagcaggaactgacttgggtcttatttagggcacagtgttttctcaagttttctggaacttgagaaaaaatactgagttagcagatggcactgatttttttttttaattaaagaaatgtaaagctatcggacacaaaacacaaatattatgtaggcagagaaaaaagttatgacaagtaggctttactgccaacaatggtgaaggaagaaagaatctaaaataatattaccagtaagcatctgacaattattaaatcgttactcttacacaatatgctgcaaaatgaggaaataattattcacaaattcaaagtattatcaccaatt

SEQ ID NO: 333103 - DNA, 620 bp, Homo sapiens
aaataacacgaataatattatcaaagggctgcagatcctgcaacatgacattaagtattttattaagataatatatttagttatcagtggattagttactgcagtgatactataaataatatatggacaattcagacatctaatattgtttccaaagtttgtaattaaaatgtattcagcatgtaattgatggagatagtgagtgaagaagacagatctgtctacactgatatgcaagacagaaaaatatgtaactcctttaatatagaactattaactgtgtagtcccagaagagcaggaactgacttgggtcttatttagggcacagtgttttctcaagttttctggaacttgagaaaaaatactgagttagcagatggcactgatttttttttttaattaaagaaatgtaaagctatcggacacaaaacacaaatattatgtaggcagagaaaaaagttatgacaagtaggctttactgccaacaatggtgaaggaagaaagaatctaaaataatattaccagtaagcatctgacaattattaaatcgttactcttacacaatatgctgcaaaatraggaaataattattcacaaattcaaagtattatcaccaatt

SEQ ID NO: 333104 - DNA, 552 bp, Homo sapiens
aaaattaaaaagaagattcaaattattaaattcaaaagataaagtgggatcattagtataatcttactgaaataaaaaggattactgaaataacatataaagagactaaatcagtaatcaaagacctcccaatcaaatatagcccaggagctcatgattgctcctgttacatctaccaattatgaggaagaattactcaattcttaacctattccaaaaatggaaaaaaggagaatatgccctaactcatactatgaagccagaataactgtcacacaaattccagggggraaaaaaccctgcagaccaatattctttatgaatatagatgcaaaatcttaatccttgttcttgatctcaatgtttttacctaagacattggtgtccatttttcaccagttccagcaaacactgcactaaaagatctagacaaagcaattgggagagggaaggcataaaaggcacttaaattggaaaggaagaagtaaaactgtcattattcacatatgacatgatcttatatgtcaaaatgctaaataaaccataaaaatc

SEQ ID NO: 333105 - DNA, 643 bp, Homo sapiens
tcacagaaactgttatgtataaatgtgttttaagtatctaagtttgtggtaatttattaccagaaatagaaaatagggtgccatcactttcacatggactactactgttttaatagcatctcctctgacaaccatctaaaacattcaccacaatttacacacttgtttataaaaaatgcaaataatcatatcgctgcctctatktttcaactgcatacactgcttaaaatatttccttgagtggcttctcattgattcttaggaattggtatttttttactatggcctagaaaacttacatgcatggccctttaactctccagtctcccatcattctccttagggagtgtttttcttcagattcccttattacttatgaaatcactatttgatgatgaagtcagtatttggtgaagtgtttcatgtttttttttctgtattacgtagtgaaaggtatagcatgacagttttaattgcacagatttaacccaacaaagaaaggtgacataggtatatttaaatagcatcaaatgaagctgtgaggtctgtaaatattgctgagctctatgatagctccattctgttaaatattttgatcacaagtgtaagagaaactagaagtaatacatatttcagttgcaga

SEQ ID NO: 333106 - DNA, 624 bp, Homo sapiens
gaaagtgatagaataattttctgccaagtcaggggtgtgtctgtgtgaagtgtttcctttccgtcttttatgacttccactcaagcaggtagcaagctgtgcctacttgttccaatggacttttgaggcagccaagacagcaaaatttgcatgtaatattcttcccttcctagcttttgtttacaaaggtaaaccagtcaagttatgtagttagtttagactcctctaaggacraaagcagaaatacggactgctggcagacagcaagaacaacttgtatttcctgctaacccaatataagagttactttgaagtataaattagaggaataattttttaaagcttatgtctgtggtttgagatttatacttgcaattttatcattaatatgaaatacgtgtcttcccttaagagagttttaaagatcatgcatttcatgaaaatgacaaaggaaggattaaaataaagaccaggacactcatttatacatcaaaaattagagacatatcttatgaatacatgtttttcaatatgtctctcaccaaaataaccttagggcatgcaaataaaacttcttaaaaccaaagagtgcaaaattatgtgattcacattaaattaaactca

SEQ ID NO: 333107 - DNA, 624 bp, Homo sapiens
gaaagtgatagaataattttctgccaagtcaggggtgtgtctgtgtgaagtgtttcctttccgtcttttatgacttccactcaagcaggtagcaagctgtgcctacttgttccaatggacttttgaggcagccaagacagcaaaatttgcatgtaatattcttcccttcctagcttttgtttacaaaggtaaaccagtcaagttatgtagttagtttagactcctctaaggacgaaagcagaaatacggactgctggcagacagcaagaacaacttgtatttcctgctaacccaatataagagttactttgaagtataaattagaggaataattttttaaagcttatgtctgtggtttgagatttatacttgcaattttatcattaatatgaaatacgtgtcttcccttaagagagttttaaagatcatgcatttcatgaaaatgacaaaggaaggattaaaataaagaccaggacactcatttatacatcaaaaattagagacatatcttatgaatacatgtttttcaatatgtctctcaccaaaataaccttagggcatgcaaataaaacttcttaaaaccaaakagtgcaaaattatgtgattcacattaaattaaactca

SEQ ID NO: 333108 - DNA, 550 bp, Homo sapiens
tttgtgtggccaatgtagaaatgtcctcctaaattgtctagtcaaaagtataatagctattcttaactactttctttcacttattacaaccaatccattactaggtcccattgactctgcttccaaaattcaaattggccactgcaatttactattatagctgctgccacaactccagcataatcatctgtgcttacttcttggacctcataccaacctccacttcactcaaaatgatccagtcacatgcgtcttcttttcatcttttgaacacattaagttcattcctcagggtttttgctcttgcggttataactggccacacctccttctagatgcttatmatttagaactactcaaatattatcatatcaagtacgtaccatcagaccacatttcttagactaccacacatctttgctttctttcccagactttttattaaataaaattatttttattttctgtgctgaatacattactacttgaagtaaacttgtttatttgggtatttagttattgatttcagttttgttacactataaaataa

SEQ ID NO: 333109 - DNA, 550 bp, Homo sapiens
tttgtgtggccaatgtagaaatgtcctcctaaattgtctagtcaaaagtataatagctattcttaactactttctttcacttattacaaccaatccattactaggtcccattgactctgcttccaaaattcaaattggccactgcaatttactattatagctgctgccacaactccagcataatcatctgtgcttacttcttggacctcataccaacctccacttcactcaaaatgatccagtcacatgcgtcttcttttcatcttttgaacacattaagttcattcctcagggtttttgctcttgcggttataactggccacacctccttctagatgcttatcatttagaactactcaaatattatcatatcaagtacktaccatcagaccacatttcttagactaccacacatctttgctttctttcccagactttttattaaataaaattatttttattttctgtgctgaatacattactacttgaagtaaacttgtttatttgggtatttagttattgatttcagttttgttacactataaaataa

SEQ ID NO: 333110 - DNA, 529 bp, Homo sapiens
gtcctacaaaaagtgtccaaaaattacatatgtttaaactaccagttagtaatagttgtgttctcttttagcaaagccttcttagaaatgccattttttcaacaataatcagaaccgamagccttgtccaccttttaggataaagtggcatgcagccttgttaatctgacccattgaaataaatggaaaatgtactagtgccccagtataattgttagcagcagcattttagaaggcactaatttgcacttcattgtaatatctcttctcaactttgatataaatgttaactagagctggcattattaatagcaagctaggatctggggcaggggcaaaggagtggtcttacagagaatcagaacatgaccttaattgttaatgaaacatggcagttccatgaaaaggcaaaagcacaaaatgaatacaataattgtttcagtaggaacctgcataatgcaaaaggctacaattataaaatatgccaccccaaaaagcactccttggattcatatttcaaggttatatg

SEQ ID NO: 333111 - DNA, 529 bp, Homo sapiens
gtcctacaaaaagtgtccaaaaattacatatgtttaaactaccagttagtaatagttgtgttctcttttagcaaagccttcttagaaatgccattttttcaacaataatcagaaccgaaagccttgtccaccttttaggataaagtggcatgcagccttgttaatctgacccattgaaataaatggaaaatgtactagtgccccagtataattgttagcagcagcattttagaaggcactaatttgcacttcattgtaatatctcttctcaactttgatataaatgttaacyagagctggcattattaatagcaagctaggatctggggcaggggcaaaggagtggtcttacagagaatcagaacatgaccttaattgttaatgaaacatggcagttccatgaaaaggcaaaagcacaaaatgaatacaataattgtttcagtaggaacctgcataatgcaaaaggctacaattataaaatatgccaccccaaaaagcactccttggattcatatttcaaggttatatg

SEQ ID NO: 333112 - DNA, 587 bp, Homo sapiens
cactcttttacagtgtacagtgactttcacaggattgcacaaccatcaccacaatctgattttagaacattttcataatctcaaaagcaactctacacccattagcagtctctctctctcttccacctcatatcaccacttccaggcctagtaaccactgttwaatgttatgtatttacagacttgcctattctggtcatttcatataaacaaaaccatagaaaatgtcgcctcttgcgtttggcttctttcactttgtacatttcaaaggttcatctgtgttgtaacctgtgtcagtacctcattttttattactgaatattataccattgaattaatacaccatatatgcttaactattcaccagttgacaaacattttcattgttttcatttttttcttattacaaatgctattatgaacatttatgtacaactttttgtgtgggtatatgtttttatttctcttatatatatatctaaaagttgaattgctgggctatatggtaattctgtgttaaagatcattagtttttgaagaattctgtgtatcaaaataaaatccaggaacatcagaacagtttacag

SEQ ID NO: 333113 - DNA, 587 bp, Homo sapiens
cactcttttacagtgtacagtgactttcacaggattgcacaaccatcaccacaatctgattttagaacattttcataatctcaaaagcaactctacacccattagcagtctctctctctcttccacctcatatcaccacttccaggcctagtaaccactgtttwatgttatgtatttacagacttgcctattctggtcatttcatataaacaaaaccatagaaaatgtcgcctcttgcgtttggcttctttcactttgtacatttcaaaggttcatctgtgttgtaacctgtgtcagtacctcattttttattactgaatattataccattgaattaatacaccatatatgcttaactattcaccagttgacaaacattttcattgttttcatttttttcttattacaaatgctattatgaacatttatgtacaactttttgtgtgggtatatgtttttatttctcttatatatatatctaaaagttgaattgctgggctatatggtaattctgtgttaaagatcattagtttttgaagaattctgtgtatcaaaataaaatccaggaacatcagaacagtttacag

SEQ ID NO: 333114 - DNA, 573 bp, Homo sapiens
agacagattttaaaacgctaaggatttaaaatcacaggactcattctatatttagcaagtttatcttgatatatcagtaataatattttccaggactataagggacccattgcaatatggaaacactttgattctgaatatcagtaagagttcaggtctaggatgaaaagagctatggggaggaatacagatttgtgacctatatgtaatgttttgaaaygcaatactgagaagtgtcattagggcatactacatcttactgggtaataaaatttttaaaaagccttacttcacttaaaattaacttacaaatttcaagaatcggttgtccagattgaactaagagaaaaaagtaaaatgctgccttatggagaaggcatctgtgcagtggaaaacagagattttccattctgcacaaaaactctctaaggttagactattacaccaagttttctaaaaggtataaaaatgtaatccttgttcaagaaaaaggccattaaaaacagaagattagaaataaaatccctatgggaaagtacacacatattcagaatatagtctctgaattgcaaa

SEQ ID NO: 333115 - DNA, 640 bp, Homo sapiens
tttcttgttcttatttcattttgctaaactgttttctgaagtatagtcatcatgcttattttaaaattataattttttcagatcttttaagttgttcgtgttgcctttgatttctcttgtatggaaattrtacttctgattgatctagttattttcatctgcaaggtcaagtttcacagaaagattagctattcttcctttttagcggcatggcagatagtcaaccagtgttccttgttaatcctaacttaattcaagagaaaggaagggaagagactacagggttgagaaccaaaggcaccaaagaatcgcctctgatctcccacatgatgcaactctcctactgagaagtgtacctttgaattctttcaaacaaactatattgtgaagatgtaatgcttttggtttgtaacccatacacttttgttattttgaaatagagtaggtggaagaatacgtgagcaagtatatgtaatcagtcagttcactccagctagggatttgggttacactaaaattatcttgctaatagtgggccttcttttgcaaacataaatgttacattcctgatgtaaagagcatccattgataaagcctttagagttagatgttgagtcaaaagcaaatcttcaaagctttc

SEQ ID NO: 333116 - DNA, 544 bp, Homo sapiens
gggataaacatattatagaaggaattcttacatatgtgtacatgtctacattttaaatcatacaaattcactagttttcataaccaaatcattaattcattatttatatttccattaattacaaatcttttcattagtgatttatgtttttaaaaatcatcattatttatcactctaaaaatacactgaaaatactgttataataattggcatgtttatttaatttatgtggctctttaccaaatagcttcagctataatatttagccaggcataaattttctcctggaaccaggagaaaactttcttgaatgtatttttatataatcttcatgtccaaagaagtatgcagttggttatgcttaactgtccacagtttctcccaaaagattaaagagtttacaactctgtgcctttgtgcagcttaatgctcttttccccragtaaattactttgccatcctttaattcttagctcaagtaacagtttcgcttggagactctccctttaccccataactcagcaaatgcagctgctcctcacat

SEQ ID NO: 333117 - DNA, 495 bp, Homo sapiens
cttagctcaagtaacagtttcgcttggagactctccctttaccccataactcagcaaatgcagctgctcctcacatccttgtttccacatcaccctataaattctttaacattgtgttgtaagtaatagctatttgtctttccagatagaatatgaacttcagaggtcagacatctacgttatttatagttaacccctatttaatagcacagtgctagacatgtacrttccaaataaaaaaacccgtgttccaatagtgagtggttatttagtgtgtcaatagcctactaaaatggcaagatgataataagaaacttaatgtgttccaatgatatttaaaatttctgcagacaaaaatgagatagacaggatatctaaaagtgagttagttagaatgtgtctcatatatatgaaaaatgctgtcttcctcattatcctcttaaaaaactcgtaaaatattgtaaaattaaataggtacaccctttaaatgtttcc

SEQ ID NO: 333118 - DNA, 550 bp, Homo sapiens
agtacaatttgaactccagattactgtgcaaaatggctagtcttcccaaagtattattaaccaatgcttgataaaaatttgcttctttataaaattacatttcattaaaaatctgcaaaatgttattaaactttaaggtttataaaattaccaatgtctttttaaaaaattttgtggatacatattttatttttattattacatattttttccatccgatcttcaataaagctgacaaaaacaagcaatggggaaagactctctattcagtcaatggtgctgggataactggctagccayatgcaaattattaaatctggaccccttccttacaccatatacaaaagtcaactcaagatggattaaatacttaaatgtaaaaacctaaaactatgaaaaccttaggagacaacctaggcaataccatcctgcacataggaacaggcaaaaatttcatgactgataccaaaaacaatcagaacaaaagcaaaaattaacaagtgggatccaattaaaatggggttgtttttctgcacagcaaaagagactg

SEQ ID NO: 333119 - DNA, 276 bp, Homo sapiens
agtgggaggaacagacaatggacaagcatatattattcttagaagtagtgacttttgtgaaaaatgaaaaaaaaagataaataataatgggggtgctgatttagatagaatgttcagcgaaggccttgttgaggaggtaagactggatcagggatatgactcaaattctaagaaaaagaattttaaataaaagrtgataagattttgattaaacaaagtagaactgaaaatttagctttatagtttactgataatatatgtatgactccaagtttg

SEQ ID NO: 333120 - DNA, 576 bp, Homo sapiens
tacaatcagtcatgctgtctcttctttttatcctaatcctctcaatttctaccaggtatattccatcatttatgtattctcaaatctcagtgatataaataataatgtaatattacaaaactaaacaaaataaagcaaaargccaataaacaacaaacataatatctatggactttagtttccagctacactccataacaggctttttattcctagtcatatttccatcatgtaatttttcccactttgtacaaatttcaatcaccctcttctccttccttagataacttgaactggacatttaatcccatatgagcaccaaaaaacgttttatctaaagtcaatgattctatctatgtcaatatattgaatgggcattttcttagacataattgtacttcacctctcagaataattctgtactattgaaaatttccttccaaataatatgttccttgggatttcataattccttgatctcttgatttttctcctgtaatttttttatgcttccatcctcttttgttggttaattcaactttatatttttcttatacattttgcaatactcagtta

SEQ ID NO: 333121 - DNA, 559 bp, Homo sapiens
gctccatgaggacacaatttttttctgttttgttcatcctgtatagtctcatcaacgggaatagtgtctggcacataaaaaagtgatccatacatatttggtgaaataatgaatgaataaaagactgactgactgamtgaatgaatgaatgttaatagaggagagggagggagagagagattctcattaacaaatgtcctttcggaaaacttaaccctactagttatagaattatgaaaaactaatgtatttttaatacaagtaatgtacatttaaattttagtttaagtgaccaacagatactctaaattaaacaattaataaagagcagaacagaattcaaacacagaggttgggtgagtttagatgagagaaatagaacaccaagttttaaagtctaacagaattatatcactaagttagctgattcaataaatacacatttgtcattatgcattttattctcaaattctaaattgtggattaatttttgcagcaaaatcagttctttatattttcctactcttttgccaaaatatattggcattcatacagttct

SEQ ID NO: 333122 - DNA, 497 bp, Homo sapiens
gtcttggccaggacggtctcgatctcttgacstcataatcctccctcctcggcctcctaaagtgctgggattacaggcttgagccaccgcgcccggccctagactcctggcttttaagtaaatcagagatacatgtttacatgaggacttgttgcttatctctacttagaaaagcactacatttttcttgactatttatgggaatcatattgaaatgttattttactagaaattaggaatgacctctttaaaatgttttcagatgttaatattaaaagattaaaaacccattttcaaccatgaaagctatagcttactcattggcaaatgacaaaaattctgaaaatcaaatattttatattcattgattactaattattgaaatgtgagctatgtcctcatttgatattagtaatcagttatcagctagtaattctttgaagttcctggctatttgttaacttcatttattcaaacacatttattacattgtcagg

SEQ ID NO: 333123 - DNA, 617 bp, Homo sapiens
aagtgtctaggacttttgccaggttgtttactaattacttatctttgagaagtgacttaacctcccttgatatgattcatcttttttggtaaatattagcacaacatatccatgatgttaaaagtcctttacatataagatattctaaggcttataattttacaaggacattaaacactggtattattataaacatttatcattcaaaactctataatcctctataagctcaatgagacaagtattatgtcatatatattgatgtacatgaaaaggggaagccacacagttgttcttcgtataaagcaaatattcttatgtatatgaaaccataggaaaatattatgttaagactatatctaatcaaattaaaagtgtgtatttgggacaataaatgtattatggcgcctgcagtctacacacacacacgcacacacacacacacacacwctctctctctctctctctctccctcatgtacatatacactgctttcagtttatttttttgcaaccatgtgttcagattctcctttattttctttattttatattggcacctcagagcactgaaaatcgcctaatgtatccggggacatatatttatatcaatcaagt

SEQ ID NO: 333124 - DNA, 611 bp, Homo sapiens
ggtcctctgtcaagtgctttccaagttctgtgttattttatataaccctcagaagaattgtatatattcacaagaaggtaaatattgatgatctatgtatcatgtaaaaatgacaattgttaccattttggtatatgtgaattcggaatatttttacatatgcaagtatatttgcgaaaaacttccagtattgcttyagaagtgttagtgaatatccttttttaaataaagtttgcatatgctctgtggtggattctgtgaaatggttcacttaaccatttcaaacaccaaatggcatgctttcctttttataggctttttttacagggcctagtaaattaaaagctacatttcccagatccctttgcagttagccttctagatttgcttgacatttctcttatcagatttatgcaagcagggtcttttatggaatgacttactgaaatcccaggccatttttgtgggatacccattttcctttcacagataatggcaaaggcagtgtggctctgaagccagaggccagaaggtaggggaaaagtcttcccctatggttaattctgataatgcaggggcagcaaatcctttgatgtcccagttctatgatg

SEQ ID NO: 333125 - DNA, 564 bp, Homo sapiens
aagccccaccatcctagggtctagagtcactactacatggtgcttcgtcctctggaacctgagttgtcactgagctcattgactctggttcctgaattgcagctttactctactccccaggcccataccgccagagcaactcttcttccctggagtcaggccggtgctatgcccttccccccaggggtagaatcacaggcataacttgccygcctggacctgagcttccaggaagttactgtaagtcagatatcctgacactataggcaatctacatccaactctgcctcagaaaacaaacctgcaccccaagacctgggtgccacaataggtttgtgagaccctgagcctagtacctgaccctacagccactcagagcacatgcacctagaacccagtgcctctgcacctgcctgtagactatgtcagacctgatactaagagtgatctcctcagctaagtctctccattgtggagaaaatgagactaggaggaccctaaaagcccttgacaccaaggacattcacaacctacactgctgctgccacagacttctacagcaca

SEQ ID NO: 333126 - DNA, 564 bp, Homo sapiens
aagccccaccatcctagggtctagagtcactactacatggtgcttcgtcctctggaacctgagttgtcactgagctcattgactctggttcctgaattgcagctttactctactccccaggcccataccgccagagcaactcttcttccctggagtcaggccggtgctatgcccttccccccaggggtagaatcacaggcataacttgcccgcctggacctgagctkccaggaagttactgtaagtcagatatcctgacactataggcaatctacatccaactctgcctcagaaaacaaacctgcaccccaagacctgggtgccacaataggtttgtgagaccctgagcctagtacctgaccctacagccactcagagcacatgcacctagaacccagtgcctctgcacctgcctgtagactatgtcagacctgatactaagagtgatctcctcagctaagtctctccattgtggagaaaatgagactaggaggaccctaaaagcccttgacaccaaggacattcacaacctacactgctgctgccacagacttctacagcaca

SEQ ID NO: 333127 - DNA, 564 bp, Homo sapiens
aagccccaccatcctagggtctagagtcactactacatggtgcttcgtcctctggaacctgagttgtcactgagctcattgactctggttcctgaattgcagctttactctactccccaggcccataccgccagagcaactcttcttccctggagtcaggccggtgctatgcccttccccccaggggtagaatcacaggcataacttgcccgcctggacctgagcttccaggragttactgtaagtcagatatcctgacactataggcaatctacatccaactctgcctcagaaaacaaacctgcaccccaagacctgggtgccacaataggtttgtgagaccctgagcctagtacctgaccctacagccactcagagcacatgcacctagaacccagtgcctctgcacctgcctgtagactatgtcagacctgatactaagagtgatctcctcagctaagtctctccattgtggagaaaatgagactaggaggaccctaaaagcccttgacaccaaggacattcacaacctacactgctgctgccacagacttctacagcaca

SEQ ID NO: 333128 - DNA, 564 bp, Homo sapiens
aagccccaccatcctagggtctagagtcactactacatggtgcttcgtcctctggaacctgagttgtcactgagctcattgactctggttcctgaattgcagctttactctactccccaggcccataccgccagagcaactcttcttccctggagtcaggccggtgctatgcccttccccccaggggtagaatcacaggcataacttgcccgcctggacctgagcttccaggaagttactgtaagtcmgatatcctgacactataggcaatctacatccaactctgcctcagaaaacaaacctgcaccccaagacctgggtgccacaataggtttgtgagaccctgagcctagtacctgaccctacagccactcagagcacatgcacctagaacccagtgcctctgcacctgcctgtagactatgtcagacctgatactaagagtgatctcctcagctaagtctctccattgtggagaaaatgagactaggaggaccctaaaagcccttgacaccaaggacattcacaacctacactgctgctgccacagacttctacagcaca

SEQ ID NO: 333129 - DNA, 628 bp, Homo sapiens
tgttttaattttttgtatgaaaaataggagttgatttggttcttagatctatttaataagtaaataatatagattatgttagctttatgagagcaataattgtgttattctgtccttgtgttaatattacttagtacatgcttggtacgtggtttttctatgtgctgaatycatttttgtcaatagttaatttttataagattttgctttgtcatctaagaagtagataagcaaatacacttttaagcaagtataatatgtggtgctttttaatattttgtattgatgaattttaaaatcattgcttagtatttaaaggaatacgttaaaactataagcaagcttaatagattagttagcgtgtgatgttactgagaccatcattttgaagactgtcttatctaaatgaacctaatggtttccatttagtaactctggattgttagtggacttaagtgatccagataaatgagattgccctccctaaataacttagctcctggtgttggagaaggacaagtcaggcaaatcttagctttgcttttgtagtgttgactgcttaactgctactacacaacattgcctccatctgagatgaaaagtaatcactatccaccagtcaagtagg

SEQ ID NO: 333130 - DNA, 429 bp, Homo sapiens
ttaccattataatttttaaaaagcaaataggtttctgtttttcagagttactcatgttcatctgcaatatttaatctgaaactgccgccttttacgttgttttctaatgtccacaaatgtcctgtgatctacttaagctagtttatttttataaaasctgtattgctgaaagtggcctgtcaactagaggtataattttaacgaaattatttttcctaaatttcattcaagaggacattctattttttaattttaaaatttttattttttgctttcaataagaatttattttgcacattttaaaaatcgcaattttcaggatgtgtaagaaaactatttttcttatactgaaataagcatgtctttggtatagaaaccacaccctatgtgtgatctttaactaagaaaactaatcaagaactatgatct

SEQ ID NO: 333131 - DNA, 574 bp, Homo sapiens
gtggggctttagaatatagttatgtacatatctccatatctacaaagagttaagatgccatatcaaagatgttcagaagttatatatggtagagaattaattggcttatccttgacacataatacaaaacaccaaaagtaatatatatacaggacaagcaaaatagaacattgtcactaaggtcaaataatagaaaaacaatcacatcatttaagtttgatgcattggaaacaaagtaacttctttattatgtaaacaacttgcaaagctcaaaaggtaacagcacagagccataaatttgataaggcactttaaagatagcaatcaaacatataaaaatgtcaaccacaaaaaaactgtaaaaataataaccatamaaaataggggggaatacatgcattctttctagatagtctttcattttccaaaggaaagccttctataaaaatatagaagtacaaatatatatatatatatatatatttagaagccatcatcaaagttcaaatctctgtaaagagaatgtttttcctcaagttagtaaagtttggattcatacattttctagagaagc

SEQ ID NO: 333132 - DNA, 593 bp, Homo sapiens
ctactcttcatattatttatttccgtgctttttaaaattccaaaaataaggaattgactaaataacatgtactccatttgactttctaactccactgacttctaacaaaaaagtgactttatttctgaaatgtatccaaagtaaaacaggactcggcatggaaaaaaaaaacatggatgacaattctaaaaatcacatataataatggtaaggggcctatatayacacacacacattttgaccaaaattataaaggctctccatctagaggatagcaggacaaactgcaggtttgtaggatatttcactgttttaaatcaaccaaccaaataactgaatcatataaactatcaccaaccaacatctagtcatagtaggaagcagggaaaattgaattatgacattaggaaacaatcttatttgctactgaataacacatcactgcttgttaactttaaaagtctgttctttttaagagatatttgctcactcatttctttacttattcactgactataaaccctgagcatctattatgagcatctattatgtgtcaggcactgtgctccattctcaggatgtggtggtaaata

SEQ ID NO: 333133 - DNA, 543 bp, Homo sapiens
tcttaccatggcatacaatcccttacatggtttggagcctggttacctctctgatcttttcttacactgtgctgtagctacacaagtacacagcaagcatgtgtttgcctttgggatgttgcatgtggcttaacagttttctggaatgttttgtccacattgcacgcttgctttaccccttctggtctctgcttcaatgacatcctgtcgagaggttttctctggcaagtgactagttttcttactctttaattttctccatagtacttgtcaccacctaagctattttctggttgcttgtttgctgtctgtttcattggacttgaatatacactccataggttgtatctacatcaactagaaaaatacttagcacatagtagacacggtaaatagttattgaatgaataaactgatgtcatcatccttgtactcattgaactcattttgctgtrgacattgtactggtgtagatattaggcataggacttgctgagtttggccttagaatcacagaggtatagcaggaggtcttaatagaag

SEQ ID NO: 333134 - DNA, 585 bp, Homo sapiens
catcaactagaaaaatacttagcacatagtagacacggtaaatagttattgaatgaataaactgatgtcatcatccttgtactcattgaactcattttgctgtagacattgtactggtgtagatattaggcataggacttgctgagtttggccttagaatcacagaggtatagcaggaggtcttaatagaaggccgatcagagttacgtaaaggtggatgtgtgtgcaatgcgcataggattcctgtggtgatgagagtaagaaaattgtggtcagattagagggaatgaatcagagagataaatggagagaaatgcaggggtttgagtgacagtagtttgggaaatgggtatgtcctggggagaaataatactgttaaagatagttggctaggcacagtgrctcatgcctgtaatcccagcactttgggaggcagaagtgggcagatcattttaggtcaggagttcaagatcagcctggccaacatggtgaaaccccatttctattaaaaatataaaaattaaatgaaacaaataaacaaaacaaaaatacaaaaattagcctggcgtggtggcgcatacttgt

SEQ ID NO: 333135 - DNA, 569 bp, Homo sapiens
agggatgggtaaatgaaccctggggcagagctgggggatgtgtagttgagtggaaaatcatagacttyggaataaaactgaattttaaatacaggccccatcccttgttagatagaaggccttgggaaaattagttaatattccagagtcccaatacccacaatgagaaaacaattactgctgtttacagaggctgtgagggttagttgaaataatgtaacctggcacacagtaggccttcgatgagtcctagttctctttgtttgcaaaagtaatttaatccttgggtgaaagtgattgacaatcaagacacttacacacaaaaatacccagagaaaattattttcctgaaggctcaaacatccagacttttgcttgttctcctccctttttgcttgtgcaattttttccccttatgttggaggctgggaaataaaagtcagtcaacaaagccgtactgacaacctgtcatgcccgaagagaatactatgtgttatggatgggaaaccaaatcagacataatccttgtccttgagaaggtttgacctaattgggggaaataaaacatg

SEQ ID NO: 333136 - DNA, 569 bp, Homo sapiens
agggatgggtaaatgaaccctggggcagagctgggggatgtgtagttgagtggaaaatcatagacttcggaataaaactgaattttaaatacaggccccatcccttgttagatagaaggccttgggaaaattagttaatattccagagtcccaatacccacaatgagaaaacaattactgctgtttacagaggctgtgarggttagttgaaataatgtaacctggcacacagtaggccttcgatgagtcctagttctctttgtttgcaaaagtaatttaatccttgggtgaaagtgattgacaatcaagacacttacacacaaaaatacccagagaaaattattttcctgaaggctcaaacatccagacttttgcttgttctcctccctttttgcttgtgcaattttttccccttatgttggaggctgggaaataaaagtcagtcaacaaagccgtactgacaacctgtcatgcccgaagagaatactatgtgttatggatgggaaaccaaatcagacataatccttgtccttgagaaggtttgacctaattgggggaaataaaacatg

SEQ ID NO: 333137 - DNA, 569 bp, Homo sapiens
agggatgggtaaatgaaccctggggcagagctgggggatgtgtagttgagtggaaaatcatagacttcggaataaaactgaattttaaatacaggccccatcccttgttagatagaaggccttgggaaaattagttaatattccagagtcccaatacccacaatgagaaaacaattactgctgtttacagaggctgtgagggttagttgaaataatgtaacctggcacacagtaggccttcgatgagtcctagttctctttgtttgcaaaagtaatttaatmcttgggtgaaagtgattgacaatcaagacacttacacacaaaaatacccagagaaaattattttcctgaaggctcaaacatccagacttttgcttgttctcctccctttttgcttgtgcaattttttccccttatgttggaggctgggaaataaaagtcagtcaacaaagccgtactgacaacctgtcatgcccgaagagaatactatgtgttatggatgggaaaccaaatcagacataatccttgtccttgagaaggtttgacctaattgggggaaataaaacatg

SEQ ID NO: 333138 - DNA, 569 bp, Homo sapiens
agggatgggtaaatgaaccctggggcagagctgggggatgtgtagttgagtggaaaatcatagacttcggaataaaactgaattttaaatacaggccccatcccttgttagatagaaggccttgggaaaattagttaatattccagagtcccaatacccacaatgagaaaacaattactgctgtttacagaggctgtgagggttagttgaaataatgtaacctggcacacagtaggccttcgatgagtcctagttctctttgtttgcaaaagtaatttaatccttgggtgaaagtgattgacaatcaagacacttacacacaaaaatrcccagagaaaattattttcctgaaggctcaaacatccagacttttgcttgttctcctccctttttgcttgtgcaattttttccccttatgttggaggctgggaaataaaagtcagtcaacaaagccgtactgacaacctgtcatgcccgaagagaatactatgtgttatggatgggaaaccaaatcagacataatccttgtccttgagaaggtttgacctaattgggggaaataaaacatg

SEQ ID NO: 333139 - DNA, 542 bp, Homo sapiens
gacttagctcttagccttcttcctcttcaaacacattgccctgtttataggcaatgtgatacaaaacccttgcatcctgatataatagaccatgtcctttggcatcagcctcgactctgaataatgaattctgcaccttaatatctgtgtaacatggggcaagttacttctttaagtctcagtttctcatctataaattgagaacaatacatgcctcataaaattgttgtggagagatgactgtcagatgcctggtgtgtgctaggtacttgcttggtaaatgtttcctaccaccctaaarttacacagcagtgagagatttctcttgccacaggatgagggcttcaggaggcccttgggaaaaaagcatgtggaaaattaacttacttattattctgattacatggaagaaacattgtctctttcaaagacagcagaaagcttagttcattccaagtctgaaacctctgttggcctgtgcccgtggtatggaaattcagtcgcagggaccatgtagagggtttccctccatgcccttagct

SEQ ID NO: 333140 - DNA, 469 bp, Homo sapiens
gtagagtcttgtcttttaattttcttgatggtgtcttttgaagaggaaaagtttttaattttgatgaaatctagtgtatcatgttttcttttatggatcatacatttgttgtcatatatctaagggatctttgccttarccaagatcacaaagattttctcttatgttttcttgtagatatttcatagtttattttgtaagtttgtatctgtgatccatatttgggtttatttttgtgtatggtgtaagctagggtataagttcattttttgcatgtggatatttgcttgttctggtgccatttattgacaagtctcttaaaagttttttttttctgttaaactgtattactgcagtaaatagtcttacatatgctctgaacacacgccttcattttctgactgaattgggagaagagggaggaaaggagtttgtcttgggtcttggccttattgtagggagcttttct

SEQ ID NO: 333141 - DNA, 469 bp, Homo sapiens
gtagagtcttgtcttttaattttcttgatggtgtcttttgaagaggaaaagtttttaattttgatgaaatctagtgtatcatgttttcttttatggatcatacatttgttgtcatatatctaagggatctttgccttaaccaagatcacaaagattttctcttatgttttcttgtagatatttcatagtttattttgtaagtttgtatctgtgatccatatttgggtttatttttgtgtatggtgtaagctagggtataagttcattttttgcatgtggatatttgcttgttctggtgccatttattgacaagtctcttaaaagttttttttttctgttaaactgtattactgcagtaaatagtcttacatatgctstgaacacacgccttcattttctgactgaattgggagaagagggaggaaaggagtttgtcttgggtcttggccttattgtagggagcttttct

SEQ ID NO: 333142 - DNA, 549 bp, Homo sapiens
gtggccgacataacagtaatatacataaaatggcacagcaataaaaaactggcaatctgctccaataccagcaggaccagatattcaaactgctttataaactaataaatttttttatrctgtctacacttcactcttcctgtcactctatactcataaacatcgaataaaagggtttaagaactaggaaaagctagtaaggatcccattcaaatacttaccaggagcaatggtctccaatgtatcagaactgaccttccgagtacttgtacagtgacggagggtggaacccaaaaataccaagtaaaacactacatcatcttcagctttgtcctcttcagcaagcagcactgtaacaacacaatcaccctaggaaaggaaacaatatagcaagtttacattagtaaggttcctcttcgcagcctatctttatcaaacatcatatttaagggaaaatcaaatttatcatctaaaccatgcccccattctggtaagctgaaacaagtataaagattgagcacttatacaccaggcaatcatctaggcatt

SEQ ID NO: 333143 - DNA, 538 bp, Homo sapiens
tcttttttacaaaacctttctaacagtttatttttctacttacgaaatcctgttagttgtaatatcttatcattcttgtcttccatgtctctggtttctctcttattttttacttctttgggctttattctgagcaatttcttcagcctgtcttccagtttacattttccttttcaattgtatgtaatctgctgtcaaatctgtcttcaatttcaacaattatgtttttatttctggaatttctgtttggatccttctcaaatctgcctggtcattttttaaaatgtttttttgctttcattgagttgtattaaatttttactatatgcccaacaattctaattaagtctttattggtttgattttgctgagtctcttttcttttgtctttattttctttacttgtacratggtaataatctagtaataacaccaactaaatcacatgattgttttatgaattgagataatgaatatattgcataatatctggtacatagtaaatgtacatgcaatccattataataattagaaataa

SEQ ID NO: 333144 - DNA, 274 bp, Homo sapiens
gagcatttgaaatgtggctaggctggattgagatgtgctgtcagggkaaaacacacaccagattttgaagacttagtaggaaataaaattaaacatatctaattaataacttttatattggttagacattgacataatattttgtatgtattttacatataaatatacattcatgtgtatgtgtaattaatatcttcacatgaaatacttctcaattacaattggaagaatgatgactttgtggtggagaaatctggcacaaacttgatcatat

SEQ ID NO: 333145 - DNA, 274 bp, Homo sapiens
gagcatttgaaatgtggctaggctggattgagatgtgctgtcaggggaaaacacacaccagattttgaagacttagtaggaaataaaattaaacatatctaattaataacttttatattggttagacattgacataatattttgtatgtattttacatataaatatacattcatgtgtatgtgtaattaatatcttcayatgaaatacttctcaattacaattggaagaatgatgactttgtggtggagaaatctggcacaaacttgatcatat

SEQ ID NO: 333146 - DNA, 234 bp, Homo sapiens
tgaaaaccctctttttgtaatatctatgaaggaatattttggagcccatagaggcctatactaaaaaccaaatatcccaggataaaaactagaaacaagctatgtgtgaaaatgttttgcaatgtgtagaatcatctcacagagttaaaccttgttttgattgggcaggttaraaacattctttttgtagaataaaggaagggacattttggagctcattgaggcctatagtga

SEQ ID NO: 333147 - DNA, 576 bp, Homo sapiens
tctttttgtagaataaaggaagggacattttggagctcattgaggcctatagtgaaaaaccacatatgccatgataaaaactagaacaagctatctgtaaaaatgttttgcaatgtgtggtttcatctcacagagtttaacctttattttgacttagcaggttggaaacactatttttctagaatctgcaaggggacatttcaarcccaatgaggcctgcagtaaaaaactgaatatcccacgatgaaaattagaaactagctatctgtgaaaatactttgcgatgtgtggattcatctaacagagttgaatgttagttttgattcagcaggttgtaaacttagcaggttggaaacattcattttgtagaatcaaagagaggacttttcttagccccctgaggcctatagtgaaaaaccaaatatcctgtgataaaaactagaaacaagttatctgtaaaaatgctttgcaatttgtggatttgtctcacaatgttaaacctttgttttgattccgcaggttggaaactctctttttgtacaattgatgaggagatatctcaaagcccattgattc

SEQ ID NO: 333148 - DNA, 576 bp, Homo sapiens
tctttttgtagaataaaggaagggacattttggagctcattgaggcctatagtgaaaaaccacatatgccatgataaaaactagaacaagctatctgtaaaaatgttttgcaatgtgtggtttcatctcacagagtttaacctttattttgacttagcaggttggaaacactatttttctagaatctgcaaggggacatttcaagcccaatgaggcctgcagtaaaaaactgaatatcccacgatgaaaattagaaactagctatctgtgaaaatactttgcgatgtgtggattcatctaacagagttgaatgttagttttgattcagcaggttgtaaacttagcaggttggaaacattcattttgtagaatcaaagagaggacttttcttagccccctgaggcctatagtgaaaaaccaaatatcctgtgataaaaactagaaacaagttatctgtaaaaatgctttgcaatttgtggatttgtctcacaatgttaaaccttygttttgattccgcaggttggaaactctctttttgtacaattgatgaggagatatctcaaagcccattgattc

SEQ ID NO: 333149 - DNA, 566 bp, Homo sapiens
atggagttggaagcacttcctgtgtcatctgcaccttttttggcagatgaaggtgcaggaccccatccacacctcagcagactgtatgctcacctgtatctgacctaattgctgctcacactcctagttctggaatgaaatcccaagatgttggaggagtgctcccttcatgatgtgaagcacatgctyggctgcaaaccgaattcgaattggattcaagtggcctgcggacaggactgctagggtaccgccttgggttggccacaggacaatgaggccctgacaggtgtctgctcctgagagcggtgtgctcctcttctttctagaagagtggttccttcgtatgggggggtgatttgtacacctgtgagtctcaaccatccccccaactcaccgtggactcaggaaccatggaaaaacaaagaacatgcagccccataggccaagcagagccacacagacaggtgcaccagaaggtgaagggactcagaaaaaaaagtgctgcagtgcattaaacacattccttttagcagatgcccctcacacacacacatacacacaaacac

SEQ ID NO: 333150 - DNA, 581 bp, Homo sapiens
gcagcaacccactgcagcatgctaatagtctcgaacatagagccttcatgagccatctccgtggtagggtcycacaggagaaggaggagtttcaagactgtgaggtgggctctggagactgctcttctgactccattcccaaaagaggctgtgtgcatgaattgggtctcctggggatgggaataaagtctggtgagttgttaagaggtctccaggtgatggaataatatctgagatccaagaggcaggtgtcagtggaagatggccaggccattgaaccccctgccttccttcatcctgggcctcacaggggctcctgcttctcagcacggctctctgggaaaggcaggaaccatgacaaaggcaagtccaaggtggaacagtgttctcacacctaaaacaggcctctcacaagtgcacttgaggttgagagagtgtctcagaggctgtctggggcaatttgaaacctgaaaataaagtccaggagtgctgttgatgggcactgtggacccccaatgaaagcaaagaaaaatcaagtctctcctgggagaatgagcagacttgtgccggaatccaagcca

SEQ ID NO: 333151 - DNA, 581 bp, Homo sapiens
gcagcaacccactgcagcatgctaatagtctcgaacatagagccttcatgagccatctccgtggtagggtctcacaggagaaggaggagtttcaagactgtgaggtgggctctggagactgctcttctgactccattcccaaaagaggctgtgtgcatgaattgggtctcctggggatgggaataaagtctggtgagttgttaagaggtctccaggtgatggaataatatctgagatccaagaggcaggtgtcagtggaagatggccaggccattgaaccccctgccttccttcatcctgggcctcacaggggctcctgcttctcagcacggctctctgggaaaggcaggaaccatgacaaaggcaagtccaaggtggaacagtgttctcacacctaaaacaggcctctcacaagtgcacttgaggttgagagagtgtctcagaggctgtctggggcaatttgaaacctgaaaataaagtccaggagtgctgttgatgggcactgtggacccccmatgaaagcaaagaaaaatcaagtctctcctgggagaatgagcagacttgtgccggaatccaagcca

SEQ ID NO: 333152 - DNA, 571 bp, Homo sapiens
aaactagtaaaaagctatctgtgaaaatactttgtgatgtgtcaattcatatcacagagttaaaccttgttttaattcagcaggttgaaacattctttttgtagaaactaaaatggcacatttcggagaacattaaggcctaaagttaaaaacgttatatctcaagataaaaactagaaacaagctatatatgagaacgctttgcaatgtctggattcaaatcacagagttaaacctttgtttttattcagcaggttgtaaatgctctctttgtagagtctatgaagggacatttcagagcccwtcaagaagtatatgaaaaaactgaacatcctgccatgaaaactagacacaagctatctgtgaaaattccttcctatgtgtggattcctctcacagtataaaacctttttttttattcagcaggccaaaatcactctttttgtagaatgtacaaagggacattttggagcccattgtgccctgtcatgaaaaactgagtattgtgtgataaaaactagaaacaagccaactgtgaaaatattttatgatttattattttatgtcacag

SEQ ID NO: 333153 - DNA, 571 bp, Homo sapiens
aaactagtaaaaagctatctgtgaaaatactttgtgatgtgtcaattcatatcacagagttaaaccttgttttaattcagcaggttgaaacattctttttgtagaaactaaaatggcacatttcggagaacattaaggcctaaagttaaaaacgttatatctcaagataaaaactagaaacaagctatatatgagaacgctttgcaatgtctggattcaaatcacagagttaaacctttgtttttattcagcaggttgtaaatgctctctttgtagagtctatgaagggacatttcagagcccttcaagaagtatatgaaaaaactgaacatcctgccatgaaaactagacacaagctatctgtgaaaattccttcctatgtgtggattcctctcacagtataaaaccttttttyttattcagcaggccaaaatcactctttttgtagaatgtacaaagggacattttggagcccattgtgccctgtcatgaaaaactgagtattgtgtgataaaaactagaaacaagccaactgtgaaaatattttatgatttattattttatgtcacag

SEQ ID NO: 333154 - DNA, 286 bp, Homo sapiens
ctatatagagatagtaggttaatattagcaatttaaaaagaagaaacttaaaatccatgaaagaacataattttgcaaaagacatgaaaggcaatacattgttttattccatttatgtgatattctggkaaaggcaaaagtatagagacaaatcagatcagtggttgccagggtatataagtaggggttggagacttaatacaaaggaaattgagggaatttatgggggtgatgggagttttctgtatattgattgcagtggtagttatatgattatatacattaa

SEQ ID NO: 333155 - DNA, 310 bp, Homo sapiens
tccactgtcaagaacctaaagagtctgtttacggagatgtagctagggttaaaaaaataagagagaaagagagatgcagaggaaaaaagacaccaaccacaggaagccataaagggwcaagagaaaagatagcattaccagagctaagtgagttctggagctgcaaggaaaggtcacatagcaggagttctagttatggagagattcagctcctggcagaagcacagaaccaaagcagagggaatcgggggaaaaataacccattctcctctccacctaacttgaaccctacaggagcctcccactgagt

SEQ ID NO: 333156 - DNA, 502 bp, Homo sapiens
ggctctttatgggaaacataagtgctaaaagtctccacagcagatctcctggattccaactaggcctacttgcctaattttcctttgttaatcagaattaatcaatccattcagtatagttaaactctttattgccagttakgtcaatggcattaggagctaaaaatagcaagggtgcaatttcaggtccaaatttaatggaaacatagctatatttcttgaaagaaatgttccttccttggaaaagagaacctccaaagctactaaatacaagtttccaggaacggaaataaaattctgtaaatagaatattaggtaaaataattctacttcttagttcctgatcctacgtgttctggcttttggaaatatggcttatgtattggctaatagtttaatctgttaggccagcaccacaatttcaaacaatattgtgtcacacctggcattgaaactgagcctttaggaagccattccatcattctatcaagctagctgctta

SEQ ID NO: 333157 - DNA, 502 bp, Homo sapiens
ggctctttatgggaaacataagtgctaaaagtctccacagcagatctcctggattccaactaggcctacttgcctaattttcctttgttaatcagaattaatcaatccattcagtatagttaaactctttattgccagttaggtcaatggcattaggagctaaaaatagcaagggtgcaatttcaggtccaaatttaatggaaacatagctatatttctwgaaagaaatgttccttccttggaaaagagaacctccaaagctactaaatacaagtttccaggaacggaaataaaattctgtaaatagaatattaggtaaaataattctacttcttagttcctgatcctacgtgttctggcttttggaaatatggcttatgtattggctaatagtttaatctgttaggccagcaccacaatttcaaacaatattgtgtcacacctggcattgaaactgagcctttaggaagccattccatcattctatcaagctagctgctta

SEQ ID NO: 333158 - DNA, 502 bp, Homo sapiens
ggctctttatgggaaacataagtgctaaaagtctccacagcagatctcctggattccaactaggcctacttgcctaattttcctttgttaatcagaattaatcaatccattcagtatagttaaactctttattgccagttaggtcaatggcattaggagctaaaaatagcaagggtgcaatttcaggtccaaatttaatggaaacatagctatatttcttgaaakaaatgttccttccttggaaaagagaacctccaaagctactaaatacaagtttccaggaacggaaataaaattctgtaaatagaatattaggtaaaataattctacttcttagttcctgatcctacgtgttctggcttttggaaatatggcttatgtattggctaatagtttaatctgttaggccagcaccacaatttcaaacaatattgtgtcacacctggcattgaaactgagcctttaggaagccattccatcattctatcaagctagctgctta

SEQ ID NO: 333159 - DNA, 502 bp, Homo sapiens
ggctctttatgggaaacataagtgctaaaagtctccacagcagatctcctggattccaactaggcctacttgcctaattttcctttgttaatcagaattaatcaatccattcagtatagttaaactctttattgccagttaggtcaatggcattaggagctaaaaatagcaagggtgcaatttcaggtccaaatttaatggaaacatagctatatttcttgaaagaaatgttccttccttggaaaagagaacctccaaagctactaaatacaagtttccaggaacggaaataaaattctgtaaatagaatattaggtaaaataattctacttcttakttcctgatcctacgtgttctggcttttggaaatatggcttatgtattggctaatagtttaatctgttaggccagcaccacaatttcaaacaatattgtgtcacacctggcattgaaactgagcctttaggaagccattccatcattctatcaagctagctgctta

SEQ ID NO: 333160 - DNA, 549 bp, Homo sapiens
gggttctcctgttaaatatgaatgagaattgaggaaaatttgataactaagcaggaatagctaataaaggtctgaaccacctgctcattcaatatacttgtgactccccttcctgttcagccttaatgtcacccatatcaattccatcttataataacctgctaattttcaagcacagttttaatatttgataacttggatagcaaccagttgatggtgaacacttcaaatcacatagatacatggtgacaagcctgacttcttaaatagataaaaaatatttggcagaaggggacacagttttgttccaaaatcattagttaggtgaactgtgattgtcttcttggggttacttagaagcttcaaacagcattactctaagccagatacttagatctacggagtcaaaatacctrcgcagtagaggagcctacagcacagactgaacctgctgcaaagagctctttcttctaaatgggtagacttgtgagttagcctgtaataggtttgaatacacacagctgtagtcatgttacttccaaaatccag

SEQ ID NO: 333161 - DNA, 578 bp, Homo sapiens
tctgatactatttcttgttctgaactctgttgtgtctaatatcaatgtagtccttccacagctttattttagtgtttccatgatatggctttctccatatcttgatgataacctatttatatctctatgtatttggagcaagatataaaatttagagttgatwttttaaagatttttcaagatgtaattcttatttatttttgttctatttgacgttctctgagtttcctatatctgaagtttgattttctgtcacttcttttagaatatttttggcagttattttgaaaaatatttcttttgctctattattttttcctcttttctttttgggatttcaattataactagggtaggtaatttcatctcagacttatgcaggtactttttctcagggtctcaggcatgtagccttctcacacttctgttcttttcctggctgttttggtgagatcagtgatattcctccttcaccttcaagagcagttttgttttgtttttcctgttttcatactcccagcatcaggagtattctaagtgtggcagtttttgttgccttcccctacatattaagtgga

SEQ ID NO: 333162 - DNA, 578 bp, Homo sapiens
tctgatactatttcttgttctgaactctgttgtgtctaatatcaatgtagtccttccacagctttattttagtgtttccatgatatggctttctccatatcttgatgataacctatttatatctctatgtatttggagcaagatataaaatttagagttgattttttaaagatttttcaagatgtaattcttatttatttttgttctatttgacgttctctgagtttcctatatctgaagtttgattttctgtcacttcttttagaatatttttggcagttattttgaaaaatatttcttttgctcyattattttttcctcttttctttttgggatttcaattataactagggtaggtaatttcatctcagacttatgcaggtactttttctcagggtctcaggcatgtagccttctcacacttctgttcttttcctggctgttttggtgagatcagtgatattcctccttcaccttcaagagcagttttgttttgtttttcctgttttcatactcccagcatcaggagtattctaagtgtggcagtttttgttgccttcccctacatattaagtgga

SEQ ID NO: 333163 - DNA, 601 bp, Homo sapiens
aaaaaaaaacactaaaataaattcctaaggctaaaagcaagttacacaagccagtcacttgaatccacatttttaaaaaagcactagtataggtaatattaacattataaaagacagtagaaatgcatgttttctctttatcataaattgtttataaaataatatgtgtataacggccaggcacgatggctcacgcctgtaatctcagcacgttgggaggccgaggtgggygtattatgagtccaggagatcgagaccatcctggctaacacagtgaaaccctgtctctactaaaaatacaaaaaattagctgggcgtgatggcaggcgcctgtagtcccagctactcgggaggctgaagcagaagaatggcatgaagccaggagatagagcttgcagtgagcagagattgtgccacggcactccagcctgggtgacagagagagactccatctcaatgctaataataataatatgtgcataatgtattgctgagtatttgacatgtagaaatgtaatatgtttataacatattttccagtaacatcaaaaaggaggtagttggaaaaaaatgtattgtgataaggtaatcactctagatg

SEQ ID NO: 333164 - DNA, 565 bp, Homo sapiens
tcaaaatgtctaatcttttttaatggttaaatggctttttgtgtctcattcacttacattttctacgaaaagtttaaagttttgtttctgacatgtaagtcttttgtccgtctggaatttaatgtttgtatatagagtgaagtaggaatataatttcattttgtttcttatatcgataaccattatttttctattctatttattgaaaagccctttctttccttgctgatctgccatttcacctacatcacatatcaaagattaaatttgtggagatttgcttgggaactctctatcctgtttcattagtcaatttatcagtgagaaccacactgtcttaattgcagtagctttataaaagttctgatatttggcaggacaaatctttcctcttcttcaatgtctttgatatacttggccccttcccttttcatacacacacacacacacacacacacacacacacacacacacacacayatatatatatatatatatatatatgtatatatatatagagagagagagagagagagagagagagaggtctcactttgttgcccag

SEQ ID NO: 333165 - DNA, 565 bp, Homo sapiens
tcaaaatgtctaatcttttttaatggttaaatggctttttgtgtctcattcacttacattttctacgaaaagtttaaagttttgtttctgacatgtaagtcttttgtccgtctggaatttaatgtttgtatatagagtgaagtaggaatataatttcattttgtttcttatatcgataaccattatttttctattctatttattgaaaagccctttctttccttgctgatctgccatttcacctacatcacatatcaaagattaaatttgtggagatttgcttgggaactctctatcctgtttcattagtcaatttatcagtgagaaccacactgtcttaattgcagtagctttataaaagttctgatatttggcaggacaaatctttcctcttcttcaatgtctttgatatacttggccccttcccttttcatacacacacacacacacacacacacacacacacacacacacacacacatatatatatatatatatatatatrtatatatatatagagagagagagagagagagagagagagaggtctcactttgttgcccag

SEQ ID NO: 333166 - DNA, 506 bp, Homo sapiens
ctgtgctcagcccatccttggctgttcaattgtggaggtaagtagtagatgccaagtttacctccaggtcagaaggggcagatgccccagggcagaatcataaccataaccaggcctcccaatgcatgaagacattatgttctgaagcttaaacctggacaaagttctgaccagtagcactgtgttcatgaatatcgggtcaaaaatttaaaactgggactatccagaagaacctggtagatgcaggtgcagtctacagtccaatggtcagccatgataacaggccacctgtactttctctttatcatggagttcttgatgtaaaaattgatgacactttcttccttctgatgtgcttccctttcttcttcattttccataagtagtttcctccatcccacctcccaacaggccacagtcaattcaggacattttaaccatgaaaatgagtgtccataacatraatttagaggccagacagggtggatcatgcctgtaatcccagc

SEQ ID NO: 333167 - DNA, 623 bp, Homo sapiens
tctttaaaaaccaagggatatcacttttgcttatataatacataatattataatacatattatattataataatacataatataatatatattacattataataatacataatataatatatattacattatatattattatatgatgttatatrgtatatataatttagattatataatacatatataatatatataaaataatatattattgttgcttattatgaatgaggaaagaaagtggtttcttgggatggaatctactcctggtgaaaatgctgtgaacattgtggaaagaacaacaaaggacttagaatatcctataaacttagttgatagaggaatggcagggtttgagaggattggttccaattttgatataaattctacagtgggtaaaatgctgccaaactgcgtagcacactacagtgaaatcttttgtgaaaggaagagtcagttaatgcgataaaattcattgtcatcttattttaagaaattgccactccctctccagccctcagcaaccaccaccctgatcagtcagtagctatcaacattgagacaagaccacccagcagcaaaatgatgatgacttgctgaaggcccagatgatggttagcatt

SEQ ID NO: 333168 - DNA, 513 bp, Homo sapiens
gtgctgagataggcaccagtggtgcagggaacatatggcacagtctctgacctcaggtaatttttcactctcatacatatgtattaggacaccaatacatatgtgaatataagatagtatgatagatattgcaacaagtaattttttactgtaaacctattttataggattttgaacttaaactactttcaccctatttccaaaaaaagtattgcataactttaaatggattctcagtttgaaatcatcatacaaactgcagtagcatcttctggtgaaatactgctttgtatctattagaatagtccaaacaattgggagagaactgcattattagagctgtaaaagttactgtctagaaatctcagagaagaagaggaagttctatggtagatgaataagatracatctaaactgttctcttaagctactgaagttctgtggatatctcacagcacaaagttcaaatgtatgcccacaactcctcatgccacaagatgtgacaactttcca

SEQ ID NO: 333169 - DNA, 216 bp, Homo sapiens
tttaagggatgggggacacaaacagcagggtcaaaacaaagtcttatggttaggaatactgtagagaawatacggccattgaatggggagttagactaattaagctgtatagacattttcaattgggattacaattgaatgagttatatgaaattgtatgagatactactgatatttaaggattattgtattactttcctatttgtcaggctaaca

SEQ ID NO: 333170 - DNA, 216 bp, Homo sapiens
tttaagggatgggggacacaaacagcagggtcaaaacaaagtcttatggttaggaatactgtagagaatatacggccattgaatggggagttagactaattaagctgtatagacattttcaattgkgattacaattgaatgagttatatgaaattgtatgagatactactgatatttaaggattattgtattactttcctatttgtcaggctaaca

SEQ ID NO: 333171 - DNA, 599 bp, Homo sapiens
atttctgctattctttttactctatcaatgtttttcattttgaatcatctaggtttttctgtattactgtgcttcagctcagagagtgaatacttaacaaaatgcagagtatgagtttcagtgaagtaatggccaaaatataggccataaacagattattgtgagattagtatttgtggtatgaacagtagcctcccaaagatgtccatatcgtcattcctggaatctgtgaatatggcaaaatggactttgtagctgtaactaaggttacaaaccttaagatagggyaagcatctttaagtatccaggtgaacccaatctaatcatatgaacctttaaaagtagagaacattctttagctggagaaagagaggcttggtagagggagaaattagaaagattccgcctgagaaggttcagaggcgtcattgctggttttgcgatgtggaggctcacataggaagtctggagacaggttactaggagctgacaccagcaaccaccagttgacacaggcaagaaaacaatgacgtacaactgtacaagatactgggaatggtgatacaactgcaaacaactaaattctgccaacaacctta

SEQ ID NO: 333172 - DNA, 579 bp, Homo sapiens
atttaaattcttttatacagacacacacacacacatacatacacacggagaaagaggggaagagagtgacagaaagataaacagtgagacagaaagagagaccagaaattaccagtgtgagaaattaataaaagagaggacatcactacagtttctatagacatcaaaacaagtataaaagatttatagtggccccagctagtgtgasaaggcaattaaaagaagttaaatttgtaaatattgaaaaggaaaggtaaatgctattttggagatggcatggctatgtacaaatgtcaaaaactatctacaaacaattagaaataaaagccagtttggtaaggtgactggatttataacaaatgcacaaaaagcaaaaatcaattgtatatctattacactttttgtttgacaaagtagaaataattcatcacaaacaaggacagaaaggaaagggaataaacacatccttaaattgtgtaccctagatgcctctcttgcttcaccctaggctcagtcctgatgaaaatggctcattattttttagagaaatttaaattgaaactgtaatgacataccatt

SEQ ID NO: 333173 - DNA, 579 bp, Homo sapiens
atttaaattcttttatacagacacacacacacacatacatacacacggagaaagaggggaagagagtgacagaaagataaacagtgagacagaaagagagaccagaaattaccagtgtgagaaattaataaaagagaggacatcactacagtttctatagacatcaaaacaagtataaaagatttatagtggccccagctagtgtgacaaggcaattaaaagaagttaaatttgtaaatattgaaaaggaaaggtaaatgctattttggagatggcatggctatgtacaaatgtcaaaaaytatctacaaacaattagaaataaaagccagtttggtaaggtgactggatttataacaaatgcacaaaaagcaaaaatcaattgtatatctattacactttttgtttgacaaagtagaaataattcatcacaaacaaggacagaaaggaaagggaataaacacatccttaaattgtgtaccctagatgcctctcttgcttcaccctaggctcagtcctgatgaaaatggctcattattttttagagaaatttaaattgaaactgtaatgacataccatt

SEQ ID NO: 333174 - DNA, 572 bp, Homo sapiens
gtgcccggcctcaaatgtcttaaatacatctgcaaatgccttacttcaaataaggtcaggctccatggattaagacatggacatgcctttcagaggcattattgggctaccacagagtaggtatataaatatcaaaacattaagaaaagtaaactccaaatagtgggtatctttgaagacaaatgaaggagtagtaatctattttgcaaaaaaaaaatgttattctgagtggtagttgtggaggtatttgttttgtgataattctttaaggkgtatacattttcttaggatttgacattacatatatatgtttatgcataaattattcatagatatacatatattaaaatttaagaaataaattagaatgactcaatgttcaaatgtttttaaatttttttttaaaatgtgaccttttaggaaataatgcagtcacatagataaatttaatacttccaattaaaaaagcagatatagtattattttattataaaattattttttatctattctgctagttctccctctctcactatacatatagttatgtatcttccatctatatccaaact

SEQ ID NO: 333175 - DNA, 436 bp, Homo sapiens
aggaaagcaattcagaggtgcaaattgcctaatgtgcaaatcaataacatgctggcctaatgctcgatttcatgagattgctgttatataaawgtagggaaaagcaaataatcaggagccaaaattgtctcgtatcagggaaagttcataattagtttgcattgtcacagaattccaaatagtactgattaattaagccaatatgtattccaagcagcaacagctaccaatagtcagcctgtgtggggagaagcataaatccaatgaactcaaatttaatacccgtaattgtaccaatgtaagtaacagtcaatgactgagcatgcagccctttccctagacaatctctaaaatagtttttaactgaattttgtgaacagtatgtagagaaaatctaaggaaaaaaacacagtgaaggcaagaattcccaaaatgc

SEQ ID NO: 333176 - DNA, 436 bp, Homo sapiens
aggaaagcaattcagaggtgcaaattgcctaatgtgcaaatcaataacatgctggcctaatgctcgatttcatgagattgctgttatataaaagtagggaaaagcaaataatcaggagccaaaattgtctcgtatcagggaaagttcataattagtttgcattgtcacagaattccaaatagtactgattaattaagccaatatgtattccaagcagcaacagctaccaatagtcagcctgtgtggggagaagcataaatccaatgaactcaaatttaatacccstaattgtaccaatgtaagtaacagtcaatgactgagcatgcagccctttccctagacaatctctaaaatagtttttaactgaattttgtgaacagtatgtagagaaaatctaaggaaaaaaacacagtgaaggcaagaattcccaaaatgc

SEQ ID NO: 333177 - DNA, 436 bp, Homo sapiens
aggaaagcaattcagaggtgcaaattgcctaatgtgcaaatcaataacatgctggcctaatgctcgatttcatgagattgctgttatataaaagtagggaaaagcaaataatcaggagccaaaattgtctcgtatcagggaaagttcataattagtttgcattgtcacagaattccaaatagtactgattaattaagccaatatgtattccaagcagcaacagctaccaatagtcagcctgtgtggggagaagcataaatccaatgaactcaaatttaatacccgtaattgtaccaatgtaagtaacagtcaatgactgagcatgcagccytttccctagacaatctctaaaatagtttttaactgaattttgtgaacagtatgtagagaaaatctaaggaaaaaaacacagtgaaggcaagaattcccaaaatgc

SEQ ID NO: 333178 - DNA, 436 bp, Homo sapiens
aggaaagcaattcagaggtgcaaattgcctaatgtgcaaatcaataacatgctggcctaatgctcgatttcatgagattgctgttatataaaagtagggaaaagcaaataatcaggagccaaaattgtctcgtatcagggaaagttcataattagtttgcattgtcacagaattccaaatagtactgattaattaagccaatatgtattccaagcagcaacagctaccaatagtcagcctgtgtggggagaagcataaatccaatgaactcaaatttaatacccgtaattgtaccaatgtaagtaacagtcaatgactgagcatgcagccctttccctagamaatctctaaaatagtttttaactgaattttgtgaacagtatgtagagaaaatctaaggaaaaaaacacagtgaaggcaagaattcccaaaatgc

SEQ ID NO: 333179 - DNA, 548 bp, Homo sapiens
atattaaatttataaatgtagtttaaaatctttaagggagtttaattaactaagttgtaaacggaccaaacattaatcaaagtcccccttaaaaataatttttaatgcactagatttataaatataacaataagatttctaatttaaactcaaaaawttttttaattggttaacaatttaatgtaatatgctgcacattaactcagaatatgaaatcttataagtagtcctttttacattcaagaatcacattgataaacatcacaaaatgaccactggtaaccactatgaaactctttaagcgataggtattgtatgaattttactcctcatgatttgaagataatgcataaattccttcttgttattttgtttccaatttagtctttacatagacaattcaatttagtctttacatagacaaaactcctataacagaaaaactgaaaacaaagagggtacattccttcggttgctttctgaggacgccctactctaaaaggcagtagctttcaacaaactatgtctccttctcattgtactctgtg

SEQ ID NO: 333180 - DNA, 250 bp, Homo sapiens
ttgcagttgtcaaatagcccaggtgatgttacagatttactccttataaaaggaggcattacacattacacatgcatcttagtggccttacaaaagtgtttggttyatttgtattgactattcacctttaaaatatttcaatattcattaaaatagcttccaaccaatattattaggcttatgtttctatcttttttgtattgatatctaccttcattgctgtttgtttaggagatatattctatgtcac

SEQ ID NO: 333181 - DNA, 574 bp, Homo sapiens
aaagccaataccacacgtgttaagaggcaagttcctgtgtatatatctgggcttaattctatgggaagctatgtggaacatgcctcagaattacatcactgaatccggggagattcttcttagttaccctcaccttttcttcccacttcatgcccagtaacaagctcccgttctgctagagaaagtcctcagctagaaacaggtgcaaattctggagatgagatcttgtagaatgttaagaatggttttcttcacagcagctacaggtaaggaataggggctgggctattaatacatctgctacaaatcaataaagcccttatgctccttttggtgatcgacaatgtatttaaaaatattagatgatcaagaagggctgcagaaaggaggaaacagaaacagcacaccttttggtttatttttattcatttcatcagtttcaaggaaaatgtgttggggattcctgscatagagaatgtcacaaagacatgttttcaatagtggtgttgtccctagggcagagaagacccagagaaagcccaagtggctgctggatcaaagtcagacaccgtgc

SEQ ID NO: 333182 - DNA, 228 bp, Homo sapiens
accgtgccacctgtccacactccttggctctgccatcatgctgaagatcggtttaaaggactggcttccctccccccaaaattaaaagagcacaaactkagaaactgaatgtaggagacagcagtggattatgctgttctcaggggtcacctcaggtttggaagcattctttcaaattaacccatctcaggccatctgcagagaagaaaggtggtacctaaatttttc

SEQ ID NO: 333183 - DNA, 540 bp, Homo sapiens
caaattgttttacaaacaccactaggtctaaaaatagtttggatcacaatgaacacagaaacaccttcatcccttcagaaatacctatcaattacttccaatacagaatgaaaaattgacaaaggaawtatgtcgatgtgatcttggctcactgcaacctctgcctcccaagttgaagtgattctcctgcaacagcctcctgagcagatgggactatagacactttaagtgcttttaatgtattcataaagttgtacagctatcaccactctctaactctagaacatttttatcatttcaaaaagaaactccatacttactagcagttactccccatttccccctttccccagcccctggcaaccactagactattctctgtctctatggactagcatatgccaaatatcagaaaaaacagaatcatatgtgaccctttgtgtttggcttcatttatttagcatgttgtcctgattcatccatgttgtatcttgtgtcagcccttcattgctttatatgcctgaatcccactgcatgagt

SEQ ID NO: 333184 - DNA, 493 bp, Homo sapiens
gagtataaaacttttttcaaagtcgtttacatttggctttggcaagggttttaattgttcattggagagtatctgtaacctgaaaattcttgagacayggtaaccacagagttaatatgtgactcacaaaaggctggaaactgcctactttttccatcctgtccctctcatcagttttgcttccactttattctgggagttaatttttatcaaccttcacacagaagtactatttgtttgttcatatatgcaagggaaattatttttattcctaaagcatttctccctcttaaaatcctggattagattaagcaaatatcccgtttatgtaaataaatcatttaattaagcagaataggtaaggatgtcagaaataataaaacagatgatttgtcagaaataaactgtagggcatatgatcctttgaagataattgaaaattcactatttaaaaatatgaattaaaaaatatatagaacttgatgagttacag

SEQ ID NO: 333185 - DNA, 574 bp, Homo sapiens
tattttgtgagttcacattttactcttatgtaattaatataaaaggtaccataaatccagttggcaaatttgccaacctgttcactatcatcatcccagttgatactttactcaattaggccctgcattttatcctaatgtttaggacttcagtgagtacttactaaatatagctgaagttttttttttgttttttttttccctcttagtggtgagaaatagatgcatttttaatgttttaataatttaaaaatattaacataaatttgaaggtcagaattttacatatagggggttcttcctttatattccatttaaataaagttataaattgccttaarggaaaattgaatttgttttgacacattagcaaaaatttccttatcacatcacaaatcatgaataaaatgctgttacagagcaacagagggagctcacacatatttgattctctccctgtctcttcactctggttagaaaaaatgaagtttgctttaaattttttattagatgattcccccaccctgccaaaataaatccaaatatattttttaaatcaacaaggaagttaact

SEQ ID NO: 333186 - DNA, 573 bp, Homo sapiens
atccaactacccaaatgactatgagtaatttctgagagtggagagtgagggtcaaattctcaatttcagaaaataaaaaaaaaaaatgagcttccaaatgtatcttctgagatgcattcatttttctgtgaccaatatttagaataaaaaattactgagaacatactctgtgctagataccatatgttttctaatattctaatttagtattttctattgtaatattaaaaaatactgagagacaagaagacaactcctatttcactgacaattaatctgagattcagaaaatgtaaataacttgttaatgactactgagccagtaagaggttatagatctatagtttgaactcagttcttctaaatctaaagtcgtactttttaaaacaacctctccaacataatatcaaaaaagtaaagtattctcttaccttgcatatstacatcaaagaaaaccataaggaaaagaaactacagatgtgcacgcagtaagtccaagatgcttaaaaatgtcacatcatgttaaacctgagtcaacctaacagtaaggctgtaaaaacaactctacttcct

SEQ ID NO: 333187 - DNA, 605 bp, Homo sapiens
tgttgttatcctcactatcactgttatagggaagcaggcatggtcttatggaaaagacacagcttccaggacctcagtgtaccacatagaggtgacaaggattaaactaaattgtggctatgtcagctctgttgctattgctattgggttatgtattacacatccacctctaatatggagttttatctattgtctctttcaagattagcaatgacataaaaattgccaattagctttcaaaagatccaataattttttttaaattttttttgccatctgtgatttttcttctgaaagaaccaagtgtttattttttgttattaggcctttggttctaagatatgcaagtgagcatttaaaaaatatatatctatataccaagataaaaagttttaaaaattgaggctaactctttagcaaattgaaaaatgatgtcctyattttttcttcttcatacaagattaactttagcgatttgtttaagccaagaatctttcttctttttatgtaccatgagaaggtgaaaaaaatgaaccaaagccaacacaatactgtaagtcaagtaagaatctaacttaaattagcctggattttaaaatgacccc

SEQ ID NO: 333188 - DNA, 596 bp, Homo sapiens
cacttttaaatacagacactttcactactcttacagaacagtaatctgttctctcatctcactgacagtggaacaagaaaaaaatttaagctacaatatgagagaagtaaagtgcataacccagttctataatagtatcattgctagaaagagcttgcaaagtgctgtgaattttttttctctagaaagttttccatttacccttttattttatccatccatccatccatccatcccagagaattttctcatggtctcagtgaattttttttatagtcctaaacaaagttaaataacaaaacttctgaggttctaacactatgatcttgacaatccaagtgaacaattatcagtaaatataacagaaaactctgccatttacagcacttcacattatcarattattaaaatgatctaaaattattcatttaaatgctagcagggaaataaatgactctaaattccctgcattactcacaaatactacaaaaaggaatgttccctggtttctgtggttagaaaatgtatagagcagagtatttcatctaaacctagagtcttctttttttatttggatttgccacttataacatgaa

SEQ ID NO: 333189 - DNA, 589 bp, Homo sapiens
acaggaaagacattaactacaattcaagtgaaaaattattaagtgagttaaagattactttgagttggaaagkttccatagacaaaatgtatctgaccagaagctgatagatacaagcaatatatagtggtttgcacagtgaaaaaataaaataaaatgaaacaaaacttattttccctataacttaatcccaagaatggggctgatcagtgggaaaaaacaagtccctcacccaccaaacaaaacaaagcaaaacaaaacaaaacaaagatttgtctgataatttcttaaggcatttgggtattttataaaattttgtatctaaatattccccttttcatacgaatatgtctatatttaacagcattaataacataacagtctatatttaacagacagctaggacattaataatacatcaacagaataaataagtagcaaaggaaagttcttaaacagaaagcaataatgtgtaaaaggttttgcttttaataaataaagccagaatgatcaatgacaacatgacgtaaacctcaaatatatttcttagaagattctctccacatcatttgatcacagcatcagaaag

SEQ ID NO: 333190 - DNA, 659 bp, Homo sapiens
ccccttttcatacgaatatgtctatatttaacagcattaataacataacagtctatatttaacagacagctaggacattaataatacatcaacagaataaataagtagcaaaggaaagttcttaaacagaaagcaataatgtgtaaaaggttttgcttttaataaataaagccagaatgatcaatgacaacatgacgtaaacctcaaatatatttcttagaagattctctccacatcatttgatcacagcatcagaaagtcctcagaagagtgttatatttttaaaaaggaccagatagcttcacaattcccaggtagtaaaatggttttttacttcccaatgaagcagaggcgaggcacattagaggtrggagaatacagcagagttcacagggagtgaatcatattcatatgtatatactctaatggcatagtatttgctttaatttgctttaaatttcaaaggtgttcagggattttcttctgttcatactgaagatgactgtgaaagtcagacagattaaaattaagcacaaatcccaattccatttagaagtttgtgttctcagaaattcactttacctctctgagcttctctgcctaatctatagctttcaacagggagatgaaatgaaataccatacaaaacacctagcaga

SEQ ID NO: 333191 - DNA, 659 bp, Homo sapiens
ccccttttcatacgaatatgtctatatttaacagcattaataacataacagtctatatttaacagacagctaggacattaataatacatcaacagaataaataagtagcaaaggaaagttcttaaacagaaagcaataatgtgtaaaaggttttgcttttaataaataaagccagaatgatcaatgacaacatgacgtaaacctcaaatatatttcttagaagattctctccacatcatttgatcacagcatcagaaagtcctcagaagagtgttatatttttaaaaaggaccagatagcttcacaattcccaggtagtaaaatggttttttacttcccaatgaagcagaggcgaggcacattagaggtaggagaatacagcagagttcacagggagtgaatcatattcatatgtatatactctaatggcatagtatttgctttaatttgctttaaatttcaaaggtgttcagggattttcttctgttcayactgaagatgactgtgaaagtcagacagattaaaattaagcacaaatcccaattccatttagaagtttgtgttctcagaaattcactttacctctctgagcttctctgcctaatctatagctttcaacagggagatgaaatgaaataccatacaaaacacctagcaga

SEQ ID NO: 333192 - DNA, 595 bp, Homo sapiens
cagtttatcttttgacctttatgtcaccaaatctaacagtatatgcttttttttcctcctgccagaaaagatctgcagattaagtgtgctacaagaccttttcaaaaaaaaattaaagtatctgtctgaggtctacatgatgaatgaagttacataatgtactttacaatctaaaaatgctggaatttgttaagggagtcatttcacctctttaaaaaaaatgaaaagatattctgatctgttgtttactcctaccactttatcccttcacatcatgaaaaagcaataatcctgttactttaatgcaaagattagtaatcatgagtggaaaatcaaatgcatattaaactaagaattttatgcataacttttcaacagaaatatattatacagcaaatgaccrtcatttatgcaatatatccctttgttacagtacagaaataaataaattagtatttttaattaaaaactgtagcatagtaacttccttggtaacttaactaaacacaaccagcaaactgcaaactgtaccatatttgagctatatcaataacactcttcttataatttttgtaaccatttggttgttataata

SEQ ID NO: 333193 - DNA, 622 bp, Homo sapiens
attaactcagtgggttcaagagttcataagaacataaaatcctcacataatatttaatatgctttatgaaatcagaagtgagttacagagatattagagacaacaaaagtcatttaatcttctatcagttcacctaaaggcattgtattcagccctaagttttttgtcccastttatcagagtttacaacaattatgtaatgtaaaatcaggttttgtatatcaaacaaactctgaatggaataagatataaaatgtacatggttaatagtctggattttcctgaggttttaaaattggaatatttaattaaaaactcaactactttaatcataaaagattattggcatgaaattgaacttgaaaatgaaatgtaattaatgtatataatcacctatttagtcgctgtttcattataaaaagatttgactcataaaaataaattttatgtgaaaaattaagcaggaaatttccaagcagcttatcaatcaaactttattaaataccattttaaaaaggtgccagaaaccttcacacccattacctcatttagtccattccacacattgtcaggcttatttttagtgtttagaagacaccaaagctcacatcgtaaagtccct

SEQ ID NO: 333194 - DNA, 622 bp, Homo sapiens
attaactcagtgggttcaagagttcataagaacataaaatcctcacataatatttaatatgctttatgaaatcagaagtgagttacagagatattagagacaacaaaagtcatttaatcttctatcagttcacctaaaggcattgtattcagccctaagttttttgtcccagtttatcagagtttacaacaattatgtaatgtaaaatcaggttttgtatatcaaacaaactctgaatggaataagatataaaatgtacatggttaatagtctggattttcctgaggttttaaaattggaatatttaattaaaaactcaactactttaatcataaaagattattggcatgaaattgaacttgaaaatgaaatgtaattaatgtatataatcacctatttagtcrctgtttcattataaaaagatttgactcataaaaataaattttatgtgaaaaattaagcaggaaatttccaagcagcttatcaatcaaactttattaaataccattttaaaaaggtgccagaaaccttcacacccattacctcatttagtccattccacacattgtcaggcttatttttagtgtttagaagacaccaaagctcacatcgtaaagtccct

SEQ ID NO: 333195 - DNA, 574 bp, Homo sapiens
gtcaaattgctcagcagagttaaatgaatgtctcatctcagtggaatgtaataaccatgtgaagaatacaatggaaggaaattgtgtcctcatccttaaggagattataactgaagggtccacattcagaatacctacccaatgttttaagaagatacygtagaacttccagtaacaatggaacttcctcttttgtactaggatgcttataaaaatgttaaattcatttttatctctttggggacttttgcctccagacaaatgcttccaaacttgactattcatcaaaatcacctgtgtaggattttagggattatggagtttaaaaattcccagctcttacctccggagatttttatatggtaactccccaggtgattctgataattagcctggcctaagaacaactgctggaggtaatttcaacataaacagaaaaacttgtttgaccagaaattaaaagtgtgcctgcaaaggtcaacatactcagtctggacaaaacagaagaaccaagacctcacatttacaaatctatatgccaaaatagataaggttcctgtatgccctttaatta

SEQ ID NO: 333196 - DNA, 601 bp, Homo sapiens
ttaataaaaataaaaattaacatatcctataaccataatttatctttgtaattaaacagtgatattttataaaaatcttttgtttcttcctcaaatatagaaattgttcttatatcagtctagctttatcatcaaaccsataatactttcatagtgactatcttccatagtgttttggtagataaaaagcctgttcttaacacatttaatagccaatgtaatttttcttttttgataagaatattcattttagtgaccctcatcatcccttatctttaataatctgacaaaagcctgaataactgtaattctcatccacatgcaatttccaaagatattgcaacaacatagtctaggtcctacccaggttctcttgataggaattatatgacacatgtattttcatgttgtgatgcctatatattgctgattgtataaagatgtatactttaccattttagtaagaaaccaatcatccctccaaaatttcttctttttacaattaccccaatgcatttttattgttcagaggctttggacatattcacttacttttgcccctctattttcctcttttcaaattcaacaaccaccaccaaaa

SEQ ID NO: 333197 - DNA, 601 bp, Homo sapiens
ttaataaaaataaaaattaacatatcctataaccataatttatctttgtaattaaacagtgatattttataaaaatcttttgtttcttcctcaaatatagaaattgttcttatatcagtctagctttatcatcaaacccataatactttcatagtgactatcttccatagtgttttggtagataaaaagcctgttcttaacacatttaatagccaatgtaatttttcttttttgataagaatattcattttagtgaccytcatcatcccttatctttaataatctgacaaaagcctgaataactgtaattctcatccacatgcaatttccaaagatattgcaacaacatagtctaggtcctacccaggttctcttgataggaattatatgacacatgtattttcatgttgtgatgcctatatattgctgattgtataaagatgtatactttaccattttagtaagaaaccaatcatccctccaaaatttcttctttttacaattaccccaatgcatttttattgttcagaggctttggacatattcacttacttttgcccctctattttcctcttttcaaattcaacaaccaccaccaaaa

SEQ ID NO: 333198 - DNA, 601 bp, Homo sapiens
ttaataaaaataaaaattaacatatcctataaccataatttatctttgtaattaaacagtgatattttataaaaatcttttgtttcttcctcaaatatagaaattgttcttatatcagtctagctttatcatcaaacccataatactttcatagtgactatcttccatagtgttttggtagataaaaagcctgttcttaacacatttaatagccaatgtaatttttcttttttgataagaatattcattttagtgaccctcatcatcccttatctttaataatctgacaaaagcctgaataactgtaattctcatccacatgcaatttccaaagatattgcaacaacatagtctaggtcctacccaggttctcttgataggaattatatgacacatgtattttcatgttrtgatgcctatatattgctgattgtataaagatgtatactttaccattttagtaagaaaccaatcatccctccaaaatttcttctttttacaattaccccaatgcatttttattgttcagaggctttggacatattcacttacttttgcccctctattttcctcttttcaaattcaacaaccaccaccaaaa

SEQ ID NO: 333199 - DNA, 606 bp, Homo sapiens
agtttagacacttctagctttccagcaaactcttggcactcatgcatttatttgtgtgtgattaatatgcatatttaaatcatttctggatcagctgcttatagcattatttaattttatttatttctaaaaacgtttagttttcttattgaactaccaattaattcccaaaaaaggggtctctgacttctgtgtatctcaccaacataatagaaaatcttatagtgactgtaatttctgagccagaatttgaggcctgaaaataattttgttatacgatttatgacattataggaattttaaaataatcaaattgttaagagtatggaatgtagagtcagatatgcyttagttcatatcccaacctcctaccttattcattccatggtttttaacccatccaagcttcagttttattctggtaaagcacggttaaaaatttttttacaggatcttggtaaactcaaatgaagtactatgcataaagcaattaatgtagtgacaataaaatcagtataatattccaaattaaattttattcgttttttttttttttttttttttgagacaaggtctcactctgtcacccaggttagaatgtagtgg

SEQ ID NO: 333200 - DNA, 614 bp, Homo sapiens
attttattacatatttcacaaaaagagtagtaactaacaattcaagatataatgtattagttgccataagcatgccagagagagttcctgtggcacatgggtatcagttggtgtcttcctgtgccttattaggatggacaactcatttccatttacctgggactttctcagtttaagcactgattgcttaacacccaggaaagcccaaaggcaaacagatggatgttcactgctagagacttactgtttatgccccacccccaacctcccttccaaaatttgtattctgaaacctaayggccaatatgaaggtatttgaaggtggagtctttgggaggtaattaggtcatgagcactcaccctcatgaatggcataaggtattagtacccttatgaaagagaccccagaaagctccctgacctttctactatgcaaaatgcagcaagaagacagccatctataaacgaggaagtggctctcaccagacactgaatctgcaagcaccttgaccttggactttccagcctccaaaacagaattaaatttctattgttcataagccactcagcctatggtattctgttataccagcccaaatagaaaagacagccat

SEQ ID NO: 333201 - DNA, 583 bp, Homo sapiens
ctcctcatttctcagctcagaatctayccacagcctcccactgttcttaggattaaagccagaatccctaacgaggttcacaaatcctgcatggcttggccctgacagattctctgctctgtctcctgcctggctccagccccccagtcttctttggtcaaggccatcccaagggcaaaggaagtggtcagcccaaagtgcaggcaataagggcattaatttcctgtagggaatttgaaatcaataataaaatggactttaaaagttcacttcttatcaccatgcatccatgttctaaataatgtcagtgattaaatactcttcccccgcttttctcccactcccttccttcgtacacctgtggtttcagttccttcaatttgccatgccccatcttcagggtctttgcacgcactgtctcccatttagaacactttctaacccttgggatttgtctaattaactctttctcatcattcaaatcttatcacgagtgtctcaacgttacttctagaaaggtgcattcctgacatcccagaccagcctattctgcatgctcagaggtcccagtgaagtcactggt

SEQ ID NO: 333202 - DNA, 623 bp, Homo sapiens
ggaatcaagttaaaacattttaggaaacataataaaaaaattcttaagaaaatatgtgtacatatatttctttcagtattttgagccatgttccaaccatagagagaaaatgatatttacattaagaactgattctgattaccagggatttaaggacaacctctgttggggtcaaaagagaaaatgaaatcctagtggggtaagaaatagcctccaactttgatatataggctctagtagcttcttttctactgattgtttttgatcctgcatagccacgcacagtcaattgcttactttttttatttgaagcttttaacaataaaaataaatttgtcaattgatatcttatgagatatgctccatatttacacaaagtactttcyacttggatgacatttctgtggacacacttaccagggaaacatgtccaattttagtaggtccaattagactttcatttttgactcatgagacttcatgtgcaaatagatgtcaatattaccagtcacataggtattcctgacagatatgaccctgactacaatttgtattacatatctttttattatcataggcagcagaaggaaaattttcaaggacaaggacacatctttgtgccc

SEQ ID NO: 333203 - DNA, 401 bp, Homo sapiens
aattccaggacagcgctaacatgagatgttgcacaaagaagcttgactttgggatagtttgcctagtgggttctatgtatttatggttaattttgaagtgttacttttctgcatttcctagaacttggaaatgagtaacttargaagtcttttctgtttctattcagtttgtttcctcttgttccagaggattttgtgatataagagcaggtgaagtatataacttactaagcacatctaggtggaaagcagagtctaggaagcttgtcatacactttatcacttaattcacacagcagtctcttgagataggcactgttatttttctcattccccttttagagataaagaaactgatatacccagagtttaagtagcttgcttatggagatacaattcgt

SEQ ID NO: 333204 - DNA, 589 bp, Homo sapiens
atacatgtccttaaaaattaacaagatttattttcttgtgcacttaagtccagatgcaatagggtgaaagtatgtgtaaagtttgccaaccactgaaagcaaaataaactaccaaacaacccatgtaactcaggagcacagcaagaaaagatccaagggagtttaggaaagtgaatgaaaaggaatataatgatttatcaaayatgttatgacccaacatagttaatgggaataataacacattttcatataatgcctcctctgagctcaagacttggtggcagatggaatacttccattgttcccttatctcttttctgtcctctctctaacttacaaaataaaagcatttatgaacaaggaaaaaacctgtagggaaaatgtccactcatacagccagatagccacagttgctgctaaccatgcacgtttcacagcttggtgcttggctctgcagctgccaagtattatctcaagagtaactataaacactgttggcccgagtggtgtaagggatccagaaggctgacagagtccatgaactgattgccagcaagggatggggacatgccaaattgtgattgaatta

SEQ ID NO: 333205 - DNA, 589 bp, Homo sapiens
atacatgtccttaaaaattaacaagatttattttcttgtgcacttaagtccagatgcaatagggtgaaagtatgtgtaaagtttgccaaccactgaaagcaaaataaactaccaaacaacccatgtaactcaggagcacagcaagaaaagatccaagggagtttaggaaagtgaatgaaaaggaatataatgatttatcaaatatgttaygacccaacatagttaatgggaataataacacattttcatataatgcctcctctgagctcaagacttggtggcagatggaatacttccattgttcccttatctcttttctgtcctctctctaacttacaaaataaaagcatttatgaacaaggaaaaaacctgtagggaaaatgtccactcatacagccagatagccacagttgctgctaaccatgcacgtttcacagcttggtgcttggctctgcagctgccaagtattatctcaagagtaactataaacactgttggcccgagtggtgtaagggatccagaaggctgacagagtccatgaactgattgccagcaagggatggggacatgccaaattgtgattgaatta

SEQ ID NO: 333206 - DNA, 643 bp, Homo sapiens
tgaaaatgaactattacagaaaactgataccaagagcagggtaccactataaagataacctgaaaatgtggaagcgacttaggaactgggtaatggggagagattgggacagtttggagggctcagaaaaagaagagaagatgatggaaagtttggaacttcctagagactagttgaatggttttgaccaaaatactgatagtgatatggacagtcaagcccaggctgaggtggtaacagatgtggatgaggaacttattgggaactggggcaaggttgttcttgctatgctttagcaaagagactagaggcattttgcccctgccctagraatctgtggaactttgaacttgagatagatgatttagggtatctggcagaagaaatttctaagtagcaaagcagtcaagatgcaacctgaaagtgttcagtcatgtatgttcacaaaaagcttatctaaaactggaaattgtatttaaaagggaagtgcagcataacagtttagaaaatttgcagcctgaccatgaggtagaaaagaaaaacacattttcttgggagaaattcagctggctgcagaaatttgcataagtaatgagcagccgaaatgttaatccccaagacaatggggaaaatgtctccagga

SEQ ID NO: 333207 - DNA, 602 bp, Homo sapiens
catccttgctggctaaccctggcttcttcacagagtaatcaccccatgaggagagatgccaattcccagtgagcaagcactctttaagttcctgaatgcatgtttactattgtcctcttatctaaagcaaattatgcggccaagcctaaattcaagagatgaaaaaatacactctgcytctttgtaggtacagctgcaaaatattgtggacagttttgcctggtaccaagattgtgtgtatttgtcctcaaaagagcaaaggcttggagttctgatttctctgaggtcattgcttttcctcctattgttttagacacatggctagctctttcacagagttttaatctctgctttaattgtgactccagtgacaacttcttctgtggagtgaattgtgtcccctcaaaattcaattcttgaagccctaaccccccaatgtggtggtgttggagatgaggctttgagagctataagatttagatggatgaggtcatgagagtgggactcttataatgggattagtatccttataagaagagacaccagagaacttgccagttgagcacacaggggacggtggccatctacaagccagaaagagg

SEQ ID NO: 333208 - DNA, 590 bp, Homo sapiens
gaatatttgaaaagcataataactttcttgtcttcttatgcagagtgtactgaacatactttatttcttccctaatgactctgagtcatcattattgaattacagaatgctgcatgtagaaaagaatgaagggcaatgttctcccagactattgagacatccagagagacttaatgcatacattcccccctgtattaggcaactctacactgtagctctttttaatcttgccattcttttacctcatactttattattatctataactccctacttggctgggagctgtctgcttctagtagtctctactatttctactgtcttatcttctataaacataatatacagtaaagcatgttagaaataactagataattatacttctcaaataaaattttaagtttaccatctaaatgcctttgsgctgctctgctactgagtaggatgtgtgaatattatgtcaaatagttccccactccgcatatcctgccttctccttggaaatcatcagtgagacgtgatgcacacagcttggaacactgaggaagggagtacagaatttgacttatggctcagctgtatgatgtcgg

SEQ ID NO: 333209 - DNA, 590 bp, Homo sapiens
gaatatttgaaaagcataataactttcttgtcttcttatgcagagtgtactgaacatactttatttcttccctaatgactctgagtcatcattattgaattacagaatgctgcatgtagaaaagaatgaagggcaatgttctcccagactattgagacatccagagagacttaatgcatacattcccccctgtattaggcaactctacactgtagctctttttaatcttgccattcttttacctcatactttattattatctataactccctacttggctgggagctgtctgcttctagtagtctctactatttctactgtcttatcttctataaacataatatacagtaaagcatgttagaaataactagataattatacttctcaaataaaattttaagtttaccatctaaatgcctttgcsctgctctgctactgagtaggatgtgtgaatattatgtcaaatagttccccactccgcatatcctgccttctccttggaaatcatcagtgagacgtgatgcacacagcttggaacactgaggaagggagtacagaatttgacttatggctcagctgtatgatgtcgg

SEQ ID NO: 333210 - DNA, 666 bp, Homo sapiens
aataacaaaacaattattgacatgtcataaaacaacttagttcagggatgccacttcagcaacatcaaataggtgcaaaaacaataaagtagaaatgctggcttgagggccgctgagataatgcaaacacaaatgaaggtctgtgctccttggtaaaaatacaacctgctgagagaggcctcagtcccaggagtattgctctagcatcagagctccgggctagagtttgcttttaattttcttaaaatatagctaaaaatgttcttacctgtgcagtagccaagttgaaagctttttttcttttctaacacagttataattctacttctgctacaccagcctctcttgcttgggcaaaattgataatgaaacaactcagtttcctgttacactgacatcatctcccctacttacsaatcatgtaagaattcatttgtgctagggaaatatgtgttatagcacaacagactataggtatcttaggagctgtctctaatttgtatgacagtcatgaattgcttaaagatgaggatacattctgagaaacgcatcactgggcaatttcatcattgcatgaacacaaatttagatggcatagcctactacacaactaagctatatggcatagcccatgcttctagactaaaaacctgtatgttactatac

SEQ ID NO: 333211 - DNA, 666 bp, Homo sapiens
aataacaaaacaattattgacatgtcataaaacaacttagttcagggatgccacttcagcaacatcaaataggtgcaaaaacaataaagtagaaatgctggcttgagggccgctgagataatgcaaacacaaatgaaggtctgtgctccttggtaaaaatacaacctgctgagagaggcctcagtcccaggagtattgctctagcatcagagctccgggctagagtttgcttttaattttcttaaaatatagctaaaaatgttcttacctgtgcagtagccaagttgaaagctttttttcttttctaacacagttataattctacttctgctacaccagcctctcttgcttgggcaaaattgataatgaaacaactcagtttcctgttacactgacatcatctcccctacttaccaatcatgtaagaaytcatttgtgctagggaaatatgtgttatagcacaacagactataggtatcttaggagctgtctctaatttgtatgacagtcatgaattgcttaaagatgaggatacattctgagaaacgcatcactgggcaatttcatcattgcatgaacacaaatttagatggcatagcctactacacaactaagctatatggcatagcccatgcttctagactaaaaacctgtatgttactatac

SEQ ID NO: 333212 - DNA, 510 bp, Homo sapiens
aacttgggctggaactacaccaccacttccctctaccccatggctttcctgggttgccagctcttaggtggmagatcatgggacttctctgcctccataatcaaataagccaattccttataataaatctcattttatatgtataaaatgagacagtaccctatgactcagtcaagttgacctataaaactaaccatcacatactggttttgcaaaaatgtcagatttcagcattttcgaatacaaagtatatattaattgtagctaagatcaaaagaaccaataaaatgtatacataattatatctgtatataattgaatatgtttgactttttttaaagtcaaaaggttatatatatacatatatactctcctattggctctttttatctgaagaaccctaatacacagcaccataatctttaagcctagggtaaacttggcaaaagatttctattctattggagagatctatgtctccaggaataatattatatgacctgtaagtgt

SEQ ID NO: 333213 - DNA, 384 bp, Homo sapiens
tggcaggcacctgtaatcccagctattcacgaggctgatgcasagaattgcttgaacccagggggcggagtttgcagtgagcagagatcacgccactgcattccagcctgggcgacagatgagactctgtctcaaaaaaaaaaaaaaaaaaagaacacaggctatgtgcttccatttgtataaaattgaaatgtccacaacaaaaccctttctgatggcagagatcagtgtcaggcctctgagcccacactaagccttcataacccctgtgacctgcacgtacacatccagatggcctgaagcaactgaagaaccacaaaagaagtgaaatagccagttcctgccttaactgatgacattccacccttgtgatttgttcctgcc

SEQ ID NO: 333214 - DNA, 384 bp, Homo sapiens
tggcaggcacctgtaatcccagctattcacgaggctgatgcagagaattgcttgaacccagggggcggagtttrcagtgagcagagatcacgccactgcattccagcctgggcgacagatgagactctgtctcaaaaaaaaaaaaaaaaaaagaacacaggctatgtgcttccatttgtataaaattgaaatgtccacaacaaaaccctttctgatggcagagatcagtgtcaggcctctgagcccacactaagccttcataacccctgtgacctgcacgtacacatccagatggcctgaagcaactgaagaaccacaaaagaagtgaaatagccagttcctgccttaactgatgacattccacccttgtgatttgttcctgcc

SEQ ID NO: 333215 - DNA, 538 bp, Homo sapiens
tacatgcttacgtgacactgttgttaaacttgtacaaagggaactcaaggccaagagcttaagatatataataggcatgtaggagacctttgaaacagtcttcataaaactcagtgatgtgtgtgtatgtgtctactttctaatttcaaaaagacatggcttaaacatatgccagtcattrtgagtattttgtgtttataaatctgagcattttgagtaaagccagaggtttcagggttaactatttgcctaaaagattttgttggaaaagagtgcaatttctgttgttggaagaaaatgtgcactattgcttctttgctgaacatgtcccagcctcatgtcaatatagaagggctagaatgtgcctggtgttcagaatggctgtttgccaatttaaaaggtttctgaaaagaagagagtctattgtctactctttcaaattacaggaaaatgtattgtttgtggagcacggttcacagccaaaaaaaaaaaaaaaaaaaagattcttgctcacataaattttgtctttatttttaac

SEQ ID NO: 333216 - DNA, 553 bp, Homo sapiens
  misc_feature (1)...(553): n = A,T,C or G
gggacttggtgctctgcatcggagcttctcttgccatagctgaaaggggcctacytagagcttgggctggagcttcagaaggtgaaagccccaggccttggcagcttccacatagtgttgagcctgcaagtgcacaggagtcaagaattggggtttgggaacttttgcctagatctcagaggatgtatggaaatgcctggttgttgaggcaaaagtttgctgcaggtgtggggcccttgtggagaacctctgctagggcattgtggaagggaaatgttgggtcagagcccccacacagtgtacccactgcggcactagctagtggagctgatgagaagagggccactatccatcagatcacaaaatggtcgatctcctgacagcctgcaccatgtgcctggataagctaaacacacaatgccatcctgtagaagcagcccagaggcaggctgcatcctacatagccacagaaagaacgcgnccaagaccatgggaaccacctcttgcatcagcctgacctggatgtgagaacatgtacgtcaaggagatcatt

SEQ ID NO: 333217 - DNA, 618 bp, Homo sapiens
tgattaaaaaaaaagtattggcagaactaacaaaaaattaaaattagtatattataaagtcacagattaggtcttcagataataaatatatattatctcagaagaggctgatattgatacagaaacaatagaacaggtaagattgacatcaagtttgaagaagaatgtgtttgaataaggtagagagcaaagagaagaacttaagtaagcatcatgacaaagactaaaaaatcaaaaatgaaaagttgccagaccgggcacagtggctcgtggctcatgctagtaatcccagcactttgggaggccaagctgggaggatcacttgaagtcaggagtttgagaccggcctggcaaacttggtgaaatmtggtctctactaaaaatacaaaaattagctgggcctggtgggggatgccataatcccaattacttgaacgtctgaggcaggagaattccttgaaccaaggaggtggaggttgcagtgggccaagattgcaccactgccctccagcctgggcaacagagcaagacagtcttaaaaaaaaaaagttgcctgtagaaaagataataaatctacttgaattgaacgggggaagatgcaattcatggctagattct

SEQ ID NO: 333218 - DNA, 587 bp, Homo sapiens
attgtatgcctatatcaaaatatctcatgtatcctatgaatatatatacctattatgtacccacaaaaaattttaaaattcaaaaacttgtatctacacacggaaataaaaaagtgctaaaagtagaataaagataattataaaattcttttatttttaattgctttaaagaaaaactgacttcctaaaatggaaatagttaacaagacattttgagttagcacacataataccaaaatatatgctaamagcagaaaaaaaatgcaaggacagaattgggactacatatgaacctatataacatgattttaatgtatactctgattaaggatatatattaggttggcgtaaatgtaatcacggttttgccattgaaagtaatggcaaaaaccacgattatatttgcaccaacctaatattgtaaccctgagggcaatcactaaaaattctttttaaaaccataaataataattagtgaagatgaaatagaatctcaaaatacatgtaaataatctttaaaaagtcagaaaaattgataaaagaaacagggaagagacagaacaaataagaaatagcatgatactaag

SEQ ID NO: 333219 - DNA, 495 bp, Homo sapiens
aaatgtaactgaagttcctaagagagaaaagagttaatagggcagaaaatatgtgtagaaatattagctaaaatgtttaatgttaaaaaaaacaaatgcatattcaggaagcaaagtaatacccaagcaggatgaatattttttttaaactgcatttaaatatatcatagtcaaactgtagaaaaccaaaggtaaagagaaaatcttaaaaacatccagagagaaagatatactgcattcaagaggacaataataagcacgatgatggctgttgtctcattaacagcaatgaaggcagaataaaacaaaatatttaaagtgctgaaaaaaaacctgtcaacatataattctatatttaccaaaaatatcacttaaaattaaagataaaattgagactttttagataaacaaaagccaayaatttgttgctggcagccatacccactctacaaaaaaattctgaaggaatttcttcaagaagaaggtaaatggtag

SEQ ID NO: 333220 - DNA, 495 bp, Homo sapiens
aaatgtaactgaagttcctaagagagaaaagagttaatagggcagaaaatatgtgtagaaatattagctaaaatgtttaatgttaaaaaaaacaaatgcatattcaggaagcaaagtaatacccaagcaggatgaatattttttttaaactgcatttaaatatatcatagtcaaactgtagaaaaccaaaggtaaagagaaaatcttaaaaacatccagagagaaagatatactgcattcaagaggacaataataagcacgatgatggctgttgtctcattaacagcaatgaaggcagaataaaacaaaatatttaaagtgctgaaaaaaaacctgtcaacatataattctatatttaccaaaaatatcacttaaaattaaagataaaattgagactttttagataaacaaaagccaataatttgttgctrgcagccatacccactctacaaaaaaattctgaaggaatttcttcaagaagaaggtaaatggtag

SEQ ID NO: 333221 - DNA, 631 bp, Homo sapiens
cacaaaaactaaaatgtttgcttgaacatgaagagggatatttgcatacaagtaaattccaaactaatatttagaaattattttktaacaaatatagttcaagatatagtcctgattgagtagtatattgctttttaaaaattttctatatggcaaaataaaatattatacaacttacatgttaaaatgataatttatcatttgggatcttctttgtatgatatgtataaaccaaggctcattccagaatcaaagtattgatttaagaattgatatttcctattgatgatgactcaatggaacaatgtcttctttaaaatttgaaagtataaaaaacaatctaattaataaatgtaataactcaataaatgtttaatttggcacatctggcaataaaatacaaattatgttaaaaagcttctttctaattagaccataacttacgatttttttttttttttttttgaaatcgactctcactctattgcccaggctagagtgcagtggtgcaatctcagttaattgcaacctctgtttcctgggttcaagcgattctcctgtctcagcctcccgaatagctgggattacaggtgtccagctcatttttgtatatttagtagagacagggttt

SEQ ID NO: 333222 - DNA, 631 bp, Homo sapiens
cacaaaaactaaaatgtttgcttgaacatgaagagggatatttgcatacaagtaaattccaaactaatatttagaaattattttgtaacaaatatagttcaagatatagtcctgattgagtagtatattgctttttaaaaattttctatatggcaaaataaaatattatacaacttacatgttaaaatgataatttatcatttgggatcttctttgtatgatatgtataaaccaaggctcattccagaatcaaagtattgatttaagaattgatatttcctattgatgatgactcaatggaacaatgtcttctttaaaatttgaaagtataaaaaacaatctaattaataaatgtaataactcaataaatgtttaatttggcacatctggcaataaaatacaaattatgttaaaaagcttctttctaattagaccataacttacratttttttttttttttttttgaaatcgactctcactctattgcccaggctagagtgcagtggtgcaatctcagttaattgcaacctctgtttcctgggttcaagcgattctcctgtctcagcctcccgaatagctgggattacaggtgtccagctcatttttgtatatttagtagagacagggttt

SEQ ID NO: 333223 - DNA, 430 bp, Homo sapiens
ctatagaaattttatgagcaattttatgaagaaaaatcttgagtcattaggtaatttcttatttgcttgctacctgacagcattaatagcttcagcacatggtgaatgcctgtttttctcccaaaactgttgtgggaaaaaaaaaataaatggcatcaggaaatgactgaaattcatagtawgagtttttaatgcattttctaagaatttgaacctcagctctgcattctttatgtatttctttgaaagatatcaacttatttttttatgtaaaaatttggaatgaaatgttatttaagtgaaaatttccaagctcagtcagtatatgcagggtatatatatgcaatatatacccattataggttatattaatgtaacttacccatttctcactaatatgccattacttttttgtattatgccagtattt

SEQ ID NO: 333224 - DNA, 430 bp, Homo sapiens
ctatagaaattttatgagcaattttatgaagaaaaatcttgagtcattaggtaatttcttatttgcttgctacctgacagcattaatagcttcagcacatggtgaatgcctgtttttctcccaaaactgttgtgggaaaaaaaaaataaatggcatcaggaaatgactgaaattcatagtaagagtttttaatgcattttctaagaatttgaacctcagctctgcattctttatgtatttctttgaaagatatcaacttatttttttatgtaaaaatttggaatgaaatgttatttaagtgaaaatttccaagctcagtcagtatatgcagggtatatatatgcaatatatacccattataggttatattaatgtaacttacccatttmtcactaatatgccattacttttttgtattatgccagtattt

SEQ ID NO: 333225 - DNA, 578 bp, Homo sapiens
tgggtttgcaatatatgacctttattatgttgagagatgttacttctatgcatagttcgttaagagtttttaccatgaagggatataaagttttataaaaagcattttctgcatctattgagataatcatagggtttttatycctcattctccttggtgtgatatatcacatttattgatttgcctacgttgaactattcttgcattcggggtataaatcccacttgatcacagtgtattatctgtttgaagtgctattggattcagtttgctagtattttattgagaatatttgtgtctatgttcatcagagatattggcatatagttttcttttttgttggtgtctttgtctggttttggtgtaaggatactgttggtcttgtagaatgagttagggagaattcccaccttttcaatttttgttttgaaattaattaaagataattagtgtttagttcttctttatcagtttggtagaactaagcagtgaagccatcagatgctgggcttttctttgttgggagactcttaatactgatcaattttttttttttttttttttttgagatggagcct

SEQ ID NO: 333226 - DNA, 578 bp, Homo sapiens
tgggtttgcaatatatgacctttattatgttgagagatgttacttctatgcatagttcgttaagagtttttaccatgaagggatataaagttttataaaaagcattttctgcatctattgagataatcatagggtttttattcctcattctccttggtgtgatatatcacatttattgatttgcctaygttgaactattcttgcattcggggtataaatcccacttgatcacagtgtattatctgtttgaagtgctattggattcagtttgctagtattttattgagaatatttgtgtctatgttcatcagagatattggcatatagttttcttttttgttggtgtctttgtctggttttggtgtaaggatactgttggtcttgtagaatgagttagggagaattcccaccttttcaatttttgttttgaaattaattaaagataattagtgtttagttcttctttatcagtttggtagaactaagcagtgaagccatcagatgctgggcttttctttgttgggagactcttaatactgatcaattttttttttttttttttttttgagatggagcct

SEQ ID NO: 333227 - DNA, 578 bp, Homo sapiens
tgggtttgcaatatatgacctttattatgttgagagatgttacttctatgcatagttcgttaagagtttttaccatgaagggatataaagttttataaaaagcattttctgcatctattgagataatcatagggtttttattcctcattctccttggtgtgatatatcacatttattgatttgcctacgttgaactattcttgcattcggggtataaatcccacttgatcacagtgtattatctgtttgaagtgctattggattcagtttgctagtattttattgagaatatttgtgtctatgttcatcagagatattggcatatagttttcttttttgttggtgtctttgtctggttttggtgtaaggatactgttggtcttgtagaatgagttagggagaattcccaccttttcaatttttgttttgaaattaattaaagataattagtgtttagttcttctttatcagtttggtagaactaagcagtgaagccatcagatkctgggcttttctttgttgggagactcttaatactgatcaattttttttttttttttttttttgagatggagcct

SEQ ID NO: 333228 - DNA, 611 bp, Homo sapiens
aacggcaccatgctgcagccacttgggggtcaggggatgtgtgggacctaatgtgagctctctgtctggagcaatattgtcmtgtgaactcatagccacaccctataccagcctcagggctcacaagggtccagggcctctctcatgactagaattgcaggagtccaccatgggagtgtggaccactggggatttctcacttagtctttccccacactgggaagtgtctcttggctctcagccaatcctggcccagaccatcctcacatccctttgcttctgtgcctgtaggatttcccatcacttttctgctgaagtccagtgttctcccttggatgctctatgtgaagtatgattatctacttactattttgtggaggaagcaagtggcaaatgtctctctagtcagccatcttgatgtccccatgaggatcagaagttttaatgtgacttgcatcatagagctttatgaaattcttatttaacctgcatcagataggatggtctatgatggtttcacacacatgaaaagaatttactgtttttttttaatttatttgttttctgtgatcaatgctgatgagaacattttgtactgcagaatcccccca

SEQ ID NO: 333229 - DNA, 611 bp, Homo sapiens
aacggcaccatgctgcagccacttgggggtcaggggatgtgtgggacctaatgtgagctctctgtctggagcaatattgtcctrtgaactcatagccacaccctataccagcctcagggctcacaagggtccagggcctctctcatgactagaattgcaggagtccaccatgggagtgtggaccactggggatttctcacttagtctttccccacactgggaagtgtctcttggctctcagccaatcctggcccagaccatcctcacatccctttgcttctgtgcctgtaggatttcccatcacttttctgctgaagtccagtgttctcccttggatgctctatgtgaagtatgattatctacttactattttgtggaggaagcaagtggcaaatgtctctctagtcagccatcttgatgtccccatgaggatcagaagttttaatgtgacttgcatcatagagctttatgaaattcttatttaacctgcatcagataggatggtctatgatggtttcacacacatgaaaagaatttactgtttttttttaatttatttgttttctgtgatcaatgctgatgagaacattttgtactgcagaatcccccca

SEQ ID NO: 333230 - DNA, 611 bp, Homo sapiens
aacggcaccatgctgcagccacttgggggtcaggggatgtgtgggacctaatgtgagctctctgtctggagcaatattgtcctgtgaactcatagccacaccctataccagcctcagggctcacaagggtccagggcctctctcatgactagaattgcaggagtccaccatgggagtgtggaccactggggatttctcacttagtctttccccacactgggaagtktctcttggctctcagccaatcctggcccagaccatcctcacatccctttgcttctgtgcctgtaggatttcccatcacttttctgctgaagtccagtgttctcccttggatgctctatgtgaagtatgattatctacttactattttgtggaggaagcaagtggcaaatgtctctctagtcagccatcttgatgtccccatgaggatcagaagttttaatgtgacttgcatcatagagctttatgaaattcttatttaacctgcatcagataggatggtctatgatggtttcacacacatgaaaagaatttactgtttttttttaatttatttgttttctgtgatcaatgctgatgagaacattttgtactgcagaatcccccca

SEQ ID NO: 333231 - DNA, 611 bp, Homo sapiens
aacggcaccatgctgcagccacttgggggtcaggggatgtgtgggacctaatgtgagctctctgtctggagcaatattgtcctgtgaactcatagccacaccctataccagcctcagggctcacaagggtccagggcctctctcatgactagaattgcaggagtccaccatgggagtgtggaccactggggatttctcacttagtctttccccacactgggaagtgtctcttggctctcagccaatcctggcccagaccatcctcacatccctttgcttctgtgcctgtaggrtttcccatcacttttctgctgaagtccagtgttctcccttggatgctctatgtgaagtatgattatctacttactattttgtggaggaagcaagtggcaaatgtctctctagtcagccatcttgatgtccccatgaggatcagaagttttaatgtgacttgcatcatagagctttatgaaattcttatttaacctgcatcagataggatggtctatgatggtttcacacacatgaaaagaatttactgtttttttttaatttatttgttttctgtgatcaatgctgatgagaacattttgtactgcagaatcccccca

SEQ ID NO: 333232 - DNA, 568 bp, Homo sapiens
gaggttgaatttcatgcctaaagaaagagcaacgccaaagagaatttagggagaagcaactgcaacaacataaaaagcactggagggagaaggttgatgggaagaaaactgtgaaaatgaaaaggtgtttagataagaaagcaggagaaagttgaaatagttattctaagattcacaggctgggcaagctctaatgttcatatatggataaaggcatttagtggttttgtaagatcaatgtaaaaatacaacatgattacagagaagcagagcaktgttttttgtttcatttgtttgtgttcattacaagcagggctttaaagtgggtagataaattaatggttttcaagttaacaggtatcacaaacacctggagggcttgttaaagcggagattgtgttgggctcaactcccagagtttctaattcagaaggtctgtgttgtgctctgagactctgcctttctcacaagtccccagttgatgcttatgctgctgaccgcggaccaatctttgggaattactgatctcaacaatgtaagaataactagtttaagaaggtatttgtag

SEQ ID NO: 333233 - DNA, 580 bp, Homo sapiens
tcaagattttggaggaaaaaataagcatttcaaagttaagcagaaatatagagtgtgtggggaggrggtgttagtttaggtgctgcatagttagggaggtatgggtaaggtgatacctttccatcaagaactgaatggagttatggagccaagtaaatatccagggggaagtttcaagtagaaagtatagaaagtacaagtgacctgaaagaagataatattctgaggcatctaaacaaagtaagtttggctgcagcactctgcaaattagagagcggtgagaagtcatagaggtggccaaaaactagattttgtaggactttgaggagtcttgtaaatttttttttttattattctgagtaaaataaaaagccattggagttttttaaatttggttataacagacaaaaagtgaggaaaatatgcctgtagcttggtgaattttgcacatatgctatgtaactaccacattaagcaagtatacaacatttgtagcagtccaaaagattctcttcctatttaatagttcattttttttcaaaggcaattactattttgatttctattaaaaagattagtt

SEQ ID NO: 333234 - DNA, 603 bp, Homo sapiens
tatacatcctggcagacctatcatctggaggaaaatttagcaaagcaggtcaatgggacaaaaacaccctttgcccctgccaacggatgtgcaatgtctctcctctccactacccattttagattccccataatatcatctagtacctctgctagtacctagtgacatgacctgtggctctaagcccctggtcaccatggccttctcaggttagtgtgctgtgagaagttgcccatttatcatcaaaactgggcaagggatttccaaaaacacctaaatagattaccctgataacattttttctttccctctttatgcagcagcagcagccctggacctcattttatttccaggaattgggtcagtacggtgagaaatrgaaatgaaattcgaagctcctcagctaactgaatggacccatcttggccaatgggactccagagcaaccttgaaaactgagattttggccctgatgagtaggaggtcagacatgttgttatatcccctccctccctaactgtcattaggctttcattcctaagggctaaacagaaagcagctctttttttttttaaatgaagaagtttatttgactcacagttc

SEQ ID NO: 333235 - DNA, 578 bp, Homo sapiens
gtcaaaacattgcaaatattaggataaattttagaacctaatttaggactataattcacatgtaaatcagattttaactcaattttaattcagttgtactttttttctcgttttgctatttaaggagttgataaagtagaatggtaaaagtttctgctggtatctgctattttatctgctatacagagcttgaagattactctttttggggaaatttcccattttatgaggctctgcagaaagcaagctcttgattctcactagtaaagccagagaatccaagtgtgtctctcttgtcccatctaagataggaaaaaggcttaagaaataacttaaaggacaatttttcttctccctggaatttcaaatctgrtaggagtgatgggaaaacacaaagagttgagaaatcagtcacagatagagtattaagagcccaagcatagtgacagtggcaaattcagcaatagtggcattactatcagttgacttcctaccaaattgtccttttgctatgactgtgtctctgatatcttgcatttctaggttcctgcctctgttctgagctgagtatttttctt

SEQ ID NO: 333236 - DNA, 257 bp, Homo sapiens
attataactttaaaggctaaaatgtttggcactgtgttaygctgttttcttctccagtattttttggtgcataagatctagaaatttcaaaatctattttagtcattttttaatattataggagttgtgcatggataagtttctttttcaaatagtatcagaaggtcaggaaaatgataaactattctctcaataaaccttaagttttaggcagcatttgttagcaacttttgtttttagttgttttgataattacc

SEQ ID NO: 333237 - DNA, 568 bp, Homo sapiens
gaggttgaatttcatgcctaaagaaagagcaacgccaaagagaatttagggagaagcaactgcaacaacataaaaagcactggagggagaaggttgatgggaagaaaactgtgaaaatgaaaaggtgtttagataagaaagcaggagaaagttgaaatagttattctaagattcacaggctgggcaagctctaatgttcatatatggataaaggcatttagtggttttgtaagatcaatgtaaaaatacaacatgattacagagaagcagagcattgttttttgtttcatttgtttgtgttcattacaagcagggctttaaagtgggtagataaattaatggttttcaagttaacaggtatcacaaacacctggagggcttgttaaagcggagattgtgttgggctcaactcccagagtttctaattcagaaggtctgtgttgtgctctgagactctgcctttctcacaagtccccagttgatgcttatgctgctgaccgcggascaatctttgggaattactgatctcaacaatgtaagaataactagtttaagaaggtatttgtag

SEQ ID NO: 333238 - DNA, 553 bp, Homo sapiens
cagcatgtattccctgaccagaaggggccatatatgtatcagcagttgcacagtgttgcaggagggtccctgaggttaagtgtatcagtatgaatggagcaactgctatgttcaatagaaatgcatgactgagatttgcctccctttctgggtcaggtgtggggatgggctttgaggccgggggggatggctgattaaactccctggtgtgccaaactagggcttatcaaattttgcccagttctgctgtggcagaggctggcaatcctgtccttatggttcacattagctagtctcacagaagttctttacacgagtgaaattaatccctggtacrgcagagaaaggctggaaggcaaggcctggcttctcctggatctgccatgtaatgaagactggtaaatctgtttcagtggctcgtatgggagagtcatccagcatatccctgtgtttggggatagtttcctgaccacagtgacgggctggagctgagactggtccccttcaagatctgctgtgcaacagtcaggcatgtctgtcgtagtggctcagc

SEQ ID NO: 333239 - DNA, 603 bp, Homo sapiens
ggcaaaacatttttaaaactaatacagtatattctatttaaggtaaaggaaagttttgtatgtgtatcatcacctcctttccttcttcctgtgtatctttgactgcattttgcaaatgtttatcttcccttagtttagtattgcaacattctaacttcayacagaaaaacaaaatgaaacacacacacatccacttggtaaattgaagtttctgattcatcatgtatatgtaaatcacctgtggtagctccgtgcttatccctaaaaatgtctggaactatggtattgactcttggacaagataggaatgaaatattctagctcatgattggtaatgtgctaagatcaaaactcccctggaggtatcttgtaccagctggtcaaaattatcgtaaatatgtagattggtggtctaaacctggtgcatctggttacacagcctagtttgactaagttgttagtgttgtatctgcatcaatgactcttagtaaacacaagactgggtatccttgagacagaggcaatcacacttatcttgatggtttgtgatccagagatagcgcttatcccatgtgacagagataggaccctggaagctatgcc

SEQ ID NO: 333240 - DNA, 603 bp, Homo sapiens
ggcaaaacatttttaaaactaatacagtatattctatttaaggtaaaggaaagttttgtatgtgtatcatcacctcctttccttcttcctgtgtatctttgactgcattttgcaaatgtttatcttcccttagtttagtattgcaacattctaacttcacacagaaaaacaaaatgaaacacacacacatccacttggtaaattgaagtttctgattcatcatgtatatgtaaatcacctgtggtagctccgtgcttatccctaaaaatgtctggaactatggtattgactcttggacaagataggaatgaaatattctagctcatgattggtaatgtgctaagatcaaaactcccctggaggtatcttgtaccagctggtcaaaattatcgtaaatatgtagattggtggtctaaacctggtgcrtctggttacacagcctagtttgactaagttgttagtgttgtatctgcatcaatgactcttagtaaacacaagactgggtatccttgagacagaggcaatcacacttatcttgatggtttgtgatccagagatagcgcttatcccatgtgacagagataggaccctggaagctatgcc

SEQ ID NO: 333241 - DNA, 503 bp, Homo sapiens
catttggattcatagattaggcatgtgacaggtaagatttgaacttacatgtaccatgcttcccttccatcctcaatattttttttaaaaagcacacaaatgcatgagagtggttgcagattactttctgaaaggaaggaagcttttgttcttcattttgattttagaggagttatttaaaagmccagttatactctttacttgcaaacatttttggctatttgtgaaagttcacctccaaggaaatctaatcagccagacaagttattgtttcattttagcctgaaaaaaaaaatcacacatatataaaattacacacacacacacacttttattttaaagataggaggtctaaagaatataaaatatggcaatgtgtttctaatgtgtttgaaatgatcatagcaaatagtgaattgccactaaattatcaacaaattatttgcatttgacttttgcgtcagtttctaattatcatataacttgaaacataaacattggtt

SEQ ID NO: 333242 - DNA, 503 bp, Homo sapiens
gtgttactatcaaggaataccagagactgggcatttgcaaagaaaacaggttgatttggctcacagttctacaggatgtacaagaagaatggtgccagcatctgcttctggtgggcaattaagctacctccactcaaggcagaaggcaaagtggagctagaatgtgctraaatcacatggttagagagaaagtaagagagtaagaggggagatgtcaggcttttttccacaaccagcttgccagggaactcttgcaggaactaatagaatgagaattcattcagttccctccccacagggaagttattaatctatttatgagggatctgctcccatgaccctgtcacctcccattagccaccacttccaacactgaggatcacatttcaacatgaggttttgcagggacaaacatccaaagcacgcatgttgtgaaaaaatcagccttgtttggagatctaattttttttacattgtgcccaatagaccacagaatcgctagt

SEQ ID NO: 333243 - DNA, 508 bp, Homo sapiens
tctttggatgtcagaggaaatttcatttaaaggcaatatttgggtcttgaaaggaaaaagtttgctggcagagcaaggactcacagtggaataaacaccacatgtacatgtaggaggagggagggtaacagagcaagcagtgttaaggaaaacttgagagtcttgtgtggatggaacatagagttggtgggagaatggtagctgatgaggcttaaaagcttcaccaggaacagattgtaaagggtcatgaaacataaagacttctagatttgacaaggatactaacgagctatggctcttcgtgaaagaaatgctttagaaaaactagtctagctgtaacatgaagaatcatctgctgttctcaaggctagagtcatggatagcaaatagtagccactgcagcaattcacrtatgtgtcgatgaggtcagaaataaaggacagaggccagtgtttgtaactgaatgatgtatttggcttgggacacatttaatttaaatgattatatt

SEQ ID NO: 333244 - DNA, 639 bp, Homo sapiens
aagtgattgtattacttttccagtgttttcccaatacagttgcagccacaaggacaagatatgtatgtgaaggtaactattgttcccagaaacacaagctttgatagaaagaatcataaaataaaactacacaacatatatccttctaaaataactccgtaggagaacaggttcatttttactttgatctactgttattatgagaaagtggattgaggtgacagtgtgcagtgctgattcagacctaattcagcagtatggagtaaagtaatacactgcaaagacattgcttagtaatagtagaaaatagagtcaagaagaatcttgaaaagtgtacagatgtagtccttgacactatgttatgtagccttctaacaacacccacatagttttccttcctttctctgatcacttttagtgttagtagtcataaataggatttgattatatttcaaatcgcatttcttaaactatttcattgtttcaatcttgycttcccaaataaggttgaaaccagcaagagtagcagtgtgcacacatgtgtatgtatgtgtagttttttcccaaccctaatctacagagtttttacacatattcacacactcacaccacatatgtatttctaaaaatcacagtcac

SEQ ID NO: 333245 - DNA, 605 bp, Homo sapiens
cactgcaaagacattgcttagtaatagtagaaaatagagtcaagaagaatcttgaaaagtgtacagatgtagtccttgacactatgttatgtagccttctaacaacacccacatagttttccttcctttctctgatcacttttagtgttagtagtcataaataggatttgattatatttcaaatcgcatttcttaaactatttcattgtttcaatcttgtcttcccaaataaggttgaaaccagcaagagtagcagtgtgcacacatgtgtatgtatgtgtagttttttcccaaccctaatctacagagtttttacacatattcacacactcacaccacatatgtatttctaaaaatcacagtcacattttcgtgaattataaaattttgacactgccttttatttacttttctcttcgcttctttaactttctgcccttatacttgctaaaacttgtgtcttaatcagaatgycaagatcatgcatatcaccataacaaataagaaaatcaaagcttactgaattttcagtgtaattagggtaaaaataccataatactctgtgttttttataaaatagccattgaggtcagctcacatagaat

SEQ ID NO: 333246 - DNA, 605 bp, Homo sapiens
cactgcaaagacattgcttagtaatagtagaaaatagagtcaagaagaatcttgaaaagtgtacagatgtagtccttgacactatgttatgtagccttctaacaacacccacatagttttccttcctttctctgatcacttttagtgttagtagtcataaataggatttgattatatttcaaatcgcatttcttaaactatttcattgtttcaatcttgtcttcccaaataaggttgaaaccagcaagagtagcagtgtgcacacatgtgtatgtatgtgtagttttttcccaaccctaatctacagagtttttacacatattcacacactcacaccacatatgtatttctaaaaatcacagtcacattttcgtgaattataaaattttgacactgccttttatttacttttctcttcgcttctttaactttctgcccttatacttgctaaaacttgtgtcttaatcagaatgccaagatcatgcatatcaccataacaaatwagaaaatcaaagcttactgaattttcagtgtaattagggtaaaaataccataatactctgtgttttttataaaatagccattgaggtcagctcacatagaat

SEQ ID NO: 333247 - DNA, 576 bp, Homo sapiens
gtgaaaaaacataccatacaaacaataatcatagttgatctagaattactattttaatgtcagaaataattgactttaagacaagaaatattactagaaaaaaagacattttatgataataaaggtgtcaattttttaggaagatatggcaactatacatatatacacatacctaacagyagaacttctaaatataaaaggcaaaaactaagagagttaaagaagaaatagagacctgaataataatagtttgagattttccaaccctactctcaaaaattgatacacaaactaggcagaaaattagcaggcatatagaagatgaacaatactatccaccaccttgatcttgctgacatttatagaacattaaccaacacatagataaataaatattcttttcaattgcacatagtaaattctccaggttagaaaatatgttacaagtcttaccacagaaaaaagcctggaaataataccaatccagtagcaacatgcacccctaaagtctccattgtaccttccaaatacaacttgtcactaaaaggtaccaggctacctacaagaaatgactga

SEQ ID NO: 333248 - DNA, 546 bp, Homo sapiens
tgacagctcatgttgatgctcaacatgagtgctaatgccagaatgttgtgtttcatttattttattttattattttattttttgagtcagaatctcactctctcatccaggctggagtgtggtggcatcatcacagctcactgcagccttgacctcttgagctcaagtgatcctcctgcttcagcctcccaagtagctgggactacaggtgtgcaccaccatgcctggataatttttttttctactttttgtggagacgtggttccactatgytacccaggctcctcttaaactcctgggctcaagggatcctcacacctcagcctcccaaaatattgggattacaggtgtgagccattgtgcccggccatgctttcttttaaagtgaatttaagttaagaggcagttacaacttggggtttatggctgtctggaatggaaataaattgggtcataaagagagataggattagagagtactgaaaaatacaagaaaggggaagaggataagtgagataagggccgctatgttctagttatgatttg

SEQ ID NO: 333249 - DNA, 446 bp, Homo sapiens
ccactacactcttttcatgctgtaagagcccatttacttcaatacattctatcccaagaaatatatctccaaattttatctactagccaaatgtctgttctagatttcaagatgtagcttcttgggtgtattactctaacctgttgccttctcctgggttcctatcttaatagcatcaattgyctctcaattattttaaagccaatgtctatgtgcctttctccatgaccttttccatctagtaagttgctaaatcctttcagtttgaactctccaatatctttcacgataagaaaaatataatagtgataaagacagtatgaactacccacatcaataccacaattattgagtgtttattttgaattaaaactgcgctaagcattttcctcataggatatcatttaatccccacaattccattacagtgaaaacaattgaggtaa

SEQ ID NO: 333250 - DNA, 446 bp, Homo sapiens
ccactacactcttttcatgctgtaagagcccatttacttcaatacattctatcccaagaaatatatctccaaattttatctactagccaaatgtctgttctagatttcaagatgtagcttcttgggtgtattactctaacctgttgccttctcctgggttcctatcttaatagcatcaattgcctctcaattattttaaagccaatgtctaygtgcctttctccatgaccttttccatctagtaagttgctaaatcctttcagtttgaactctccaatatctttcacgataagaaaaatataatagtgataaagacagtatgaactacccacatcaataccacaattattgagtgtttattttgaattaaaactgcgctaagcattttcctcataggatatcatttaatccccacaattccattacagtgaaaacaattgaggtaa

SEQ ID NO: 333251 - DNA, 627 bp, Homo sapiens
ttgtccttcatcatgtcttctctgaactaatgccagagcctccctgcctctaactgtggcccttccctttaactgttgcaatacatctatcttcataaaagcgggttaaaacaatttktttttcatcagaaatcttcttcaagccctaaaataaatgacaagctttgagtgtaggtaagacttcctgggctgggtagccaaaacattttcctagtaactcaatttctttacttattcaaaaaacattgaaaaagttttttgtatgtgttgtgtgtgtgtgtgtgtgtgtgtgccagaccctaatcctttaccgatattacacaattaatcctcaaacaatccatgatggaaatgcttttttcctccattttaccaagtaaagaattgagcacaaggaagtcaggtcaattgtcctatggcacaaagctagtagctagtgcctctgggcgtcaatcaaacctctgcagtctagctccggagcccatgctcttagccctcaggcgggccacctctccatcacttgtcttattgatttaagaggttggcaagcatgtatttcttctcagatagattttatatccattaaggtatccatctttacatcttctccatcttgcaatatcacag

SEQ ID NO: 333252 - DNA, 579 bp, Homo sapiens
tggaaattgagcccacacatttcaacaccacaggactattgttgacatctatgacaagttatctgttgtgaaactagtaaaataattgaataaaagttattcttgattttaaaaaaragtctggccttgtatttcatttatcatatcctatggccaaattgtcacttcctaatatcagccaaatatttgaaataaactttttgcatgattgaaaatgttctctatgctaataatgttgtgtagtttctcttcttgaaatctcacattagaattcagttttgctgctttacccacagaatgaagtgtaaatgcactactctggtatttaaaatctccacaatttgcccccaatctacacttttaacgttagctctcatcattctcaatcgcacaccttagatttcagtctcaccttccagtaaatagacccttttccatgatgttttatacctcttccagacaaattccaactcctagaattttcttaattctatgagctgaatataatatggggatttttttcagaagttctaaagatctttactttcttaaatactttttaacaggaaactttttgac

SEQ ID NO: 333253 - DNA, 579 bp, Homo sapiens
tggaaattgagcccacacatttcaacaccacaggactattgttgacatctatgacaagttatctgttgtgaaactagtaaaataattgaataaaagttattcttgattttaaaaaagagtctggccttgtatttcatttatcatatcctatggccaaattgtcacttcctaatatcagccaaatatttgaaataaactttttgcatgattgaaaatgttctctatgctaataatgttgtgtagtttctcttcttgaaatctcacattagaattcagttttgctgctttacccacagaatgaagtgtaaatgcactactctggtatttaaaatctccacaatttgcccccartctacacttttaacgttagctctcatcattctcaatcgcacaccttagatttcagtctcaccttccagtaaatagacccttttccatgatgttttatacctcttccagacaaattccaactcctagaattttcttaattctatgagctgaatataatatggggatttttttcagaagttctaaagatctttactttcttaaatactttttaacaggaaactttttgac

SEQ ID NO: 333254 - DNA, 579 bp, Homo sapiens
tggaaattgagcccacacatttcaacaccacaggactattgttgacatctatgacaagttatctgttgtgaaactagtaaaataattgaataaaagttattcttgattttaaaaaagagtctggccttgtatttcatttatcatatcctatggccaaattgtcacttcctaatatcagccaaatatttgaaataaactttttgcatgattgaaaatgttctctatgctaataatgttgtgtagtttctcttcttgaaatctcacattagaattcagttttgctgctttacccacagaatgaagtgtaaatgcactactctggtatttaaaatctccacaatttgcccccaatctacacttttaacrttagctctcatcattctcaatcgcacaccttagatttcagtctcaccttccagtaaatagacccttttccatgatgttttatacctcttccagacaaattccaactcctagaattttcttaattctatgagctgaatataatatggggatttttttcagaagttctaaagatctttactttcttaaatactttttaacaggaaactttttgac

SEQ ID NO: 333255 - DNA, 560 bp, Homo sapiens
tccacatttttttaagttgggatccaacactgtcatagtagatatcactttagtaaattctaagttttttctataacatactattacctttaatcactgtagcaacataatttattaaataatgtttctctttactcaaactggctaaaagtgccttacatgaaatcctcaagaagaacaatatggaagccatctgcagtagaccatgcaatagaccaagaactttattaataatagaccataagctagaataaaataattaaaatatagcaattggaaaaaaattttatgggcaacaaactgaaaaccattttattttaaaataccctaggtgtggatattgtatttaaaaataccctcgctgagaaayagcaaccagagttatcttgcatataccaataaaagatgaaggtggctttcatattatgattttgttcttaagaaaattgttaggcaatttatggatagagccacaagccatcacaagtaacaaatggatttaattattatgagagtaagtcgactgtttcattgcattcatggacttaaatcatatgtta

SEQ ID NO: 333256 - DNA, 602 bp, Homo sapiens
ctaaatgtcaaattcaaaagttgtgtgactttctttcaaaataaacattaagacttttgggggaaataaacattttgattttgaaaacattcatgactatacaagataatttgatgaacactaagtttgtgttgtttgtacactgctttttattttgtggtaaattgttgacaaagtaatgcatcctttcttcatgttatagatgtataaccactccaccacatcaaaagcccagggattgcactgtagaaagtctcattatcagcactagctttctgagtgtacttttggacaagaaaaagtatttatgtttyattaactactaagattgtcatgttttagacatttcaaagagacaatgctactgctttttgttcccagtgactgaaatgtggaaagctttcgtatttgttattgtgtaatgtgccattatctcccatgaaagcttcaggcctgtgtgacacacagctaaaactgggcatttgtttctactctgcttattcttttacaacacgtgtagagagttaaaagagaaagtggtatctgttgaaagtataccctgaagaattcttagttttttcagtttaaaaaaaagaaaaaag

SEQ ID NO: 333257 - DNA, 550 bp, Homo sapiens
caaaataatggttgatgagttatgttctgtctatcatgagacaaaaagaagacacacagagaatactagcattaatagagcagggaagtatactgcttccatgaaagtgagcatgaatacctgataaatgatctattttattccatctgtcttttttctccatctgtccttaggtatcttttaatttttgagttcagaaatttctgtattatgtgttttggtattggtttccctttatttaaaattattttattttattttttaattgtacatattgatggggtacatagtgaagtttcagtaagtataatgtayggtaaacagcttagagtaattagcatattcatcatctcaagcatttgtcatttatttgtgttggaaacattcaatattacccttctagctatttgaaactatacattgttgttaactattgttatcttatagtagtatagaacagtaaaacttatccctcctagctagctgtaattatgtatcctttaacaagtctcatcttatccctcctttccccttatcagtcccagattct

SEQ ID NO: 333258 - DNA, 582 bp, Homo sapiens
tatgactacatattatatttctgctaatcttcggggcaggaggagaaattaaactagtgttttaatcagtatataaaaatgttttatcaggccaggcacattggctcacgccagtaatccctttgggagatcgaggcaggcggattgcctgaggccactagttcaagaccagcctggccaacatggtaaagccccgtctctactaaaaatgcaaaaattagctgggcgtggtggcacgtgcctatggtcccagctactcaggaggctgaggcaggggagtctcttgcacccggaaggtggatgttgcagtgagccgagatcacaccactgcattccagcctgggtgacagggtgagactctgtctcaaaacaaacaaacaagcaaataaacaaaaaatgtattrtctattatcatacaaagcccaaacaactgcaagtaccaatagataaatataccctaaaagtcttattttatatttagaatagtcatgtcaaaatggttatctctaccaaatgctatcatgtacacaatgatatttttcaacaagaaaccacaactaatcattgtacagcatgccctgc

SEQ ID NO: 333259 - DNA, 530 bp, Homo sapiens
ctctcctcaactctatgaaggctgagagaggtgaggaagctgcagaagaaaatctggaagctagcagaggtcagttcatgaagtttgagggaattgtctgcataacataaaagtgcaaggtgaagcagcaggtactgatggagaagctgcagcaagttatscagaagacctagctaagataactgacgaaggtggctacattaaacaaggatctatatgctgaaaattacaaaatgctgcagaaagaaagaaaattttaaaaaatgaatagaaacattatgtgcaaatagttaagatgtcaatccccaccaaatttctatactgatttaaagtacttactgtcaaaatttttgtacatatagaaaagattattcaaaatttatatgaggagcaaaggaagaaaaatagctaaaacaatattgaaaaaagaatagagtgggagaaatcagtatacccaattcaagacttgttggttagctataataatcagtaccatatagtatttacggagtgatctattagtgcaacaa

SEQ ID NO: 333260 - DNA, 504 bp, Homo sapiens
tcaacatcaatagtgaaaaataaatagggattgtaatgacatataagatgagaccttaatatatatatattttttccacaatgactcaaaaagataaaacataaataataacctaaaagaatttgccctttccagtcctgtttggaacaggctcccaaatctggccaaaaactggccccaaaactgrccataaacaaaatctctgctgcactgacatgttcctgatggccatgacacccacgctgaaggttgtgggtttatcagaatgagggcaaggaacacctggcccacccaaggcagaaaaccgcttaaaggcattcctaagccacaaacaatagcatgagccatctgtgccttaaggacatgttcctgctgcaggtaactagccagaggcaatccctttgtttggcccattcctttgtttcctgtaaggagtgcttttagttaatctataatctacagaaataatgcttatcactggcttgctgtcaataaatatgtgag

SEQ ID NO: 333261 - DNA, 504 bp, Homo sapiens
tcaacatcaatagtgaaaaataaatagggattgtaatgacatataagatgagaccttaatatatatatattttttccacaatgactcaaaaagataaaacataaataataacctaaaagaatttgccctttccagtcctgtttggaacaggctcccaaatctggccaaaaactggccccaaaactggccataaacaaaatctctgctgcactgacatgttcctgatggccatgacacccacgctgaaggttgtgggtttatcagaatgagggcaaggaayacctggcccacccaaggcagaaaaccgcttaaaggcattcctaagccacaaacaatagcatgagccatctgtgccttaaggacatgttcctgctgcaggtaactagccagaggcaatccctttgtttggcccattcctttgtttcctgtaaggagtgcttttagttaatctataatctacagaaataatgcttatcactggcttgctgtcaataaatatgtgag

SEQ ID NO: 333262 - DNA, 661 bp, Homo sapiens
ggaaacttaacatatacacccacccagtcctcacaacaaagagattgcctgctaaaaacaacaagaacaagaacaacaacaacaacaacaaaacccagattaaatagtaatctgaatctcaacatttaatatccaaaaagtctaggatgattttgttaaatcacttgtcatatcaatatccaggaaaatcacaagttgaatgagaaaagaattaatgatactaacaatgaaatgaatgagatattgaaaatatctcacaaggattttacagtaaccatcctaaaaatgcttcaacaggcaattacaagttttcttgaaacaaataaaaatatttttaaaaacttcaaraaagaagttatttttaaaaggataaactagaactgaaaaaaataaatcgacaaaaaataaaatgctgaattggctgaagagcagagttaaatgacaggaaataaaatttgaaagcataaatacagatcaataaacttttcccaatctgtttaacagaaagaaaacagattttttaaaaagtttctcagtgaaatgcaggacaataataaaagggttaatatttgcatcaacagagatgtagagggagagaatggaaagcgggactaatcaagtgtttgaaggaataaaggtcaaaaactttcctaatttggtg

SEQ ID NO: 333263 - DNA, 533 bp, Homo sapiens
ttctatcatccatgcctctctagccacaatcactttatttatttctagataaaggccaagatcattcacctctgaacagggttgctccacccttcttatacttctttcccaagctggtgacttctatctagaagtcagtttaaaagataactccttgagtgagacttttatttaatatacaagcaaaagttgctacccagtctcctccacatggaacaacctgttacttctcctgtaaatatgtatttgttcattgtttacctctcttaactggaacyattatgcccattctatagatgataacgtggaagtgcagaaaaattagctactctctctgaggcaccccagcaaatatctggagctatgtctagctctgaattctgtatgtgctcttcactcctacatcacagcaatagaatagtacgcctgacacatgcctgtctcccaaaccccagaacatgggactgtgttcctacaggtgccaaagggacttttcaagtgtgattaagatgaaggagtttgtgctgctgaca

SEQ ID NO: 333264 - DNA, 495 bp, Homo sapiens
aaaaataagttagaaacgatcttgaagggcaatgtaaataaaatgtaacatatcgaatttgatttttttgagagacgttaaaagcagagaaatctgcatatcaatgtctctcagaaacacagttgaaaaatttcttaaattttcttattttagaaaattgagtccaacaataaataaaaaggataaaaacattatgattaactgggatatattcgcaaaattcaaacttggtttcatatctaacaatacattaatagaacatagcatattgatagaaataaaaaaaaggcataaggcacagtatatttattaatagtcacagaaaaggcatttaacacagttgaacwtttattctgattaaaatttttaacaaactagtaacagaaaggtatttcatcaacatgctaaagaacatttatgaaaaacatctagctattaacatatttaatgttgaaatatttaatgatttcccctatgatcagatacaaggtatgt

SEQ ID NO: 333265 - DNA, 607 bp, Homo sapiens
ttaaaaattctatataattatagttgctataattyttcttccagaaataattgatcataatggctaaaaatacctaggcaaacactgacaatgtaaaattgtattttatcattattcagagtggctccaaaatatttacaatagttgttaatatttaatacttagtaaatgatgtctactagaatgagggtgaaggctttagggacttgtcttaagctgtattggcacagctttcaactcattttatttaaattctatgctttcacattggaaagcaaagcatggcagaggctatgctgttgtggggtgggtggggttcagctcatttcttaaccaactctcacataatgagcatttgctatattttaggtgagcattcactcccagtgaactattattttaggtaaagtggacttgagtagattctaaaaggtagaatttataaattgtaaaaaacagtaattgcttccaattaataatttaccaattttttattcattatttcaccagctatatgaacaagtattagtagaaagttatcaatttttatttccatgatcatttcttattaaataattgaagactttaaaatatgcaatgttgtaat

SEQ ID NO: 333266 - DNA, 572 bp, Homo sapiens
gggagttccccactcttactggatcgcagcatcactctctttggtcttctstccagaaatccaaggctcttctcagagtttagtttcctgtactgatgcacatttcctcatgactggagaaaacagcatgagaaaaggagagaagagtggggatccctcatgccacaaaaactaatttttccagaacctttagatagagggtggattttctctctgagtttccagctggcccggctgccccaggctccatggcagcagctgcatggccaggggggccttggagtcagctcaggaaccaaaacaaaggaacagtaacagagatgtcttccacagctgttggctcgcagaggcctcttcccaggtctctgatcagcaagacatgctctctcagagtttttgtttgttgtccatgacttaatttgtcttgacctcaagtccatgctgggagataaaggaagcaagaaaaagaaaggaaaacaaaataaaaacaggtaaactcctgtttgccatattaatcattattcaatttttacttctttcaaaaaagttcttgctattatttattgtacaat

SEQ ID NO: 333267 - DNA, 572 bp, Homo sapiens
gggagttccccactcttactggatcgcagcatcactctctttggtcttctctccagaaatccaaggctcttctcagagtttagtttcctgtactgatgcacatttcctcatgactggagaaaacagcatgagaaaaggagagaagagtggggatccctcatgccacaaaaactaatttttccagaacctttagatagagggtggattttctctctgagtttccagctggcccggctgccccaggctccatggcagcagctgcatggccaggggggccttggagtcagctcaggaaccaaaacaaaggaacagtaacagagatgtcttccacagctgttggctcgcagaggcctcttcccaggtctctgatcagcaagacatgctytctcagagtttttgtttgttgtccatgacttaatttgtcttgacctcaagtccatgctgggagataaaggaagcaagaaaaagaaaggaaaacaaaataaaaacaggtaaactcctgtttgccatattaatcattattcaatttttacttctttcaaaaaagttcttgctattatttattgtacaat

SEQ ID NO: 333268 - DNA, 474 bp, Homo sapiens
tttattcaaagaaataataatagagaacttccaaaacatagagaaagataacattcaagtacaagaaggttataaagcaccaagtggacttcatctaaagaagacaatctcaaggcatttaacaatcaaacttccaaaggccagagaaaatgaaagaactctaaaaccagcaagagaactgaaaaaaaaaaaaaaaaataccttacartggagctccaatacatctggcagctgacttttcagtggaaacctgacaggccagtagaggctagcacagcatgtttaaagcgatgaaggaaaataactattacattagaatagtatatccagtgaaaatatgcattaagcatgaggaagaaataaagaccttcccagacaaacaaaagcttagggatttcatcaacaccagacctgtcctacaagaaatgctataagcagtttgtcgacatgaaagaaaatgatgttaatgaacaa

SEQ ID NO: 333269 - DNA, 474 bp, Homo sapiens
tttattcaaagaaataataatagagaacttccaaaacatagagaaagataacattcaagtacaagaaggttataaagcaccaagtggacttcatctaaagaagacaatctcaaggcatttaacaatcaaacttccaaaggccagagaaaatgaaagaactctaaaaccagcaagagaactgaaaaaaaaaaaaaaaaataccttacagtggagctccaatacatctggcagctgacttttcagtggaaacctgacaggccagtagaggctagcacrgcatgtttaaagcgatgaaggaaaataactattacattagaatagtatatccagtgaaaatatgcattaagcatgaggaagaaataaagaccttcccagacaaacaaaagcttagggatttcatcaacaccagacctgtcctacaagaaatgctataagcagtttgtcgacatgaaagaaaatgatgttaatgaacaa

SEQ ID NO: 333270 - DNA, 474 bp, Homo sapiens
tttattcaaagaaataataatagagaacttccaaaacatagagaaagataacattcaagtacaagaaggttataaagcaccaagtggacttcatctaaagaagacaatctcaaggcatttaacaatcaaacttccaaaggccagagaaaatgaaagaactctaaaaccagcaagagaactgaaaaaaaaaaaaaaaaataccttacagtggagctccaatacatctggcagctgacttttcagtggaaacctgacaggccagtagaggctagcacagcatgtttaaagcgatgaaggaaaataamtattacattagaatagtatatccagtgaaaatatgcattaagcatgaggaagaaataaagaccttcccagacaaacaaaagcttagggatttcatcaacaccagacctgtcctacaagaaatgctataagcagtttgtcgacatgaaagaaaatgatgttaatgaacaa

SEQ ID NO: 333271 - DNA, 645 bp, Homo sapiens
tttctttctgttttttttttttttgagacggagtttcactcttgttccccaagctggagtgcaatggtgtgttcatggctcactgcaacctccacccccgggttcaagcaattcttctgcttcagtctcccgagtagctgggattacaggcgcaccccaccatgccctgctaattttttgtatctttagtagagatggggtttcatcatgttggctagcctggtctggaactcctgacctcaagtgatccacccgcctcggcctcctaaagtgytaggattaaaggcatgagccaccgcacctggccaaatgtatactacactttctttagccatttatgcactgatagacacttaggttgatttcacattttggctattatgaatattgttgcaataaacataggagcacagatgtcttttcaatatattgatttcctttctttaaaatgtatacccactaatgaaattgctggatcgtgtggtagtcttattttcagttttttgagaaccctccaaactgttctgaagtagtggttgtactaatttacattttcaccaacagtgcataaggattcctctttctccacatcctcaacagcatttgttattgcctgtctttcatatataagccattttaactggg

SEQ ID NO: 333272 - DNA, 645 bp, Homo sapiens
tttctttctgttttttttttttttgagacggagtttcactcttgttccccaagctggagtgcaatggtgtgttcatggctcactgcaacctccacccccgggttcaagcaattcttctgcttcagtctcccgagtagctgggattacaggcgcaccccaccatgccctgctaattttttgtatctttagtagagatggggtttcatcatgttggctagcctggtctggaactcctgacctcaagtgatccacccgcctcggcctcctaaagtgttaggattaaaggcrtgagccaccgcacctggccaaatgtatactacactttctttagccatttatgcactgatagacacttaggttgatttcacattttggctattatgaatattgttgcaataaacataggagcacagatgtcttttcaatatattgatttcctttctttaaaatgtatacccactaatgaaattgctggatcgtgtggtagtcttattttcagttttttgagaaccctccaaactgttctgaagtagtggttgtactaatttacattttcaccaacagtgcataaggattcctctttctccacatcctcaacagcatttgttattgcctgtctttcatatataagccattttaactggg

SEQ ID NO: 333273 - DNA, 483 bp, Homo sapiens
ccactaatgaaattgctggatcgtgtggtagtcttattttcagttttttgagaaycctccaaactgttctgaagtagtggttgtactaatttacattttcaccaacagtgcataaggattcctctttctccacatcctcaacagcatttgttattgcctgtctttcatatataagccattttaactggggtgagatatctcattgtagttttgatttgcatttctgtgatgattagtgatattgagcaatttttcatatacctgttgaccatacgtatgtcttcttttgagaaatgtctgttcaaatcttctgcccatttttaagtcagattttttattgttattgagttgtttgagtgtcctgtatattctgttcagtaattctttgtcagatgggtcatttgaaaatattttttcccattctgtagattgtctctcactttattttttctcttgtggtgcagaagctttttagtttgatgt

SEQ ID NO: 333274 - DNA, 483 bp, Homo sapiens
ccactaatgaaattgctggatcgtgtggtagtcttattttcagttttttgagaaccctccaaactgttctgaagtagtggttgtactaatttacattttcaccaacagtgyataaggattcctctttctccacatcctcaacagcatttgttattgcctgtctttcatatataagccattttaactggggtgagatatctcattgtagttttgatttgcatttctgtgatgattagtgatattgagcaatttttcatatacctgttgaccatacgtatgtcttcttttgagaaatgtctgttcaaatcttctgcccatttttaagtcagattttttattgttattgagttgtttgagtgtcctgtatattctgttcagtaattctttgtcagatgggtcatttgaaaatattttttcccattctgtagattgtctctcactttattttttctcttgtggtgcagaagctttttagtttgatgt

SEQ ID NO: 333275 - DNA, 639 bp, Homo sapiens
cttttcaaacgtgatttttcaaccaccttgctttatcttattaagtcagttttttaactgaaattttattgaaataattgtacatttacatgcagttctaagaaataatgaagagaaaacctgtgtaccctttacctagtttctcccagtggcatcatttttcaaaactatagtataatatgatacaatatcacaacaaagatattgaaattgataaaaacctcttcatattgtttagcttttttgtctattttaatttttgcttgtgcacattggtggtatgagtatgtgtaattagttttgtacaattatagaacatgtttaggctcatatatccaccacaagtcaaagtagtgaacatttgcagccccaccctaataccttctgttgccttgtataaacatcctcatctctgtccccacactcttttgtaaccaaaaatatgttttccatttctacaatttggtcatttcaaaaatgttatataaacacaattacatattatgtaactttttggtattgacagccgcagtctgyacctttgggattggtctaccacagtagacctgtggtatcctgggccctagtggttcatgctcctcccaaatgtaaaatacattcaacctttcaaagctttcc

SEQ ID NO: 333276 - DNA, 524 bp, Homo sapiens
ctaaaacaggtgttcttgattggcagtcaacttccctccatagcataattcagaaatttgtcttgtagctttaccatcttccagggtctttttgtcaaaagacaataaattaaaagaataaaatagggaagccttgcctgaaagtgcatgcatcatttcagctcacatcccattggtgaaatctaatcacatggtcatatctacctgcaaagaagcatgagacatgtagtacctttgtttacctaactgtatttgtcattttaatttactaaaattatctctaaatcttagtattttgtccttgcttgcttggggctcaggtgttttacgatgattaaaattttcttgttatacaatcatgtcctttaaactcatgaactctttatatagagtaggctctctcaattcatgagtttacttttcttatttgcagaaaaaatgtcccaygaagttaattcaattaggtaacctttcttgctattatttctgtatgataaaatttgaaggttctagtatgcccaaag

SEQ ID NO: 333277 - DNA, 441 bp, Homo sapiens
taaaataaaaacaaaagcaaaagaaaaaccctatattctgtctctgtaaggtttatctaagacataaaagtacagaaaatttgtaaagaaaagaataaaaaaattataccaaacagagaccaaaaatcaattgatttagcaatactggtattagaaaacgtagatctaaggcaaacattatttctagaaataaaaaggacttttaataatgatagtgtcaaacctatcaaaaagacataataatgtttagatttttttatatctgataacataccttttattyatttattatttatttatttatttacttattattgtttttgagacagtcacactctgtcatccaggctggagtacagtggtgtgatctcagctcactgcaacctccacctcctgggttcaagtgattctcctgcctcagcctcccgagtaaccgggact

SEQ ID NO: 333278 - DNA, 563 bp, Homo sapiens
tgctcataaacagaaacagcacccacgtctgatgcggcagctgcccctgcagtttcatcatcctgatgttacatgtggttctcaaaagtrgatacagaggttgaattgattgcattccacttcacagattggtcaggaggtccacaaggactggtctctgtgtaactcaggagcaataaataatttttagaaaacatcaactaaataccattaagaccctctccataaggcatgcaagtattccttcgtctggcataaacctcttcacttgttcttacacaattatgtaggggattaaaaaagaaactgccacaatccccttaaaatatatgaatctctttggaaaagtccactcttcctttgaacaattctagatgaattttgtatagttctttcaatctagggcaaattatcttgccaaagagtcgctctttgtttcatttctccagtttattataacacacttatttaatgatatgaatttattaattaatattaattttaattttgccatagccagaggaggacagtattccagggtgcttgaatatctctggaaaact

SEQ ID NO: 333279 - DNA, 563 bp, Homo sapiens
tgctcataaacagaaacagcacccacgtctgatgcggcagctgcccctgcagtttcatcatcctgatgttacatgtggttctcaaaagtggatacagaggttgaattgattgcattccacttcacagattggtcaggaggtccacaaggactggtctctgtgtaactcaggagcaataaataatttttagaaaacatcaactaaataccattaagaccctctccataaggcatgcaagtattccttcgtctggcataaacctcttcacttgttcttacacaattatgtaggggattaraaaagaaactgccacaatccccttaaaatatatgaatctctttggaaaagtccactcttcctttgaacaattctagatgaattttgtatagttctttcaatctagggcaaattatcttgccaaagagtcgctctttgtttcatttctccagtttattataacacacttatttaatgatatgaatttattaattaatattaattttaattttgccatagccagaggaggacagtattccagggtgcttgaatatctctggaaaact

SEQ ID NO: 333280 - DNA, 563 bp, Homo sapiens
tgctcataaacagaaacagcacccacgtctgatgcggcagctgcccctgcagtttcatcatcctgatgttacatgtggttctcaaaagtggatacagaggttgaattgattgcattccacttcacagattggtcaggaggtccacaaggactggtctctgtgtaactcaggagcaataaataatttttagaaaacatcaactaaataccattaagaccctctccataaggcatgcaagtattccttcgtctggcataaacctcttcacttgttcttacacaattatgtaggggattaaaaaagaaacygccacaatccccttaaaatatatgaatctctttggaaaagtccactcttcctttgaacaattctagatgaattttgtatagttctttcaatctagggcaaattatcttgccaaagagtcgctctttgtttcatttctccagtttattataacacacttatttaatgatatgaatttattaattaatattaattttaattttgccatagccagaggaggacagtattccagggtgcttgaatatctctggaaaact

SEQ ID NO: 333281 - DNA, 619 bp, Homo sapiens
ccacagtcacagaaacacaaattacatttgatcaaatatcacatatatatttcaagcaccataaatttgacccaaatatagctcaaaggtgtgataatgtagtgcttctactgatgtcatgagatattcgagatttgcatgacaatgctttctgcttcaaatgccttcgagatggcaggattcaggaataaaaggacagagaaattatggaagagctgttatgtgactaggattagccaggaagagataaataaaatgatgtccaggtaagcatctgcatatgtaatacctgctcctgtgagggtaraaaggtaacaaagtagacaagagcaactaagacccttggggtcccagagatcaattgtactggtgcttctttgcacaatttattacttttgccagggaatcctgctatgccaggaacgaaaagggtattcatttagttaaactggatttattgagggctgggaagtagtaagattggagtgactggaggtcacagtgacaggaaattctaaaatgaaaaataaccacgtaatttgtgtggatgaacaggaagctcagtctaggcaatgcagctagatcctggatagatatatgaactagggtaattggaagg

SEQ ID NO: 333282 - DNA, 559 bp, Homo sapiens
tgacagtgaggaaagctgaaaggttatagaagacagataattaaagtgagttctaatgtccagctcaggctggggagacattctagacacctagtactgaatgaatagttcaatgggaaatgtcgcttgtgtatgatggaataatgtgataatgactagccctataggttaaaataaaggctgagcatgaattttattttcttcttctgattccrtaatctattattttactttcagtttcctcatagccaggccttaaccattttgtgtctctagttctgagatttcatgatttttactttctcatcagtctatattttcaattccatctagatatatttaagcccatgtgacatgatgtttgcatttgtttcctagtgcattaaacttttttattattatgaagtgaccatatctatatttagtaatatatttgctgtgaagtttgctttgcctagtattaacaaagctacaaacctttcttttatggtttgcactgtattttttccttttttctggtttttaaaatacatatttatttaatttgtaaattaactgt

SEQ ID NO: 333283 - DNA, 594 bp, Homo sapiens
atacctgacactcagtaatttatgaaggaaagaggtttaattgactcatagttcctcatggctggggaggcctcaggaaacttacaatcatggtggaagcaaaggagaagcaagcaccttcttcacaaggcagcaggagagagasagcaaagggggaactgccacacacttttaaaaccatcagctttcatgagaactcactcactatcatgagaacagcatgggggaaaccactcccatgatccaatcacctcacaccaggtccctcctctgacacatggggattacaatttgtgatgagatttggatgcggacacagaacaaaccaaatcattcagttacatggaagcattacttaaaatgtcataatgtcagtctaaaagcttcaaatccatttagttattaaacacttagagaaatattctaattatgtcaatttatttatttatttgttttccttctttattttatcaaattttattttaagttctggggaacatgtgtaggatgtgcaggtttgttacacagataaacatgtgccatggtggtttgctgcccagataaacccctcatacaggtattgagccccacacc

SEQ ID NO: 333284 - DNA, 415 bp, Homo sapiens
ctgtggtcccaggtactcgagaggctaaagtggargatcacttgagcctgggagttcaaggctgcagtgagctatgattgcaccaccacactcccgcctgggcagcagagcgagacccggtctcaaaaaaaaaaaaaaaaaaaaaatcattttcaagtgagcaattcagtggcacttagtacattcacaatgatgtacaaccaccactgagttccagaatactttcatcaccccagaaggaagcctgtacccactcacagtcactccccattcccctctctcccaaccacctgccagtcaccaatctgagccccatctctatggatctacctactctggatatctcatataaatggcatcatacaatagttgacctcttatttagtttgatggcaagagggggaaggagctgctg

SEQ ID NO: 333285 - DNA, 310 bp, Homo sapiens
atgtcagggctggaagggaactttgtgatctccattctggtccactcccaagaagggagggacccgctggtccacagcaagtttgcttgcccactttctcatggatctgggctcttctgcaggccaggctgttgccaggctctggggctaggragatgagggagccccagtgtgcccagcagtgggggatgtagcatgggaatcaccaagcatgctgggagggaggcgatctcaggagtctgaggaggacatctggagaagagttacagagggcatggcatttgagctttgaaggggtgctggacaggaa

SEQ ID NO: 333286 - DNA, 310 bp, Homo sapiens
atgtcagggctggaagggaactttgtgatctccattctggtccactcccaagaagggagggacccgctggtccacagcaagtttgcttgcccactttctcatggatctgggctcttctgcaggccaggctgttgccaggctctggggctaggaagakgagggagccccagtgtgcccagcagtgggggatgtagcatgggaatcaccaagcatgctgggagggaggcgatctcaggagtctgaggaggacatctggagaagagttacagagggcatggcatttgagctttgaaggggtgctggacaggaa

SEQ ID NO: 333287 - DNA, 583 bp, Homo sapiens
tggaagtcttttttgtccagttacaaagattcatttaggtctaccttaatttttttcagacctggtggcaagatcgcccgggcgtattctcatggctttggcaaaggtgcaaaaagcaaattctaaggagcccatttcaagcctctgcttgtgtcttatctaaaaaactcccttygcaaaggcaaatcacatgattaaggccaatgtcaaggggaggagtaggagtgcactgcaaagttatatggtgaaaggcatggctctgaagaggagaaaagacttggggccattgttgcaatctatcacactcatttcccttggaaaattatttataggacatctttgaggcctaggatgaagtgatagtccaccagaaaggacttagtgtctttgccaggtaactaaagatgtgctagtccgggactattccaaactaaattcatgccttgagatttctggtactactcagatgtattagttcattttcatgctgctgacaaagacatacctgaaactggaaacaaaaagaggtttaattggacttacagttccacatggctagggaggcctcagaatcacggcggga

SEQ ID NO: 333288 - DNA, 555 bp, Homo sapiens
tgccatggcatttttgtaaactgtcatggcaatggtgaaagtatagcagtgaggactaccagaggtcactgtcatcgctattttggttttggtgggtttggccagctcctttactgcaacctgttttatcaacaaggtctttatgamctgtattttgtgttgacctcctatctcatcctgtgactcagaatgccttaagtgtctgggaatgcagcccagtaggtttcagcctcattttacccagatcctatttgagatggagttgctctggttcacatccctctgacaaattcataatggctccaagttcatcagcagataacttaaacccagcgccccctcactttcactctgcctctcatgaccatagtataaattgggacgtagcaaagagttaaatacccacaaagggctttggtttggcacagagcctgatacaggaagctgtagcttcccacagagaggtggtggcctgacctgtggggacatggtgcagtgatctactggccaggtctgctttgtaaaactctgaccgcaggggtctatgtgacctgc

SEQ ID NO: 333289 - DNA, 584 bp, Homo sapiens
ttacctatgctgggtttcaacttaaaatttctttttcttctgtctccacaaagcccaaggaaagactcttccttttgaaatgcaggtaatttgtgatgtttgagargcaaagtgtattaataaacatgtgcgacctaaaacctgcagagatcacatggtggaatgaaaagctagcactttgctgctgatgcctgggtttcggcccacattctgccactaactggctttactgagcttcagcagctcaatgctttaagctagtgcagttggttgaaaagctttttatggatctactgtttaatgcatttaattgggctttttgattttataaaggtggaatttgacagtaaaacccatagtgaaggttgattgtgtagcgccttctattcatcaggaaaactttttttgcattctgggtttgtcagccattagccaaatgaaaatcatggaagagacagaagattttaaatgagagaaaaggaagggtgagtcaaaaagtaacactagactgggctcttgcttttagcaggtaatccccaataatccacataaagtaagaataaaacaccacagttattaaatgc

SEQ ID NO: 333290 - DNA, 584 bp, Homo sapiens
ttacctatgctgggtttcaacttaaaatttctttttcttctgtctccacaaagcccaaggaaagactcttccttttgaaatgcaggtaatttgtgatgtttgagaagcaaagtgtattaataaacatgtgcgacctaaaacctgcagagatcacatggtggaatgaaaagctagcactttgctgctgatgcctgggtttcggcccacattctgccactaactggctttactgagcttcagcagctcaatgctttaagcyagtgcagttggttgaaaagctttttatggatctactgtttaatgcatttaattgggctttttgattttataaaggtggaatttgacagtaaaacccatagtgaaggttgattgtgtagcgccttctattcatcaggaaaactttttttgcattctgggtttgtcagccattagccaaatgaaaatcatggaagagacagaagattttaaatgagagaaaaggaagggtgagtcaaaaagtaacactagactgggctcttgcttttagcaggtaatccccaataatccacataaagtaagaataaaacaccacagttattaaatgc

SEQ ID NO: 333291 - DNA, 520 bp, Homo sapiens
gtttgtcagccattagccaaatgaaaatcatggaagagacagaagattttaaatgagagaaaaggaagggtgagtcaaaaagtaacactagactgggctcttgcttttagcaggtaatccccaataatccacataaagtaagaataaaacaccacagttattaaatgccctgaggttcttgcttttaatcccccttttcttaaagagttatctgttccatatgtacaaggcacttcccatcctcccctgactctctctatcaccaccytccccggtgctagagagattcgtttattcaaggatttatttagtatcgatcaacagcccatctgccttgcataaaaaaattaaaaagcaaaatatggtccttttctgttcttttaacacaggaatgtgtgcccttcccccacacttctcactgatacacctcctttttcaattattttgtaggtaaagcaaagaaattccttgcttcagctatcctcctaagcttaccaaatctaggctttgttcctaggcc

SEQ ID NO: 333292 - DNA, 615 bp, Homo sapiens
aagtatggataaattaatgtgcatttgaactataaattattaatatcatagcttttttcccagaaaagaggctctttggttactgctgctcattcattctttgcctgttttccccaacatcaaaggtaaactcaccatcaagataatccacactggacataacacatgggggaaaggctaagaatttgggctctgagcagaggccgatcacaamcaacctccagaaaacggcctgcctcaaagaggaatgcaggaagtccacagaatgccggacaaaccagtgaggcaggtttggaataatctagtacatgcctttgcaccctgtatccgttaaggcatgtttggttggaaataaataaaaacccaaataaccaacgccgttttcccacaaagaaaatctgcaagtataggtcttttctggtgctggttaagctgcccactgaagtcacggaggatgaggctcactctttccctcttgctgtccttagtgtggggcatcttttctttaggccattaggatgtagacaaggaacaagccagccacacacctcctgctagtcctgaacacaacccatctcaatatttcctgccttaggaaatcgaccttttcttctc

SEQ ID NO: 333293 - DNA, 440 bp, Homo sapiens
ggtgtggtggtgtgcacttatgatttcggctacttggaaggctgaggtggggggatttcttgagcccaggattccaaggttgcagcaagctatgattgcaccaccgcacaccagcctgggtgacacagcaagaccctgtctcttttatttatttatttattttttttattatttttatttatatatactttaagttttagggtacatgtgcacaacgtgcaggttagttacatatgtacacatgtgccacgttggtgtgctgcacccattaacttgtcatttaacattaggtatatctcctaatgctatccctcccccctctcccgaccctgtcyctcttaaaatgtaaactagatcatttaattctcttgcttaaattcaacgagtgacttctcattgctctcaaatatttatgcttttttgtagaacatccacattca

SEQ ID NO: 333294 - DNA, 572 bp, Homo sapiens
ttaaataagtaattaaggttaaagaagatatggatgggtcctaatccaacatgactggtgtccttataaggagagagagacagtaggggcatgtgcaaacagaggaaatgccatgtgaggacacagtgagaaggcagccatctacaagccaaggagagaggcctcaagagaaaccaaacctgttgacaccttgatctggggacttccagcctccagatctgtcagaaaataaaaaaaawttttttttttttgagatggaatctcgctctgtcgcccaggctggagtgcagtggcgtgatctcggatctctgcaaactccacctcccgggttcacgccattctcctgcctcagcctccctagtagctgggattacaggcacctgccaccacgcccggctgattttattttatttatttattatttattttgtatttttagtagagacggggtttcaccttgttagccaggatggtctcgatctcctgacctcatgatccgcccacctcagcctcccaaagtgctgggattacaggcatgaaccaccgtgcctggcccagaaaataaactttaa

SEQ ID NO: 333295 - DNA, 574 bp, Homo sapiens
atcagcatatgaatgaatgtgtctttttggtagaatggtttatatacctttgggtatattcccagcagtgaaattgctgggttgaatgttgaatgatagtttaactcttagttttctgagaaatctccaaactgctctccacagyggcctaactaatttacattcccaacaacaatagtataagcattctcttctctctacagccttgccaacacctgttatttttttgactttttaacaaaagccattctgactgttgtataatggcatcttcttattgttttgatttgcatttctctgatgattagtgatgtggagaatttttaaaatatgtttgttggcctcttgtatgtcttcttttgagaagtatctgtacatgtcttttggttacttttttcttttctttttattttattttattattattttttcttttttgagaacaaggcctggctatatagcgcaggctggagcgcagtggcacaatctaggctcactgcaacctcagcctcccctagtcaactcatcctcccacctcagcctcctgagtagctgaaactacaggtgcgtacca

SEQ ID NO: 333296 - DNA, 582 bp, Homo sapiens
atctattaaggctagttccaaatgaggttccattttgaggtaccgggggtcggacgttcaatgtaccatttgttggggagcagtactcaatgtgtaacaaggactaattggtgcaagttaatgggacgttcatcttgtttcaatccaaggatgaatttttaagcagtcagaattttgcagccatggtgaaagtcgacttttgtcwatagtgagtacccagtgcctgggggttttcaagaagagtctgaacactcagccaaggatgttgtgagcaaggacttctatatcgcatgaaatgatgggttgacataatctctgtggctctggattgaggccttctttaatcacaaaaatctcataaagttaaaacatggatgaaccttgaatatatcatgcaaagtgaaagaagccagacacagaaggccacgtactgtgtggttcaatttatacaaaatttcagaaatgggcaaatacatagagacaaaaagtagattagtggttgccagagactgggagacagggagatggaaagtgattgctaatgggtacggggattgttttggggtaaggacatattctgga

SEQ ID NO: 333297 - DNA, 582 bp, Homo sapiens
atctattaaggctagttccaaatgaggttccattttgaggtaccgggggtcggacgttcaatgtaccatttgttggggagcagtactcaatgtgtaacaaggactaattggtgcaagttaatgggacgttcatcttgtttcaatccaaggatgaatttttaagcagtcagaattttgcagccatggtgaaagtcgacttttgtcaatagtgagtacccagtgcctgggggttttcaagaagagtctgaacactcagccaaggatgttgtgarcaaggacttctatatcgcatgaaatgatgggttgacataatctctgtggctctggattgaggccttctttaatcacaaaaatctcataaagttaaaacatggatgaaccttgaatatatcatgcaaagtgaaagaagccagacacagaaggccacgtactgtgtggttcaatttatacaaaatttcagaaatgggcaaatacatagagacaaaaagtagattagtggttgccagagactgggagacagggagatggaaagtgattgctaatgggtacggggattgttttggggtaaggacatattctgga

SEQ ID NO: 333298 - DNA, 521 bp, Homo sapiens
ttttatgaaatgggtattattgtccctactttatggatgacaaaacttggatgtagggagatttaaaatctagccatgctcagatggcaaattacagagcaaaaatatctgtttacctttatttttttccacttacaaaaccaagtttcctactgatayggtttggctctgtgtctccacccaaatctcatcttgaattgtaatcccaataacccctttttgtctagggaggacttggtggggggtgattggatcatgggggtggtttgccctatgctgttctcatgatagtgagttagttctcatgagagctgatgctttaaaagtgtttggcagttttccctgttctctttctctttcctgctaccttgtgaagaaggtacttgcttctccttcaccttccatcatgattgtaagtttcctgaggcttccccagccacgtggaactgcgagtcaactaaatctctttcctttataaattatccagtcgtgagtatttctttacggcagtgtgaatttgg

SEQ ID NO: 333299 - DNA, 596 bp, Homo sapiens
tggtgaggggcagggacgctcacctccagaacctactgtgtagcagactctctgcatttattattacasttaatttttggaactcagaaatgggcattaatgtccccattttaccaaagacagatgggaggaacagagggagaatgcctcattttggccattcatcctagtactaagtccactatatgggtgtggggctagggggttagggatcaagaccattgccaaaggttatgttgcagaataggtttttttctgaattccacattcatgctgattccaatatacccagacataggctcaaacctggaacttattaaaatgtgtgagtacctctgctgactgcaagctccacaacaccttttgcttagttagcctagttcatttctgctggtgttttattatgcaaatgtcttgttctggtttagtctgtcaccttttaggcaagaaaagagattttaaaaaaatctttctcacttctttagttcctttgcagatttttttttctctttatctccctcctcgtaaaattaagattccttgggaggacatagagggcagagatcttaccagagccccacccagatgcagaaagt

SEQ ID NO: 333300 - DNA, 596 bp, Homo sapiens
tggtgaggggcagggacgctcacctccagaacctactgtgtagcagactctctgcatttattattacagttaattttyggaactcagaaatgggcattaatgtccccattttaccaaagacagatgggaggaacagagggagaatgcctcattttggccattcatcctagtactaagtccactatatgggtgtggggctagggggttagggatcaagaccattgccaaaggttatgttgcagaataggtttttttctgaattccacattcatgctgattccaatatacccagacataggctcaaacctggaacttattaaaatgtgtgagtacctctgctgactgcaagctccacaacaccttttgcttagttagcctagttcatttctgctggtgttttattatgcaaatgtcttgttctggtttagtctgtcaccttttaggcaagaaaagagattttaaaaaaatctttctcacttctttagttcctttgcagatttttttttctctttatctccctcctcgtaaaattaagattccttgggaggacatagagggcagagatcttaccagagccccacccagatgcagaaagt

SEQ ID NO: 333301 - DNA, 596 bp, Homo sapiens
tggtgaggggcagggacgctcacctccagaacctactgtgtagcagactctctgcatttattattacagttaatttttggaactcagaaatgggcattaatgtccccattttaccaaagacagatgggaggaacagagggagaatgcctcattttggccattcatcctagtactaagtccactatatgggtgtggggctagggggttagggatcaagaccattgccaaagsttatgttgcagaataggtttttttctgaattccacattcatgctgattccaatatacccagacataggctcaaacctggaacttattaaaatgtgtgagtacctctgctgactgcaagctccacaacaccttttgcttagttagcctagttcatttctgctggtgttttattatgcaaatgtcttgttctggtttagtctgtcaccttttaggcaagaaaagagattttaaaaaaatctttctcacttctttagttcctttgcagatttttttttctctttatctccctcctcgtaaaattaagattccttgggaggacatagagggcagagatcttaccagagccccacccagatgcagaaagt

SEQ ID NO: 333302 - DNA, 596 bp, Homo sapiens
tggtgaggggcagggacgctcacctccagaacctactgtgtagcagactctctgcatttattattacagttaatttttggaactcagaaatgggcattaatgtccccattttaccaaagacagatgggaggaacagagggagaatgcctcattttggccattcatcctagtactaagtccactatatgggtgtggggctagggggttagggatcaagaccattgccaaaggttatgttgcagaataggtttttttctgaattccacattcatgctgattccaatatacccagacataggctcaaacctggaacttattaaaatgtgtgagtacctctgctgactgcaagctccacaacaccttttgcttagttagcctagttcatttctgctggtgttttattatgcaaatgtcttgttctggtttagtctgtcaccttttaggcaagaaaagagattttaaaaaaatctttctcactyctttagttcctttgcagatttttttttctctttatctccctcctcgtaaaattaagattccttgggaggacatagagggcagagatcttaccagagccccacccagatgcagaaagt

SEQ ID NO: 333303 - DNA, 473 bp, Homo sapiens
atagggaaggtagttgtcagaacatgatgaaataagaaatcctggggtcaagattttgaacgagtggtttgagcagacgttgcttgcttctaggaagattatacaacatgaggagaagggcacactgtgattcaggtgcaaaggcatcaattattgtgaaagaaagaccaggaagttgctgggtggcaggaatgtgaaggagtagaggaagctatagtccacgggtataaagcttagtatctgagcattggtcagtttttgcactagatggtggtacactcactcatcactgcatttcctacagtgatgkagcagcttgcacacagtaggttctcaacaaatgttggttgcttgaatgaaaaacaataatagcatctcttgggaatcaccgtatttagcatttcgtatatactaactaatctaatcttcaatataaccccatcaagaagttgttactattgttcttttcttct

SEQ ID NO: 333304 - DNA, 473 bp, Homo sapiens
atagggaaggtagttgtcagaacatgatgaaataagaaatcctggggtcaagattttgaacgagtggtttgagcagacgttgcttgcttctaggaagattatacaacatgaggagaagggcacactgtgattcaggtgcaaaggcatcaattattgtgaaagaaagaccaggaagttgctgggtggcaggaatgtgaaggagtagaggaagctatagtccacgggtataaagcttagtatctgagcattggtcagtttttgcactagatggtggtacactcactcatcactgcatttcctacagtgatggagcagcttgcacacagtaggttctcaacaaatgttggttgcttgaatgaaaaacaataatagcatctcttgggaatcaccgtatttagcatttcgtatrtactaactaatctaatcttcaatataaccccatcaagaagttgttactattgttcttttcttct

SEQ ID NO: 333305 - DNA, 575 bp, Homo sapiens
cctacatctgttccttgggaacatataataaaataaaatattgccactgcttttgaggtcagcaagggttttctcaaaacttaatttttctattattcaattagtgtttgcttttgcctcatgcaaaaaaagaagtataacaaaatgtgaagtgaaaataaattctacaagtgcacaagaatattttcctagtattaaggcttggatttacaaaaaaaaaaaaagygtgaattgtagaagtagaacaggcttagacttgcactaaggctccatcaggccagctttgtgagcttgagctatgtgttccaatctctgcctgcatttccctaacatgagaatgggaacaacaatcactatcccgggagagtagtttgaattaacagatatatgtataaattcagaatattttatggcacattggataaatgacttcctagtctctggacttcacctttcttacctataaagcagagattgtaatgatacctgatcagtcagtcaagttgtgttacagtctcattgcagtgactgggacatgctaaaacctccataaatatgagctctccttcctcttc

SEQ ID NO: 333306 - DNA, 575 bp, Homo sapiens
cctacatctgttccttgggaacatataataaaataaaatattgccactgcttttgaggtcagcaagggttttctcaaaacttaatttttctattattcaattagtgtttgcttttgcctcatgcaaaaaaagaagtataacaaaatgtgaagtgaaaataaattctacaagtgcacaagaatattttcctagtattaaggcttggatttacaaaaaaaaaaaaagtgtgaattgtagaagtagaacaggcttagacttgcacyaaggctccatcaggccagctttgtgagcttgagctatgtgttccaatctctgcctgcatttccctaacatgagaatgggaacaacaatcactatcccgggagagtagtttgaattaacagatatatgtataaattcagaatattttatggcacattggataaatgacttcctagtctctggacttcacctttcttacctataaagcagagattgtaatgatacctgatcagtcagtcaagttgtgttacagtctcattgcagtgactgggacatgctaaaacctccataaatatgagctctccttcctcttc

SEQ ID NO: 333307 - DNA, 538 bp, Homo sapiens
tgtcagctacatgaaagactgactggaggaggcacacagtcagggtgacagtggttttctggctttgcttcaaaatctccaaggatttgagaatcaaagctgtctaaccctatgctcagcctaaacactgggaacagaaactacactttattgcctgcgttaacttggctgtgctgttccactgtcttcattacacygtcttcattacattcattacttcattacatgctttacttttttgaggctgtcctggccaagtagatggatggatggttcattacacgaaattcctaaagacccactgagtctttaatggaaagcagcaacagagagtttgtaccctagcatcctttgagtccttcacctcaaaatcctgtccttactatttccactaatcatctttatcgtgattcttacccgatatttatcaagtcaccacattgaaagaccctccttaaaccaaacttccacatctcaattaattctgaccttacagaccccactcttagacaccgccaaaattctgcaaagatggcac

SEQ ID NO: 333308 - DNA, 586 bp, Homo sapiens
cctctggctaccaatgttccaatcatgagcctaatatttttctgattcttaatgctttgaaatgctttgaatataaactgtttttttccctgttcctttgtttgtttactagaagcatttaggattttcttttttycttcctgagtttttttttgagtcagagtctcactctgttgcccagactggagtgcagtggtacaatctcggttcactgtaaactccacctcccaggttcaagttattctcatgcctcagcctcctgagtagctgggattacaggtaagtgccaccacactcagctaatttttgtatttttagtagagataaggtttcccatgttggccaggctggtcttgaactctagatctcaggtgatccgcctaccttggcctcccaaacttctgggattacaggcctgagccactgcccctggccttcttcttgagttttaattgcagtgaaaactagttagaagttaactagacttttcatgtggaatgtgttgtttttgtaaggacaaaattcaatctcctagacatctcaagctcagtccttacttcttgggtaaaaaatgattgcctacata

SEQ ID NO: 333309 - DNA, 627 bp, Homo sapiens
tagagtgtattttttatgcgtcacatcaatcccacgtttcaagctgatagcaaatgggttacatcatttgaattgtgacctctgataaaatatcttattttgctaaacctattaggtgaatatttatcattctgtcatttagtgagggaaaataaggctcttagaaacagagccagagtttatgcaaccagtctgtgaagccacctggatgcaacactgaactacagtaaaataaccataattttgagctacatgccaggaattggggtgaactctcattgcaaatggtattttgttccatcttcctggtgatcttkactaaggtattatcctttcaatttttcaaaagaaatgggagtccagcatggttaagctatttatagagctaataagtgatgtgtttctgagggaaagagaaaaaaaaagtatttggtgtcagtttaaccctttttttcttttgcagcccatgaaattttgcttgtaaattctgatgcaaagcaaaccatttctatccttctctcacagtagagatcctcatttctttgatcaagtgccttctccagactcatcccattccaacaagcccatatggactgttggctgtatagattctgctaagctaagccc

SEQ ID NO: 333310 - DNA, 431 bp, Homo sapiens
tgtgatttttgtaaaatctgacaagatgacattaaaatttatttgaaaaagaagaaccaggtaggagaacttatattaccttattgcaagatacactacaactactacttacaagaattaagactgtgtgttattaacataaacacaggcaaataaattaatagattataacagagaacacataagtaaaccagataaaggctttagatatatactttcaagtggtctttcattgaggtgttgatatgatttggctgtgtccccacccaaatctcaccttgaattgtaatcatccccacatgtcaagggtggggccaggtgaagataatggaataatgggggtgatttctcccatacagttctcatggtagtgaataagtctcactagatctgatrgttttataattgggagttccctgcccaagctctct

SEQ ID NO: 333311 - DNA, 605 bp, Homo sapiens
aactcaatttcaatgaaaaatcccatgtgatttttgtaaaatctgacaagatgacattaaaatttatttgaaaaagaagaaccaggtaggagaacttatattaccttattgcaagatacactacaactactacttacaagaattaagactgtgtgttattaacataaacacaggcaaataaattaatagattataacagagaacacataagtaaaccagataaaggctttagatatatactttcaagtggtctttcattgaggtgttgatatgatttggctgtgtccccacccaaatctcaccttgaattgtaatcatccccacatgtcaagggtggggccaggtgaagataatggaataatgggggtgatttctcccatacagttctcatggtagtgaataagtctcactagatctgatagttttataattgggarttccctgcccaagctctcttgcctgctgtcatgtaagatgtgactttgctcctcattcaccttctgccatgattgtcaggcctccccagccatgtagaactgtgagtcaattaaacctctttcctttatgaattacccagtcttgggtatatctttattagcagcgtg

SEQ ID NO: 333312 - DNA, 553 bp, Homo sapiens
tggagtctacaaatactaaactcgtagaagcagagggttgaatggtggttaccaagggctgcaggaaggagaaagatgggaagatgttggctcaaagggtgcaaagtttcagttgtaagattagtaagttctggagaatatacagaatggtcactatagctaataatgttgtattgtacagttgaaatgtgctaatgaaactgcttttgcaaatgttttatcagggaaaaaatttaacagtaagctaagctaacccaatctccatattgcctttctcttaattattcctgggctattgaggggtgggagagtccaagagaatcttaaattggaaacacgtattgtttctatttgctgggaagggtgggctcataagggtgacaggacaakggtttgataagaaatatctcttcaaatcagagatgcacccaggaacccaaagtctcttgtctgtgacaggtaatgaggtagggtagaggcatgaatgacgtcagcctggatctgagccatcaggctggagttgtcaaaccagaatgaagaaaacaataaaagc

SEQ ID NO: 333313 - DNA, 514 bp, Homo sapiens
gactctataaactatgctaaggagtctgacagatcatagcaacagtcaaaaaggtcaaggatgaaaagtcaagaagggtcattatcaggtggaaaattctaaagctgctacatggggttagccatttgctgaggtctctttagaaatagtcttgtggatggtagggctcagactgtgcttgggtcttgtcaaacaaaaggagtcccccatgctggcatgtgcctgtaatcccagctacttgggaggctgaggcaggagaattgcttgaactcgggaggtggaggttgcagtgagctgagatcacactattgtactccagcctcggctacagagtgagactccatttcgaaaaaaaaaaaaagaaaatgaagtccccatgcttaagttacaccgttaccctaagaacttgacwtggtctggttgcgtcctcacccagatctcatcttgaaccgtatttcccattttccccaggtgtcgtgggagggacccgattgggggtggttgagtcactggg

SEQ ID NO: 333314 - DNA, 520 bp, Homo sapiens
tttcaacagttgtcactggtaaattcaaagatagcagaggttacttagatagtcagaatactatgaaagagggatcttctctaccttaggatggttaaaaaaaaaaaaaagaaaagaaacacctccaccagaccagctctgtcttcaaaactctgcacaatagtttcgtttcatcattawctgatactacctacaatgacttagtactcaatgttaagtacaagatacctatatttgcttcctggttgaataaaccaattctgtctcctatgatttaatttctgataatgtaggaacacacttatttcacatctaccattctcttgccactttaatatatcaggttatatatgtattggtacaatgagaatatcctaagtagtaccttaagagagtaccagccaaaatattaaaaattccactgaggaatcaaaaaaatccctagtaccttagattccatatgattagtaaagagaaatgaaagaaatacaagctcttgaggtttggcttgaaaaaatat

SEQ ID NO: 333315 - DNA, 580 bp, Homo sapiens
cctacaattttccaaacctgtagataaagatcttccctttctcaaaagtatgagtattttgatcttcccatggggaaccttatacaaacatgtgttgaaggtttctctagtttctttataaggtttggaaaactttcactgacatgctataaaggacatagtaaagaactttattattcttcttttaaaaaaaaaatagagacaaagtctcactctatcactcaggtttgaatgcagtggtgtaattatagctaactgtaacttagaactcctgggctcaagcaatcctcctgcctcagcctctcgagtggcaaggactaaaggctcatgtcatcatgcctgactgatttcttaattttttgtagaggtgggttcttgctaagttgcccaggctgktctcaaactactggcctccaatgtatcttccaccttggcctcacaaatttctgggattataggtgtgagccattgtgcccagccagatttcatcactcctttgtgaacctaattttccttcatatactttgttcccatttgacaagataatgaattttccaggtgttctcttccatgattaagg

SEQ ID NO: 333316 - DNA, 590 bp, Homo sapiens
tattggctatgctgatatggataattcatcaatgcatataagcatactttaaaaaaatgtttatatattattccttttttattattcacatttttatttttttatttttgaggcagggcctccctctgtcacccaggctggagtgcagtggtatgatatcagcccactgcaacctccacctaccaggatcaagcgatcctcccaccttagcctcctgagtgctagctatgactacaggcacacaccatgacacctgcctaatttttgtactttttgtagagacagggtttcgccatgttgcccaggctggtctcaaaatcctgggatcaggtaatccacctgcctcagcctctcaaaatgctaggattacaggtctgaacmaccgtgccaggcctacattattcttaaataaggaaaggtttattttcttatgagtatttcaaaccttgtgaccaacatattccagaattatgccctagaaaattttcatatatggctagtcaggttatgcagtgatttatgtttagaagaattcattacaaggttattgaaatagcaaataaattttaaatactgtaaatccaaaatta

SEQ ID NO: 333317 - DNA, 590 bp, Homo sapiens
tattggctatgctgatatggataattcatcaatgcatataagcatactttaaaaaaatgtttatatattattccttttttattattcacatttttatttttttatttttgaggcagggcctccctctgtcacccaggctggagtgcagtggtatgatatcagcccactgcaacctccacctaccaggatcaagcgatcctcccaccttagcctcctgagtgctagctatgactacaggcacacaccatgacacctgcctaatttttgtactttttgtagagacagggtttcgccatgttgcccaggctggtctcaaaatcctgggatcaggtaatccacctgcctcagcctctcaaaatgctaggattacaggtctgaaccaccgtgccaggcctacattattcttaaataaggaaaggtttattttcttatgagtatttcaaaccttgtgaccaayatattccagaattatgccctagaaaattttcatatatggctagtcaggttatgcagtgatttatgtttagaagaattcattacaaggttattgaaatagcaaataaattttaaatactgtaaatccaaaatta

SEQ ID NO: 333318 - DNA, 578 bp, Homo sapiens
gaactacagctgctcaggtctaatcagctgcttctgggatgccgttattttacctggggaagtcaggcattcagagagatggctggcctaattatagaataagctacatagagaaggcaccaaaacaaactgttgagggaggcaaggaaaagcattggaatcagatggctctgggcttacttccatctatgctgcatactatctatcatctcgaacaagtccaaaactgctctgccaccaccatattttggatctacaggatgagaataatagcacattcagatgattaagcctggcatagaaagatcaatcagtaaatggcatctkttaaaaatggctaactccgtgtcccatgctctttgttcaattacttcatcttcatctctgcatttatttggctgtgacagaaataagatagttatagccccacctgctttttaaggaaggtatccctgtgggcttggcccttaattttgcttgtcaaaatactatgttgcagagataagtcactaagtaatctatttaggtataatgaagttacattgtttatttgctgggtttgttgtttttgtttttgt

SEQ ID NO: 333319 - DNA, 549 bp, Homo sapiens
agaaacaggaaaggcattaggacaaaggccctgaaagcccgcctatggcctctagcgtaacttttccaaatcgttatgtctcctcctttggcctaagaacaactaagtccaggggatctattgtcatagcattctccagcagcttaaaagagagattctttcacttactgcaggaagaacaggaacccagccattccatgacaaacagacaggatgtgaggactactaagggttgaattgagtccacctgtgatacattgaagtcctaaccgccagtacctgtgatcatgaccctattacaaatagggctgctacagatggaatgaaggtatcatgacgtcattagggtaggccttaatttaatactgcctgtgtccctagaagaagagagccactggaaaacacaggcacacaggagaaygccatgtgctgacatacagacacagggagaacaccatgtgattatggaaacagacattggtgtgatttatctacaagaaaaggaaggccaagaatggctcacatacactaggaggtggaagagacaga

SEQ ID NO: 333320 - DNA, 590 bp, Homo sapiens
tttgcgtctcactgcaccactgcactgtgggcgcacccgttcttattgtaccctcagaacagtgtgcagcctagcacctgtaggaaggactcgatagaattttcttgaatggaaatagcagtgtacccttcaagaaagggtcactttggagttaggaaaaggatgaaatgctcagagataaagcagaggaatgtgttgaatggccagttgactttataattttcatttatttcttcaacttgttttcactgagtggctgcagcatcccctgaactgtgtactaaggtcccaaggatagaaaagacaaaacaagcaagttcccagaacttaaattctccagggaacagaatggcatatatgactggmtggatggatcaatgaatggacagatgatgtatgtagtgttattacagacaatggtagtgctacaaaagaagtgattggtactgcagtaaaataatggggaatgtagttcagcaaggaagtcagagaaggcttcttagcagtggtgaaattgaagcagacacttgaactaaaaggagggggaagggaagcactgtggaagctcttccaggtgaagtcagtgccag

SEQ ID NO: 333321 - DNA, 590 bp, Homo sapiens
tttgcgtctcactgcaccactgcactgtgggcgcacccgttcttattgtaccctcagaacagtgtgcagcctagcacctgtaggaaggactcgatagaattttcttgaatggaaatagcagtgtacccttcaagaaagggtcactttggagttaggaaaaggatgaaatgctcagagataaagcagaggaatgtgttgaatggccagttgactttataattttcatttatttcttcaacttgttttcactgagtggctgcagcatcccctgaactgtgtactaaggtcccaaggatagaaaagacaaaacaagcaagttcccagaacttaaattctccagggaacagaatggcatatatgactggatggatggatcaatgaatggacagatgatgtatgtagtgttattacagacaatggtagtgctacaaaagaagtgattggtactgcagtraaataatggggaatgtagttcagcaaggaagtcagagaaggcttcttagcagtggtgaaattgaagcagacacttgaactaaaaggagggggaagggaagcactgtggaagctcttccaggtgaagtcagtgccag

SEQ ID NO: 333322 - DNA, 226 bp, Homo sapiens
gtcaagaattgaggttaacctctgcctagatttcagaggatctatggaaatgcttggatgtccaggcaaaagtttgctgcaggggcaaagccctcatgaagaacctctgctagggcagtgcagaggggaaatgtggggtcacagcccccatacagagtccccactgaggyactgcttagtggagctgtgagaagagagccactatgcttcagatcccagaatggta

SEQ ID NO: 333323 - DNA, 508 bp, Homo sapiens
aattaaaaaatttacatattatatgaatatgtaatttacagaaaactcaaatgactagtcaacaaatgaaaagagaatcaaccttagtcrtaatgatgaaaatacaaattagacaagataatcactaaccaccctcacccaagccctcatgcatcaaattggcaagggaaaaaaagcctgaaaacatcaagtcctggtgaagtgaaattggtagtttttaacactgctagtaggggaatattgggctagtggtgaggtcagcagggggcatttttttaggatctaaaattgtttttaatatagaatacacattttaatatagaatacatatatagaattgtaactgtacaattctgcctctcagtatcttgctgagagaacactctgcttatgtgtacaaagaggcatgtctaaggatgttccctacagcatagctggaaatgtaaaaaaagtttgtccataggagactggctgaatcaagcctattatatcagtacctggactacat

SEQ ID NO: 333324 - DNA, 473 bp, Homo sapiens
tcatcagagcaaccatgtgagaagagtcagagagagcctgagcaagacagaagtcacagtgtttgtatcctggtcttggaagtgacatctgtcacttctgctgtattttgtttattaacagcaagtcaccatgtccagcccacacccaagggcaggggacaacacaaagatgcgatgtcargaggcaggaatggttgggagctgtgtcagaagctgcctcccacacatggccttgcagtatctacaccggagctcaagtgcattgtgcaggccaaaaagcagcaccttcacccggtgctacgtgatcactcacaacttgtcaatcaccatattttagctgattgttatggaaacgttgattccaaacttgaaaaagggaaaaatgatgatttctggaatctgtgatattctactagaatgcaaataagtctgactgatcccatttggaagctcttgagcagtgtgacaaatat

SEQ ID NO: 333325 - DNA, 473 bp, Homo sapiens
tcatcagagcaaccatgtgagaagagtcagagagagcctgagcaagacagaagtcacagtgtttgtatcctggtcttggaagtgacatctgtcacttctgctgtattttgtttattaacagcaagtcaccatgtccagcccacacccaagggcaggggacaacacaaagatgcgatgtcaagaggcaggaatggttgggagctgtgtcagaagctgcctcccacacatggccttgcagtatctacaccggagctcaagtgcattgtgcaggccaaaaagcagcaccttcacccggtgctacgtgatcactcacaacttgtcaatcaccatattttagctgattgttatggaaacgttgattccaaacttgaaaaagggaaaaatgatgatttctggaatctgtgatattctactagaatgcaaataagtctgaytgatcccatttggaagctcttgagcagtgtgacaaatat

SEQ ID NO: 333326 - DNA, 292 bp, Homo sapiens
attattacttgtaacacaactgtgttttggtgtttgctaaytgatcatgaataatttgcatatctctcattggtcctttattaatttttaattttactagaaggcttgagtagtactttcaaaatgattttgtaggcaataaattttctgacttctaatgcaaaagaacagaatcaatagccaagacaatcttgaaaaagaagaataaagttggaagtctcacacatcttgattttaaaacatactatgaatctatggtaatcaaagcatgtggtgtgggcaaaaagacaga

SEQ ID NO: 333327 - DNA, 292 bp, Homo sapiens
attattacttgtaacacaactgtgttttggtgtttgctaattgatcatgaataatttgcatatctctcattggtcctttattaatttttaattttactagaaggcttgagtagtactttcaaaatgattttgtaggcaataaattttctgacttctaatgcaaaagaacagaatcaatagccaagacaatcttgaaaaagaagaataaagttggaagtctcacacatcttgatttyaaaacatactatgaatctatggtaatcaaagcatgtggtgtgggcaaaaagacaga

SEQ ID NO: 333328 - DNA, 592 bp, Homo sapiens
aggtgagtctactgaaggcagcaggtagttcactggtgagttcttatttattttgcagttctgtatattttaagtggagcatttaggccatttacattcaatgttattattcagatgtcaggtaccattgcattcattgtgctatttgttgcctgtgtaccttggttttttcattttttgtttttgctttttaacttgtatttttgttttataggtcctgtgtgatttatgctttacaaagttttgttttgatatgtttctaggatttgtttcaagatttagagctccttttagcagttcttctagtggtggcttggtagtggtcaattctctctgtattttctgaaaggctgtatatatctatcatatatgatagraatttgctgcatacaaaattcttagctgaaaatggtttcgtttgaggatactgaagatagggccccagtcctttctagcttgtagggtttctgctgagaaatctgctgttagtctgataggttttcctttataggttacctggtgcttctgtctcacagctcttaagattctttccttcatctgaactttagataatctgatgacaatgtgccta

SEQ ID NO: 333329 - DNA, 531 bp, Homo sapiens
taactcacccttaaagcagtaagcacgatcaatgtaattgtgggcactcagcaagtaacatttattttccttagtgagatakataggggatttaggcccatgggaagaatctttttaactgcattcaaataaatttgaaaaccaagttaagatggataaatctctaggaaaatatgacctaacaaaattaaaccatatagagatagaaagactgggcagagcaatttccacaggaaaaaattagaggaaggtgtaaaagagctccctgaaaaagaaggaccaggaagattgattcgtgggtcaaatctaccaaccttcagatatcaaatggccctggtgctacttaggttaatccagagcattgaaaataaagtgaaactttccattttgttttatgtatataatattaactataaagcctgacaaagattacacataaaagtaaaaaccatagctcaatctagtttattaatattaatttaagaattttacagaaatccaaatgccatatgttcttacttaaaagcagga

SEQ ID NO: 333330 - DNA, 531 bp, Homo sapiens
taactcacccttaaagcagtaagcacgatcaatgtaattgtgggcactcagcaagtaacatttattttccttagtgagatatataggggatttaggcccatgggaagaatctttttaactgcattcaaataaatttgaaaaccaagttaagatggataaatctctaggaaaatatgacctaacaaaattaaaccatatagagatagaaagactgggcagagcaatttccacaggaaaaaattagaggaaggtgtaaaagagctccctgaaaaagaaggaccaggaagattgattcgtgggtcaaatctaccaaccttcagatatcaaatggccctggtgctacttaggttaatccagagcattgaaaataaagtgaaactttcmattttgttttatgtatataatattaactataaagcctgacaaagattacacataaaagtaaaaaccatagctcaatctagtttattaatattaatttaagaattttacagaaatccaaatgccatatgttcttacttaaaagcagga

SEQ ID NO: 333331 - DNA, 531 bp, Homo sapiens
taactcacccttaaagcagtaagcacgatcaatgtaattgtgggcactcagcaagtaacatttattttccttagtgagatatataggggatttaggcccatgggaagaatctttttaactgcattcaaataaatttgaaaaccaagttaagatggataaatctctaggaaaatatgacctaacaaaattaaaccatatagagatagaaagactgggcagagcaatttccacaggaaaaaattagaggaaggtgtaaaagagctccctgaaaaagaaggaccaggaagattgattcgtgggtcaaatctaccaaccttcagatatcaaatggccctggtgctacttaggttaatccagagcattgaaaataaagtgaaactttccattttgttttatgtatataatattaactataaagcctgacaaagattacacataaaagtaaaaaccatagctcaatctagtttattaatattaatttaagaattttacagaaawccaaatgccatatgttcttacttaaaagcagga

SEQ ID NO: 333332 - DNA, 560 bp, Homo sapiens
tttttttccttcatcaactgatgtgatcatgtgatttttctttttagtctgttaatatggtggattacattgactgatttttgaagatcaaaccagacttacatttctgaaatgaaccccacttaataatggtatataattacttttcaatattgatgaatcccatcagtaatattttgttaaagatttttgcatctatattcatgagggatattggtctatagttttatttgtttacaytgggtttgtctggttttggtatgagagtaattgtggcttcgtagaagtgtcggaaagtgttttcatttcttctgttttctggaagagacagtagaataggtgttaattcatatttaaatgtttggtagaattctccagtgaaaccatctaggcctggacatttctttggaggaggcttttaaattctgaatttaattttccatagttgtaggactatccaaatgaccggtttcatattagattaattaaggtagtttgggcttctcaaggaattggtccatttcatctaagttgctaaatttatatatgtagaattgttc

SEQ ID NO: 333333 - DNA, 560 bp, Homo sapiens
tttttttccttcatcaactgatgtgatcatgtgatttttctttttagtctgttaatatggtggattacattgactgatttttgaagatcaaaccagacttacatttctgaaatgaaccccacttaataatggtatataattacttttcaatattgatgaatcccatcagtaatattttgttaaagatttttgcatctatattcatgagggatattggtctatagttttatttgtttacactgggtttgtctggttttggtatgagagtaattgtggcttcgtagaagtgtcggaaagtgttttcatttcttctrttttctggaagagacagtagaataggtgttaattcatatttaaatgtttggtagaattctccagtgaaaccatctaggcctggacatttctttggaggaggcttttaaattctgaatttaattttccatagttgtaggactatccaaatgaccggtttcatattagattaattaaggtagtttgggcttctcaaggaattggtccatttcatctaagttgctaaatttatatatgtagaattgttc

SEQ ID NO: 333334 - DNA, 623 bp, Homo sapiens
atgtaaatcagcactgggatataagactcgatcagattcagattcaatttggggcacattttggtgctgtcttcttccatcagttggcactgagtatctgtctctgcctgtgatggtagcagccactgatgttcattgcctagacccagcaattcaagaggggttgcatatactggcagcataattcattcattcattctttatttattagctggaattcttaaagggaaacttctactaatctactatttggtcacccagtggtagacatctaatagaaaaggcaagatagatgcttatttrtgaccttttaattcatcattttacttggacgagttggttcactagcttccttccatgggatcaatttgttacttcttttttttgaagtattttgcattcatcaatttaaacatattttatgcatttcaatctatccaatatagagcagttgttgtctttattgatgcttaagtcctgaatcaagttcccttgacactagtgtagctgatagagtcttttctacatattttgtgtgacaaaatgtttcaggtcccttttctacatttactgttccggatctagaattcaacatttctccaaagaactatgactctttttta

SEQ ID NO: 333335 - DNA, 412 bp, Homo sapiens
gaatgccacagcatacacggtaatgcaaaagacttgcaggacagagagggagagagaacacaggccactcccaggtcgtgcccaggaagagctgtgtgcgctcctgcagagggctgaacaggccagacctcctagctaygcctgctagagcaaggatgctatggcctaggaccacaggatgaatccccaagactcagggctggaaaagcaggactggcagactcagaagcagagagctgagggacccaggggcatgagcactcacaggaaagggcaggagctccatgagatacagacgtccacaaaggtgccagcggggcagcgaggtgtggacaaacccagcagcattctctggacaccagcctgcacacacgtggggcacctgggaacctgcatagggacagctatgaga

SEQ ID NO: 333336 - DNA, 412 bp, Homo sapiens
gaatgccacagcatacacggtaatgcaaaagacttgcaggacagagagggagagagaacacaggccactcccaggtcgtgcccaggaagagctgtgtgcgctcctgcagagggctgaacaggccagacctcctagctatgcctgctagagcaaggatgctatggcctaggaccacaggatgaatccccaagactcagggctggaaaagcaggactggcagactcagaagcagagagctgagggacccaggggcatgagcactcacaggaaagggcaggarctccatgagatacagacgtccacaaaggtgccagcggggcagcgaggtgtggacaaacccagcagcattctctggacaccagcctgcacacacgtggggcacctgggaacctgcatagggacagctatgaga

SEQ ID NO: 333337 - DNA, 549 bp, Homo sapiens
ctgtggcaattctaagtgctcattaagctccttgtgcttgccccatgagaacattcatcagtaatatgtaactattccagggkacatggggaccattgctttacatttgcctggcagcatttctctttccacttctaatattagacccctcctctctgatcctaggcatggcccatgtccctgggaacagtagagactgaggcctgggtctcagtggcatcaattagagcctttccctgggactgatgtacgagtgtctctttctgttggcatctttaaatgagaagataaaaatccaggttatcattagccacattcactggtcaagaaaaaggcctctgcagaacacagctgagcagaaccacacagaagtggaagaagcaaagaggtttccagaagactgtgagtacttgattccaatctctgagcttctatttcaggcagttcttcctttgatccttcccaagttctataaatagaaatttccacttttgcttgtgttaatgaattgctctttatcatgcgtaatagagttctgacgaatatacc

SEQ ID NO: 333338 - DNA, 549 bp, Homo sapiens
ctgtggcaattctaagtgctcattaagctccttgtgcttgccccatgagaacattcatcagtaatatgtaactattccaggggacatggggaccattgctttacatttgcctggcagcatttctctttccacttctaatattagacccctcctytctgatcctaggcatggcccatgtccctgggaacagtagagactgaggcctgggtctcagtggcatcaattagagcctttccctgggactgatgtacgagtgtctctttctgttggcatctttaaatgagaagataaaaatccaggttatcattagccacattcactggtcaagaaaaaggcctctgcagaacacagctgagcagaaccacacagaagtggaagaagcaaagaggtttccagaagactgtgagtacttgattccaatctctgagcttctatttcaggcagttcttcctttgatccttcccaagttctataaatagaaatttccacttttgcttgtgttaatgaattgctctttatcatgcgtaatagagttctgacgaatatacc

SEQ ID NO: 333339 - DNA, 649 bp, Homo sapiens
tgggaacccataacttggtaggtaataaaataagcatagatttgaaaatcatgtcttaggactaaaggactccaaggaattttaaataaatgatttatctaaatgagtgattgtattaattgctatatctagaatttagcttatctgttaatacaccctggtgaattcagtratatggctcttccccaaggtgcctgtggccatcaggatgtcattcagacaggacgaaatatccacccccaaggctaaatgagaaacattatctcagcaaagctgcattctagcctggaaacatatgggcagagaagaaattaacaatgggagctggaggggcaagaagcatatgacattatcactaagaaaatccatttagatatttaagttacacactctagtgtcaggctgtttaaatggacctattgatctttcagtttcagtaaaattgctctcattttgattatactgtttaaccttgaagaattgtaggaaacatcttagttccagaactttcctttctccctacatattacattttaatcgtttcttactttccagctctctctcttattctctttcctccttccttccttccccacaaccctaaagcttatgatattatttaaggcgtcctgagtatctactacattat

SEQ ID NO: 333340 - DNA, 649 bp, Homo sapiens
tgggaacccataacttggtaggtaataaaataagcatagatttgaaaatcatgtcttaggactaaaggactccaaggaattttaaataaatgatttatctaaatgagtgattgtattaattgctatatctagaatttagcttatctgttaatacaccctggtgaattcagtgatatggctcttccccaaggtgcctgtggccatcaggatgtcattcagacaggacgaaatatccacccccaaggctaaatgagaaacattatctcagcaaagctgcattctagcctggaaacatatgggcagagaagaaattaacaatgggagctggaggggcaakaagcatatgacattatcactaagaaaatccatttagatatttaagttacacactctagtgtcaggctgtttaaatggacctattgatctttcagtttcagtaaaattgctctcattttgattatactgtttaaccttgaagaattgtaggaaacatcttagttccagaactttcctttctccctacatattacattttaatcgtttcttactttccagctctctctcttattctctttcctccttccttccttccccacaaccctaaagcttatgatattatttaaggcgtcctgagtatctactacattat

SEQ ID NO: 333341 - DNA, 545 bp, Homo sapiens
gggccaattaggaaagtcacaagtcttgtgacctccagccacatgactccttagcagtaagggattacagaaactgactacatttcaacagagttcaggcccctctcataatcctaatcttgtggcctttagtcttacaaaggtggttttcagtccctgagcaaggtgggggttagttttagggaaggactattatcatccttgctttcaagttaaactgtaaactaaatttctctcgtggttagcttggtctttacccaggaatgaccaagaacagcttcgaggtcagaagcaagatgaagtcaactatgccagatttcccttactattataattttgaaaaagcagtttyactttcagggaagtacagaattgatggtggccattttacaggtaagtcttcaaagtaatggcttactatcctcattctacagaaaaagaggttgaagttaaagagaaacccgtccaaaatcaagccataaagtagcagaattgagatacaagcctaagtttgaccccaaaactttatgcataaccactgtgat

SEQ ID NO: 333342 - DNA, 478 bp, Homo sapiens
agtcatctgtgaaggtagagaacatcattcagcacctctataacttgtccatatacaaaagttaggactcaattataaattaccattccgaaactgaaatagtgccaagaggaaagaaaaaaggaaagagaaagtagcaatatactcacagatgattcagatattgaagttcccagaaatggattctaaaattgctatgacttatatgttcaagaaagtagatgacaagatataacattttaccgcaaagggaaaagcaataaaaaagaagcaratagcaattatagaacccatggcttctgcttcagaccagattggagtaaaaggaatcagatttgacctcccactggaaacaaattttaaaatgagtaaatatatgagaaaatatattttcaagacattggagatcaataaatgaagaacagtaatccctaagagttatgaatgaaaataatggaagctctacaattgtccatat

SEQ ID NO: 333343 - DNA, 478 bp, Homo sapiens
agtcatctgtgaaggtagagaacatcattcagcacctctataacttgtccatatacaaaagttaggactcaattataaattaccattccgaaactgaaatagtgccaagaggaaagaaaaaaggaaagagaaagtagcaatatactcacagatgattcagatattgaagttcccagaaatggattctaaaattgctatgacttatatgttcaagaaagtagatgacaagatataacattttaccgcaaagggaaaagcaataaaaaagaagcagatagcaattatagaacccatrgcttctgcttcagaccagattggagtaaaaggaatcagatttgacctcccactggaaacaaattttaaaatgagtaaatatatgagaaaatatattttcaagacattggagatcaataaatgaagaacagtaatccctaagagttatgaatgaaaataatggaagctctacaattgtccatat

SEQ ID NO: 333344 - DNA, 617 bp, Homo sapiens
cagaattcattaaatgttgctgttttagtaatcaaaaccattaattgcaataaataaatttacccattccccatgtaatccagggtgatatggagtaattagtacttcatttcattgcttggaattgatatcaattaatttacttgccaggtaatttgttcaacctgtttaagaatttttccttgtaattctattacctttgtctaataatgtttaaaacataatgtaattaaatgataactaaaactactgtaaatcatatttagtgagtacagtgattgaccatcttkttttttctgtcagtgcagtaatttttttttttttcgagacagagtctcgctctgtcgcccaggctggagtgtagtgtcgtgatcttggctcactgcaacatccacctcctgggttccagtgattccctgcctcagcctccctagtagctgggattacaggctgtgccaccatgcctggttaatgttttttaaatgtttttagtagagaagggtttcaccatgttggccaggaggtctcagcctcccaaagtgctgggattacaggcgagagccaatgcgcccggcccagtgcaataattaaatacacaatctatgtcatatgtcagg

SEQ ID NO: 333345 - DNA, 550 bp, Homo sapiens
ttttggttctcatttaagggctacttaaatgtttctttcatagagcatgaggttcttgtctttctcaaggctgtgcctcacttccttcttgcactctgtcttgaagatgagcaggaaagctcctcagagccatctaaggtagccatcatttctcctttgccaaggaaacctttctccaatctgttcttgcctggataccaggaccaactccctactaagtaactgtgtccccttggagtgttgtgcagtacagatcagtgtctgccaaacatgtatccaaatgatttcgagatcatttaaaagtgcagttggattcagtaggtctagggtggagtctgagattatgcatttctaacaaaatcctgggtgatgtcaatgttgcaggtctgcggaccacattttgagtagcaaggatgatggaaacaaagagattaatctgcatgaaaaaattttgsatatttattggtgtcataatatctaccaaatcagggccatctagagatatctacaactgtgactcaacataaaggcatatatttttgagcaggac

SEQ ID NO: 333346 - DNA, 550 bp, Homo sapiens
ttttggttctcatttaagggctacttaaatgtttctttcatagagcatgaggttcttgtctttctcaaggctgtgcctcacttccttcttgcactctgtcttgaagatgagcaggaaagctcctcagagccatctaaggtagccatcatttctcctttgccaaggaaacctttctccaatctgttcttgcctggataccaggaccaactccctactaagtaactgtgtccccttggagtgttgtgcagtacagatcagtgtctgccaaacatgtatccaaatgatttcgagatcatttaaaagtgcagttggattcagtaggtctagggtggagtctgagattatgcatttctaacaaaatcctgggtgatgtcaatgttgcaggtctgcggaccacattttgagtagcaaggatgatggaaacaaagagattaatctgcatgaaaaaattttgcawatttattggtgtcataatatctaccaaatcagggccatctagagatatctacaactgtgactcaacataaaggcatatatttttgagcaggac

SEQ ID NO: 333347 - DNA, 604 bp, Homo sapiens
ttaattttattttaattaattaaaataaaatttctgtcacccaggctggagtgcagtgccatgattatggctcactgcaactttaaactcttgggttcaagtgatccttctgcttcagcctcccmagtggctgggactataggtttgcaccaccagactccactatttttttttaattttgtagaaatgaggtctggctatgtttggccaggcaggtgttgaactcctggcctcaagtgatcctactgctcagcctccaaaagtgctaggattacaggcatgagctactgtacccactctaaattatatttaagcaaacacacgtggctactatatgagataacaaatgtctagccagaaactttgttttaatgagaattgtaaaggttctttcaactcttatttttctccccagtctggcatcactgtttctccccaactcttgtttatctctcaaaatgcaatccttagatatcagcaataaagacatctgcaaagtatatcttccatgaaagcaataagaatagctcaacaaattgcatgtaggatcactcaaagagatctatttctagatattacaattaaattgttgaaagccaaagac

SEQ ID NO: 333348 - DNA, 604 bp, Homo sapiens
ttaattttattttaattaattaaaataaaatttctgtcacccaggctggagtgcagtgccatgattatggctcactgcaactttaaactcttgggttcaagtgatccttctgcttcagcctccccagtggctgggactataggtttgcaccaccagactccactatttttttttaattttgtagaaatgaggtctggctatgtttggccaggcaggtsttgaactcctggcctcaagtgatcctactgctcagcctccaaaagtgctaggattacaggcatgagctactgtacccactctaaattatatttaagcaaacacacgtggctactatatgagataacaaatgtctagccagaaactttgttttaatgagaattgtaaaggttctttcaactcttatttttctccccagtctggcatcactgtttctccccaactcttgtttatctctcaaaatgcaatccttagatatcagcaataaagacatctgcaaagtatatcttccatgaaagcaataagaatagctcaacaaattgcatgtaggatcactcaaagagatctatttctagatattacaattaaattgttgaaagccaaagac

SEQ ID NO: 333349 - DNA, 565 bp, Homo sapiens
cccaggctggagtgcagtgccatgattatggctcactgcaactttaaactcttgggttcaagtgatccttctgcttcagcctccccagtggctgggactataggtttgcaccaccagactccactatttttttttaattttgtagaaatgaggtctggctatgtttggccaggcaggtgttgaactcctggcctcaagtgatcctactgctcagcctccaaaagtgctaggattacaggcatgagctactgtacccacyctaaattatatttaagcaaacacacgtggctactatatgagataacaaatgtctagccagaaactttgttttaatgagaattgtaaaggttctttcaactcttatttttctccccagtctggcatcactgtttctccccaactcttgtttatctctcaaaatgcaatccttagatatcagcaataaagacatctgcaaagtatatcttccatgaaagcaataagaatagctcaacaaattgcatgtaggatcactcaaagagatctatttctagatattacaattaaattgttgaaagccaaagac

SEQ ID NO: 333350 - DNA, 436 bp, Homo sapiens
actcatgttcatagcagcagcattcttaatagtcaagggattgaaacaatccaaatgtctatcaacaaacacataaacaaaatgtgctatacacataaaatggactattgtttggtcttaaaaagaaggtaattctgacacctgcagcaacatagataaaccctgggacrttatgttaagtaaaataagccagtcgaaaaagaacaaatactgtatgattcttcttacatgagcttcctagagtactcaaattcatagagacagaaagaaaatgatggttgccagaggatgggggaaagggaaaatgggggagttatttttctttaattattttttaatgagtacagactttcagttttgcaagatgaaaagagttctggagatggatggtgatgatggttgtataacagtgtgaaagtacttaaagacattgaac

SEQ ID NO: 333351 - DNA, 631 bp, Homo sapiens
gacccattcccaagcagcaataaaagccaattagcatggtattcaaattatgattatgaatgtgatcacctccctcatcggcattaatattataacaattaaaaaaagcacagtaaggaatgaatcaggcaagtcctcctgcacagttgccttatttccttgctgttgttgagaaatttaatattccacaaaagtggcttttaaagaatgtgagctttgaaatttgaaagcctgagatgattgattctcatttgttactaattgtgtctgtatctgagactaatgtccccatctgcaaaatgggaatgacagcagccatttgcaggactttgttaagattagaattgctataygtgaaggatccagcagagggctagacacactggagtcatgcagaaagtggcagctttagtccagaatacagaggtctgtattcatgggatattagaagtaaaccctgggctcatcaattccctcctgccattttcagtgtggaaacctattttactgtgtacaagtagtatcttccaatcactgcttgaacacatttattgctacagaatgcatttcctcgtggggtaccacagtttcattgccagaacaggcagaaatgccctccttattgactccc

SEQ ID NO: 333352 - DNA, 631 bp, Homo sapiens
gacccattcccaagcagcaataaaagccaattagcatggtattcaaattatgattatgaatgtgatcacctccctcatcggcattaatattataacaattaaaaaaagcacagtaaggaatgaatcaggcaagtcctcctgcacagttgccttatttccttgctgttgttgagaaatttaatattccacaaaagtggcttttaaagaatgtgagctttgaaatttgaaagcctgagatgattgattctcatttgttactaattgtgtctgtatctgagactaatgtccccatctgcaaaatgggaatgacagcagccatttgcaggactttgttaagattagaattgctatacgtgaaggatccagcagagggctagacacactggagtcatgcagaaagtggcagctttagtccagaatacagaggtctgtattcatgggatattagaagtaaaccctgggctcatcaattccctcctgccattttcagtgtggaaacctattttactgtgtacaagtagyatcttccaatcactgcttgaacacatttattgctacagaatgcatttcctcgtggggtaccacagtttcattgccagaacaggcagaaatgccctccttattgactccc

SEQ ID NO: 333353 - DNA, 434 bp, Homo sapiens
tgaaccaatttttaccatcagcaataatacaccttattgaaatgcttttatagataatttttttaggaaatatagccaactgtttgatagcacaggctttggagctaagctgtctgggttcacatcctagccccatcattgactagctgtgtgaccttggacccattaacctcttggtggtttagtgttctcatcattaaatgtggataactcctatctcttatgttgctgtgaatggtagctattatggaattctattcatttcattttcatttttatatgaaatatttcaagccctctcttagcaggctataatgtacaaagccctttcccagcctagtgaagcatgcctgratgtctgtttaaacaccaaaacccctgttaaattgatcatttgatccacaactttgtgcagtgcgttacatctttccata

SEQ ID NO: 333354 - DNA, 492 bp, Homo sapiens
gcgttacatctttccatattcacatgatagcaaaattccctttctttccagcatgccaatgaggaaacagaggcttagaagggtgaggtaagggaacttccttctccacagtcacccagcttgtactagattggtacaaaagtaattgcaccaacctaatatgtagagagccagaaattacaaaaagcctgcagatgccagagcttaggcacttaaragggctctgtttttgtttctgcggcgtgagccactggtaggcagggaaagaaagccagaaggcttgagagcagagctgcgagagcctgggaccttggatttaggattggttagtgcaagaagtaacagtgctaaccagatttcatgggcatggcaaaattgtttcatcaggtggcacccagaaggttcagactttgatgctcagcaatcggaggagaattatgcagatttctactggtaatggcagaaccttcatgtggacctggtgctgtgata

SEQ ID NO: 333355 - DNA, 492 bp, Homo sapiens
gcgttacatctttccatattcacatgatagcaaaattccctttctttccagcatgccaatgaggaaacagaggcttagaagggtgaggtaagggaacttccttctccacagtcacccagcttgtactagattggtacaaaagtaattgcaccaacctaatatgtagagagccagaaattacaaaaagcctgcagatgccagagcttaggcacttaaaagggctctgtttttgtttctgcggcgtgagccactggtaggcagggaaagaaagccagaaggcttgagagcagagctgcgagagcctgggaccttggatttaggattggttagtgcaagaagtaacagtgctaaccagatttcatgggcatggcaaaattgtttcatcaggtggcacccagaaggttcagactttgatgctcagcaatcggaggagaattatgcwgatttctactggtaatggcagaaccttcatgtggacctggtgctgtgata

SEQ ID NO: 333356 - DNA, 546 bp, Homo sapiens
agtttaatagtcaaatttttggatgcaagtgacagtagaataaatttgagttggcactgggtcttatgatgaccttcagatcatattatataagtagtcatctccttttattatcattactcttattactactattattattactctttttcctcattgttttcctctgtttcctcattggcatgctggaaagaaagggaattttgctatcatgtgaatatggaaagatgtaacgcactgcacaaagttgtggatcaaatggtcaatttaacaggggttttggtgtttaaacagcaaataaataaaataaacatattattattattatggctcttaggactgcatggatrgaactgcccagctgaggctccctgaattaagacttgttcctgaaccacaacctactagataggaacattctaagactggacctcaaggtggtgtaaagtgatcattctgcggaccccgagcattatcttgaattttttccttagcattacaaagccaacacactgagctgaggtagatcctaaacccaaacctctt

SEQ ID NO: 333357 - DNA, 586 bp, Homo sapiens
catattattattattatggctcttaggactgcatggatagaactgcccagctgaggctccctgaattaagacttgttcctgaaccacaacctactagataggaacattctaagactggacctcaaggtggtgtaaagtgatcattctgcggaccccgagcattatcttgaattttttccttagcattacaaagccaacacactgagctgaggtagatcctaaacccaaacctcttatctccaaattccactctattttggcagccatttgtgtgacgtgaattyatgtccaaacactgaaactattttattaagatacctgaaaattttcccatattaagttaaagtttcaatcagtttgtctcacagacttcctacgttccaaaagaattctaatgaaaaaggccatcatgtgagtgtctgattccatttatatgaaatatgcagaaatgtctgaaataagctaattcatagagacaggaagaaaattagaggttgccaggggctgggaggaggaacagcgagtgacaatttaatgggtacagagtctccttttggggttatgaaaacattctggaactagacag

SEQ ID NO: 333358 - DNA, 570 bp, Homo sapiens
tgattgacacaagcccttcagctttcaagaactttgctttcaggtatgttttgatgtttcaggggtgatacatgctccctaaaagtctgatattactgagcacattgcctggcgtgagttttattctctgccagtctgtactctactgtcctgccagcactgtcatgctggatgttcaaggctcccctgggcatggactgctctgaccaggatcaccactaatgagtggattcctgagaaaaatactgcttgagaagtacacaagcagtactgtcttgggaccaccccatcaacagagcacaacagaaaagtgaagacatgcatttcttccccgtgttagctgcttgtgtcctgatctttgacaggtatttagagaaacagcaactccagaggcactcatccatggggtggtgtggtgggcatagtcacctgagagtaaaaacattgcacttaaaaataacttctcatgaagctgcttctgccaaagtggagtttccccatttccccaagttctctttcttacarcaaagacctcctagacttaacacaataatccacatagaaattatt

SEQ ID NO: 333359 - DNA, 549 bp, Homo sapiens
tttttttgtttcatttattttttgtatttttttgttattgtttgtttagttggttgtttcaatttcatttaattctgctctgatcttggttatttcctttcttctactgggttggagtttggtttgttcttgtttctctaattcctgggggtatgaccctagattgtctgcttgtgttctttcagactttttcatgtaggcatttarggctatgaactttcctcttagcaccgccttagctgtatcccagaggttttggtatgttgtgtcactattgttattcagttcaaagaattttttaatttccatcttgatttcattgtttacccgatgatcattcagtaacaggttacttcatcttcatgtatttgtctagttttgaaggttcttttggatttgatttccagttttattccactgtggtctgagagagtgctgcatataatttcagttttctgaaatttattgagactcgttttgtggcctatcatatggtctacactggagaaagttcaatgtgctgatgaacataatatatattatgtggtt

SEQ ID NO: 333360 - DNA, 632 bp, Homo sapiens
ttttggtgggatatccaagaaacaacagttaaatccaatgccataaagctctctcctgtttccttctaagagttttatagttttagctcttgtagttagctctttgatccatttttagttaatttttgtatgtggtatgaagtaagagttcagcttcattctttttcatgttgaatatctagttttcccagcactatttatttaagactgtctctttcccattgaatggtcttggcaacactgatgaaaatcattttgccatgtatgtgagggtttatttctgagctctccattcttattctaccagtctatatgtctgtctttacgccagtaccacactgttttcattactgtaggtttgcactaagtgaaaatattttcacttcttaaagaagggatgtgagtaatcttgtctctggggataacaaacttggaagaaacattcctagtcagtttcatgaatgctgctattctaagccctgggaataaagatccagataggagaaatagacaaggtcactagaggagagtgatcaaactacagaggcatgtgataaaaagctgggyttgacctgtgaaagccattctttggctctgttgccatcagatgaatgaggccttttgttattggc

SEQ ID NO: 333361 - DNA, 563 bp, Homo sapiens
caaaggtttggcggcagagggataagatcaactgaaaaaaaaaaaaagttgactttagaaaagagaggagcagartctgtaaaattttttcttagactggtctgttttgaaactcacctttgtatttgttatttgtgagtaagacattaggctttatgttctcaaatacattttaagctgagtagcccttgcaaatccatctcacttaggctaagttgggggcagaaacagcccttttccctttcagcttcctcccaaaagcttagccaaactatttctaaatacacatctcattctcaacttttcaattgagctatcttatatacttgagtggggaaatgggctaatgatagtctatttgattatgtaattccttaaactgtcttgtatgtgtggcctatcatctaggtcacttagccactattgaagttttatgtattgaaacaccctgttactcaagcatgcctcctattctctgtgaccatgctactcaaatgtttgcttgcataggaatcattccttgtcaggctgacccatgccccaaagatgtccctgtcctgatc

SEQ ID NO: 333362 - DNA, 563 bp, Homo sapiens
caaaggtttggcggcagagggataagatcaactgaaaaaaaaaaaaagttgactttagaaaagagaggagcagagtctgtaaaattttttcttagactggtctgttttgaaactcacctttgtatttgttatttgtgagtaagacattaggctttatgttctcaaatacattttaagctgagtagcccttgcaaatccatctcacttaggctaagttgggggcagaaacagcccttttccctttcagcttcctcccaaaagcttagccaaactatttctaaatacacatctcattctcaacttttcaattgagctatcttatatacttgagtggggaaatgggctaatgatagtctatttgattatgtaattccttaractgtcttgtatgtgtggcctatcatctaggtcacttagccactattgaagttttatgtattgaaacaccctgttactcaagcatgcctcctattctctgtgaccatgctactcaaatgtttgcttgcataggaatcattccttgtcaggctgacccatgccccaaagatgtccctgtcctgatc

SEQ ID NO: 333363 - DNA, 563 bp, Homo sapiens
caaaggtttggcggcagagggataagatcaactgaaaaaaaaaaaaagttgactttagaaaagagaggagcagagtctgtaaaattttttcttagactggtctgttttgaaactcacctttgtatttgttatttgtgagtaagacattaggctttatgttctcaaatacattttaagctgagtagcccttgcaaatccatctcacttaggctaagttgggggcagaaacagcccttttccctttcagcttcctcccaaaagcttagccaaactatttctaaatacacatctcattctcaacttttcaattgagctatcttatatacttgagtggggaaatgggctaatgatagtctatttgattatgtaattccttaaactgtcttgtatktgtggcctatcatctaggtcacttagccactattgaagttttatgtattgaaacaccctgttactcaagcatgcctcctattctctgtgaccatgctactcaaatgtttgcttgcataggaatcattccttgtcaggctgacccatgccccaaagatgtccctgtcctgatc

SEQ ID NO: 333364 - DNA, 563 bp, Homo sapiens
caaaggtttggcggcagagggataagatcaactgaaaaaaaaaaaaagttgactttagaaaagagaggagcagagtctgtaaaattttttcttagactggtctgttttgaaactcacctttgtatttgttatttgtgagtaagacattaggctttatgttctcaaatacattttaagctgagtagcccttgcaaatccatctcacttaggctaagttgggggcagaaacagcccttttccctttcagcttcctcccaaaagcttagccaaactatttctaaatacacatctcattctcaacttttcaattgagctatcttatatacttgagtggggaaatgggctaatgatagtctatttgattatgtaattccttaaactgtcttgtatgtgtggcctatcatctaggtcacttagccactattgaagttttatgtattgaaacaccctgttactcaagcatgcctcctattctctgtgaccatgctactcaaatgtttgcttgcataggaatcattccttgkcaggctgacccatgccccaaagatgtccctgtcctgatc

SEQ ID NO: 333365 - DNA, 546 bp, Homo sapiens
atcttttcttgcgatcgttggtcatttgtatatcttctttgaagagctgtctattcaaatactttactcgttgcttaactgggttacttgcaattatcttttggctaatgagttcatcagctgggagtgtccatctagatagaaatgtaacctgtttttttcttgataccttatccttaccaagtgtatgatttgcatatactttctctcattctgtaggttgttttttactttcctgattgtgcagcacagtttttcaaaacattttaatcaaacctaattgatytacttcttttgggtcacttgggcatttgatatctatcattcattaagaaattattgcctaatctgaggtcacaacaatttacagctatgtttttgttttttctaaaattgtactttaaattttgcattgacatttatgtctatgagccattttgagttatttctgcatatgacttaaggtgggggttcagcttcattgatttctaagtaaatatctacttgtctcaacactatttcttaaaaagactatttttccccatt

SEQ ID NO: 333366 - DNA, 590 bp, Homo sapiens
ctccccaatattaaggcctgccacaaagccacagtgatcagtggtgtgttattggtggaaacagattataggagcatcatgttcttatgccactgtgcagtaacagaccaataccctgacatggcagggtttgctgcagaggaagaatttaatgaatgcagggcaccaagcaaggagatggtaccctttggaatttgaaaccctcaaatccatttctccaaggagttattgcttggggcttttaaggggatcatggagggtgaggggctggaaaattgagatcactgattggttaggataaggggaatgaaatcatcaggatgtggtgaccccattctttgatgagtcagcttctcacagggtcccacagacagytggtataagtggggtcctttacaccagctgatatcagtggggttcttcataccaactgagtcagtagtttcagcagtatgcagaagatgaaagaatagctcaaagggaaaatttaacatttcatgatgttcaagttgttatctatagagcaggtaaggagaactataattatgtaactgtgtctgggtggttctttttttgtttgtttgtttttt

SEQ ID NO: 333367 - DNA, 575 bp, Homo sapiens
gcctttgagcatcagtaggaaattgatttgtatgcctggacttagtctcataaaatgtcacatgtgctgtcttctcctagaacacactccatacatgcttcctagagatttaggttagtgctggctccagttatggtctgtgtttatttaactgttcatttaatttcatagttcctaactaagaggaagttcctaactattggaagagtcatgtgtgtgtcccagaagctgcttgtttttgctgggtggtgtgctgttgctggtttgtactgggtcaggagagctgtattttaagttattgtgacttctgaaagccattaaaaaacaaacaaacaaaatggtggcttgatatttattggccatgttaccrtattcccaagtacattgacaccatggaaatctgcagaagctaccaatcggggctccctgctctactacctgtcctggccaagagccagctgtgaagcctctatctgtgtcagcttagccacgctttctaacttccacacatgcatccatatccaggtgagatgaacatccatttccattttgattctcactggtgcatgcagggt

SEQ ID NO: 333368 - DNA, 568 bp, Homo sapiens
aggatgggagcctggggaatgtgcttgtgctatttctttgaaaccaacagtacaaagggttggaggctggataagggtatggttagatagaaggttggttatggtgtctgtatcctccagagttgcagaaggaatacatgacatgatcaacacagcttttaattaaatagatttgtaaggaaagtcccatttacctgaaatggaatagagtctttggaaagacccaaagatgcaggtggagctaaggaaataatagatgscaaaacaaccagagagtagtgacagtgggaagctgttcctactcttggtctgaaggagaatgggaagggtcatgtcaccagcactggtgacagttgtagctgtgttagagaaactgcccagagaagccatgagggaacatgtggatacacagattccccctcctttctgctctctgctcatctcccacaggctcctcccatcttctcatctgcagtgctacatcttgttatctatagccaaccaaaagctggaaggcaagggggtgcacctgatgcagtgcatggagatcagcctctccggacaaaga

SEQ ID NO: 333369 - DNA, 484 bp, Homo sapiens
tacatgaatgaaagatcaatggcagttgtctaatttagacattctcttgagaccctggtgtgtacttgagattggtcaaaaggtttgaactcatgcaaagcaaatatgtttattcttacaatctttttacccatcatgagtgtatttactttgctttcagtaatgttcattccacactttatagtccaaagcttattcttcttgacagggaaraaaaaaagcaaaataggagtcaagcagtttcattgcaccagtatagttcaataatgtttagttaatgttttgtttgtgtgtttctctaaatgtacctaaaaggtacatgtatatgcatgtacatgtatgcccatgtatggaaacattctttttcggaaccattaaattaccttggcgtcttaatctgtttgtgctgctattaatataaaggaatatctgagacttggtaatttataaataaaaaaggtttgttttacttatcactgtgctg

SEQ ID NO: 333370 - DNA, 587 bp, Homo sapiens
tagtactggcaagacatgaaagctgtgtatatggagggctgccttttggcactcatgggttccacagcactgactgaaggacttgagtatatgcagattttggtatatgcagtggtcctaaaaccaatcccccatgtatactgaagggacgattgtaccagtaagagaatgttcaatacccagagagatgctgtattagctaggatgctttcagctgtgagtaaaaaaaaaaaaaaaaaaaaaaaaattaatgctggtttaaactatacggacattcgtcaattagttaacaggtagtcaacagacgggaagtctcagcgttggttcagcaaccaatgatgatatcaagaagccaagtgcttttcaatctctgtttctttcctcctttttatttttgagtagattgttttctttagttttttaaactgtaaacccattrccttatggttgcaaaatggctaaagagctccaaacatcacaatcttacgtgtccacaaccaaaggcagggcgcagaaggagcaaaacaagagagagctcttcttccttccttctttccttcccaacaaggaaaactcttggtcagaag

SEQ ID NO: 333371 - DNA, 587 bp, Homo sapiens
tagtactggcaagacatgaaagctgtgtatatggagggctgccttttggcactcatgggttccacagcactgactgaaggacttgagtatatgcagattttggtatatgcagtggtcctaaaaccaatcccccatgtatactgaagggacgattgtaccagtaagagaatgttcaatacccagagagatgctgtattagctaggatgctttcagctgtgagtaaaaaaaaaaaaaaaaaaaaaaaaattaatgctggtttaaactatacggacattcgtcaattagttaacaggtagtcaacagacgggaagtctcagcgttggttcagcaaccaatgatgatatcaagaagccaagtgcttttcaatctctgtttctttcctcctttttatttttgagtagattgttttctttagttttttaaactgtaaacccattaccttatggttgcaaaatggctamagagctccaaacatcacaatcttacgtgtccacaaccaaaggcagggcgcagaaggagcaaaacaagagagagctcttcttccttccttctttccttcccaacaaggaaaactcttggtcagaag

SEQ ID NO: 333372 - DNA, 575 bp, Homo sapiens
catccaccttgctcttttggatcactcaccctgggaactagctgctgtgttatggggaactcaagaagtcccacagagaggcccaagcgctgagaaactgaggcctcctgccaacagccagcgccagcttgctagccatgtgagggagacacctatgaagcagaacttctgcccccagtccagctctcagatggctgcagccacccactgacagtttgactaccacctcatgagggcccccaatccaaaattccctggcaaagccactcctgcattcccacacacaaactgtgtgagataataagtgtttgttgttttcttaggttgccragttttggagtaatttgttatgtagcaacagattaaaaaatatggtgttattttcttttcatatatataatttttatttttaatttttgtgggtacagagtaggtgtatgtatttgtggggtacatgagatgttttgaaacaggcatgcaatgtgaaataatcatggagaatggggtatccatcccctcaaggatttatcctttgaatgcaatccaattatattattttagtattttattttatt

SEQ ID NO: 333373 - DNA, 473 bp, Homo sapiens
ttaaacattgctgtgaagctaaagcatccttggaaatgtgccaacgtggaaccaactctatttactagaatttctctctaggagaatatagtataatatgtctggaaaaaatgttctgacattttctggggagtatttgagtaacaaggggtagtaaatatggtgacttacaaagtgcttccttttttgctaggcaggtatgcaagttgggggccagagcagagttgttggggacaataaaatggaagctgagctgctacgaatactccccattcttcctatttccctcaaatcactgtcagtgtctcctcacgtagcacagtctcctctgtakctaggtgtgcttgtgcgtctgagctctcaccacggagatgtaagcagaatttttgtataggactgctgggaaggctttataaaatgtagaggatgtgaatactttttttgcccttccttggttcctccttcatgctgcc

SEQ ID NO: 333374 - DNA, 549 bp, Homo sapiens
ccaatcaaatgcagatacaaaatctctggggaaaaaaatagaaaataacaataaaacaatacaaataatacaaaaaaatatagtgtaacaactatttacatagttttacattgtattaagtattacaagtaatctagagatgatttaaagtatacaggaagatgtgcatgtgttatatgcaaatactatgccattttatataaggaacttgagcatctgcagattttgatatctttgagggtcctggaaccaatccccttcagatcctgagggattattatatttgcttttcaggctttaagcagtcttgaatttgaatctgagctcctcacttcttggcttaagcatgtctatgaatcttctgagaccatctcctcatctgcaaaatgtgggtattgaaacayactttacaactacatatgtatgttgtattatgtatctgttcttatactgctataaaaagagactgggtaagttataaagaaaagaggtttaattggctcacagttctgcaggctgtacaggcagcacaatgctggtatctacttg

SEQ ID NO: 333375 - DNA, 549 bp, Homo sapiens
ccaatcaaatgcagatacaaaatctctggggaaaaaaatagaaaataacaataaaacaatacaaataatacaaaaaaatatagtgtaacaactatttacatagttttacattgtattaagtattacaagtaatctagagatgatttaaagtatacaggaagatgtgcatgtgttatatgcaaatactatgccattttatataaggaacttgagcatctgcagattttgatatctttgagggtcctggaaccaatccccttcagatcctgagggattattatatttgcttttcaggctttaagcagtcttgaatttgaatctgagctcctcacttcttggcttaagcatgtctatgaatcttctgagaccatctcctcatctgcaaaatgtgggtattgaaacatactttayaactacatatgtatgttgtattatgtatctgttcttatactgctataaaaagagactgggtaagttataaagaaaagaggtttaattggctcacagttctgcaggctgtacaggcagcacaatgctggtatctacttg

SEQ ID NO: 333376 - DNA, 582 bp, Homo sapiens
gggaacagtatttgggagatgggaatgttgacagtagatggtgaacataagctccccaaaacagaggtttctgtttaaattgctttatgctgtatgtatgccagggcctagaagaaaaaaaatacctgccacatatactattcccaataaatatttgttagaggaatgaatatataaatgatttaaattaaataaagaacaaattatctagtagctcaagattaaagaaaagggtacattcagcttagattaaccaaattatatgttgcatctttcaggtgctttgtgggtgaggtataaagttgattaagaaaattgttcataggaatccaaactgattgtaggacctgtcattatggtctccatgtatttatcatatctcattgagattcttccagtaacttcctttctcatatctctgcactaataatctctttcaatttcaattyacacttctcattgaacagagactgtagtacccaagagaaaaacaaaaagagtattatataatgggagagtatattgcattaactctttcatttcttttaataataataaagatgttgtactttactggttttt

SEQ ID NO: 333377 - DNA, 619 bp, Homo sapiens
aggaatgaccaaggacagctgggaggttaaaagcaagatggagtcaactatgtcagatttatcttactgtgtaattttgcaaacgtggttttagaattccatggtctggggaaatttaatctgtgcagtggtcaggaagaactcattacactatctgtgtcagaatttgatcagagaagcagatccctatgagtgacacaatgaaaggaaattgttatagggattagatataacacaattgtgagggctggtaataagtctatacaaggctgttaactttatgtctaatgggaccctgaagtcatgataggtcaccctaaccagtggtcaggaaagagagctccatataacttggacaggagcaaagraaaactggaatgtacaaggacaaaataaaacctgtctctttcttttcccatgtctaaacttgatgatatgaatgatctacaggaaaatcttgttttattcattgtttaccacagaattaaacaatacctggatcattgtatagagaagttgtaaaagaagattttgtgggagctggtagaggtgtagatctgggtgctgtctcatgccagtttctgagttaacagaacaaagacaacaggtatgatatgcc

SEQ ID NO: 333378 - DNA, 606 bp, Homo sapiens
agaggatgtagtaatttgttccagttgtatatccatccttgaaaaaatacctgcaattgtagtcatcacccagttgtgatagtcccctgtcattctacaagatgcatctgaaccggaatgtgttgagttatcactcctgcattttacaagttctcgtgatggtactaatcactgcaattcctcaggattgcggtattgctttcgctttttatagagaggcatttcatttgacttccatttggccattcctgctgtagtagccctatttaaagggtcagagaatcaatgtgaagattcgaccagttaccaaatatgtttatttccaatttagcattataaagttgagaaaataccataaggtwttttgaggggcccactgcaagatgaacacaagacaaaactttatccatcaccttacttcctattgtcctactttggatggtgaaccactgtgctcttttaggtgtttagcagttattgtcagttcagtgccaataagtggtaataccaaaacagtctggttattttcccataatgtacattcacactggtaatacccacacctccctttggggaaggttaagaagagttataatgtaaaagttg

SEQ ID NO: 333379 - DNA, 588 bp, Homo sapiens
catggttaacctattgaactataaagataaaggaagaattttgacttccaagtacaaaaaaactcacctacaagagagaaaaataaatctagactgagatctagcaattatcaattttcgcagtgattatttaaagcaataaatacccttgctattattcacagcaataatcaatgctaaaaaaaagagagtacattctacttttttttaggaaagacatttgcactcaaaatcatgctttgacaaattttcctttagattggacatcaataggctaatcctgaaaacataagctaactcagagaataagtaaacattaaaataattttaagtgataggaatccaatgaatcaagaaataaataataatcactaaatgttaacatggataagtctggtggtgtggtttagaatgatacattgagatactaatttcycctgctttatcctgtttgagtttgtttaaaatgaacatagatcatttttaaaaaatgaagactgtacttctcaaacacaaatagtatgattttgtttgtggaaaatttttaaaagtttaaattaatttatagttacagaaataaattaacat

SEQ ID NO: 333380 - DNA, 546 bp, Homo sapiens
ttagtacatgcctcaagaagttgtgaattttattgtaattttagattgagttttacaataaaatataaatttttttaacaggagacaagtcattcaaaaatagttttatttattcccatgtgatctaccttacaaatcttgtctggagttttgctgctgagtcctaagtgacagaaaatagtaattgcaaaaaaaaaaaaaaaaaaagaagataaacaaaacagagatattttaaaagaagatttgtaactgcatatcagaattaaacttgtcactactttggattggattgtttattatcttttaaaatcaaattaattttgttttcttaaatcctctaaaaatgttcactgagttttctggtctttttgaagctatggaacattctttaatgtaaaatataagatttaaatattttgacttgtacttgttttaacagcayttcctccatgtttagagagctctttttagagtccaattttttcctattttataacgttaagtgaacacagaattttacaactgtagttttgataaagacagttt

SEQ ID NO: 333381 - DNA, 546 bp, Homo sapiens
ttagtacatgcctcaagaagttgtgaattttattgtaattttagattgagttttacaataaaatataaatttttttaacaggagacaagtcattcaaaaatagttttatttattcccatgtgatctaccttacaaatcttgtctggagttttgctgctgagtcctaagtgacagaaaatagtaattgcaaaaaaaaaaaaaaaaaaagaagataaacaaaacagagatattttaaaagaagatttgtaactgcatatcagaattaaacttgtcactactttggattggattgtttattatcttttaaaatcaaattaattttgttttcttaaatcctctaaaaatgttcactgagttttctggtctttttgaagctatggaacattctttaatgtaaaatataagatttaaatattttgacttgtacttgttttaacagcacttcctccatgtttagagagctctttttagagtccarttttttcctattttataacgttaagtgaacacagaattttacaactgtagttttgataaagacagttt

SEQ ID NO: 333382 - DNA, 546 bp, Homo sapiens
ggcttaaaataaatgtttgcaaggaaaatagaggtgagatatataaacgctggcttaaataagacaagggaaagcttttgtaaaagaacaccttgtcctgaaaattataaggtctgacaattcattgtttcaytttatctttcattgctgctaagtgtttctggtgttttccgtctccagcattttccactgacactggtggtcatatgataaaaagattgtttttgaggacttcaatattgcctgatggattatagccaactctaatgaatatgagttcccagagtgatgagcacagtgtcgtgtgaagattatggtgtcagatggcctggttttgatcttggtctctagcacaagctaactgcatgacccagggcaacttgcttaattgctaacgtcataactaataaagttacctaaagcatagggtgttttgaggttgaatgagataatgccatgcttttcaacagtaaacattcaaataacattattattgataaatcttcaattttgctcttgcctgcctctaatctaggcttcccacag

SEQ ID NO: 333383 - DNA, 620 bp, Homo sapiens
tatcaccatcttaccaaatttaagctttgacatttttgcttggattgctaatgccaactaatgtgtttccttgactccaaaatcttcctgaaccaaactatctttctcaacactggttagaaacatcttatagcatcataaccttagaaagaaatttccctaaagagaaattttcaatggcacttccattgcattctaaaccctaatacacataatgatttccccaagatcttataattgtccagtycatgtttaatttttatgtatttgacataaacatttacaaataaaaagtaatattataacagctaaaatgcaaatattattcagaattttgttaagtcattgagaatggaatgcagttctctaatgatttcattgtcaggattcattttctgaatttttgcaaggtatgtgtgggaaggaggaaagcacttaaatccacatagatttatgaaattttcaagttaaaatattttcactattgtccataattaattttatgctcattatcttatcccacatctgtttaaggtaatggcaagatgtaaccttccaactaaatttagcattttaactgcaaaattagatcttgctcctcttctatcatgaaaatgttg

SEQ ID NO: 333384 - DNA, 620 bp, Homo sapiens
tatcaccatcttaccaaatttaagctttgacatttttgcttggattgctaatgccaactaatgtgtttccttgactccaaaatcttcctgaaccaaactatctttctcaacactggttagaaacatcttatagcatcataaccttagaaagaaatttccctaaagagaaattttcaatggcacttccattgcattctaaaccctaatacacataatgatttccccaagatcttataattgtccagtccatgtttaatttttatgtatttgacataaacatttacaaataaaaagtaatattataacagctaaaatgcaaatattattcagaattttgttaagtcattgagaatggaatgcagttctctaatgatttcattgtcaggattcattttctgaatttttgcaaggtatgtgtgggaaggaggaaagcacttaaatccacatagatttatgaaattttcaagttaaaatattttcactattgtccrtaattaattttatgctcattatcttatcccacatctgtttaaggtaatggcaagatgtaaccttccaactaaatttagcattttaactgcaaaattagatcttgctcctcttctatcatgaaaatgttg

SEQ ID NO: 333385 - DNA, 594 bp, Homo sapiens
acaataatgtagatatgtatttagtgatagatgaaataccaaaaatatatttatgataaaaatgaaagacaaatttgtatatatactgggatataaatgaataaataagtttagtgctcagaacaatgctagacacatttgatattatcccagttatgtttatgaatatatgtgaatatacatcccaacatgtgcatacatagatacatatgaaaagttagaaaaattttgtatacctcccaaatcaccaatccctttgaaaagcaaattaatgagacattcctttaattcagacactgttctgttgcgtttagtatagtaatcctgtcaacctttcttgccccaaactctattttagcataagacagcttggcagtactaggaagactagttgtgataccatgaattctgagacatataattccagatgttaataaagacacaggaggagaaagaaatcaggtaactggaatataaatattatcttcatgactctcatgtrtttttaacagagtatcattaatggcagtagaaagggaaaaacctaaatttcctttcacatctagaagttttcaaaattttttttgttttaag

SEQ ID NO: 333386 - DNA, 511 bp, Homo sapiens
atttctagttaccgatgctgtaggtaagttgtagatacccttcatcttattgagaaagttttcttgcatttcttagatgaaccaacttgttcattattcatgtcattaattattcaatgktaaatgatatttccataaggtacctttatatatagttgaattcactcctttaatattttatttaggatgtatacacctatatttataaaagtgtttgacctataatttactattgctatatggttgttagatttttgaaatacaatttttgtcagtctcctaaaataaatttagaattatttttttccctaattcctccagaaaagtttgcaaacttagaaatgctttattatttaatgttttgtaaaacttttcatagaaaccatttggcctggagttcgctttgtcttaatatcttaatacattcattcaattttccaatgagtacatgttgttttatgttatgtatattttttccattcaggtttggtaagttttctctttctaagaa

SEQ ID NO: 333387 - DNA, 564 bp, Homo sapiens
agttaacacattcataaatttatgtccacacatttttctatgcatatagattaaatgccaatattctgcttaacaacctgaatttttcacttaactatacttcataaacatctcccaataccaatggatatttatctacaacatyatttttaactggatgaaaattgttccttttattaatgcactataatttatttaatgactttatatatattaaggatatctcctcctcaatattttaatttaataaataaggctatggtggatctttttcagacccagctggatgtattatatgggttttataatctaggatccaggtttccaaacttgtttcaagaactaatagtcattgtgtttctgatcattgcttgtgttacattagccaatgtatcctgtcagggacttaattaaatgcagttgcacagccattgttccttcagaaagttcaacaattcatcctacaacaaaaggagcaggagagactaactctagtctaagtaaagactgcattctctaaaggaactcctgatcagcaaaatctcaacaatgatgaaatttcag

SEQ ID NO: 333388 - DNA, 547 bp, Homo sapiens
tgtatgtgttataaaattaatttatttattttaggctttccaatttgttgacataatagtctctaatgtgccttttgtttctgtagtatcatttgttttatccctttgtatttctcatttcattcatttttggtcttttctcttttttcctagtttgctttaacttttttcagttgtgtttatattttaaaacatgaacttttcatttgttgacyttttgtatattttttagtctccatatcaatttatttctgctgtgattgttttatttccttctttctactaattttgggttcagtttgtttttgcttttttagcaatttagatgaatcactaggttgtttgtttaaagtctctctacttttttgatatagatgtttattgctgcaaacttccctcttagttgtttaatttccatgtattagtgtactttccaaggttacttatattattgatttctggttttattctgttgtggtcagaaaatatactttagatgatttcaactttttaaaattcgttgagacttgttttgtggcctaacata

SEQ ID NO: 333389 - DNA, 625 bp, Homo sapiens
agccgggaagttcattaataaactggacacaagatgatggtggycttgaacaatgtgttggtgatggaaataataagcattgagtgatttctggatatattttgaaggtagagtcaataggatgtgctaagggattggaggggtgatggaaaggaaacagagaataccaaggaagtgctgaaggctctgtctgagcacttggaaggacagaggtgccatgattaaactgggtaagactgagcatattttgagggaaagatgaagatattggttatggacatgttcagttcttgttagtcattcagttggagatattgagtaggcagttgaaaaaactggggttcaggaggaagttcttgactgaagacatgttcttggcagtatataattggtatgtcaagccaacatataacctaggaagtagctataaataaatataaagaaatctaaggaatgaactccaaaatttagaggtcaagggggtgacaaggaaccagacgataccactgtgctgagacaaataagagtatatagctcgtgaagatagttttgtgataattagagaaacatttgtaactagtttaaatttttgctataaaaatttttatataggtttgaaacaaat

SEQ ID NO: 333390 - DNA, 610 bp, Homo sapiens
tgctcactattattaatcattaaccacaattacatactatctcatacttaccagaatagctaataaaacaaaaaaaaatactgaccataattagtaaatgaagaaattagaactttcatacattgctggtggaaatataaaatagtgtaactactgagaaaaaactgttttgtggttccttggttcckcaaacaaacatagaattaccatatcacccagaaatttcacttctagttatacatatatggaaaataattgaaaacagatattcaagcaaatatttgtacataaattctaatagcagcattattcataagagccccaatgtagaaacaactcaaacattcatctactaattaatggataaataaaatgtatatctatattatctggcaataaaaataaatgaattactaattagtgttacaacatggattgaccttcaaacatcatactaagcaatagaagtcagacagaaaaactacatatcttattattacatttatatgaaatatcaagaataaacaaatctataaagacagaaagtagacagtggttgccgagggttggtgtgggggaatgaggtcaggccattaatgggtataggctt

SEQ ID NO: 333391 - DNA, 581 bp, Homo sapiens
gaaacaaatataagatgtagggaattttaaaatagaaaaaaaaggagttttattgtacaagtcataaaaatataaacctaatattaagatgagatgaggtgtagggaaaggaaagaataaacagctatattttactttcagaaatacatcctttcttattaactagattctcccccttggcgccccctgcctccaacttgtactattacaaagaaggtataatctcatggaaaaccaatgtaagggattaaatgaacatcttttaatgagtaaaagagaaacatgatgccaagcctgttgcatggtctatgttttgacaacgggttttacagatctttcaaaccttgtgtaattatcatttgttacagagttaagctaaagtactatctaagccagtgggtatatacrtggatgtttgatataactcaagatgaagaattcatgaagtttaagacaccaggcactataaagtaaatttttagtactaattttggaaacattcaataatattaacattattaatattagtatacattatattttcacaatggatattgaataattaactggccaaatttatt

SEQ ID NO: 333392 - DNA, 606 bp, Homo sapiens
ccatttggattatttcatttacagatgctattagggacatttaatagtcatctttctggaaatggaaatctctcagagtttatctttctggtatcacaatatagaattatctaatttttattttgtttcttattggtctttgcacccacctcatgtcgtcaggttagcaactttgtctattttatgctcacaatatttccagaaagtagacaagtatttggtacttagtaagtatagaatatactttattgaatgattgaatatataattcaattaacttgtttttcactttataaatgtttctcctactgataaaaaattcattagagtgatttttattgctacataaaatgtatactggaatagtgtcatcctttgtcatattgaaaaacaattacattgttcttyattttttactgttctaaatgttgctgagattaaaattatggtttataatgagttatttatattttgttaggtcttcagatattttctcataggtacaattatcaggtcaaaatacttgaaatcattttaaagctctttatatgtattgtaaaattgcattccagaactaattacaactcccacaaactgtgtgtgtgt

SEQ ID NO: 333393 - DNA, 606 bp, Homo sapiens
ccatttggattatttcatttacagatgctattagggacatttaatagtcatctttctggaaatggaaatctctcagagtttatctttctggtatcacaatatagaattatctaatttttattttgtttcttattggtctttgcacccacctcatgtcgtcaggttagcaactttgtctattttatgctcacaatatttccagaaagtagacaagtatttggtacttagtaagtatagaatatactttattgaatgattgaatatataattcaattaacttgtttttcactttataaatgtttctcctactgataaaaaattcattagagtgatttttattgctacataaaatgtatactggaatagtgtcatcctttgtcatattgaaaaacaattacattgttcttcattttttactgttctaaatgttgctgagattaaaattatggtttataatgagttatttatattttgttagktcttcagatattttctcataggtacaattatcaggtcaaaatacttgaaatcattttaaagctctttatatgtattgtaaaattgcattccagaactaattacaactcccacaaactgtgtgtgtgt

SEQ ID NO: 333394 - DNA, 531 bp, Homo sapiens
gttctaagtgcattttatttattttcaaattgaaaactccacttttaaaaaatattgggatcagagccacttctttcctacttctgacattttctgacttgtggagggacatctatttctgtcattctgctttctcttgcctcttactctcttgtcaccagggaggatagagtgactttcttgtttggtaaagttgggaatgcttggattgaatggttctgctttctcaggaatgaggtcctagcatgcagtacatgatctactgtgctcattgccacatgctttataagatcaggcatgcttggtgaatgactctgtctactgcaggaggttcatgtaaggagcttcactcatttgctcatagatataagtcacaataatgaatatattatcaataataagggagatatttttgtcytcatattataactttttttctctgctgattgagggtttaggtagaaaatgtgtgttactattggactttcctcatgacaccaattttagatttgttttataatttttaaaaat

SEQ ID NO: 333395 - DNA, 541 bp, Homo sapiens
atgttacacggtgttttgggccatgaaagtaggtatgcatagctaagccactctcctcttgaaaactaaggcacctgtataaagcatggactctggtctgctccttgattccattaacttttacaaaggtatgccttcacatggggaggtctgcagatttccagccctggttgttaaggcatgggtaggtcagtttaattctatgattttttatcaggaagcccactttcttgcaggtatatgctatattctcttacatggttttattartagtaagggcaatttttaaaatctctatatgctaattcttttattgtattttttgacaggtttgggaaccgattaaataaaaggagttttttattggcccctttatagcctccaacatccccatcccaggtatcacaatgtcctggagagtaggaagtcctctataagctttttatctctactgaagttctcagagtgatatgtcacagctaccactcacaaaatcttgccccttgacctttcctattactgaccatttatccccccaatt

SEQ ID NO: 333396 - DNA, 603 bp, Homo sapiens
acttatgagtgagaacatgtgcataccccattaaaaagacctcagctgggcatggtggctcacgcctgtaatctcaacactttgggaggccaaggtgggtggatcacgaggtcaggagtttgagacaagcctgaccaacatggtgaaaccccatctctactaaaaatacaaaaattagctgggtgtggtggtacacacctataatcccagctactcaggaggctgaggcaggagaatcacttgaaccagggaggcggagcttgcagtgagctgagatcacgccactgcactccagcctgggcaacagagcgagactccatccccaaaaaacaaaaaacaaacaaacaaaaaaccctttattgtatgctttagaaagaacttcagcttttactcagactgctttgagaaayttcagtgtcattaaaggcaaaatgtgtgttataaaagacatatcaactgctatgatcacacatatgcaatgtaaggtctggttcctttactgagttaaagcctggttcacacttcaataacagttatgaaaaatatagattgtgctttcatgtcatggttctttttatgtgctcccaaacaccaatttatatt

SEQ ID NO: 333397 - DNA, 502 bp, Homo sapiens
tttcacactctaaaaattattgagaaccacaaaaagtattggtttatgtgttgtatctataaacatttattaaattagaaataaaaaatattttgtaaattttatgtttattataataatttatgtaagcttattacaaaaatcttattacatggcaatgcaaatcacataatttttwaaaaaattattgccatttgaaaaattcagtgacaagagtagcattgtttcatatattttcatctctttaatatctgacaaaaagagatagctggattctaatattttcttctccatttaatctgttgcaataggtacaaagaagtatacaaaaaatataaataaaaaccagcatcacacagatacttaagtagaagacatcagaatcttaataaagtgtataccttatttttgacactgcacaaaactcaaaacatggttgtttttcaaagttaagttgcaatgtaaacttgaaactatatcagtgaactttatattctgttag

SEQ ID NO: 333398 - DNA, 334 bp, Homo sapiens
tacttattaaggatataggccagtagtttccttttttkgttgttgccttgtctggttttggtatcagggtaatgctagccttgtagaatgagttaggcagaattttctcctgttcaatttttttgaatagtttttaaggaggattggtatttgttcttctttattcattggtagaactcagcagtaaaatcatccagtactgggatttttgttgttgttttgaggagacttttattaccagtttaatcctgttactcattattgattggttcagggtatctattacttcctgattcaatcttgggaggttgtatgtttctagggatttattcat

SEQ ID NO: 333399 - DNA, 334 bp, Homo sapiens
tacttattaaggatataggccagtagtttccttttttggttgttgccttgtctggttttggtatcagggtaatgctagccttgtagaatgagttaggcagaattttctcctgttcaatttttttgaatagtttttaagraggattggtatttgttcttctttattcattggtagaactcagcagtaaaatcatccagtactgggatttttgttgttgttttgaggagacttttattaccagtttaatcctgttactcattattgattggttcagggtatctattacttcctgattcaatcttgggaggttgtatgtttctagggatttattcat

SEQ ID NO: 333400 - DNA, 468 bp, Homo sapiens
gtttaacaaaattccacacccattcaagacaaaaactcacacagtatgactacccttgtatgacttcctggaaaaggtaatattacacrtaagattaactgatcagtgattgttagggtttggtgcaggtagggggaacattcatacatgaaagatagggcatcttttagagggctgtgaaatactcaatattatgctggtggatatacattactatgcatttgtcaaaagcatagaacttcatggcacaaatattaaaccttaatataatcatatatacacacacacacacctatgtatgttaacacacacacacatatataaacttaaaagcaaacatttttaaagtttttttaaatatacacatatatattctttttattagaaaattgatgcaccccaagagactgtgacaaaacaaaattataagtctataaaatacccttgctgaaaaggggtgggaaaatg

SEQ ID NO: 333401 - DNA, 675 bp, Homo sapiens
gcagtttgaattattgccaattcttggttgagtaactcttttcagaagcagacaggtgtttgaatacctattaattagcacttagcatcctttaatttatatattattgttagttcctgcttagttttatcaagcaatctattagagtaggaccccctttttaaaaaatatttgaataaataatttcaaacatgttaaatgcattttcctgttttcctttattccaacaatagatatcattacagcataactaattgctttgatcgttataacatattcatctcttctgtgttggtattatgaaaataaatatttgaatcatgtaaaatacgtgtgattaatgcctttgttattttcacaccattagttcattatctgttgcattcaatctttsttcatgaaaatataaaggattgattcatattgtgctaagatgttaataatataatactttgatttcttttaaaatataagaaatctggctgaatgattatgtgatggtggcaacgcatttcagaacgaatatggataatattcaaaaacaaaaagtaaaaaagaaatcttaaagatgcaaacatttgtaatactaaattttctaaccaggataatcaatggagaaaacataaattatgtacacattagagttttttgcttatttggtatcttttagctcac

SEQ ID NO: 333402 - DNA, 675 bp, Homo sapiens
gcagtttgaattattgccaattcttggttgagtaactcttttcagaagcagacaggtgtttgaatacctattaattagcacttagcatcctttaatttatatattattgttagttcctgcttagttttatcaagcaatctattagagtaggaccccctttttaaaaaatatttgaataaataatttcaaacatgttaaatgcattttcctgttttcctttattccaacaatagatatcattacagcataactaattgctttgatcgttataacatattcatctcttctgtgttggtattatgaaaataaatatttgaatcatgtaaaatacgtgtgattaatgcctttgttattttcacaccattagttcattatctgttgcattcaatctttgttcatgaaaatataaaggattgattcatattgtgctaagatgttaataatataatactttgatttcttttaaaatataagaaatctggctgaatgattatktgatggtggcaacgcatttcagaacgaatatggataatattcaaaaacaaaaagtaaaaaagaaatcttaaagatgcaaacatttgtaatactaaattttctaaccaggataatcaatggagaaaacataaattatgtacacattagagttttttgcttatttggtatcttttagctcac

SEQ ID NO: 333403 - DNA, 675 bp, Homo sapiens
gcagtttgaattattgccaattcttggttgagtaactcttttcagaagcagacaggtgtttgaatacctattaattagcacttagcatcctttaatttatatattattgttagttcctgcttagttttatcaagcaatctattagagtaggaccccctttttaaaaaatatttgaataaataatttcaaacatgttaaatgcattttcctgttttcctttattccaacaatagatatcattacagcataactaattgctttgatcgttataacatattcatctcttctgtgttggtattatgaaaataaatatttgaatcatgtaaaatacgtgtgattaatgcctttgttattttcacaccattagttcattatctgttgcattcaatctttgttcatgaaaatataaaggattgattcatattgtgctaagatgttaataatataatactttgatttcttttaaaatataagaaatctggctgaatgattatgtgatggtggcaacgcatttcagaacgaatatggataatatwcaaaaacaaaaagtaaaaaagaaatcttaaagatgcaaacatttgtaatactaaattttctaaccaggataatcaatggagaaaacataaattatgtacacattagagttttttgcttatttggtatcttttagctcac

SEQ ID NO: 333404 - DNA, 572 bp, Homo sapiens
tcttctgtttggccactgtgcgctccaaccctttatgggagaaagagcacgcagacgggcaggtgcaggagccagggcaagtgcttttgggctcgggcaccatggtagcatctaggggtgggtgcctgaggttcccaaagccccagtgggcatgctacagtgctcttttaattctgccacccacagatgccttaagcgtcaatcayttcagtgcccccttgggccccaggttcttgtctggtgtccaggaaaaatcagatcacacagacaaattgaaggatggtaaacacggggaattttactgccagatagaggtggctctcattgggaggaacggggaactgaaaagggatggagtaagatgatcttcccctggagttccatcatcccacagccaatgttccctctgatcatccccagcagaactcctcttgatgttcagaagctccttctctgcagcactgctctgccgcccttctgctcctctgctcttgtttatctgcccatggagcctggggtttggggattatatgggtataggatagaagggcgtgacaggccaaaaggcaaca

SEQ ID NO: 333405 - DNA, 532 bp, Homo sapiens
ctctcacaaaacttcttaaaccaccactgcattgtgtgttcattagcrgttcttgggccaaatgtcttgttgatgttgtgagttgtctccactgcttcatgacccattttgtatttcttttcttttttttttttttaagatggagtctcgctcttgtagcccaggctggagtgcagtggtgtgatcttggctcactgcaacttctgcctttaagcggtttcaagcgattctcctgcctcagcctcctgagtagctgggattacaggtgcacaccaccatgcccagctaattttgtatttttagtagagacagggtttcgccatgttggccaggctggtctcaaactcctgacctcaggtgatctgcctgcctcggcctcccaaagtgctgggattacagacatgagccaccgtgcctggcccatggcccattttgaactcaattaagaaaattgctccaatttgctttttgtctaacatcatttccatagactaaaataaacataaaataccagcaagtaataagtcattag

SEQ ID NO: 333406 - DNA, 532 bp, Homo sapiens
ctctcacaaaacttcttaaaccaccactgcattgtgtgttcattagcggttcttgggccaaatgtcttgttgatgttgtgagttgtctccactgcttcatgacccattttgtatttcttttcttttttttttttttaagatggagtctcgctcttgtagcccaggctggagtgcagtggtgtgatcttggctcactgcaacttctgcctttaagcggtttcaagcgattctcctgcctcagcctcctgagtagctgggattacaggtgcacaccaccatgcccagctaattttgtatttttagtagagacagggtttcgccatgttggccaggctggtctcaaactcctgacctcaggtgatctgcctgcctcggcctcccaaagtgctgggattacagacatgagccaccgtgcctggcccatggcccattttgaactcaattaaraaaattgctccaatttgctttttgtctaacatcatttccatagactaaaataaacataaaataccagcaagtaataagtcattag

SEQ ID NO: 333407 - DNA, 523 bp, Homo sapiens
  misc_feature (1)...(523): n = A,T,C or G
tttgaaaacaacacactgacattttattatgacttcagagttataagtaagagagtntagctgatgtgttatctgattacatcttggtatggangataaacagtaatcttataattccatattacttttacaaatgtcacagctccaagttcaacctgaaatcattaaaaatttgttatctaaaatgtttcttaaaaacaaktgaaaggggaaaataattaacaaaaataaagtgacaatatgtgaagtataatgagagatgtaactatcaatcctgactgctgaacagaaacgtggtatctcagaatattaactagactgatattcagtgtaagccttttagtagaggtgtgcaggcttttctgtnataaatgacatctttatgaaattccttatgactttcaccaatttaatacagggatttttgaggtatttagtgatctcaaacaaatgtatcttctttgatagtaaaggggaatgtgaagaggtgggcaaatgttaaaacacactttataatttcagc

SEQ ID NO: 333408 - DNA, 545 bp, Homo sapiens
acctgttaaagccacaaatgaacaaattactagattccatttatgtatgtgctaatttaagttttaatataacagattggatcatggattagtttcacagtcatgacacaaacactgccaggtaagacctagatatactgataattaatcaaaatatatgcatctttargataaatggtttctgagaaaaagttattatagtactaaagtatagcatgattgtaaaaggatttcatagtttcatactgagtttgatttttagcagtattaaaatatattgaagtacttttgctctttgtctctgtataattgttgcttaatccaagccagggattgtaatccaaatgtatttattaagcaatgaagttttgtttagaagaagttttgataacaacgcatttcgcttgaaacttcttgtgcatgtgcacaggcatgtgtatgtgttttgtcttcaaaggaagagttgggttgtatgagagttcatcttgaatactgagcattttaacacacactaagaagttgaattgcatgatttccatatagta

SEQ ID NO: 333409 - DNA, 545 bp, Homo sapiens
acctgttaaagccacaaatgaacaaattactagattccatttatgtatgtgctaatttaagttttaatataacagattggatcatggattagtttcacagtcatgacacaaacactgccaggtaagacctagatatactgataattaatcaaaatatatgcatctttaagataaatggtttctgagaaaaagttattatagtactaaagtatagcatgattgtaaaaggatttcatagtttcatactgagtttgatttttagcagtattaaaatatattgaagtacttttgctctttgtctctgtataattgttgcttaatccaagccagggattgtaatccaaatgtatttattaagcaatgaagttttgtttagaagaagttttgataacaacgcatttcgcttgaaacttcttgtgcatgtgcacaggcatgtgtatgtgttttgtcttcaaaggaagagttgggktgtatgagagttcatcttgaatactgagcattttaacacacactaagaagttgaattgcatgatttccatatagta

SEQ ID NO: 333410 - DNA, 558 bp, Homo sapiens
aagaaattatgcaacatttgagaaacatcttaaaagctaaacatgctagggatccttttcctaatataacatttcatagaamtaagaaagaaataataattatttcttttttcttctagttggaatttttacacttctgatgagtatccagatgtctttgtgggcacaaaagaaacataagatttatctgagaaaattcaattcatatattcatagaaaatcagcaatgattccattcatattgtaaaaaaagaatcttatctcctatagaaaacagcaacatataaattcaataaataagacttagttaaggatagttaactattatactccaacaattcatgagcaacagtatatacactgagtaaaaatataaaatagtaaaatttcactaaatttagagaaatgcacatggtaataaaaagtataaattataaatgcaattaactaagaacagctctgaatgtatttgcatgggattggtccttgaataaaattgtcttacttcattaatacttcacaatactatttgcataagacaaaataccacagcaaaaa

SEQ ID NO: 333411 - DNA, 569 bp, Homo sapiens
atatgacagacattttttttcccattatactacactcccttatgccagttgctccatcatactttttttgtatcagttattcccttactgttggcagacatacmttagttaaaggatatcttaattatgaaatgtgttttttaaatttatttctcatttttatttccaggtggtctcactgcctaagacatcaaaagaaaaagcctgacaaatttacaccatcttgttgtcaatattaatgctacaggtataatcctgtagcagccatgtacacatttttagcctttaaaacctaaccttcatttacaggttttaggagttactatacataagtatgtacacatatgcatatgtatatgggtatgtgtgtaaatgtgcacacttacaaactttaatgatactctaaattaatatataagatttatgtaaataataagtttgcattgctggctaaaatattgtgcatttattttaatataaaacaaatctatataatctcacatattcatggttttttgccacatatctaagtaacttaattttagcttatggagtattttgcaggagca

SEQ ID NO: 333412 - DNA, 569 bp, Homo sapiens
atatgacagacattttttttcccattatactacactcccttatgccagttgctccatcatactttttttgtatcagttattcccttactgttggcagacataccttagttaaaggatatcttaattatgaaatgtgttttttaaatttatttctcatttttatttccaggtggtctcactgcctaagacatcaaaagaaaaagcctgacaaatttacaccatcttgttrtcaatattaatgctacaggtataatcctgtagcagccatgtacacatttttagcctttaaaacctaaccttcatttacaggttttaggagttactatacataagtatgtacacatatgcatatgtatatgggtatgtgtgtaaatgtgcacacttacaaactttaatgatactctaaattaatatataagatttatgtaaataataagtttgcattgctggctaaaatattgtgcatttattttaatataaaacaaatctatataatctcacatattcatggttttttgccacatatctaagtaacttaattttagcttatggagtattttgcaggagca

SEQ ID NO: 333413 - DNA, 586 bp, Homo sapiens
gtgtctcaattacatttacatatcagtgtgtttggtggggaaagaagatgaaaaataaaacatttgaatataaaattaaaataaataaaatatgacatttatttatgatagatgtcataatttgatcatattcataggaaaaacattaatgaaaaatttaaatgcagaaaaatatatacacacattatacaaattaacaataacattactaccacagttacttattgaagtaatatgctgtcttwaatatgtttcattataccatgttctctcagagttaacactctcatcctataaataaaagatatattctcaaattctaaaattcttgtgtgtgtattttcaacagttgttatttttaggtcaagaaaaatattatgacaatattagcaactgttaaattctatgctttgagacgtataggcctcatttctaatttaataaggtatgtatatatttgatattttcataaaagcaatacagggtttggccaagaagttttgccgtctgtgaaaggcatgcatttgatgctattataagccatattaactggagaacatttctaaaatacctccatttcacatgc

SEQ ID NO: 333414 - DNA, 586 bp, Homo sapiens
gtgtctcaattacatttacatatcagtgtgtttggtggggaaagaagatgaaaaataaaacatttgaatataaaattaaaataaataaaatatgacatttatttatgatagatgtcataatttgatcatattcataggaaaaacattaatgaaaaatttaaatgcagaaaaatatatacacacattatacaaattaacaataacattactaccacagttacttattgaagtaatatgctgtctttaatatgtttcattataccatgttctctcagagttaacactctcatcctataaataaaagatatattctcaaattctaaaattcttgtgtgtgtattttcaacagttgttatttttasgtcaagaaaaatattatgacaatattagcaactgttaaattctatgctttgagacgtataggcctcatttctaatttaataaggtatgtatatatttgatattttcataaaagcaatacagggtttggccaagaagttttgccgtctgtgaaaggcatgcatttgatgctattataagccatattaactggagaacatttctaaaatacctccatttcacatgc

SEQ ID NO: 333415 - DNA, 586 bp, Homo sapiens
gtgtctcaattacatttacatatcagtgtgtttggtggggaaagaagatgaaaaataaaacatttgaatataaaattaaaataaataaaatatgacatttatttatgatagatgtcataatttgatcatattcataggaaaaacattaatgaaaaatttaaatgcagaaaaatatatacacacattatacaaattaacaataacattactaccacagttacttattgaagtaatatgctgtctttaatatgtttcattataccatgttctctcagagttaacactctcatcctataaataaaagatatattctcaaattctaaaattcttgtgtgtgtattttcaacagttgttatttttaggtcaagaaaaatattatgayaatattagcaactgttaaattctatgctttgagacgtataggcctcatttctaatttaataaggtatgtatatatttgatattttcataaaagcaatacagggtttggccaagaagttttgccgtctgtgaaaggcatgcatttgatgctattataagccatattaactggagaacatttctaaaatacctccatttcacatgc

SEQ ID NO: 333416 - DNA, 586 bp, Homo sapiens
gtgtctcaattacatttacatatcagtgtgtttggtggggaaagaagatgaaaaataaaacatttgaatataaaattaaaataaataaaatatgacatttatttatgatagatgtcataatttgatcatattcataggaaaaacattaatgaaaaatttaaatgcagaaaaatatatacacacattatacaaattaacaataacattactaccacagttacttattgaagtaatatgctgtctttaatatgtttcattataccatgttctctcagagttaacactctcatcctataaataaaagatatattctcaaattctaaaattcttgtgtgtgtattttcaacagttgttatttttaggtcaagaaaaatattatgacaatattagcaactgttaaattctatgctttgagaygtataggcctcatttctaatttaataaggtatgtatatatttgatattttcataaaagcaatacagggtttggccaagaagttttgccgtctgtgaaaggcatgcatttgatgctattataagccatattaactggagaacatttctaaaatacctccatttcacatgc

SEQ ID NO: 333417 - DNA, 568 bp, Homo sapiens
ttttcaccaggtgcataatgaagcctctaattaggcctccttcagaggaggtttgattgtgaaaatacacagcagcatttcctgagataaaagttcctgctaaaatgggatttgggtttttaactttagtttgctaatggttcttgaaatgtgagaaaaaaagtcgttcagaaatatttacaaaacaaatgcataattattgattttattgagaatatagaagacattttcataccatgtgtttgggaaatgaaatcccgtagtctgttgccagaaataaaactattaaaaatataagaaatactctcaataatcccagtacataatttctggtttatcccattgttctgtcagcttgtaaacgagagtcgtttctgtcacaggatactttgggtgtcacttcttgccagccagaaacctgtgtggctggtggtgcctctgcttgagttttgttcgcacctgcagagcttgttgccccaastcggaccagtagcttgcatttggctcccgctaacagcccggaacccaggcctggtgagagtgagccaagtgtggggctacgaggggt

SEQ ID NO: 333418 - DNA, 612 bp, Homo sapiens
gatgacactaactgccattaggggataaggagagatgaccactctagcttattcaagctgtgagagagtgttgtttgtgtggcaatcagggatcctccagagggcagtctagaaggcctcagaaaaaggacttcatgcattgttccacttacatgatccatctgaaatttaatgactaggtgaaaagaaacaaattttacaagacggtttaatatgcaggttccaaaaagtagacctaacataatcattacagagatcctattaaggggagaaactatgacattgaagggagataccctttaatggcattccatatatctccagctaaatggatcttagtgtctctgagtcatttagcactatgaaatagcaggttggctctaaacttaacctctcctgaggggttaacataaaagcaacaagaagtatttgctacagcacatagccctcctttttctgctgaggaaaaatcaagggctattstattatccattacctggttaacaagtgagtctaatgatgtttgagggccttaagaccttgactaggatcttcagcattttgttcagttaaacttgatgcattctggattgtatatgcattgtaaactat

SEQ ID NO: 333419 - DNA, 603 bp, Homo sapiens
tggtgctgacaccctaatgggctgtcagggactggagtcagtccaggggcctttagggaactctgaggtgtaacctcagcctgatacactcaatgacctcaggacctccttccagtcccaggcagtggctagacttctgtgaagggaaactgggttagaacagagccaatgttcccaagacctgagggcaattggggactgacaaagtccttccaagcaagyctgtcctctaagtcttaagttcagcagccatgttatatgctcttaactggccatcagaggcatagtctttaatttgatcttgaaaggaagaaaaactgaggacaaaaagcctcagaaataaaagtaaagaaatagaggtctgctcctgctcacacttctgacaatccctaatgagccctccaaaagttgctgtttgcttagtccatagttcagtgacatctaagttcttgtcctgcaaccaagaagaatgaggcatgtggataccagagagtgagtagggtggaatttattgagtaaaaggaaagctctcagcaaagagaagttgtctgaaagtaggttgccagaaatggtgcttggttctacgtcttttatgtggcagag

SEQ ID NO: 333420 - DNA, 538 bp, Homo sapiens
gaaaccagaaacctggtgtagcgccatgcctcccttgctatttgtaaagttgaagctgtgcttttctgtgctgtgccctcatatcctgaaccttacttgatttaaaataaataagattttatcaatactttggttgggaaaaagaattggattcacacctatttatggttttacagttaatttagcaatccacaaaaamtaatcagtgtttggaagttaaacatcattaaatagaataataatattttgaaataaaatcagacttgatgagttagcagtgatgtgcatgatggcatatatataaactaagtctctagctgtacattctatggaggtttctatgctctcatggtataatataaaataaatgaatgtactaatatagagaaatcatagcttgaaccaaaatttctcacttagggctctgctacattgctgcttttttataaaacaaaaaaattttattactcaagggtttttgtaactacatctacaaaagaacaataaaatgaggagagataccaatttccttaactac

SEQ ID NO: 333421 - DNA, 648 bp, Homo sapiens
ggattacttttcatttttttacactgttcacttatagaaatgctagtgatttttatatgttgrttttgtatactgaaactttacggaatttgtttatccattctaatagttttcctttggagtctttaggtttttcaaaatataagatcatatcatctgcaaacaagtgttttagttttttctttcccatttggatacactttgtatctttctcttgtctcattgttctaactatgacttccagtactatcttgaataaaagtggttacagtgggcacccttttattgtttcagatctcattgggaaagctttctctttatccctattcagtataatacttgctgtgagtctgtcatatatggcttttattatgatagaaggaagatatgtcccttctaatctataagattaataatttcttattggcatgacctaataggaaagtaaacatggacaatcaatttatgtaaaatttgtactgctaagtaatggaagaaaaaataaaggattagtatatgatgctggggaaaatgcctaaatataaggagaaaatcaaaacaataaaaacattattaagtccttacagacaatacatgtatatatgtgaaatgcatgtgaattaagatagtagcctaaatgtaaaaata

SEQ ID NO: 333422 - DNA, 648 bp, Homo sapiens
ggattacttttcatttttttacactgttcacttatagaaatgctagtgatttttatatgttgattttgtatactgaaactttacggaatttgtttatccattctaatagttttcctttggagtctttaggtttttcaaaatataagatcatatcatctgcaaacaagtgttttagttttttctttcccatttggatacactttgtatctttctcttgtctcattgttctaactatgacttccagtactatcttgaataaaagtggttacagtgggcacccttttattgtttcagatctcattgggaaagctttctctttatccctattcaktataatacttgctgtgagtctgtcatatatggcttttattatgatagaaggaagatatgtcccttctaatctataagattaataatttcttattggcatgacctaataggaaagtaaacatggacaatcaatttatgtaaaatttgtactgctaagtaatggaagaaaaaataaaggattagtatatgatgctggggaaaatgcctaaatataaggagaaaatcaaaacaataaaaacattattaagtccttacagacaatacatgtatatatgtgaaatgcatgtgaattaagatagtagcctaaatgtaaaaata

SEQ ID NO: 333423 - DNA, 616 bp, Homo sapiens
tttggggaattatttcaaatgaagaattcatggatactaatatatttcccccatgaaattgtaaacacaattttgatatggttttggataactattaaatacacataaatattttaaaacctaaaatgattgattttgttttgttttcttatgtacattgtaaataatttgaggatagttggaaccagttcgctactttgtaacttacaaagtgttacataccaaagtaaacaggttagtaattataatatggatggagaaacactttaaatatgggagacatatgtccagatttgatgtgtctctttatctatcttgcttcaataatgcctatatcaatcatgagttgttttaataatgctacaaaatgtgaaagttattaaactaaaggtaatagagtagagcaatttataacatacctttaaaaataagttttgagatatatttttataagtaaagcttatttcggtctactaattattgacaatgtgattttggacaaaggtaactattgtacatatcagggattttcgatactgayactattcgtatcttttatttgatgaaatcactcctgttggagaactgctgttgtatacactctctaaacctcaat

SEQ ID NO: 333424 - DNA, 613 bp, Homo sapiens
tctttcatctgggtcatgctgatgcaagaggtgggttcccatggtgttgggcagctccacccctgtggctttgcagartacagcctccctcctgtgtgctttcacaggctggcactgagtgtctgtcttttccaggtgcatggtgcaagctaaggtacatctacttttctggggtctcaaggacagtagccctcttctcacagctgcagtagacagagccccagcagacactctgtgttggtgtgcccaccccgcatttccctttcccacttccctagtagaggttctccatgagtgctccacccctgcagcaaactattgcctggacaacaaggcatttccatacgtcttcaaaatccaggcagaggttcccaaaactcagtttttgatttacatgcactcacaggctaaacaccacatggaggctgccaagccttggggcttgcactctctgaagctatggcttgagctgtaccttgaccacttttagtcatggctagagtggctgagacacagggcaccaagtccctaggctgcacacagcccagagacacttgaccccatccaagaaaccattttttctcctagacctccaggcatgtgttgggagggg

SEQ ID NO: 333425 - DNA, 395 bp, Homo sapiens
tgtaggcattgtccctcttgcaagaccttctatctctatctgcctaatcagcccctacctacctcctctctcattccccactctggagtgttaaccctaactgccattaggtggaacggggagataactgctctggctttttcaggctgtgagagggtgttgttccagaaaggcagagggattctcatgtggtcctaattctagtacttcgtaagtcctccagtatgcacatttgaaagtgttttctcctccatcytcccatattatcattagaagcctatttaggtcattcaacggtactgctgtctttccaactggataaggccttcccttgtctctggtattatgtgagatatgaagctcatatccaaatttctttactgcttgcaatgctg

SEQ ID NO: 333426 - DNA, 622 bp, Homo sapiens
agcctcctttacagtgccagtgggtctccttgactggagaaaggaaactctctaaatctttatatatcccttgttctaagaacaggtaaaagcaacattgttctgggttacacttctgatgagtaagcaagctactcaattttcccaataatattatctctcctggttgcaaaaacatacataacattgaatataaagaagggagagcaacgatgatagtctcaaaagaaagaaaatgtgatataaaatactggaaatctttatccaacaccctaatggggtgtcagggactggagccagtccaaaggcctttgcgtaacaccaagatmtagcctcagccagataccttcagttgccccaggatatccttctaagtcccacacaacggctagagctccatgaagggaaactgttttggaacagaataaacattcccaacacccacggatgaagaggttttgacaaagtcctcattggtaagcttgtcttttgagtcttgtaggagcaacagccatgctattcactcttaactgactgacagaggcccagtgttttgtttggtttcatataataaagagaggcaagagctcttggaaatgaaagtaaaagaagtctgccctta

SEQ ID NO: 333427 - DNA, 622 bp, Homo sapiens
agcctcctttacagtgccagtgggtctccttgactggagaaaggaaactctctaaatctttatatatcccttgttctaagaacaggtaaaagcaacattgttctgggttacacttctgatgagtaagcaagctactcaattttcccaataatattatctctcctggttgcaaaaacatacataacattgaatataaagaagggagagcaacgatgatagtctcaaaagaaagaaaatgtgatataaaatactggaaatctttatccaacaccctaatggggtgtcagggactggagccagtccaaaggcctttgcgtaacaccaagatctagcctcwgccagataccttcagttgccccaggatatccttctaagtcccacacaacggctagagctccatgaagggaaactgttttggaacagaataaacattcccaacacccacggatgaagaggttttgacaaagtcctcattggtaagcttgtcttttgagtcttgtaggagcaacagccatgctattcactcttaactgactgacagaggcccagtgttttgtttggtttcatataataaagagaggcaagagctcttggaaatgaaagtaaaagaagtctgccctta

SEQ ID NO: 333428 - DNA, 592 bp, Homo sapiens
ccattagccccctccagcatccctcttgtgctccttggcacccaaagtctggaggaggccgaggtggtggtgggggatagtatgtcagtgccttcctgagcgygtgcacaaccggctgggttgcaacagcacccaggcttggccacaactttgctcgaaaattggagcaggcaccaggatcaagggagaggccagggagtaagagcagagacatctgagccagtggggccaggggagtttcctggtctcccaagagtgcagggatgcctgggtctggagctgcagctatccagctgtgccccagagcctggcgctcctgccgcaccaactcagtagggggcagggctcccacctgttcctgcctcccgctggctccatggagtgtgcagccctgactgtgcctcccctgctgcagctggcatccccgcagtggctgctctagatgggccaccaccaccatcagaggcacttcttttcaaaattatatttaatttaataaataatattagagccaaatatataattttagaaatattgtgtttgccatgatgcagttacagagtgactatggaaattaaatatgtattacaca

SEQ ID NO: 333429 - DNA, 592 bp, Homo sapiens
ccattagccccctccagcatccctcttgtgctccttggcacccaaagtctggaggaggccgaggtggtggtgggggatagtatgtcagtgccttcctgagcgcgtgcacaaccggctgggttgcaacagcacccaggcttggccacaactttgctcgaaaattggagcaggcaccaggatcaagggagaggccagggagtaagagcagagacatctgagccagtggggccaggggagtttcctggtctcccaagagtgcagggatgcctgggtctggagctgcagctatccagctgtgccccagagcctggcgctcctgccgcaccaactcagtaggggrcagggctcccacctgttcctgcctcccgctggctccatggagtgtgcagccctgactgtgcctcccctgctgcagctggcatccccgcagtggctgctctagatgggccaccaccaccatcagaggcacttcttttcaaaattatatttaatttaataaataatattagagccaaatatataattttagaaatattgtgtttgccatgatgcagttacagagtgactatggaaattaaatatgtattacaca

SEQ ID NO: 333430 - DNA, 621 bp, Homo sapiens
tgatgtcacagaggatgttgactgtggtctctatttgatttctaattattacagtatcttagcactgcttctcttttatttctatatgcatttcctaagtgatctcatccaatatcatgcccttaaataccatgtatattctactaattctaaaatgtattacttgattctaacatttccactaacttcaaatgtttacatctggctaatttctatcgttatctatatatctaataggtatcacaaatttaacaagagcaaaccaacactactaattctccatctcaaaaaatattctatcaaaacattttcctacttaaatcatccttacataataaatgaygtctttcattcatgaacctaaagcaaaaacaaaacaacaagaaaaacagtaaacatataacataaaaagtcatttttgtttcttcttttctttttaatttggcctagaaacaatgacattccaatagtaataagaaccttgcattttgactttgattttgccataagaaattggagaccgtgttgaaatagacaattcttgggctatgacaagaaaagtgctgggtgaaactgtaatatctagtgtcataaaataataaatgctaaaaaataagagac

SEQ ID NO: 333431 - DNA, 621 bp, Homo sapiens
tgatgtcacagaggatgttgactgtggtctctatttgatttctaattattacagtatcttagcactgcttctcttttatttctatatgcatttcctaagtgatctcatccaatatcatgcccttaaataccatgtatattctactaattctaaaatgtattacttgattctaacatttccactaacttcaaatgtttacatctggctaatttctatcgttatctatatatctaataggtatcacaaatttaacaagagcaaaccaacactactaattctccatctcaaaaaatattctatcaaaacattttcctacttaaatcatccttacataataaatgatgtctttcattcatgaacctaaagcaaaaacaaaacaacaagaaaaacagtaaacatataacataaaaagtcatttttgtttcttcttttctttttaatttggcctagaaacaatgacattccaatagtaataagaaccttgcattttgactttgattttgccataagaaattggagaccgtgttgaaatagacaattcttgggctatgacaagaaaagtgctrggtgaaactgtaatatctagtgtcataaaataataaatgctaaaaaataagagac

SEQ ID NO: 333432 - DNA, 552 bp, Homo sapiens
ttctgataattgtgaatcaactcttcattatggcagtgtataataaagatgattygatttttctatagcgacagaattatttagtgctctctttattcctaacggtagtacaaaaagaaaatttcaagtgatgcttctgctatgaccaataaactcataatattaaaagtcaatgatacatataattctgatagacatcttagtatttactcttgatagagaaaataacccaatttcaggtgcaaatattagatgaatttgaaatgagattaaagttcccaattttaaataaaatattttcaagctttttattgatgaaaaacttacatagactgaagtgcacaagtcatagctcatactacctgatgcatgtccaaaacctgaacacacctatataacaagtcccaaaatcaaaaagcagaaacttaccacttttaaagctttcctcatgctttctctcagtcactatccgtcattgctggtcagtaccctacaaaaggtaaccactatttctatttctgacactagataacccattttatttacttccta

SEQ ID NO: 333433 - DNA, 645 bp, Homo sapiens
ttcaatatttatttttattccaaattaactatacatatattaggctttctccccctggttcttccaaggaagtcgttatttgcaatatcacttaatctagttacaaaaaatctacctgtttcaccaatttatgcagtaggctaatactcatagacacaaatgaaccttaaaaacatctatttttatcgtttaatctaaatcatgttttattttcaggtgtttttggctgaatacacaggacctctgctaatatacctcctcttttatttgaggatcccatgtatatatgatggaaaagagagtgctagaagattacgccacccagtggtacagtaagtgatacacacacacacacacacacacacacacacacacacacacacacacmccatacacgttaaggaggggatgaactagtaagcaggtaaaatattaataaaggttgttactaaacgcgattgaagtggatatcattttatggaaatgtattttagataaccacacatagtgtatgtacaccagctttccaaatttgtaaactaagaactattaggtataccttaaaatagaggtaatttaccaatgatcacagctgtcaagagcaactgcgaaattcagaaacgtagtcaaaagaagtttacaatt

SEQ ID NO: 333434 - DNA, 645 bp, Homo sapiens
ttcaatatttatttttattccaaattaactatacatatattaggctttctccccctggttcttccaaggaagtcgttatttgcaatatcacttaatctagttacaaaaaatctacctgtttcaccaatttatgcagtaggctaatactcatagacacaaatgaaccttaaaaacatctatttttatcgtttaatctaaatcatgttttattttcaggtgtttttggctgaatacacaggacctctgctaatatacctcctcttttatttgaggatcccatgtatatatgatggaaaagagagtgctagaagattacgccacccagtggtacagtaagtgatacacacacacacacacacacacacacacacacacacacacacacacaccatacacgttaaggaggggatgaactagtaagcaggtaaaatattaataaaggttgttactaaacgcgattgaagtggrtatcattttatggaaatgtattttagataaccacacatagtgtatgtacaccagctttccaaatttgtaaactaagaactattaggtataccttaaaatagaggtaatttaccaatgatcacagctgtcaagagcaactgcgaaattcagaaacgtagtcaaaagaagtttacaatt

SEQ ID NO: 333435 - DNA, 607 bp, Homo sapiens
ccaggaatgcagttttcctaggcttcaagctgctcagaatatgtggccttcaatagacctgcagccaggattaggtgggactttgcctcatctgaagggcttcttcttattttatttatcgtaattttttgtagagataggatcttaatatattgcccaggctggtcttgaaatcctggactcaagtgattctccygcctcagcctcccaaagtgttgggattacaggtgtgagccaccgcacccgacttacagggcttcttctatacttactaattctcctaatgtgtgacatctggtctactacttaaattggtgcttttccattggatataagccttagcaatagatattacctaattttctcttacctttttatgggtggggttattttcattataatttttttttcctgggtttgcacaactgccagaaaacattttatcagagctaggttatgaacattgcaggtgggcctttcaacttcctgcagaagtgcagaggtgcaactgagcattcactaagaactggcacttgtccaaactgtgcaaaagagggagtgcaagtctgtctcacacacgtaattgaggaaggaaaagaaggccagt

SEQ ID NO: 333436 - DNA, 520 bp, Homo sapiens
  misc_feature (1)...(520): n = A,T,C or G
tctgcttggctggtcttgtgatcattaaactttttgtttgctgcaatacctgctgttctcagtacattggcttttctgggcaatgggcaagaagaacccattgggttatgacaaaagtatggtgctttggcatgytgagtactttaaactaaatgagattggaggactcagaagctgcttcaaaaacaaagtctctgatcttctcattccttcatgtttcccactcctcttttacccccaaagagagtcatagaaaccagaattcccctcccccaaggtgggtcataaaatctaaaaatgttattctaacctccccccacctttctatgtagaagctggccataaagaaatctctgacctaccttgacagattgtagaccattagaccttcattccagaaggagtcctgctctatgcccagaggaaggaatgctacacagagaagccangaagaatctgnacagacagggcaggctggggctccttcccacccccactcagtctattaccattagattgc

SEQ ID NO: 333437 - DNA, 520 bp, Homo sapiens
  misc_feature (1)...(520): n = A,T,C or G
tctgcttggctggtcttgtgatcattaaactttttgtttgctgcaatacctgctgttctcagtacattggcttttctgggcaatgggcaagaagaacccattgggttatgacaaaagtatggtgctttggcatgttgagtactttaaactaaatgagattggaggactcagaagctgcttcaaaaacaaagtctctgatcttctcattccttcatgtttcccactcctcttttacccccaaagagagtcatagaaaccagaattcccctcccccaaggtgggtcataaaatctaaaaatgttattctaacctccccccacctttctatgtagaagctggccataaagaaatctctgacctaccttgacagattgtagaccattagaccttcattccagaaggagtcctgctctatkcccagaggaaggaatgctacacagagaagccangaagaatctgnacagacagggcaggctggggctccttcccacccccactcagtctattaccattagattgc

SEQ ID NO: 333438 - DNA, 520 bp, Homo sapiens
  misc_feature (1)...(520): n = A,T,C or G
tctgcttggctggtcttgtgatcattaaactttttgtttgctgcaatacctgctgttctcagtacattggcttttctgggcaatgggcaagaagaacccattgggttatgacaaaagtatggtgctttggcatgttgagtactttaaactaaatgagattggaggactcagaagctgcttcaaaaacaaagtctctgatcttctcattccttcatgtttcccactcctcttttacccccaaagagagtcatagaaaccagaattcccctcccccaaggtgggtcataaaatctaaaaatgttattctaacctccccccacctttctatgtagaagctggccataaagaaatctctgacctaccttgacagattgtagaccattagaccttcattccagaaggagtcctgctctatgyccagaggaaggaatgctacacagagaagccangaagaatctgnacagacagggcaggctggggctccttcccacccccactcagtctattaccattagattgc

SEQ ID NO: 333439 - DNA, 594 bp, Homo sapiens
ctttgaaaggtggagtcaagatagactggctaggaatttcagaactctagacaagacacagtggtcaatttcctgggttttctttttgcctaatatatgcttatatttctgtgtggtgaaaaagccagcaacctcgaaatgtgaataatcacagagaaaaaggaaaaattaagaaaagcctgttttttttttctaggcaaaaccaaaaagtaggcagtataccggtaaagttttagacaacaattactctagtgtaatcaaacatcatagagaaaagtgtgacccctcctatacccccagcaataaaggcctggtggaaagcctaggattcctcccttgcccagttgtgatgagkttccctccccaacttgatgtgtttcccagaaggccaaggggagctgacactttaattcccttctgggcatgtcagtagagaatatttggggagcatggacctccattcccatccagcaataaccaactgctcctccttctccctgccgtggtggtattactgaaggctgagtgggaaactaggacctttacctgcttccagaggtgacaaggccaccccatggtgtcagtgaaggccac

SEQ ID NO: 333440 - DNA, 579 bp, Homo sapiens
atatgtattgttttcttcatttcggttttttacttctgttctgatctttatttcttttctcctattaattttaggtttggtttgttcctgcttttctagctctttcagatgtgtcattatgttatttatttaagctttttattcttttttgatgtaggcacttataggtataaacttacctcttagtgcagcttttgctgtatcccataggttttggtatgttttgtttccattatcattggtttcaagaatttttcaatttccttccttccttccttcctttcttccttccttcctttccttccttcctttcctttctttctttctctctttctctctttctttctcctttctttcttttttttttggtagggtctcactctgtcaccctggctggagtgcagtggcatggycttggctcactgcagtcttaacctcccaaactcaggtgaccctcctacttcagcctcccaagtagctgggattacaggcacatgccaccaacacttttcttaattacttcattgatccactggtcaattcaggtgcatactgattaatttccatgtatttgtatag

SEQ ID NO: 333441 - DNA, 624 bp, Homo sapiens
acaacagtcatacataggattattctgttattataaggtacttggccgggcacagtggctcacgcctgtaatcccaacactttgggaggccraggtgggcagatcacgaggtcaagagatcgagaccatcctggccaacatggtgaaaacctgtctctactaaaaaataataataataataataaggtacttgtactgcctgtgaagtggtatagtgttatttgaaaatggatttgcattagttggaaatgtatattgcaaactttagggcaactacttaaaaatttttttaagtataactgatattctaagaaaggagagaaaaatggaatcatttaaaatgttcaattaaaaccacaaaagacaggaaaatagaaaataaaaaagagataggtcaacaaatataaaatagtaacaaatatggtagatgttaatccacctatagcaataatcattttgaatataatggtctaaatccaccaattaaaagagattatcagaatagattttaaaaaaagactcagttatatgttgtcttttaagaaacccacttaaatataaagacacatattgattaaaagtaaatgaatggagaaagttataccatgttaatactaataaaaa

SEQ ID NO: 333442 - DNA, 624 bp, Homo sapiens
acaacagtcatacataggattattctgttattataaggtacttggccgggcacagtggctcacgcctgtaatcccaacactttgggaggccaaggygggcagatcacgaggtcaagagatcgagaccatcctggccaacatggtgaaaacctgtctctactaaaaaataataataataataataaggtacttgtactgcctgtgaagtggtatagtgttatttgaaaatggatttgcattagttggaaatgtatattgcaaactttagggcaactacttaaaaatttttttaagtataactgatattctaagaaaggagagaaaaatggaatcatttaaaatgttcaattaaaaccacaaaagacaggaaaatagaaaataaaaaagagataggtcaacaaatataaaatagtaacaaatatggtagatgttaatccacctatagcaataatcattttgaatataatggtctaaatccaccaattaaaagagattatcagaatagattttaaaaaaagactcagttatatgttgtcttttaagaaacccacttaaatataaagacacatattgattaaaagtaaatgaatggagaaagttataccatgttaatactaataaaaa

SEQ ID NO: 333443 - DNA, 601 bp, Homo sapiens
aataggcaacataaataaacctatatctattgaattagtaatcaataaccttccaaaagagaaagcaccaggccctgatgggttcactggtgaattctgccaaacattaaaggaagaaattacaagaattctctacattctctttcagaaaataggaacagagagaaaacttcstaactcatttttatgaggccagcattacactaatactataactagagaaagacattacaaggaaaaataacctatagaccaatatctctcatgaacatagatccaaaatcatcaacaaattattagcaagtcaaatcaataatctataaaaagaatggtacaccatgaccaattgggatttattccaagtatgccaacctggtttagcattaaaaaacaattaatgtaatcgatcacataaacagactaaggaaggaaaatcacatgattttatcagtaatcacagaagaaaagcatttgttgaaatttaacacctattcacaataaaaactctcaatgaactaggaatgggggaaattttctcaagttgccaaaaaaacctacaacagacattatatttaatggtaagaaactagatgttttccca

SEQ ID NO: 333444 - DNA, 546 bp, Homo sapiens
gcggattggtccatgagtggtcttggaaaaagcatcattcagttsgttaaaaggcactatccagaaggaaccaattcagagagagagtagagtaggtaagacagggatagaagttttcactccagtcatggactctatctggaactggcagctcagtcctcaggttgaaggttgagccctaccagggacccgctgctgtctgccttggaatttgtcgatctcctgtcgctatcaccatgactaagtactgggtacccctctcatagctcacaaatattaacttgggtatcccagaaatgccttgggaaacttgattcttttcctgtatcccgagttcttaatgactgagatctgcctcattcctctgtgctctcactgaccatgttttctgcctggaatctcatgttgcctagtagccttcacctcaaatggcatttttcactcctgaccccctgatccatctgatatcactctctgataatgattagccagccacctggagtgatcttttggagtttcacctatcctaactgtacttgagtaacc

SEQ ID NO: 333445 - DNA, 462 bp, Homo sapiens
gttcaactctgattttgtttattttttgtcttctgctatctttgtggttggtttgctcttgcttctctagttcttgtagttgtgatggtaggtcattaattggagatcttcctaagtttttgatgtgggcatttagtgctataaatttcccccttaacactgccttatttgtgttccagtgattctgatacattgtatctttgtcctcattagtttcaaataacttcttgatttctgccttaattttgttatttacccaaaagttattcaggagcaggttgttaatttctatctattcttatggtttggggccattttcttagtcttgatttctattttttttttttggactgtggtctgaaagtgtgactgatataattttgtggggttttatgcatttgctgagtgtcgttttatgttcgatcmtgtggtcagttttagagtatgtgccatgtggtgata

SEQ ID NO: 333446 - DNA, 542 bp, Homo sapiens
ataaattacccaggctcaggcatttatttatagcagtgagagaactaatacagttgccaaaaatagaaaattatgtttatcataggaataagtatcctattgtattctattctaaataaaccaaatcagcttacagacttctgtttttctcagtgtgttttttaaaaagacattaatagaaatatacttgtgagggggcattttgacttgttatgaaaaagagaawaatgtaacatatgaatgagctgggcaagtttaaacaaaaggaaatttttttaaaaaaggcaagatcttaaatatttaaactataatcatttaggagtgggtttaccatgtgttgtttctaaaagtaaaactaaaattagtgaatgaaggtcatgtagtggtagaactcttgtcaagattcaaagaacaatgggtttttatgaggtattgagtttcatactataaaacgaattcatctgtaggatcacagaataaaaataatactaaggaagataaatcaacttctctttaatgtccagcctcaatgagtacagcta

SEQ ID NO: 333447 - DNA, 547 bp, Homo sapiens
acctaaggtaaagaatcattataatgatgattctctaacatgcatcagaatcagctggaggactcacttaactatagataatatgtcttctctcccaaagtttcaggttcagtaagtctgagatgggggcctagaattttcatttttaacaaattcccaggtaatattgaagcaactgatctgatgtatgtattgtacaactgaaccacagttctgacccagtaactgcaatcttgggctacttccaactccaaaacaaaatatcctaggaaaggcactgaacttgaaatcaaaagaccaaagtctgagtcctcgtttgttacctacaagacgtaaaacaaaatyccttagcactatgaactttattttctatgttactggagtaataatacctattatatcttttaggattgttataaaaataactaaggtaatatatattaaaggcttttataatcagttaatatctttagaaatataaattcttgttatatgcctcagtttcaataacttttaaaaacagatttcaacttcactggtagttcct

SEQ ID NO: 333448 - DNA, 589 bp, Homo sapiens
caagatactaactaagttctatgtggactatggagataaataggacacggtgctggcttcattttcctgagcttatgttttagtgccttcagtaggattcacttagccataatgaaccactttcctttaaggaaatccttataactctacacaagggagaatataaacatgcatatggtatactaccatacccagacttactttttcaagatgaaattttcattttgaactaacaggtatttttctgaaaagtgagcctgtctaaagttatatatcttcttttggcctttctgacatgctgtttcagaatttgaaagtgttcttatgttcttgaattgtatactccacttaatctaaatcaccaaatcagaccatgccatttcyttgattaaaattaaggtctttacattacatgctaaagttcaaagtcctctctgtgacacataagggcattcatgacctacttctctagccttacatccctctactttttaatcctgtaattccaagaccaattccctgcaactcgttgttcaatgcctttcttccttttcttatgttgtttgtctccccaggattaattccccac

SEQ ID NO: 333449 - DNA, 581 bp, Homo sapiens
  misc_feature (1)...(581): n = A,T,C or G
tgttacagctcagcatgaactggtaagttgcttatctcagcttatcaaagaatagcatgttatccaagaaggatagattttaatagggctggaaacatcttgaacttcaaccgtggcatggagagmaaaagggaggaatacgttatggatttgcatgtcttcacagggcagaacaggcggatcttattttttttttaggttattttcttcagctgntagggaactgtctcctagaaagactaaatttagcattgcaaacattatcaatattaactggaattccatttctttataagcaggcttcctgtcaactggttactatttgagggttttttttttttcaaaccaaaatttgaggatttttttggttgataatacactttgaaatgttccagagatgtcttggtatctttttttgtattatgcatcaaacccatcctgggttgacatttaatagaataatattccatatgaaaaattgcttacttcaattttcctgttagataacagaatcttaattataaaggtgatatagttcattcaatttagttatctagctgaaactaaccaagaaagggttt

SEQ ID NO: 333450 - DNA, 521 bp, Homo sapiens
  misc_feature (1)...(521): n = A,T,C or G
aaactcctgttataattaataattttttttacatattccctgttaaaactactggngttgtttctgtctcctgtttggactctgactatatggaattgataccagaggtggtcccagaagataaccccaccaagataagatttggagatgcattttgctgggcttttggactccaacatgtctaccagtgggaaatgggattgtagtaatccatggcatgcagtgacatcacaattaattatgctgtcacctgtaattaagtgacaagagaagcatgtgccttgggagaccaggtgacagcrgcacttgaccattacagtagtaatcatgaccataaagactgggatgtggggaaaattcttttgaggacgcttgattgcttaccaaaagaaaatttagaacttgtgttctttaattcttggcataaaccagagaaccagaaagtttctggttatattacagcctgagaaccagaaagcttccatgataactctaaaagattatcttatttcttgtaggca

SEQ ID NO: 333451 - DNA, 578 bp, Homo sapiens
agccccttctctgccccagtgcagggcttggccttagcacacggtcagtctgtgctggggtgaagtgatgaatgagtgagtggttgagtgataatgcatcatcagatctgtcttttccacatgtctctatctccacccagaaccagttttctcatccacaaatgggcatttgaggctgggtgctcctaaaccctacaaaattcagagctggcacagttggggactgaccttccttgatctcacctcactttctgtatctataaaatggggtacctttctctaagagtaaaaaggaggcctggcatagggaaagaaactcagctcgagcatccagaacatccatcttgctctcaaatacctaatacaggggaccatgttttctgctataattggtattggagctggtaccatttattaaaggyaattcagttacaaagcttcaattattaaaactgtgtagtaaacgtgtatatatggacagacaaatagaagaggaagtccagatgtagacagaaatccatacagaaatagagaatgggacaaaggaaacatctcaatgcagggtgttcagacacctg

SEQ ID NO: 333452 - DNA, 579 bp, Homo sapiens
acattgcgagccctgcacatcttccactttctctagaggcagctgtcaaatgctattctcctccactgaaggatgcccccagccctggcttcttgacccttgtgctgaattccctttcttctctgtcttatcttggtttctgagggctttctcatgagtgacggtgacctagttccagacctcactttagataagttctggagagaagtttttattagtcaaatctcaatgtaatcaatattctcttctgagataactcaattaattctcttaataagggaatacaagttttggacagggatctaattacaaattcagctgcattttaatgtagaagatgaaggatggttgtttcagcccaaagaaaaatgataatctagatttcacttacataaagaatagcttccagttttgtcctttcttcaggaaattgmtccaaactgtcgacactgtgaatcatcctgcaaaatgggtggattttagtttatagatcttaaagctttttaaaccatggatatgttttagaaatagcacacaattctatgaggactcagccttttctgccaattactcaaagag

SEQ ID NO: 333453 - DNA, 571 bp, Homo sapiens
tgacacctcttaagaacaattctattttttaacttctatagcatttctgccagctttttacatattttgtttctctgttcagataatcattcattcatcatatgatttcaccaacatgtgtctcccatgttcttgctactgacaaactgtgaactaaggttctcttcagcttctgctccgaaatcaactttatcttatgctgtaactgggtagtcctgcttttcttgacacttggtcatggcaagctggtttgtcccttagtaaacttaaagtcagtctcataaacaacagattgttagactttagtttttaaccagtaaccatcatttcatcttttcatcttgataaatttaatcagtccatttgyataaacataaaaaatgatgtatttttactatactctattatgctataggtttattattctcctgccattaaaaaaattaacaggatttgtagatgtaaaactctatttctctttaaatcgaaaaataaaataagctgcctattgtcttcctttttcaaaaaactttaaaatcttattttcctcattcatcttgttttcaattac

SEQ ID NO: 333454 - DNA, 531 bp, Homo sapiens
ttcaaagtccatctatccattgggcacacacttcacttgctgagcctctcttatttgccgggccctcttcttggagctgaaggtgtgtggagagaggtgggaaggaggggacagaagggtgcagtggtgatcactaccatgtgcccagtccacagagagggggcaggagcacgggaggaaggggcttggagaaggctctagcctgggctttggggaataatagaaaaccrggacagagggacttatcagccctgccgcgtaccctgcagaagcccgtaatctaaagccaacctgctgcacctcagcctcacaggtaggtggtgtcaagaggcaggtgaccaagaaaagacagggctgtgaaccacaccctcttttctttccacaagtggaagaaaggcaggtgcaaggcccacagagcatgagtttgggggtggggaggctggccgaccctcgcctttgacctcagttaccactcacctggtcgtcgcgccctctcctagccacacctgctgtcctgctcttgtctctcca

SEQ ID NO: 333455 - DNA, 565 bp, Homo sapiens
cttatggaatgagagaaaacatttgtaaaccatacatctgataaagggtcaatagataaaatatataaggaactcagtcaactcaagagcaagaaaaagaacccaattaaaaaactgggcagaggatcccaaaagacacgtttcaaaagaagacatacaaatggccaagggtatattaaaatatgtccaacatcactaatcctcagggaaatacaagttaaaacaatgagatatcacctcacacctggaagaatggctactatcaaaaagacaaaagataacaagtgttggcaaaggatatggggcaaagggaacccttgcactctgttggtgggaatgtaaattaatacagccwtatgaaaaactgtatgaagtttccttaaaacaaaacaaaacagaaataaaactaccatatgatccagcagttccactaataggtgtatacccaaagtaaatgaatcagtatttgaaagggatatctgctcccctacattcgctgcagcacttggctattcacaatagccaagacatgggattaacctaagtgtccatcaatagatgagtg

SEQ ID NO: 333456 - DNA, 538 bp, Homo sapiens
gttggtgggaatgtaaattaatacagccatatgaaaaactgtatgaagtttccttaaaacaaaacaaaacagaaataaaactaccatatgatccagcagttccactaatargtgtatacccaaagtaaatgaatcagtatttgaaagggatatctgctcccctacattcgctgcagcacttggctattcacaatagccaagacatgggattaacctaagtgtccatcaatagatgagtggtggtagaaaatgtggtacatatacacaggggaaaacgttcaaccttaaaaacaaaggaaatattttgatttgccacaacttggatgagcctggagaacattatgttaaatgaaatgagccaggcacaggaagacaaatactgcatgatcacacttatatgtggattctaaaaaaggtgaaaccatagaagcagagcaaaaatggtggttcacagagggtagggggtcccaagatgggtgactgggaaaatgttggtcaaaggatattaaatttcagttagacagggagagtaagttca

SEQ ID NO: 333457 - DNA, 579 bp, Homo sapiens
tgcattctgtatccatcagtacagtaactggcacataatatttgtccagttaatatatgttaaataagtgaatgatctgtacatatatatagttacaacagaaaataaagtgtttaatcccaggcatagaataaayttaattgtagcttagacgagtaaaggtaactagtattttttgaacagctactgtgcatctcagttaatctgcataacaatccttggggattcatactgtcaaatctataataaatatgtaaagagcacagatcagaatctaaacaattgttcatatagccaataagtaccaaaataaagatttatatccacatgtgtctgaatccaatgttcctattcctttcactacaccaatattcctgaaactatgtctcagaaaagagttccatggtcaaacaagcttgggaatttctgttcaatacaccctcctctacaaaactcagaatgcccatccatatattgaaggcattggtcagaagttctgtagtaaagaagtctgtttagtacagattagcatcattttccctcaatttgttaaaccacacagccctacagtcaacgtag

SEQ ID NO: 333458 - DNA, 554 bp, Homo sapiens
ggcaatgcagatgaggctaggttctttagaaatggattctgaacactagaaatgagttcaggggagttgcctttaagtttcttctccttcagccaagccacctggaattttrctaatcctccagaaccccaccatcctgaagtgtagatacagcggagctatcctgacatgaagaatcaaagtgcataaggtctacttattttgacaaccacaatgcttgcacagctcctctatcaggcattccctagatccctattcaataacacaggtgaggcagagacattaagcaattgaacagaaattactaagtaggttagttctgactaattttggacagaataagctaacatccatattttaaaaaagatataaaattcatgagtataatcatgtcttctggaggcttccttcactttccaactagaatgtgagccccctcagggagctctctagctgctattcaaggctcttcacaaatcagatgtcacttttctgtggtttcagttttatctcttgcaaaaacatcaaaacatgattgactgtaaagaaaatga

SEQ ID NO: 333459 - DNA, 554 bp, Homo sapiens
ggcaatgcagatgaggctaggttctttagaaatggattctgaacactagaaatgagttcaggggagttgcctttaagtttcttctccttcagccaagccacctggaattttactaatcctccagaaccccaccatcctgaagtgtagatayagcggagctatcctgacatgaagaatcaaagtgcataaggtctacttattttgacaaccacaatgcttgcacagctcctctatcaggcattccctagatccctattcaataacacaggtgaggcagagacattaagcaattgaacagaaattactaagtaggttagttctgactaattttggacagaataagctaacatccatattttaaaaaagatataaaattcatgagtataatcatgtcttctggaggcttccttcactttccaactagaatgtgagccccctcagggagctctctagctgctattcaaggctcttcacaaatcagatgtcacttttctgtggtttcagttttatctcttgcaaaaacatcaaaacatgattgactgtaaagaaaatga

SEQ ID NO: 333460 - DNA, 577 bp, Homo sapiens
tcagaatcctaaaaggaagatagcatgacctactatatatgtacatggaaaaaagggaaataattatagagaaaacatgtaaaaggagcctggtttattactcttaaatgggtacatgatagatcaaaataaatgttattacaactgatcaaaaaatcctactgcaaaggaaataataaataaagatggagagtcaacctgtccatcataagtgctttttgttacaaagccaaggacttggagtgtggacccaaccccacagcatgcaaaaccgtggggctctcaggattccaagcctagcatccccaccctctcataggcgcttcggagctgaccgcaggcacacttttaatttgtggcaagatggtctgacaaacagcttgggaggacagcagaggtgaaaatacagatcaagtgcagataaaaatatgttcaccttgaaaaatacaaacaagacttttaggtaataatgcacagggaaatacctatcaaaaaatgagaagaatagaaccactgctttctcattaacarttttcacaatcccttttagcttgtattccaacttctgtccataatc

SEQ ID NO: 333461 - DNA, 515 bp, Homo sapiens
gagatcctttagcaatacttcaaggtatyatccctataaaaagtgaagagggatctgaggtcctaaaaagaaaaataatgacagagaatggctgtaatttcatatgttcctgatggaaatctcactgctcagaaaaaaaaagaacacatatgccaaaataaaagaaaaaaaaaaagcaaaaataaaagggaatgggaccacatataaccttgccaaaggttcatgttttacataaagcagcagttgggacttcacaaaggaaatctctgcactttttatttctggttcagaggatttacatgctctttctaatgatctgggccttcagcactgggtaatgtctcccagtgcccagcttagcgctcatgcaaaattgaagcactttggaggcagtttagtagttgcagatgaatctcaatgtgcaggaaaaggcataatggctgtttagcacttgctaggagaagctgaggaaatcagggggaaaaatctattgaattcaagccatctgggaagcc

SEQ ID NO: 333462 - DNA, 590 bp, Homo sapiens
cagtcaacagtcatggcttttagattccttctgaaccatctaagtcctccatctgccctactcccaccttgcattttatcatgaagtgacacatagcagaagagcagtataataaakttaagccagtgacttactactttccccaagggtagaaatcccctctgtttcttttctcttttgtttccaggttaaagggtgcatttgcagacatctaataccatgcatgctgatctgaaggaatttccctgggggaatgtgagatgtatatgtcttttttatagtcttatgggagacttttacttttagataatcacaggtaaatcaatatggttttagtccctctgaaccaataatatatgtttactgaattggattataaaacatattataaattaaaattatcttattttctttcttaagatgctttttaatactttgtagtgataagatttctgtagtggaatagtctatcgaaaaagcgtttcagccaggctccgtggctcatacctgtaatcccaccactttaggaggccgaggagggaggatcacttgaagttagcagttcgagaccagcctgagcaacaaaatga

SEQ ID NO: 333463 - DNA, 590 bp, Homo sapiens
cagtcaacagtcatggcttttagattccttctgaaccatctaagtcctccatctgccctactcccaccttgcattttatcatgaagtgacacatagcagaagagcagtataataaagttaagccagtgacttactactttccccaagggtagaaatcccctctgtttcttttctcttttgtttccaggttaaagggtgcatttgcagacatctaataccatgcatgctgatctgaaggaatttccctgggggaatgtgagatgtatatgtcttttttatagtcttatgggagacttttacttttagataatcacaggtaaatcaatatggttttagtccctctgaaccaataatatatgtttactgaattggattataaaacatattataaattaaaattatcttattttctttcttaagatgctttttartactttgtagtgataagatttctgtagtggaatagtctatcgaaaaagcgtttcagccaggctccgtggctcatacctgtaatcccaccactttaggaggccgaggagggaggatcacttgaagttagcagttcgagaccagcctgagcaacaaaatga

SEQ ID NO: 333464 - DNA, 598 bp, Homo sapiens
catttctgtaaaaaatactcatttgtttttcaacctacattaaaagaatattatgattacctcttttttattttgagatggagtctcactctgtcacccaggctggagtgcaatggcacgaacacagctcactgcagcctcgacgtctggggctcaagtgatcctcccacctcagtcttcagagtagctgggacgacaggggtgtgccaggggtcagctagagctggggtttctctacatggcccaggctggtctcaaactcatggtctcaagtgatccacctctctcagcctcccaaagtgctgggattacaggtgtgagccacagtgctttggcctctctttaaaartgccttttttttttttttttttttaccatgaaaggacaaagctcactttatattttgtagagcatggtatttgaacaaagttaagggattggtcatcattaaaatagttatgacactgtctactaaatcatttgtatctatatttaatacatcaatacagagttatagaagttcacatataaaatgtggtattgacagtggaagaaaaggaaagaatacaagatatattggaaagaaatgacagatatc

SEQ ID NO: 333465 - DNA, 583 bp, Homo sapiens
actcacagttccacatgactggggaggcctcacaatcatggcagaagrtgaagaaggagcaaagacacatcttgcatggcaacaggcaggagagcgtgtgcaggggaactcctatttataaaaccatcagatctcctgagacttattcactatcctaaaacagcacaggaaaaatccaccttcatgattcaattaactcccacctggtccctcccacaacatgtggggattatgggagctacaatttaagatgagatttgagtggggacacagccaaatcatctcactgggcatggtggtgtctcaagcctgtagtcctagctactctggaggctgagatgggagaatctctcgagcccaggagtttgagcttgcagtgagccatgattgttccactgtactccagcctgggaaacagagcaagaccctgtgtcaagaaaaagcctgtcaccaagttgctctgagttaaataagtggaagtggtgctatggaaaatgtaaagcattatgtaagtgtcaccttcttagaattcgtgtagaatcaccaactttagaactaaaagtttgtagagaccccaagcctc

SEQ ID NO: 333466 - DNA, 583 bp, Homo sapiens
actcacagttccacatgactggggaggcctcacaatcatggcagaagatgaagaaggagcaaagacacatcttgcatggcaacaggcaggagagcgtgtgcaggggaactcctatttataaaaccatcagatctcctgagacttattcactatcctaaaacagcacaggaaaaatccaccttcatgattcaattaactcccacctggtccctcccacaacatgtggggattatgggagctacaatttaagatgagatttgagtggggacacagccaaatcatctcactgggcatggtggtgtctcaagcctgtagtcctagctactctggaggctgagatgggagaatctctcgagyccaggagtttgagcttgcagtgagccatgattgttccactgtactccagcctgggaaacagagcaagaccctgtgtcaagaaaaagcctgtcaccaagttgctctgagttaaataagtggaagtggtgctatggaaaatgtaaagcattatgtaagtgtcaccttcttagaattcgtgtagaatcaccaactttagaactaaaagtttgtagagaccccaagcctc

SEQ ID NO: 333467 - DNA, 523 bp, Homo sapiens
accttcttagaattcgtgtagaatcaccaactttagaactawaagtttgtagagaccccaagcctctctgactccattatggaaataaggaaataggcccagggaggtggggacaattgcaggacttggacctcaattcagacctctggacacatttcatttgtttgcttgtgtgtttatttatttttgtatatttactgttggaatgtagtctaaaatagaacaccattgggatcattaagaagtgtattgttgtgtctttttttttttttggaaatgtggaagccaagaatgaaaatgctgtagagatttcttcagttgcatcctcctctgtttagaacttctggggaatgtgcctgtctttgaataaatggaaacatcccttgcaaaagttgtctagctagtttcaggctaagcatcttaacaaatcctggctttaacctaccagtcctatctgaagtcatggaatgagttagacaccccatgtctcccagttttcccttttatttcaggtgatttagca

SEQ ID NO: 333468 - DNA, 561 bp, Homo sapiens
cattactttttaaaaaaattagggctttaggcccatgtagagagacagtatagcaaagaaattaaaagcatgattctggagtcagaaccatttagaaatgatatraatttgtctgaagttactttaccattccaagccttagtttcctcattctagaatggagataagattaggacctactcaatgaagttattggagaattaaatgataatatgtccttgactttgtacctgtcacagagtaagtgctcagaatatgaactgttactctacaagactagtggaaccacaggcatcattacacttgaaactcatcaccaggagttaagaagaaggaaagcaaatactgtacgtgaccattgtgaagttaattcaaggagcataaaccctaaagagtggcataccagtggcctcatccccggtttgtttatttgttgttgtttttaattagggtgcaaaatctttacatcaagaagcaaaaggaattgttcatcagtttcactatgtgatttttgcttttctttacctgttccaagatggctagtttgattatattgtgaaa

SEQ ID NO: 333469 - DNA, 623 bp, Homo sapiens
ctcttgaacagaattcttacgggttttacttatctgcctaactgccttgaaaacagcttggaaatcattcccatacttttggggagcagtcaatcatttagacagtttccactgaacagcttaaaataatcaggttattacaagtaaaaatattttaggatgggtatctatgccagctaacatgaaaacccacactgaactgatgtttaagatgtattattacaggcaaaaagaaaaaaatcttactttgttttttgcactggcagattacaaaagttcatgggacagcagtcatagaaacacagagttttaggatgaattatgcattattttaaaaacctttagtattgagttgttagccctccatgtggatagaatttcagagcccttattacattttaaaagtgaagctagggcagaaagtgactcaaaattagaaatgtcaggatcttcaattttgaggtatggccatttattcttaaagatactgcattcaaacaaaaaggagtcagctgaggtggctyacgcctgtaatcccagcactttgggaggcctaggagagaagatagcttgagctcaggtcatcgagaccagcctgggcaacatagtgaggcccccatctc

SEQ ID NO: 333470 - DNA, 508 bp, Homo sapiens
catttcagaaaaatatactatgggttattactttttatctagctgttaatgattgatcctatgarttttctctttggattttttttttcatcagataaattataatttctcatctctccagttattaccaactctgaaaatgggtaatctgtggatattattggaataaaaattattttaatataaatttgcatctctattataggacacttttaaattgtggagaaaagcttcataaaaatcacataaataacaacaggaaattgtccaatcagttctgctatacatgacataaatgttccttaaatttatctcactatgcaaaattggaaataaaaatcacaagagtttgtgggggaaataggattggagcataacatgcaaaatttgaattaaatacacacaaatatagaaacctaataaaactgatggaatatttctacacatgcaaatggttaagaaatataaacgctacaataaatatggacttcaccttgaaagagaccta

SEQ ID NO: 333471 - DNA, 578 bp, Homo sapiens
aatgatactgcaggaacgatgaaagtagacttttataatgagagcaaatggcccggagtctgtgagaaattgctgaggatccttttaccgtagcaccattgctaattaaaatctaagaatcaacaccaagattgttcaggaaacacaaatactgattggagaaccaaacttgagggtcattccaatttctaaactatcttcattggaatttaactttttaaaaaatgtctccaaagcgtcataacctcacttctattcatttcyttttacatctcttacatttgtttccctaggctttctgttcttgtgcttgagatcattattacttgatacggggcagtgacaaatgagggaagcaatttgttcagaaatcatgcctgtggcaagtatttctagactggagaatgtagcctcatttatcatcatcattatcactgaaaagctataggtcaggaatgtcttaagtcccctgtgtttcagcattgtctattaaattggggttaattaaaatgtctcttctaaaggtacttctcttgaatacacacacacactttaactctggtcttttttagcagagc

SEQ ID NO: 333472 - DNA, 582 bp, Homo sapiens
tgcaaaaaagtagtctgctcagttcttttggtgcctgaaactcctttttaattctggggagttttaagtttgtttcttggtattcttaaagggattctgtgaaatccctattgtcattccataggtatgtgttttaaatgaaggcattgctcactatatggccatcacatgtcctgtgcagcagtgaaactaactgtttatgggaaaggattactgaacagggactccagcatctgtacactccacattatcactcctatcaaaggcattcattgagcccctttccatgtttctggataattgcataatcttatttaaataagaaacgcaatcaccatttgaaggcaaaatgtgtatcaaatgcatatatactgctatgtagatgaaaggcttgcagattaattggcagcattttcagaaaatagggcttgacagtagcagttcatgtgaaaaagatctgggaggttttagttaagtacaagttgaatatgtgccaagattacratgtggtggccagcaacccaatttaatctcgtaatagttacatgtatagaattacaattttctgccctaggatgcatg

SEQ ID NO: 333473 - DNA, 556 bp, Homo sapiens
gaatgaaagtctataaaaataatacatggtgaaaagctttctcttcttgggtataaatgaaacagcaaaagcctatgtgagataacagaaaaaaggaaatactgagatttattgatatcaagataaaaatggtactactgttggaatgtcagtattgagtaatagtagaaagtggaaaattaagtcaaatatcagaggagggtaaaatgaataatagcgttacatctaaatcaaaaatgcgttaatactgaattcaatgtacagaacaaaagcaactctggaaattttaccttgttaatttgaatgaactacatgtacaaaacgtgtttcacaatttaattaatcaagtcattttgcccagatagcacaatgcagtcaataccagcagctggggtgtgcatttatagaaaaggtaataatttgggrtacctgtggcatgttgccagaaataagttcacagtctgaagttgctgttcacaaactgaattcctattatcaccctaatgtcactccttcagatatttatattaaaaaataaagtggtaagaggatgtac

SEQ ID NO: 333474 - DNA, 607 bp, Homo sapiens
agtgcctatgaagtttttctatagcatgtgaacatttaaatacttttgctatattattgaataaggtaaggtagtatacaatcatctgtatcttgcaatcattccttttcaagttttaccttctgaaacaatggctgaaagatttattatactttgcatgcttaaataaatagttattaaatacagtcacatgttttatgtgtacaaacatagttaaaaaataaagtctagttgaccttccaccttcataaatagtaataattaaaaccaacagctaacttctrtagaatttgagtcatgttttgcggagctttattgattatcagcactgtccatcatcacatataacagtaagtgctttagaagaaaaaaaattggttaagaccttcaagacatcagtttcatgctgatggatttgtcaatagttcagttcctcatccctttgcctttctgagctatgtttatttaagcagtcttgaatgttcttgcatattgactaaaggagcttcaattgatggaaacaaggttattctttagtaagctgacaattttggtccttgatgttcaacaatggaaaaactagaaatgatgccctgccaaaagaaag

SEQ ID NO: 333475 - DNA, 607 bp, Homo sapiens
agtgcctatgaagtttttctatagcatgtgaacatttaaatacttttgctatattattgaataaggtaaggtagtatacaatcatctgtatcttgcaatcattccttttcaagttttaccttctgaaacaatggctgaaagatttattatactttgcatgcttaaataaatagttattaaatacagtcacatgttttatgtgtacaaacatagttaaaaaataaagtctagttgaccttccaccttcataaatagtaataattaaaaccaacagctaacttctatagaatttgagtcatgttttgcggagctttattgattatcagcactgtccatcatcacatataacagtaagtgctttagaagaaaaaaaattggttaagaccttcaagacatcagtttcatgctgatggatttgtcaatagttcagttcctcatccctttgcctttctgagctatgtttatttaagcagtcttgaatgttcttgcatattgactaaaggagctkcaattgatggaaacaaggttattctttagtaagctgacaattttggtccttgatgttcaacaatggaaaaactagaaatgatgccctgccaaaagaaag

SEQ ID NO: 333476 - DNA, 641 bp, Homo sapiens
attttcaaatacatgtttctaatgaagttgctcttgcttttgtctgctctcaagggtgacactctataatgggaaatgtagtgatacattgggaagatcatggtttttaattgagatacacatgaattccagtttcagctctgctwtttactacctatgtgctcagggcaacttacttatcctccctgatgttgagttttgctgtgtatagaaatgggaataataatccatatccttaaatgaccagtcaatagatctaacatacagcctggcacacagcaggcattcaaatcacttaattactgcatttataagtcactatttttacatgactagcaagtagaaggcaagttgttacaatgtgttaaccatcttccactttcttcttctttctcagatgatgacttttttcatgaactcccagaaacttttccttctgatccacctgagcctctgccacatttccttattgagcctgaagaagcttatattgtgaagaataagcctgtgaacctgtactgtaaagcaagccctgccacccagatctatttcaagtgtaatagtgaatgggttcatcagaaggaccacatagtagatgaaagagtagatgaaacttccggtgagttttccattgcatttgc

SEQ ID NO: 333477 - DNA, 641 bp, Homo sapiens
attttcaaatacatgtttctaatgaagttgctcttgcttttgtctgctctcaagggtgacactctataatgggaaatgtagtgatacattgggaagatcatggtttttaattgagatacacatgaattccagtttcagctctgctttttactacctatgtgctcagggcaacttacttatcctccctgatgttgagttttgctgtgtatagaaatgggaataataatccatatccttaaatgaccagtcaatagatctaacatacagcctggcacacagcaggcattcaaatcacttaattactgcatttataagtcactatttttacatgactagcaagtagaaggcaagttgttacaatgtgttaaccatcttccactttcttcttctttctcagatgatgacttttttcatgaactcccagaaacttttccttctgatccacctgagcctctgccacatttccttattgagcctgaagaagcttatattgtgaagaataagccygtgaacctgtactgtaaagcaagccctgccacccagatctatttcaagtgtaatagtgaatgggttcatcagaaggaccacatagtagatgaaagagtagatgaaacttccggtgagttttccattgcatttgc

SEQ ID NO: 333478 - DNA, 507 bp, Homo sapiens
gaatggaaaatggagttattctctgacaaaaagttttgaattggtttggttaargtttggtgatcttgtttcatgtgttgaaaagtaaaatggtgtgaataaatcttgacttgcttcctgttggactacatgaaattaaaacatggttcatacttaagaagataaataatgcgaatgaatagactgacaatgttaaatgcccaagcaaataataatattcttgaattgcacctgcgtggtagtcagatctaaatatcccgagatctggggagcatttttaacttggataaattgaaagtgtttacattaatgtctaatgttaatccatgtgcatagtttgcccttatatttgttaaggatttgtaaatgtcatagattcaaagtatcttatactcataacttacatccaaagtgaatcctaacttcctaactcttatctaaaattaaattgagggtgattcagaacagtgatagtgtaggattcatgaacagaagaaatggtaattg

SEQ ID NO: 333479 - DNA, 655 bp, Homo sapiens
cttttaataaacaatacgttagtttttgtgttaatgccttgttaagactccttattactggttgggtgcacacttsttattccagtagtttgggggactgaggtgggaagatcatttgagtccaggaatttgagaccagcatgggcaacatagagagaccctgtatctacaaaaaatttaaaaattagttgggtgtggtggcacccacctgtagttacagctactcaggaggctgaggttggaggatcatttgagcccaggagttagaagctgcagtaagctgtgattgcaccactgcacttcattcagcctgggtgacagaggaagaccctgtagcaaaaaaaaaaaaaaaaaaaaaaaaccggtttcctcgttcttcctcattctttcctatggtatacaaaatggtttttgtcttatcttagttctctccctattaaaatttaggctataacttataatcaaaatttcagaatttgcttattaaaaatctccctatgtagaaattccagttaccatatcacttaccaaaatttgtttattttcaagtactgcttgggaggcatcagcaagtggtgaaaggaacattgaaccatgagttcgaggccttggtattggttccagccacattcataatgatcttttgccttttcta

SEQ ID NO: 333480 - DNA, 655 bp, Homo sapiens
cttttaataaacaatacgttagtttttgtgttaatgccttgttaagactccttattactggttgggtgcacacttgttattccagtagtttgggggactgaggtgggaagatcatttgagtccaggaatttgagaccagcatgggcaacatagagagaccctgtatctacaaaaaatttaaaaattagttgggtgtggtggcacccacctgtagttacagctactcaggaggctgaggttggaggatcatttgagcccaggagttagaagctgcagtaagctgtgattgcaccactgcacttcattcagcctgggtgacagaggaagaccctgtagcaaaaaaaaaaaaaaaaaaaaaaaaccggtttcctcgttcttcctcattctttcctatggtatacaaaatkgtttttgtcttatcttagttctctccctattaaaatttaggctataacttataatcaaaatttcagaatttgcttattaaaaatctccctatgtagaaattccagttaccatatcacttaccaaaatttgtttattttcaagtactgcttgggaggcatcagcaagtggtgaaaggaacattgaaccatgagttcgaggccttggtattggttccagccacattcataatgatcttttgccttttcta

SEQ ID NO: 333481 - DNA, 572 bp, Homo sapiens
cttgcccaatgtttataaagctagtaagtagcaaacattccctttttgcttgamaaatactcaatacatagacttagagaaccatctgatgaataataaactctgtggagtttcccaaggagataccaacatctatttattagttataggtctaaacgagaaatatacagatgttaccttttcaacaatacgtttatacatgctatatatactggtctcttcagagattacaatgacatgttcttattattctttcatttgcattactttctaatttatttaaccaatatatttataaaaatgttttaaaagttatctgtgaatttaaaattactggtaatctgtaagttaaaggaaaaagacttagcaaatcattgtccacaatatgaagaggagcagtaagacacgaatggcacaggatatgtataaccagttggagaattgttaactgctccacagagtaagagattagcactgttaaaagtattgtgaaataaataaacaaacagaaaatttgcaaaaaacatacagggaaaggattccaagttaagtagtgcaatacaactgtaatg

SEQ ID NO: 333482 - DNA, 526 bp, Homo sapiens
gatatagtaataaccctaatagttactatttggtaaagtagagaaattggaaattctcatcataaatatacattaaggaaataaaaacatatcctaacatttgctaaatttcaagttgtttaatcttttattagtaagaaagaatattgtcttactacttttgttttgtctgagatcagattgatgaaaagtaataaaattcttctacagacactgtattgtttcacgtcttagtcaaaacagaaagcaactatatttttcaagaaagaattcttttgataaacacctctctttagtgaaataataaacattataacaaatgagataaatgttaaattatcaatrtaactatttcagaaactgtatttgttttctatcttatactatatgtcttaaacactaaaatatctgacccaaaatttccgtttccaaaatcaacatgaccgtgatagctcttgaaacattgtcgtgtctgtaagtcagaaaagaatatgttaggtggaaagtaacaaaaagcaaccaaaca

SEQ ID NO: 333483 - DNA, 526 bp, Homo sapiens
gatatagtaataaccctaatagttactatttggtaaagtagagaaattggaaattctcatcataaatatacattaaggaaataaaaacatatcctaacatttgctaaatttcaagttgtttaatcttttattagtaagaaagaatattgtcttactacttttgttttgtctgagatcagattgatgaaaagtaataaaattcttctacagacactgtattgtttcacgtcttagtcaaaacagaaagcaactatatttttcaagaaagaattcttttgataaacacctctctttagtgaaataataaacattataacaaatgagataaatgttaaattatcaatataactatttcagaaactgtatttgttttctatcttatactatatgtcttaaacactaaaatatctgacccaaaatttccgtttccaaaatcaacatgaccgtgatagctcttgaaacatkgtcgtgtctgtaagtcagaaaagaatatgttaggtggaaagtaacaaaaagcaaccaaaca

SEQ ID NO: 333484 - DNA, 522 bp, Homo sapiens
tcctttgcttgaacacataaaatattaagagccaattttcagctgcacctctgtcacttccattatcattctacacgtccagaggtgataatggactctgtaaattgcagtctttctccaccccagaccacggagggtttcaccaggggacagttccacacaaagggtggcccagatgtatgttaatggcactgagaagcgaacagcagacactaccrtacaagataatgtgacgtgttatccagaggaaagatgaaatgagcagaaaacaatttccttagaaattctgtaaaatcaacaaggacccattcttctccacaaatcaaataggtagcactatcttcacagaactttggaaacaagattaaaatacattcctaatgcctcatctatgaaggaattgtttgttcaagccaacagagaatgaaggcacatgagcattgaggtttaaagaattataggggaggcttttgtttaccatttgcttttttcagacatacaacacagatctaccagcattca

SEQ ID NO: 333485 - DNA, 522 bp, Homo sapiens
tcctttgcttgaacacataaaatattaagagccaattttcagctgcacctctgtcacttccattatcattctacacgtccagaggtgataatggactctgtaaattgcagtctttctccaccccagaccacggagggtttcaccaggggacagttccacacaaagggtggcccagatgtatgttaatggcactgagaagcgaacagcagacactaccgtacaagataatgtgacgtgttatccagaggaaagatgaaatgagcagaaaacaatttccttagaaattctgtaaaatcaacaaggacccattcttctccacaaatcaaataggtagcactatcttcacagaactttggaaacaagattaaaatacattcctaatgcctcrtctatgaaggaattgtttgttcaagccaacagagaatgaaggcacatgagcattgaggtttaaagaattataggggaggcttttgtttaccatttgcttttttcagacatacaacacagatctaccagcattca

SEQ ID NO: 333486 - DNA, 494 bp, Homo sapiens
taaaatacattcctaatgcctcatctatgaaggaattgtttgttcaagccaacagagaatgaaggcacatgagcattgaggtttaaagaattataggggaggcttttgtttaccatttgcttttttcagacatacaacacagatctaccagcattcattatcttcaaacatgaagtgaaagaaagagggtaaggtaaaagaaagtgcttatcttatccattgctgaaatgatactcactactctttgtggtgggcaatctgcccattaaaaggaagctgtcttataggaaatygaatgtggttgacactgggttttcatatgatcatatttcctactattccatgcaaaataatcagattttacggaaaatatacaggaaggaagggatttgaaactagtttttctcccttttccataggccgtcatctaactagttatctcactctaacactgggtgagtgttcattgactgaacctaccagactaagcacca

SEQ ID NO: 333487 - DNA, 605 bp, Homo sapiens
tattttctatgaatttttaatgatgcaagcaatttttcaaggtcactgagagagcaatcagtcattcagacagtaaatttgttcacagtttcttggcagctttgcaagaaaacaagcaagtgggatttgtggaggaggggaaatgatacactgaggaagaggtrgattaggagtactataaaattagctacaggtatacttgattcactctttaacctaccaggttcttcactaagtgttctagaaggtagaatgagactttatgactcaatgattttctggttgtcattgtggttaatagcataaactgttgacacctataaaactcattttctaatgatttgatcatatcagtatccaaagatcgctgaacatttctaatttaaatttaaatttaaaaattaagttagattataaaaattaagtgcatgggaaagacattaagaggtatatatttatcaatatttacagcccagaatgagttatttctcaaaaacttgaaaataataagaaattatactgctctcttaatgttacattataagactgaaacagaatggaacaagagagaaatgtgaaaaatgtatagagtacatgtattaaaa

SEQ ID NO: 333488 - DNA, 581 bp, Homo sapiens
tgtgtaaaaatgaaagtttttctttttaaaaatataattagatattccatacttcatgcatagaacacattcattgatgagacttatacaaatactattaaaagattcagttccctatgcaaatatgaggttgagatttatttgtttagaaaattaaaagcaaattagaacattttctatgactayaattattttcactgaagaaatgactgacttttaatattttaagtaacatgggcaataagatgttaatactatgttcatttctaagttcaatgttcccagaaaattctgtgcatttgcagaacttattagatactcttaagtgaatcaactgacataatgtttcaatgaccaagttaaaagctaatcagaaatttcccacaatacctttacctatatgtttacacacattaatattttatgtcaatataatatgttattcaatgttgttttctgaattcatttcaatttgaattgagaaacattagcaatatccctatttcctgttattttccttttttcaaacctgttatatgtactgattgcaaacaaatatactttaaaaaatgaagaaggga

SEQ ID NO: 333489 - DNA, 512 bp, Homo sapiens
gcattattttaaatggcaacagattattattgataatagcgagaatcaaaatatactgacaggtacttaattcagattccagttatttcttgtggaaataaatttttctttgaatcaaatagaagaaaacagcacttttaaaaaggagtaggagtcacaagttaccagcaagtacctccactgggattgtctgtgggtaactgcattttatgctcttgttggtggatggaactgtccatgtggtgttttttttttttttggtgtttttcgtatttctttatracttgaattttcaagaagtctatccatgtatatgtatgaattcataatactaaattttaaatagccattctaataataacttttctctaagcaataacttaaatagttagcaacatgcttatcttccttttgtccaacacagtgatgtggtttggctgtgtccacaccgaaaagtcatcttgaattgtagctcccataattcttacatgctgtgggatggacctgctggg

SEQ ID NO: 333490 - DNA, 591 bp, Homo sapiens
atttttatagcaggtcagagtaagctttataagcaaaggggggataaaatattttccagacaagcaagtgctaagggtatttgttaccactagacactcatcaggagatatttttaagggagttctaaacatgaaaacaaatgaataatacctgctatcacaaaaaaaaaactcatgtaagtgcatatagccccacagactatataaascaatgacacaaaagaaatgacaaagcaacaagctagccacctcatgatagaattaaaatctcatgaattaaaattaaacttgaatgtaaatggtctaaacaccacacataaaaagcacacagtggaaacttgaataaacaacaacaacaaaaaaccatctgcctgctgtgttgaagagaccatcttacatgtaaagacacccataaactgaacagaaagggatggagaaagatttaccacacaaatgaaaaaccaaaagaagcaggaattattactcatatataagataaaacaaattttaaaccaacaacagcaaaaacgagacaaagaatggcattacataattacatagggttcaattaaacgagaagacataactatc

SEQ ID NO: 333491 - DNA, 563 bp, Homo sapiens
gaccacacttctcgaagcaaattgcagattcaacactattcctatcaaacaaccaatgycattttttcacagacctagaaaaggctattctaagatttaaatggaatttaaaaggatcccaatttttcaaagcaattataagcaaaaggaacacaatcagaaggattatattaccagactttaaaccgtactataaggctacaataaccaaaacagcgtggtactggtacaagaacagagatatagacaaatgggatgaagtagagaacccagaagtaaagccatacaccaaagccatttgatcttagacaaagtcaacaaaaataagcaatgaggcaaagaccccctattcaacaaatggtactggaatcctggccagccatatgcagaagaataaaactggaccactacctttcactgtaaacaaaagttaactcaagatagattaaaaatttagatataagacttcaaactttaagaatgctagaagaaaacctagaaaacacaattttggaggtcagctttgagaaacaattcattactaagtcttcaacaaaaattaa

SEQ ID NO: 333492 - DNA, 486 bp, Homo sapiens
acttcttccatggatttttgcaacccatggattaggagattccctagttagccaacaccaacaggccttgggtctgatacacagaactgtgtcaagtctcggcasaacagacactcagtacacacagagacccaggagttttacattctccagccccaggatccctggctaggagggaaacccattcctatatatctgtaggaaggggactgaatccagtgagacagaaaatagaaaatggaccttttcttacaacatagacaaaaattaactcaaattggatcaaaaacttaaatgtgaaccccaaaactataaaaaccctagaagaaaatctaggcaataccattcacaacataagcatgagcaaagattttatgacaaaaacccaaaagcaattgcaacaaaagcaataatagactgatgatatctaattaaactaaaaaacctctgcacagcaaaagaaactatcatcagagtgaacagaca

SEQ ID NO: 333493 - DNA, 486 bp, Homo sapiens
acttcttccatggatttttgcaacccatggattaggagattccctagttagccaacaccaacaggccttgggtctgatacacagaactgtgtcaagtctcggcagaacagacactcagtacacacagagacccaggagttttacattctccagccccaggatccctggctaggagggaaacccattcctatatatctgtaggaaggggactgaatccagtgagacagaaaatagaaaatggaccttttcttacaacatagacaaaaattaactcaaattggatcaaaaacttaaatgtgaaccccaaaactataaaaaccctagaagaaaatctaggcaataccattcasaacataagcatgagcaaagattttatgacaaaaacccaaaagcaattgcaacaaaagcaataatagactgatgatatctaattaaactaaaaaacctctgcacagcaaaagaaactatcatcagagtgaacagaca

SEQ ID NO: 333494 - DNA, 562 bp, Homo sapiens
ggaaaaaaactatcaagagaggaaacagacaaactacagaatgggagaaaatatctacagactatgcatcgaataaatgtttaatattcagaatatgtagtaaacttaaacaagtcaacaagcaaaatacaattaacccctttaaaaaatgggcaaaaaatatgaacggatacttctcaaaagaatacatataagcagtcaacamacatatgaaaaaataccatcatcactagacatcagagagatgctaatcaaaacccaaatgatacacaatctcacattagtctgaatggctattattaaaagtaaaaaaacagcagaatctggcaagatttaggcaaggaaatgcatatatactgttggtgggaatgtaaattggtcagccacgctagaaagaaattcgatgatttctcaaagaacttaaaacagaacattcaacacagaatattccttcaacacagcaattccattactgagtatacacccaaatgaaaataaataattataccataaagacgcatgcactcacattgctgcactattcacaatagcaaagacatgg

SEQ ID NO: 333495 - DNA, 403 bp, Homo sapiens
gaccagactcataattataaaacgtaggcttgccacagaaggagctttcttctctgcctccgacaactgagctgattctctggggttgaaattgacttccrttcctccagccatattctcttgcctagtgtccctttaattttttattttattttattttattttgagacagaatttgactctgtcacgcaggctggagtgcagtgaggcgatttcaactcactgcaatctctgcctcccaggttcaagcgattctcctgcctcagcctcccaagtagctgggactacaggcacgcaccaccacgtctggctaatttttttttttttttatatttagcagagatggggttttgccatgttggccaggctgacctcaagtgatccacctgcgtcagccttccaa

SEQ ID NO: 333496 - DNA, 403 bp, Homo sapiens
gaccagactcataattataaaacgtaggcttgccacagaaggagctttcttctctgcctccgacaactgagctgattctctggggttgaaattgacttccattcctccagccatattctcttgcctagtgtccctttaattttttattttattttattttattttgagacagaatttgactctgtcacgcaggctggagtgcagygaggcgatttcaactcactgcaatctctgcctcccaggttcaagcgattctcctgcctcagcctcccaagtagctgggactacaggcacgcaccaccacgtctggctaatttttttttttttttatatttagcagagatggggttttgccatgttggccaggctgacctcaagtgatccacctgcgtcagccttccaa

SEQ ID NO: 333497 - DNA, 403 bp, Homo sapiens
gaccagactcataattataaaacgtaggcttgccacagaaggagctttcttctctgcctccgacaactgagctgattctctggggttgaaattgacttccattcctccagccatattctcttgcctagtgtccctttaattttttattttattttattttattttgagacagaatttgactctgtcacgcaggctggagtgcagtgaggcgatttcaactcactgcaayctctgcctcccaggttcaagcgattctcctgcctcagcctcccaagtagctgggactacaggcacgcaccaccacgtctggctaatttttttttttttttatatttagcagagatggggttttgccatgttggccaggctgacctcaagtgatccacctgcgtcagccttccaa

SEQ ID NO: 333498 - DNA, 644 bp, Homo sapiens
tgttaaatagaaaacataaactacaatggcagaaataattccacatatgtcagatataccagtaataacaataaatgcaattgggtcaaacttgagtaaaagatcaagactcttcaattgtataaaatgtatttgcagttgccctaccttagyatgaatgtgtaaactagtaccaaggacaggagggaaaatattcattaaggcaggcctgagcctagtatacatttgctggccacatggagctaaagcaccacaggtctgctttcatctgcacaatataattgactttcttcttagaatatgttagcacctagtaagcatgaaataagtatttggtgaataagcgctcaactattcacactgagtacttattaggttgaaatatatgaaattaacagttttgcaaatgatcaactttttcaatttcgtacagttcaacttaatattttgagcatttttatatgtaagcactttattggaagatctcattttcattcttgcaacacgatatgaacatgacatgacattataattcccattttatagatgttaaaatcaaggctcaaagacattaagtcataggttatgcagctagtgtcagtggtggggactcaagtcaagtttgtctgaactcaacgtctttg

SEQ ID NO: 333499 - DNA, 546 bp, Homo sapiens
ttcaaatatgaattagtccaaaaaatatgaattatttcccttttttagctaaagttgtctttcctcctgccttctacttcccttcacagttaccttttatgagatctaatatattgatttttctttagtaagatgaaattccactaatattgatgtaaaaagtatatacatctaaaatatcaattaattcrtttataagtgaatactttaaaatgtgtgaagtatgaatttctatatggagatgtttaaattttgggctgtggattttttataaagatataatcctgaaaacttaatgttatcattctattcttgttgataaatgttggcaaaataaataacttttgccaggtttgttatgttttggaaatagaaaatttgacttttaagtggtctgtgttctctgaagtagtttaagcatatgaaagcttaaagcatatataagcttcaagaggacaggaatttagtgtgtctgtagtcccagtagctgaaacagtgtctggcatttatttaggtaattggtagttaatatgaagttaatatata

SEQ ID NO: 333500 - DNA, 513 bp, Homo sapiens
tgtttaggattgaatgaatcataaataccagtgaacaatttgatattcatgaaatttttcccatatgctttttggacaaaattagtgtttagcctaaattcaagtgatatttttcaaactatttattatttttcaaattatttttaattcattttttttaaaaaaagacaattttagggtagtgaatgaaagtgaataagaaaatccaatttggggccgggcacggtggctcatgcctgtaatcccagcactttgggaggccgagacgggtggatcatgaggtcaggagattgagaccatcctggctaacatggtgaaaccccgtctctactaaaaatmcaaaaaaaaaaaaaaaaaaattagccagacgttatggcgggcgcctgtagtcccagctactggggaggctgaggcaggagaatggaggcctgtgtagccaatgtcagcaagtgtgttccaggctcttaatgttccttgaatttttttgttgttttctctttagtgaccatgttt

SEQ ID NO: 333501 - DNA, 596 bp, Homo sapiens
taattttgtgtcttgcaacattattgaatttatcttttctaagagttttttggtggagtctaaatttttcaaagaataagattatgtcgtttgtgagcaaggataaattaattgacttcttttttttttccaatttgtatgccctttaatttaacttcttttttctcaatttggatgtcctttatttatttctcctgcctacttgctctgaccaggacttgaggtgctattttgaattaatgtggtagaagtggacattcttttcttgttcctgatcctagacaaaaggtcttcaattttctacattaattacaatgttagctgtgcttttttcatatatggccttaattattttggagtatgttcttctrtacctagtttaacgagcatttttatcataaaggaatgttaaattttattgaatcttttctgcctcaatttagatgattacatagcattgtacttggttctgtaaatgtgatgtatatctttattgataagcatatattgaatcatccttgcattagtgagatgaattccacttgatcatgtgaatgatctttttaatgcgtaatgtgttcaattagctagtattt

SEQ ID NO: 333502 - DNA, 544 bp, Homo sapiens
gaggtggtaagtgagtggggaaaacatccttttttccatggaactgtgcaacccatggataggaaaataccacttgtaagcccatgccaccaggccctagggtcccaaccatcgagccaggcagattctcaacaatcattaagctggaatctgcttaaccctgcagagctgctgatgggagaggtgacaagcaccacagctgccaactgtggctgcctgctatctaagcctttgagctcctcagggraggggcagcagcactgggactgatagccgtctaacacactaagttcccagggcaggggaacagggcagccatctctatagctctaagccatgcttttccctggtggagctggagagtctggacagcttggttgcaagaggtattccctacagcccaatacaccaactgtagcagaccgtgaacaaagtgccttttcaggcctgacctttacctattccacatcactgggcgggcctccctgcaggaactccaacaactccagctaggggcttagggacagaactctgatatccctgg

SEQ ID NO: 333503 - DNA, 613 bp, Homo sapiens
tgacatttaaagatacaggcctctatgatatcattgagagaatgtgtgtggatagaggaaaggtccagggacctagcctagggagcttttatttagggcttaggagatgggaagacagatggaatggtcatggaggaaggaggagaaaacaaggatgcccaaaggagaaagtggtattagaaggggagagggatcagctctgtcagatgttgctgatcagttgagtaagttgaggactgggatgaccgttggttttggcastgtggaggtctgtgggcaatttcagtggagtgatggggatgacagcctaatttcagtaggttcaggagggaacaggaggaaggaagtagagtggtttgggaagggggcagagaaagggggtggtactgcaggaggatgtgggtcagcaggggagactgctgtttgccaggttgtcagctgattcttccattttgaagaacgaattacccatttctgcccctccaaggagacctctcatgacatcaaaacctgtctgtcctccagggccactgtctctgaagcagggcaaacactcctcagttctcactctgtaggacgctccctttgactcgatccatcccttggttcatgc

SEQ ID NO: 333504 - DNA, 613 bp, Homo sapiens
tttacaactggtttacctcgttatgcaggctgattttaactatgtgacttgtaggatataaaagcccctcaagtcaatttgcgtcttggaattcctgagaccaaagcatcccacatgtattggttgttgataaatcaaagaggttgcagattctgtaagactgaaaaaggaaattggaagctatgtctagaaatctgagatttctctcatgttttcttcgtgcattctttttcctgctgtatcgtatccttcaccttcattaaagctttacgtgttgtgtatattcctttggaatctcataagtttttcacttagccaacactttgtaattgctkcacttagtcataatgtaccatacttgttatttatccttggatttggcttgctaatattttggttaggatttttgaatctttacttatgggaaagatttggctgtcattttcctttcttatgtttttatcatgccaggttttggtatcggatccttctggctttataaaaatagttgggatgttcctttttttattctttgaaatattttgtataagactggttttacttcttccttaaatattaagtagaacccactattgaagacagctgggcctgg

SEQ ID NO: 333505 - DNA, 544 bp, Homo sapiens
gtgtgttcttctgttgcagtatctaataaactctctcaatttttcttgtaataggactgcagtttgcttaattggtagagttcacgtctcattgatcttctcttccccatggtgtycttgttaatactggacttgtgatattttcagattgaatgagtggaaatttgaattctagctctgtttcttctttgaacataatgtgttatcttggataagtcacttagactatttttcttgtctttccagtaaaacaggggaaatcataattcttgcatcaaactattataaaaataaaataatttgcaaaaacttgaaaaatgttctgtcagttgtaagatatttagtttatgagatgtcactgtttgctgccattgttagaaatttggagaaagataatcaagatagaatgaaatccaatttgcattctaagatattttacagcagtattttggcatactggtgccaaatgtttcatgtttccataagaaatattaaaatatctgatatttattttttatctaaaatttcatcagtagttagaaaa

SEQ ID NO: 333506 - DNA, 552 bp, Homo sapiens
tctgaaaatgcattattcaggttccgtggagtggcaatcaagtactattrgagagctttagtgtatattttaagcaagtgaacaatgagttgatttataaatatttaaaaataataagtcatgaattagccatatctgcctgcagagaattatttaataaataacattactctgatggaatttaaagctagccatttgtattcaatcagtatatgttactattcttgaaggtactgtgttttatttgatctaataatgatatatctgtattgatataatttgaaagagatttctaagtcacaggtttttgttaaaagttggattttcctctcgaaaagttcgttgatgggaaaagacacactaggagtcatcaacacaaaagaacgatagaccagatgtctctattttaaccagacatattgaactagtagttatggtaatttttcaatttggtttaagttatttttcccctggtagttgtataaatgtgtatgtattcaaaatgtgccagttaaaatcaaatactgaataaaattgcaaggaatcgtactg

SEQ ID NO: 333507 - DNA, 575 bp, Homo sapiens
ctcaggctagttatctgccgcaggaacatgtccttaaggcacagctcatgctgttgtttgtggttcaggaacaccttaagtggtttttccgccctaggtgggccaggtgttccttgccctcattctggtaaaccagcaaccttcagcctgggcatcatagccatcacaagcytgtcacagtgctgtagagattttgtttatggccagttttggggcctgtctatggccagatttgggggcctgttcccaacatctttatattaaggcagatttttgtagacaacatatagttggcccttgtctttccttcactattatgacagtctctgtcttttaattagaatatttaggacactcacatttaaagttatcattggtatagttggattaatatataccatgtttgcaagtattttatgttaattgcagttgttctttgcttatcttctcattttcttcattctctggttttaattgaatattttatatgattctatttattatctttcttagcatatcaatgagctgtgtttaatgttcgctgtagctatgggtgccagagggttcaatttctc

SEQ ID NO: 333508 - DNA, 474 bp, Homo sapiens
ttcttataatgtatttcactttatgttgaaaagctattcatataatttaccaaattataaaacatctgtaattgattaatctatttcctgccccctgacacaaagtaaatgtagaagaaagaagtctaacaatggtctcttggaaatggtgctctgtaaaatatgttaatttgacatagactattcaccaagtctttaaccagacttacctgctatggactatttatattcaagtacccaaaaggtgaggtagaatctaagagtgagttcataagattggttatttatacttagctctctgtcagagaatgaatgcataaacaatagctttttttttaaamcatcaatttacatctgcttaagtaggacaatatattttctcttaataaccagaaattggccttcctgtgaaataactgaatatgtatgttttcctttagctggctccaaaactccttattaagcactatttca

SEQ ID NO: 333509 - DNA, 519 bp, Homo sapiens
tctcactatgttgcccaggctggtcttgaactcctgggctcaagcaatcctcccactttagcctgccaaagtgctgggattataggcatgagacactgtgcccagaccttgatttatgcacattaaagttggagaactgttgataatggctgggatcaagggtgacaaaaatgacaatatacatattgaactagtgaatacttttttttttgaaacagcatttggcgctgtcacccaggctggagtgcagtggtgcaatcttggctyactgtgtcctcctcatcctgggctcaagtgatcctcccactgcagcctcctgagtagctcggactccaggctcatgccaccacgcccggctaattttattttgtattttttatagagatgaggtttcgccatgttgcccaggctggcctcaaactcctgagctcaagtgatcctcccgcttcggcctcccatagtactgggattacaggcatgagccactgtgtccgggccctgaatacttttatttttaaa

SEQ ID NO: 333510 - DNA, 519 bp, Homo sapiens
tctcactatgttgcccaggctggtcttgaactcctgggctcaagcaatcctcccactttagcctgccaaagtgctgggattataggcatgagacactgtgcccagaccttgatttatgcacattaaagttggagaactgttgataatggctgggatcaagggtgacaaaaatgacaatatacatattgaactagtgaatacttttttttttgaaacagcatttggcgctgtcacccaggctggagtgcagtggtgcaatcttggctcactgtgtcctcctcatcctgggctcaagtgatcctcccactgcagcctccygagtagctcggactccaggctcatgccaccacgcccggctaattttattttgtattttttatagagatgaggtttcgccatgttgcccaggctggcctcaaactcctgagctcaagtgatcctcccgcttcggcctcccatagtactgggattacaggcatgagccactgtgtccgggccctgaatacttttatttttaaa

SEQ ID NO: 333511 - DNA, 516 bp, Homo sapiens
tgcccaggagtttgagaccagcctaagcaacatagtaaggctgagattgagagatttagagagagaraaagagaaagagagagagagagaggccaggaatggtggctcacacctgtaatcccagttttctttaacctggtctcactacattgcctaggcttgtattgaacatgtggtctcaggtgatccttcctcctcggactcccaaaatactgggattatagaaatgagtcactgtgcctggcctctctctctcttaacattcttgatccttctgttgaatacttttagttaatatttcagggagtaaacattaaagacacaaccaattaataactaaaccaatgtgcatatgttttagtttttacctactagattttcaagtccttaagggcaagaaacatcatgatgttcccacaacactctataattaccaataatgtgacctcaagtgagtcatgtgaactgtctgtgccatggtttcattagctactatatattaatggtagtagctcc

SEQ ID NO: 333512 - DNA, 485 bp, Homo sapiens
tgtggcattcacattctcaaaccatttttgtctttctggcatttgcctgaaagactaagttccattgcttgttttaataatctatgtctgtttgacatayagtaattcagatcttcctttatgtggaaagatgagcatccctcctgtgatgagatggtcaccaccatttctgacctagagggagggtcgtagcaggtaagggtgcagtgtggggctctgagtctgacataaggtcagaatcccagctctgcttctctgctgaaaattgcttaacttcttttggtcttggttcacccattagtaaaataaggataatagcaattatacctgtttcttagcattttagtgaagattaaaggagattgtttgggggaaaaatgttttttctcttctatactctcagaacacttcgggtcaccaaaacatggggatttctcctttactacacaattctccaattctttgcagacaccaactgggtgccc

SEQ ID NO: 333513 - DNA, 229 bp, Homo sapiens
cttcataataaaagaaaagatgacacttagaattggatcacttggccctttctcttcttatctactcccagttcaaaacgcatctgttaatagccttagacgtgcagttgggctcaaagcactcaaactttagcacaatcttctttgtagttttggcctttttcgggataatcagcttagtctgcccaccatagccactctgcttyctgtcataacgctgctttccctg

SEQ ID NO: 333514 - DNA, 554 bp, Homo sapiens
aaaattttgtaacgaggcatcacttcctgataatactgttaacatgatcaggggaagcttgacttatgcatttatacttctcattgttgtgcagtaactcaggcaaaaaaaaaatcttatggatcttatgctaggtgtgcttgaaatccccacccatcaacactactttcttggaataatagagaataatgatttagtttgggcaagtggtaaagaaaccatcaccattaagagtgtaacccaaacacagacaagaaatatgagcattcctcttacttacattctgaaaaaatgcaatctggaaaatcaagtatgcgagtttaaaagcatgtaggtatgcattttgatttgatagtatgrctaatgaaagaaaaacaaacattacatgcacaaatttagaaatcatgtagttctaaatacatttcaattagtttggcatttccactactgattggattagaaaattggtgtgaaaaaagttggcattctcataggattaccaaagtaactcagtggcatggtctatggtagctatgagattaaaattaatactt

SEQ ID NO: 333515 - DNA, 602 bp, Homo sapiens
catggtctatggtagctatgagattaaaattaatactttactctcaatatttataaagtgtctcctatcttcaaagcaattcactaaattaatgctctcacttgttaggaagcagcaacaaaagtcatttcaagtaaaatgcaaaaagagcttttgtctaggcctagctgaattataagacttggaaacagatttttaatcctttagctaaaacctccacactttgcccaggccctgtcttcttggtctgatgcttctttaaaaatggcctccaactatacattttaggttttatctcctattttctcatcatgcccatcatactatagccaagctgaagtttttttttttcctctttgctagtaaatcctcctctcttgctgagaatttccatttcttcatctccatttgtgaaatccttcacatacataagacccacagccaccactgcacctttttttatagatctcttatgatttctcctgctgggtgtgatttcttattttttctaagaagcaaagctgctattatttctcacacaatgcctagcccagagtgctgtacaaggyatgagctcattaaatattgattagatggattgt

SEQ ID NO: 333516 - DNA, 582 bp, Homo sapiens
atggtaagcagtcaataaatagcagttaccttatgataacatgaggtttgcacttatttttccacagcctgaggtcaagagaaagcaaataaaatgaatacacagctctatgaatatggtttttagctgcaaaaaatgtcacatcgcttagttctgctggaaacctcccataagcaatttggactatagaatagtttttaactattacatcacagacgcaaaccttcctgtttaaagtgccaagttggcagtacaaacaagcactcatgtcatttatagacacatttttagatgacgagctcacaaaataagctttgtcttactactgaaagacctatttggtgtaaatgatttaattttctgctctttgagcctcattaaattatattgtttagcaaaaagtttgctgctaactagattttattgtcaagacaaatcctaggaagggaaaactcagtaattgttaatcttcctaaagaagatgttgtatttttcttgttatgtaaagtttggcaataatcacttttctaaattattagaaaaatgawcttttaattaattaaagcataattgtattcagag

SEQ ID NO: 333517 - DNA, 550 bp, Homo sapiens
gaggcagaatggatataggtgctaagagaatgaaggtgggtgaggcatttaaaatttttcaaaatgttaacaattgcacctgatattttaatttttatcaagaaaacccttgcttaaagccatatgttactttttctgtaccgagaccaggaggtaccctgcatagttacccatttgttcttgcagttcttgtttcatatgcacattttatcaaaaagaataagtagtctccccttatccacggggraaacatcccaaggcccctacagggtgcctgaaactgtggatggtatggaaccctgtatgtactatgtttttttttctatagatatatacttatgacaaggtttaatttatcagttaggcacagtaagagattaataataataactaaggttaaactagaacaattataataatatggcagcatcactagtcttgtgctttggggacattatgtagtaaattaagggttacttgaacataagctctgcgataactctacagtgaatctgataaacagctactgagtgagtaatgggtggggact

SEQ ID NO: 333518 - DNA, 550 bp, Homo sapiens
gaggcagaatggatataggtgctaagagaatgaaggtgggtgaggcatttaaaatttttcaaaatgttaacaattgcacctgatattttaatttttatcaagaaaacccttgcttaaagccatatgttactttttctgtaccgagaccaggaggtaccctgcatagttacccatttgttcttgcagttcttgtttcatatgcacattttatcaaaaagaataagtagtctccccttatccacggggaawacatcccaaggcccctacagggtgcctgaaactgtggatggtatggaaccctgtatgtactatgtttttttttctatagatatatacttatgacaaggtttaatttatcagttaggcacagtaagagattaataataataactaaggttaaactagaacaattataataatatggcagcatcactagtcttgtgctttggggacattatgtagtaaattaagggttacttgaacataagctctgcgataactctacagtgaatctgataaacagctactgagtgagtaatgggtggggact

SEQ ID NO: 333519 - DNA, 614 bp, Homo sapiens
aatgagtcattctttttgctcacctctacatatctgtcagaaaaaaaagtcaaacttcatcagtatttgagatgcttccgtggatgtaagcccctaaacaattccttcctccctcccataaaattaaattaatccatgcctgaaagcatagccctgtttcctttgcttatttttgtcctaraacatgtctgatctctctgcctgtctctactctaatcctgcttatggaccttaactccttgaggtcaggcaaggatgcggcacagattaatttaaagtgttgtgagattatgcaactacttacgtccctaatgtatttttaatatattttgaggtatcttcttacctttgtttgtttgtttgagaactcttttctaggaagtgggcaaagcaaaccaccaagaaatccattaataaccttccagaatacatagagtaccagggtttgagagtgggtctccaagtgacaggcacagtggcttatcttggctctaccacaggagggagcattcaggtgaagtcgatgcaggggctgccttaccctgagtttagatccttagcagggagcgccttcaggaggatcaaatcattttctgaaacgaggatctcatccc

SEQ ID NO: 333520 - DNA, 586 bp, Homo sapiens
tcctgggctcaagcaatcctcccacctcagcctccaaagtaactgcggctacaggcatgcaccatcatgcctggtcaatttttttcccttttttttttttcctgaaacagaggctgactctgttgcccaggctggagtgcaggggcacgatctcggctcactgcaacctctgcctcctgggttcaagcaattctcctgcctcagcctcctgagtagctgggattataggcacgtaccaccacatccagctaattttggtagagatggggtttcaccatgttgaccagactggtcttgaattcctgacctcaratgatctgcaggcctcggcctcccaaagtgcagggattacaggcatgaaacactgtgcccggccaatttttttccttttttatagagacagggtctccctgtgttgcctaggctggtctcaaactcctgggctcaggcagtcctcccacctcagcctcccaaagtgctgggattacaggcatgagccaccatgcctggccagattattcttttcaacaaacttggcatcacagggtgagaagaagtagacaattactgtcttcacagggtcgct

SEQ ID NO: 333521 - DNA, 595 bp, Homo sapiens
cttactgaatgcagagagaaaatatggtagtatccctgcctttaaggagcttataatgtcttaaagcagcaacctatagcaaccagattaaattagaacaaatgaaattaatcgtaattctaaacagtatttggaaaagggaaagaatgacagaagtggaatgatcattgaagatttcatgaaaaagaatatatttcacaacaaaatccaaaaaagttaaacattaatattatggctaacttttacttatatacgagtggagctagagtatggctctgttagatattagtataatatttagtattatattaaacacctcactccccttcaccataagaggtataccacataaatctctggaagttttcatccaatttattttattttattttatttatttttttgagacagggtctcactctttcacccaggctggagtgcagtgstgcaatcttagctcactgcaacctagaccttccaggctcaagcaatctgcccacctcagcctccagaatagcggggactacaggcacacatcactatgtgtggctaattttttgtattttttgtagacataatgttttgcaatgttgct

SEQ ID NO: 333522 - DNA, 535 bp, Homo sapiens
tgtcatatctggaatttcagttataggcaaaagaaaacctttctgaaaaaaggcgaattattattttacagttctgcaaatcagaagtctaaaatgggtcttacaggctaacatcaaagtgtcaccagagctgtgttccttccagaggctctaggggaaaatgcattccttgctttttccagctcctagagactgtccttattccttgcctcatgacccctctctccatcttcaaaagcacatcatttcaacctgtttccatagtcrtatctcttctctctagctttgaccctcttgtctccctactatgaagaaacttgtgatcgtattgggcctccaagattatccagaataatctcccaatctcaagagttttaacttaatcacatctgcaaattctcttttatcacataaggtagcaatcacagattctgggtattagggcatggacatctttggtgggccattattctgtctaccacatctatgcttccagacttgacgatatgggaaaccaaaatatatccaccaaaat

SEQ ID NO: 333523 - DNA, 580 bp, Homo sapiens
tctaggggaaaatgcattccttgctttttccagctcctagagactgtccttattccttgcctcatgacccctctctccatcttcaaaagcacatcatttcaacctgtttccatagtcatatctcttctctctagctttgaccctcttgtctccctactatgaagaaacttgtgatcgtattgggcytccaagattatccagaataatctcccaatctcaagagttttaacttaatcacatctgcaaattctcttttatcacataaggtagcaatcacagattctgggtattagggcatggacatctttggtgggccattattctgtctaccacatctatgcttccagacttgacgatatgggaaaccaaaatatatccaccaaaatatacttctttggcatattttgagatggctctttagaggggctgcagacataacagtggctctgaaagctgtccttttgtggaaaagatttgcatctgtagaggaaatctacattagtgaagtaaacagtggatgcaaacaggatttctctgagacccattatcagccttatcctaaactaggaaagattaactc

SEQ ID NO: 333524 - DNA, 487 bp, Homo sapiens
caatatatatgaaacactttatatgcaaatagcattcatgatattttacataattttttaactaaatacaatatatagcagaacaagcactccttttggagtatgaaactcaacacaagtcccagcttcattaaatacttactgtattgccagctgtgcattttgagctgcctcacagcttctgagggctggttccttatttgtgattttagtaataatactgtctgtgcagattcacattgcagaataaacaggagattcaagtaggaaaaagaaaatagagtgccttctaaacagtccaattwtgcagaggtagtggcttattattatagaatcatagccttctgtatctgtttccaggattgtttcctgggctatgcccttcgactggctgggaagcaactaccagcctttggcaattttagggcatttctgaccatttgtcttacaaatgaactgtgtggtagaattaggttctcatgactct

SEQ ID NO: 333525 - DNA, 504 bp, Homo sapiens
tcccaaatgtttgtattttcagccctcacatctactgcctggtacttaggaggttttcagtaggtattggtttttagagttgcaggaaaatctatagaacataattgagaaaaagaaggaacatagctgctcattggctattttctgtctctgtctctcattatgaagttcattatgcttgtatgaatatacaagccctgagaaaataaatcatttccaacaatttattagagcaagagacattgcctgggaaaataaattatttccaagaatttatagagtgagaggtcagcgagttccagcaatatcttggtcattaatatagcatacttttactttgtttctggatggttttaatttttacaaygaaaattaaacatataaagaagcccagaaacctgaaacaagctagaataaatagatggtcaggtgaagaacagcacttcccataccatgtagctttcatttgcctatgtgtctatcccttctaccaaactgcaagct

SEQ ID NO: 333526 - DNA, 529 bp, Homo sapiens
cccttcctaaaaagtaaaaaccttaaggagaaacccaaaatgtaaaagagatgaaagaagatgccaggattactcacagaacgtattcctcctcccagtgatggttgggaggaagtagaaagtgcttaggctttgggctgagtcagatccaaattcatacctaatcttcaatagctggcatgagagaggctctgcaagcagyggtgcctcctgcaaaaatacctggcatggataattatggaaacagtaaagattcctgagctgaaggacaaaatggccctagttgtgtggaaggaaaaataacaatcaatatactagacaacatttacagaatattacaatatgccggggactttattaggttggaaagctaagtgctttacaaatattacctcatttaaccctcctgacaagtcttactcaattcttaccatcaccattctaaggatgaggaacctagaacttaagtgcaataatctgccctgatcacagatctaacgagcggtggagtcatgatttgaaatagttg

SEQ ID NO: 333527 - DNA, 633 bp, Homo sapiens
aaaaaaaaattcaaagataaggaaatataagtaaggttaaaacaataaaaatatgtaagcaccttatttagcataacaaaattcaaggactctttcttacctcaagaatgggacacataacttctgctgtgacatcaccatgattcttacagaatttatagaatgcctcaaggtaagacttaaaaagaaraaagatcataaagtgatataatgaatatatattccttttgaaaatgtctagatcagcttttcatggtttattaaatgctttaatggaatctgaattacatctcccataggaagatattttataataaatttggtagaagctttcacattgcagcatgttgcacagtctaaaaaagaattccagaaaaggacaaaactgcatttatcataacttataattacttaacaagcactttttttgcatggttttggattatttcatatggttaattcttgctattttaacaagagtgccaagttcttttctgagatcagtgaataattttagatttagccctatgctgacatttagtctcttgtagaggcacatttgggatggctttgagcatggagctatatgggaaaggctgtagggtcagactgcctgagtttggatcccaactc

SEQ ID NO: 333528 - DNA, 569 bp, Homo sapiens
tcaatgtacccatagctatgctggttttattcgccctctctgcactccagccacctctgtagagaatctcctttacattctaggtcttttccagatccaggagagatttcagttaagagtctgacaccttttaaggtccatcatgtaagacatatttaccatgtattctttctgaagcctgttacctggaggcttcttctatgtaacaagaaacttggcttccacaaccacccttatcttaactcaagatttttttctgctgagttcaactcttcaggcaaagcttaactctttcaaccaattgccaatcagaaaatcattgaaagtgcctgtagcctgtaagctcccacttcaggatgtcctgacttttcataccaaaccaatgtatatcttacacatattgatttatgtctttgcctgtaacttctgtctccgtaaaatgwgtaaaacaaagctgtaacacaaccaccttgggcacacgttcttaggacctcctgaggctatatcccagaccatgatcactcatatttggctcaaaataaacctctttaaatattatgtaaagtttg

SEQ ID NO: 333529 - DNA, 601 bp, Homo sapiens
ggcttgattcatgttcaatattgacaacagcatgtctagttaaatactgctcgcagctggccatgggacatattatgaatacctttgcttcccagatacatttataattgtttagtttttcatttgcttacttctctgggccataattcaaccccaaattatttgccatttgtccagatctctccacatcctgatggatcaggttgtctacaaatgtcatcttgttcaaaggcctctgctccattctaacctggcaggagtagaggggtgccatgcagaaggggagcagagaatgccaggaaggcaggagaacaggggcctctgggctgaaccagcccaaaggctcctgtgcagcttcccagtgagaaaaggtgagactgtcagcaaagagaaagtgaactttgcccagctctctatgaycacatgctgccacacacactgaggattgagaacagatccaagggcaaccgcagacgcctaaagctaaagaaggtggtctaaggttgtataaaaaaatccagatgcacttttttttttttttttttttgtagacaggatctcactgttgcccaggcagtggcacaatctaggctcactgcaa

SEQ ID NO: 333530 - DNA, 610 bp, Homo sapiens
ctggctgctaggctcagcgaatggatgctctctccaagtacagcaagatcctaagcaagttaggctttagtgccgtggcagaagcaagcatgctgaacacaattccccgcatccacaatggaggctgggcattgccagcagtagcggttggaacacaggatttaggaggaggcagcagttatgaaatgctcaagataaccagtaatgagcagcacaagaccccttgcaccttcaaatataagaccagtaataacacttacaaatgtacattttaacttggatagttaaaaatactaacaagtgatttatatctgctaaatcagcaaaaaagaamaaagaggaacaaattgaaggcatatgttttaatgaacattataaccaaaaaaaattgagtccttgtgctagaaacatgtagaagaaaaattataaatttgtttcaaagaaagctttcagaatcagttttacctaaaatctatagctaagattatcactcccacataccctcacccatgatttcttcctgccaaccttctctcaatagctatatcagtatttggcttgattcatgttcaatattgacaacagcatgtctagttaaatactgctcgca

SEQ ID NO: 333531 - DNA, 610 bp, Homo sapiens
ctggctgctaggctcagcgaatggatgctctctccaagtacagcaagatcctaagcaagttaggctttagtgccgtggcagaagcaagcatgctgaacacaattccccgcatccacaatggaggctgggcattgccagcagtagcggttggaacacaggatttaggaggaggcagcagttatgaaatgctcaagataaccagtaatgagcagcacaagaccccttgcaccttcaaatataagaccagtaataacacttacaaatgtacattttaacttggatagttaaaaatactaacaagtgatttatatctgctaaatcagcaaaaaagaacwaagaggaacaaattgaaggcatatgttttaatgaacattataaccaaaaaaaattgagtccttgtgctagaaacatgtagaagaaaaattataaatttgtttcaaagaaagctttcagaatcagttttacctaaaatctatagctaagattatcactcccacataccctcacccatgatttcttcctgccaaccttctctcaatagctatatcagtatttggcttgattcatgttcaatattgacaacagcatgtctagttaaatactgctcgca

SEQ ID NO: 333532 - DNA, 589 bp, Homo sapiens
ctcaataattattcattaaatgctgaatgaatatagccaaagagaaatagcagaaggaatgagtggagatttagaaacttcagttcaatatgatgtaaaacaaagctccattctttggagacagtccaacaaccagaaataattttaaaagraacgtatagcttgtattttctacaggactttgccccaataacacattcaacattctcttcttttcttcctgaattctttcacatctttttgttactccaaagcttctcactcagcaacccttcacaactcttgcatctctttataaactgtttatcacgattctctgaatttagattctctgaattttttggtgtttctatcaacttatcaatttctgaatttgtcacacacacaaaaagcataaacataaacatgtggtaagaataattatatctttagtcagatacatctatctacctgttctgttgattctatatcacacacaaaaaaaaccaaaacagcaattaaagagccatccttaggtaattcagagtgaagaagctaagaaaagataatctataataggtatagaagtgggggagacatagtatattaa

SEQ ID NO: 333533 - DNA, 538 bp, Homo sapiens
agataagttgactatatcacgggacagatctatttctgggctctctactttgttccattgatctatttgtcaatactcttgccaataccaaactgttttgattattgtaattgtacactttaaaaagatacattctttggcatatgaattgtatctcaaagaagatgttatttttaaaaaccagaaagaatagtgaacaaggaaattgytaaatcaaaattaattgaagacttaagatcaagtgtaagattcctacaatctagaatttattttgttttaaagaagtcagatataatacacattatgaaaaaaaggaactgcagattgaatatattccacagagagaagagctcagagagggatttgtaattgttatataataagagattaagcaaaatttattatatcagataaagatagtaaatctgtattggcttataatcttctccaatgaataaccgctctctgcccagagtgtgagaaaagcagtgtgagaaaggcttttgaggatattagagatgtctaccattatcgagaa

SEQ ID NO: 333534 - DNA, 538 bp, Homo sapiens
agataagttgactatatcacgggacagatctatttctgggctctctactttgttccattgatctatttgtcaatactcttgccaataccaaactgttttgattattgtaattgtacactttaaaaagatacattctttggcatatgaattgtatctcaaagaagatgttatttttaaaaaccagaaagaatagtgaacaaggaaattgttaaatcaaaattaattgaagacttaagatcaagtgtaagattcctacaatctagaatttattttgttttaaagaagtcagatataatacacattatgaaaaaaaggaactgcagattgaatatattccacagagagaagagctcagagagggatttgtaattgttatataataagagattaagcaaaatttattatatcagataaagatagtaaatctgtattggcttataatctwctccaatgaataaccgctctctgcccagagtgtgagaaaagcagtgtgagaaaggcttttgaggatattagagatgtctaccattatcgagaa

SEQ ID NO: 333535 - DNA, 567 bp, Homo sapiens
tgtttcacatacttttattatcacaagctcttaccataccgtattatagtcgtctctatagttacctrtatctccagatttactataaactctatgagactgtatctctgttttccactctgtatctttaatatgtaacagaatgcctgacacatgttaggtgctcaaaaatactttctgaattgattaatacatcaacaaatggagagacagtgggagctgaaatcagatctggattcatgcatggaaaggtgaaagtaagaattaggaaatatgaagagctcccctgagaggcaactatagattcccacaacctagggtccgagtgattagtcttcttgtgtctctatttctaggcatgagaaatgtctcctcacacccaaatattttgtactttgaaatttttaactttaagtacttgaaatatatatggccaaaatttataaaattattatgattaatgctattatcttttagagtggtagtatttctagtacgggtgatacaatataaggaaagtatacttttattcttagaatgaaatgttgtaattagattgatagcctc

SEQ ID NO: 333536 - DNA, 504 bp, Homo sapiens
gtggcaatattagtacttgtgtggtgaagaactaactttaccaaaagagaagtctggcctttgtcttggctccaggaggtarcctctaaaccctttgaattttccaagtaattggagtgtctttgttatggtgggcctgttagaacccacttgatagagagttatgctgattaggtgactgatggttagctcctagatagtttatgctgaggagttgactaggttggatttggccatactggaaagatcaaccttatatttttatatcaccctaaccccagtggaagcgagagctaactggagactgagtcagtggacaatgattcaatcaattgtgtctacagagttagagtccgatttaaaaaaaacaaaaacaaaactcttaacactgaagctcagtgagctttccctggttggcaatactcttgagtatcgtcgcactttgacactgagaagatgatgaaaactgtgttttgaactctctgagtcttcactctatgcatc

SEQ ID NO: 333537 - DNA, 527 bp, Homo sapiens
taacaatccgggatactgtagccccacccagagtttcttgttgtgatttgtttatttgtttaataatttggctggactattttagtgaagtctattttccctgcattgtgcaagcctctgatattgctcctcagagcgtgcaccagctatagtcagctatttggccagctatgttgctcttggtaggacagtggtataagctttctttgactgtcttctctgatttccctgttargctgtctgaacttttttagtatcaaacccagtgtcaacctccactaattgctggttgattgttctattgtctttaacaatgctctggaacataaattgacccactgtctgattcattttatgttggggccccttccagggtaatctttgaggccagtttttgctgtttgctctaatcccgatattcttcttagctcttttcctgtttttctctggaaaacttcaacctgatcttcagtttacctttttagtctcatggagctaccatcctcctcttaattgcttaacatcat

SEQ ID NO: 333538 - DNA, 607 bp, Homo sapiens
tattattctaaaggttaaatatatatttttaaatctgatgagctgtttgtatttaaatctattataattttaataaggactcaaaaatakcaacaagataactttttaattataccacataggccagccatggtggctcacgtctgtaatctcagcacttagggaggccaaggtggatagattaattgaggccaggagttcaagaccagcctggcaaacattgtgagacccccatctctactaaaaatacaaaaattagctgagcatgattgtatactcctgaaatcccagctacttgggaggctgaggaatgagaatcacttgaatcccagaggcggaggttgcagtgagcaaagatcacaccactgcactccagcctgggcaaaagagcaagactgtctcaaaaaaaaaaaaaatacacacacacacacacaccacatagatgtgaaaaaatacattaaggtatagtcagcaagatattaatagtgttcatagttaatacaattttagataattattgctttctaaaggtttatacatctttttaaaaattcaaatatgttttatttacaaaataaaaacgtttttattgtgaacaaaaaattta

SEQ ID NO: 333539 - DNA, 706 bp, Homo sapiens
atttctatttttgcaattctttgagaaagttttgtccaaagtgtgccctaagaattattttctgagatatttcttgaaaggaaagttttatggtaaaatacatgtgtaaaatgcaatatatctttctggtaggaatcctaatggtctttactgcacaactgtctactgagacttagaggctctttttaatcaagttgatgtttctcaagcaattgcactgtcaactactcttcataaackttctgctataggtacaggaatattcacgatctccttgatctcccctagctttacctattttgaactttccaactttgcttatcctcttctccttgcctcacctctctactataatggtctcctctcacctctctgcttttccaatgtgaatcaacaattgtacttctcctactactattttttgtaacaattgaaatgtatgcttatgtttgccactggactgtgagttcttagaggatcaagaatatcttattcatctttgtatggcagggcaagggagaatttaagtgaagtaacactctggtttagttaaggcttctctttgaaggttttgattttggagtagcaaaaaatgctgcccccaaatatggcacattggcacactatgtattttaagctgaaggacactgagaaacttgcagaagcagaaaagattgctctcaacttccgcctcctgtcttttaaa

SEQ ID NO: 333540 - DNA, 585 bp, Homo sapiens
tgttatgcctttttcttgctaatctgtctttattatagaagtgtcagccataaacccattaatgtacccgaaattttaattgtctattcgtaatgtttgtgttattgctggtattattatgtaactctgttaatctcattgctttttgccatatttcccacctcaattttcagtttcttgggccaaatgatctttacatgactacatcacctgtaagagaactcttcaagagctagaaatgaattactacttgaattatttgaattgaaggtaggtactacttagtagaagcaccaatgatcacagaggggcagaaaaaaatgtgcagggcaaatttactgccatgaattaagcacttgtactaagaagtttacttagtctaatgattagtgaagctactttcgtaacttggttaattacatttttactytatgtttaatattattctgattatcttcattgtaaaagcatttagaaaaaatatacattgcttcttattctaaatgacttaagtacaaatatgtaaaaagcactctcttctcagtggttgttatatgacttaaatgagtttatatacaaccttta

SEQ ID NO: 333541 - DNA, 618 bp, Homo sapiens
aaaacataaagttatgagctatagaaataaaactgattttcttgacagtcctgttayagtagaacttggaatacccttcaaagatagataaagtaagggggttaccagtaccgtggtcattataatgaaattcattattctggaaattctataggctgatgatattaacagaccaaaaataaatcacatagataaattaatgaatagtagattcttaagggttattaaagaaaattaaaatgttttggtggataaacaactttttacggcatattcctttttactactattaaaggtaaaatacttggtatatatgacaattagtctgcctcagtatgccaagtcattttccccttaattcttagaattctggtattatcttgataatactactagagagacagcattggagttttacataagatctgcactttttgtctttctgtgggaaataaatatatattctcaactgctaaatatttatcagaaatgcatacactcgtttcacaagaaaaatatttggggacagtagagatagaagaaaataattaaaaagtatgtctgtccttttgaattttaacttttgagctcattgaaatgtgaaaattcacatgttta

SEQ ID NO: 333542 - DNA, 537 bp, Homo sapiens
aattctattcaaacacagattaaacgatatatgatttaagagcaaattcatgtgaagacatccaacttttaattgacctcacrttaactatggaggaacagtgtattttgtacctcttcaatatctgatataacttcagctttatgaattgatgcatctacagtgagataaaaacctattattttactctgatgtcagctcttctaggattatgattcacctttgaaaatgattataactaacagaagcttttagagagaagggtaattatgatgctaaggggacttggaatcaaaacaaggggagactgttccttaatataaagctttcttaaaattagaccagcataaaatcaaaatgaaatacttaagaattagtcacttccttcactgaagatatgcaagcataagctgggatgaacatttgttgagctttttgaataaggaaggcaataaaaataattggtttggttgtactagaagtcttctgtagtgccagctatcttgtgatagtctgcagttctttgattgtaagtac

SEQ ID NO: 333543 - DNA, 613 bp, Homo sapiens
tcaaccaagattcttaaatccagaaaaagtgtctttcaaaaataaaggtgaaataaagacattccagatgaatgaaggtgaaatgaaaccattcccagatatatgaaagctgagagatatcattgctaaaagatgtgccttagaaggtgtatgaaagaaagttccaygagttgaaagcaagtggcatcaaacagtatttcaaatccacatgaaaaaacagagtgctaataaaggtcataaagtcagtaattataaaacacaatgtaattgcacctttcttctccttttctcttttaacttactttagaaacaactgaataaaacaatatgtatacataattatattgttggccatataacatatagtaatgtaatatatttggtaataacagcataaaggaggcaggtgtaacaaagctatattggagtaatgaaatgatgtaagataacaagcctacagaaagaaataggataaaaattggtaaataaaaaagataataacaagctctatgactatatatacttgctctccacttttcatcaactttctaaatatatatacagtataattacaaaaatatttttaccatatatagacattatacattatata

SEQ ID NO: 333544 - DNA, 618 bp, Homo sapiens
ctagtttctagtatagatgtgatttccacaaatctatatgtttgttaattacatttgtgctcatgatgccacctgtggcttaggattaaaggggttgagtgtaatgatgtaaaagtgcataagtggtggcaaggggatgggggtagaagtgttggagaagcagaaagaatacaggagggaatttagatgattagaaccaagtagccctggtcagaagcagttctcatcagtagagaaacattaagctcataytgcagtttacatcagagtcctgcttctcactgagtcatgaaaaattccttctcattaaagaaataaacagaatattcatcagctctgggtagtatgagtgtcccttccagagaacaagtaaactccagacaatacttaagctttctgatgtcataaaacaatgatcttgaaaagtaacaataaagaccctgcaaaattttacaaatgccataaaccatttgatgtctgaagatgaaggaatcctctttgtaaaataataataataataataatgcattccctccattaaagaagtgacggctctgaagaaaaactacatttgtttaaatcttagttctaccacttgctagctgtgtattatagggt

SEQ ID NO: 333545 - DNA, 629 bp, Homo sapiens
cagtactcatggtgggccttggttgagactgagagacatactggcttcagatgtgaccctgcacatttccagctgtggtggctatagctagggactccttcttctcgaggaaaaatggagggagagaaaaggtgacttcatcttgcagattaggtaccagcttggcccaaacagagtagagcaccaagggtctcagattccaggctttggtcttggctctgagatggcattgctgtaccctctctggtccagaggggagctcacttcactgaagggagagtcctaggcctggcagcatttaccacaagctaactaaagagccctgggtccttgaataaacatcagaggtaaccaggtaatactcactcaccacataactggggtggtgatagttacagggagagacttctctgcttgtgggtagaggagggaagtagggaaggactttgttttgtggcttgggtgacaggtagattcctaaagtaactgactcaaggtgctggctcttggatggcatctcttgacctacytgggaccaaggggaacttgccacactgaagaaaagaaaacaagcctggctggcttcaccaactgctgattttaaagctctgcaggctcgagtgaacata

SEQ ID NO: 333546 - DNA, 403 bp, Homo sapiens
ggaatacttataccagacatgatacatttcaatacaaaaactataaacggaggcaaagaaggttattatataatggtacagaggtcaattmagcaaggggatataacaattttaaatatatatgcacccaacactggagcacccaaatatataaagcaaatattattagagaaaaagagggagctagaccacaaaaccaaaatagctggagacctcagcaccccactttcagtattggagagatcactcagacaaaaacaatcaacaaagaaacactggacttagactacattatagaccaaatagacctaatagatatttacagagcatttcatccagtggctgctgaatacacatgcttcttctcagcacatagatcattctcagggatagaccatatatt

SEQ ID NO: 333547 - DNA, 475 bp, Homo sapiens
ttaccagaagctgggaagggtagtagggtgggtggaatggggacagttaatgggcataaaaatacagttagatgtaatgaataagatctagtatttaatagcacaccagagtgactatagttaagaataattaattgtacattataaaataactgaaagaatatgtgtggattgtttgtaaaacaaagaaaggataaatgcttgaggtgatggataccccattaatcctgatgacattgttatgcattataggcctgtatcaaaatatctcatgtaccccataactatatacacctcctatgtacctacaaaaattaaaaatttaaaaataagtaaataaaagttggaatggaaaattaacacagaagttgaacaaaaaaactagagttaggaaataatgcttttaatttttagctcccacaaatgartgggggctaaatgtttattctctcaaaagactaatgaaataggccca

SEQ ID NO: 333548 - DNA, 607 bp, Homo sapiens
  misc_feature (1)...(607): n = A,T,C or G
nnnnnnnnnnnnnnnnnnnnncaagtactatccatgcattctctcacttaattttcatagcctacttatgaaatatatgtttttattatagctatttgattataataaaagtccatcaccatggttagtatattactcaagataattaacactagatgccatggcagacaaaacctaaaatcataatggttaacaaaacaaaagttgatttcttgctcattcaaacctaaactggatggggcattcttcgtatgtartatagctagaccatctgaaacataagctagctctagggatgctaaagcaacgaaataaagagaatggtatgcttagcccagaagtgacacacttactttgagtcagaatttattaaccagtaataaattatgtcaccccaattaaatttaaggaaagctagaaaatgtagagaaacaagtagaatactttgtaagaacaaaattattgccacaagtcaccaaagatcctttgatcccttttcgccaaacattgaacacactcctaaaaaatgacaactgaaatcccatcaagtccagaatctctacgtgtgcagtatctctcaatcaggtctggataagtttttaatcca

SEQ ID NO: 333549 - DNA, 509 bp, Homo sapiens
caattcactctctagcaatttaatggaagttactataaatctggaataatatacgggaagcccatacgcttaatctaaactgtgctgtgagtcataattttcacttaagtttgcgcccttgtctaaaagacttgttaaatttattgttttactatttgttatttagaagcagacagctttccatatgtgcaaggccctaattttggaggtcttctttttyttttattttgtcttgaaaaccagctacttttctgagctctctttttactataaggtaacttgccaaacatagtcaagtacaaccaacacacagaatcaatattccgtcttccagcttcttgccttagagacataaattagtaggcacatagtttgccttccaagttatcacggggaaattctttgctactaaataacttggactgccatcatttcagcccctgatatcaattttttcatctcctataactaatcacaaagataaggccatattttaggttttatgttat

SEQ ID NO: 333550 - DNA, 619 bp, Homo sapiens
gaaaccataaaatcacctttagagtattcgtttcagatataagtggatttggagcaagacaaagtatataatgaaggtaaaataactaaagactgcataaatctgatcacaggcaggttgatacaatgaccctcaaataattaaacttttgacctttttggctgaataggaagtagcagttttgttctcagaaatatcttttatgtaacagctggcactttctggaaagtatttgaatttacttctttacaactgtatctgaaatatgaatggtccttgaaatggctatagaagattggcccattctgcagctatacttattataaagggttaaaaatcactaacagaacacacacttttaaggtttcaatttcagtcttgtatgccacatcttttcagtataaatcaagaaatttgtatgttaatttctaatactgaaaatgcttcttacagcagccgatgaaataggtattcatgaagtatagcattatttaaaratgtctgacctacagtgttatatcatttttgtagagaaaaataaaaaaaattggataagcattataaaatgaagctaggagaaataatagctttaatttaagttaaagaagataaaagcacc

SEQ ID NO: 333551 - DNA, 615 bp, Homo sapiens
gctttttaatgctcattataggtgttaagtatcatcygttcctggaataaacctgtttttatttttcatttaaaaattcttcactcaactcttacacaagacaatttctattcactctttatgtgataaaatcacctcattttgctagaaacacaaataagtacttttaagctcatacattctctttacatttaaaaatttttcaatgttgccaaggataattaaaatttaagaagtcacaataccaaaacatattgtcaaaatatgacacaattttaagtaatgctgcttctattttcatttaggccctggtttttctattagagaagtatgacaaaatacaatgtgtggcactattttgcaattccagtctgtaacaacaactctaaatactttttcaacctcaaattcttctgcaagtcctcttcaagttgcatgatcactctcgtattttcctacttctaagaattttgctctatttggaaacttctctctgtttctgcctcctaacgatgcaattcatcacatgttgaaaatcacctcaaattgcatttgaaccatagaaatgtgtcatttctttcttctatatatctcacttttatcctacccatgata

SEQ ID NO: 333552 - DNA, 511 bp, Homo sapiens
agctcatacattctctttacatttaaaaatttttcaatgttgccaaggataattaaaatttaagaagtcacaataccaaaacatattgtcaaaatatgacacaattttaagtaatgctgcttctattttcatttaggccctggtttttctattagagaagtatgacaaaatacaatgtgtggcactattttgcaattccagtctgtaacaacaactctaaatactttttcaacctcaaattcttctgcaagtcctcttcaagttgcatgatcactctcgtattttcctacttctaagaattttgctctayttggaaacttctctctgtttctgcctcctaacgatgcaattcatcacatgttgaaaatcacctcaaattgcatttgaaccatagaaatgtgtcatttctttcttctatatatctcacttttatcctacccatgataaaataatgagtatgttcagtgatcctgtttccactagtacttacacctttagattcccctgaaaa

SEQ ID NO: 333553 - DNA, 602 bp, Homo sapiens
atacttttaaccttagagcctagtgaagtgcctggaggtacttggcaaatgaccaaagaaagctaaatgacaactggacagagcacattgccaagaagttaatatagcttgacaaagtcttggcaatgtagaattttacctgaatgttgttaaacacagttgatgagaggctgttggcttggaccagcctcctgcactaggccccagcagaccagaccagaccagaatagacagacttgtgctaagtgccatggaaccaaacagaagtttgaaataggtcagttttcctaaaaaacaggagatttcagtcaacctggttcagcacaataaggaagttccctctgttttaaccctgtaaggaaagtaactttcaaatgaccaatacactttttgttccctgtttctgcttccttaagtcctttctgcctataaagccaacctcctctgatcagctcataggaacctcattctatttctcagaaaatagagaayagaattctctatttctcagaaaatagaatgaggttctatttctcagcaaattctgtttctcagaaaatagaatgaggtgatgctcaattctagaatagcaaataaaagcc

SEQ ID NO: 333554 - DNA, 500 bp, Homo sapiens
ttgctaagtttgggtttatgtttttattttgcggttgatcaccttgttgacagaactgaatgcttcttatcactgccagagtcaggaactcttctcattgtagctaaaacatggccaatgagcctttgccctcccacctccagtacctggaaattgttgcttccttagtgtctgtttcactgggggtagccctcggtatgaggagtgtctccttacactgagcaaaaatctgccacctgtatattctacccatgtgcgccytatcatgctatgcagaataaatctacttccttttccacaaaataagcactcaagtatcataatatttctcccctgaagtccctacatgttctccaggttagtaaatacgtttgttacagcattcctgaattctagtgttcagagagcatggaatagtcctttttacagttgcttgagaaaaaataaaaaattcaaattactgacagtctaaaacacagggtttaacatttcaaaaaaca

SEQ ID NO: 333555 - DNA, 569 bp, Homo sapiens
aatgcatattaaggtgcactagacctcttagaccttctaaaattaatctctgtcagtaccaaggcaaccaaggcaataccagtgtaatatcacatttcacaagtgctgttttgacctacatttgatgtcatggctgaaaactttcaattcctttatgcaggcagtttgctaagccaccaccacatctacttcccttactaggcactaacgctgctgaattataataaacacatacccaactgccgggggccccaggatatttacggcccaggaatggaccttcttatttggaattattcaaaatgcccaatgtccagggatcccagctagctccaccaagctcaccccaccccgcttgccatacagaagattatattttcctttaaatctttaaacataccctaatagctactttgaagcctttctctgcagagtccaacatctagactctcttagagtcagtctctttagtcttttttccttcygtatggggagtacatttcgtggttgtataattccagcttgcttttaccctgtccctggatgcagcccactgtgtagcccaagtg

SEQ ID NO: 333556 - DNA, 562 bp, Homo sapiens
agaatgtgccagtctagctccaaagccaaggctttttgtactatttcttcaaggaattcagtctaacttgacagttcagaacactgaacaaaaaagcatccatcagttgcttttttctccagttaactcacagattttcctgtttttccccttcttatgccagtaaatcatctggtaagtgaatgagataagcacttaaaacattcatcctttattccttgaagacccttgagagaaggtgctacaatgtgctcttcctcccattcttcctgcctctgggaccaacccatggtctttgtcattacccaaatcagaagtggagccccattcttaaacttytgatctccccctaccttgtatggtcaaccacgaagtgcagttgacttgacctttgatgtatctccttagtgcaccacatctccctgtgttcactgcccatgtccaaactattgcccttctctggatcactgcaatagcctcttttcagacacccttaaccagaatgactttcaggaggtcaaatgtatttgcaccatttccatcctataatcccttctttggc

SEQ ID NO: 333557 - DNA, 562 bp, Homo sapiens
agaatgtgccagtctagctccaaagccaaggctttttgtactatttcttcaaggaattcagtctaacttgacagttcagaacactgaacaaaaaagcatccatcagttgcttttttctccagttaactcacagattttcctgtttttccccttcttatgccagtaaatcatctggtaagtgaatgagataagcacttaaaacattcatcctttattccttgaagacccttgagagaaggtgctacaatgtgctcttcctcccattcttcctgcctctgggaccaacccatggtctttgtcattacccaaatcagaagtggagccccattcttaaacttttgatctccccctaccttgtatggtcaaccacgaagtgcagttgacytgacctttgatgtatctccttagtgcaccacatctccctgtgttcactgcccatgtccaaactattgcccttctctggatcactgcaatagcctcttttcagacacccttaaccagaatgactttcaggaggtcaaatgtatttgcaccatttccatcctataatcccttctttggc

SEQ ID NO: 333558 - DNA, 602 bp, Homo sapiens
cataaattcaatggaaattgcctgttttcttcccataatctatggttttggaagttttcctattagccattttttcttttgtggcgtacagcaaaggatgagtcattatctgttgaatgaattaatgaaggactttgaaattcatcctggtatttaattgacacaaagcagccactgatgtcactatgttaaatatttccaagttacaggtacccaaaaggatacagagaaatcaagttacttgaccaaagttttactgtataatactccattgtattacagggcagtctgatcattggttttcacatcaagggtcttcagttattaagaaccatttaaattatgttcaaaattattttgccaataaggtagagaagtataatacattgtggaaaaattaccatctaaaatattgtaaggtttatgtgcttaatattgaaataatgaggcatcatttttctatagtttaacaaaaggttggcaakgttataataaaatcagaggctttatacatttacacaaccttttttaaaacaacatggtgatatgtatcagagtcataaaatatcctaagatgtcaacctaataatctcactcctgag

SEQ ID NO: 333559 - DNA, 574 bp, Homo sapiens
cacaccacacccaaatatggsagatgtcaggctgtagcaaaccaggtgacttctccactttgcttctgtgttcaggctatagaagctcactgctcacactgctgggtggaactttctgaacctcttctgcttctgagtgttgcctgactcatgaatcctttgttcaaataaactcttaagtttaatttgtctaaagtttctattttaacactggcaaataatatatacttataagggtctcagcttcagtaggcttaagaaggaagatttcataaagctattaaagacatcagaccaggattagaaaagtcagtctctggggaaagataaaggatgtgtatcaagattagccttgggagtgagtcaaaggaaattacaaaaatttcactttgcctatctttgttaagagggtcaagatttttagaaggtttattcaggaatattttacataccataaaactcacccagtgtaagtgtacaatttaatgaattttagtgaatttaattaattgtgtatccacctaacaactcaattaataaacataccatcacctcaataaattccctcatgatg

SEQ ID NO: 333560 - DNA, 585 bp, Homo sapiens
agatttccttctgttgttgattctaatttaatcctttcaaattctgttgtgttcaaaaaagaaactttatatgattaagtcctttaaatttattgagacttgttttatgtcttagcrtagggtcaactgtagacagtgtccacctgcacttggcaaaaatgagtattcttcagtggatgggtggtatattgtacatatatgtcagatcaagttcactagtgccattcaagtcttctatattattgttcattttctgtctagattttctaggaattatttaatggtttatcagaatttgcaactacaattacttaagcctctatttctcctttgaattctatcaatttttacttcatgtattttggggctctgttgttaagtacatgtatgtatataattttacttgccttctatcagtatcctgacagttgttcctctgttcctccttgactgccttttaaaattagatatacaattctttcatgtgccatgtttaattcctttattaattttcttagtgattgttctaggaataacaaaatgcatcttaagtgatcacaatctatgtcaggttaatactaattt

SEQ ID NO: 333561 - DNA, 603 bp, Homo sapiens
tttctcaactacaactactcagagttatgactagcagaggctagtcataactacatgcatagcagaggctttataaagatattaacttgatggcaaagtaaaattattcatagttagacctttataatgctcaatacttatagacatgtttatatcatatgtacatagrcagcaaggactgtaaaataaatattgaatctatttctgaataattaagtaggagtgggtaatagagtttacacacaaaacacttcttaaatgaaaaatgagacctataaaatgatactgcttaaatcaagtggcatacataaactaaagctctatatgatggtaagtggtagagagttgggattcacactcctatatgagtagcatttaaggagctttatattgcactacatatattttatgttagtaaacttaagtccaattaggcatccatctgtaagaagctttgccttgtttaatttcataactgtgattataatcttcataaccatgagaaggaccaggctctgaaatgttacagaaagcagcttgattttaatgtcttgaatgtctttccactatagaaggtaggaagtatttttcagacactacctc

SEQ ID NO: 333562 - DNA, 612 bp, Homo sapiens
gcaacaatactaagaacaggccccacaaattgtatcaacaacccagccatcctactcttgatcaattgcataggcttactacattatctctccttgtgttctcaaggagagatataaagaaatacacgagtcactcacctcaaatgctcagtctggttagggagatgagacataaatatatggaagagaaactaacaaaatggctgaaaatgttgagcgctaactgagctacgtgcatattgagagttttaaaggcagtgatgtcacttctggctggaagtatctgacagakaacttggaatatgataagtcaggtgggaaggattgggacaggtagaaaagagaagaggaccacatagacaagaggatgaggatggagaggtgtccaaaggatgctccacattctagactggccgaactgaactacaacgaagaagtgcaacaatggatcagactgggcaggtagagagggaaggtactaggaatacagcctgtataccccagggaatgtggaatgaggtgatgaatatcctgtgctcagggtccttgcaccataagacaagaccaacttggatctacaataaccaacaataacctcttcaaaccacatgc

SEQ ID NO: 333563 - DNA, 621 bp, Homo sapiens
gtcaccagatggcgaaagtgccttttctagctgcccaatttatgaaaacctgtttccagctcacacccttagggtgcacgtagaggcaagtcacgaagtcccttccatttatacagtgtagtcttactagcttctgataacctgtaactgtgtgatttcagagctrgaggaaaatgctgaagtgattcctttcaactctgctttttatggagggaaaacacacccacaggtctggtgacttcttgaggcaggtctctgcctgaactgaagtctggtcataccacagggcgagtgatagaaaatgttcattaataagtactcagaatccacaggcatcctggagcgcaaatggctctgcctgcacctgtcagccctcctcaccacctataagaaacctggaaaatgatgtcttcctttcagcagtcacctggaactaaacctctcccccgtccttgttcaggtttcttccctgaaactgtcttatcaaactagcacaggacatggccaaattctccctccaaacttgacaagcagaagggcccttgccatctggggactctggccctgcagcctgagtccccgaccccctgagggctgggaggtgccctgccatgtgatgtc

SEQ ID NO: 333564 - DNA, 621 bp, Homo sapiens
gtcaccagatggcgaaagtgccttttctagctgcccaatttatgaaaacctgtttccagctcacacccttagggtgcacgtagaggcaagtcacgaagtcccttccatttatacagtgtagtcttactagcttctgataacctgtaactgtgtgatttcagagctagaggaaaatgctgaagtgattcctttcaactctgctttttatggagkgaaaacacacccacaggtctggtgacttcttgaggcaggtctctgcctgaactgaagtctggtcataccacagggcgagtgatagaaaatgttcattaataagtactcagaatccacaggcatcctggagcgcaaatggctctgcctgcacctgtcagccctcctcaccacctataagaaacctggaaaatgatgtcttcctttcagcagtcacctggaactaaacctctcccccgtccttgttcaggtttcttccctgaaactgtcttatcaaactagcacaggacatggccaaattctccctccaaacttgacaagcagaagggcccttgccatctggggactctggccctgcagcctgagtccccgaccccctgagggctgggaggtgccctgccatgtgatgtc

SEQ ID NO: 333565 - DNA, 621 bp, Homo sapiens
gtcaccagatggcgaaagtgccttttctagctgcccaatttatgaaaacctgtttccagctcacacccttagggtgcacgtagaggcaagtcacgaagtcccttccatttatacagtgtagtcttactagcttctgataacctgtaactgtgtgatttcagagctagaggaaaatgctgaagtgattcctttcaactctgctttttatggagggaaaacacacccacaggtctggtgacttcttgaggcaggtctctgcctgaactgaagtctggtcataccacagggcsagtgatagaaaatgttcattaataagtactcagaatccacaggcatcctggagcgcaaatggctctgcctgcacctgtcagccctcctcaccacctataagaaacctggaaaatgatgtcttcctttcagcagtcacctggaactaaacctctcccccgtccttgttcaggtttcttccctgaaactgtcttatcaaactagcacaggacatggccaaattctccctccaaacttgacaagcagaagggcccttgccatctggggactctggccctgcagcctgagtccccgaccccctgagggctgggaggtgccctgccatgtgatgtc

SEQ ID NO: 333566 - DNA, 621 bp, Homo sapiens
gtcaccagatggcgaaagtgccttttctagctgcccaatttatgaaaacctgtttccagctcacacccttagggtgcacgtagaggcaagtcacgaagtcccttccatttatacagtgtagtcttactagcttctgataacctgtaactgtgtgatttcagagctagaggaaaatgctgaagtgattcctttcaactctgctttttatggagggaaaacacacccacaggtctggtgacttcttgaggcaggtctctgcctgaactgaagtctggtcataccacagggcgagtgatagaaaatgttcattaataagtactcagaatccacaggcatcctggagcgcaaatggctctgcctgcacctgtcagccctcctcaccacctataagaaacctggaaaatgatgtcttcctttcagcagtcacctggaactaaacctctcccccgtccttgttcaggtttcttccctgaaactgtcttatcaaactagcacaggacatggccaaattctccctccaaacttgacaagcagaagggcccttgccayctggggactctggccctgcagcctgagtccccgaccccctgagggctgggaggtgccctgccatgtgatgtc

SEQ ID NO: 333567 - DNA, 595 bp, Homo sapiens
tgaactcagaaaacttgctggttacaagattgacacacaaaaaaaaggctgtttttctatatagtggmaatgaataatttgaaaagaaatttaagagagcaattctatttcaatagcatctaaaataataaaatatctaggaataaatttgaggtaaaagacttgtgcattaaaaactataaaacattgcttaaagaaattaaagaaaacacaaataaatgaaaagatatctgatgttcatggcttggaagacttaatattgtcaggatggcagtacttcccaaagaaatctacagagtcaatacaatccctttcaaaattccaacaaccattttttatggaaatggaaaagcctatcctaaaattcatatggaattgcacaggtccctggataaccataataatctttaaaaaagtcaaaatacacacaattcccaatttaccaccaagttacagtaatcaaaacagtgtggtactggcataaggacagacatataaacaatagaataaaattcagagtccaaaagtaaacccagacttctgcatccaactgatttttgacaagagtgccaagtctattcagtgaagaaaagat

SEQ ID NO: 333568 - DNA, 585 bp, Homo sapiens
agatggccaccttccttctgtggcctcacatggccttttctctgtgcacacatccttggtgtctcttcttcttatagggagaccagccctattagattaaggcctcacccttatgatctcatttaacttaattacatctttaatgactctatctacaaatatagaaacattgaaagttagggctccaacatataaattttgggggaaataattcagtccttaacagttaccatatgccctagcaattccactcctaggtattacaatagccaaaggaattgaaagcaagggctgaaacagatacttgtatgccartgttcactgcagcattattcacagtggccacacagataggagcaacccaagtgtctatcaagagatgaatggagcaacaaatcacggcatatacatacaatagagtattactcagccacagaaaggaatgaagcactaatccatgctacaagttggatgaaccttgaaaacattatggtaagtgaaataagccagacacaaaaggacaaatattgaatgagtctactcatgtgaaatagctagaacaggtaaatttttagagacataaat

SEQ ID NO: 333569 - DNA, 506 bp, Homo sapiens
aagacatttgttaaccataagtaagataaggcattaatttccaaaatatatatggagctcctgcaactcaatagcacaaacactaataacccaattaaaaatgggccaaaggtttcaatagacatttctcacatacgtagtagtctgtactcacactgctaataaagacatacccgagactgggtaattgataaaggaaagaggtttaattgactcacagttccacatgscgtgggaggcctcacagtcatggcagaaggtgaatgaggagcagcgtcccatcttacatggcaagcaggcaagggagtgtgtgcaggggaactcccctttatgaaaccatcagctctcatgagacttcttcactaccacaaggacagtgtgggggaaaccatccctgtgattctgttatcttcacctgggattgcaaaatggtacagctagtatgaaaaacactatggacattcctctaaaaaataaaaacagaactaacataagatccagcaatc

SEQ ID NO: 333570 - DNA, 506 bp, Homo sapiens
aagacatttgttaaccataagtaagataaggcattaatttccaaaatatatatggagctcctgcaactcaatagcacaaacactaataacccaattaaaaatgggccaaaggtttcaatagacatttctcacatacgtagtagtctgtactcacactgctaataaagacatacccgagactgggtaattgataaaggaaagaggtttaattgactcacagttccacatgccgtgggaggcctcacagtcatggcagaaggtgaatgaggagcagcgtcccatcttacatggcaagcaggcaagggagtgtgtgcaggggaactcccckttatgaaaccatcagctctcatgagacttcttcactaccacaaggacagtgtgggggaaaccatccctgtgattctgttatcttcacctgggattgcaaaatggtacagctagtatgaaaaacactatggacattcctctaaaaaataaaaacagaactaacataagatccagcaatc

SEQ ID NO: 333571 - DNA, 506 bp, Homo sapiens
aagacatttgttaaccataagtaagataaggcattaatttccaaaatatatatggagctcctgcaactcaatagcacaaacactaataacccaattaaaaatgggccaaaggtttcaatagacatttctcacatacgtagtagtctgtactcacactgctaataaagacatacccgagactgggtaattgataaaggaaagaggtttaattgactcacagttccacatgccgtgggaggcctcacagtcatggcagaaggtgaatgaggagcagcgtcccatcttacatggcaagcaggcaagggagtgtgtgcaggggaactcccctttatgaaaccatcagctctcatgagacttcttcactaccacaaggacagtgtgggggaaaccatcccygtgattctgttatcttcacctgggattgcaaaatggtacagctagtatgaaaaacactatggacattcctctaaaaaataaaaacagaactaacataagatccagcaatc

SEQ ID NO: 333572 - DNA, 575 bp, Homo sapiens
acacaagatgagattttaaatataatagatgagaaagaaaggcagcccaaagaaggcttgggaaatttctaaattttgcactaaagcagtgatatctcaaatcctactctctgacagaggaagctgtacataggtgcattcctgtcctccctgcatgatcaatatctgtatctrgctctcaatgagagagttctcccatttgacttcatgttcacaagccataatttcatgtaattgcactagacttatgggcgatgcgaccactgaatactactgagtttcttctgaagcctgtcacaaagatctagatttttactaagtactgctttctaggaaaaatgttttatttagataactgcctcaaagacctagaaattagcttgagtttcagatgagatcaggtgtgttcagggtggtatggctgtagacaaatttgcttgagtttcaaactttcatgggtgtagaactagtgccagggtaatttttatacccttagctttggtcactgaggggcattttcatagagtaggaagtagaaaagaagtcattggaggtaagcagctcaaaacaacagt

SEQ ID NO: 333573 - DNA, 575 bp, Homo sapiens
acacaagatgagattttaaatataatagatgagaaagaaaggcagcccaaagaaggcttgggaaatttctaaattttgcactaaagcagtgatatctcaaatcctactctctgacagaggaagctgtacataggtgcattcctgtcctccctgcatgatcaatatctgtatctggctctcaatgagagagttctcccatttgacttcatgttcacaagccataatttcatgtaattgcactagacttatgggcgatgcgaccactgaataytactgagtttcttctgaagcctgtcacaaagatctagatttttactaagtactgctttctaggaaaaatgttttatttagataactgcctcaaagacctagaaattagcttgagtttcagatgagatcaggtgtgttcagggtggtatggctgtagacaaatttgcttgagtttcaaactttcatgggtgtagaactagtgccagggtaatttttatacccttagctttggtcactgaggggcattttcatagagtaggaagtagaaaagaagtcattggaggtaagcagctcaaaacaacagt

SEQ ID NO: 333574 - DNA, 575 bp, Homo sapiens
acacaagatgagattttaaatataatagatgagaaagaaaggcagcccaaagaaggcttgggaaatttctaaattttgcactaaagcagtgatatctcaaatcctactctctgacagaggaagctgtacataggtgcattcctgtcctccctgcatgatcaatatctgtatctggctctcaatgagagagttctcccatttgacttcatgttcacaagccataatttcatgtaattgcactagacttatgggcgatgcgaccactgaatactactgagtttcttctgaagcctgtcacaaagatctagatttttactaagtactgctttctaggaaaaatgttttatttagataactgccycaaagacctagaaattagcttgagtttcagatgagatcaggtgtgttcagggtggtatggctgtagacaaatttgcttgagtttcaaactttcatgggtgtagaactagtgccagggtaatttttatacccttagctttggtcactgaggggcattttcatagagtaggaagtagaaaagaagtcattggaggtaagcagctcaaaacaacagt

SEQ ID NO: 333575 - DNA, 555 bp, Homo sapiens
tcaatcaatttttttcctcccaatatttcactcttacctcccaaccccagcactcccaaacaacttcataatttctgctcccctgggacractttactttgggatattctctatttcagggtatgtcaaaagcagaaggaagagagagaagggaaccccttcctgggttttgtggttccatagcttagggcttgaagggaataaaaaggattcagggtacagaagaaactcaaaaaagatgcaaacctccaggcctgggacaaggtcaggatgctctaggttaagtggagtgaaaggatcctcaaataggatcctgtgtttcccctctagcaaagttccaagagggggcgggaccactagatagatgagagtttgagggcagggatgagttttggtataaggcagacttaaaggtcttcttgacctttaagttgttccctggagcaacagtggcaggaggtagaagagcatcggatgagaatgaggcaactttcttggaccaaaaaggaaaggccaaagagaggggctccctcagcagatatcacggaaagtgga

SEQ ID NO: 333576 - DNA, 545 bp, Homo sapiens
tacatgttgtgtagacaatgattgcgctgtgataatccctttgatatccaggaaaaaacaattctcattctcaacctttggaggctgtccttttatttctcaccctaacaacgtccatccagttaaagttttttttcttttttttttctttttttggctgctgtgcagttgtaaaagtttatgtcgacacactgtcggaataatcatttgtaaaacagtcctttgttttgtgaaaagcgttctgttccatgctaacacactgttgcacatcgtgttaactgccaggacagatcgatctcacaatgctgctgcttaacattcatgaaaaaggcaaaagcaattttytgaagcctttggattcaggacattagctcactatagcggcaggattgcaccttaggaggccatgttgtctcttacgaaacacaatcaaaaaagtgtcttcaggattaaaataaatgttaaaatactaaaaaaaaaaaaaatccaaattaaagacattaaaaaagttcacataaaatgtatagaataaagattgctgtgat

SEQ ID NO: 333577 - DNA, 547 bp, Homo sapiens
  misc_feature (1)...(547): n = A,T,C or G
tatcagaatcactgaagcctcaattatctggaaagaaaaaatatgttcatgcctctgtcggtaaasaagaaagaaactggaggtagatggaatgcaaaaataggacatgcatctgagactgaattgcaagcagtcattggagaacagctatcaaaggcagaatgcaaactaatgaaaatttgtgctccttttctataattattttttagcttcttttctcattgagtactaatgacattatttgtcttcctttaatagaggtttacttttgaactccaatttttaaattatttttaataaacaaaaaatttttatgacatcaatgatatttagttcaactttccaaaaggcaattaagaatgtcagaagatacaatcaaattaatgacagcaatttgtgttttctcacctttacctgagaagatcaagttgaaatattttatagacctcataattctgcacagtattctctgtgttccacaaaccctgacacttagaatacattaatnnnnnnnnnnnnnnnnnnnnnnnnnnnnnnnnnnnnnnnn

SEQ ID NO: 333578 - DNA, 547 bp, Homo sapiens
  misc_feature (1)...(547): n = A,T,C or G
tatcagaatcactgaagcctcaattatctggaaagaaaaaatatgttcatgcctctgtcggtaaacaagaaagaaactggaggtagatggaatgcaaaaataggacatgcatctgagactgaattgcaagcagtcattggagaacagctatcaaaggcagaatgcaaactaatgaaaatttgtgctccttttctataattattttttagcttcttttctcattgagtactaatgacattatttgtcttcctttaatagaggtttacttttgaactccaatttttaaattatttttaataaacaaaaaayttttatgacatcaatgatatttagttcaactttccaaaaggcaattaagaatgtcagaagatacaatcaaattaatgacagcaatttgtgttttctcacctttacctgagaagatcaagttgaaatattttatagacctcataattctgcacagtattctctgtgttccacaaaccctgacacttagaatacattaatnnnnnnnnnnnnnnnnnnnnnnnnnnnnnnnnnnnnnnnn

SEQ ID NO: 333579 - DNA, 547 bp, Homo sapiens
  misc_feature (1)...(547): n = A,T,C or G
tatcagaatcactgaagcctcaattatctggaaagaaaaaatatgttcatgcctctgtcggtaaacaagaaagaaactggaggtagatggaatgcaaaaataggacatgcatctgagactgaattgcaagcagtcattggagaacagctatcaaaggcagaatgcaaactaatgaaaatttgtgctccttttctataattattttttagcttcttttctcattgagtactaatgacattatttgtcttcctttaatagaggtttacttttgaactccaatttttaaattatttttaataaacaaaaaatttttatgacatcaatgatatttagttcaactttccaaaaggcaattaagaatgtcagaagatacaatcaaattaatgacagcaakttgtgttttctcacctttacctgagaagatcaagttgaaatattttatagacctcataattctgcacagtattctctgtgttccacaaaccctgacacttagaatacattaatnnnnnnnnnnnnnnnnnnnnnnnnnnnnnnnnnnnnnnnn

SEQ ID NO: 333580 - DNA, 568 bp, Homo sapiens
atctttcaaatatttgatgctttattaacatttcacaatgaaaacgttgacaataaatcttatttawaaccattcctaagaaaccaggctataaaaaaaatgagctttttccctccttgcatttcaaatttcatgtgcccataatttaaaccaaattctatttcgactgcctgtttcttaatcctaataatgtaaatattttcctacgcataataatttttggagtattctgcccgtcatttaaaattatgctacccttcctattaggcacaaactatctttcaagacctccctggaaataatgttttaatatactacaattgagtttaaattgtcaaattcaattattagagccatttctttactatttgagcaagttttgacaactgtaaactttgcgacctaaacataaaacatgacaactgattataacatgatctcaaatgtacccccgttctccggtttcattaaaatattaatttattttctcgattgtgaatattttcagcattctggttatagggtctttattagcaatgacatgaatcatgaatttttcatgtttatg

SEQ ID NO: 333581 - DNA, 536 bp, Homo sapiens
tggattcataaatatctggaatgcaagtccaggcccaatacttgtgacctgaggcaaggaagataattgatstctctgagttataatttgcacaaatttgagaagataataacgtaaagagcaagtacgtcatagctattgctgtgtatgtatagcttcttgatacttttatctattcattaatttaaaaatatctgttgagtgctagtcattgctagcattgtgataaataataacttggttttggaatccagtagcagttaaagataggaaaagatcgttagtttctcctgtgttaacttgaaagctcttcataggaactgtaaattttcaagacaagtagaaaacaggattcaggcaatctgttaggacaatagattttcatgataagaaagtttacttaagccgagtaaacatgcaaattgataataaaatgcttagcttcattctccaacccattcatcacaaatcttttggcaatgaaaaaaaacattcattttttaaaaatgagaatttaaagtagtgaatccacaaaa

SEQ ID NO: 333582 - DNA, 536 bp, Homo sapiens
tggattcataaatatctggaatgcaagtccaggcccaatacttgtgacctgaggcaaggaagataattgatctctctgagttataatttgcacaaatttgagaagataataacgtaaagagcaagtacgtcatagctattgctgtgtatgtatagcttcttgatacttttatctattcattaatttaaaaatatctgttgagtgctagtcattgctagcattgtgataaataataacttggttttggaatccagtagcagttaaagataggaaaagatcgttagtttctcctgtgttaacttgaaagctcttcataggaactgtaaattttcaagacaagtagaaaacaggattcaggcaatmtgttaggacaatagattttcatgataagaaagtttacttaagccgagtaaacatgcaaattgataataaaatgcttagcttcattctccaacccattcatcacaaatcttttggcaatgaaaaaaaacattcattttttaaaaatgagaatttaaagtagtgaatccacaaaa

SEQ ID NO: 333583 - DNA, 509 bp, Homo sapiens
ttgttgttgatggcgattgggatgatcaatacactattccacagaaaatgatgttgatcactcccacattgtgttaataaaaatagcgtaatttggcataattttcaaatgtgtgattatcaccaaattgacaggatagagtagaatactggataaactaagtcaatggcattttttaaaaatactattaaaacaacgaaggtcaggggctggagaacacaaattagtaatctaattaaattaccagcaaaagagacaaatcgtgttaacagcagtcagatttgttattacagaccagttattaaagtgacatattgtaagatgctatgtatcattactaggttttaaacattttcattttacacaggcagaaaaatatagattmatcatttcattttgtaagtcaaaagctcctttattaaaatatttatattatttgtatgaagagataaacattattgaggatctaaacattcttttatgaaattatttgtacaagtagctctcat

SEQ ID NO: 333584 - DNA, 556 bp, Homo sapiens
aatcatttcattttgtaagtcaaaagctcctttattaaaatatttatattatttgtatgaagagataaacattattgaggatctaaacattcttttatgaaattatttgtacaagtagctctcattggagcagtctctaagkgccacatgacctaatttgtaagattaaacaacagttgctgattttgacattttgtacatttcattaaatcactatcaaatgaagtaactttaatatggcaccaaattattatttggttatattttatattcaaggaacatacatatgttatgaaacagcaggattttcacaggtctagagaaaaattgctttccccgcaacttggtttccggcctttgctaagactaggaaaacctttacaggctcccaaatattgtggtattacaactagatacattgaaaatttgacagacttttatacgagacagacaagggtttcattccaggccattggtttctaactttgtgacctgaggcaaattactttaacctctttaagctctagcttcttgatttgtaaaagaaggattaata

SEQ ID NO: 333585 - DNA, 627 bp, Homo sapiens
ttggttatgtgcaacccacagcaatccagattaaaaataatactggtaataacccataatattgttttcaaaacaattactttcctaatcactggtaatgtttatcttattctttgggttactatcttcattaaataaaagatctccaagttttacctcaaagatagtcccactacagggttttaaataagtgaaagcccgttatamaaaccatgggcgctagacattataaatggaagctgccattgcaattaatttttgctcaattctggattttagggttcttttcatactctgagattaaagattttgtggagaaaagaatcaaaatcccaaagtgggccaaaatgccctataagatacaaatactttatttgaatatgccaaaagaaaagctctaactacagtataatattacataggtgttagcctggatccattgattctggtgttaaaaattaagaaaaagagaatgtgtataaaaggattggcataattattgacttctatgtagtttttataagggttgttagtcctgcgccagttgccccttaattgttcagcaaggtctcgagtggccttctgctccacctctgtattcccaagcagtgcaatctaattgcaaat

SEQ ID NO: 333586 - DNA, 627 bp, Homo sapiens
ttggttatgtgcaacccacagcaatccagattaaaaataatactggtaataacccataatattgttttcaaaacaattactttcctaatcactggtaatgtttatcttattctttgggttactatcttcattaaataaaagatctccaagttttacctcaaagatagtcccactacagggttttaaataagtgaaagcccgttataaaaaccatgggcgctagacattataaatggaagctgccattgcaattaatttttgctcaattctggattttagggttcttttcatactctgagattaaagattttgtggagaaaagaatcaaaatcccaaagtgggccaaaatgccctataagatacaaatactttatttgaatatgccaaaagaaaagctctaactacagtataatattacataggtgttagcctggatccattgattctggtgttaaaaattaagaaaaagagaatgtgtataaaaggattggcataattattgacttctatgtagtttttataagggttgttagtcctgcgccagttgcccyttaattgttcagcaaggtctcgagtggccttctgctccacctctgtattcccaagcagtgcaatctaattgcaaat

SEQ ID NO: 333587 - DNA, 633 bp, Homo sapiens
agtggtttgtccatctgagtgtactgcattagtgtaacattttatattccacctgtaagtgttggaatgtttcagagttcggtccttgaacactttttatctaaaatatcttatctagtccctyggctgtcatcaaaatgccaacaaagcccatatttgtatctccaaccatgatcttcccactgacctctggactccaattcatttgcagctgcatgtgcttgactcctctgcttgaatgtatagtgggcttctcaaaattatctcatggaaaactaatttctaaaactttctgaaccaatcctctgagtcagccatattgctcaagactgagttaggttctttcatttatattccaagtacaacccataagcaagtcccatcagctctaccttaaaagtatatatcacacatccatcacttctgttcatctttactgccatccttcccatcatctttactacctattctaggccattatcatctttcacttaaaccatgataatagtttcctaattggtgttccagcttctattcttgctccctagaatttatactctgcacagtagagagaatgacgtcttaaattcattaatcagacatgtcatttcctggcttaaaaccctccaaaaa

SEQ ID NO: 333588 - DNA, 586 bp, Homo sapiens
ccaaggatttaagtttcgtgaatgtttaagcccatcaaaaactctatgaaataactattatctccatttcattaactattcattaactattatctccatttcaaataactattatctccatttctctcagagcctactcaattcacatagctgataagtgaaagaaccctgtctcacctcacaagacttctgtgctcctgatcamcaactctactacctccaaagaggtgtagccctctgtagttcagcctcacgttcacagtcttgggctctgcaatctcacaggccctatatggaattccaggtgtacagttctccagctgtatggacttgctgcccatattaaattgttaggttatagtaaatggtagctttctcatctgtaaaacaggaatattactagtatttactgctactagagctgtgaggagtaattgcttcaaatatattagaaaaagccaagtgccctcttggaagtgtgatatctttgtccaccttcagtaaatgtgaatttggcgtatgtgaaagttatatcccatgtttttggtttttatcatttgttttagggtttctaaaaaaaacctga

SEQ ID NO: 333589 - DNA, 553 bp, Homo sapiens
cagttctttatagtggtatgaaaacgaattaatacagagtgcagtactacactacggttttactttgaattttcatgatgtctaatgattttcctgtggttattggcaatttatgtattttcttttgtgagctatctgttcaaatctttgctcatttttaaaactggggttttgactttgwtggggccaagatggcccattagaagcagtggcaattgaaggctcccatcaaaaagaaacataacagaatgcaaatcctggactggcaactgaggtatccaggttctgtcatcagaactgactaggcatctgacatgacccatggagaagggaggaagagcagtgtggtgcggtggcccaactgagagccacacagggctcaggggatcccccggccaggggaggtggtgagtgagcatgctacccagcctgggaaaacatgctttttccatggaactgtgcaacccacggatcagaagatcccactcgcaagcccatgccacaggggcctaggatcccagccacggagctgtgcagattctcaacagccacc

SEQ ID NO: 333590 - DNA, 597 bp, Homo sapiens
ttaaggtaatttctacacatgcagtaaaggaaggatcaaagttatttatgcatttttttttcatatggatatttagttgttctagcaccatttgttagaaactcttttttccacattaaataccctggggtgtttttggccataaattaacaaatatatatggatctatttctgtactctattttcttgatttatgtttattcatttctaatgtcacattctcttcactacttaactttataataattattgaaattaggtagcatgattactttatctttgttctttttcaaaattaatttggatattccaggttttttggatgtgcaagtaaacttagaatctatttatttttaattttcgtgggtacatagtagttgtatatatatttattgggtacatgggatgttttgatacaggcatgcaatgtgtaataataacttcatgggcaagagggtatccacccctcaagcatttatcctttgagttacaaacaaaccaattatagtcttattcaaaatttacctaaaatacataatttatttaaaatacaattaagttattkactatattcccctgttgtactatcaaatagta

SEQ ID NO: 333591 - DNA, 536 bp, Homo sapiens
ttatgtgcaatgcaagaatatttatacacatataaacacataccagtattaccaaagataattatgcatataaatattgctgcacatcatggatatacatgtacatattaatatccacagacacgtatcaaaatgttaacagaaattatttctaaaatttgggtaacaagtggtttttactttcttcttaatgttttactgaattttctaaatgttttaatgtatatatatttaatgtatctaaatgttttaatgtatcgctttccataattcaagaggagatgtaattttaaaaaggtgagtaataaataaaaattatttggatttaagaagaaaatttaacgggtatgacactgcccaaactttagcctgctgcttaagatcatcaactttgtttttatttcttcctccaccttccttggttgctcttaaaaacagtgccaagcccaactcttccaataggaagttcaaatattgaaccattctcaagccattcagctttgccaatgttctgcmgaaaatggtacctaccagag

SEQ ID NO: 333592 - DNA, 595 bp, Homo sapiens
atagtatagcaggaaaaaaataattttaagctaccactcacaatctgatctttccaactaaattatttcagtttttgcttattttcttctagtcttgtaccaatttatgctatatattaatatatacatacacatgtacagttttaacagccagtgaaatatgtacactgttaaatacctatataatttatatgcaaatacatgtttattatggacatacacatatgtactttatactgcttgttagaaacaaagattactgtgttcatttagtattgaaacatagctatcaatcaatgatttccctcattgccrtaatcgcaattgtcactcatcttggcttaatcacccaaattttcttaacttcaatttcctttttgagggaaaaaattatacaaatactattgcccgacttacttcactggaatatcagaagtcctttaaagagtcagtgggaaaatgcactgcaaagacataaagctttgaaatgcaaggtgctgtggtcattgtcacaactgccttttaccactcctgtccaggtgagaagcttcctctgtaggtgagacactgctgctgcccttacgttctgtcaagc

SEQ ID NO: 333593 - DNA, 595 bp, Homo sapiens
atagtatagcaggaaaaaaataattttaagctaccactcacaatctgatctttccaactaaattatttcagtttttgcttattttcttctagtcttgtaccaatttatgctatatattaatatatacatacacatgtacagttttaacagccagtgaaatatgtacactgttaaatacctatataatttatatgcaaatacatgtttattatggacatacacatatgtactttatactgcttgttagaaacaaagattactgtgttcatttagtattgaaacatagctatcaatcaatgatttccctcattgccataatcgcaattgtcactcatcttggcttaatcacccaaattttcttaacttcartttcctttttgagggaaaaaattatacaaatactattgcccgacttacttcactggaatatcagaagtcctttaaagagtcagtgggaaaatgcactgcaaagacataaagctttgaaatgcaaggtgctgtggtcattgtcacaactgccttttaccactcctgtccaggtgagaagcttcctctgtaggtgagacactgctgctgcccttacgttctgtcaagc

SEQ ID NO: 333594 - DNA, 534 bp, Homo sapiens
tgtgtactgtaattttgtgatacagagttttatcagcctgaagggctgttttctatttttaacttgatgaggttttttaatatcagaaatgaatgttaaatgctatcaaaacccttgtggcgtctatgagaagataatataatgtatttgttttttcaattaatatgttaatttcaagtaatagattccaattgttgaatcattcttgcaatcctgggataaaccaagcttggaatgtggttattctgttaatccattattgcatttaatttgaaaatagcatactcatattttttgcattgatactcacagtgaaattgatctattttttctttatgctattstcatccagttattttcatgagagttatgtagccacatagaatgatttagggaacttccttttccatttgaatagtgtcaatagaattctctgtccctaaaagatttgaaaggactcttctttccaataatttgggattggttgccttcttaaggtgatgaatctataattatgttttctgttttcccttg

SEQ ID NO: 333595 - DNA, 440 bp, Homo sapiens
ggtttcactggcaaattctgctaagactttaaagaattaacaccaatgcttcttaaactcttccaaaacattgaagaggagaaaacacttccaaaccgattttytgatgctggcattaccctgataccaaaggcaaataaagatcctacaggaagaaaaaaaaaaaaaaaaaaaaaaagaaagaaagaaagaaaaaaaacccactggccaatatccctaagaaacatagctgcaaaaaccctcaacacaatgctaagcaaaccaaattcaacagtgcactaagaggaccattcgccatgaccaagtggaatttttccctgggatgcaaagatggttcaacctatgcaaattcattaatgcgagagatctacaattaacacaatgaaggataaaaatcacattatccctcaatagatgcagaaaaagcacttgacaaaatt

SEQ ID NO: 333596 - DNA, 572 bp, Homo sapiens
ccttttcccattgtgtattcttaatatcttgtcaaagagcagtggactttatatgcatgcatttatttctagacatttctctgttctgttccattggtctatatgcctgtatttatgccagtatcatacatttttgattactagaactttgtaatatgttttgaagtcaggaagtgagttgccttcagctttgtttttcttttgcttgattcttttggctatttggggtcctttgtgattccrcatgcgttttgtgattgtttttttctgtttctgaaaaagataacattgggatgtgaatagaaattgcattgaatctgtagatggctttgggtaaaatggatactttaacaaaatttagtctcccaatccatgaacatggattgcctccctatctttctcttaatatctttcaacgctacatagtagcttttagtgtacaaatctttcaccttgtcttagtctgttttgcattgctattacagaatatctgagactgggtaatttataaagaaaagtttatttagctcatggttctgtagtctatgaagttgaagggcactagcttctgg

SEQ ID NO: 333597 - DNA, 544 bp, Homo sapiens
ggagaggaaggtggggaaaggggaaaaaaatccacagtccaagaaagttgtgctcatayttctcttcaaccaagaaatcttaagtcataagtttgatcatagggaacttgtcttggttttgatcatgaattgtgtttcttttgattcacaggtagatggttttaacctacttttcttttgcaatattgcatcaacaaattgcacttatattgctcttctagggactcttggtattaaatctttagcccaattgaaacacttactgcccacggaaagctgccagcctcctgcaaagtgaagggttcagagataacctggcagggcatgacgcctcggtttagatgtcagttctgctgactattaactaaatgatcttgggtaaaatagtctctagacagtttactcatctttgaaattggattatattggttaaaacatgtctggccatatccagttgtgcctgcagcagcccttaactcataaaattacagtgaaacttaaataagaagtacacatgcaaaatttctaaaagagtagagttgct

SEQ ID NO: 333598 - DNA, 544 bp, Homo sapiens
ggagaggaaggtggggaaaggggaaaaaaatccacagtccaagaaagttgtgctcatatttctcttcaaccaagaaatcttaagtcataagtttratcatagggaacttgtcttggttttgatcatgaattgtgtttcttttgattcacaggtagatggttttaacctacttttcttttgcaatattgcatcaacaaattgcacttatattgctcttctagggactcttggtattaaatctttagcccaattgaaacacttactgcccacggaaagctgccagcctcctgcaaagtgaagggttcagagataacctggcagggcatgacgcctcggtttagatgtcagttctgctgactattaactaaatgatcttgggtaaaatagtctctagacagtttactcatctttgaaattggattatattggttaaaacatgtctggccatatccagttgtgcctgcagcagcccttaactcataaaattacagtgaaacttaaataagaagtacacatgcaaaatttctaaaagagtagagttgct

SEQ ID NO: 333599 - DNA, 544 bp, Homo sapiens
ggagaggaaggtggggaaaggggaaaaaaatccacagtccaagaaagttgtgctcatatttctcttcaaccaagaaatcttaagtcataagtttgatcatagggaacttgtcttggttttgatcatgaattgtgtttcttttgattcacaggtagatggttttaacctacttttcttttgcaatattgcatcaacaaattgcacttatattgctcttctagggactcttggtattaaatctttagcccaattgaaacacttactgcccacggaaagctgccagcctcctgcaaagtgaagggttcagagataacctggcagggcatgacgcctcggtttagatgtcagttctgctgactattaactaaatgatcttgggtaaaatagtctctagacagtttactcatctttgaaattggattatattggttaaaacatgtctggccatatccagttgtgcctgcagcagcccttaactcataaaattacagtgaaacttaaataagaartacacatgcaaaatttctaaaagagtagagttgct

SEQ ID NO: 333600 - DNA, 612 bp, Homo sapiens
agttttggctgggtgcactggttcatgcctgtagtcctagcagtttgggcagctgaggtgggaggactgcttgagcctaagagattgagatcagcctgggccacaaagtgagactctgtctccacaaaaaatcagaaagttagccaggcatggtggtgagcacctgtggtctcagctacatgrgagactgaggaaggaggattgtgtaagcccaggaagttgagactgcagtgagctctgctcatgccactgcccttcagcccgagtgacagagtgagaccctgtctcaaaaacaacctccccacccccgcccaaaaaaaaggagttttgggagaatcccaaagggaataaacaagacaaaagcaaaaacaacgatactataggaatgtgaagactctggcacctacaactacaccaaacattaaacacaacctaattcctacccatataacataaaaagtcacattagaggtttctttaactcagtttctattacttgatacattgtctagaaaacacgataaatatgaagaaaaaacagtctgaagagacaaggcaaccatcagaaccaaatttagatatgacagactttgaaaaagacagggaatttaa

SEQ ID NO: 333601 - DNA, 479 bp, Homo sapiens
caatagcaagtcattcaacggtagctttaaatattatttgacattatataccatcactgctaattaatagttgtataagtaattccacagtattggctaattctttytctccttttcttgttggaaggcagggctttgtcaagtttagagagagaactgattcactgggacatggaaaccactcttgtctgaaaggccatataatccagcttcagaagaagttaggattgaaacgggaggaagcctgaagaaaaaattttcatcagctcctgaattagatctttataattttaatgtaagttatatacatttatatttatatctttgagtcccaagctattcttacaggtattaaacaaggtggataaatatctttaaaagtaaatgatatgtttccctgctttttcacataatatagtgaatatgagtagtgttcttcagataaagctgaattatcatgttgaaaataagttttaccc

SEQ ID NO: 333602 - DNA, 584 bp, Homo sapiens
ccaccagggaaatttgggagatttgggtcataactgtggtggccaaatctactcccacttaatgcttttaagaacatatgctttggaaggaaaaccaaggttccaaagagtagttgaaaagtctaaggcaaagatgttctaaattaatcttgtagaaatgaaactgtggatagacaagggagtggctttgtattagtcttgcattgctgcataacaaatcactacaaagtaagcagcttaaaacaacatccagggatcatctcacagttctgtaggtcagaaattctggcatggcccagctgggttcccggcttagtgtttgacacacaaggtggcagctggagtgagttctcactcagaaaacacccagagcygttgctcacttttcaagtccgtcagattgctggcagggtttatttccttatagctgtatgactgaggttcctgttttcctgttggctgtcagccaggcattgctctcagcaactagaaatgcactcaggtggcccactccagcttcaagccagcagggaagaaccccctgtcaaagcccctctcacactgaatctcttttaccaggaaaa

SEQ ID NO: 333603 - DNA, 579 bp, Homo sapiens
agaaacaagcattttaacagtggaaaatcaggaaacaagttattaataaatgaattattaataaataaatgtattcmatcatttattcatttattttgcatttaatatttgttttctaacagtatgtcaagtgactttagagagtctggaccataatccggaaagacacaatcccaaatgccataatccaaaatgttgaaatctcaaaagataaaaatttcctaaagataaaaatcccaaaagtctaaaatctctaacttctaaaactctgaaaatcacaataataagatggttgcatcatgttaggccagctcttatggattatctttgtgcaactgcccataatctgtccctgtaatacagttttacatgcctaattttctttccagtttttctttttcttttcttagttatttttcaacaccattttaaatggtcagcattatttcttataatttgctatgctatgtattttatgtttgtatcatttccagtactggaggtataaattgggtaaagacttttagagagtcctaatttgttttatgcatattttgcaaatttgactccctgaaagta

SEQ ID NO: 333604 - DNA, 579 bp, Homo sapiens
agaaacaagcattttaacagtggaaaatcaggaaacaagttattaataaatgaattattaataaataaatgtattcaatcatttattcatttattttgcatttaatatttgttttctaacagtatgtcaagtgactttagagagtctggaccataatccggaaagacacaatcccaaatgccataatccaaaatgttgaaatctcaaaagataaaaatttcctaaagataaaaatcccaaaagtctaaaatctctaacttctaaaactctgaaaatcacaataataagatggttgcatcatgttaggccagctcttatggattatctttgtgcaactgcccataatctgtccctgtaatacarttttacatgcctaattttctttccagtttttctttttcttttcttagttatttttcaacaccattttaaatggtcagcattatttcttataatttgctatgctatgtattttatgtttgtatcatttccagtactggaggtataaattgggtaaagacttttagagagtcctaatttgttttatgcatattttgcaaatttgactccctgaaagta

SEQ ID NO: 333605 - DNA, 656 bp, Homo sapiens
ctgcagtgattcccaaggcatggtgcttccagggcttcacacccagagctacctcacacaaatttctggggttgggggtctattcaggtgcatttaaatcaaggtcctcgggttttcattctgcacactacactgtcagactctctgtgctgatgggacattccacttggtgaacacaaaggcaccagagaacctttagagaacttggtatgacagatactctctcctttgaccaaagctttagtcaggctcctctcattcctctgcttgaggaggcccaagtttgggcttcctgtctaactttgcagaatccagtgtgagccagaatcctgctaaggcagcttagggaaaatccctcactcttggtagtgataggaatcagaacatgctaccccaaaatatggcactttggcatttgagtaaacagtagaacagggaggtcactctsagtttccccttgcccttctcccctgaagcaggtcatcagaccctcatgtcagagatgccctccctgtatacataagaaaggaacatcgttgtctcggaagacacagggacacagagcaccacctaaatagataggccttgctaaattccccccagcttattactattagattatgctcctttggccaatcatacttctgcaggactgc

SEQ ID NO: 333606 - DNA, 483 bp, Homo sapiens
gatgaccctaattaaaataggactctaggtcatgtccattgctgtgtgttccttgcccctgcattttttatttataaccctacctggcatgtatctaytttttactgtatgtctatcataaaaaaagtagtctcttcaatggtagcaacccaatccagttcactgctatgatcccagtaattagaacaatatacaacacataacaatccctcaataagtatttgctgaatgaatgaatagtacttcctggaagacactgactagcagagccatgtacaagttggtagaaatttaaagttggaagagactatgatctactgttgtaaggcaattagaatggcctcactgtaagtaaaacaaaattaggactaattattagaagacatcattaaaacaatgaaacctatggcacagaccttgtgtttttaactcatgaatggggaagtccaacctacattaagaccaggaaaaaggtagtatttt

SEQ ID NO: 333607 - DNA, 483 bp, Homo sapiens
gatgaccctaattaaaataggactctaggtcatgtccattgctgtgtgttccttgcccctgcattttttatttataaccctacctggcatgtatctactttttactgtatgtctatcataaaaaaagtagtctcttcaatggtagcaacccaatccagttcactgctatgatcccagtaattagaacaatatacaacacataacaatccctcaataagtatttgctgaatgaatgaatagtacttcctggaagacactgactagcagagccatgtacaagttggtagaaatttaaagttggaagagactatgatctactgttgtaaggcaattagaatggcctcactgtaagtaaaacaaaattaggactaattattagaagacatcattaaaacaatgaaayctatggcacagaccttgtgtttttaactcatgaatggggaagtccaacctacattaagaccaggaaaaaggtagtatttt

SEQ ID NO: 333608 - DNA, 636 bp, Homo sapiens
atctaatatatgtggcagcaaggaaatcagtggttgcctagagacagggcttagggaaaagggagcgacaggagggcaagattacaaaagcacatggaaaaacttctgggtggtggtggtggtggaaatgtttatatcttgattatggtaatggtttcacaggtatacgtgcgcatcaaaacttacacattttacactttaagaatgtgcagtttattgartgtcaattacaactcaataaattgtcatggaaaatagtattgagcaaaatatttaacaaccagtgtgctacagacaataatccttgagaataaatgcagaccatgccagtgtgttgcagctcaatgccaacaagccttggttgcaaagatgatcaacttcattggttatcagggaataaaatttaagaccacaatgcaatagcacgacacatctaccaaaatgtctaaaattaaaaaaacaaaaaacaaaaaacaaaaaacaagataccaagggttggtgaagatgtggagaaatctaaattttcatatactgccagtgggaatggaaatttgcacaactatcttggaaagtcatttgtcagtatctactgaaacctaatatagcttcaaactctcatagctgataattccattt

SEQ ID NO: 333609 - DNA, 648 bp, Homo sapiens
ctccagacttgaagacacaaattcaaatgcctcgagaatccagggtgtgatacagatgggtggagaaaagcagcagtgtagtgtgatgaaaagtacagatcattggtcaccaggactggcggcaacagggaatggtgagattraggagaaccagagagctcatgtctatccgcgagggacagctgctcccaagttcctcctggctgtggctgcgtgggaatgttccccagtggggccatctatgcagattgtaaaacagaggttagaaatctagatttttattgtgaaatgtcccaatttttaaatgttgttaaaaattgaaaaaaactttgtaactattgtttgggccataattgtacaagctcatctgctgctgcattattatctcaggcttctatttgcaatgtctgctccagagtgagctctcactcactaaattacattactatacctcttcttttcaattaaccgcattttacaaacccacttttaactcccaggctttacttttcctctatacttgaccagaggagttagaaggtctgaagtttcagtcctgacgtgctgcttattagctgtataatcctgaatgagtcctttaacttctcaaaatcttaggtctttatctggaaaatggaaaaaaaaaaa

SEQ ID NO: 333610 - DNA, 521 bp, Homo sapiens
ttactacctgctggctaccatgctaaatatattcatgtatgaactcatttcaacctcatgtcgacttcaagaggtaggtacaattaaaatcaacatgttacagatgatgaaacagaagcacagagataatttgcccgagttcccagaaagctaggaaatagtgaagttacttyccacctttcatttcccatggacatagatagcttaattttcctctaagtaggaacttccagcaaaaccctagttaccagcttctttgggggaaaaaaaagcctttttggcagactccaggctgccttgccctttgaattttctactgtgggtttgagaggatctttccttgtttctggaatacttcatgatgtatgtgtcttcttaccctcttctaagtttcttctttcaaggctcatctcaagttttgcctcttttggtggatgtccctagggctcattctattatgtaagattaggcatccttgaacatactttgcttagacagttgattcaactagatcctaagtc

SEQ ID NO: 333611 - DNA, 587 bp, Homo sapiens
tatcataggtagggctgcgttcagctgcaggtaagagaaaacctaattacagtggcttaaatagaggtgggttatacttttctcatttaataattagtgcaggcataggcagtttgctgatattgggtccaaccaggaataaaaaaaagaaggttggtacttgttttgcctctcctttttaacagaaaagcaaaagctttcccagaaatcctgtctcagcagatctgctttttatcctgttgaccaaaatggtgtcatacggctgtaagagagaatgggaaagtgagactgaatggctgtcctagcagccgatgaagattctttgccacaagatcaatcctggttcaactcccagagattttttgaaagggttggcatccaagttcctttagtgataaagaactaaaatgctgaaatactgcaataagtctataaattaaaaatgttatacatagagtttattagttctaccttcccttcatactgtgactaaactcatcacyttcttgaactgaaatggagaaatccaagatcactggtcaaacttcacgtgattcctgaaactgcagtctgcttaacaacttgag

SEQ ID NO: 333612 - DNA, 587 bp, Homo sapiens
tatcataggtagggctgcgttcagctgcaggtaagagaaaacctaattacagtggcttaaatagaggtgggttatacttttctcatttaataattagtgcaggcataggcagtttgctgatattgggtccaaccaggaataaaaaaaagaaggttggtacttgttttgcctctcctttttaacagaaaagcaaaagctttcccagaaatcctgtctcagcagatctgctttttatcctgttgaccaaaatggtgtcatacggctgtaagagagaatgggaaagtgagactgaatggctgtcctagcagccgatgaagattctttgccacaagatcaatcctggttcaactcccagagattttttgaaagggttggcatccaagttcctttagtgataaagaactaaaatgctgaaatactgcaataagtctataaattaaaaatgttatacatagagtttattagttctaccttcccttcatactgtgactaaactcatcactttcttgaactgaaatggagaaatccaagatcactggtcaaacttcaygtgattcctgaaactgcagtctgcttaacaacttgag

SEQ ID NO: 333613 - DNA, 531 bp, Homo sapiens
tgtgattagttgagcccagtcttcagaccttctctggaggtacaatgctatggctcctgggaatgtaatacagttgactcttaacatccaaaccayggctataacacaggatccaagagagcaagatccctgtgcctttgtgggtgtatgtgttaaaaccagaatgcctttttttgggggaaatgctctcaaattaggcaaacagtgtgattaaaaaaaaaaaaaaacttcagctgaattaaatttaatggaatttaattgagaaacaaacgatttgcgattccagcagcctcctgagtcagagtagactcagagactcccgcgcagccacgtggtggaagatttatggacagaaaaaggaaagtgacgttccgaaaacagaagtgaggtacagaaagcgttgaattggttacagctcagtgtttgccctacttgaacatggttcaaacagctggctacatttgactggccaaactcagtgactggcacaagtgaggctacagagtatttacacttccagttgttatactt

SEQ ID NO: 333614 - DNA, 531 bp, Homo sapiens
tgtgattagttgagcccagtcttcagaccttctctggaggtacaatgctatggctcctgggaatgtaatacagttgactcttaacatccaaaccacgrctataacacaggatccaagagagcaagatccctgtgcctttgtgggtgtatgtgttaaaaccagaatgcctttttttgggggaaatgctctcaaattaggcaaacagtgtgattaaaaaaaaaaaaaaacttcagctgaattaaatttaatggaatttaattgagaaacaaacgatttgcgattccagcagcctcctgagtcagagtagactcagagactcccgcgcagccacgtggtggaagatttatggacagaaaaaggaaagtgacgttccgaaaacagaagtgaggtacagaaagcgttgaattggttacagctcagtgtttgccctacttgaacatggttcaaacagctggctacatttgactggccaaactcagtgactggcacaagtgaggctacagagtatttacacttccagttgttatactt

SEQ ID NO: 333615 - DNA, 531 bp, Homo sapiens
tgtgattagttgagcccagtcttcagaccttctctggaggtacaatgctatggctcctgggaatgtaatacagttgactcttaacatccaaaccacggctataacacaggatccaagagagcaagatccctgtgcctttgtgggtgtatgtgttaaaaccagaatgcctttttttgggggaaatgctctcaaattaggcaaacagtgtgattaaaaaaaaaaaaaaacttcarctgaattaaatttaatggaatttaattgagaaacaaacgatttgcgattccagcagcctcctgagtcagagtagactcagagactcccgcgcagccacgtggtggaagatttatggacagaaaaaggaaagtgacgttccgaaaacagaagtgaggtacagaaagcgttgaattggttacagctcagtgtttgccctacttgaacatggttcaaacagctggctacatttgactggccaaactcagtgactggcacaagtgaggctacagagtatttacacttccagttgttatactt

SEQ ID NO: 333616 - DNA, 577 bp, Homo sapiens
ctcccgcgcagccacgtggtggaagatttatggacagaaaaaggaaagtgacgttccgaaaacagaagtgaggtacagaaagcgttgaattggttacagctcagtgtttgccctacttgaacatggttcaaacagctggctacatttgactggccaaactcagtgactggcacaagtgaggctacagagtatttacacttccagttgttatacttcacgatgtacagagaaaccttcaggccaaacttaaaatatggaaggaggcagctttaggctaaacttcatttagcaagtgaggtttgtttcrgtaggacaaggcaatacaatttgatcctgggagacttctcctttaagggtgtttcaaaacaatttaatattttcagattatgtgacttccatttctgttaagctagtcttgaatttattatgaagtaaagaacatagacctttcaagtgcaagttttattgctattacagtctcaggtgaggtgataatcaaatatttattatatggaaagtagtgagcactactactcagaatggatctcaactgttctctcagagacccgattttgaa

SEQ ID NO: 333617 - DNA, 459 bp, Homo sapiens
ggagaatcatgtttatacatacaatactttttaaattattgttgatccatggaatattttgccttgctattctgtagtgaatgtattctaacttttttgtgggggtgggggttggtaagaaaaaggatggtggtaatagtggttgacatatccayagatgagcaaaatgtacatttcttgttcctgcctcttctaatttagtacatggcctcaaatctctcacttttcaggggcatcccattctgatgctgagatctaatggagtttagctctactagaaagtaatttctgtgagggcagcgacttgttcatcactgcatccatggcgatttataaataattattgaactcgtccacacactctgcccagcttcatttacttccttgtcctttatctttcctcccttaagcctcagagtaggaccctgttctgagaggagcacagcaggacactctggg

SEQ ID NO: 333618 - DNA, 575 bp, Homo sapiens
gaagccaagagaaggtaatgaggtgccaaacctggcctgatatgcacaaggcaggagacagaagccaataaaatacatgccaacatgccgggccacagaggtctctcacacagtggattgcttctgcaaagcttttcagttcataatcagtgccctgcaactgacaattatttttatccaagaattaatttttaaaaatccactggctctgccttctaggcacttaggatggccttctagcattgtgcttagaatttcatgatgtgtgtgtcatcatgagagacataagagagtgataactgctgcttattgaacatttggtatgtgccacacaccaaagcactcactgaacatccattcactcacttaagcctcccaccaaacctatacagtatgcttgtgctattaccatccccatattatagctgaggaaacagaggcagagagaagttgcccagggtcagccagccagcatgggtgggggctggaattcacacccccrcctaacaccagagcccatgctcttgactcctctaacctctgtctctccccatccctaagtaaccccaacagaa

SEQ ID NO: 333619 - DNA, 606 bp, Homo sapiens
tgggggctggaattcacacccccacctaacaccagagcccatgctcttgactcctctaacctctgtctctccccatccctaagtaaccccaacagaaagtcaaattgtttcttatcttcacattctccacaactcacactgatctgaaaaaagaaggtgaccaacacataatgctagcttgaattgaatgaagccatgatgaatatttcttttaaatttctttgtgaaagtaatatacatacataattaaaacggtgccaaaagaaagataacaatttaagaaaattcccaacacacatgaactctcatttttttccttcccgctccactttttagaggaaaccacttatttatttatttttacattaaggatttattttttactttttttattacactttaagttctagggtacatgtgcacaacctgcaggtttgttacatatgtatacatgtgccacgttggtgtgctgcatccaataacttgtcatttacattaggtatatctcctaatgctatccttccccsctccctccaccccacaacaggccccagtgtgtgatgttccccattctgtgtccaagtgttctcattattcaattcccac

SEQ ID NO: 333620 - DNA, 593 bp, Homo sapiens
ctgtcagattcaaaatactcaaagccccctcaccctgtctcaacatggccattccacagaagggaaactagttatctttccagggaatgaaatggatgctattaagatactcccacaaggatttagttattatgtgggcatcgtctatgccattaaactgtatccygggaggacctgagggtttgatggcaggatctcagaatcaccaggataagagggtgagaaaacatgcatgtcacttcccttattcctcatgtcccccaactattcggaggataaaacttcaccattaatctaaacacatcatttgccatataagaattttctttcatctcctcaggtctgagaacacaaataaattggtccaatatattattgaaaatcatctttaatattatagttaataagcattaacagctaaattacgtcttcttaaatctaattattcagtgatcaaacataaacatggagtcccggggaaagacagagcatgagttactatctatgctgggcactacaagagttaaaataaaaggttggtaaattgacacacagagaaaaggacattaaggatattgtctgatgacaatgct

SEQ ID NO: 333621 - DNA, 639 bp, Homo sapiens
ctaaccctcacttcttcatcgtacaatgagacggttaactggatagtttcttagagttccttcttgaattttaggacttaaatcattttctctgtcctttatagtcatcggttccatttattaaaatgtctccaatgcagaaaaggacaaaaatttaaagaagtagaaaatctcgtcattgtcatatttgtcagtcccttgcaatccagtctatactgctaygtcttttccttttactgtcaactgctaataccaaatgtgctgttctctcatcagtttgtggtctaatttatgcccataaaatattgttaccatctgatgacaatgagaacaccaaatctgttgtccccactcttctgaatcctctttcagcatcggtatcgtcctggcttttctcttctatagatatatctgaattatacattatttcccccaggcatgcttttccaaattaaataaaatttcattttctgtttcttgccttaatcctactagatgacttggcttaaaatatttacagactccactttgtaccatttttaataatttggccttattgcatgtatttattttatcttgtgttttagagggttgtggtttgtgctcacccataattaaggctttcctctaatactatat

SEQ ID NO: 333622 - DNA, 639 bp, Homo sapiens
ctaaccctcacttcttcatcgtacaatgagacggttaactggatagtttcttagagttccttcttgaattttaggacttaaatcattttctctgtcctttatagtcatcggttccatttattaaaatgtctccaatgcagaaaaggacaaaaatttaaagaagtagaaaatctcgtcattgtcatatttgtcagtcccttgcaatccagtctatactgctacgtcttttccttttactgtcaactgctaataccaaatgtgctgttctctcatcagtttgtggtctaatttatgcccataaaatattgttaccatctgatgacaatgagaacaccaaatctgttgtccccactcttctgaatcctctttcagcatcggtatcgtcctggcttttctcttctatagatatatctgaattatacattatttcccccaggcatgcttttccaaattaaataaaatttcattttctgtttcttgccttaatcctactagatgacttggcttaaaatatttacagactccactttgtaccatttttaataatttggccytattgcatgtatttattttatcttgtgttttagagggttgtggtttgtgctcacccataattaaggctttcctctaatactatat

SEQ ID NO: 333623 - DNA, 638 bp, Homo sapiens
tggatgctctggtgtcggatgaatatatggttcaggatttttatttcctcttgctggactgatccttttatcatgatataatgactttttgtgtctctttgaactgtttttgattttaatgtctgttttatgaagtatagctactcctgctcatttgtggttttcatattcatccaatatcttttttcatccctttactttcaatctatatgtctttaaggtgaggtgagtttcttgtaagcagcatataggtggatcatgtttttaaaattcatttagccactctatcctttaagtgaaaagtttaatctgtttacattcaagattattattgatatgggagggcttactcctattattttattaattgagytattgttattttgaatattctttgtttctttctctcctgtttatcattgtgttttgttttctgtagttgtaaccattggaccctttcctttccttatggtgtgtttgctctaccagtgttttttatacttttgtgagttttcatgatggtagatagtatctttttgtttccaggtgtaggactcccttaaagcattttttacaggacaatactagtggtgatgaattccttcagcttttgcttgtttgagaaatactttatttgt

SEQ ID NO: 333624 - DNA, 488 bp, Homo sapiens
gatgatgaaactgaattttagttacattgtcccaaatcccagygcataatggccaaaccagaatttgcggtctttttctaaagactgaagtttattgactaccatgctgcctagtacccccgtctgtttgtttgtagtgacgtctacagaagctatcaggaagttaggttctgttgaggaacatatcaaatactggactataggcagtggggaactgccgaagccattttgaagagagaagcacatgatatggctggcagaaatatcccgaaaagatcgggctgaatgcagccaattaggtaactgtaaaaatttgtgggtggtaaaaataggaaaaatgacagttgtgaaagacagtatttactccagaaaatgttacagaatttggaaatcattccacattaaaggcagagagaaggaagcaaagataacttagaggcatcaaaacaaagggctggtggggatgattagcagccatcaagatgctt

SEQ ID NO: 333625 - DNA, 638 bp, Homo sapiens
tggatgctctggtgtcggatgaatatatggttcaggatttttatttcctcttgctggactgatccttttatcatgatataatgactttttgtgtctctttgaactgtttttgattttaatgtctgttttatgaagtatagctactcctgctcatttgtggttttcatattcatccaatatcttttttcatccctttactttcaatctatatgtctttaaggtgaggtgagtttcttgtaagcagcatataggtggatcatgtttttaaaattcatttagccactctatcctttaagtgaaaagtttaatctgtttacattcaagattattattgatatgggagggcttactcctattattttattaattgagctattgttattttgaatattctttgtttctttctctcctgtttatcattgtgttttgttttctgtagttgtaaccattggaccctttcctttccttrtggtgtgtttgctctaccagtgttttttatacttttgtgagttttcatgatggtagatagtatctttttgtttccaggtgtaggactcccttaaagcattttttacaggacaatactagtggtgatgaattccttcagcttttgcttgtttgagaaatactttatttgt

SEQ ID NO: 333626 - DNA, 638 bp, Homo sapiens
tggatgctctggtgtcggatgaatatatggttcaggatttttatttcctcttgctggactgatccttttatcatgatataatgactttttgtgtctctttgaactgtttttgattttaatgtctgttttatgaagtatagctactcctgctcatttgtggttttcatattcatccaatatcttttttcatccctttactttcaatctatatgtctttaaggtgaggtgagtttcttgtaagcagcatataggtggatcatgtttttaaaattcatttagccactctatcctttaagtgaaaagtttaatctgtttacattcaagattattattgatatgggagggcttactcctattattttattaattgagctattgttattttgaatattctttgtttctttctctcctgtttatcattgtgttttgttttctgtagttgtaaccattggaccctttcctttccttatggtgtgtttgctctaccagtgttttttatacttttgtgagttttcatgatggtagatagtatstttttgtttccaggtgtaggactcccttaaagcattttttacaggacaatactagtggtgatgaattccttcagcttttgcttgtttgagaaatactttatttgt

SEQ ID NO: 333627 - DNA, 647 bp, Homo sapiens
ttattttctaaatcttacaggagagaaaaatgtatcttctaaacagttttttgttttacatgagcagataatatttgttttttaaaaaagccaccctccaaaaatataatgtaaaacttttgattagaaactctttctgaaaataacagctttattgagatttagttatatattataaagttcaccattttaaagtgtacaatccagtgagtttaatttattaagttagacacccatcatcactatctaattccagaacatgttatatcaccccaaaaagaarcatcataaaccattagcagttctccattctacttcccctcaacccctggcaaatgctactctagtctactctacttttaatgccaaaaccgcaattacttttgcaccaaccctattttggatacctcatatatatgaaatcatacaatatatggtctgttgtgactggcttctttttttttattgatacataatatttgtacatatatagagagagtacatgtgatactttgttgcatgcatagaaggtgtacttaggatatccatcaccttgagaatttatcatttctacatgtcaggaacatttcaagtcttctgttctagttattttgaaatatacaacacattgctgttaccttcttctg

SEQ ID NO: 333628 - DNA, 250 bp, Homo sapiens
ctaaggcttcacatccattttcttcagtacctgttacagccttgtaatatgggtgttgttatttctataytacaaatgggaaagtgttgctcaaagagatcgagaaatttactgtgttctcaaggctaacaagtagtagagaaaagatttgaacctacaactgattatttcccagtcccatgttccccctactagaatatgatgctttgccttctacccctcaggattactattttgttagtaaaataat

SEQ ID NO: 333629 - DNA, 250 bp, Homo sapiens
ctaaggcttcacatccattttcttcagtacctgttacagccttgtaatatgggtgttgttatttctatattacaaatgggaaagtgttgctcaaagagatcgagaaatttactgtgttctcaaggctaacaagtagtagagaaaagatttgaacctacaactgattatttcccagtcccatgttccccctactagaatatgatgctttgccttctacccstcaggattactattttgttagtaaaataat

SEQ ID NO: 333630 - DNA, 595 bp, Homo sapiens
gggcttgaaaatctttccttttatgaaatgataatggcagtaaataatagttgtttttcctttttaatgtcctttcttggcaaagtgaaaagttggcaagtcatagcagaatccaaatttgtttattggttagctgttttaattactgcaagaaatatgaaggtctgggaatttctagactaggcaattgatattttttctcttgaattttagaaaaatggaagaattctttaaatagtacaataggygatggagttggtaatgaatagctgtatcacctacttggagaaaaacttagtatttctcattcatatatgtcattaagatgtatattccatatacagcatttatacacaagcaggcaagttcaaagatgtttactgtaatatattatttgtgcacacacatactttcattaaagactgctaatatatctatgcaccaatgaaagaggtggcaatgtgcttgtaaggaattatacatgttttcactgaaaacctaggtcatgataaggcactcctggttctgctttgcatcctgaactgctgacacacagttctagccttgatagatgagttcattattcctttctaaa

SEQ ID NO: 333631 - DNA, 636 bp, Homo sapiens
ggtgggggcagcagtggttgtgctgcagtcctactactgaggagggcaaagttgttttcagtggcagcaaccataaacaggcagctggggaatgaacacattggtctcagttggtggcttcgggcaggatagcatctcatggcacttgtagatgtgtggtgtccccactactggggattgtggggtcactgacagtggctcatgattcacgcctggtggcagcagccagaagtggcacctggctgtgggcaagggatgtcaattgggcttcagaaatgtggagatgaagaggctgttggaccccagggtaggatgcagtctggtaggggctgggctctcaaagtggcaccttgctatagctgcttaggacttggyggctgtatggaatccagtgtgaattcccttcctcaagcaatgctgtcatgtgatcttcaggcagctccctgtgttagtctcaggactcacaagggttaagagactccacagtggctaagactgcaggagtctgtggtgggaatctgtagcaattgggtgttgttcacttacccttttcccacagttgggaacctctacaggcttccagttgatcccagcagagcatgttaccttgcttttctccctttcattgccttaggt

SEQ ID NO: 333632 - DNA, 636 bp, Homo sapiens
ggtgggggcagcagtggttgtgctgcagtcctactactgaggagggcaaagttgttttcagtggcagcaaccataaacaggcagctggggaatgaacacattggtctcagttggtggcttcgggcaggatagcatctcatggcacttgtagatgtgtggtgtccccactactggggattgtggggtcactgacagtggctcatgattcacgcctggtggcagcagccagaagtggcacctggctgtgggcaagggatgtcaattgggcttcagaaatgtggagatgaagaggctgttggaccccagggtaggatgcagtctggtaggggctgggctctcaaagtggcaccttgctatagctgcttaggacttggcggctgtrtggaatccagtgtgaattcccttcctcaagcaatgctgtcatgtgatcttcaggcagctccctgtgttagtctcaggactcacaagggttaagagactccacagtggctaagactgcaggagtctgtggtgggaatctgtagcaattgggtgttgttcacttacccttttcccacagttgggaacctctacaggcttccagttgatcccagcagagcatgttaccttgcttttctccctttcattgccttaggt

SEQ ID NO: 333633 - DNA, 593 bp, Homo sapiens
acaatcctaaatatatatgcctctaacactggagctcccaagtttataaaacaattaagactagacccaagaaatgagatagatggcaacacaataatagttgggggacttcagtactccactsacagtgctagataggtcatcaacacagaaagtcaacaaagaaacagtggactgaaactataccttagaacaaatgaacttaacagatatttactgaacattctaaccaacaactgcagaatatacattctattcatcagcacattgaacattctccaagataggccatatattaggtcacaaaattagtctcagcaaatgtaaggaaattgaaattataacatgtactctctcagaccacagtagaataaaattggaaatcaactctaaaaggaaccctcaaaaccatgcaaatacatggaaattaaataatctgctcccgaatggtcactgggtcaacaatggaatcaagatgggaatttaaaaattatttgaactgaataatagtgacaaaaccaaaacctctgtgatacagcaaaagtatttctaagagaaaaggtcacagcattaaacaccttcatcaaaaagaa

SEQ ID NO: 333634 - DNA, 481 bp, Homo sapiens
cagatcctgtttgcctgggtatcaccagtggaggctgcagaagagcaaatattgctgtgtgctcctccctctggaagtttggtcccaaaggggtgcctgccagatgcccactagagctctcttctaagaggtgtctgttgaaccctgctgggaagtgtctccccatcaggaggcacagggtttggagacccacttgaggacgcagtctgtcccttagcagagctcaagccctgtgctgggagatccactgctctctttacagccagcaagcagaaacgtttaagtctgctggagctgcacccacagctgccccttccctcaggtgctctgtcccagggagaggggagtttcatcyataagcccctgactagggctgctgcctttctttcagagatgccctgcccagagaggaggaatctagacaggcggtctggctacagcagctttgtggagctgcagtgggctccgcccagtcagaact

SEQ ID NO: 333635 - DNA, 590 bp, Homo sapiens
ggggctgtattgtcctttctgtggatctttggcaaatagacaagtcaggaaaaagtgcttgagacaaagggaatagtctgaatcttgtgtaacagagagagggcacatcttaaaatggctatgtgactagaatatatggagtgcattgcaaactacagggctaagatgataaagagaggacaagtgtggagggaggagtgtacgctttattctgcctttaagtatctactacggccatgggggtacaactcaatgtatgacctcatataagagtttatgatgcatttatgacaaaacagactgtaggtgccatccagagtggaataatttggaaccagtacacctatacaaatttttattattagctggctatgaaggaaagaaatgcacttaattgggtaaacagtttatttcttatcttcttttaagctttctgaacgaacagaatttggctagctggttttctacccttgaaagcataaagaagsttggactgtctgaaaatactcttttctgggagtatgttcgtagacaactgaaataaactgcaactcactggtgccaaatatatcacacatcagcccacctcc

SEQ ID NO: 333636 - DNA, 624 bp, Homo sapiens
caatagcatacctttgggacattattgctcttaggtgctattgttaacaacgggcctcctaatctagatgttctcactctagttcttccatgaggatttctgggaagtttgcctatgagggaaagttatgacccaygatctactgttgctttgggaagtcttcagcagctggtgccagctgtgttatcctgatacttttttttgtttatttgtttgagatggagtcttggtctgtcacccaggctggagtgccgtggcatgatctcagctcactgcaacctctgcctccagggttcaaacaattctcctgcctcagcctcccgagtagctgggattacaggtgcacaccgccacacccggctaattcttttgtatttttagtagagatggggcttcaccatgttggccaggctggtcttgaactcctgacctcaggtgatccgcctgccttggcctcccaaagtgctgggattacaggcaggagccaccgcacccagcctcctgaaacatttcataagagaggtatacgtaatcctctgccatatttagcagagagtttcacaggttctgtgaattacctggtgctcttcaggacataggcaatgccacaaatatcacacccat

SEQ ID NO: 333637 - DNA, 547 bp, Homo sapiens
gaaaagtctagtgacctttccaacatttctaagcattcctaaggaggtttatgtccaggtcatttcactcagcgtttcagctcttcactctgatggggttcaggacatgctaccccaaattatggcaccttggcatttgagaaaacagcagaagcagsaaagtcactctcaccttctcctcatccttctcccctgaagcaggttaaaaaaccctcatttgagagttgccctccctatactcagagaaaaggaatattcttatttctggagacacagggtcagagaaaagaatctgaacaaacaggccttgctaagttccccccagtttattagcattagattataccctcttgtcctccaatcatatttctccatgactgcctactctttgtcaaacctaagcacaacattacacaactgtacctgtttctttgggtcttcatttccttatgaaggctcctgtgtcacataaaacatttatattaaatgaatttgtatgcttttctctagttaatctgccttttgttatggaagcctcagccgcaaa

SEQ ID NO: 333638 - DNA, 579 bp, Homo sapiens
ataaagaaacacaattatctcaactacattaagcacccattatgcttaagatgcagcagtgggtgcaagagagaaawagaaaacaggacaagaggtatcctttgttctcaaggcatttatgatgcagtgggggaagtggccatgcacccaagaagctgtgtggtgagtagaaggaagtttgaaggcagaagatccaagtttcagtgttgattttacaataatatgtccctggacaagacaagtaaccttctgcattttgatgttgtgaatattccattacttgcaccgtttctggggcttctgagaggatagaaggcaacgatgtgtgtggatgggttataaaaatcataaagccctgcatgagtgtatggtatttctgtgatcaccacttgaaaagtaacacacagtaactggctatgagtgcaaatccccactgctgcacaatcttttagggtttaaatgctaaatatgttggtgctgtgcttacagggactaaagaaactaaacaccaaataagttgagaatcattacaatgaaaccacagccacctacctcaagagctccccaaatctacaaaag

SEQ ID NO: 333639 - DNA, 564 bp, Homo sapiens
tgtggcacaaataaaatctacacatccatagatatttggcagtacccctgtatagagacactgttgtacctatgtaccttgacctagagtgaagaaccactgttatagaccacatgttctataaggatttggaaggcctgaaagtggctagagaatatttatttcaagaacgctgttggactgtccaatgggtagagagtgaaacagaagagggtcttccaaggggcaactstcatatttgcatcatatttaaagctcacaaaagtttcacatacattatttcatttaatctttacgacaaaacagtgagattcattcatttcccagctctagaagcagatacttagaggtaagccacagaagatgtacacatgtaccgccaaccaccacaccacaccaaaatgtacaagaaaacctgtagctacaatgctcataatggccgtgaagtggaaaagttgcaaatgctcattctcagtatgacaaaaaaatacacatgaactgagcactatatcgtctagcaatgagaaaagccaaccacaactatctgcatgaaaggatgagtct

SEQ ID NO: 333640 - DNA, 564 bp, Homo sapiens
tgtggcacaaataaaatctacacatccatagatatttggcagtacccctgtatagagacactgttgtacctatgtaccttgacctagagtgaagaaccactgttatagaccacatgttctataaggatttggaaggcctgaaagtggctagagaatatttatttcaagaacgctgttggactgtccaatgggtagagagtgaaacagaagagggtcttccaaggggcaactctcatatttgcatcatatttaaagctcacaaaagtttcacatacattatttcatttaatctttacgacaaaacagtgagattcattcatttcccagctctagaagcagatacttagaggtaagccacagaagatgtacacatgtaccgccamccaccacaccacaccaaaatgtacaagaaaacctgtagctacaatgctcataatggccgtgaagtggaaaagttgcaaatgctcattctcagtatgacaaaaaaatacacatgaactgagcactatatcgtctagcaatgagaaaagccaaccacaactatctgcatgaaaggatgagtct

SEQ ID NO: 333641 - DNA, 598 bp, Homo sapiens
ttaagaggtgctcacggagagtctgtgggtatgatgtggtcaccactatgactgagactgtgcagtgacctctgatagcatgatggggcagcacataagagcatggggccaagagaagacgaagatcttttttaaaaaacagtatttttgagcttccaagcaaatgctgatcagctaagtatccttacatagcataaacagttgattactggctcacaccatttccttccctccactgtgggcaaggatatttccctaccccattgctgttgagcttggtgatgtgacttcctttggccaaaggaacatgggtagaaatgtcagtctgccagtcccgaccctgagccctaagatgccttatgtatttcctctccccttyctgtatttttgccgctataatgaaaagactatataaagaggcagctgctggtcccagaataaggggacatgcggaagaaagtcaagtccagctgattcccactaagccctccaaagccctgcagagccaggctgacctacaaaaaaaatagttgttattataaactaatgagatttgggggttgtttcacagcattattacagcaaatacacatgagat

SEQ ID NO: 333642 - DNA, 569 bp, Homo sapiens
tactccaacttttggctattaagttgctatgaacattggtgtaaaaatatctgtttgagtctctagttaacacccataagtgaaattaatggatgatatgtgattctatttttaatattttgaagaactgccatactattctcatagaagatgctgcattttctgttcccaccagctagacacaaggttccaatttatccacatccttgccaatatgattttctttttgccccccaaataatagccatactaaatggtacgcggtggtatctcactgtagttctattttgcctttccctaattgttagtgatgctgaacatcttttcgtatgcttaatgaccatttgtatgtcttctttagatacatgtctatttaagttctttggccacttaaacatgacatttttagcataaaatgagtatatacaaattttgttaacaaagatgttttargctataaatatacacattttgttaaaaaagatgttttaggatataacagcaaagtcataaagcccttaaaattagctgttaagtgagtttactattattgttgctatttgtatcat

SEQ ID NO: 333643 - DNA, 540 bp, Homo sapiens
ggaaaataaaagtacttaattctgtgacattatcatatataatgttctgattttcactgtatatttaaccaaatactggagtaaccataaattatagccctccagtcacataaaatgaacttccagatagctcccaaatttgagtaacttaaatgactatttcagaataatatccaaacactaaaaatayttggcacatttgctacagaataaaaataacctcactcaagcatggggaagagaaggttctgtaggattccagcatccaaacaccactctcaagccagaaagttattctaaaaacaagaggacactgaacaagaggtgataaagacagatcaaagaagtaagtggtagagttaggaaaacaatttaaactcagaaaagactaaaaaatagagacttcaggacatctggataaggaataggcagcggtaatgtgaggtgaaagacgggggttgcggaaggccagagtggagctgggggcattatttggcctctaagagaggccttcactgctttaacatttaaaggctttcc

SEQ ID NO: 333644 - DNA, 540 bp, Homo sapiens
ggaaaataaaagtacttaattctgtgacattatcatatataatgttctgattttcactgtatatttaaccaaatactggagtaaccataaattatagccctccagtcacataaaatgaacttccagatagctcccaaatttgagtaacttaaatgactatttcagaataatatccaaacactaaaaatacttggcacatttgctacagaataaaaataacctcactcaagcatggggaagagaaggttctgtaggattccagcatccaaacaccactctcaagccagaaagttaytctaaaaacaagaggacactgaacaagaggtgataaagacagatcaaagaagtaagtggtagagttaggaaaacaatttaaactcagaaaagactaaaaaatagagacttcaggacatctggataaggaataggcagcggtaatgtgaggtgaaagacgggggttgcggaaggccagagtggagctgggggcattatttggcctctaagagaggccttcactgctttaacatttaaaggctttcc

SEQ ID NO: 333645 - DNA, 548 bp, Homo sapiens
attcttatgggtaagagtttargaaaaatgccaatttctaccataattatatgtttttatattgtttaaactttataaaaattaataaatgttagtgtctgatatttaaaaagtaaaggtatttgtataaaattgtactgaaaataaagcaatatgcaattttggcttcgaagtaattaagaataagttaatcttaagaaagctattcaatttacctttctcaggctacttgaagatccaacaacagaaaacagagaaagaccaaattcactgaattcaagtggcattgttcaaggttttgctggagactgggtcttagcctttgccttatataaaaaaaaatagtagatcttgcccatcatgtctattaagtggagaaaaaccagtttcccttttcaccccagggttcttgaaggcatactgggatgacggtatccatttaacgttgttcacactttcttcctctcctccttagattacaaaccattcaggttacagtttagcaagagctttgaattcagtgaaaaatatcattggctttctaaaca

SEQ ID NO: 333646 - DNA, 514 bp, Homo sapiens
tttctaccataattatatgtttttatattgtttaaactttataaaaattaataaatgttagtgtctgatatttaaaaagtaaaggtatttgtataaaattgtactgaaaataaagcaatatgcaattttggcttcgaagtaattaagaataagttaatcttaagaaagctattcaatttacctttctcakgctacttgaagatccaacaacagaaaacagagaaagaccaaattcactgaattcaagtggcattgttcaaggttttgctggagactgggtcttagcctttgccttatataaaaaaaaatagtagatcttgcccatcatgtctattaagtggagaaaaaccagtttcccttttcaccccagggttcttgaaggcatactgggatgacggtatccatttaacgttgttcacactttcttcctctcctccttagattacaaaccattcaggttacagtttagcaagagctttgaattcagtgaaaaatatcattggctttctaaaca

SEQ ID NO: 333647 - DNA, 514 bp, Homo sapiens
tttctaccataattatatgtttttatattgtttaaactttataaaaattaataaatgttagtgtctgatatttaaaaagtaaaggtatttgtataaaattgtactgaaaataaagcaatatgcaattttggcttcgaagtaattaagaataagttaatcttaagaaagctattcaatttacctttctcaggctacttgaagatccaacaacagaaaacagagaaagaccaaattcactgaattcaagtggcattgttcaaggttttgctggagactgggtcttakcctttgccttatataaaaaaaaatagtagatcttgcccatcatgtctattaagtggagaaaaaccagtttcccttttcaccccagggttcttgaaggcatactgggatgacggtatccatttaacgttgttcacactttcttcctctcctccttagattacaaaccattcaggttacagtttagcaagagctttgaattcagtgaaaaatatcattggctttctaaaca

SEQ ID NO: 333648 - DNA, 504 bp, Homo sapiens
ctggagaactagtaagtatggtgttctaggagccaagggaatagagagtttcaagaagaagggaaggataaatagggtcaaatgtagcagggtccagaaagagaataattagatgatgtgatgacaattatggtggtgatcatgatgaccatcatctaactacaataatgatgacaatagcaactagcacttcttgagtattcattatgtgctaaatattacaatttatttaagtaacacatgtagaacatgtactccctaccagaaacccagtgtttttaaaggtttaactcatttaattcccacaacaaccctakgaggtagatactactcttagcctcattttacagataaagaaatagaaacataggttaagtgacttgtccaaaattactcagtgagtattagggccaacattctccagaggctattttcctaactactaagctttgctgtctcatgtcctattttatttaattttctccatacgtgagccaatgagta

SEQ ID NO: 333649 - DNA, 476 bp, Homo sapiens
ctagcctatcagaaatagccattctggtcatttatctattaaggaaaaaagacctgmttcaatgcaagggctttacattattggctggcaaatcaaattctaactaaagcttccaagtcaattccatagcttaagtttaggcaaacagatgtctacctttctactgtttagttttttgaatccatccttttctggcaataaaatttaaacacatgctttttcttttctaagttgcacatcaatactcactcccttgtcaaatgtaccaatttatccaatattcacaatatgatttctttttttctacaaggaaggaaaactttgtgaatctttcacttgttttcgaacaacccacaaccctgcctgtactctctttgcgatttaaggaaaagtccctctttttctcttctttctgatggtattagttaccaccgtcatgtgcccgagaagcagaaaattatgtcctactttagaaa

SEQ ID NO: 333650 - DNA, 205 bp, Homo sapiens
acaaggttctgaagcagtcaagagaagaaagagtgaataactttgcagagaaactttaagaaggataagttgacaaacccagatactgaaatatgaacaagatgttctcagaccaacaagtcacagggaaaagggcaagtatwagggcacagaagcatcaaatactacaaagtgtatggaaaactgcatcgtgattgatacaaaa

SEQ ID NO: 333651 - DNA, 523 bp, Homo sapiens
atttaaaacctgtaattcattatttttatatacatttagggaaagattcctatactgacatcagttttttrctttctttttctttctcttcctctggttttcttccctcccatcctgtattaagccctctttgtctttgcccatatttattgaacacttctatattcaggcatggatgtttttcttttagaaaaaataagacaatgtcaccctcatcctcatccttgaggaaactcacagtccagtgtagaatgatagacaagcatatgtaaactaatttcattagcaagtaagcaattactgctgtaattgagaaataaaaaaaaaaacctataaagatcagaaatctttcttaaatagatcatattgagtagggtaagtaatgaacataatcttgcattcattcttgttcttttagagcaaacaatcagtagtttaaatgatgctttttttttttaattatactttaagttttagggtacatgtgcacaacatgcaggttagtgacatatgtatacatgtg

SEQ ID NO: 333652 - DNA, 612 bp, Homo sapiens
catgtatgacttttcttcttgttacatgaagtctatcctttatacaacatcttgtccacatgtgttatctttatcctgcatttggtgtaattttctcaaatctgtctcccagctcatgtaaaaaagcataaacataagagcacaggctctagatctggcatgctrcagatcaaatcagaactcagcacctaggagctgtgtcaccttggacaaaatgacttgtattttggtttcctcattgattattaggataatattactaaatatttcatggggttttctgagaattaaaaagagtcaatatatgtaaagtgctttaacattttctgatattgtatcaataaggtgagtttttaattttaatgaataaatttttaatttctggaagtttcatgtgttttttacctcatatttgaaagttctttttttgtggtgtctttatctttgattcctttatctttgttcattcttatattttctattagattgctctagtatctaaagatttgggagttctgtcatatttgctaagagtactgaatcttgtctagagtgaattatttctccatctgttttgtaattttgaaagttgaatttattagtggctagagt

SEQ ID NO: 333653 - DNA, 498 bp, Homo sapiens
tcagttcccaaacaaattaccaataagagatccattatgttatagatgtctacaagtaattttttcatgccatatgaaaaattttaaaaaaattaaatttaaaaaattctgagatgacttacaaaggtaaattagtacagaaagtataacagtaaagaaatggaaatatgaaagagatgaaggtagcaataaagataggaggaattttaaaagtataattagctagccatttggggccatggatttttyatcctaaaaccatggtctgatttgtctggaacctggaggaggaggctccagcgctggtgaacactgctgtgacgtatttgaagcctagattggccacatttagatattaagccaaagttgagctaactcctccaactcctactgagatcctgacagctattcagagcctgaaaaaaatagtcaacagtgcttacactgctagcttctaacagctgacagttaaggaagctgtgctgaatggttcagtgg

SEQ ID NO: 333654 - DNA, 525 bp, Homo sapiens
aaacaaaagtgacttaaaacatctacaaagtaatgacataaatgtttatgggcaaatatatttatctatttgaaaaggtcatttttaaaggcttctgagattctgttgtactgaatatctaccgtcaggaacaattatggcattttgaactaaatatacactttcttaacacactgaaatctatttatgttgaagtctcaaaaacatgaaatgcatttatgacatgaatagaaagataaatktctaaccattttacttgttttaaaaatagaaaatgtctcaaattgtatatgacttaatagggatttcaggtcctcaactcctacttcttcctcaactgggtacctttcaggatcatgtcttctgtaaagaccaagggatgaatgatatttttttatgaggtgacttccaaatcttatttcccatcctggggtatattttaggctctaaagtataaagaataataacacattagacacacatgggaacatacaaaactttccaagcaaaatattaatcttaaag

SEQ ID NO: 333655 - DNA, 586 bp, Homo sapiens
agactctccacctcaggtgacattgctttaacttccgtcttcatagttccttaaaaccatcaacatgaaagctcattgctttttacaaaatatatacaaattttatttctcaacataagctccatcaaggtcaagacacttttttaagcaatgacagcagccatttaatccatcccccagaaggtcctgggaattttccaatgggagaattctayaggcaaattatcactatgacttgaacctacctctttgaattctcatctactccaggattttagtctcataattgtttgtctccttaaaagttgtttggtactttttagtttttcctggatagaatagtttttcaaaattctctagcctgtaattactagaatcaaaaattctggctacatacactttatctcatatatcaatttttattttatcttgaagctcaatgttgtctttcccttggtgtcatatcaaatcttctttaaataaacatctattactgacactaatacctacccccaggaatttattagagatcatggttacagtccaacccctgatttcgtactccaaagatgtagcaaatagctct

SEQ ID NO: 333656 - DNA, 540 bp, Homo sapiens
caaaagtaactgtcttaaacacctgttactaaaataggaggaacttcattacttccagttgaaaatatactaataaaaaaggaacaatatattaaacagtaaagataggtactggtttatagttgttgaaagattctccccggggcctgaaagcttgaagggatgagtaactcctccctcctcaggcccagtcccaaggtgcaaggccacttgtgccagcaccatgcgtaagcaagacagcagaagcaggaagagagccrcccagaagacacctaccctggccagaaggcacctaccctggctggaagacatgtacccctgaagatcgagaaagaggccatccaggtactaggtagcagtcatgtcagactgggacacttagccctgccctgtcctcatttggacctaacgccattttaggcctcagcccgcctgcacccaggcgctcattaaaacagcacgttgcgccacactgcctcgtgttgtccattggcacgctctcggggtttgaactgatacaagaacctttcagttgtgtca

SEQ ID NO: 333657 - DNA, 540 bp, Homo sapiens
caaaagtaactgtcttaaacacctgttactaaaataggaggaacttcattacttccagttgaaaatatactaataaaaaaggaacaatatattaaacagtaaagataggtactggtttatagttgttgaaagattctccccggggcctgaaagcttgaagggatgagtaactcctccctcctcaggcccagtcccaaggtgcaaggccacttgtgccagcaccatgcgtaagcaagacagcagaagcaggaagagagccgcccagaagacacctaccctggccrgaaggcacctaccctggctggaagacatgtacccctgaagatcgagaaagaggccatccaggtactaggtagcagtcatgtcagactgggacacttagccctgccctgtcctcatttggacctaacgccattttaggcctcagcccgcctgcacccaggcgctcattaaaacagcacgttgcgccacactgcctcgtgttgtccattggcacgctctcggggtttgaactgatacaagaacctttcagttgtgtca

SEQ ID NO: 333658 - DNA, 540 bp, Homo sapiens
caaaagtaactgtcttaaacacctgttactaaaataggaggaacttcattacttccagttgaaaatatactaataaaaaaggaacaatatattaaacagtaaagataggtactggtttatagttgttgaaagattctccccggggcctgaaagcttgaagggatgagtaactcctccctcctcaggcccagtcccaaggtgcaaggccacttgtgccagcaccatgcgtaagcaagacagcagaagcaggaagagagccgcccagaagacacctaccctggccagaaggcacctaccctggctggaagacatgtacccctgaagatcgagaaagaggccatccaggtactaggtagcagtcatgtcagactgggacacttagccctgccctgtcctcatttggrcctaacgccattttaggcctcagcccgcctgcacccaggcgctcattaaaacagcacgttgcgccacactgcctcgtgttgtccattggcacgctctcggggtttgaactgatacaagaacctttcagttgtgtca

SEQ ID NO: 333659 - DNA, 556 bp, Homo sapiens
tattatattttttatagcaactcaggttgagtcacacacacagataaactgtcaaactgattgtagccttaagagggagaaattagagattcttccatccatgcaataaataaatacctaccaagtctactagttgtcagtcattctgctrggtgctgagatttaaatataaaccaaagtgccaggttccctatcttcaggagctcacagcctagttggggaaagaatattatttaaatattcccagaaatatatagttaccagttacagtatatgctttgaggaagaattataaggagattataggcaggaaaagcagtggggacaaatccattctgagtgtcctgggcagtcttccctgaggaagtaacctttcagctgagagaaacaatcagtgtgagttgatatggctaatgaaagagggaagggagagagcaggaaagatggaggaaatgccctgtacaaagtccctgtggagggggtgatgcatttgagccatcttgtccttacagattttataacttagtattgttaatcaaagtatggggaacaaaag

SEQ ID NO: 333660 - DNA, 589 bp, Homo sapiens
aaaacttaaaggggatggggtggttaaaaaaaaaccatgattttaaggtatctacattccatttgaaatggtaaaatattaattctaagtagactgtgaaaagtatatatgttgtaataccttaagcaatcccctgaaaaataaaattacattcaaaaatctaatagataaacaacacacacataaaaagttacttttatggcatgttattataatttcattgtaaatcaacgcatgtgtacacacacatacacagasgttttgtgccccaaggaaattttaggttgaggaaaatgacctgtattttgaatgtggtaggagtgacatgggttaggattcaaaaccactcatcaaagtgttcgctcaaatgggtctttttattatatgctaattatgcctcaataaagttgatgttataataaaagcaaaacagtgtgtaccttgagaaaggtagctgtggctctaaacggcttattagattcagatatgtgaaaaataatatctaaaattattctcatttctgaattatttcttgttcaaattttaggcataatttcagttatagatacattatatattacaaaatagt

SEQ ID NO: 333661 - DNA, 589 bp, Homo sapiens
aaaacttaaaggggatggggtggttaaaaaaaaaccatgattttaaggtatctacattccatttgaaatggtaaaatattaattctaagtagactgtgaaaagtatatatgttgtaataccttaagcaatcccctgaaaaataaaattacattcaaaaatctaatagataaacaacacacacataaaaagttacttttatggcatgttattataatttcattgtaaatcaacgcatgtgtacacacacatacacagaggttttgtgccscaaggaaattttaggttgaggaaaatgacctgtattttgaatgtggtaggagtgacatgggttaggattcaaaaccactcatcaaagtgttcgctcaaatgggtctttttattatatgctaattatgcctcaataaagttgatgttataataaaagcaaaacagtgtgtaccttgagaaaggtagctgtggctctaaacggcttattagattcagatatgtgaaaaataatatctaaaattattctcatttctgaattatttcttgttcaaattttaggcataatttcagttatagatacattatatattacaaaatagt

SEQ ID NO: 333662 - DNA, 589 bp, Homo sapiens
aaaacttaaaggggatggggtggttaaaaaaaaaccatgattttaaggtatctacattccatttgaaatggtaaaatattaattctaagtagactgtgaaaagtatatatgttgtaataccttaagcaatcccctgaaaaataaaattacattcaaaaatctaatagataaacaacacacacataaaaagttacttttatggcatgttattataatttcattgtaaatcaacgcatgtgtacacacacatacacagaggttttgtgccccaaggaaattttaggttgaggaaaatgacctgtattttgaatgtggtaggagtgacatgggttaggattcaaaaccactcatcaaagtgttygctcaaatgggtctttttattatatgctaattatgcctcaataaagttgatgttataataaaagcaaaacagtgtgtaccttgagaaaggtagctgtggctctaaacggcttattagattcagatatgtgaaaaataatatctaaaattattctcatttctgaattatttcttgttcaaattttaggcataatttcagttatagatacattatatattacaaaatagt

SEQ ID NO: 333663 - DNA, 589 bp, Homo sapiens
aaaacttaaaggggatggggtggttaaaaaaaaaccatgattttaaggtatctacattccatttgaaatggtaaaatattaattctaagtagactgtgaaaagtatatatgttgtaataccttaagcaatcccctgaaaaataaaattacattcaaaaatctaatagataaacaacacacacataaaaagttacttttatggcatgttattataatttcattgtaaatcaacgcatgtgtacacacacatacacagaggttttgtgccccaaggaaattttaggttgaggaaaatgacctgtattttgaatgtggtaggagtgacatgggttaggattcaaaaccactcatcaaagtgttcgctcaaatgggtctttttattatatgctaattatgcctcaataaagttgatgttataataaaagcaaaacagtgtgtaccttgagaaagrtagctgtggctctaaacggcttattagattcagatatgtgaaaaataatatctaaaattattctcatttctgaattatttcttgttcaaattttaggcataatttcagttatagatacattatatattacaaaatagt

SEQ ID NO: 333664 - DNA, 585 bp, Homo sapiens
ggtttattatggaattctaatgtagacagtcatggataacacagtgacagtttcgaagtaggctaagattgcacgtgaggtttcggtgcttagatgaagagatagtccatatcagtctgaggtatatgcacagagaacaaaaaactgtctcaaggggagaaggaagcagtcggtcagctctccattagtagtagctcagtctatatgaagaatascacaaaccatctggtgtttaggccctcatgacaaagaacacatgtgatggttaatattgagtgtcaacttgactggattgaaggatgcaaagtattgatcctgggtgtgtctgtgaggatgttgccaaaggagattaacatttgagtcagtgggctgggaaaggcagaccccttaatctaggtgagcactatctcatcagctgctagtgtggctagaatatgagcaagcagaaacatgtgaaaagagagactgccctaccctcccagcctacatctttctcccctgctggatggttcctgccctcaaacattggactcccagaactccattagctctgtccctctagagaaccctgactaatacgataca

SEQ ID NO: 333665 - DNA, 620 bp, Homo sapiens
cgggtatgtgaatgtgggtcttaactaaaaatgccttcagctttggtggtttggctctagaaaagacagtgatatggtttaaaggagatgaattcactaagaatcaagctaatacacaatagtggttgaaaaaacaacctgaaagttaatggattttgtgaataaacaagcagtggaaaataaagcattaccaaygtctctgaatttttataaaccttcaaatttgaggagcattattttgttcttacatgtggcttcttttcctaataatggcaaaatagtacacaaaattaaaggaacagtaaatgcattaataaaaatatttaaaaagaggcataactttttccattcaagacaaaaattcgtatgccttatacttataagatataattttaaataaatagtgtcaaactttacatagatacgtagatagatagatagatagatagatagatagatagatagataatcacagatattaagctatatagggtactttatacatgcctaagatcatcaaaataaccctgcagattagacagggaagattttatgagttctgttttataaaatgggaaaaacttttacagagagtcaatgactcaccaaggtcatatagt

SEQ ID NO: 333666 - DNA, 519 bp, Homo sapiens
gactcctgtacgagaagttaaattacaacacaaagattgcttggtgagcatgtgatcaaaacagggcaagatgaagacctttagaggccacaagcattttagtgtgcctcccaacttcccttatattattcaaaatataaacaataaaatctacaaagatgtgaaagaagtccaacaaaagctttattttttttatratgaatacttttaaaacttcattgaaatatcaaatatcatattcttttaaaacgatttttttttctttttgcaatttgttttgttggtatccaaaatacacagtttttctgctgggctccgaacaagaggagttaattttagtccttagagttttgactgcaacaagcctaaatgaaaccttcataaaggagactaaaactctctcctttagatcctatttgagtatatgctgctaagtttcgtaaagtggctcttctctgtgcttccatagactagttggtccctttctgactgacacattctttccttaagtgggttaat

SEQ ID NO: 333667 - DNA, 581 bp, Homo sapiens
caaacttcactcaggaagcaatagcttatgtagaccaataatctattaaaaatgaatttatagttaaaaaccttcccacaaagaaaactccaggcctatatggcttcactgacaaacttggctaaaaatttatggaacaaataataccaattttacacaaacgcttcaagaaaattgaagagtaggaaatattttaaaaytcattctatgatgccagaattttatatcaaaatgacaaaaagacattacaagaaaactgtagattcataatcctcataagcatagatgtaaacattcttaacaaaatattagcaatattttaaaaaatggagcataagcaagtggggtttaccaggaattcaaggttgatttaacatttgaaaaaaattaatgttaatgtagtcaccatattaacaaactaaagtataaccatataatcatcttgatagacacaggagaatcatttgttgatattcaacaaatagttctgattttttaaaaacaatacaaagcaaaaagcttctctgaaaactaggaacttcctcagcttgataaaggacatctacgaaaagcttcagcta

SEQ ID NO: 333668 - DNA, 581 bp, Homo sapiens
caaacttcactcaggaagcaatagcttatgtagaccaataatctattaaaaatgaatttatagttaaaaaccttcccacaaagaaaactccaggcctatatggcttcactgacaaacttggctaaaaatttatggaacaaataataccaattttacacaaacgcttcaagaaaattgaagagtaggaaatattttaaaattcattctatgatgccagaattttatatcaaaatgacaaaaagacattacaagaaaactgtagattcataatcctcataagcatagatgtaaacattcttaacaaaatrttagcaatattttaaaaaatggagcataagcaagtggggtttaccaggaattcaaggttgatttaacatttgaaaaaaattaatgttaatgtagtcaccatattaacaaactaaagtataaccatataatcatcttgatagacacaggagaatcatttgttgatattcaacaaatagttctgattttttaaaaacaatacaaagcaaaaagcttctctgaaaactaggaacttcctcagcttgataaaggacatctacgaaaagcttcagcta

SEQ ID NO: 333669 - DNA, 581 bp, Homo sapiens
caaacttcactcaggaagcaatagcttatgtagaccaataatctattaaaaatgaatttatagttaaaaaccttcccacaaagaaaactccaggcctatatggcttcactgacaaacttggctaaaaatttatggaacaaataataccaattttacacaaacgcttcaagaaaattgaagagtaggaaatattttaaaattcattctatgatgccagaattttatatcaaaatgacaaaaagacattacaagaaaactgtagattcataatcctcataagcatagatgtaaacattcttaacaaaatattagcaatattttaaaaaatggagcataagcaagtggggtttaccaggaattcaaggttgatttaacatttgaaaaaaattaatgttaatgtagtcaccatattaacaaactaaagtataaccatataatcatsttgatagacacaggagaatcatttgttgatattcaacaaatagttctgattttttaaaaacaatacaaagcaaaaagcttctctgaaaactaggaacttcctcagcttgataaaggacatctacgaaaagcttcagcta

SEQ ID NO: 333670 - DNA, 581 bp, Homo sapiens
caaacttcactcaggaagcaatagcttatgtagaccaataatctattaaaaatgaatttatagttaaaaaccttcccacaaagaaaactccaggcctatatggcttcactgacaaacttggctaaaaatttatggaacaaataataccaattttacacaaacgcttcaagaaaattgaagagtaggaaatattttaaaattcattctatgatgccagaattttatatcaaaatgacaaaaagacattacaagaaaactgtagattcataatcctcataagcatagatgtaaacattcttaacaaaatattagcaatattttaaaaaatggagcataagcaagtggggtttaccaggaattcaaggttgatttaacatttgaaaaaaattaatgttaatgtagtcaccatattaacaaactaaagtataaccatataatcatcttgatagacacagragaatcatttgttgatattcaacaaatagttctgattttttaaaaacaatacaaagcaaaaagcttctctgaaaactaggaacttcctcagcttgataaaggacatctacgaaaagcttcagcta

SEQ ID NO: 333671 - DNA, 599 bp, Homo sapiens
taagtcctgtcctttgtccagttagagttgtagtgacctgggttataaatcagagttaggaagggtttcacaatttacctgataacctattgttagggagtgtagcaaggatgtggtttttcctgtagccataggattttagagatttgcyatgctagccaagccccaaacccttggcctgtaggtaacttttgttgtcttaatggaagggtctccactgattgacaaagggaagtctattttaatctctcagatcacagtttgtagattatatttattgaatcaatgttaattttgtatactttaattgcattatggttgtctaagacgttaacattaaaagaagctggatgaagtatataatgggaactctttttactattaatgtttttttgtttttgtatatctagaattgtttccaaataagtatagaatgaaagaataaggcaaatttcattggtaaagaagctttgcagtgtataacttgagtaaatatatctaaatttttttcgatatatcatctgaatgatgtttaaaatctgtcatagattcatgtcacaagccattcctacccagtacactgcagtagcttctggaag

SEQ ID NO: 333672 - DNA, 599 bp, Homo sapiens
taagtcctgtcctttgtccagttagagttgtagtgacctgggttataaatcagagttaggaagggtttcacaatttacctgataacctattgttagggagtgtagcaaggatgtggtttttcctgtagccataggattttagagatttgctatgctagccaagccccaaacccttggcctgtaggtaacttttgttgtcttaatggaagggtctccactgattgacaaagggaagtctattttartctctcagatcacagtttgtagattatatttattgaatcaatgttaattttgtatactttaattgcattatggttgtctaagacgttaacattaaaagaagctggatgaagtatataatgggaactctttttactattaatgtttttttgtttttgtatatctagaattgtttccaaataagtatagaatgaaagaataaggcaaatttcattggtaaagaagctttgcagtgtataacttgagtaaatatatctaaatttttttcgatatatcatctgaatgatgtttaaaatctgtcatagattcatgtcacaagccattcctacccagtacactgcagtagcttctggaag

SEQ ID NO: 333673 - DNA, 546 bp, Homo sapiens
gggaaatgacttatctgataaaaacaggcatctatttttactgacattaaaaaccttgcttcaagttgatagcccctccaggatttatccagtratgtataaggtgactctagcctgtttccttgctaattacaaacaagtgactcataatttctgaatgagtttattacagacattaacggtttagttttatacggaaaaggcaacaataataatccctccccccagtcattttgtaattagccccgcaaatacatgaatgccatctctatagcaaaatcacctcaactaataaataatttattgaagacctaccatgtacaagttactatgttgtgcaagttgctatattgttaggagcagaaaggttaaaaagttgtattaacactcctcaaataatctacagtctcataggagagattgtacatattaccaagctggggtagtatgcaatatatgccgtaaatgttttctccctggaatcagggtgtgagaagagaggccctctgtgttgactagaaaggaagtcatggagaacatcatatt

SEQ ID NO: 333674 - DNA, 525 bp, Homo sapiens
gccatactgttttcaaaatgttgctatacaaatataaagatatattgtacactcaggaaattgttgctgaaacaattataactttatagatattttcaaaaaatctaagtgtgtttatgtgaaaataattgcataggcaagtcaaacacgatactaaggaaactgatgttatgttgcttcaatttcaatgcaaagtaaaagcctaatagagtaaacaggtatccataccatatcatcaaatggaataaaagagttagtataactcttttattttattcatcaaatgaataaaagagtgagtatccatgttggtttaatggacctgactgttttggatgtatcttggtgcagaagacaatacctgcaatgtcctgagaaatttaagtctctctcgttctctgtctctgtctctttctctctcaggcatgcacacacatacacacaatctrttatgtccagtttaacagaaaaaaataattctaaataacaggaataccacatgtagctgacaaagtggaaattcag

SEQ ID NO: 333675 - DNA, 576 bp, Homo sapiens
cagcttctttcatcagtatcttagctttcaatttactaacataactacagttctgtgctaacatttatttttcctgcgctctttatatcactctctcaagcatcattgtaaaatttctaccttctgttgacactcctttactagttccaactttcagttcattttgtaattatttgcatggagtagttgatttcttattgtttatattttttgttttctgtatattgtgatgttttgacatctcaaaagtttttccagctagggaaatacaacttctcccaaggacagctaagagatagtgaagaataaagccagagcatgcttttgttatacaaactaaccaatccagagccattcccttctctgcctggccctactctctaagcagcactgtttctcaccttaatcatcccagtaccaggtagcaggcaaataggcaccattgtaacatcttcagccctgctgaaattattcaamccagccaattctaaactatttactctgccctgccttgccttttctgtggaaacaataaagatttgttttgttttcataaatgaagtccagatactgtca

SEQ ID NO: 333676 - DNA, 487 bp, Homo sapiens
ctaagcagcactgtttctcaccttaatcatcccagtaccaggtagcaggcaaataggcaccattgtaacatcttcagccctgctgaaattattcaaaccagccaattctaaactatttactctgccctgccttgccttttctgtggaaacaataaagatttgttttgttttcataaatgaagtccagatactgtcaggtgttggaagtggtcctgttattcagtgatgcctttggagatataggctcttttcatcttttgaatccactctccttattatgcttgtctttggccttaagattaaaatcttggggactatacaagaactatasctccatgtaatttgactcttttcaaagcaggaagaagtcaaaacatgtttaggaatgggcatctggaaaagggcagcctcaatatgtttcacaaaataatatattagggacattgtatacatgagttattcattaagtatccaagtgagtaatgtg

SEQ ID NO: 333677 - DNA, 487 bp, Homo sapiens
ctaagcagcactgtttctcaccttaatcatcccagtaccaggtagcaggcaaataggcaccattgtaacatcttcagccctgctgaaattattcaaaccagccaattctaaactatttactctgccctgccttgccttttctgtggaaacaataaagatttgttttgttttcataaatgaagtccagatactgtcaggtgttggaagtggtcctgttattcagtgatgcctttggagatataggctcttttcatcttttgaatccactctccttattatgcttgtctttggccttaagattaaaatcttggggactatacaagaactatagctccatgtaatttgaytcttttcaaagcaggaagaagtcaaaacatgtttaggaatgggcatctggaaaagggcagcctcaatatgtttcacaaaataatatattagggacattgtatacatgagttattcattaagtatccaagtgagtaatgtg

SEQ ID NO: 333678 - DNA, 487 bp, Homo sapiens
ctaagcagcactgtttctcaccttaatcatcccagtaccaggtagcaggcaaataggcaccattgtaacatcttcagccctgctgaaattattcaaaccagccaattctaaactatttactctgccctgccttgccttttctgtggaaacaataaagatttgttttgttttcataaatgaagtccagatactgtcaggtgttggaagtggtcctgttattcagtgatgcctttggagatataggctcttttcatcttttgaatccactctccttattatgcttgtctttggccttaagattaaaatcttggggactatacaagaactatagctccatgtaatttgactcttttcaaagcaggaagaagtcaaaacatgtttaggaatgggcatctggaaaagggcagcctcaatatgtttcacaaaataatatattagggacattgtatacatgagtyattcattaagtatccaagtgagtaatgtg

SEQ ID NO: 333679 - DNA, 558 bp, Homo sapiens
aggattagagaacacctgtaggctgaagtgggaaaagagtgaagaaaatgattgaaacgagaaaagagagtaatttatccaagtcccacaagaattctgagcagttgggtcaagagtgcaggtaaggttctgagtttcagagaaaactcagtttccttttttgtgatttttgtattccttaagttttcacaaataatcacatatcacaaatataataaaaagaaaaacaaattatctctatgttcagctcatgttaaacctggattcaagtagagaygatgcatgcagggagccccatgcactgcccggcacctgttcacatagttctctttccttcttctactgagttaagagtgaatagtagataatcaatgcatgatgatttagatagtcttagaaatgggcacaaggaaatttaatgaaattcaacagctatggtttttctatatcttaaatgatgctaggcttagaatatctttaggcaaaaagcaataacaaattaatacattctctgatccctttcaagaagggattcatctatttctgtatggtagctat

SEQ ID NO: 333680 - DNA, 594 bp, Homo sapiens
ataatatttttataagcctcttttgactttagatatttgtgtggattgatgataatgtgagaagtagtgcagtaaatatccagattaatcagaaagtagtcacctagggcagcatttttcattttaagcaacaactagaacacaggtggcctttttaaatgcccatagttgattaatgaaatgcaagatttattgtgaaatgcatggagggcccaccagaggatctcccctcaacttcccagggagagcaagaaagtgctttttgtattgcactaaagtgattaatttttaagtagggactaactctcctgtctctctttatttatgcagcctaggagagtctattctcctgatgtaataatgatattaccttacatttacatagcgctttatgctttttgaagtacttgaagatgtaccatttcaccttatcctgacagccaccctcaaagactagtgaggagscttcattctctttccttcatgaatgagacaacagagggaaaagaaattgactattaccttagtttgtctttgttagaactaggattagaacctgttatatcattcctatccgtgtgtttatctactatt

SEQ ID NO: 333681 - DNA, 577 bp, Homo sapiens
gtatctcattgtggtttcaatttgcatttccctgatgattactgatgatttgttggccatttgaatatcttcttttgagatatgtctattcatatcatttgcccactttttaatggcattatttgttttttccttgctgatttgagttccttgtagaatttagatatcagtcttttgttagatgcataatttgcaaatattttctcccaatctgtaggttttctatttactttgatgtttttttattttgctgtacagaagctttttagtttaattaggtcctatttatttatttttgttattgttgcatttgcttttggggtcttggtcataaatcctttgcttaggccatgtccagaaaagttcttcctaggttttcttctagaatttttgtggtttcaggtcttagatttaagtctttaatccatcctgagttaatttttgtattggtgagaaatagggatccaatttcattcttctacatgtagctatcaaawtttcctggcactatttactgaatatggtgtcctttacctaacttacgctttgtatgatttgttgaagactatttgtttcc

SEQ ID NO: 333682 - DNA, 590 bp, Homo sapiens
aatagtctgatggaagttcccttataggtaactagatgcttttctcttgctgcttttagaattccctctttgtctttgactttagataatttgtctataatgtactatgaagcagacttttgtgcattgtatctgtttggcgatctcttcgcttyctgtaaatagatgtttaaatttctggctagacttcacattttcatctattatttcattaagcaagttttgtaatccttttgtttttacttctctttattgaacaccaataattcatatgtttggtcactttatgttttcccacatgtcacatagaatttgcctatttctttttattcctttttttcttcattttagtttgactgggttatttcaaaagacctgtctttgacttctgagattctcttctgcttgatctagtctactgttgaagctttcacttgtattttgttttttattcaatatattttttacttctagattttctgtttggttattcttttgatatctatcttttttttgtatatttctcattcctggcatgatatttttaaaatctctgtattattttttcataattctcttgtatattactg

SEQ ID NO: 333683 - DNA, 590 bp, Homo sapiens
aatagtctgatggaagttcccttataggtaactagatgcttttctcttgctgcttttagaattccctctttgtctttgactttagataatttgtctataatgtactatgaagcagacttttgtgcattgtatctgtttggcgatctcttcgctttctgtaaatagatgtttaaatttctggctagacttcacattttcatctattatttcattaagcargttttgtaatccttttgtttttacttctctttattgaacaccaataattcatatgtttggtcactttatgttttcccacatgtcacatagaatttgcctatttctttttattcctttttttcttcattttagtttgactgggttatttcaaaagacctgtctttgacttctgagattctcttctgcttgatctagtctactgttgaagctttcacttgtattttgttttttattcaatatattttttacttctagattttctgtttggttattcttttgatatctatcttttttttgtatatttctcattcctggcatgatatttttaaaatctctgtattattttttcataattctcttgtatattactg

SEQ ID NO: 333684 - DNA, 590 bp, Homo sapiens
aatagtctgatggaagttcccttataggtaactagatgcttttctcttgctgcttttagaattccctctttgtctttgactttagataatttgtctataatgtactatgaagcagacttttgtgcattgtatctgtttggcgatctcttcgctttctgtaaatagatgtttaaatttctggctagacttcacattttcatctattatttcattaagcaagttttgtaatccttttgtttttacttctctttattgaacaccaataattcatatgtttggtcactttatgttttcccacatgtcacatagaatttgcctatttctttttattcctttttttcttcattttagtttgactgggttatttcaaaagacctgtctttgacttctgagattctcttctgcttgatctagtctactgttgaagctttcacttgtattttgttttttattcaatatattttttacttctagattttctgtttggttattcttttgatatctatcttttttttgtatatttctcattcctggcatgatatttttwaaatctctgtattattttttcataattctcttgtatattactg

SEQ ID NO: 333685 - DNA, 559 bp, Homo sapiens
ggttctcaagtccctgggcagcaggcgtggcatcagtgatggcaatagcagtgatggaacaatgctttgggatacaagtagtttgcactggtgttggtggtggctgtgatgtggatgagtcagtcccgagacccacaggtggcacttacagtgggttccagctgtgggagtagtgacaggttgactgtgtctgacctctgacctcagaaggagtgttcaggtgccaccatggtggactgggctgggcaatcctcagacccttggatactgtgctttggtactaaggggtgtggagccaagctgggtggtccccttaggcctgcaaggggtgcatgctaaggctggctatgataggcaaggatgagtggtttccaggccactgacataaygctcaggtgagagcagcagcaccagtgtggtcctgctactggaaaaagtggggtggctttccctgggaaaagccataggcagacagctgagagggtgtggcctttgcttgcaccttagcccacagcagtcaacagtggcagccttgtgggcagtgaaatttgttcttagg

SEQ ID NO: 333686 - DNA, 591 bp, Homo sapiens
ctcccctgtgattatcgctactaatcaacctcatagaaacgaacaaacaaaaaacctataatcaagggaggaactgatcacatctaatttccctagatacacagtttagcagagcagaaataccmaggcattattaccaggtagaaattatacctggcctgattttgcagagataattattttctttctagaggcaatcttcagttttgttaatctttaaaatgggtcacttctggaagcaatgaagacaaatagaaactttagtgtgaagtatatgaccatgaatcagaacattccggctcttttattaactcctactgagtgaattcctttttggaatgagggaggaatatacaatctcacaggcttacctcaagcaagtctcttattcttcctcagcctgtttcctataaagtaagaaaatcgaattaaatagtctctacatttattctggttctaaccttgttttgaattctgttatagagatggtcagtctggtgcagccagaagataagccagaggagaggttcaggaaaacaaaatttataatacaggtcctagagataggaggcagatcatgccatccacagt

SEQ ID NO: 333687 - DNA, 591 bp, Homo sapiens
ctcccctgtgattatcgctactaatcaacctcatagaaacgaacaaacaaaaaacctataatcaagggaggaactgatcacatctaatttccctagatacacagtttagcagagcagaaatacccaggcattattaccaggtagaaattatacctggcctgattttgcagagataattattttctttctagaggcaatcttcagttttgttaatctttaaaatgggtcacttctggaagcaatgaagacaaatagaaactttagtgtgaagtatatgaccatgaatcagaacattccggctcttttattaactcctactgagtgaattcctttttggaatgagggaggaatatacaatctcacaggcttacctcaagcaagtctcttattcttcctcagcctgtttcctataaagtaagaaaatcgaattaaatagtctctacatttattctggttctaaccttgttttgaattytgttatagagatggtcagtctggtgcagccagaagataagccagaggagaggttcaggaaaacaaaatttataatacaggtcctagagataggaggcagatcatgccatccacagt

SEQ ID NO: 333688 - DNA, 589 bp, Homo sapiens
ctctcaacaacacattccactttccttactaaatttactcattatattttatagtattttgttggtgttgttttctcctctgtctttattctcctgaaaaaaattcatttggaatgaatgaatctcatggagaaattgaaatccttgyaatgaacatagactagaaattgtttttattgcatgtggtgcaagatagtctatcttagatatatgacatgtgctgagtgacaaacagtgtgccaggagctttatatatatttaatttttgcaaccctactaggtaaacgttattaccacacccatttcatagattaggacactgaagcatagaccaatcaaattactctttcacacagctagaaaataaaagagcatgcattatgacctacaaagtctggtgtcagagactgcttttaaccaagatgatatataatttatcatccaaactgagataatctgggatgttaaaggaggccctattcataattatgatggactacaggtggaagttgagatcattccaggcaaatcaggatatatggttactttactcttaatcttcattctgtgctgccccaagtttattgcc

SEQ ID NO: 333689 - DNA, 589 bp, Homo sapiens
ctctcaacaacacattccactttccttactaaatttactcattatattttatagtattttgttggtgttgttttctcctctgtctttattctcctgaaaaaaattcatttggaatgaatgaatctcatggagaaattgaaatccttgcaatgaacatagactagaaattgtttttattgcatgtggtgcaagatagtctatcttagatatatgacatgtgctgagtgacaaacagtgtgccaggagctttatatatatttaatttttgcaaccctactaggtaaacgttattaccacacccatttcatagattaggacactgaagcatagaccaatcaaattactctttcacacagctagaaaataaaagagcatgcattatgacctacaaagtctggtgtcagagactgcttttaaccaagatgatatataatttatcatccaaactgagataatctgggatgttaaaggaggccctattcataattatgrtggactacaggtggaagttgagatcattccaggcaaatcaggatatatggttactttactcttaatcttcattctgtgctgccccaagtttattgcc

SEQ ID NO: 333690 - DNA, 589 bp, Homo sapiens
ctctcaacaacacattccactttccttactaaatttactcattatattttatagtattttgttggtgttgttttctcctctgtctttattctcctgaaaaaaattcatttggaatgaatgaatctcatggagaaattgaaatccttgcaatgaacatagactagaaattgtttttattgcatgtggtgcaagatagtctatcttagatatatgacatgtgctgagtgacaaacagtgtgccaggagctttatatatatttaatttttgcaaccctactaggtaaacgttattaccacacccatttcatagattaggacactgaagcatagaccaatcaaattactctttcacacagctagaaaataaaagagcatgcattatgacctacaaagtctggtgtcagagactgcttttaaccaagatgatatataatttatcatccaaactgagataatctgggatgttaaaggaggccctattcataattatgatggactayaggtggaagttgagatcattccaggcaaatcaggatatatggttactttactcttaatcttcattctgtgctgccccaagtttattgcc

SEQ ID NO: 333691 - DNA, 481 bp, Homo sapiens
tgcatcagtgtgacctgaatgtgagacatcaagtcaatggagatcattttgtaactttaaggcttaatgattggcctatcgatttttggacttggatgtggtctgcagctcctctgtttttacttccatttacaggcattgggtaaatacacacatttggagacggtatactaattcaatgcttatacccccattgtatctaggaagtagctaacttgctttcaattttacaggctcatagacagaaggaactkgccctgtctcagatgagactttggacttggacttttgggttaatgctggaatgagttaagactttaggggattgttgagaaggcatgattgtgttttgaaatgtgaggacatgagatttaggaggggccaggggagaatgacatggtttggctgtgtccccacccaaatctcatcttgaatcatagtttccataatccccatgtatcatggagggacccagtgggat

SEQ ID NO: 333692 - DNA, 550 bp, Homo sapiens
acttcaaggcattcaacacaatcaataattaatgtgtataatatgcattttcacattccattatctttgtttctcattaggatattgcctccccgagatcaaagatctcatccttttatttaccactgtgtctgcagtgcctagaataaagcttggcacatagtataaacaaactcaatatttgttggtttaatggagcttccctaaattctgcaatgtttctggtactgaattcaatttaccccaggatgtatgcaggttgcagaattttagaattagaaggcctttgcaaatcagccttatttcastagagatgagactgagactcgatgtagacaagagctttgattaaagctgtctacataacaactacatagttatctctgagcctgcagtgctactccaaccatattaccaaagaaaataagcccccatggacttttactcagtttaatagtctggtcagtgtattattattattattattattttattaatcttacattacttatttacaaagactaagcatgttttcaacatttatcaccta

SEQ ID NO: 333693 - DNA, 419 bp, Homo sapiens
tttgtttctcattaggatattgcctccccgagatcaaagatctcatccttttatttaccactgtgtctgcagtgcctagaataaagcttggcacatagtataaacaaactcaatatttgttggtttaatggagcttccctaaattctgcaatgtttctggtactgaattcaatttaccccaggatgtatgcaggttgcagaattttagaattagaaggcctttgcaaatcagccttatttcactagagatgagactgagactcgatgtagacaagagctttgattaaagctgtctacataacaactacatagttatcyctgagcctgcagtgctactccaaccatattaccaaagaaaataagcccccatggacttttactcagtttaatagtctggtcagtgtattattattattatt

SEQ ID NO: 333694 - DNA, 572 bp, Homo sapiens
gtcattgtcaaaaaatagctgatagccttttacatatacacatattaaatgcacaaagtggcaaataattttactttttgttgttttgattttaatttgtggaacatgttacattaatgatagatacaaaatgtaaaaaagggaactattcatggcttccaatctgtttctagaactttagaaaggaaacaagtcagggtagactattatattattgagaccgctcagaaaaccaagcaccaaataattaaaccaarccctgttgataactgctgcataagtacagattttatagattaagatattcatgtctgtggcaacatctttattcaggtcatagagaaaatcctgcactgccaccttgcactgccatcctcaacctgaaagactaatggcaagattctagtccttctcttgatcatcacagtaacactttgacgtctgtctccaattaatcataaggtattctgttttgactcatctatccataacacagcacattgcctgagataaacatttggccacagtgttatcacaaggagggtgtactagattcatgtacacataaacct

SEQ ID NO: 333695 - DNA, 451 bp, Homo sapiens
tgcttgatggtggagagttcatgtatttctcacagcatctttcagtattaactgaataactttatttataaatgtttatcaattaatagatttattagttggtttatgccactaaactattgtcttactcctcttccaactaagactagattctctttgtggttgtgtcttctccattacagcgttttacaaaaaatcaatatgtgtaatatgggtttctcctccctcaattacaatcctgcactcttatagtagacacaatcctataaatataattggctagagtcaatgttttatttttaatmtaagataatttttaaataaataataaactttgtatataatgatactttaaaatatattaaaagtatcttaatataatatccatattatcatgtgaaaaagaacatgaatactttaccgatattaaacttcaatgttggtatgttct

SEQ ID NO: 333696 - DNA, 483 bp, Homo sapiens
ctggtctgccaaatgctaaagcctattcaatggcataccattatcaagtggctgtgttacatacacaatcaggctgaattaagmcctaaagaagtcgcccgcaagtgttgtgaatgggtggttaagacttccagtgcacctacgcttgctgcattgccacttatttctctactcttcatgagatgctcccctagaaccagtgaacaaggaagagcatatttcaacctggtttagagacgactcctcatgatattctggccccagctacaaatggagggctacaatgcatctcattgtcctctttgtcaaaggtttgtcagggacttggaaattctgaaattgaagacttgagaaaaggagaatattggaaagaatcttgtggatgagcctcgtagaatgagaacagagtgtaagaacgtctacatccattctaaatgttcatcaaagcatacctgctttagaagacactctcagtaatcagat

SEQ ID NO: 333697 - DNA, 483 bp, Homo sapiens
ctggtctgccaaatgctaaagcctattcaatggcataccattatcaagtggctgtgttacatacacaatcaggctgaattaagccctaaagaagtcgcccgcaagtgttgtgaatgggtggttaagacttccagtgcacctacgcttgctgcattgccacttatttctctactcttcatgagatgctccccyagaaccagtgaacaaggaagagcatatttcaacctggtttagagacgactcctcatgatattctggccccagctacaaatggagggctacaatgcatctcattgtcctctttgtcaaaggtttgtcagggacttggaaattctgaaattgaagacttgagaaaaggagaatattggaaagaatcttgtggatgagcctcgtagaatgagaacagagtgtaagaacgtctacatccattctaaatgttcatcaaagcatacctgctttagaagacactctcagtaatcagat

SEQ ID NO: 333698 - DNA, 483 bp, Homo sapiens
ctggtctgccaaatgctaaagcctattcaatggcataccattatcaagtggctgtgttacatacacaatcaggctgaattaagccctaaagaagtcgcccgcaagtgttgtgaatgggtggttaagacttccagtgcacctacgcttgctgcattgccacttatttctctactcttcatgagatgctcccctagaaccagtgaacaaggaagagcatatttcaacctggtttagagacgactcctcatgatattctggccccagctacaartggagggctacaatgcatctcattgtcctctttgtcaaaggtttgtcagggacttggaaattctgaaattgaagacttgagaaaaggagaatattggaaagaatcttgtggatgagcctcgtagaatgagaacagagtgtaagaacgtctacatccattctaaatgttcatcaaagcatacctgctttagaagacactctcagtaatcagat

SEQ ID NO: 333699 - DNA, 483 bp, Homo sapiens
ctggtctgccaaatgctaaagcctattcaatggcataccattatcaagtggctgtgttacatacacaatcaggctgaattaagccctaaagaagtcgcccgcaagtgttgtgaatgggtggttaagacttccagtgcacctacgcttgctgcattgccacttatttctctactcttcatgagatgctcccctagaaccagtgaacaaggaagagcatatttcaacctggtttagagacgactcctcatgatattctggccccagctacaaatggagggctacaatgcatctcattgtcctctttgtcaaaggtttgtcagggacttggaaattctgaaattgaagacttgagaaaaggagaatattggaaagaatcttgtggatgagcctcgtagaatgagaacrgagtgtaagaacgtctacatccattctaaatgttcatcaaagcatacctgctttagaagacactctcagtaatcagat

SEQ ID NO: 333700 - DNA, 524 bp, Homo sapiens
cccacctccaacatgttctctcttattcttttttaatactccaaccattataaagtttacaattacatgcttacccagagtagagtgttataaatattggatcaatggccattttaatctttcctctctggctctttgaaataatcttaaaactactttgaaaacagtattttaagattgttttacatagaaattctatcatccctcaagaagcagtatggctccaatattcagatttcactgtgaggctcttacctatctaattcatatctattttcagattttgttaaaagaaattttacagaggctactcactcatatttggaagaaaaacataatctaagaaacaaaagaaatgtgtgtggaggggagaaataggtatataacaacttaaagggtttgaattgctaatttttagtactattttatgtaatactttttgcaagrtttaaatagatgcattgcaaccatttataaacttctatatgagcagcatacaaggacattcctagaatacagaaagc

SEQ ID NO: 333701 - DNA, 540 bp, Homo sapiens
cttgtgtccttgctcaaaggctcataaacaaaggggtcagaatggtggaaacagaggttatacaaggactctataaattggactttcctacaayatggctgatctaactgctgctgttactgctgggtacccagtcttccaaagcagagatcagtcttgaatctgatgttgcatcacaattcaaatgaatctgatcatagtttgttactttttgactccaactactaaggcttgtccttcctggagtagctacttattaaggatatgaatatgttttccctgtttactatgacttctgctagcaaagttcctgcagtgttaaggtatttcagttaacactgcctctgaccagggaatttaataataaaagaagtaagacaatgggtatataccctgggcatgtacagatcttagcacattttctatcattcaaaagcagtggtccttataaacaagtggaaagagcctatagaaaacccagtcatggtgccagctagagaataacatcttgcatgattgaattcagtctctctggaagta

SEQ ID NO: 333702 - DNA, 615 bp, Homo sapiens
attcttcctctagcacagaaggacacagggacctcctgaagtgctgccagagtaaacaagggaagatgaaaattgttctgtgatccataaaaagtaaagtagagagaaaactggagtttcctgtgcttttgttttcttcctttcacttaagtcgctgtgacttaccaggaaaccatttagtgctctcaggctaaatggaatattcaagcccctaacaccctgataaataaagttcactgtttcagataagtaaatgcattctttcaggggccattttatgtcttgcctagcaagtttactgctttgagacttgtcytaggaataggagtagggaggtggagtggattgactaagattttagcccctggcttttaacaaaatccacaatccacaagtagttctctccttgaggactcactaacctaaatttcttggctttcatgagtttgaagccacatattaatagtattgtgatgattttcttcatgggttttaatgtaccattagtttcatattagatgcctttaactaaatgtatctgcccataattgttttaaaggataaccaattgttttgacaactatagggcaaggctttcaatagctagtgcagcat

SEQ ID NO: 333703 - DNA, 660 bp, Homo sapiens
attagcaaggtgtagtggtacatacctgtagtcgaagctactcagaggctgaggtgggaagattgcttgagcccaggagttcaaggctgcagtgagctgtgatcatcacactgcactccagtctgggtgacagmgtgagaccctgcctctaaaagaaaaaaaaccctataaaataaaataaaataaaataaaaataaataaaataaaataagaagtgaaataactttgtcctcaaacaaaaaccaatgtttgcctcagttatttattaggtatcagcctcagtaatgaattgctgagtcgacattttctttcatatgttgctggaataattttgttacttacaaaacactaactttgttactttataagacattagtgatgtctaccaaaaattatgactatgagaattaagacaaggtttagtttagcagggccagagaagatttgactggaagtagatcttgaagtcctcttgaggcctgacaaatctctatttctagaacaaggcagtattacacagatgcattactcatcatttattaagtggcaatatatctataatacgctctctcaaatgagttatatttcataagttttaaaaaaggttttaaagcgaaaccctttacacttcatgacagtatttctagagattgtattttt

SEQ ID NO: 333704 - DNA, 660 bp, Homo sapiens
attagcaaggtgtagtggtacatacctgtagtcgaagctactcagaggctgaggtgggaagattgcttgagcccaggagttcaaggctgcagtgagctgtgatcatcacactgcactccagtctgggtgacagagtgagaccctgcctctaaaaraaaaaaaaccctataaaataaaataaaataaaataaaaataaataaaataaaataagaagtgaaataactttgtcctcaaacaaaaaccaatgtttgcctcagttatttattaggtatcagcctcagtaatgaattgctgagtcgacattttctttcatatgttgctggaataattttgttacttacaaaacactaactttgttactttataagacattagtgatgtctaccaaaaattatgactatgagaattaagacaaggtttagtttagcagggccagagaagatttgactggaagtagatcttgaagtcctcttgaggcctgacaaatctctatttctagaacaaggcagtattacacagatgcattactcatcatttattaagtggcaatatatctataatacgctctctcaaatgagttatatttcataagttttaaaaaaggttttaaagcgaaaccctttacacttcatgacagtatttctagagattgtattttt

SEQ ID NO: 333705 - DNA, 472 bp, Homo sapiens
tttgagtgctgccacttggctcctgccaccttgggatctaattattcccattgtatttaaattttatagttgagtgactgcagttcttactcttagatctgacatacagagaagagctgttacagggctcttcaaagacacaggtgctgccctcacgaatctattttgcaaggcattggtcaagagtatattttctggacccttccagctgggatgagtaggtctaaagtgactaatccactccaccattccaaactccctaagccttttgatcaatttctcgaccttaaaccaagggagatcaggcatttacagctcactcacagtaagccatcctttaatccatatttcmgctaaccaaacaaataaactcttataatcttttttaattcgatgagctggaacgttaaatgcagagtccctacttagtgggcccaaatcaatgaattcagcctgatccaattctatattt

SEQ ID NO: 333706 - DNA, 437 bp, Homo sapiens
gtggctttagtactgagtagaaagtgaraaagtaaattttaattaattttttatgaaatatgggagtgatgaagaggagcaaaacaagacagtctgaggaagtcagttgaaatgagggaatatttatttttattataatattttaatagaataaacttgagcaagcttaaagagaaaactattaggagagagagggtgcagttttacaggaaagggcaaaaattactgagttatggtccttaaatctgggaagagatgggattcaaagtgtagaggagatacattgtagaggaggtaaaggacaattcttacctttcaagaagaaacagtaagtagattgcacatggagtaagagtgatttgaaatacttttgtagaaaataaataaatttttcttatcatgtctttttaattaatttaaagaaacaatacatatca

SEQ ID NO: 333707 - DNA, 375 bp, Homo sapiens
tttataattttgcttttaaagttatttaaactttaaaattgttttattctattgctaataagaccatcaatggtatttgatagaaactattaattmtgtagatcactttggagagtatgggcattttaataatttattgcttttaaagttaatatagtctatgggtttggacaaatgtataacagtttagactataatgtatccactattgtagtaacttgcaaaatagttttcctgccctaaacacctttgtgctttgtctattcatctctctctctctgtgaagccccggaaattactgatcttttcactgtatctatagttttgcctttccagagacaaacaatatcatatagctggaattgtacagtatat

SEQ ID NO: 333708 - DNA, 584 bp, Homo sapiens
tatatgtagaattaaagattctttagctaccagttctttctgatccctttctaaagcaacacatttttggggaaagagtaacagcaggtaaagtggttaagaatatagagacatacataaatagagacatgcaatttagagacactttttatgactttattactatcattttccctgttttgtatttaaatatgtaaatatgtgtgattgcaactcaaatatattttattgggtaaaatgatgtttaattatatgttgctggtcagcctgagagtagatttaatacatacctaggatttaattagagcatatttaactcaaacattttctcacactttttttcttttcgcttgaaataatttttgttctctgttaaattaaaamgtatataaccataaagctgaaaagagggaaaatcattgttgtgctgtataggatggatgtttaacagtccatatttattttaaagtttaatcaagcataaagagtagaggctcttgaagtgctagattatttgaagtatttaatcataaaaatatattttaaaataataaagttaacaatgaggaattcaaaaatcatct

SEQ ID NO: 333709 - DNA, 584 bp, Homo sapiens
tatatgtagaattaaagattctttagctaccagttctttctgatccctttctaaagcaacacatttttggggaaagagtaacagcaggtaaagtggttaagaatatagagacatacataaatagagacatgcaatttagagacactttttatgactttattactatcattttccctgttttgtatttaaatatgtaaatatgtgtgattgcaactcaaatatattttattgggtaaaatgatgtttaattatatgttgctggtcagcctgagagtagatttaatacatacctaggatttaattagagcatatttaactcaaacattttctcacactttttttcttttcgcttgaaataatttttgttctctgttaaattaaaacgtatataaccataaagytgaaaagagggaaaatcattgttgtgctgtataggatggatgtttaacagtccatatttattttaaagtttaatcaagcataaagagtagaggctcttgaagtgctagattatttgaagtatttaatcataaaaatatattttaaaataataaagttaacaatgaggaattcaaaaatcatct

SEQ ID NO: 333710 - DNA, 507 bp, Homo sapiens
aaagcagacatatagacaaaagccacacaatatcagacccagaaacatcccacacatatacagttaactaatctttaataagggttccaagaatacgcattgttgtaaggatagtgccttcattaatttgtgagaagaaactggttattcacttgaaaaataatgaaactggacccttatcttacaccatacacataaattagatcgarttaaatgtgaccaggcacagtggctcgtgcgtgtaatcccagcaatttgggaggccatgatcagaggatcacttgagcccagcaattcaagatcagcctaggcaagatcgtgagaccttgtctttacaaaaaattttaaaaagtagtctggcgtggtggcccatgcctgtcgtcccagctattcaggaggttgaggtaggaggattgcttgagactgggaggttgaggctgcagtgagcctagattgcatcgctgtactctagctgcaatgtggactctgtctcaaaacaaaaacaaa

SEQ ID NO: 333711 - DNA, 561 bp, Homo sapiens
ggcatgcccatccatgctcttgaaggcaggcctgcagatactggtcttagctctgggccctcaagcagccctgtgattctgttccagtctctctcagcagtggtttggagccaatcctaccccaggggcatgcccaatgacctggtgggagtactcttggggactcattggaagcrattactagatgcatatctggcaacaggtccaccatctatgaaccttgaaagaaactctcatcccagtgccagagaactgattaaggtcctggaggcagtgtagttggtccagggacaatgcaagatccactcccactggggcccttgtaacaggcctaccaaccacagagcccactattgggccaagcagcagccacgtgattcagccccaaccttactcaactgcaaacccagaggcaatctcatcagctatggatccaacaggagaagagctttacttgctgaaaatagtctgtaaaaactggaagaggtgtttgttccttcaaatgcacagacaccaatgcaagactacatagattataaagaatcaagaaaacatgacagc

SEQ ID NO: 333712 - DNA, 422 bp, Homo sapiens
ttttaacttgtttttttgaataagtttttcaaaatagtgttcctagtgtcaccccttctctaaaatatcatcacttatcaaaatagtacacataaggaagttataattcagccaaaaatatcatttgaagtcatcttaaaattcagtgcaatgtaataaatgcctattcaaataagagtaggtgctaaataaacattcaatgtgcacgattcttaaaaaaagtcatcttctggcaaaattggcatatttgyagttcatattgtatgctgaaaagcagtttatacatccatacataaaatttattgcttagcttaaaagttacctctttaggagagattctcaatcaatgtccaatttttctgtaatatattctcttagcactttattttttctttatcagcatttgtcacaaattttaatta

SEQ ID NO: 333713 - DNA, 408 bp, Homo sapiens
ctgccggcaccttgagcatggacctcgcagtatccagaaytgtaagaaacaaatttctgttatttgtaagctgcccagtttatggtattttgttatatagcagtctgaatggatgaagacacacaccaccaaagaacaaattctcttatgttccatatttcatgccctaattatgaatataaatgaacactttagtttttaataggtttgaagctcaattatacaatttcacatatacatggaatattacatttattgactatttgattaccaaatctctttgggtcccagtttattcataaagtaacactcacaacagtagggcatgcctctatcaaaatatattagaattatgtcataggagatttaatatttaaatctccacccttctcttcaccccagagtggt

SEQ ID NO: 333714 - DNA, 601 bp, Homo sapiens
acgtggcatatcacagcagttattattataaacattattcattaatttagtgaattaattttcaattgaatacaaataaatattttaaattaggaacattattgctagatttatatgctctactaaaatagttgtagtaactgtccagattacaggaagaatactgaggccttctctagaacataaatttgtgcattcattatgacaattgggcccttcttactcatggtactaattaaaacactattacgtgtacttggcattgagctcttatcaagaactaattttctttttgaaaattagtagaaacagaagaaaacagtagaaaacagaagaaaatatcagtcttaaraactgattaaatcttaatgcacaattatcaaattatttgaataaaacaaacaactataaggaatgaaaagaaagtacacttggaagagggctaagcgggcaacttgaaagacaagtacatgatttgaccttttgacttggagttttatatgttggcatgattccagggtcttgtgttctttctcccctgattcttccctttgggtgggctgccgacatgtgtagtggcctgctggcacttggaagagga

SEQ ID NO: 333715 - DNA, 601 bp, Homo sapiens
acgtggcatatcacagcagttattattataaacattattcattaatttagtgaattaattttcaattgaatacaaataaatattttaaattaggaacattattgctagatttatatgctctactaaaatagttgtagtaactgtccagattacaggaagaatactgaggccttctctagaacataaatttgtgcattcattatgacaattgggcccttcttactcatggtactaattaaaacactattacgtgtacttggcattgagctcttatcaagaactaattttctttttgaaaattagtagaaacagaagaaaacagtagaaaacagaagaaaatatcagtcttaagaactgattaaatcttaatgcacaattatcaaattatttgaataaaacaaacaactataaggaatgaaaagaaagtacacttggaagagggctaagcgggcaacttgaaagacaagtacatgatttgaccttttgacttggagttttatatgttggcatgattccagggtcttgtgttctttctcccctgattcttccctttgggtgggctgccgacatgkgtagtggcctgctggcacttggaagagga

SEQ ID NO: 333716 - DNA, 643 bp, Homo sapiens
atatatttagtaataaaaagtcttcaatctctatggtcactatctgcataggcaaccattatacagtttcttaagcattcatacacaaataacatattaatacttatgcctttatgttattatttttcaaaaatagaagtacactctagagctctttcacttaatattctcagtaattggtcattaacatattgatcaatatattatayatatatatctcagtgattgatcaataatagatatcattcaccttatttcttctaatgccatttttaggttccctagaagtggagcccaaggtaaggattcttttgcaagtgattttctagtagagtgctctcaggagaaatctgggagaaagtaaaggaatctgaataagggctgggaagaggcaaacacagatacttttagctgaagtctagcctcagctttatccctggagacttcttgagtatgagtggcacaacagagttgcttcatctccaaggaagggggccagattttgcactgtagtgtcagtatgtaattggcaacaagtatccttgcaactcccagaaggaaacataatctcccaagtgaggtgattacagttactgaagccaattccctagaaacattgtaagctgttgtaaattataagtgg

SEQ ID NO: 333717 - DNA, 601 bp, Homo sapiens
caagggagttaatccagtctttgcctatgtatgaccgtgggtaagttaatcttactatacttcagcttcatcatttataaaatgagaaattaatagtactaatcacagagattgataaaagaattaattgacgtgagatatttagcacgctgcctggagtttagaaagcatccaataaatgttatcttttccatgagttaggattttttttattataatagaaaacccaattcaaacttgcctacagagtaaaaagaaatgacttttgtcacagctgaaaagtctagcagtagaatgaactttaggtattgtttgatcagggtaccatgctttcagwcctggtcttgctgatgtgttggctttatcttcagctggtttcttccctcacaatagcagataatcacagcagtttcaggccttatatccacacatccagaaagaaagaatttctcatatcctccaactatcaaaaaaaaaaaaaaaaaagtcccagtttacatgctggaactccaatttagggtctgtacccactcctgatgccatgcactgattggcacagagtatgggatgacaatttatgcattctcaatgagagtgaaat

SEQ ID NO: 333718 - DNA, 555 bp, Homo sapiens
gagggaaaagttgaactagaattcaggctcaacaaaaactgcagctgacctcccaggtagctctgaagctgagagttgtcccaggttgttacgagaggggtaggtcttctccccaccttcattaacccattattggagatgggctacccttgaaaagggggatgggatgaccttggaggaggcagctctctttaagggactgcgatttccagacgggtttgagatctgtctgctcacaacactcccaacagctggggaaataagtttgggcaacacatcaagcaccttctacgggtgcctccccaacaggtgctaggaccaaagcctgcactgaagcaagggcagcaggargaaagtgaagagtgagattgccttgatgtgaggatgtagaatctagctttaaaacacagccagccttcagagaggtctcctgactgcttgctacacttttttcaagggattggaccacaacagactcagctacttaccattatagtagtgattaacacatacagaaaggagagaaaatttgggtgataaatgaaatgagtccat

SEQ ID NO: 333719 - DNA, 557 bp, Homo sapiens
ctgctcactcaccactggcataccattagcacccagtctcccttctggaggtgcccaccaggcagatggcaaaatggcaggtcccagcgcatgcttcctgccgtggccaccaaggggccagcttgtcctctgtctgtcccctggttcagcttggctaaacttgcatgttcctgtcttctgagtttgagctaaaaggacaggatgtttggaagtcagaatcatcaaggcagtaactgaggtgagtgggacaggcaagatagtcgcgtgacataamttgttactttgctccctgtgggttctcttgttttgtgttcattttctaagcctgatttaaacatccattctttgcttctttcatcctgagaggcctgatttggttcagggatcaatatcacccccttgcccatataacttgggtaaatactgattgattggtctctaacccagtgcttccctactttctctgatgtcatagaatacacagaaaatgatagtgtttgtgtggcacctggagtaaatggaagaagctgctcaggctggaggtgatcaccaaattg

SEQ ID NO: 333720 - DNA, 557 bp, Homo sapiens
ctgctcactcaccactggcataccattagcacccagtctcccttctggaggtgcccaccaggcagatggcaaaatggcaggtcccagcgcatgcttcctgccgtggccaccaaggggccagcttgtcctctgtctgtcccctggttcagcttggctaaacttgcatgttcctgtcttctgagtttgagctaaaaggacaggatgtttggaagtcagaatcatcaaggcagtaactgaggtgagtgggacaggcaagatagtcgcgtgacataacttgtyactttgctccctgtgggttctcttgttttgtgttcattttctaagcctgatttaaacatccattctttgcttctttcatcctgagaggcctgatttggttcagggatcaatatcacccccttgcccatataacttgggtaaatactgattgattggtctctaacccagtgcttccctactttctctgatgtcatagaatacacagaaaatgatagtgtttgtgtggcacctggagtaaatggaagaagctgctcaggctggaggtgatcaccaaattg

SEQ ID NO: 333721 - DNA, 557 bp, Homo sapiens
ctgctcactcaccactggcataccattagcacccagtctcccttctggaggtgcccaccaggcagatggcaaaatggcaggtcccagcgcatgcttcctgccgtggccaccaaggggccagcttgtcctctgtctgtcccctggttcagcttggctaaacttgcatgttcctgtcttctgagtttgagctaaaaggacaggatgtttggaagtcagaatcatcaaggcagtaactgaggtgagtgggacaggcaagatagtcgcgtgacataacttgttactttgctccctgtgggttctcttgttttgtgttcattttctaagcctgatttaaacatccattctttgcttctttcatcctgagaggcctgatttggttcagggatcaatatcacccccttgcccatataacttgggtaaatactgattgattggtctctaacccagtgcttccctactttctctgatgtcatagaatacayagaaaatgatagtgtttgtgtggcacctggagtaaatggaagaagctgctcaggctggaggtgatcaccaaattg

SEQ ID NO: 333722 - DNA, 603 bp, Homo sapiens
aatacatgcaacaccatgaatgaatatcaaaaacattttgctcagtaaaagaagccaggtattaaaaaatacatactccataattcaatttgtatgaagytctacaacaggaaaaactaatctattgtgatagaaatctgaatagtggttgttatgggaggtagggaaagattggcagaggtagctttctggaaaagttttatatcttgggggggatgtggataacatggctgtaatacctaaaatatgtatttttattatgcatcatttatagtgtaattttctaaatgaaacaaaaagcagtaacagacactgcccaggttttgagtagtaaatgcacaagatgagcatctttttatcccaggtagcaaggaagctgacaaatactactggtagcaaggaagctgacaaatactactaaaaccatgtcacaaggacttggaaactggcttgaagaggctctcactcaccaaaatggcccaatctgaatatcagtaaagaaaattttaaaaaaagaaaataactttaatggattgaaacacataaattatatttaaatgcatatgttcataatgacaaaatgcactttgaccacccttgaaa

SEQ ID NO: 333723 - DNA, 603 bp, Homo sapiens
aatacatgcaacaccatgaatgaatatcaaaaacattttgctcagtaaaagaagccaggtattaaaaaatacatactccataattcaatttgtatgaagttctacaacaggaaaaactaatctattgtgatagaaatctgaatagtggttgttatgggaggtagggaaagattggcagaggtagctttctggaaaagttttatatcttggkggggatgtggataacatggctgtaatacctaaaatatgtatttttattatgcatcatttatagtgtaattttctaaatgaaacaaaaagcagtaacagacactgcccaggttttgagtagtaaatgcacaagatgagcatctttttatcccaggtagcaaggaagctgacaaatactactggtagcaaggaagctgacaaatactactaaaaccatgtcacaaggacttggaaactggcttgaagaggctctcactcaccaaaatggcccaatctgaatatcagtaaagaaaattttaaaaaaagaaaataactttaatggattgaaacacataaattatatttaaatgcatatgttcataatgacaaaatgcactttgaccacccttgaaa

SEQ ID NO: 333724 - DNA, 603 bp, Homo sapiens
aatacatgcaacaccatgaatgaatatcaaaaacattttgctcagtaaaagaagccaggtattaaaaaatacatactccataattcaatttgtatgaagttctacaacaggaaaaactaatctattgtgatagaaatctgaatagtggttgttatgggaggtagggaaagattggcagaggtagctttctggaaaagttttatatcttgggggggatgtggataacatggctgtaatacctaaaatatgtatttttattatgcatcatttatagtgtaattttctaaatgaaacaaaaagcagtaacagacactgcccaggttttgagtagtaaatgcacaagatgagcatctttttatcccaggtagcaaggaagctgacaaatactactggtagcaaggaagctgasaaatactactaaaaccatgtcacaaggacttggaaactggcttgaagaggctctcactcaccaaaatggcccaatctgaatatcagtaaagaaaattttaaaaaaagaaaataactttaatggattgaaacacataaattatatttaaatgcatatgttcataatgacaaaatgcactttgaccacccttgaaa

SEQ ID NO: 333725 - DNA, 604 bp, Homo sapiens
aaatgaaaatgtgggattccttgttcaaaaatgattaagaattgtgagacagcagaacactaaaccaagcatgaggcccttctgagcactgaatcctgtgggcctacataggccacacacccagctctgacatccaatacctgatagacattcaaaaaataattactgcagtgaatgcaaatttaagaaaaatcatcaggtatccaaggagctctgacatacagattgataaaagattaaaaacagaaaccagcatgtgtgtgaaagaaatgtgtaattcctcaattgcagagttgactatgaggtgacaaataaagtgattactcttctctttttgagagatgccaggtccaggctgcaaatttttcgaaggtcagaaccatggtgttttcatatttgacttccttgtaaggcctctgcatgtatttgatgctcaagaaatatttgaactgaaactgaattgtttctagaggctgaattagagaaggatgagragttatgaggaaatattttttctttagtgcaaacctcactaaatttaggaggagatgagctggtcttcaagtttgtcctcttactttatgacaaatggtttagtgctatg

SEQ ID NO: 333726 - DNA, 570 bp, Homo sapiens
tgagctatatagcactttttcaatctccatatatgatgcttttctgggaatatcattgcccagcttttttttttttcctttttccatttatcctacaagtatatgtgcatgaaataatgtttaagtaacttgtttcttctaacatccaacccgtccaattgggaggtcacgtgctyacaaataattactaaatatgtattaaactttttgccaccttttctactgatatcatcaagtgacttctatttgcatccaaacttagcattgactgaagttgttacaggctgccatgtcttccccagacagtatattgtggtcatagtaattagagtctttagaaggatctgaagataaagccactccccggtttctgagggattaacattttgtgggggtaaagggaggtaccccaccctatatttagatacctgtggtatctcccaggcaaattctttgagctttgcatgaactatctcttttaatttccccagcactcctgaaggagatcaggatttttatctccattttacaaaggagggaaccaattctcagaaagatcaagtaactttc

SEQ ID NO: 333727 - DNA, 570 bp, Homo sapiens
tgagctatatagcactttttcaatctccatatatgatgcttttctgggaatatcattgcccagcttttttttttttcctttttccatttatcctacaagtatatgtgcatgaaataatgtttaagtaacttgtttcttctaacatccaacccgtccaattgggaggtcacgtgctcrcaaataattactaaatatgtattaaactttttgccaccttttctactgatatcatcaagtgacttctatttgcatccaaacttagcattgactgaagttgttacaggctgccatgtcttccccagacagtatattgtggtcatagtaattagagtctttagaaggatctgaagataaagccactccccggtttctgagggattaacattttgtgggggtaaagggaggtaccccaccctatatttagatacctgtggtatctcccaggcaaattctttgagctttgcatgaactatctcttttaatttccccagcactcctgaaggagatcaggatttttatctccattttacaaaggagggaaccaattctcagaaagatcaagtaactttc

SEQ ID NO: 333728 - DNA, 570 bp, Homo sapiens
tgagctatatagcactttttcaatctccatatatgatgcttttctgggaatatcattgcccagcttttttttttttcctttttccatttatcctacaagtatatgtgcatgaaataatgtttaagtaacttgtttcttctaacatccaacccgtccaattgggaggtcacgtgctcacaaataattactaaatatgtattaaactttttgccaccttttctactgatatcatcaagtgacttctatttgcatccaaacttagcattgactgaagttgttacaggctgccatgtcttccccagacagtatattgtggtcatagtaattagagtctttrgaaggatctgaagataaagccactccccggtttctgagggattaacattttgtgggggtaaagggaggtaccccaccctatatttagatacctgtggtatctcccaggcaaattctttgagctttgcatgaactatctcttttaatttccccagcactcctgaaggagatcaggatttttatctccattttacaaaggagggaaccaattctcagaaagatcaagtaactttc

SEQ ID NO: 333729 - DNA, 521 bp, Homo sapiens
gttttcctgtcattgttttaatgctatctttgctcctttaaaggtcgtgaaaggctgatttcttattttgctttagaactttggcaaatatgaagtatgtaattccacttcatcaccctttcccctgctcccaccactctccttttttcttcttctttttttttttaaattttaaatactggagtttctttatggatgtagaaaagacagagagagggcaggaactgtgtcagtaagcaacacaraaatgctttttgatttataattgttcatcgtttcatcagcaagatgtgtttggggccttccctgtttttgtgaacacttggcaacaaaaattccgtggtgtcctagagctcattagcagcccatctgaaaggatcctttgatgtgggtccctgctttgcctccagaaagaagaaggaaaattgaattttgtcctccagtctagtttgtggtgaggattctatgtgatcagaattcagcagttcaagatagaaacctcggaaatgccatttttgggg

SEQ ID NO: 333730 - DNA, 447 bp, Homo sapiens
catttttgtctttggcttcttggctcagttgaccaagacaccaggctaatgaggtgaattctaggttttgattaccaagtaggagaacagaatcaaagatagttttggggctcgcaagggaaattagtgaaaatatgattcctatttttttttttttttttttttgcagatgatgggaggcaatgaggatcaggaagatgaagtgtaatgtccaatccccttgaacatggcaactctggactccctgtccagtgctctttccactctaccatgcactagttaactttttatgactgcagtgcaaattcttatcaggaatcctccaaaggtatgtttttggtaaaaactggaaacaggtgaggctgtggaaaartgaatccaaaggctatctccactgttgctgggactgtatgttatcaacatacactctcaaagtagagtgggaaa

SEQ ID NO: 333731 - DNA, 605 bp, Homo sapiens
tgcaattgcattataattagtgtataatgagcagtgaggactaccagaggtcttttttcatcaccatcttggttttggtgggttttggctggcttctttgctgtgtcctgttttatcagctgagtctttatgacctgtatcttgtgataccagccctgctgacctcctatctcatcctgtgactaagaatgcctgacctcctgtgaatgcagcccagtaggtctcagccttattttacccaggtcctattcaagatggagtcactccagtgcaaacacctctgacacaaccagctctggggaaaaagggacactgatttgcaacacttgccattttctgtggtgtaaatactctcaccttgactgacttactgatctgggaagagacgagcagtagcatatcattaaatggtgttacttccatgcagattcaataaccacaagagcaaaggtcatagtaaatgtagtaaaacaattggaaagtgaagagttttattacctttgcttttaatgcgatttatttcattgtaagttcatattagttgtacctaacaaccagcttgaaaatgggasagtgggctttcgtgagtggccaagagccagctc

SEQ ID NO: 333732 - DNA, 563 bp, Homo sapiens
agtagtttcctttgggatggagacctacttttcatagaataattttgtgtgcattgtttgaamttggtggactgtatggacattatttttgcaatatattgactagcctgtgctctttgttcttcttttaaatccagttactcccatataataaatctgtttttggccaagcctgtttattaactcaactaaagccatttttaggctgagcccatctcatataaaataaatgatacaacgagtccaaaggtttgcttgccagccgtggccctgacaccactcttgctgtcttgttcctgcagatgacagaaggcaggcactgccaggtgcacctcctggatgataggagactggagctgctggttcaggtaggtgtggcccacatgtgtgttgcccagataagtcttgcccaggtaggttttaccctcacggggacagctcatcctggttccctctctgagcctcatagtctgtattcaggcttctctgttatctttgcctcaaagccaatgactcagaattgatcaaggggaaaaaaacatcttcgaagtcagaaaacttgg

SEQ ID NO: 333733 - DNA, 563 bp, Homo sapiens
agtagtttcctttgggatggagacctacttttcatagaataattttgtgtgcattgtttgaaattggtggactgtatggacattatttttgcaatatattgactagcctgtgctctttgttcttcttttaaatccagttactcccatataataaatctgtttttggccaagcctgtttattaactcaactaaagccatttttaggctgagcccatctcatataaaataaatgatacaacgagtccaaaggtttgcttgccagccrtggccctgacaccactcttgctgtcttgttcctgcagatgacagaaggcaggcactgccaggtgcacctcctggatgataggagactggagctgctggttcaggtaggtgtggcccacatgtgtgttgcccagataagtcttgcccaggtaggttttaccctcacggggacagctcatcctggttccctctctgagcctcatagtctgtattcaggcttctctgttatctttgcctcaaagccaatgactcagaattgatcaaggggaaaaaaacatcttcgaagtcagaaaacttgg

SEQ ID NO: 333734 - DNA, 580 bp, Homo sapiens
aaccctattttttaataggattactaatgtttggctcacttgtctttccacatttatttaaagtacaaagacatgagtacttactagaamagaaaagggagccccatgaagcctactaaagccttacagagccattttcttctccattttgttatgtttgttatgttatctactcctgataagctggagcaggggaggtcctaactgatttggtactcaggtcagtatctcttgactaattccaaagatgttttatttaaagaatcaaaataaacctaggttttatcgtggggccagatctaatatagagcaacacccaggaggcttatggtcatcttttttggctttattatttaatgatatggtatatgtcttgaacagcattttcttgctttctttctgctttttttttttttttttttttttttttgaaatggagtgttgttgtcgccaggctggagtgcagttgcgcaatctcagctcactgcaacctccgcctcccaagttcccaaggcaattctcctgcctcagcctccccgtcccgagtagctgggactacaggcacgcaccaccacgccca

SEQ ID NO: 333735 - DNA, 575 bp, Homo sapiens
tttctgttgtggttgtcctaatgactggggcactactgcatttatcaggcagagcccaaggtcactraatgccttccagtgcatgggatactcctgcacaaggaggagccatcccagccagccttgcttccacgtcacatcacagtggttcctcacatagctgacagtctaatagagaaaagtgagctgagaggagcaatatcccattgtgtgtacagtcagagactttcataacagtgcatggcccaaaggaggcatcagcattccacctgggtttagtgtggggggaattttttctataaacatgccaaagaaagacttcttctagtactatggagcctctgatttaaatgaaatgataattctgagcaaactatcgcaaggacagaaaaccaaacagcgcaggttctcactcataggtgggaattgaacagtgggaacacttggacacagggtggggaacatcacactccggggcctgtcgtggggtggggggaggggagagggatagcattaggagatatacctaatgtaaaggacaagttaatgggtgcaacataccaacatggcacatg

SEQ ID NO: 333736 - DNA, 575 bp, Homo sapiens
tttctgttgtggttgtcctaatgactggggcactactgcatttatcaggcagagcccaaggtcactaaatgccttccagtgcatgggatactcctgcacaaggaggagccatcccagccagccttgcttccacgtcacatcacagtggttcctcacatagctgacagtctaatagagaaaagtgagctgagargagcaatatcccattgtgtgtacagtcagagactttcataacagtgcatggcccaaaggaggcatcagcattccacctgggtttagtgtggggggaattttttctataaacatgccaaagaaagacttcttctagtactatggagcctctgatttaaatgaaatgataattctgagcaaactatcgcaaggacagaaaaccaaacagcgcaggttctcactcataggtgggaattgaacagtgggaacacttggacacagggtggggaacatcacactccggggcctgtcgtggggtggggggaggggagagggatagcattaggagatatacctaatgtaaaggacaagttaatgggtgcaacataccaacatggcacatg

SEQ ID NO: 333737 - DNA, 584 bp, Homo sapiens
gcctctcttctgagaggatggtgtcatgagacagaggtaattgacctgttgtaggttttattctggtattcccttggctgcctgacatttccgagaacacagtcgaactgcatcgtttaaaaaaaaaaagtaccaccaccatttgctcstactaatagggcatttttgaagttcagtagttttccattcagcatgatgacagttctttttcaagctaagttcattttcttttgattcagtaaaatctattatattcagattcatcgttaccatcatcttgaaaaaaaaaccatcaatactaatactgatggcacatagagaagacttattgtgaagaaaggtttgcaaatcttggaccaagtcttgtgtcctattaactaattcaacaaaaactcttgggcaattttattaacgaaagaaatctcatttaaaagttttctgattacagtcactgaaaacaacaggcactttgaggacagattttgtgttcttcgtcttttgactgattgagtttcacctgaattaagattataaaagcacatttgatacctgaaatcaagctgatttacttgtcgataatctgt

SEQ ID NO: 333738 - DNA, 522 bp, Homo sapiens
tcctacttgtccttcaagtccacttgaaatctcccctcctccaggaagcctgccctgaaccccattatctgggctccctcagccctggctgtctgggtccatctcttacccaagcctggggctccttgagggctgggcaggggctggagaactcttggagtccgctgtgtttcccagcgcagatgtgggcacccagtggggaaccctaaatactcagtgagtgcattcatggggccagggttcaaatcccagctcagtcactttgcggctttgtagtcctagtgagtctggtcccctgtcacagactcagtttcccccctctagaagatggggtgtccacaggaacctggccctggatgcagggggtcagcggagtttcccgcaaggcacggtcacaggctgcaggctgcattgctcagtggcagtgctggtggctcctgccatcccygagtgcccccctcctctggggctcagtttccccatttggccacactcccccttagacaaacacagacggggcgc

SEQ ID NO: 333739 - DNA, 324 bp, Homo sapiens
aggttggaaacactgatgtttaaaggaaagacagagatagaaaaatctaagaaatgatttgagaggtgggagaaaaatatagattatactgtcatgaaagtcatgtgagcaaagaatttcaagaaaggcagtgtcaaatatcagagaaaggtcaagtaagatgaacattacaggttcaytggatatggcaaaagatcactgatgaccttctccagagcttcatgaaatgatgaggtggaaatctgaataagaaaaaagtggacaatcctactgaggaaaaacaaaagactggaactcgatgaattcagatagtagagttagtag

SEQ ID NO: 333740 - DNA, 460 bp, Homo sapiens
taatgacaatgatcaaaagcatttttatattcagctatactttttccttcatttttcattctaatttttaaaaagtttattaaatactacaaagtaataaacatttattataacctagacaaaagtgcactgggttaggaactaagagttgctgagttttagttttgtcagtgggtattatttgttactgtttattgtacatgtttactgtttgtaatactacaaagcaataaacatttattataacataaataaaagtgcactgggttagaaactaaaagttgctgagttttagttttagttttgtcagtggctgttgtttgttattgtttcttactcccaggaataatgtgaagatgaaatgagactagcratctatgggaaaaaaacttcatgtgatttttaggagtttatttatggctctacatgtggaataagaaatgctggagaataagaatct

SEQ ID NO: 333741 - DNA, 548 bp, Homo sapiens
aagcttataaaaagcttgtttgatcttgaagttttaaaaattatacagtcaaacctagacttcttttatataaagttctttactttcattcttagaaataccttctccatcttgaggtcacatagtcacctgttttcgatcagtatatttgtttttacttagtatatttaaatgcttaaacctcctgaattttattagtcattgtaaaatgactaattgttattcrtcttaccaacatatattttgcccacaatcattactaacatcctacaatttttagggctacttctggattttacattctatttcactgacttacctattattttatgagtaacaataattataccttatattatatattatataggaaaagcatatccattgctcttcttttccaataactgcttaaacattctcattccattattcctccatattacctttattatcatttgtcaggtttaagatgaaaaaaatcaaccatcctccaatctccaatagaattttgataatattttgattatattttagattaattttggaag

SEQ ID NO: 333742 - DNA, 536 bp, Homo sapiens
aaatacacaatggagtctgactccaggcattgctgcatctcaaggtctcaaactataaagcactgatctctcattttctctcttcatctcggctctggtttcctctcaattggttccattcttaggtaagttctccaacaagtgacaaaattgacgtcctcaattataggtcaacctgtccttagagcttgtaatctcaaaaatgaagtataatttcccccaggcattcatatgaatcctggggaaacaagcaaacaaacaaaaaacawaactctgctatagcttgaattttgtactatctctggagaatggaaccgattgactgaaaataaataaataaataaataaaatttggaatgaacgaagtttactcaccaaaaaagagggcagaccaaaaggaagaaatattctctacaatattaaaaggagaaaaataaacatacaatagattcttaacctttgggaaaacaagtgattagctatgctaggtgaggtgttgggaatgaaggaaaagaagaatgtttattagaataaac

SEQ ID NO: 333743 - DNA, 551 bp, Homo sapiens
aaaaacattttggagatgtcagtaaaactgatacttgttgattgggcacccataattcctccttatacattcccaaaaagtatatgttttagcagaagttagagacagatcattacacatttgattctctttcatttatgcagtatacaaggcaagacatttaaacatatacacatttacttttgcaaatattaatttactgaggaactgagcaaatggtagaaagtattgttacctagagcaaaatgtcttgaagatcaccatgaccaattctttcaaagcaccacatttaattacaaatcataaacagtgataaaatatgaccacttttacatagataatatattataattttaaaactttttattatatgccactctagaaacttagttccctaagctctcctctccaaaaacattcagtgaatctttcaagtcaaatcaaccatctttgcagggacatggatgaagctggaaaccatcattctcagcaaactaagacaagaacagaaaacyaaacaccgcatgttctcactcctaagtgggagctga

SEQ ID NO: 333744 - DNA, 619 bp, Homo sapiens
ggttgggatctgtgtctccactcaaatctcaggctgaaatataatccccagtgttggaggtggggcctggtgggaggtggttggatcatagggacagagttgtcataaatggtttagcatcatccctccttggtactgtatagtgaattctcaaaagagctagttgtttaaaactgtgtagcacctctcccctgtctttcttcctcctgctccggccatgtaagacatgcctgtttctctttcaccttccaccatgattgtaagtttcctgaggactccccagagacagaagctgttatacttcttgtacaggctgcagaaccatcagccaattaaacctgttttccttataaattatccagtctcaggtatttctttgtagcaatgcaagaacggactaatacagacctttagttaaggttctccagttttctctaactctggttatcactctrtctctgtatctcactctgtctctctttctttttcaatatatatttatctaatatttgaatatgtatctatttatctatctataaatatatattgagggattgagagagaggaagagagagagggatattcaaaaagttcaataaaaatatatgtatatgaaaaa

SEQ ID NO: 333745 - DNA, 619 bp, Homo sapiens
ggttgggatctgtgtctccactcaaatctcaggctgaaatataatccccagtgttggaggtggggcctggtgggaggtggttggatcatagggacagagttgtcataaatggtttagcatcatccctccttggtactgtatagtgaattctcaaaagagctagttgtttaaaactgtgtagcacctctcccctgtctttcttcctcctgctccggccatgtaagacatgcctgtttctctttcaccttccaccatgattgtaagtttcctgaggactccccagagacagaagctgttatacttcttgtacaggctgcagaaccatcagccaattaaacctgttttccttataaattatccagtctcaggtatttctttgtagcaatgcaagaacggactaatacagacctttagttaaggttctccagttttctctaactctggttatcactctatctctgtatctcactctgtctctctttctttttcaatatatatttatctaatatttgaatatrtatctatttatctatctataaatatatattgagggattgagagagaggaagagagagagggatattcaaaaagttcaataaaaatatatgtatatgaaaaa

SEQ ID NO: 333746 - DNA, 520 bp, Homo sapiens
tctatctataaatatatattgagggattgagagagaggaagagagagagggatattcaaaaagttcaataaaaatatatgtatatgaaaaattatgcatgttattttgtgcaacaaaataaatttgttattactttctgaataggatctagtttgaggcactaagaagaataagacactagtttgaaaagatcccttatgagagaaatgaaaattactaaaattaaagcaacaaatattaaacttatggtgacgttaaggggaagaatggtaatatcattgcagctgtgtgaaaacttgatgcagaccatgctccaaggaaatcaacagtttacaaatacataacttcttttaagaagaaatgagatgatgttgaatatgaaaccygaagcaggtttcataatctacatctcaaattcatctacatgaatttgcgagaaaaaaattaatcttgtttgtgcgctagttgaagaggactaatgattaacagcagaaacaatagccaacatcatagacattta

SEQ ID NO: 333747 - DNA, 588 bp, Homo sapiens
attatttgtcaattaaaaataaattattaataaagatgcctttgataggtgttagggtatgaaagagcacactgaaaattgcaaaaatgtattcacatgtttaaaagaagcattagaaggaatgcaattcaatcaacaaatatgggatttytttttctttcagtgactatctgcgttggtgttaatattattaagcagggtaggagtaaagtgtcttcacctatttaaaattttgttgttattgcagatgacagcttcttacttagaggaatcgacttcattgctattcatgatatttccagtatgattatagaaatatgaaataaggctgaatataataaggatgtttataataacttattaatcactctctactctggagtaaagaaaagctatcacagtatatttagtgacatgacagcagcgataaatatacagagtgaagagtcaagtgaatatgcctcatccataagcaccaacctttggtgaaaggggctaccaaagagatttttacatcagcatatttattgcattgaaaatggatcagaagactgatgaatgaccaaaaaagcttgctttgatccattt

SEQ ID NO: 333748 - DNA, 588 bp, Homo sapiens
attatttgtcaattaaaaataaattattaataaagatgcctttgataggtgttagggtatgaaagagcacactgaaaattgcaaaaatgtattcacatgtttaaaagaagcattagaaggaatgcaattcaatcaacaaatatgggatttctttttctttcagtgactatctgcgttggtgttaatattattaagcagggtaggagtaaagtgtcttcacctatttaaaattttgttgttattgcagatgacagcttcttacttagaggaatcgacttcattgctattcatgatatttccagtatgattatagaaatatgaaataaggctgaatataataaggatgtttataataacttattaatcactctctactctggagtaaagaaaagctatcacagtatatttagtgacatgacagcagcgataaatatacagagtgaagagtcaagtgaatatgcctcatccataagcaccracctttggtgaaaggggctaccaaagagatttttacatcagcatatttattgcattgaaaatggatcagaagactgatgaatgaccaaaaaagcttgctttgatccattt

SEQ ID NO: 333749 - DNA, 501 bp, Homo sapiens
tttattgaatagaagtttgtaaatctttgagttttcatgaaattcctgaaatttgtgctttagatactaaaaatagttattaacagraaaattaattgtcttgattttcttacatacattttataacagagtattttccactgtgaataatacaggagataaaaagagtctattatactgagttatattttccaagcattattttaagtctttttataaaagccaagactctgaaataaatgtgtttattatatttcatgtatgcctgaaagaaaactaagtaactgaaaaaaggtcagctgtaaaaaatcagccttcaaacaccctgatgttatgaattataactactgcctgttgtagatgcaggggatgactccttcaatatctgaaaacatgtgccttgaaattttcaattactctcagggaaccaaacatttcttatgaaaagtatttgacaaggctggctgaaaaatgtgactctgcagaaggaaatgccattgg

SEQ ID NO: 333750 - DNA, 610 bp, Homo sapiens
tatagaaaaattctgtaataaacttacttgtactatttctttgtcacttgtgcctgtatttctcttggaaatacagctagaggtggaactcctgtgtcagattatgcatacattcaattttagagttaacagtaaatggtttcctaaagtagttgtaccaatttatactcccaaatgcctctaatgtataaggatttcaattgctttacattttcatcactacttggtacccaaggcctttttaattgtaaacattctagatgaaatttttgtataatgtgtagtggcattgttttttcagttttattttttattttcttaaattcaaatgtattaaacaacttttcatgtctttttgactatatgaatatgcttttttataaagtacctcttcaaattttttgtttatttttcttttgggctttctattttattgattgcagtycttaatctagcttaatgcattacaagcttccacttgaccacttacttttcactcttttctaaagttagaataaagagatattaataaaatgaattattgaattactctttgatgaaaattaataactcatcaaagagttattaattttgataactcaattcatta

SEQ ID NO: 333751 - DNA, 610 bp, Homo sapiens
tatagaaaaattctgtaataaacttacttgtactatttctttgtcacttgtgcctgtatttctcttggaaatacagctagaggtggaactcctgtgtcagattatgcatacattcaattttagagttaacagtaaatggtttcctaaagtagttgtaccaatttatactcccaaatgcctctaatgtataaggatttcaattgctttacattttcatcactacttggtacccaaggcctttttaattgtaaacattctagatgaaatttttgtataatgtgtagtggcattgttttttcagttttattttttattttcttaaattcaaatgtattaaacaacttttcatgtctttttgactatatgaatatgcttttttataaagtacctcttcaaattttttgtttatttttcttttgggctttctattttattgattgcagttcttaatctagcttaatgcattacaagcttccacttgaccacttacttttcactcttttctaaagttagaataaagagatattaataaaatgaattattgarttactctttgatgaaaattaataactcatcaaagagttattaattttgataactcaattcatta

SEQ ID NO: 333752 - DNA, 619 bp, Homo sapiens
cctagtggaatcttggtcttgccttttcttgttttctgccctaaagttatcatttttcataatggcattttattttcttattgtcactggatttatacttccttctaaactttgcttaataaaaatactcattttatcatatttcattcactgggaaatgcttataatccacttttgtaataccgtgctacctatacttacacctcctcttcaggaagtgggaatctagaaggaaaaaaaaaatagcaagagtccagttgcttttcctcttgctagacttaagaaaattgtattttcctgtattaactggagagcaatgaaaggataaagatggcaagtgagaggcactgaccttcacagcaatgagacagcagagatagcagtgatcagcagtaagacagcgagacggtggtgatcagcagagaggcaggaaaatgtgcccagtaaaaatcctgatggatgtggggamaatgaaaagcatcccagaggattgtcttctggggcgttttttaggctactggaacaaattcaaattcagcttaaagaaaaagaaactcattttctcctgaaacattgcttacatctattacacattagaaaaccaagagatttgtactaa

SEQ ID NO: 333753 - DNA, 599 bp, Homo sapiens
attttagcagccttttactgaaacactaatacagcacagggcwtggcaaaactcaagatgaatggaaacatagatttcaactaaatttactaaaagcaaatatcataataacaatggacaattgggataaatttttatatttagttgaatttttaatctttaagtaccaattctaacatgaaaataagaaaatataagaattcaagcaaaggagaagtacagtaatttggggaaaataaaactatttaaaaattttaacttgacacacatttataactttaacacacatttatagctgcaaattattttatatcctgtttttcaacttttgaatgttttgccttatggaaataacaatattcctcaatttctttttctttaaaattagtgaatatatatatacgtattctgcctcagaaatgttatgcataaataaatgaaccttcctggcatgttatatgcacacaacaaagacagaagtactgagctattgtgcacaatattgtcattattaaaagtattgcacaaaatcatgttgctattttacctgttattttaaacagttattaattataacttaaacttttaatgactcaaga

SEQ ID NO: 333754 - DNA, 599 bp, Homo sapiens
attttagcagccttttactgaaacactaatacagcacagggcatggcaaaactcaagatgaatggaaacatagatttcaactaaatttactaaaagcaaatatcataataacaatggacaattgggataaatttttatatttagttgaatttttaatctttaagtaccaattctaacatgaaaataagaaaatataagaattcaagcaaaggagaagtacagtaatttggggaaaataaaactatttaaaaattttaacttgacacacatttataactttaacacayatttatagctgcaaattattttatatcctgtttttcaacttttgaatgttttgccttatggaaataacaatattcctcaatttctttttctttaaaattagtgaatatatatatacgtattctgcctcagaaatgttatgcataaataaatgaaccttcctggcatgttatatgcacacaacaaagacagaagtactgagctattgtgcacaatattgtcattattaaaagtattgcacaaaatcatgttgctattttacctgttattttaaacagttattaattataacttaaacttttaatgactcaaga

SEQ ID NO: 333755 - DNA, 599 bp, Homo sapiens
attttagcagccttttactgaaacactaatacagcacagggcatggcaaaactcaagatgaatggaaacatagatttcaactaaatttactaaaagcaaatatcataataacaatggacaattgggataaatttttatatttagttgaatttttaatctttaagtaccaattctaacatgaaaataagaaaatataagaattcaagcaaaggagaagtacagtaatttggggaaaataaaactatttaaaaattttaacttgacacacatttataactttaacacacatttatagctgcaaattattttatatcctgtttttcaacttttgaatgttttgccttatggaaataacaatattcctcaatttctttttctttaaaattagtgaatatatatatacrtattctgcctcagaaatgttatgcataaataaatgaaccttcctggcatgttatatgcacacaacaaagacagaagtactgagctattgtgcacaatattgtcattattaaaagtattgcacaaaatcatgttgctattttacctgttattttaaacagttattaattataacttaaacttttaatgactcaaga

SEQ ID NO: 333756 - DNA, 616 bp, Homo sapiens
ttgtgtttccagttagatgattcctactgactgccacgctcttacttgagcttgtttaactcctgctcaattcttacaatttaaaacttggtgggcagatgaagcttccattcagactgctcacaatgcccaagcccaacctcaatataactgcagaccaacttttgggggttggtggctgggctggtttagatgcacaagtggtcatgcaggatgataccacagaacagcttagaggaatgtgcattagagcttgggaaaaaaatcactttgggaggagagcaatacccttcctttrgtgcttaaaacagggactgaaagaaccgtatgcagattttatagctcggatacaggagtctcttaaaaaggtgatggcagattcagctcctcaggatataatgttatggttattagcttttgacaatgcaaataccgattgccaggcttctctgcatcctattagagggaaagcatatttagttgattatatcaaggcctgtgacagtatcggaggtaacctgcataaggccactctgctagcccaggcaatggcaggactgagagtgggtaaaggaaatactccatttcctggagcttgttttaactgtgggaagcg

SEQ ID NO: 333757 - DNA, 380 bp, Homo sapiens
ttgtagctataattgaggtattgactgcattttttttttttttttgagatggagtcttgctctgtcgcmcaggctggagtgcagtggcatgatctgggctcactgtaagctccacctcccgggttcatgcttgactgcttttgatatgtctttaatgcgatttctgattcttcaaatgtggttcattccacacaattaattgaaaatgctcagttacaatttcatacagatgaacaactgatgactttatttacccaattggaaacagcagttaggaacagaacaaaccctctttacatcacttactttagggctcatacacctcttccaggacctttaactgaagggaatcaaatggctgatcacctagttgctaatgc

SEQ ID NO: 333758 - DNA, 380 bp, Homo sapiens
ttgtagctataattgaggtattgactgcattttttttttttttttgagatggagtcttgctctgtcgcccaggctggagtgcagtggcaygatctgggctcactgtaagctccacctcccgggttcatgcttgactgcttttgatatgtctttaatgcgatttctgattcttcaaatgtggttcattccacacaattaattgaaaatgctcagttacaatttcatacagatgaacaactgatgactttatttacccaattggaaacagcagttaggaacagaacaaaccctctttacatcacttactttagggctcatacacctcttccaggacctttaactgaagggaatcaaatggctgatcacctagttgctaatgc

SEQ ID NO: 333759 - DNA, 509 bp, Homo sapiens
cattcattcaactcagttgagtaggaaataataaaatattgctgccagaatgtcttttagatttacatttatatcaactttttctctgttaaaacaaagagtgtgccaagctacaattccataaatgtcaagtggaaacatgctctcacagtttaactgtgtgaacagtcctgcattttctatgggaatacagaggatctgtcattatacaatcttatttcattactaattagtctgtgatatatgagrattacaaaatctgcaatgaatataatcccatgtatccaatataattttgcttcttacattgaaatttttcagggaaatcaaaaataagcatactataagtgaaacaaattatttttatattgactaaagctgagggagtatattaaaaaattctaaatctctaaacctaaatgtatatgttttatatttttcaactaagttaattaaaatgtctttttccccatatttcactgagtgaagagtgagcatttcagaaggct

SEQ ID NO: 333760 - DNA, 564 bp, Homo sapiens
ttacacaatgtctttaccttaaagaaaagcatctgtgaaaaggcagacttattaagataaattagaaagatactatgaacatttaaaaggtttaaagataagttatttaacaagtcatttgaattgtgtacagtcaatatatagtgatataatatgtaaatagtaaattcatatattttaaatggcatgtctttattctgaaaaaaatttaccatatcaaacaaaacatatcaacttgccattttataaatgagttaaatactataggtgactatattgcagcatattatgacatcacaaaaaagagaacacattttgaaattatttatcaaaagtctataagaataaataagcatttatatttttacttatattatgtcaacatcatctggctatctstggtgtttgctaatctttccatttaggctgcaaacctatcgtttcacctttctttctttaaatttttattttagcttcaggattatatgtccaggcttgttttataaggaaaatcgcctgtcatgggggcttagtgtacagattatgttggtgataagcatagta

SEQ ID NO: 333761 - DNA, 488 bp, Homo sapiens
ccacagcagcctgaccaacatggagaaaccccctctctactaaaaatacaaaattagcaaggtgtgatgatgcatgcctgtaatcccagctacttgggaggctaaggcaggagaatcacttgaacccaggaggcggaggttgtggtgagccaagatgcrccattgcactccagcctaggcaacaagagcaaaactccatctcaaaaaataaaaaaattaaaaaaagactttcaacaaagaatcttacatacagctgaactatccttctccccaaaaaggacttaggacacttccatgtaaacaggacagaaaatcctttgctagtagatatgctgtaaaagaaattctatactgagtccttcaggctaaaactgaaggacattaaacattaattcaaatccacagaaagaattggcactggtaaaaatacactggattgatataagaaacatacaaaatgtacatttttgaatatacctcttttctta

SEQ ID NO: 333762 - DNA, 488 bp, Homo sapiens
ccacagcagcctgaccaacatggagaaaccccctctctactaaaaatacaaaattagcaaggtgtgatgatgcatgcctgtaatcccagctacttgggaggctaaggcaggagaatcacttgaacccaggaggcggaggttgtggtgagccaagatgcgccattgcactccagcctaggcaacaagagcaaaactccatctcaaaaaataaaaaaattaaaaaaagactttcaacaaagaatcttacatacagctgaactatccttctccccaaaaaggacttargacacttccatgtaaacaggacagaaaatcctttgctagtagatatgctgtaaaagaaattctatactgagtccttcaggctaaaactgaaggacattaaacattaattcaaatccacagaaagaattggcactggtaaaaatacactggattgatataagaaacatacaaaatgtacatttttgaatatacctcttttctta

SEQ ID NO: 333763 - DNA, 472 bp, Homo sapiens
cgtggtggcatgtaactgtagttctagctactctggaggctaaggcaagagaatcatttgggcctaggaagttgcagtgagctatggcatgccactgcactccagcctgagcaatagcgccatactctgtctctaaataataataataataaattaaaaatatatatagttcttgaggcaaagaattggaggccayattactacctatattgattagtaatgtctgaatttcataaatctttttagtgtatagttatttaccatgcaacacaatatacataaattcattttaatcaataaacttgccttttcaatctctttattcaatgttttagttaaagttcctggagtcaatataaaaatgctagaggctgaaatattttctcaaaactgtcatcagtagaaatatttgttatgacactagaactctctctgaaaatcacagataataaaaaaatgtttaatgtttatg

SEQ ID NO: 333764 - DNA, 484 bp, Homo sapiens
caaagtgcctgctttccaaaatttggagaaagatgatgggctagtttttcatagctaatatgtgaatccacagaagaaggctgaactgggttctttatggaaaggtattacaagaatacctgactggatgggcaaggtaaccccatgagatagatgagtcattggaaaccaaggggcaaaaaggaagttataaataaaaggctgagaatttatcactatgtgaagtgaacttataatgataaaagttcaatggagtaagacagtttctaagcaaccccaagagagaatragccaaagatcatatataattacagcatcgaaaaacgtactaacaagaagttaaggtcacaaatgtcctggctttctttttactgcctctctctggtagagctcaaactctcaagggacctcgaacagccatagtaagtggaggaaaatgtgaaccatcgtcacctttcccactgcaggtttttcagatttaagg

SEQ ID NO: 333765 - DNA, 621 bp, Homo sapiens
tatgactacaatatttctgcattagttcacacattacgactaaacagagaattatgggcattttttagtcaatcatttccaactatttgctccaaactttatcctaaccaaataaaaatagctattatttaacatgaataatatcagttatttctccaaatcactttcaataattttttgaactatttcaacaatttagaatttaaacttagtatttaaagaaagattttgattactttttgttctagttatcgaactggtacatgaatggtagaaaaattagaaagcacagaaaagcaaatagttttcatgtcttagtggctgtaatcttaccaaycagaaataagcaatgttaaaagtcttgaaatacattttcctcaagcttggaatgcattttttatataatggtatgatactatttatcttttttatcttaacaatatattgacattttctcattactatagataatatttcagcatgattttatactagttttatagcactctgttatattggtatgctacaattatttaaccaactcatttttggccacttaggttttttttacttgttcacatatataaattcaaatatgatgaaagacttcattatacatct

SEQ ID NO: 333766 - DNA, 620 bp, Homo sapiens
atctatttgtagacagcaattagtatggttaaatttcccacagacccctccttcagctgctagcaagtagtcgagagccaatctattttgatggatagcatttctcatctgagtttcttgctgggccagaatagtcaaggctctgctggttttattagtgatyatttctaagatagcttataaccgtatgattcagttgatcatgtaaatggggatccggtatccccacgagccatcttgtgcccaagtagcaggcccataatattgtatgcttctctcagggggccattcatgatctgtccagttccctatagctatacttctcttttcacaggaagcatagacagggaagcccaggatttcgcctgtctttacgggcagtaggaagaaagatggtttaatagtgccagtaacacaactacctgcccactggtcaagtaatttggcataagctctatgcccacagtataatccagtgggggctgtccagtcccggtgggactccgggtgggtccacacaatttgcaactttgggaatttactaaatggatttttcttagtgtgatttgaactccactaggtggctgcaaatttgtggtactattatgcagtttttgctc

SEQ ID NO: 333767 - DNA, 600 bp, Homo sapiens
ttctattcaatttgtgtaaacttttccaattctctattagttaaatttgaggttaattgtccatgtacacttctagcttggcttgtcaattgtgtctatttcttgcttacgaaagtagataaatcttatctttcccragcccatttattttatctctattactatacagccaggctctcaggttttcttacacttattttattacagttttcttattactggactttcctcacactagtgatgcattgccactggccttttgtctttcaattctctgtcataataaaaggaaaatacccctaaaaaagtcacattggagagtgtgcagtaagaggattaaatcacagtctataatcctgcacctttatttctctgggtgaagtaatatcacagattttcatatctatgaaaatacattgctacaaatgagctccgtagatccctaagtaaattacaaaaacagaaggccagtgtatagcagagataaaaagttgtttttctaataagtaatcattaatttataggctgataaatttatggtcaactcagaaatattattctgcctcttgccaccatttttaatatttctcttatccatat

SEQ ID NO: 333768 - DNA, 582 bp, Homo sapiens
ctgcagtgagctgtgagtacaccactgcattccaacctggacaacagaccccatttcaaagaaaataaaaaccccaaatttcatcatctaaatcctctcagtcargtatgagtgaggttctgagtctaatagatttttaccataatttgtccaatgacctgtgaaatcaatgaaatagtttatctgtccccaaaataaagtggcaaaacaggtgtaggaaaacagctatagacattttcggtgtaaaaagggagacaataaaagggaaaaaacgagtaattagtcttaagaaattttaaaatccagtagtaaaaaccctgttagcttttaaggcatgagcataattttctatggtttttgaatccatccttccttttttcttttgttttcattaaaggaagcagatgtttacagctgaatagatttatcagccaacagaatttctggggatcaagaatcttctctcatttcgtgctacttgtccccctttaagttcaagccatcaatctttctgctgttacataaatccctatcactttgtgcatctcctaatatgtcataggggttcatagcattaaacag

SEQ ID NO: 333769 - DNA, 598 bp, Homo sapiens
aaaaattgattctgtaataaggatagaataatttatagggataagattcccaggcagttaaaagagattggaatgcaaaaaaaagtgacttgccttagtttgtaaaagagtaatttaatctattaagcggattagaaagttgacaaattttaaggctggattgtggaattttgtgtggcagaggaatcaagtcttgccattttcaaggagccgagggtgggaatggcaacatttccacatttattattttcacttctccacagatccttgtctggaccttttttcaaaacacaagataagagcaatgttgaccagaaaataaataaaatagcaaacatggcatcacatacttgacttcaggtaaacttttcaagttaacatttcaatgtaagttgaaatgaaatgtgtgagattaatttgcaaggccatgtatacttttcttattttgtttataaatatctggtctaatacaaagcattgttaaaaaacatctttggaaatcctacacatttrataagctgactttaaatttacatatgataagaaagattgaatttaatcccaaactatgaaattatgaagttacaaacttgttgtg

SEQ ID NO: 333770 - DNA, 571 bp, Homo sapiens
ggtatttattgtcactctgaaccatgaagaaacatttgggttatgctcaatagactatgtaaggayacaaggaaacatgtaatacttttaagaaaaactttcatcaaaatatatattgttcgggagattcatcatcattcacaagtagaaaacttcattccctaaatttgtcctaaaagaagtgctgcccaattaagaatagatcttgtaacattttcaatgttactaatttatgtgtagtatgattatgtcaggacttacttgggcaatgccaataatacatataactttaagtgccaatctcagagccttagaaaatagaagcaagattcccttgtcagtctgtattctcaggtaaatggtaacacctgttccaaactccctcctactcacagacatacaccatgtcattgttgattgggctgagcccactgattctttcgtaatgccataaatttttcttaaccaagaaatgaacagcaagtgataattctaattagttgattggtagctcactactgaaagcacaggttttttgactcaaagtcttcattcctatctagatatgtaa

SEQ ID NO: 333771 - DNA, 565 bp, Homo sapiens
ctcttttccaatttggatgccttttatttttttctctcacatgattgctcctgttaggacttccagtactatgttaaataggagtagtgaaagtgggcatccttgtcttgtaccagttcttagagaaaaaggctttctgatttccccatttcgtataatgttaattgtgggtttgcaatatatgacctttattatgttgagagatgttacttctatgcatagttcgttaagagtttttaccatgaagggatataaagttttataaaaagcattttctgcatctattgagataatcatagggtttttatycctcattctccttggtgtgatatatcacatttattgatttgcctatgttgaactattcttgcattcggggtataaatcccacttgatcacagtgtattatctgtttgaagtgctattggattcagtttgctagtattttattgagaatatttgtgtctatgttcatcagagatattggcatatagttttcttttttgttggtgtctttgtctggttttggtgtaaggatactgttggtcttgtagaatgagttagg

SEQ ID NO: 333772 - DNA, 565 bp, Homo sapiens
ctcttttccaatttggatgccttttatttttttctctcacatgattgctcctgttaggacttccagtactatgttaaataggagtagtgaaagtgggcatccttgtcttgtaccagttcttagagaaaaaggctttctgatttccccatttcgtataatgttaattgtgggtttgcaatatatgacctttattatgttgagagatgttacttctatgcatagttcgttaagagtttttaccatgaagggatataaagttttataaaaagcattttctgcatctattgagataatcatagggtttttatccctcattctccttggtgtgatatatcacatttattgatttgcctaygttgaactattcttgcattcggggtataaatcccacttgatcacagtgtattatctgtttgaagtgctattggattcagtttgctagtattttattgagaatatttgtgtctatgttcatcagagatattggcatatagttttcttttttgttggtgtctttgtctggttttggtgtaaggatactgttggtcttgtagaatgagttagg

SEQ ID NO: 333773 - DNA, 653 bp, Homo sapiens
gcctctctcatgactagaattgcaggagtccaccatgggagtgtggaccactggggatttctcacttagtctttccccacactgggaagtktctcttggctctcagccaatcctggcccagaccatcctcacatccctttgcttctgtgcctgtagggtttcccatcacttttctgctgaagtccagtgttctcccttggatgctctatgtgaagtatgattatctacttactattttgtggaggaagcaagtggcaaatgtctctctagtcagccatcttgatgtccccatgaggatcagaagttttaatgtgacttgcatcatagagctttatgaaattcttatttaacctgcatcagataggatggtctatgatggtttcacacacatgaaaagaatttactgtttttttttaatttatttgttttctgtgatcaatgctgatgagaacattttgtactgcagaatccccccaacatttttatttattcattttcagtattgtttagcatggcattgattatgaacaaaatatttaaatagacacagacagaagcaaaaattataaaacacaaattcttgccttgatttatgacttcataataataactaataaaaacaatgactgcaccagttattgagcactgtctaa

SEQ ID NO: 333774 - DNA, 653 bp, Homo sapiens
gcctctctcatgactagaattgcaggagtccaccatgggagtgtggaccactggggatttctcacttagtctttccccacactgggaagtttctcttggctctcagccaatcctggcccagaccatcctcacatccctttgcttctgtgcctgtaggrtttcccatcacttttctgctgaagtccagtgttctcccttggatgctctatgtgaagtatgattatctacttactattttgtggaggaagcaagtggcaaatgtctctctagtcagccatcttgatgtccccatgaggatcagaagttttaatgtgacttgcatcatagagctttatgaaattcttatttaacctgcatcagataggatggtctatgatggtttcacacacatgaaaagaatttactgtttttttttaatttatttgttttctgtgatcaatgctgatgagaacattttgtactgcagaatccccccaacatttttatttattcattttcagtattgtttagcatggcattgattatgaacaaaatatttaaatagacacagacagaagcaaaaattataaaacacaaattcttgccttgatttatgacttcataataataactaataaaaacaatgactgcaccagttattgagcactgtctaa

SEQ ID NO: 333775 - DNA, 593 bp, Homo sapiens
catatgaactcatagccacaccctataccagcctcagggctcacaagggtccagggcctctctcatgactagaattgcaggagtccaccatgggagtgtggaccactggggatttctcacttagtctttccccacactgggaagtttctcttggctctcagccaatcctggcccagaccatcctcacatccctttgcttctgtgcctgtagggtttcccatcacttttctgctgaagtccagtgttctcccttggatgctctatgtgaagtatgattatctacttactattttgtggaggaagcaagtggcaaatgtctctctagtcagccatcttgatgtccccatgaggatcagaagttttaatgtgacttgcatcatagagctttatgaaattcttatttaacctgcatcagataggatggtctatgatggtttcacacacatgaaaagaatttactgtttttttttaatttatttgttttctgtgatcaatgctgatgagaacattttgtactgcaraatccccccaacatttttatttattcattttcagtattgtttagcatggcattgattatgaacaaaatattt

SEQ ID NO: 333776 - DNA, 512 bp, Homo sapiens
gctgatctctgctcagcaaacacaagtttccttcaagtggcaactccggaagtaccatgagaaccacagactcagtagcataaagagatactttttttctttctttttttgtttgtttgtttgtttgtttgtttgagacgaagagtcttgctctgtcgccsaggctggagtgcagtggcgcaatctcagctcactgctacctccgtctcacgggttcaagagattctcttgcctcagcctcccaagtagctgagactacaaggcatgagccaccatgcccgcctaattttttgtgtgtgtattttgagtagagacggggtttcaccatgttggccaggctggtcttgacttctgacctcatgatccacccacctcagcctccaaagtgctgggattacaggggtgagccaccacacccagccaagagatacttttcatagtctgtgtgtgtcagtataaatttttgccaactttcagtggtcttatggtatttctcatgatcatcaaaactg

SEQ ID NO: 333777 - DNA, 512 bp, Homo sapiens
gctgatctctgctcagcaaacacaagtttccttcaagtggcaactccggaagtaccatgagaaccacagactcagtagcataaagagatactttttttctttctttttttgtttgtttgtttgtttgtttgtttgagacgaagagtcttgctctgtcgcccaggctggagtgcagtggcgcaatctcagctcactgctacctccrtctcacgggttcaagagattctcttgcctcagcctcccaagtagctgagactacaaggcatgagccaccatgcccgcctaattttttgtgtgtgtattttgagtagagacggggtttcaccatgttggccaggctggtcttgacttctgacctcatgatccacccacctcagcctccaaagtgctgggattacaggggtgagccaccacacccagccaagagatacttttcatagtctgtgtgtgtcagtataaatttttgccaactttcagtggtcttatggtatttctcatgatcatcaaaactg

SEQ ID NO: 333778 - DNA, 512 bp, Homo sapiens
gctgatctctgctcagcaaacacaagtttccttcaagtggcaactccggaagtaccatgagaaccacagactcagtagcataaagagatactttttttctttctttttttgtttgtttgtttgtttgtttgtttgagacgaagagtcttgctctgtcgcccaggctggagtgcagtggcgcaatctcagctcactgctacctccgtctcacgggttcaagagattctcttgcctcagcctcccaagtagctgagactacaaggcatgagccaccatgcccgcctaattttttktgtgtgtattttgagtagagacggggtttcaccatgttggccaggctggtcttgacttctgacctcatgatccacccacctcagcctccaaagtgctgggattacaggggtgagccaccacacccagccaagagatacttttcatagtctgtgtgtgtcagtataaatttttgccaactttcagtggtcttatggtatttctcatgatcatcaaaactg

SEQ ID NO: 333779 - DNA, 512 bp, Homo sapiens
gctgatctctgctcagcaaacacaagtttccttcaagtggcaactccggaagtaccatgagaaccacagactcagtagcataaagagatactttttttctttctttttttgtttgtttgtttgtttgtttgtttgagacgaagagtcttgctctgtcgcccaggctggagtgcagtggcgcaatctcagctcactgctacctccgtctcacgggttcaagagattctcttgcctcagcctcccaagtagctgagactacaaggcatgagccaccatgcccgcctaattttttgtgtgtgtattttgagtagagayggggtttcaccatgttggccaggctggtcttgacttctgacctcatgatccacccacctcagcctccaaagtgctgggattacaggggtgagccaccacacccagccaagagatacttttcatagtctgtgtgtgtcagtataaatttttgccaactttcagtggtcttatggtatttctcatgatcatcaaaactg

SEQ ID NO: 333780 - DNA, 579 bp, Homo sapiens
cacctcctgacaattccgcaagaatgtgtgattgctttttagacactacacttgtagtggtttattatacaattttgttgaggcaaaagataaccaaggtagacatggactagaagtgggttgcttctttaacaaaaacctaacagtggatttaggaccaggtattactccacaaggaagtcattatagaagcctggagaaatgatgagaactgtggtgagaagctgaaaaagtgacaacctatgttatggagtagaaaaacatttgataaaaatgtgtgagattatattaaagataaagtatggatatgacaagtttrtagttgaggagtggaatcttagacaagatgtaaaaagcatgctctgtttggtttttgttaggttgcttgatttattttattccatttttttaccagctgcatttgataagaaattgcaaggaagagatacggtaaggaaataacccagtttgtaagcaaaatttagtgagtatataagaagccaattaatttcagcttgaaagatgaagttattttctaccaaatcgaaggtgtgaccattatgctttggctctatgtaa

SEQ ID NO: 333781 - DNA, 575 bp, Homo sapiens
ctccctatggcttctactcatttctcctggctctaatgctttggaaggctatacataatgtgtttaatccctcttctccatgacaactcttaaagtatttgaagatagcaatcatatcttctctaatctatctgcagttctctcaatgactctgaatatgagagttacatgttcccttatccttatcctctgaatgtgtttctatcccacttaacacgagggtccaagcacaaaaactagacagtttgataagtgccaaggaaagcagttctttctgtccttattgtgggcaaattattagtaaaagttgaagagtaattaccttacattatttgctcatatcaggtttataatgtaccaaattaaaatcttcttcagtgtctcctggttacacccatttttttctgcttatatttgtacarttggttaaaaacggaagaaaaaagatgtataaacaaagtaaagaggttcttcttgtgtaaatactcgccatagcttataatcgcttgtccctacaaaagagctttggagagacagttcactgaagcatattggcctaactgtgatgcaaagaa

SEQ ID NO: 333782 - DNA, 611 bp, Homo sapiens
cttttttcttttttttaaactgaaaaaactaagaattcttcagggtatactttcaacagataccactttctcttttaactctctacacgtgttgtaaaagaataagcagagtagaaacaaatgcccagttttagctgtgtgtcacacaggcctgaagctttcatgggagataatggcacattacacaataacaaatacgaaagctttccacatttcagtcactgggaacaaaaagcagtagcattgtctctttgaaatgtctaaaacatgacaatcttagtagttaatgaaacataaatactttttcttgtccaaaagtacactcagaaagctagtgctgataatgagactttctacagtgcaatccctgggcttttgatgtgrtagagtggttatacatctataacatgaagaaaggatgcattactttgtcaacaatttaccacaaaataaaaagcagtgtacaaacaacacaaacttagtgttcatcaaattatcttgtatagtcatgaatgttttcaaaatcaaaatgtttatttcccccaaaagtcttaatgtttattttgaaagaaagtcacacaacttttgaatttgacatttagggcaggcaa

SEQ ID NO: 333783 - DNA, 611 bp, Homo sapiens
cttttttcttttttttaaactgaaaaaactaagaattcttcagggtatactttcaacagataccactttctcttttaactctctacacgtgttgtaaaagaataagcagagtagaaacaaatgcccagttttagctgtgtgtcacacaggcctgaagctttcatgggagataatggcacattacacaataacaaatacgaaagctttccacatttcagtcactgggaacaaaaagcagtagcattgtctctttgaaatgtctaaaacatgacaatcttagtagttaatgaaacataaatactttttcttgtccaaaagtacactcagaaagctagtgctgataatgagactttctacagtgcaatccctgggcttttgatgtggtrgagtggttatacatctataacatgaagaaaggatgcattactttgtcaacaatttaccacaaaataaaaagcagtgtacaaacaacacaaacttagtgttcatcaaattatcttgtatagtcatgaatgttttcaaaatcaaaatgtttatttcccccaaaagtcttaatgtttattttgaaagaaagtcacacaacttttgaatttgacatttagggcaggcaa

SEQ ID NO: 333784 - DNA, 636 bp, Homo sapiens
aagttctggctatttctaagtttaataatatctgaaaagggtatctttaaaggtttaatcattctaaatttaaaggtaaggcaagatccccatattacaatgaggatctataaggaaatacgtaacattgttttggacattgtagaggttaaagaagttgtattataataacaaacttttaaaacttttacattgtgtcattattaatagtattcttattattactattatcgttgttattataagtatgtgtgcatatgggtgcctttcaaagcatcaaaaaataaatcttttcatttgttacttcactcagtagcctcttaacttcaccatcaaccaactaagcatttgagacacaaggcaattattcatgagaattctagaaacatttagccaagttatttaatctcaaaataagagaaaatgtggcacctgttttatctaaagcaaaatgkggcacaatctggaaggttgatctgggtacctcattcttgaggctttaaaagaccttaaatgaatgatgtatgtcaaatatgtaaggtgaatcaagtggtcaatgatataatggtaataggtataaactttaaactgactctaaaaccttgtgattaagagattcatgtttattttaataat

SEQ ID NO: 333785 - DNA, 613 bp, Homo sapiens
taggacatctcctacccttccaaaaaaccatgaacagaggcagctgcttaccttcatatgacagaggaagagacatttgggcttggtgcctctcttataactttgggtcaagcagctgtaggtagcactttcagaaatagttaaatttgacctgtgctaaattccaytgctgcaatccaggctctttgcttgagttagtggcagaaatgtttaggaaatgcttctgtattttagctctagaatgagtgaaagaaagaacactggaataaaaattgttatatcatcctttgttcttacagctcatcttcaatcagctttgaaactctatcaatcccacacctgaaattgctctcaaattcttccccctcatttactatctaattatctcagacctgaaatgttgaaaaagacttctaaaaatctaaaatttcccaaccattgtgccttcttcaaggagccttgcacattacttcaaagaattatcaggcatcagggtcagtgcccattctgcagggcaaagggggtggcaacactcccagagaggcaggcaagtttagaagatcacccttcgaaatgcaaaggaagggaaataaaaagatagcagatggcttta

SEQ ID NO: 333786 - DNA, 557 bp, Homo sapiens
actacaagccatcctcccgcctcagcctcctgagtagctgcgacaacaggcatgcaccaccatgcctggctagttttggtctgtttgttggtgttgttggtgttgttttgttttgtatcactatctcactatgttatccaggctgatctcaatctcctgggctcaactgatcctcctgccttggcctcccaaagtgctgggattataggcatgagctaccatayactggcccatgtgattttttaacagagcccagaactcaaaatgtttttataaaaatttttaattttaaaatattaggtactaactaaaataattttagaactcagtgcagagtcaccgatcaagttagtcagtgaaggcatgacttgatatgccttttccgtatacatacatggcaagaacgtaaatgataactagaatatttagaagggaaaatatatagttaggataaagaaaaaagaaatattaaatatctccaaagaatgtaaatgtaacacaaaaatcaaggaggtaaaattattttctccatgatgaagacttgcctttaatcattc

SEQ ID NO: 333787 - DNA, 595 bp, Homo sapiens
atagttggtttaatgtctgacttctacagtctaattgtgtgacttcaragaagttgcttcatttatctggctgtctctcaaatgcttcacctagtatctcatgcctgctgtgagatcaaatggggcattgtatatggaaaggaactgtaaatctccacacaaacataacatatcattgatgggaaacactggccttggtatcggcatgattctggaaaattgacaaatggttttatgagttgggctacttctaaaagacaagacaaaacaaaacaagaaaaattccctcagaagaattgtcttcctatgcttaggaccctttcatttctgaccaatagatttttgagattcttgagggtaagaaccatgtgtcattcattactcgtatctcattactgaatggattatttcaatttcagtaagtgttcagttaagaaaaaacacaagaatatatgtgtggaaatgcactgtttttccattatcatagattgccaaaaaataagctaatacttgaaggatgaaagagtatattaaatcactttcttcaagatccctttgaattttcattagatctgttgcttgactgcactattag

SEQ ID NO: 333788 - DNA, 595 bp, Homo sapiens
atagttggtttaatgtctgacttctacagtctaattgtgtgacttcagagaagttgcttcatttatctggctgtctctcaaatgcttcacctastatctcatgcctgctgtgagatcaaatggggcattgtatatggaaaggaactgtaaatctccacacaaacataacatatcattgatgggaaacactggccttggtatcggcatgattctggaaaattgacaaatggttttatgagttgggctacttctaaaagacaagacaaaacaaaacaagaaaaattccctcagaagaattgtcttcctatgcttaggaccctttcatttctgaccaatagatttttgagattcttgagggtaagaaccatgtgtcattcattactcgtatctcattactgaatggattatttcaatttcagtaagtgttcagttaagaaaaaacacaagaatatatgtgtggaaatgcactgtttttccattatcatagattgccaaaaaataagctaatacttgaaggatgaaagagtatattaaatcactttcttcaagatccctttgaattttcattagatctgttgcttgactgcactattag

SEQ ID NO: 333789 - DNA, 547 bp, Homo sapiens
taatgagattatgcatataatgtgtataagtgccgaatcaagtgaagacacatagcgaccattcagtacatgttagttgacttcctttttatgagttcataaatttttgttaatgaaaactgctataaaaggctatttttattatatagccacaaaaccctgatttttgaaattaattatactgttgctgacatgttactgcagaggaaagtagggaaaccaggcagggaagagtgtagtagggctgtgatactcatgtgggaaggtaggacagggagggttaaaaagtcacctatgaagttaaactgttttaaactacccacttcacaacatcagaccttcttccatatattgaatgcaaatcaactttctgattctgctcaatgacactaggaacttaaataccctgaaaacctgytccagatcttcgaggcaatttacctaaatgcgtgagcgagcccgtatataaaaggtgtcaagcaaccctaactcattaggctaatgattttcctgtttgagaaacagcatgatccagatgttagataat

SEQ ID NO: 333790 - DNA, 547 bp, Homo sapiens
taatgagattatgcatataatgtgtataagtgccgaatcaagtgaagacacatagcgaccattcagtacatgttagttgacttcctttttatgagttcataaatttttgttaatgaaaactgctataaaaggctatttttattatatagccacaaaaccctgatttttgaaattaattatactgttgctgacatgttactgcagaggaaagtagggaaaccaggcagggaagagtgtagtagggctgtgatactcatgtgggaaggtaggacagggagggttaaaaagtcacctatgaagttaaactgttttaaactacccacttcacaacatcagaccttcttccatatattgaatgcaaatcaactttctgattctgctcaatgacactaggaacttaaataccctgaaaacctgttccagatcttcgaggcaatttacctaaatgcgtgagcragcccgtatataaaaggtgtcaagcaaccctaactcattaggctaatgattttcctgtttgagaaacagcatgatccagatgttagataat

SEQ ID NO: 333791 - DNA, 573 bp, Homo sapiens
actgctcgggtgagtcatgcaccaaaatctcacaaatcaccactaaagaacttactcgtgtaacccaataccacctgtaccccaatagcttatgaaaaaataaaagattacagtgagagttcttaggaatttcaccgtattgcgttgtactgacctttttccctctgttcaaaatcttatctttcctacattgactacgagttttgaagatttttggtatacacaatgtccctttcttttgttagttatgggaaagggagattatttatttaggtttattatgctatttttaacgtagatttttcatcatgtttatattttatacttccatatattgagatatagtgctcaagttatgtgaaatctcaaaaagtactctagcaattacagtggcaaaattgcacaaattagaagattttgagttagagtcttgtctcggttactttttagctgtgggaaattaagtaagtctcttttcctttttgggtctgattkcccattaacaaaacatgagtgattgtaatgacaacaataacttcttcattgcatggctatgtgggagcatgaaaacat

SEQ ID NO: 333792 - DNA, 459 bp, Homo sapiens
ccttaccttcttaaataaataacgcaaggcagcagaattagtatcagtgtggaggtctctgctgacctggaaagaaagtctgttaggtatattttctgtaagaaatatgaagtttgcagtagagggaagtgaaaataaacaaggttttgtccagtgtcacagtccttggctgaaatattcaaaagactttttatgcttctgtatatgcaggcctgagtaggagtaccaagagccggtgggcaggacttagaatggcccakgaccgacctaccagctctgacctgatcaaaaactgacttgctcagggtttctggtttacagcccccaaaccatgaaaatttatcatactgcattgcattagtcttaatatataaaaacattatagttttacaaataacaataaaaaattacaataatagctgccatttactgagtagctaccatggaactctgctggga

SEQ ID NO: 333793 - DNA, 609 bp, Homo sapiens
agcagaaaatttagaacaggtgttccaagctggaatcatttgtaaaggagcaactaggcggcttggtactacctgtggctcctctcctcactaacccacacgtatccttcaccttggatttcagtctgtcttgtccaggcttctccaggtttctgcccaagagctgcataagccttctgctgctctaagacccttagaaggaaacagctgtcatgtttacttgccaatcctgtagcagagctctgagctagctgggtgcctgctgccagctcagtcctacaggcttgggcaccaggtcctgccctctgaatgtgctaagtaacacaaatctgaggatccatgaggtccttttattaacacagaaaagaaatgtgacctggatatacctgtgaagacaagtacagttgtcaagtccaggcacacagacgagactgtatgctcaacatttggcagaatttatctcattcaatcctcacaacagcccaattgtttaaattcctttgttatatttaatagatgagaaaactgagacgtggtgacagaactggtatgaattcccaggtctgatactaccagcagtactcrtaatcagttcaatgtggtgcaaaa

SEQ ID NO: 333794 - DNA, 594 bp, Homo sapiens
tcacctgacgtcaggagttcaagaccagcctgaccaacatggagaaatcccatctctactaaaaatacaaaattagctgggygtggtggtgcatgcctgtagtcccagctactcgggaagctaaggcaggagaatcacttgaggcgtgtgtgtgtgtttaagcaccaagattggagggaaatataccataaggaaagtgaagagaaattttaaaataaatacaggccaaatttataactttgcttaaaacaggttcttctgcatagaaatctcagtaattgtatccagacatccaggctcattaacaagactgggacataccttttggagatcaacattcagggaaaggcatgaggataagatgttttaaactatttccattaagggtatggttactcctctttttaaattatacttatgttctggtatacatgtgcagatgacgggttgatgagtgcagcaaaccaccacggcacatctatacctatataacaaacctgcatgttctggacatgtatcccaaacaaaccttgttatattatttgcaccatatagacttaattttgaaatatacaattattaaacatgtagagg

SEQ ID NO: 333795 - DNA, 566 bp, Homo sapiens
ttaccatgcttcttccctgttrttacctcctagataaccactattatgacttctgttgggtagattcattttgtattttccaaatcttatataaatgtgatcctatagtaaggctcatagattgattttgtgtctatcttctttctactctacattatgttactaaaattcaaccatgtatccgaagttattttctgtttatgcataatattacactgaaaatttatttatctattgttatgggtggcattgtgaacttcaaacagatatgttgaagtcctaacctccattacctcaaaatgtcaccttatttggaaataggattattgcaaatttaattagtttagattaggtcattagagtagatcctaatctaatctaactcgtatacttataagaagaggaagaaaagattcagacagaaatagaaacaaggagaagattgacctgtaatgacagaggtagagcttggagtgatgcattttacaagtcaaggaacaatagagattgctggaaaaataccagaatggagaataggcaagaaaggattctctcctaaaggattc

SEQ ID NO: 333796 - DNA, 566 bp, Homo sapiens
ttaccatgcttcttccctgttattacctcctagataaccactattatgacttctgttgggtagattcattttgtattttccaaatcttatataaatgtgatcctatagtaaggctcatagattgattttgtgtctatcttctttctactctacattatgttactaaaattcaaccatgtatccgaagttattttctgtttatgcataatattacactgaaaatttatttatctattgttatgggtggcattgtgaacytcaaacagatatgttgaagtcctaacctccattacctcaaaatgtcaccttatttggaaataggattattgcaaatttaattagtttagattaggtcattagagtagatcctaatctaatctaactcgtatacttataagaagaggaagaaaagattcagacagaaatagaaacaaggagaagattgacctgtaatgacagaggtagagcttggagtgatgcattttacaagtcaaggaacaatagagattgctggaaaaataccagaatggagaataggcaagaaaggattctctcctaaaggattc

SEQ ID NO: 333797 - DNA, 595 bp, Homo sapiens
ctgccacaactctttctgtgagtagcctggctccctggcctgctctttcactgaatattggtgtctgagtatgttattcatctgtcgtgcagcctgggtctgcaggtcagaccccggcaggattatgtgtaaaaaaatgtacataccttaaattgctaaaaaggtccacgattatccragtcttcagtgagtcataatctctttggcatcccgggtttttccttaatgttgatagctgctgactgattggtgtgattgttgataaaggttggggtgtctggggcaatttcttaaaaaagacaacagtatagtttgctgcatcaattgactcttccttttatgaaatattttctgtagcatgcagtgctgttttatagcattttactcacagtagaacttctttcaaaattgaaatcagtcctctcaaaccttcctggtgctttattaactacatttacataatattctaaattctttgttgccattttaacaaacttcacagcatcttcaccaggagtagattctgtctcaagaaatcactttctttgctcatccatatgagcaaaatcctcttctattgaagtatgatcatgag

SEQ ID NO: 333798 - DNA, 615 bp, Homo sapiens
tgggtctgcaggtcagaccccggcaggattatgtgtaaaaaaatgtacataccttaaattgctaaaaaggtccacgattatccgagtcttcagtgagtcataatctctttggcatccmgggtttttccttaatgttgatagctgctgactgattggtgtgattgttgataaaggttggggtgtctggggcaatttcttaaaaaagacaacagtatagtttgctgcatcaattgactcttccttttatgaaatattttctgtagcatgcagtgctgttttatagcattttactcacagtagaacttctttcaaaattgaaatcagtcctctcaaaccttcctggtgctttattaactacatttacataatattctaaattctttgttgccattttaacaaacttcacagcatcttcaccaggagtagattctgtctcaagaaatcactttctttgctcatccatatgagcaaaatcctcttctattgaagtatgatcatgagattgcaacaatataaccacattttcagactccacttctaattctagttctctttctaattctaccacatctgcagttactcccctgaaatctcgaacccctcaaagtcatccat

SEQ ID NO: 333799 - DNA, 595 bp, Homo sapiens
ctgccacaactctttctgtgagtagcctggctccctggcctgctctttcactgaatattggtgtctgagtatgttattcatctgtcgtgcagcctgggtctgcaggtcagaccccggcaggattatgtgtaaaaaaatgtacataccttaaattgctaaaaaggtccacgattatccgagtcttcagtgagtcataatctctttggcatcccgggtttttccttaatgttgatagctgctgactgattggtgtgattgttgataaaggttggggtgtctggggcaatttcttaaaaaagacaacagtatagtttgctgcatcaattgactcttccttttatgaaatattttctgtagcatgcagtgctgttttatagcattttacycacagtagaacttctttcaaaattgaaatcagtcctctcaaaccttcctggtgctttattaactacatttacataatattctaaattctttgttgccattttaacaaacttcacagcatcttcaccaggagtagattctgtctcaagaaatcactttctttgctcatccatatgagcaaaatcctcttctattgaagtatgatcatgag

SEQ ID NO: 333800 - DNA, 525 bp, Homo sapiens
gggtttttccttaatgttgatagctgctgactgattggtgtgattgttgataaaggttggggtgtctggggcaatttcttaaaaaagacaacagtatagtttgctgcatcaattgactcttccttttatgaaatattttctgtagcatgcagtgctgttttatagcattttactcacagtagaacttctttcaaaattgaaatcagtcctctcaaamcttcctggtgctttattaactacatttacataatattctaaattctttgttgccattttaacaaacttcacagcatcttcaccaggagtagattctgtctcaagaaatcactttctttgctcatccatatgagcaaaatcctcttctattgaagtatgatcatgagattgcaacaatataaccacattttcagactccacttctaattctagttctctttctaattctaccacatctgcagttactcccctgaaatctcgaacccctcaaagtcatccataagggctggaatcaacttctttcaaact

SEQ ID NO: 333801 - DNA, 564 bp, Homo sapiens
tgaaagtctgtttttgtagtctccttgatcaattttcttagctagatcttcttaatcacttgctgaagcttctccaacagaactttctgcttctccttgcatttttatgttatggagatggcttctttcattaaacctcatgaaccaatctctgccagtttccaacttttcttttccagcttcctatcctctcagccttcatcatattgcagagttacagccttgctctggatgaggctttggcttaagggaatcttgtggctgacttcatcttctactcagacaactaatcctttctctatctcagcagtgaggctgttttgctttatcattcctgtgttcactggagtagcacttttaatttccttcaagaatttttcctttgcattcacaacttggctgtttagcacaagaggcctaacttcttttggcctatctcactaggccaaaacatggcgttttgacatgcctttctcactaagcttaatcatttstaggttttgatttaaagtgaggttgtgatttaaagtcatctgtgtgactcctttttttccctttaacact

SEQ ID NO: 333802 - DNA, 611 bp, Homo sapiens
ttatgatgatttttaaatttgtattttcttgatgactaatattaaacatatcaacatgattattggtcctttcaatatatttttgtgaagtggttgttaaagtcattgctcattgttcttattgatttgtagttgttctctctatgctctaaatatgcggtctttgtcagatacatgtattgcaaacatttgtgatccctatatgcgttgccttttcactgtcttgatggtatgttttgattaataaawgttcttaattttaatgaagcctaatttatataaatgttttctagatgcctttgtgtcatttaaatctgtttgcttatattaacatcattaatgtcatctcctatggtattaagaatatcattaagatattctcctctagaatttttattttatatttaggactacaatcactctggaattgatttttgtatatagcgtgagatggggataaagatagttttttcccatcctttcttccactaaattgttgtaattcacatgactgtatatatatggacctgtatctctcagtctatttatctatcctttcactaatattattaattactacataatgtcttgctagctgttagaaaaagtct

SEQ ID NO: 333803 - DNA, 611 bp, Homo sapiens
ttatgatgatttttaaatttgtattttcttgatgactaatattaaacatatcaacatgattattggtcctttcaatatatttttgtgaagtggttgttaaagtcattgctcattgttcttattgatttgtagttgttctctctatgctctaaatatgcggtctttgtcagatacatgtattgcaaacatttgtgatccctatatgcgttgccttttcactgtcttgatggtatgttttgattaataaaagttcttaattttaatgaagcctaatttatataaatgttttctagatgcctttgtgtcatttaaatctgtttgcttatattaacatcattaatgtcatctcytatggtattaagaatatcattaagatattctcctctagaatttttattttatatttaggactacaatcactctggaattgatttttgtatatagcgtgagatggggataaagatagttttttcccatcctttcttccactaaattgttgtaattcacatgactgtatatatatggacctgtatctctcagtctatttatctatcctttcactaatattattaattactacataatgtcttgctagctgttagaaaaagtct

SEQ ID NO: 333804 - DNA, 570 bp, Homo sapiens
tttctttaaaaattttgtaatcaatttgtaaattttctcaataatttgcactgaaacttttaatgagactggattgagcatcaagattgcttggggaaacttgacatctttgtagcattaagcttcctaattcatgacattctaattctatttatattctctttaattgctctctgaggtatttttgyaccaaaaaataattcaatttaattcagtttcaacctcccatatattttaattaacttttcttttcttttatattcttgacatctttatgtattaagtaatatagcctccttgaatacttggaaatgctttctgtttctaatttccagagtattttatacaacattggtctttgttttaaacactagtgaaatgaatcagtaatgttatatagacctatagttacgtttgtgtaaaatttctagagtacagattaaatttcattgtatgatacagggctaattagattttcgatttcttcttgtgtcagatttgataagttacatgttttaaggaatttgtttgatcccaagtatcatactttttgacatgaagttattcata

SEQ ID NO: 333805 - DNA, 475 bp, Homo sapiens
caagccattcttctaagtcggttaattgactttccattctttgatgtttctaattttttttttctataggtagttttatttcctatggactacaatccccccatgcatgccattctgttgctataatgtttttaccttgagcggattaagttattaaattatcctattacctaattaaatccacatgaatgtttaaatgctaatttaatcaatactttaattgtcaaataaaatttaaaatacttaatataattatattcttttkttatttagttaggtttggtatttacttttttgattttttcatagatacataatatttgcacacatttatgggttacatgtaatattttgttacatgcatagaatgcagagtattcagggcatctatcaccttgggtatttatcatttttatgtgttgataacatttcaaatcttctcttctagctattttgaaatatacaatacattgtt

SEQ ID NO: 333806 - DNA, 521 bp, Homo sapiens
tttataaaatatttggcaacattaaaataatatgtcttctttactgggagaaatctgccactgattttctaagcgaagaagcagaaagcacatgggaaaaaatgatgtcactgccatcttgacacgtttgaaatcacaaattatagaaaagttgtattcctgatygaagaatcactagtattacaggagttattaagaaattattttaggcagcaagagaggggaaaagagtccttggtaaggctttttcttttaataaaaaagcaagccccaaaacatttcttttctaacagaaagtggcctgaaaaaccagacctgcaagcattgatatgcaaatgctggtggctagaagccaggtccaaccaatatggtggttcccgtgactttttctttgttgccacgtatgcagaacatcatggtgaccagccaggtagccatatgtgcatatttaaaggctagggtgggagagctggcttttttgcaggctatgtgaatgacacacctggtcaaaccaatcccct

SEQ ID NO: 333807 - DNA, 499 bp, Homo sapiens
aaaccagcttttctgttcatggggaaaattagccattgcataaggcggggaaaagttctgaagcaactgagaatttctggccagggcatttcctagtgttattcaaaagcttctggaccggactcagcctccagcagcctgcccaggtgttggtaaaagatccccagttatcctgtcgcaaaactttttttctgtttctatccrcggtcgctatgcctcttattctctttgtgtgtcgaatgtgtgggaatttttacagcctagggaagtaatcctgttaggcaagatcaggaaatgctgtaataaccggggctatagctcaggaaaatgctgttgcaatcttctaggaacagaggtctctgaaaccccggttgtgagatgagtccctactatgctgctggtggcacatagtattcctaagccaacagcgccacctagtggaaatagacaccctcttcataagacgcattgcttgtcggctgcagtccaccgcagcttc

SEQ ID NO: 333808 - DNA, 602 bp, Homo sapiens
tacatcagtcatagtacttggccattgagaaaggagcttagccacaaatcacacaaccgctatcaaattgcatgccctgtatcccaactcatcaagctgtttagtgtctggtctttctgattaagatctagtagaaactcaggaatagaacaggcaagatttaacccaagcagagcatcctraatcaacctagtcaagattcaggtctcatttacttaactttcttctgtaatttgggcagaggagggtggaactgatgaaagacacttgattcatgtctggactgaacttacactacttattgttttctactccttgactacttatacagcagaggcagccctaaagtctaatgttcccagaggcaattgacatatttgatggcatttggcctaagacacagcataaataaaaccatgctgacttgtactatattaaaaccatagagagagagaaaaaaatcaatgtttctccaaatagtaaaggttgaaacccatgaaggaaaaaactaatattatccaacattgagtaaaggcaacacaaacactgtaagtgttttaaagtacttttatagctatagatgcaaataaatagtttttaaa

SEQ ID NO: 333809 - DNA, 624 bp, Homo sapiens
ctacctagttacctcgatttcagaagacagcagttaggtaatgtagtgctaaagttgatttggtgagtgcatgatacagtagtgtcagcaaaaaaagatcgatgtcaaagtcattgtagaatctctgaggagtacacatggatcaatatttgtgtaaaccatagactttcatcttcttgtaggagtcttgtaagaaagtgaagccagttcttctgagatgttttaccactttcccaatgaattgtaaattatcacagtcaaacaaaatactaaaatgctcctttttttttttcaacctaaagacccttggaacattaactaccctggaaaatcattaaacaaataaagccctctttgactcttaacaaagtgggcttgagtcaagatctatgtgcctcagggcatgttgactatgctgatactgtgtgtacaaagtggggccaaccargagccatgaaactagtcagtcccagtcccatctccaagtggtgatcgaggacatggaacaaattaccaagttcttcttcagcccaggtaactcctacatgagatagctcctatggagtcctcacaagcataaagctcccagtctccttagatgtaatcagtaaatagatcagtaaa

SEQ ID NO: 333810 - DNA, 624 bp, Homo sapiens
ctacctagttacctcgatttcagaagacagcagttaggtaatgtagtgctaaagttgatttggtgagtgcatgatacagtagtgtcagcaaaaaaagatcgatgtcaaagtcattgtagaatctctgaggagtacacatggatcaatatttgtgtaaaccatagactttcatcttcttgtaggagtcttgtaagaaagtgaagccagttcttctgagatgttttaccactttcccaatgaattgtaaattatcacagtcaaacaaaatactaaaatgctcctttttttttttcaacctaaagacccttggaacattaactaccctggaaaatcattaaacaaataaagccctctttgactcttaacaaagtgggcttgagtcaagatctatgtgcctcagggcatgttgactatgctgatactgtgtgtacaaagtggggccaaccaggagccatgaaactagtcagtcccagtcccatctccaagtgstgatcgaggacatggaacaaattaccaagttcttcttcagcccaggtaactcctacatgagatagctcctatggagtcctcacaagcataaagctcccagtctccttagatgtaatcagtaaatagatcagtaaa

SEQ ID NO: 333811 - DNA, 624 bp, Homo sapiens
ctacctagttacctcgatttcagaagacagcagttaggtaatgtagtgctaaagttgatttggtgagtgcatgatacagtagtgtcagcaaaaaaagatcgatgtcaaagtcattgtagaatctctgaggagtacacatggatcaatatttgtgtaaaccatagactttcatcttcttgtaggagtcttgtaagaaagtgaagccagttcttctgagatgttttaccactttcccaatgaattgtaaattatcacagtcaaacaaaatactaaaatgctcctttttttttttcaacctaaagacccttggaacattaactaccctggaaaatcattaaacaaataaagccctctttgactcttaacaaagtgggcttgagtcaagatctatgtgcctcagggcatgttgactatgctgatactgtgtgtacaaagtggggccaaccaggagccatgaaactagtcagtcccagtcccatctccaagtggtgatygaggacatggaacaaattaccaagttcttcttcagcccaggtaactcctacatgagatagctcctatggagtcctcacaagcataaagctcccagtctccttagatgtaatcagtaaatagatcagtaaa

SEQ ID NO: 333812 - DNA, 624 bp, Homo sapiens
ctacctagttacctcgatttcagaagacagcagttaggtaatgtagtgctaaagttgatttggtgagtgcatgatacagtagtgtcagcaaaaaaagatcgatgtcaaagtcattgtagaatctctgaggagtacacatggatcaatatttgtgtaaaccatagactttcatcttcttgtaggagtcttgtaagaaagtgaagccagttcttctgagatgttttaccactttcccaatgaattgtaaattatcacagtcaaacaaaatactaaaatgctcctttttttttttcaacctaaagacccttggaacattaactaccctggaaaatcattaaacaaataaagccctctttgactcttaacaaagtgggcttgagtcaagatctatgtgcctcagggcatgttgactatgctgatactgtgtgtacaaagtggggccaaccaggagccatgaaactagtcagtcccagtcccatctccaagtggtgatcgaggacatggaacaaattaccaagttcttcttcagyccaggtaactcctacatgagatagctcctatggagtcctcacaagcataaagctcccagtctccttagatgtaatcagtaaatagatcagtaaa

SEQ ID NO: 333813 - DNA, 602 bp, Homo sapiens
tcagtatatttttgctgtctcattgtcatgtaaatgtttgcaagaatgtgcaaagtgctcctgsagactcttgaacaataccattctgtgaatctggttgttattggttgtgagccctcatattttagcctcttgctaatttttattccagagaagctttagcatgtatcctttagatctacaataggtcaaggcataattattgtaggtgctttgttcttgtgtttcttccatgtattagtccattttcatactgttatagaggagatactacctgatacttggtagtttatggatgaaagaggtttaattgacttatagttctgcatggctgtggaggtctcagaaaacttaccatcatggcaggtgaaggaaaagtaagcaccttcttcacaaagtggcaggagagagagagtgagcaaaggggaactgccacactttaaaaccatcggatctcatgagaactcactgactgtcacgagaacagcatgggggaaaccgcttcatgatccgatcacctccaatcaggtcccttcctccacacgtagggattacaattcaagatgatatttgagtgagggcacaaggcctaaccatatcat

SEQ ID NO: 333814 - DNA, 602 bp, Homo sapiens
tcagtatatttttgctgtctcattgtcatgtaaatgtttgcaagaatgtgcaaagtgctcctggagactcttgaacaataccattctgtgaatctggttgttattggttgtgagccctcatattttagcctcttgctaatttttattccagagaagctttagcatgtatcctttagatctacaataggtcaaggcataattattgtargtgctttgttcttgtgtttcttccatgtattagtccattttcatactgttatagaggagatactacctgatacttggtagtttatggatgaaagaggtttaattgacttatagttctgcatggctgtggaggtctcagaaaacttaccatcatggcaggtgaaggaaaagtaagcaccttcttcacaaagtggcaggagagagagagtgagcaaaggggaactgccacactttaaaaccatcggatctcatgagaactcactgactgtcacgagaacagcatgggggaaaccgcttcatgatccgatcacctccaatcaggtcccttcctccacacgtagggattacaattcaagatgatatttgagtgagggcacaaggcctaaccatatcat

SEQ ID NO: 333815 - DNA, 594 bp, Homo sapiens
tccacatttttttaagttgggatccaacactgtcatagtagatatcactttagtaaattctaagttttttctataacatactattacctttaatcactgtagcaacataatttattaaataatgtttctctttactcaaactggctaaaagkgccttacatgaaatcctcaagaagaacaatatggaagccatctgcagtagaccatgcaatagaccaagaactttattaataatagaccataagctagaataaaataattaaaatatagcaattggaaaaaaatgttatgggcaacaaactgaaaaccattttattttaaaataccctaggtgtggatattgtatttaaaaataccctcgctgagaaatagcaaccagagttatcttgcatataccaataaaagatgaaggtggctttcatattatgattttgttcttaagaaaattgttaggcaatttatggatagagccacaagccatcacaagtaacaaatggatttaattattatgagagtaagtcgactgtttcattgcattcatggacttaaatcatatgttatttccaaaagagattcaacatggattaaaacaaa

SEQ ID NO: 333816 - DNA, 594 bp, Homo sapiens
tccacatttttttaagttgggatccaacactgtcatagtagatatcactttagtaaattctaagttttttctataacatactattacctttaatcactgtagcaacataatttattaaataatgtttctctttactcaaactggctaaaagggccttacatgaaatcctcaagaagaacaatatggaagccatctgcagtagaccatgcaatagaccaagaactttattaataatagaccataagctagaataaaataattaaaatatagcaattggaaaaaaatkttatgggcaacaaactgaaaaccattttattttaaaataccctaggtgtggatattgtatttaaaaataccctcgctgagaaatagcaaccagagttatcttgcatataccaataaaagatgaaggtggctttcatattatgattttgttcttaagaaaattgttaggcaatttatggatagagccacaagccatcacaagtaacaaatggatttaattattatgagagtaagtcgactgtttcattgcattcatggacttaaatcatatgttatttccaaaagagattcaacatggattaaaacaaa

SEQ ID NO: 333817 - DNA, 432 bp, Homo sapiens
gttgggttttgcagcactcggggtcaaattaaagggaatgtatgtgccctcaatgaaaagggcggtgaagtwtcaatcacattttcagccttagtcaggttgaacagtgacagcatcacactgaactctgacagaaaaaaaaaattggcttgatctcttgatctcagtcatgctaaaggcaaaaaattccagggacattgatatgattccttagagattcagtgatatttgtctgagtggtaaccatcctaatcttataaaattcccactttaattcattgtctatgtcttcagtaaaatgtatgattgtatgcataatttttttttcaaaattatgttactgattccaggagagcaaaatgattatttttggatattgagagaactgtcatgacaaagattttggtaaaaatcaagctgtgaatgagtaga

SEQ ID NO: 333818 - DNA, 432 bp, Homo sapiens
gttgggttttgcagcactcggggtcaaattaaagggaatgtatgtgccctcaatgaaaagggcggtgaagtttcaatcacattttcagccttagtcaggttgaacagtgacagcatcacactgaactctgacagaaaaaaaaaattggcttgatctcttgatctcagtcatgytaaaggcaaaaaattccagggacattgatatgattccttagagattcagtgatatttgtctgagtggtaaccatcctaatcttataaaattcccactttaattcattgtctatgtcttcagtaaaatgtatgattgtatgcataatttttttttcaaaattatgttactgattccaggagagcaaaatgattatttttggatattgagagaactgtcatgacaaagattttggtaaaaatcaagctgtgaatgagtaga

SEQ ID NO: 333819 - DNA, 563 bp, Homo sapiens
ctcacattttcattttgcactggatcttcaaattaggtacccaktccctatgctgtaattccaagcatagcagaaaaatgaagcaatgtcaaaaaatgtatgtaattcctctgctgcaattttcataaaattatatgggaagtaaatcaaaatcgacctctttagatataatactagtttttcaaacaggaatgtgtgcaatcttgggagaatagttctgtacttatatccctaaagtcttctatggtatcttaactgttatgaaaaaatatctgaccaaaaaatagggagaggatgtgataaaattaggtaatttgatttatatttcctgtggtggttgattttatatgtcaattaagtaggctacagggtacccagttatttgccagccattattctgagtgtttctgtgaagatatttttggatgagattattaaatctggcagactgagtaaagcatattgtccttctttatgtgggtgggcctccttcaagcaattgaaggtcggaatagaacaaaaaggcagaccctgccccacataagagggaattcctctttcct

SEQ ID NO: 333820 - DNA, 550 bp, Homo sapiens
gccatagtcagttttggtagcattgaaagaccagaaacttttaggactacaagacataattcctgcttaaaatctattcaccyggcctggcacagtggctcatgcctgtaatcccagcactttgggagaccaaggcaggtagatcaccagccgtcaagagttcaagaccagcctgaccaacatggtgaaaccccatctctactacaaatacaaaaaattagcttggtgtggtggtgtgcacctgtaatcccagctactcgggaggctgaggcaggagaatcacttgcactcaggaggtaaaggttgcagtgagctgagatggtgccattgcactccagccttggcaacaagagcaaaactccactcaaaaaaaaaaaaaagtatatatatgtatatatattttcccttgaagaaaaatttgatttcctttgaagaaaattgattatcaaaacaaaaccccctctcttaaatgttttgttattaatatttctcatcatgtcaacagtacagagaagagcataattactctcatgtaccaactaactagctt

SEQ ID NO: 333821 - DNA, 520 bp, Homo sapiens
gttttttctaagaatctgtaagcatagtgaaagaatgtggccttaaggtgatcaacattagtttctttcctgttggcaattgcgggtgctacttacattaaattactgctctaatcttttaaaattaagatttctaaggtaatggattccttattttaaaagtggttttgtgtttacaaaaaaaaaataataagctgctggtatggagttgtcatatactctcctagcccatacaccctttcccctattattaacatcttgcattaatatggtayatgttacaattaaagaaccaatattgacacattattatcaagtaaagtgcatatattaaggttcactctgtattatacagttttgacaaatgcataatgtcatgtatctaccattataatatacagaatagttttgccactctgcaaatctgtgctccacctgtcttcctcccaacccctgtaaactcctgccaactgcagatgtttttactgtatcgaaagttttgccttttgcagaatgtcat

SEQ ID NO: 333822 - DNA, 395 bp, Homo sapiens
atgagacttattcactatcacgagaacagcacaggaaagacctgccctgtgattcaattacctcccactgggtccctcccacaacatgtgggaattcaagatgagattagggtggggactcagccaaactgcatcatacgtcaaatactacctttctgtcattacctatatcttctacttcataaactttccattayatgtcagtctatccctcatgtttcttctcttatctttcacatttttttttttacctatttatatttcttcatagtggtctgggttaattcctcagtatagtctttcaattctcttattttctctgtgtctttgcctaaactggcatgcatctcataatttaattttaatgtagatattttcatttccaaaattaataa

SEQ ID NO: 333823 - DNA, 395 bp, Homo sapiens
atgagacttattcactatcacgagaacagcacaggaaagacctgccctgtgattcaattacctcccactgggtccctcccacaacatgtgggaattcaagatgagattagggtggggactcagccaaactgcatcatacgtcaaatactacctttctgtcattacctatatcttctacttcataaactttccattacatgtcagtctatccctcatgtttcttctcttatctttcacatttttttttttacctatttatatttcttcatagtggtctgggttaattcctcagtatagtctttcaaktctcttattttctctgtgtctttgcctaaactggcatgcatctcataatttaattttaatgtagatattttcatttccaaaattaataa

SEQ ID NO: 333824 - DNA, 583 bp, Homo sapiens
aaaaatgacctaagaacatacaagaacttggtgtatggtagaattggcagtatggatcaggggaaatctttaggcataaactgaatataactgctgactaatacttaaaataagaggccaaccatgtcattttgaagacatttatttgyaggtgccaatatagagtgagtcaagatatatgaaatagaatgaaacacaccaaattgttgccgttgggaaatggtagaggggagaagggtggggttgggaagtgcatgggaggaaaaacaccagaaaatttaattttaaatgttaatttttaaattgttcaataaacaaaatatttgaagcaaaaatggaaaatatgaaaatgtgtttactgtagttgagtggtagtaagaaacccctataattttctgtattttaaactatttaatagagaaagagcaaaaaatgcttcttaagcctcagaaatatataatttactctgccaaaggccttggcaatgtaggttttgaaagcaaactgttcactaaactttaaaaaaataaccatggtaaccactgcaccatgctacaaagtgctcaatggacctattgtattt

SEQ ID NO: 333825 - DNA, 583 bp, Homo sapiens
aaaaatgacctaagaacatacaagaacttggtgtatggtagaattggcagtatggatcaggggaaatctttaggcataaactgaatataactgctgactaatacttaaaataagaggccaaccatgtcattttgaagacatttatttgtaggtgccaatatagagtgagtcaagatatatgaaatagaatgaaacacaccaaattgttgccgttgggaaayggtagaggggagaagggtggggttgggaagtgcatgggaggaaaaacaccagaaaatttaattttaaatgttaatttttaaattgttcaataaacaaaatatttgaagcaaaaatggaaaatatgaaaatgtgtttactgtagttgagtggtagtaagaaacccctataattttctgtattttaaactatttaatagagaaagagcaaaaaatgcttcttaagcctcagaaatatataatttactctgccaaaggccttggcaatgtaggttttgaaagcaaactgttcactaaactttaaaaaaataaccatggtaaccactgcaccatgctacaaagtgctcaatggacctattgtattt

SEQ ID NO: 333826 - DNA, 596 bp, Homo sapiens
agtttgttattgtttcctccagaaatctcactcaaattgactatgcagagatttttttaaatattataagctcacagtggcaaaakaataaaagaaaaaagccccaatggtactgtctatttttggaggttggaaagtggagagaggaatggtagctaacttagctagccagaggaagtcatcagaggtgagaaacaagttcatttccacagaacccagaaagccttcagaactggagatgccaggcatgaaggaaggcaaagtaaaagatggggctgaaaacaaaagagtcaattaaaagtcttttaaggaacagttccccatatctatcacagccagtcaggtattacacctccagtaaggagaaaggagatttattctctgccaaaagggggtacgccaggcactgtgcagagggattaagcaaatctacccactaattggtaaaactccccctcgtccagttcccagaactctgaatgctaggactaccagttgacaagcttcctctagtctgtctcaccagatacacccccacagattccagtgaaagcagaaaaaccatacctcatgcacacattaatagtctcagagag

SEQ ID NO: 333827 - DNA, 588 bp, Homo sapiens
ggtagggaagactttcttaaacaaaactcaaaatgcactaagaaaagattgataaatcaagaaattttgttcctcaaaagacactatactaaaaatgaaaagagaagttccagactgggaaaagatttttgccacacatacaaacaacaaaatatckaaggcaaagaaccagaaatcattaagaaatagataagcattgcaatgaaaataggcaaaggatgtgaacaggcatttcacagaaaaaaatacatatcatcaacatagatatttgaaaacaatatctactttattattgatcagggaaatgcaaatcaagaaaacattagatattattttatatccattcaaattgacaaaaattaagaaaactgataataccaagtgtaggagaagatgcagttcaacaagagctcttctgtatttctgataggaatacaaattggtacatcactttgaagattagttcaacatcattttgtaaagcttaacatttcacatagcctttgacaagcaataacacttctcaatgattgtgtgcatatgtacctttgtatcagaagacatatacaagaatattcatagcaacac

SEQ ID NO: 333828 - DNA, 589 bp, Homo sapiens
tattggaatgactgtccaagagttagtgagcagtrtcctgtcccagagctgcggtcagggatggcagggagtggagtccttggcttagtcaattttgtgctgctataacagaacacacaagactgggtaatttatgaagaacagaaatttatttctcatagttctggaggctgggaagactaagataaaggcaccagcatgtgatgagggccttcttgctgcattctcacatggcagaaggcagaaaagggcaagaggggatgattctccctcctcttgagccccaggagtggtactgcatgtctttctctcctcacatacagaggtttagacagcttgctcaaatttgccattgtcatcgtcttactcctccccttcctcttcttcctccttctcctcttcttctttctcttcttttcctcttccttctcctcctcctctttctcctttctcttcttttcctcttccttctcctcctcctctttctcctttctctctcctttgctggggccggacatgcaccactctcatgaaggcagctggtgatagaggcaggctatcccagacaccactgcctagcacaaggccc

SEQ ID NO: 333829 - DNA, 589 bp, Homo sapiens
tattggaatgactgtccaagagttagtgagcagtgtcctgtcccagagctgcggtcagggatggcagggagtggagtccttggcttagtcaattttgtgctgctataacagaacacacaagactgggtaatttatgaagaacagaaatttatttctcatagttctggaggctgggaagactaagataaaggcaccagcatgtgatgagggccttcttgctgcattctcacatggcagaaggcagaaaagggcaagaggggatgattctccctcctcttgagccccaggagtggtactgcatgtctttctctcctcacatacagaggtttagacagcttgctcaaatttgccattgtcatcgtcttactcctccccttcctcttcttcctccttctcctcttcttctttctcttcttttcctcttccttctcctcctcctctttctcctttctcttcttttcctcttccttctcctcctcctctttctcctttctctctcctttgctggggccggacatgcaccactctcatgaargcagctggtgatagaggcaggctatcccagacaccactgcctagcacaaggccc

SEQ ID NO: 333830 - DNA, 510 bp, Homo sapiens
atgttgagcacctttttaatacccgttggccatttatatgtcttcttttgagaaatgtatattcaagtcttttgactatttttaaatcagtttatttgcttttttgctcttcagttgtatgagttccttgtgtattttggatatttatcccttatcagttatatggcttgcaaatattttctcctattccataagttgccttttcattttgttgattgctttctttgttgtgcagaagattttcagtytgatgcaatcccattagtttatttttgaaatatcagccacccttcattcctcctatccctccagccctgacaaccactagtcttcttcctgtttctgtggatttgctgactctggacattttatataaatggacattttatacaaaccatacaataggtggccttttgtgtcttgcttcttttacttagcataatgttttaaaggttcatctatgttgtagcatgtatcagaccatcattcccttttatggctgaataatat

SEQ ID NO: 333831 - DNA, 510 bp, Homo sapiens
atgttgagcacctttttaatacccgttggccatttatatgtcttcttttgagaaatgtatattcaagtcttttgactatttttaaatcagtttatttgcttttttgctcttcagttgtatgagttccttgtgtattttggatatttatcccttatcagttatatggcttgcaaatattttctcctattccataagttgccttttcattttgttgattgctttctttgttgtgcagaagattttcagtctgatgcaatcccattagtttatttttgaaatatcagycacccttcattcctcctatccctccagccctgacaaccactagtcttcttcctgtttctgtggatttgctgactctggacattttatataaatggacattttatacaaaccatacaataggtggccttttgtgtcttgcttcttttacttagcataatgttttaaaggttcatctatgttgtagcatgtatcagaccatcattcccttttatggctgaataatat

SEQ ID NO: 333832 - DNA, 325 bp, Homo sapiens
acttttgcccaatttttaattgggttgtttgtctttttatggctgagttgtaatgtttctttatgtattctggatactagatcctttcagatatattatttatgaatattttcttccattctatgtgctttgttttcactttcttgacagtgtcctttgatacacgaaaagttttagttgcgatgaaatccagttaatttctcttttcttttgttgcttgtccttttagtgtcatctgactgcctttttaaggcagtggttcttgatctttcctatcctatraccactccaaccccaactccaatcacactattgaagatctttg

SEQ ID NO: 333833 - DNA, 648 bp, Homo sapiens
ttaaattaattcataaatgcaaaggactaagggtgatgctcctttagagcagtttttgacaagtaatgtgtacttattaaaggctttrtttatatattttaatattgtatttggttaaaagctcaggcttctcatgtgagaagcccaggggcagatctcaagggctcaagttccattccacaggaagttctcacagatgttaaaatatgcacagagcagactgggatatgtgaggtagcaaagactcctgtaccatagcagtgtctctagtaaaatttggatatagaatttggagcagacataaaaatatctgaaaataaattcttagaattaataagtgacatcatttatatagaccagcaacaaacaaatagaaaaaatttacatgataaaattgacaattgcaacaaaagcatcaattatgtagaatttagtataaaaacgatgtatacaaccttcataatgaatgctacagggcattactgatagaaattttaaaagacctagagaaatggagatatatatcatgttcacagattgaaagagtcaatattgtttagatgttaattctcccaaaattgatctacagatccaatatgattccaataaaaataacagtaggttgtgtgtgtgtaaattgacaagctg

SEQ ID NO: 333834 - DNA, 546 bp, Homo sapiens
ggtctctttgccttcttgaaccctctaggcggcttccaaccttagggtccttgcatgggctattccctttgttgtaaatgcccttcccccagacaaccacacggtgtcctctctcagcttcttaaaaaaattataattttttttacttccacataatcagtggaagcatttagtcattctattaatcatttatttcatgtttaactcttattacatctaaatttaaaagtattgctaagaagttgtgaaggtttgggaaggaggagtctctagattctcgttctttttaaaaaatactttctaaaaattaaaaaaagtttcaatagcttttgaggtacacatggtttttggttacayggatgaattgcatagtggtgaagtctgagattttagcactcctgtcacctgggtagtgtacattgtacccaatatgtacactaccctgtacatattgccctgcttttgagtctctatagttcatgataccactcactatgcctttgcgtatccataccttagctcctgtttataagtaagaatatacag

SEQ ID NO: 333835 - DNA, 559 bp, Homo sapiens
gcacacacgctactatagattgactctgtatgtccctttcccaaattcctgtgctgaaattgccacacacaaggtgatggtattatgaggtggggccttggggaggtgattaggtcatgaggatggggccctcatgaatgggattaatgcctacataagaagaggccccccggacaggtgccgtggctcacacctgtaatcccagcactttgggaggccgaggtgggtggatcacgaggttaggagttcgagaccagcctggcaaacttcgtgaaacgccatctccactaaaaatacaaaaattagccgggcatggtggtgtgtgcctgtaatcccagctactcagggggctgagacaggggaattgcttgaacctgggaggcagaggttgcagtgagccaagatcatgccacygcactccagcctgggtgacagagcgagactctgtctcaaaaaaaaaaaaaaaaaaaaaaaaaaagaaaagaaaaaaaaaaagaagaggcctcagagagctcccttaccccttctgtaatgtgacgacacaggggaaaaacagcta

SEQ ID NO: 333836 - DNA, 578 bp, Homo sapiens
cttcatttgtacacacaagctgctgaggctcacatacgtggaaaggaagttggttgcttatgttagttgctccccaggagacagtgatatcaggatatatgaagcctcctccatgattccaagaaattgctagagaatggttgaaggggctacgtttctgcaaaggcgtggggcataaactgtcatggaaatctcagcataagtgggaatgtggttccatcctrtctgcctagtgaagctaggaaatatttgggtttcggaaagtaagctagaaaactccaagtatgctgtgtgaccatgaagtaacaatacaaatataatgttaactaatgcaaatctgatcctgccactcccctgcgtaaaacccttcagggactccccttagctaaattctatgtaaggtcctcttcatccaccactctctcccctctctggagtaagagtggtagtaccttctccagatcaaccatgctggactccttttagccccaggacactccatgctctcctttgcctccaggcctttgcacatgctgttctcacttcctagaatcctcaccccacacccatccctgtta

SEQ ID NO: 333837 - DNA, 578 bp, Homo sapiens
cttcatttgtacacacaagctgctgaggctcacatacgtggaaaggaagttggttgcttatgttagttgctccccaggagacagtgatatcaggatatatgaagcctcctccatgattccaagaaattgctagagaatggttgaaggggctacgtttctgcaaaggcgtggggcataaactgtcatggaaatctcagcataagtgggaatgtggttccatcctatctgcctagtgaagctaggaaatatttgggtttcrgaaagtaagctagaaaactccaagtatgctgtgtgaccatgaagtaacaatacaaatataatgttaactaatgcaaatctgatcctgccactcccctgcgtaaaacccttcagggactccccttagctaaattctatgtaaggtcctcttcatccaccactctctcccctctctggagtaagagtggtagtaccttctccagatcaaccatgctggactccttttagccccaggacactccatgctctcctttgcctccaggcctttgcacatgctgttctcacttcctagaatcctcaccccacacccatccctgtta

SEQ ID NO: 333838 - DNA, 578 bp, Homo sapiens
cttcatttgtacacacaagctgctgaggctcacatacgtggaaaggaagttggttgcttatgttagttgctccccaggagacagtgatatcaggatatatgaagcctcctccatgattccaagaaattgctagagaatggttgaaggggctacgtttctgcaaaggcgtggggcataaactgtcatggaaatctcagcataagtgggaatgtggttccatcctatctgcctagtgaagctaggaaatatttgggtttcggaaagtaagctagaaaactccaagtatgctgtgtgaccatgaagtaayaatacaaatataatgttaactaatgcaaatctgatcctgccactcccctgcgtaaaacccttcagggactccccttagctaaattctatgtaaggtcctcttcatccaccactctctcccctctctggagtaagagtggtagtaccttctccagatcaaccatgctggactccttttagccccaggacactccatgctctcctttgcctccaggcctttgcacatgctgttctcacttcctagaatcctcaccccacacccatccctgtta

SEQ ID NO: 333839 - DNA, 578 bp, Homo sapiens
cttcatttgtacacacaagctgctgaggctcacatacgtggaaaggaagttggttgcttatgttagttgctccccaggagacagtgatatcaggatatatgaagcctcctccatgattccaagaaattgctagagaatggttgaaggggctacgtttctgcaaaggcgtggggcataaactgtcatggaaatctcagcataagtgggaatgtggttccatcctatctgcctagtgaagctaggaaatatttgggtttcggaaagtaagctagaaaactccaagtatgctgtgtgaccatgaagtaacaatacaaatataatgttaactaatgcaaatctgatcctgccactcycctgcgtaaaacccttcagggactccccttagctaaattctatgtaaggtcctcttcatccaccactctctcccctctctggagtaagagtggtagtaccttctccagatcaaccatgctggactccttttagccccaggacactccatgctctcctttgcctccaggcctttgcacatgctgttctcacttcctagaatcctcaccccacacccatccctgtta

SEQ ID NO: 333840 - DNA, 260 bp, Homo sapiens
ctagaatcctcaccccacacccatccctgttaactggctaattcgtatttctctttctcctctcagattaaatgtcattgcctgagaggtctctccttgaccctgactccaagactaacttaggtcccaaggacaaatgtttcctggtcttccctttcacagcacttgtcccatgggtaattcttcatcaatcacctcttttccctgctggarttttacaatctgtcccagtgaggataacatcagttctgatcaacact

SEQ ID NO: 333841 - DNA, 595 bp, Homo sapiens
atgatccccttgttataaaattattcattgatagcttgatgctttctacctttacatgtatataaagagayggttggtgtcttagtctgttttgtgctgctacagcagaatatctgagactgagtaatttataaaaaccataaatttatttaccacagttctggaagctgggaagcccaacatcaaggtgctggcatttggtgtctggtgagggccttcttgctatggcctcatgtggtagagggcagatgggcaaaaagggatgaactccctttgtctaagttctttcatagaggcacttaaccccattcatgacagccctcattgactcaatcacctcccaaaggccccacttcccaatactgctgcactgaggattgagtttcaacataaattttggaggggacacaaacattcaaaccatagcagctgggttgttgttcaccagatgttgactgtatttgtttcttttctgggtgacaaaatccttggtgatttatttgtttcttcattgtaattcttaaattgcttcaatttttatagtatgcattatctgctttataaaaacaaagtcattattcttcttaaaaattaa

SEQ ID NO: 333842 - DNA, 595 bp, Homo sapiens
atgatccccttgttataaaattattcattgatagcttgatgctttctacctttacatgtatataaagagatggttggtgtcttagtctgttttgtgctgctacagcagaatatctgagactgagtaatttataaaaaccataaatttatttaccacagttctggaagctgggaagcccaacatcaaggtgctggcatttggtgtctggtgagggccttcttgctatggcctcatgtggtagagggcagatgggcaaaaagggatgaactccctttgtctaagttctttcatagaggcacttaaccccattcatgacagccctcattgactcaatcacctcccaaaggccccacttcccaatactgctgcactgaggattgagtttcaacataaattttggaggggacacaaacattcaaaccatagcagctgggttgttgttcaccagatgttgactgtatttgtttcttttctgggtgacaaaatccttggtgatttatttgtttmttcattgtaattcttaaattgcttcaatttttatagtatgcattatctgctttataaaaacaaagtcattattcttcttaaaaattaa

SEQ ID NO: 333843 - DNA, 496 bp, Homo sapiens
cttatagcagtaaagggatggggatttgggttggggaaggggcttgtctttcctaaagtgtctgaggatgaccctgatgagagatctgactggaataactggctatagtccccctgctgcctaatagccccaaatttgcaatgcagtagcaagraatctattctcggcaagggctgccaggaagtttgtggaaggctggcaagagctttgcttacctggtgagaggagtggcaacaagttggttgggttggtggcaaaggccttttatttgtgtattaatggacaatatatttctaaaaactaaaaatagcaaacacatatagcagtttctatgtgccagacactgttttgaaatgttttgcacatatactcagtccccacaacaactctaggaagtaggtcaagccccactatgcagtttggacactagggcacagtgatggcaaatgactgagtcacagcctcacagcttgtacatagcaaagcagggacgtaa

SEQ ID NO: 333844 - DNA, 553 bp, Homo sapiens
gacccttaagccctttggcctgccagcctctcgtctcttgggctgccctggctgtccatggcctcagcagctgccaccaccacctgtccctgagctcacaggatctcatgtatgacctcacatgttcctcacaggctttcattccttcatccaaatgcatttattgagtcctcacaattagccaggcactgagctgagccctggggttttcagaggccctgcgcacagggcgctgctatgaaccaacccctcatttccacagtgmggagggtgctggcacctctccagcattcctgagtttccccaagccctgggtctgcctctcccagtgctgcttttaccaggtttcctgggggcagtctctctttcaaaaagctgtcagctcagctggacctctggcctttggcatatgctccagccccagccagagaggagggtattgcccttctcctgccagcaagtcctccagccctgccaaaagccccatcttgaaccccaggttcccacacatgtgccctccccacctcaccaccccagctactgctacacacca

SEQ ID NO: 333845 - DNA, 404 bp, Homo sapiens
tgattccatttctacgaaatgtacagaatgggaaatccatagagatggaaagtagatgaatgggtgccaggractgggatagtgagaatgggaagtgactgcttcatgggtacagggtctctttttgggataatggaaaagttctggaactagatagaggtgatgattgcacaacattgtaactgtactaaatatcattgaattttacactttgaaatgctaaatttcttgttatgtgtattttaccactaaaaaaaaaaaaataaaaaaaataaaaaagccagcattcgtttccttttgtccttggccattctacactcttactctgccttcagagtccagctccagtcttagtgccgctcctgcaaccttgtctcctgtccccacaaggccaggcttgcttt

SEQ ID NO: 333846 - DNA, 568 bp, Homo sapiens
gttcatacagtggaaatgaataacttcagctacccacaccaacatggatgaatctcacaagcatcatgttaagtgaaagaagctgatgattctgttcatacaaaattcataaacaggcaaaattaaactctgttgtttagagatgtacacagagatggctcaactataaagaaaggcaagtaatggttactctaaaagtcacagtagtgttcactcctggtaggggatgagggagattattaccatgggaggtgttatgagctgtgtcatatcccccccaaatttatatgttgaagwcctaatccccagtacctcagaatatgaatgtatttggagagagagcctttaaagaattgattaaattaaaatgaggtcattagggtagaccctattccaatatgactggtgtccttatgaaagaaaaggagattaggacacacacactaagagagaagaccaagagaagacacatggagaagacaccatctacaaaccaaggagaaaggccccaggaggaaccaaccctgcccacgccttaatcttggacttcaagtctccagaattggga

SEQ ID NO: 333847 - DNA, 612 bp, Homo sapiens
atttaggtgcgatcacgatggctgtggaaaagcatttgcagcaagccaccaccttaaaactcacgttcgtacacatactggtgagtttaggccaatttttgtttcatcaagcctgtaactatcaattttccattgagacctgtagagctaggtggatatacagagatatagaycctgtatatattcaggtgagcataattagctcagccttacctagaatgtttgggtttctttcagaggcggacctcaggtattcaaccttaagagatgaaaccaatacagagacactctaaaaaaaaacaacctgtgagaaacaaatctactctttaaacttcccagcagtaggcattcccaatgctttgctcagcattgagtttgaggactgagatgattaatgtgtaatttattgaacttttaacaactgttacccaaactctcttaaaaatacttacttacctctattagggaaaggtagatttcttaatccagtgaaatgactttatggtaaattaacactactttgttattcttgcaggtgaaagacccttcttctgccccagtaatggctgtgagaaaacattcagcactcaatacagtctcaaaagtcacatg

SEQ ID NO: 333848 - DNA, 360 bp, Homo sapiens
gtgaagcttggtccaggtttcctgaaactctgacaataacaatcttttcacaatatttatcgtgtctacatcaaactttcagggtcacttacatrctcctttaactccttttacttttgaattcaagtaaatgtattccaaagggaagttataaaaatggaaaaactaggacaatttggatttagaagttaattgtgaaaatcaaataatgaaaggagtcactactaatgaattccatgtggagactattgtttgcagccagttctggggctttttcttctgtgttagaacagatagttgggaggtcttacagaaggattagagacgtatgcaccccagagtaagcctttctccttaaga

SEQ ID NO: 333849 - DNA, 360 bp, Homo sapiens
gtgaagcttggtccaggtttcctgaaactctgacaataacaatcttttcacaatatttatcgtgtctacatcaaactttcagggtcacttacatgctcctttaactccttttacttttgaattcaagtaaatgtattccaaagggaagttataaaaatggaaaaactaggayaatttggatttagaagttaattgtgaaaatcaaataatgaaaggagtcactactaatgaattccatgtggagactattgtttgcagccagttctggggctttttcttctgtgttagaacagatagttgggaggtcttacagaaggattagagacgtatgcaccccagagtaagcctttctccttaaga

SEQ ID NO: 333850 - DNA, 551 bp, Homo sapiens
caagagcaatagatgcaagagctctgtggggttggtggtgtcactaccacctggggctaaagggagctgggcacgctgtttcaagggataagacggtcccgcttattatgtacagactacatggtctrtaaatgtgattggagttgaattctttagagtgtgtagtgttaaagaaaaagtgattctgacagattaaatcggtaaagatcattcaaaactactgcaataggggagagagatcaggctcaactcttgaatacattaaggactagtggggatttataaccaagcagcatggtgaggggggtcagtggatagaaaattgctgaggagatatcaaagataaagggagatatcaaagataaagggagttcttttcaaaccagtttaacaggatcattgctgaaggaaggtcaaaggtgagggatgaggaacttgatcaaatatgaaggaattcttactaactgatgtatgacttactcatcctgactttgcaggattcttgctaagactgagctagacatttggaagacaggccaggggccaaggtc

SEQ ID NO: 333851 - DNA, 551 bp, Homo sapiens
caagagcaatagatgcaagagctctgtggggttggtggtgtcactaccacctggggctaaagggagctgggcacgctgtttcaagggataagacggtcccgcttattatgtacagactacatggtctgtaaatgtgattggagttgaattctttagagtgtgtagtgttaaagaaaaagtgattctgacagattaaatcggtaaagatcattcaaaactactgcaataggggagagagatcaggctcaactcttgaatacattaaggactagtggggatttataaccaagcagcatggtgaggggggtcagtggatagaaaattgctgaggagatatcaaagataaagggagatatcaaagataaagggagttcttttcaaaccagtttaacaggatcattgctgaaggaaggtcaaaggtgagggatgaggaacttgatcaaatatgaaggaattcttactaactgatgtatgacttactcatcctgactttkcaggattcttgctaagactgagctagacatttggaagacaggccaggggccaaggtc

SEQ ID NO: 333852 - DNA, 551 bp, Homo sapiens
caagagcaatagatgcaagagctctgtggggttggtggtgtcactaccacctggggctaaagggagctgggcacgctgtttcaagggataagacggtcccgcttattatgtacagactacatggtctgtaaatgtgattggagttgaattctttagagtgtgtagtgttaaagaaaaagtgattctgacagattaaatcggtaaagatcattcaaaactactgcaataggggagagagatcaggctcaactcttgaatacattaaggactagtggggatttataaccaagcagcatggtgaggggggtcagtggatagaaaattgctgaggagatatcaaagataaagggagatatcaaagataaagggagttcttttcaaaccagtttaacaggatcattgctgaaggaaggtcaaaggtgagggatgaggaacttgatcaaatatgaaggaattcttactaactgatgtatgacttactcatcctgactttgcaggattcttgctaagactgagctagacattkggaagacaggccaggggccaaggtc

SEQ ID NO: 333853 - DNA, 548 bp, Homo sapiens
gtgttgacaaatctgtccagagctgtgctgtccaacaccacagccactagacacaggtgactatttaaacttagtcaaagttaaattaaaaattcagttcttgagtgtgttagccacatttcaaatgttcaataaccacatgtggctastggttaccataatgggcggtgcagaccctgaatgtttccccactgcaaaaagctctgttggacagtgctggtccaggatcaccctccctagccaaagtcaggtctcctgacctgcattctcctccatttctcctggaccatattaagtatggccaactatgcagaaacatttgagatagccggccttcatcctttcctatcaatctctgccaaatttttcccatttaaaaaagaaaagaatccagtctgatggctctgatgaaaatttaaaataaataaaaatttcttaaaaagaaaagtttaatatttttaatgaaaaccctctaacatgacatatatataaagccatcatctgagagtcctaaacataacaggaaggaatataaaggtttagagtcc

SEQ ID NO: 333854 - DNA, 559 bp, Homo sapiens
tttcctcctctgtagaatgggggaggcagttcctgttcccattttaccacagccggcgtgctgtgaggggatgttggtacatttccaataaggggacaatgagtgtgaagagaaaggaaggccccaggtggtccgtaaactcttccaccagtcccacactataaacagctggttttatcagggggattcttggatgacaagtaagcacttaagtaaatatcaaggggagtytgggcaactgagtttttgtagatcctcgtgtcattgtgttatactggagccaatagtaagctgacatttggaaaaggaataactctgagtgttagaccaggtatgttttaatgaatgttatttgtttccaaacataagccaccatccttagaaattcagtgaaagataaccgaatctcctgcccagttattagcatctttcaccatgggtctttctggagaaaatgacaatgtgggcagcccctgactgcagcccctttgggactgtttctttaacacctttaagtacttgggaatgttcagtgtgtttttgttaatgttggagatat

SEQ ID NO: 333855 - DNA, 588 bp, Homo sapiens
gaagcagaccaggaaagacaggaaagccctcaaatttccacttttaaacacctccctgtaaaaactgtctcgcttccctccccttctacaatcagtttctagtaaatcagaatccggtgaattgatatgcaatttcaacgaaaaaaaaagcagagaaatagttaccccaacaagtgcaaaaagtagaaactatctgagtaccagccaagggaagataattaggaaagaaaaaaaaagaaagaaatggattactggaaccatgatggcagcttagtcacaaagaaaatgataaaaaaaaattaaaattaaatttcaaaaactttaaagatatatacatatatatatatctatatatatatgatatattgtcctctggaactccagcactcacctacagcagctgcattctggacttattatcaaataacctataaacctgtagyttaatgaagagttgagcaatcgtgactatattgacccccaggacccttctgcaaagagcagcttctgttcctgtttctgtaaagccttctgtggctgtgagaatagtggaggtagcaactataaactgacatttggaaaaggaac

SEQ ID NO: 333856 - DNA, 553 bp, Homo sapiens
gagtaccagccaagggaagataattaggaaagaaaaaaaaagaaagaaatggattactggaaccatgatggcagcttagtcacaaagaaaatgataaaaaaaaattaaaattaaatttcaaaaactttaaagatatatacatatatatatatctatatatatatgatatattgtcctctggaactccagcactcacctacagcagctgcattctggacttattatcaaataacctataaacctgtagcttaatgaagagttgagcaatcgtgactatattgacccccaggacccttctgcaaagagcagcttctgttcctgtttctgtaaagccttctgtggctgtgagaatagtggaggtagcaactataaactgacatttggaaaaggaactctcttaaccgtgaatccaagtaagtttgaagggagtgggggaagggggrattcaaacacttctgatttaattacttgcccctccaaaacattccagcttaggttccaaatctaatgtttgtgctggggggatatggtgcccatcagagggattagaact

SEQ ID NO: 333857 - DNA, 570 bp, Homo sapiens
ccccggtctcctaagtgccctgatgttgagtaaaggccaaatgccccagttttacttactcagatctgctttctgtgattaagaagagatgcacactagagagaggcactttgaaaaacacagcccaggcaaaattcttaaaaagactggctctggtggcggggcgggtggtgaaggactcagggacaccgtgcatgcagcattgagggagttaatgcagacttgctagcagacagcttggaacgttctgggataggccctgcctgaagaacatgcagtgtggttagccatcaagttcccatgtgcagaagtgccttgctcagcaggggcaaaatcagcacgtctgtggcaacagcaacaatgaataatatatgatgttaaatcccaggggttcagcagtctccactgaggtcttatcaaattaaagcttcaaggggattcatatgaacatcccaggagactcaaggactcagtcgcttttcagagggtgggcagccaatgctagggaccagacagtaggcttttttctttggtttcttaccggaarcacactagggcggggctctgcgg

SEQ ID NO: 333858 - DNA, 547 bp, Homo sapiens
gggatgttgtgtgaattggggaataatagagaagtgaggaggagacagggagttcaatgatgctttttaaaaccagcagcatgtgagaaattgtaatgacacaaaggtgaagaagtatgtattgcatataatcytagcaagtttcctaccattcccaacagaatctagcctcactgtggctccaactcacagatcctataggtaatgctgaatcgtacctgagatgccttttgaagtggcatcaagactgggctctaaaatctttaagagtcacctgtcagttattgtaaaggtttggatggctgtgtgaaaacctcctacgacaaggtgatatttgggccagggacaagcttatcagtcattccaagtaagtgtccctggggtgctgcctgtggagtgcgctggggctaacagtctcatacattagggcttaaatgactgtgcagatggcatcgtggttgaggacacaaaactgagagaatcgagatacattgactctgatcagaaaaaaaggtcacggaatagcaaacataggtttagtccttaa

SEQ ID NO: 333859 - DNA, 547 bp, Homo sapiens
gggatgttgtgtgaattggggaataatagagaagtgaggaggagacagggagttcaatgatgctttttaaaaccagcagcatgtgagaaattgtaatgacacaaaggtgaagaagtatgtattgcatataatcttagcaagtttcctaccattcccaacagaatctagcctcactgtggctccaactcacagatcctataggtaatgctgaatcktacctgagatgccttttgaagtggcatcaagactgggctctaaaatctttaagagtcacctgtcagttattgtaaaggtttggatggctgtgtgaaaacctcctacgacaaggtgatatttgggccagggacaagcttatcagtcattccaagtaagtgtccctggggtgctgcctgtggagtgcgctggggctaacagtctcatacattagggcttaaatgactgtgcagatggcatcgtggttgaggacacaaaactgagagaatcgagatacattgactctgatcagaaaaaaaggtcacggaatagcaaacataggtttagtccttaa

SEQ ID NO: 333860 - DNA, 611 bp, Homo sapiens
ttttaccacgtaagtatatcttttctcatttctgtgggctgttatgtccgtaaatcatatagaacagttcttcttatgcacacacacacacacacacccattttccagtcactgaggagaaacagtctctgggtctacctacacagccagtttgaccattaagatggtcaaattcatttttcaagataattttaactggttccatttaatgctgccaacagccaagggcattagcatgtcgtgggaacctaatctatgttcactcactgctgtgggaggacagtcatttcttcttctcccctggcagtcagacttcagaatccagctgaccttttccatgcctgtctcttctggcagattaagtggttatttccactaactttcttgtggaaaaacacacaagacagatatattctccttcagtttttactaagaaagytttgtggttatcattttgacaataaacttcagctagcatagtccctactattcatgttaataatatcttgacttgaaccatcatattttccccacatcattcacaatgcatttcaatgctgtaacccactgcaccatccccagcccttttatcttcacaacgttctctaata

SEQ ID NO: 333861 - DNA, 622 bp, Homo sapiens
accccaggggagaaaaagactactgtgggaaaatttagttgagaaaatcaaattgttctcaactaaatgctgcaggctttatgcttctgtgaacccagtttcccagttattcattgaccctgaacatacgtttacctgtgcaaatacaatctctcctaayctatttatacaattatgtgtctgccggtccaaatgccttcttctataggccatgtttttatttctcttccaaaagagactccagagccatccttgggaagagtgctgagaagtcaggcaggcctaactcccaggggtcagggaggggaaagagaaggctaagggtaacttagctcagtactagaactgtgatccacgtatctgtcactctatttcctacgtttgcttcccttttgttttctctagaataagttctttttgtttgctctggacacccactgctcccaggatgaaaggagagaaatgagatcagttttgaacacttcctcttgaaatataaagaatcaacaagttacagtcatgttggggacttcttctctctccaagcttaaatttctattacgtaagccttacttttaaccaagaaagttagtgacatggtatcactgtctgggatgctcac

SEQ ID NO: 333862 - DNA, 622 bp, Homo sapiens
accccaggggagaaaaagactactgtgggaaaatttagttgagaaaatcaaattgttctcaactaaatgctgcaggctttatgcttctgtgaacccagtttcccagttattcattgaccctgaacatacgtttacctgtgcaaatacaatctctcctaacctatttatacaattmtgtgtctgccggtccaaatgccttcttctataggccatgtttttatttctcttccaaaagagactccagagccatccttgggaagagtgctgagaagtcaggcaggcctaactcccaggggtcagggaggggaaagagaaggctaagggtaacttagctcagtactagaactgtgatccacgtatctgtcactctatttcctacgtttgcttcccttttgttttctctagaataagttctttttgtttgctctggacacccactgctcccaggatgaaaggagagaaatgagatcagttttgaacacttcctcttgaaatataaagaatcaacaagttacagtcatgttggggacttcttctctctccaagcttaaatttctattacgtaagccttacttttaaccaagaaagttagtgacatggtatcactgtctgggatgctcac

SEQ ID NO: 333863 - DNA, 541 bp, Homo sapiens
atcccagctactcgggaggctggggtgggagaattgcttgaacccaggaggcggaggttgcagtgagccgagatcacaccattgcactccagcctgggtaacgagagcaaaactccatctcacaaaaacaaaaaagaaaaaaaaaagtgcagattaaactgctcagtyataatctcaatgaactagtatcacttaagaatggcaaaccatgacccacatagccacaaccaatttttataaataaagtgatagtggaatatagccatgcccatttgtttaaggaaaagcttgcggactcctgactcagtgtgttatcagttaggcagagagctaataagaaacatacaggcccaagcttttcaccaagttcctaggtaatcttgagacatgccaaactttgagaaccactgctgtagatgagagattctcaaatcttattgtgcacataaatcacctgaggaccttgttaaaatgaagatgttgcttctgtaggtttggggtgaggcctgtgctcccaggcgatgccaatactggtagtcaa

SEQ ID NO: 333864 - DNA, 541 bp, Homo sapiens
atcccagctactcgggaggctggggtgggagaattgcttgaacccaggaggcggaggttgcagtgagccgagatcacaccattgcactccagcctgggtaacgagagcaaaactccatctcacaaaaacaaaaaagaaaaaaaaaagtgcagattaaactgctcagtcataatctcaatgaactagtatcacttaagaatggcaaaccatgacccacatagccacaaccaatttttataaataaagtgatagtggaatatagccatgcccatttgtttaaggaaaagcttgcggactcctgactcagtgtgttaycagttaggcagagagctaataagaaacatacaggcccaagcttttcaccaagttcctaggtaatcttgagacatgccaaactttgagaaccactgctgtagatgagagattctcaaatcttattgtgcacataaatcacctgaggaccttgttaaaatgaagatgttgcttctgtaggtttggggtgaggcctgtgctcccaggcgatgccaatactggtagtcaa

SEQ ID NO: 333865 - DNA, 541 bp, Homo sapiens
atcccagctactcgggaggctggggtgggagaattgcttgaacccaggaggcggaggttgcagtgagccgagatcacaccattgcactccagcctgggtaacgagagcaaaactccatctcacaaaaacaaaaaagaaaaaaaaaagtgcagattaaactgctcagtcataatctcaatgaactagtatcacttaagaatggcaaaccatgacccacatagccacaaccaatttttataaataaagtgatagtggaatatagccatgcccatttgtttaaggaaaagcttgcggactcctgactcagtgtgttatcagttaggcagagagctaataagaaacatacaggcccaagcttttcaccaagttcctaggtaatcttgagacatgccaaactttgagaaccactgctgtagatgagagattctcaaatcttattgtgcacataaatcacckgaggaccttgttaaaatgaagatgttgcttctgtaggtttggggtgaggcctgtgctcccaggcgatgccaatactggtagtcaa

SEQ ID NO: 333866 - DNA, 609 bp, Homo sapiens
atacaggcccaagcttttcaccaagttcctaggtaatcttgagacatgccaaactttgagaaccactgctgtagatgagagattctcaaatcttattgtgcacataaatcacctgaggaccttgttaaaatgaagatgttgcttctgtaggtttggggtgaggcctgtgctcccaggcgatgccaatactggtagtcaatgactacattttgagtagcaagaatccagagcagtgtttctccaatttgctgtgctctggaatcacctgggtagctttacaaactacagaagccaccccaagmgatttttacttaattggtgtgggttgtggcctggacgttgggattttctttttacattacccaagtcatgctaacgtgcagccaagttggagaagcttgaaactcatcattctcggtagttggctaaatttaagtagtggcattctcaacatagcttccgccccatatatagcaacccaacagcacccaagatgaaaacagggctgcgaacatgacagacttcagccagcagacctacattccacccaagctttgtcatgaactctgatcttaagcaagtcacaaatctgagtttcaatttcttcac

SEQ ID NO: 333867 - DNA, 609 bp, Homo sapiens
atacaggcccaagcttttcaccaagttcctaggtaatcttgagacatgccaaactttgagaaccactgctgtagatgagagattctcaaatcttattgtgcacataaatcacctgaggaccttgttaaaatgaagatgttgcttctgtaggtttggggtgaggcctgtgctcccaggcgatgccaatactggtagtcaatgactacattttgagtagcaagaatccagagcagtgtttctccaatttgctgtgctctggaatcacctgggtagctttacaaactacagaagccaccccaagcgatttttacttaattggtgtgggttgtggcctggacgttgggattttctttttacattacccaagtcatgctaacgtgcagccaagttggagaagcttgaaactcatcattctcggtagttggctaaatttaagtagtggcattctcaacatagcttccgccccatatatagcaacccaacagcacccaagatgaaaacagggctgcgaacatgacagacttcagccagcagacctacattccayccaagctttgtcatgaactctgatcttaagcaagtcacaaatctgagtttcaatttcttcac

SEQ ID NO: 333868 - DNA, 665 bp, Homo sapiens
ggtctgaccttgagtaaacgcctaggctggtgggtttctatccctgcagcatctaaagcggacgcccaggcttcactgaccccagcagtctggctttctgcccttgccgcccaggaggtgcagctcttggcacacaccatccttagtgtcttgaaagaagagaaattaaaagagaaagggggaaaagcttatatctcatatcatgcagttgcctcattttgtagcaagattgtttccccatgagcagtttgtcttcattcagcagctgtcttctctggggaagccattttgtagaggtgtttgtcacagtgtgacaactgacagctgggggaaattscagtttggagcagggacccaggttgtggtcaccccaggtaagccccattccctggagcctcacctgcccttagtatttggcatgccctgcatgccaaatatttctagccgagactatgagaaacacatctgaaaggaagccatttccctgaacagcagtacccaaagccattaagcaaaaatgagagatcagactggtgttaaatagaaacgtttttggataaatagtaattctcattattctctatcagtctcctgtgtgaatacccttatttcccttataaggaaaaaagttacaataagcaggatagccatgattcatgctgtgg

SEQ ID NO: 333869 - DNA, 555 bp, Homo sapiens
accataattaatagcttgctgggcttgaaagaaatgtccaggggaatgttttactttctaagatgacttttccaagaggaaatttgcaatgctttaaaggacttagggaggcagaatattagagctggaggacatgcaggtagttcagctcctttttaaaaatgaagaagctggtgtccatagaaattaggagacttgcccaagatcacagaggtctagaacaggattctctcccagcacagaaccccttgtgcttcacccccatcaagttgacagagaccgtcctagccaggttaagttcatggctgaatgtcttttctgctccttgcctcaatttcccacyccagcccttacctcccgcatagttttgagcacatacagtgtgccaggcaccatttccagtgtttacttgtaacatttttggtgaagaaggaaagcaaagtaattctcccaccaaggactctctgctgagcagtctatgatgctgttccttgggtagcgtttctcctgaactctgctttgtacagtaacaggacaatgtgggatccaggtgtt

SEQ ID NO: 333870 - DNA, 682 bp, Homo sapiens
gtgtattaggtcgtctgcttcttaataataagtataaaaagataagatgagaaaatataacacaacttgccacaaaaaccagaaccactttgaaacattgtctggttattgcttttcctttagacagcaggctgaaatatataaggaggttacagagctctgtttcaaagactagactattatggcctgtactgctttctaaagcataagctgtttgatgtctcttctaattagaattgttgaactaccaagaaggttaatttttaccataaggtttttgtagtgtaaaactaaagagcagtgtaaaactaaagagatatgagattgttctgtctgtaggccatatctactgatttgttcattaccgagtctcctaaaatactgcttctgcttcaaaccaacaatatttgctataaatcagaaagaggttaaattaaaccctgtcagttttttgagtagtgaagacatgaattggaagtggtaaatggtaatagatgatttatgcttctgccttcttcctgatggttaccttggaattttgattgggttgattttaragaaattgaaatgttttcataatagaagtgaggcaaatttagctgccaacaatgtggatttgcttagtcttagactcttatattattattccccaaagctaattattatcatctcattttgacta

SEQ ID NO: 333871 - DNA, 546 bp, Homo sapiens
ctagcctgggcagtatagcaagaccctgtttctaaaaaagaaaaataaaaaaataaaataaattggccaggtgtggtgtttcacacctgtaatcccagcactttgtgagactgaggtggaggatcacttgaacccaggagtttgagctgtgtttgtaccactgcactccagcctgagcgacagagagaggccttgtctcccctgtcccccccmaaaaaaattaagatagttttctttttacctagatttctttgaagtaataattttgcatctagtaatagtacatttttttcttttttaaaagtagacttaatttttttagagtagttctaagttcatagcaaaattggacagaaagtacagagatttcccatattcccccttcccctacacataaatagcctcccctgttatcaacatccctcactagtgtggtacatatatatctgttgatgaaccttccttgacagatccttaatacgcaaggtccatagtttacattagggttcaatcttgctgttatacgttctatgggtttggactaat

SEQ ID NO: 333872 - DNA, 589 bp, Homo sapiens
ccagttggccttaaaattggtcttatttttttttaattaaacaacaaagagaccaagtgtggtggcttacccctgtaatcccaatgttttaggagggcaaggatggaggatcacttgagatcaggggttttgagaccagcctggaatacacagtgggacactgtctctacaaagaaaacaactagctgggcatggcgatgtgtgcctgtagctcaaagtactctggggactgaggcaggagcatggcttgagctcaggagtttgaggctgcaatgagccacgagcatgcyactccactccagcctgggtgattcagagggactctggctctaaaaacaaacaaacaaacaaacaaacaaacgaatccaaccactattcacagattgtatttggttgttatatcttcttaatatcataatctaaaatagattccccagttttttcatgatattggacttctttcatgattggttttatgatacagaaccagaaatcttgttctatagatagtctcacattctggatttgacgttttctatgtggtacattttacttactcctctattctatttcctgttaactaaaagtt

SEQ ID NO: 333873 - DNA, 589 bp, Homo sapiens
ccagttggccttaaaattggtcttatttttttttaattaaacaacaaagagaccaagtgtggtggcttacccctgtaatcccaatgttttaggagggcaaggatggaggatcacttgagatcaggggttttgagaccagcctggaatacacagtgggacactgtctctacaaagaaaacaactagctgggcatggcgatgtgtgcctgtagctcaaagtactctggggactgaggcaggagcatggcttgagctcaggagtttgaggctgcaatgagccacgagcatgctactccactccagcctgggtgattcagagggactctggctctaaaaacaaacaaacaaacaaacaaacaaacgaatccaaccactattcacagattgtatttggttgttatatcttcttaatatcataatctaaaatagattccccagttttttcatgatattggacttctttcatgattggttttatgatacasaaccagaaatcttgttctatagatagtctcacattctggatttgacgttttctatgtggtacattttacttactcctctattctatttcctgttaactaaaagtt

SEQ ID NO: 333874 - DNA, 345 bp, Homo sapiens
tacagccttgggccagctgaaacacaaaggcatgtggcaggctgaggccccagcctgcccatacctgctggctttctggatgagttcctgtgaagccttaaggacctggggctctgtttttaaccccctagttctcacccccactacttgaaggaatttgaatgagccactgcttcttatactctgaagggcctgtctaaagctgcattcattggtggaacaggcacacaccactgctaggcgctacccctagaagtctggacgggctccctagatgcaagggtctcaaacacaccagtcctccagcgccttaytctgcctacttggaagcaattgcaggggaag

SEQ ID NO: 333875 - DNA, 482 bp, Homo sapiens
caatggtaatttgggaatatgcttctttaaatctctgttgagaagaagataaatcagaaggctttttaagggggtgagtctgcttggccaaagcttgtcattgtttaacaagaacaggctgtcacttagagctgtatggtggcttttatgtttcactcattctctttatagtcacatggaatggccatagttacataaggtcgcctcaccatactggggcttattccactttataggaccaggtgcttttctaataaatgtaagaaaactacaaagatayagaaaatggtgtttttaaaacatgatgttatgctaagttggcattgctatagttcatttccagaaagatggagcttaagatagtccaagaggcattctaaagtttcaaactataatcttgttttccttttatctgtcctcacaggaaataaagaaagagatgaagaaagaccctctcaccaacaaagctccagaaaagcccc

SEQ ID NO: 333876 - DNA, 613 bp, Homo sapiens
taaaattgtaaaactttttataagaatggataggagaaaatcttaatgaccttaggtttggcaaagatttcttaaataggagacaaaaagcacaaatgagtaaaacaacaacaacaacaacaacaacaacaacaacaacaamaaaccaacttcaatacactgagataggttttaagcatccattgagatgatgggagaaaaaaattacaatgtctattcattttgttttaactttaaaaaagtaataattcaacttctctattgttccattgacagaatgacacaggttccttcacccagtctccaggacacacagtcagggatcctttaaggggcaggaagcagccagagggacagtggaatcaaggagtaccaccagagcaagcaccagcattccatgtgatgctaacttctctaggtctcagttgtatgtcaaagctaataattcccatctgatatggtttgactgtgtccccaccatggggtgccctgcagttctctggtgcctcctggtacagcctccttatggctatgaccccttcttgctgaaatcaccctcacaaagtgggtcagctgcttgaaaagatctgtgtaaagaaagtaggagctgtag

SEQ ID NO: 333877 - DNA, 515 bp, Homo sapiens
tcagtctcctgagtagctgggattacagatgtgcaccaccatgcctggctaatttttgtatttttagtagagacggggtttcaccatgatggccaggctggtgtcaaactcctggcatcaggtaatccacccgccttggcctcccaaagtgctgggattacaggtgtgagccactgtgcccggcttgtatcattaatttttaaaaacatgtttgatggttgaagcaaaaattagatcatctggtgtgrtatccaatatatattgaggtaatatgcaagaaaattatatttaagaggtggggaggatgtaaaagaacctaactggaagtaaggtttttacacttcactgaaataggaaaatgttgatcgaagtagtctgtgacaagttacatatgtatattgtaataactaaaatactctaaaaatcactaaaagtataactgtacaaagagatatactaaaactgcctatatataaaaggaaattctaaagaatgtacaagtaacccacaggaag

SEQ ID NO: 333878 - DNA, 531 bp, Homo sapiens
acatacatacataagtatatgcatgcacatatgcatacatgtatgcacacatgtatacacacatgtatgtagagctactcgcttgtctgttgtctgtcttcctcatgagcgtgtcagcttcatgattatgggagctttattttgttccctgctgtattcctggtgcctagaatagtggcacattataggctgtcaatatatattcactgaatgagtgaatgagtgaattaactgtctaaatacttctttcccccccaaggcaagtggcaggagcggaaattttaaagcattattttgtttgccttctgcttgatgttagctggccagctggttaycctgtgaatcgggaggagccttctgattcctttccaaaacttaggctggtcagggaccacacagttcctccaagttatgggctcacagggattctcatgggacatttagtcagcacatcttcccctttgatctcccacagcatacttggggagtcaacatttatgcctatctgtgagcctggcccccagcctgcct

SEQ ID NO: 333879 - DNA, 560 bp, Homo sapiens
tctgtagggaaagaaataagtgttactgacagattatctggcaggtttgaccatgtggaaaactacagagctatttggtggatgtgaaaaaaaaacacagccagagattttaagacaacaaagcaaatggcaaactaagacacatgtctccaggaaaaacagaaagttatacaagaaaggtaatgcatctgcagtacactacgtggctcagraatagaccatatttctttggtcataatgaaaacatcaattgttgcagtttaaagaaatggccccaagttctttgacacccctctcatcaaatggcaagttctatgtcccctctccttgaatctgagaaaggctttggtaaatagtggagtatgggagaggagatgctatatgacttctgaggcaatatcttcagaggcaattctgcttctgccttgctcactggaaccctcacgtgttatgaggcctccgtgttatgaggcctccatgttatgaggaagcccaatctagcccacagggagagaccacatggaaaagccctgagattacatgaacagacatggagagat

SEQ ID NO: 333880 - DNA, 528 bp, Homo sapiens
caatacactaacagagggggaaaaaaaaaactgcagaaagtggaagccaagtagtaggctcaactctgataacataagggatagaatatctaggaatgagcaagaggttcctcacagatcctgtagaaaaaacagaactcaagttcactcccagctggagacagggaattaaataagttctttaacttaacaggcytcaagggagagaagaaataaaaagccagaaacatcaacactacttctaggagagaaaaggcaagcagagttgactccgcaataactttgaagcctggggattagctttcaagaggataggatcaccagaaatgattctaatattaccctcaacagcccaaaaaagatgcaaaatccaaacaaacaaaagctgaaaaagcttaaccaaattcccaaagcagttgcagtattatatttaccaagattcaaaccacattagtaatagcatcaaagagtcatatggctattcagagtttacccagcattttctcatgcattaattgcattgcattt

SEQ ID NO: 333881 - DNA, 516 bp, Homo sapiens
accccatctctattaaaaaattagctgggcatagtggaacatacctgtagtcccatctatttgggaggctgagcacaccactgcactccagcctgagtgacagagcaagactgtctctaaaaaaactagaacaaataaataaataaaatagaacactaaactcarcaaccacagaatatacattgttttctaaccacgctgaaattaaattagaaatcaataacaaaaagatatctattacagccccccaaatatttgaaaattaaacaacacattttcaaataacctgtgcatcaaagaaatcacttttcgtctgacatctcagcaaggctgcagcgattgccgctgctctgcaagcttcacaatgccatccaaggacaacaagaggaaagaccccgggaagttggccaaaaaagacaaaaacccagtgaacaaatccaggggcaaagccaaaaaggagtggtccaaaggcaaaatttgggataagctcaataaccaagtcttgtttgacaatgc

SEQ ID NO: 333882 - DNA, 451 bp, Homo sapiens
acccagctactgggaagctgcaccacatcatggctataggcagtgctgcttcttgaagagaatcttcatgctcatgttccctgatgcataagtacagaatcacatcaaaaacaatattaccccctcccacactccaacgatcacacttagttacttgcataattttctggtctttcaattgttcgaaaccaagcctctaataattattctcagttttgattcatattgaattaaagggactttagaatcacctaatccatgacctcacattayaggtggagaaatcaaggccaaaaatatagaggccaataagttactgtaatcgtatttgggcatgacatatctgatcgtagctcactgcagcctagacctcccaggctgcaagtcgaggctgcagtgagctacagttgggaatgtcatgcccgaatacaatatagtaacttgttcgcaa

SEQ ID NO: 333883 - DNA, 478 bp, Homo sapiens
agctgggtgtggtggtgtgcacctgtaatgtgagctactcgggagtctgaggcaggagaattgcttgaatctgggagatggaggttgcggtgagctgaatcgygccactgcactccagcctgggcgacaagagcaagactccctctcaaaaaaaaaaaattgcttttctctctacacttctattatccttcatgtgcctggcttttcttttcctacctctctggccacttctcagtctcctcaattccttctctacctgaatgagaaatgctgcagttcttcctttcttcctctattccttcctcccttcctccccttctctccgtccctttcttcttctcttccctcccctcccctccccctccctccctcccttccttcctttcttccttccttccttccttccttcctctttctccacaaatatttatctattgtgtgctaggaataaacagggaacaaaagatacaaactctct

SEQ ID NO: 333884 - DNA, 527 bp, Homo sapiens
ttatttatataaaatgttcatagttacatgtatttttaagggcaaaattagggcacgaaattttatagctagtgtatcagtactagatctagctcttcaataacaaagatcccctgtgtcattttttccccatcctatttaccttttctaaaatctggatctgtagggcagagttggagtcaagaaagcatttgatgatgagaacatgagtataatttgctgagcttttctgacttgaagcttatataggaccttggatcaatcagattttcgtttcagactagggcagtatgttgtggtcatatttaarctttgccttttttaccagtttgtctcatctagtcatcctgtaccataatcatggtgttcagagtccattttcttattcttgtattgcctatttgcaaggtagagttggcaggctctgtatgactaactcccctttgagaacacagtccctaacatccttacagaaagcacttcctgaaacaagcgatctatagaaatgggctgttttgtgatcttca

SEQ ID NO: 333885 - DNA, 518 bp, Homo sapiens
ttctgtaaatcactgctttgtgggggtataaggggggtggattccaggcgagctscagcctttgagtaagttttgagaccaaaaggagattgcatttcctgattgctaagttatctctgctatttactgagaaattatttttcccataatactttcgtttgtgtattcgataaagttaatatctgtgaaatcagttgattctcactgtgctaaattatactggaatagacagaagattgacttcctggtattgacaagagagaactctcaatgtcttttgacttattatctctggcagttggaaaggattacaataacacacaaaattactttacagggtatgtttagagagcaaagaaaattaatggagagatgggttcttggggtatttttgtcttttgatgaagattcctatttcctgtcaaacatttcctctgacatgaactagcggcacacaatgcaaattgatttatccgcacctaaagaaatacctgaggtttaattgcctctgcaatatt

SEQ ID NO: 333886 - DNA, 576 bp, Homo sapiens
caagcccaggggactgtggttttcaggcctgggctactgcctgtttttgtaaataaagctgtatcgaaattgtcacccctattcatattrcgtgctatctgaggatgtttttgtactacaatggcaaaattgagcagttgccatggactctgtatggcctgcaaggcctaaaatatttactatctggtcctttagatagaaagttggccaatcttccctctaaagtatatcagattttatattgttgtcattcattcaggaagtcattcattcagttatgccactagtctgtttcccaccaggctgtaagcaattggaaagcagaggctgcatcttctatctttgtatcatcctcagtgccaaacccagtgcacagtaagtccttaggaagtatttgttgaatgaatgaatgaatgagaaatgaaagcaataaatgcataagtgaatacattcttggtctctgccgtcaggaaacttaatagtctagcaggaaagacaaacctaaaaacaaataagtaaaataaaatcgggtaagggttaccataagcatggacatattttcagaggaaagggctc

SEQ ID NO: 333887 - DNA, 608 bp, Homo sapiens
tgtaaccccaaagcctcaccttacagcagctttccrtccatgtagccaggcatggctcttccgcaagaggttgtctccctgcctccatcctttgcagcgaaggaaggaagtgaagctggaagcccccagcagccagtctctctgactgcactgctggttcagccatctccatcttgccctcaggggtaatacttccttagtgaccccaacatggctgagttgactttgctatttttctgtctcaaagaggtcaaagggttggcaaagatattccaagtataatatggaaaaaataaaaaataaaatacacaagctcccttcttatatccaccccactaaatgtggtatgcaggcatccttggggccatgctaaggcataactgccctcagtctccccagagttccttggaatgtctatattactgttcaggtccattcgcttactccttaatttcctgacctctttggtgttgggtttgtgggagagggccagtattttatgctaaccgtatgagcagaccagcagatacaagacaaaagtaggattctcagaggaaaagcaagctgggcaaagagaagcacatgaacaaagccactgagcgcaaacc

SEQ ID NO: 333888 - DNA, 608 bp, Homo sapiens
tgtaaccccaaagcctcaccttacagcagctttccatccatgtagccaggcatggctcttccscaagaggttgtctccctgcctccatcctttgcagcgaaggaaggaagtgaagctggaagcccccagcagccagtctctctgactgcactgctggttcagccatctccatcttgccctcaggggtaatacttccttagtgaccccaacatggctgagttgactttgctatttttctgtctcaaagaggtcaaagggttggcaaagatattccaagtataatatggaaaaaataaaaaataaaatacacaagctcccttcttatatccaccccactaaatgtggtatgcaggcatccttggggccatgctaaggcataactgccctcagtctccccagagttccttggaatgtctatattactgttcaggtccattcgcttactccttaatttcctgacctctttggtgttgggtttgtgggagagggccagtattttatgctaaccgtatgagcagaccagcagatacaagacaaaagtaggattctcagaggaaaagcaagctgggcaaagagaagcacatgaacaaagccactgagcgcaaacc

SEQ ID NO: 333889 - DNA, 608 bp, Homo sapiens
tgtaaccccaaagcctcaccttacagcagctttccatccatgtagccaggcatggctcttccgcaagaggttgtctccctgcctccatcctttgcagcgaaggaaggaagtgaagctggaagcccccagcagccagtctctctgactgcactgctggttcagccatctccatcttgccctcaggggtaatacttccttagtgaccccaacatggctgagttgactttgctatttttctgtctcaaagaggtcaaagggttggcaaagatattccaagtataatatggaaaaaataaaaaataaaatacacaasctcccttcttatatccaccccactaaatgtggtatgcaggcatccttggggccatgctaaggcataactgccctcagtctccccagagttccttggaatgtctatattactgttcaggtccattcgcttactccttaatttcctgacctctttggtgttgggtttgtgggagagggccagtattttatgctaaccgtatgagcagaccagcagatacaagacaaaagtaggattctcagaggaaaagcaagctgggcaaagagaagcacatgaacaaagccactgagcgcaaacc

SEQ ID NO: 333890 - DNA, 422 bp, Homo sapiens
  misc_feature (1)...(422): n = A,T,C or G
cataattacacatggattttcagctatagagagggtcagtacccctaatccccacgttgttcaagagttaactgtacatagttttactcctgttaggaataatgctcaaaatcctaaggaagttaaacactcgaacaaaggattyttagcaaagcaattttacttctgcacagaagggtgcccccttggccagtcaccatgagagcacacctgaacaaaggggcacgagtgcttttattcttgacaccagtcctgcccctgtatccttttcccattggcttgggtcatgttgtacaatctaaactaatcctggttggctaaacattngattntttttttttttttttttttttttttaaataaaatgggcaagtaaaaaaaagtggagaggaaaggggaagccgtgtgtgtaatgagctaaa

SEQ ID NO: 333891 - DNA, 422 bp, Homo sapiens
  misc_feature (1)...(422): n = A,T,C or G
cataattacacatggattttcagctatagagagggtcagtacccctaatccccacgttgttcaagagttaactgtacatagttttactcctgttaggaataatgctcaaaatcctaaggaagttaaacactcgaacaaaggattcttagcaaagcaattttacttctgcacagaagggtgcccccttggccagtcaccatgagagcacacctgaacaaaggggcacgagtgcttttattcttgacaccagtcctgcccctgtatccttttcccattggcttgggtcatgttgtacaatctaaactaatcctggttggctaaacattngattntttttttttttttttttttttttttaaataaaatgggcaagtaaaaraaagtggagaggaaaggggaagccgtgtgtgtaatgagctaaa

SEQ ID NO: 333892 - DNA, 560 bp, Homo sapiens
ttacccaggtgactctcgttgggctactgggtgagcttgaggaagtgaagaggttggttggatatagtaaaagccacacttctaagctgcctaagaatggtgaggcttgatggtgatgccttggcatagaaagaggtcagcaacccatggttccacatggtggccaggaggccagagaatgtaggttttattctgcccgtgcatgtcctcaattgccaggtaaccatggccacaacctgtgtctcttactctggttcctcaaaatccaccagaacacaacgtagtcagagtcctctcrcttccacttaccacttaaatgactttaagaattaatgatttaataataaccataagcataatgaacagcaaccacaatagtagcagctcataccttttgagcatttaaccacgtgcctaatattgtctaagtgtcttccatgcgtaaacttattaagtcctcatagcatctctcttagttactattagtattgccattctacatgtgaagaaacagaagcacttaaagttcgagtcactagccaagtgtcaaatggtcagta

SEQ ID NO: 333893 - DNA, 560 bp, Homo sapiens
ttacccaggtgactctcgttgggctactgggtgagcttgaggaagtgaagaggttggttggatatagtaaaagccacacttctaagctgcctaagaatggtgaggcttgatggtgatgccttggcatagaaagaggtcagcaacccatggttccacatggtggccaggaggccagagaatgtaggttttattctgcccgtgcatgtcctcaattgccaggtaaccatggccacaacctgtgtctcttactctggttcctcaaaatccaccagaacacaacgtagtcagagtcctctcgcttccacttaccacttaaatgactttaagaattaatgatttaataataaccataagcataatgaacagcaaccacaatagtagcagctcataccttttgagcrtttaaccacgtgcctaatattgtctaagtgtcttccatgcgtaaacttattaagtcctcatagcatctctcttagttactattagtattgccattctacatgtgaagaaacagaagcacttaaagttcgagtcactagccaagtgtcaaatggtcagta

SEQ ID NO: 333894 - DNA, 560 bp, Homo sapiens
ttacccaggtgactctcgttgggctactgggtgagcttgaggaagtgaagaggttggttggatatagtaaaagccacacttctaagctgcctaagaatggtgaggcttgatggtgatgccttggcatagaaagaggtcagcaacccatggttccacatggtggccaggaggccagagaatgtaggttttattctgcccgtgcatgtcctcaattgccaggtaaccatggccacaacctgtgtctcttactctggttcctcaaaatccaccagaacacaacgtagtcagagtcctctcgcttccacttaccacttaaatgactttaagaattaatgatttaataataaccataagcataatgaacagcaaccacaatagtagcagctcataccttttgagcatttaaccacgtgcctaatattgtctaagtgtcttccatgcgtaaacttattaagtcctcatagcatctctcttagttactattagtattgccattctacatgtgaagaaacagaagcacttaaagttcragtcactagccaagtgtcaaatggtcagta

SEQ ID NO: 333895 - DNA, 546 bp, Homo sapiens
gccagtgcaggaatacatatatattgtgcttctaccagagctctctttctctttttttcacaatgaccagcaacattccagagagagggtggtccattagtcaataccccagaaagaaggccaaaaaaaaaaaaaaaaaaaaaaagaatgtgaagaagaacrtagactatttactaaacatgtacataatgagcaagaattaaactgagatttgggtggtttttttttttttttttgagatggagtctcagtctgtcacccagggtggagtgcagtggcacgatctcggctaactgcaacctcccctccagggtacaagggtttcttctgcctcagcctcccgagtagctgggattacaggcgtgtgccaccatgccctgctaatttttgtatttttggtggagacagggatctcaccatgctggccaggctggttttgaactcctaacctcaagtgatctgccctcctcgggctcccaaagtgctgggattacaggcatgagccaccataccccgcccgagatttgggtgttttgttgttgttgt

SEQ ID NO: 333896 - DNA, 576 bp, Homo sapiens
aaaactgagggtcgcaggagtccttttgtgtgtcctgtcacatacctaggcacaagagagttgagacttcagttgcctcagctcttgcatctccccttcccaccactgcctcccttgacatggagagagtgtgtgtcatccctaaaactgaaaagaaagaaggccaggcctctgacctagaactggcatgatgggatagaagcagcgctgggcctattctcagagggctggagtccatgcctggctctggccctcattatgggaaggaaagtaacattcattgagcccccactgagctgggcacccatcttaagttatctcaaaatcattaaaacrtgctggtgacccagttttctttatgctcatcagggagacaaggagcctgagggtcagagaggtgaccaccatttctgaaggtgctagcaaactgggggcactgcagcagtttcaaagcaggctccctgatgccatgccagggctttccctgctgaccttggctgcttgattggaggaagtctatgagacttgtctggcccctgctattcccccaggctctggagtccatttcaaaacccc

SEQ ID NO: 333897 - DNA, 595 bp, Homo sapiens
gcctgaatagttcaaagatttttaaaattttcatgattaggaacccactttttcaaatcaaaatgttttaacatttttaaagggggagaaatttaacactctttgtaaatagtcttcacaaagcctctaacaagtaaattgatagacatgtaaacattggtatatttcaaatgactctatatatgaatttatgaagctttaaagggcttcattttgcaaaaagcaactttgcaggccattagtccataatatagactagcctctttggagtatttaagaaaaagtgtgaaacagccaggatgttgagacttagaatggaattgccaactgcasatgggttcatttccacccagtgtcttgctcaggcatttagcaatgtgttttcctaatgcaggaattgcacctgacacacaaacatacactatggtacaagcgtattacaatgcattttctttattatgcacattgtgaacatacccaaagaaaagtacacaactacagccaaacacaacccttctgtcaaatcaacaacatgaagtcctcactgttattaatgtatcagagccataatgacaaactgtgactgcacggttga

SEQ ID NO: 333898 - DNA, 534 bp, Homo sapiens
aggagaacatccaaacctgagaaagaacagaggctggaaggaagagaggctctctacattgactgaaattgaattgcccaaaagagaaattagtcttaggaggaaaaaaatatgtatagctgtattctacccccatgtgagtttgtagagtaagctttgcattttctgtaaaaagaagacagaggaagaagaggaaggcaaaaaaaaaaaaaaaaaaaaratcattcattgcacacttagtctatgctggggataggtcagctctatgtacatgtattggttttctatggctgtgtaacaaatggccacaaacatagtggcttacaattcctatttattatctcacagcttcagtaggccaggggtccaggcacagtgcagctaagctctccactcaggatagcatatgctgaaatcaagatttcagttttctgttgccataaatagtatgtttatttggcatctatattagtccattttcacacagctgataaagacatactcaagactgggaagaaaaagaagtttaattgg

SEQ ID NO: 333899 - DNA, 574 bp, Homo sapiens
agccctcatcattcaattacatccccctgggtccctcccacaacacatgaaaattctgggagatacaatttaaattgagatttgggtggggacacagtcaaaccgtatcagcatccattaaaatcataaaatcaaattaatgggcaaagttacttacatcttcccygtgatccagtttttgcagatgaatgaaaatagtattacaaccctctcaacataaaccacagcatctgtgttttgagttctgcccaataggggacattgccatctaacaactatctaccactgtcctaacagaggctgtggtctaagcttttgcctcgctcctccttctgcttcctgaccaaatctggtgcttccccacttggcttgtggtgtggcaagcctccttctcttgggaaatgtaagtagtaaattcttctttcaatggcatcaggctctccatgtcatcatttaattacctcccaaaatcaaaatcctgtgggtacattttaatacagtctgctggccaaagtctcagttgaggctggattttctcccaggttcacatggttattggtagaattcagtatct

SEQ ID NO: 333900 - DNA, 608 bp, Homo sapiens
aaagtaggaatatggagcccgaagctatgtccttgccacacatactctcccacctcccctgtggtccctgaggaaggtgagtggacttcctaaggttctttgggacacagcttgaggacaacaatgccaggtgattggtggccctggtggccctgacagcctcccagctgtggtttttatgacctgtggctcaggtgagcaacttctcccttgccctggatgaagaaagctatgggacaaaagacttgcagcactaaaatgggaaagtcccaggaaaactgagctgaattggttactctgcctgtgtcctacccaaaccacctctccacactttggagaagggcaaggcccagaattatgcatggtcaggagggtaggctgggaggtagtgccttcaggacccatcatatataactgaaacctttcacccagagctgccagaaaaacaatttgagaggttgattgaattttctttttctcgttctctttgttcttttgtctttgttctccttgttctctttgtcctttctaccatccttcagtgacttccattgcctcagaagaasgatcacacggcagaaaagcagacagaacactagcgtgtttca

SEQ ID NO: 333901 - DNA, 465 bp, Homo sapiens
tttacaaattctatggcaactcctggaagttcccctatatgttctaaaaggggtagaaccctcagttccaggaactcccctccctcccccagaaaactcatgaatattccaccatttgttgagcatacagtcaagatgcaaccatatatatggccagtcagcagcgtatcggggtgctctgcctatggggcagccacccttttactcctttactttcttaataaacttttttcactttactctgttggctcgtacttgaattatttcctgcatgaagccaaaaacccacttggcttcccaggctgagccccagccttggggaactttkgcttataacagctcccattacatttttctgccccagagttcacaaaagtacatttcgcactgtctcttttattctccacaaccacctttcagcaggtattattttacccactttgcagagggcgatgcagtatgtcc

SEQ ID NO: 333902 - DNA, 633 bp, Homo sapiens
ctcacaacagcgaagacatggaatcaaccttacatgcccatcaatgatagatgggataaaaaaaatgtggtacatatacaccatggaatactatgcagccataaaaaagaatgagatcatgtcctttacagggacatggatggagatagaggccattatcctcagcaaactaatgccaggaacagaaaattaaatkccacatgttctcacttataagtagaagctaaatgatgagaaaacatgggcacgtagagggtaaggatacacactgggcctatgtgagggtggaaggtgggaagagggagaggatcaggaaaaataactaatgggtactaggctcatttcctgggtgatgaactaattcgtacaacaaacccccatgacacgagtttacctatgtaacacaactgcacatgtacccctgaacttaaaagttaaaaaaaaaactcgctccagagccctcaggaaatgcattcccaaagctgtaaatatggaacggtttgtacttatgcagatgcctagctttctcctgagtcacatttccattaaaattcaaacgtgacaccttgacattcaccttaggccttctcggctctcaccatccctattcaatgggcagtttccacaaaggag

SEQ ID NO: 333903 - DNA, 633 bp, Homo sapiens
ctcacaacagcgaagacatggaatcaaccttacatgcccatcaatgatagatgggataaaaaaaatgtggtacatatacaccatggaatactatgcagccataaaaaagaatgagatcatgtcctttacagggacatggatggagatagaggccattatcctcagcaaactaatgccaggaacagaaaattaaattccacatgttctcacttataagtagaagctaaatgatgagaaaacatgggcacgtagagggtaaggatacacactgggcctatgtgagggtggaaggtgggaagagggagaggatcaggaaaaataactaatgggtactaggctcatttcctgggtgatgaactaattcgtacaacaaacccccrtgacacgagtttacctatgtaacacaactgcacatgtacccctgaacttaaaagttaaaaaaaaaactcgctccagagccctcaggaaatgcattcccaaagctgtaaatatggaacggtttgtacttatgcagatgcctagctttctcctgagtcacatttccattaaaattcaaacgtgacaccttgacattcaccttaggccttctcggctctcaccatccctattcaatgggcagtttccacaaaggag

SEQ ID NO: 333904 - DNA, 466 bp, Homo sapiens
gggtctcactctgttgcccagcctggagtgaattggttcaatcataggtcactgcagcctcaaactcctgggctcaagtgatcctcctgcctcggcctcccaaggtgctgggattacaagagtgagccacggtgcctggccacgtggctttctcaaaggaatactggaccttgggtttagggcccaccctaagtgtgacctcatctgaacctaattaaatctgcagagaaggtcacattcacaggtacaagggatgagggcattttcaggagcacagttcaacccwcaacaccggtcatttcagcgggttctctgcaaacttcagtgggcagactttcatggatgccatttccacccaaacacagtgcacaattaaaatgttgttctacaggatgttctccaactagaaagtgtgagatgagtaaattgcttaaacctgtaatgttgaaagagcacttctcatagt

SEQ ID NO: 333905 - DNA, 595 bp, Homo sapiens
tttttctatagatctaaaatggttccaaaataaaaaaggtttatttttaaaaggagctctgtaggkagtgataatgacaacaataagggttgggaaacatgactatatgtacacagccagttgccattggtggcgtcgtggagataggctgttcatattgctgggcaactcattccaatgctgaagtcgctgctggtttctctgatacgaattatcttatccagatttcctgctctctattttctcctcttatcagttagcctcaaagaaaaagtaacaagatagagtgaatttaaagataatgtgctgcttcttccatggagaaatatctttcctgatgtgtcattgttcacgggccccataccatccatcggccatcaccaggcttagctgttccagcagcttcacattgcacttagccggaagccctggctgtgtgatgatgatgttgacctggcatgtgatctctgcctgcctctcagacttcatttgagccgttctcctccctgtatgcccaaaccatgcagcccctcctcatcctggttatcaaatcacccaatgccttgaggccttaggactctgcacctcatgacct

SEQ ID NO: 333906 - DNA, 581 bp, Homo sapiens
cgttgtcacccacaggcagtgaagtttcctgtagaggggagtctgtcatcctgagttcctgcagggtgagtacctgcggatgaggtcacctcttgatagcccgttagcatgcatggcagggacaccttgctgcttttcatggtgcgtgtagcaactgagctttatcctcatttcccactagcaagcatttaccctctgggattgtgctgtctaaaacccataatcaggaaggagcttttgctttttttaaaaaaaaacttttccttattcacaatggtctttaaaaaaaatccctaaatattttctttctctaagttagtgtgtactttcttccctttgcattgggaatagcagatcaaaaatggggtcaatttacttctaattggctgcttcctaaattcagaaagacacactttggcagtgcccctttttcgaaatgagcccacggtgcacatgcaagccacttctgctgtttgtgtctcctctccctccgtcttcaggtgcattttaaatttcttttttattattattwttttttttgagatggagtctcattctgttacccaggctggagtgcattg

SEQ ID NO: 333907 - DNA, 623 bp, Homo sapiens
gcaacagtggcaacaattaggcatgaattgtgtgctagctgaagcactggataagtgaaaatacaaaagtataaagaaagcagacaatgactattagctcttatttgtaaaatatttgctcttctccttctcttcctcttcctcctccttctcgttgcaaacagaacgtatcgcagaagagaaagagactattcaaattctacarctaggacatcctgcctcatgaccgtaggaaaattgcttcgtttcttgtccttacatttcctccccataaagaggaaataagaatatcgatctcaccagattattataaaaattaaaggagctattgcatatatcacacttcttgtaaatgtatcccccaaaatacacatactgaataaactaagagtctcaaaaaaaatcaatgagtaatcacatattaaaaaaatgagtggtgaatgctgggtctaagggggatacgcattgatgaaaattgcagtgtgatttctcctacgtagggaactggactccattcccactgatggttgctacagcatgacagacccagtgttgcagatcttatcattttcatgagaagccagagatctacatttggatataaaatgtcccaatttgaaaac

SEQ ID NO: 333908 - DNA, 623 bp, Homo sapiens
gcaacagtggcaacaattaggcatgaattgtgtgctagctgaagcactggataagtgaaaatacaaaagtataaagaaagcagacaatgactattagctcttatttgtaaaatatttgctcttctccttctcttcctcttcctcctccttctcgttgcaaacagaacgtatcgcagaagagaaagagactattcaaattctacaactaggacatcctgcctcatgaccgtaggaaaattkcttcgtttcttgtccttacatttcctccccataaagaggaaataagaatatcgatctcaccagattattataaaaattaaaggagctattgcatatatcacacttcttgtaaatgtatcccccaaaatacacatactgaataaactaagagtctcaaaaaaaatcaatgagtaatcacatattaaaaaaatgagtggtgaatgctgggtctaagggggatacgcattgatgaaaattgcagtgtgatttctcctacgtagggaactggactccattcccactgatggttgctacagcatgacagacccagtgttgcagatcttatcattttcatgagaagccagagatctacatttggatataaaatgtcccaatttgaaaac

SEQ ID NO: 333909 - DNA, 547 bp, Homo sapiens
ttttactgaactcaaaaatgggacagtttgatgtcagaactgttgtattccatttatcgtcaaaagagacgagcccttcttagaattatagccagcacagagacgaacaagatgacagagagacattgaacattggtgacatcttctaagtcataaacccagcaatattgtagtgtaacaaaacagcataaatatttattagctatacagtttctgagggtcaagaatttgggagcagcttagctggattgttttagctcatgagttatcatctgatgttggccaggaccgtgatcaactaggggctaggtgctctgtttccaacgaggctcacttatgtttctggtcagcttgtgctaactatagcaggagtcctcagtccayccccatatgggcttctctactggctacacgcatgtccacatgtcatggcagctgcctggcttgtcccagagtgaatgtctcaagaaagagcaaagcagaagtagaaatgtagtttaggatccagcttcagaagttacatgccatcattctgctaggagttcat

SEQ ID NO: 333910 - DNA, 599 bp, Homo sapiens
taaagcagttaaaactgtcgacacgtgagtcatctttgactggaaatttagcatgcatatttccaattcgtgctgaaaattaggtgtgtatcattttgtactgtgtttatattgggggaggtagaaatgagagttttgtttcttctatgtacataacataattctttattatgggtatgctacaaattcaggttgccagtgtaactggtccacattagtcctaaatcttgacaattccaattgtcaaatatggagaaaaattcactctgaataaagggagattcataccagtcaggttcataccagtcttttgaaccaaattgatatctctttctttctctctctgtctctctctctctctctctcwcacacacacacacacacacacacacacacacacacacatttctgtatgaatttacttggtcattacctgggaaaatgtcaggaaataaccaaatcacaggaatttagacaaaagtctttgctttgacaaatgtagaccaaacataaaattctaagccccccaactgactgaatgaatcccttctcttgactgaggggatttcaaaagaaacctacacaaactagctcaggct

SEQ ID NO: 333911 - DNA, 550 bp, Homo sapiens
ggactttgagtaatgagagcactccaccatcaaatgaagggaacacaagtcccctgagcgctggtttcagtgttagctgtggttggagtaaaggcatgcactggggaacaggtgtctgctggtgcttagagacagtgcagcttcccttgacctgaggcttcttggagatgttaaggagggcgactgcacaggggtgctttccctccctttcctttcaggctgctgcacaacgctgtgagcatcctgcacctctctgtggatgactctccttgccatttcttttgtctgtttgttgtttgtgtaatctgaggacttaccgttatagagatcccaacagagatcaagttatagacatcagctctcaaaaaagagagagaaagaaagagggatggaaatgaggagtttgctgtttccatgactactaaagacctcaggtcaaaaacattttcagaggcaaatgaggtagcaaaacyacatcaaagtggtggatgctgggacagcgagggaaggtgaggctgttacatttagacaaaacatttagaagtgttct

SEQ ID NO: 333912 - DNA, 660 bp, Homo sapiens
ttgctaaacccttagtaggctcaatttcctggggaatttggttctacttaygtgcctattcattctcaggtgacatataagaaagctgtaatgggttttctacctactatggccgggagtcccacaaaactaagctcattggatttatattgtttcttgaatttaaataggtaaaagctccttgtaagaattggaaacaatgtatcttgaaaactttggatttgtctgattttccacatgtccataggtggttgatctataattcataagtgttatgaaacattggagaaaaatacagaggaaagccaaccatatccagggggaagatgtttgtctctttgtacatgaattttgctttgtctgtaatgcgacggtaaagtggagttttttgttccttttggaggacagatgatggttctgttaagataaaaaaattagttgtattgaatacagaaaaaaacatttaagccaagcatcctacttacccctatgtgggatttaaagtgaatcagacatggtcctggccctgaatgaacttgttgtctacttagggggcatagagggggacagtcaaagcaaagagaggactgcatagaagatgcgtgaatgcaccgaagtggctgacaaagtgtcacaaagtggcacccaagtgatgacaaa

SEQ ID NO: 333913 - DNA, 608 bp, Homo sapiens
gttctttgaaaagttcagtaaaagtgacaaaactctagccyggctaactcagaaaaaaagagaaaaaacaatctaaattaccaagattggaaataaaaaagggattatcactgctgatcccatggatattaaaatggtaacaagatagtactatgaacaactcttcatccacaaattgagtaacttagatgaaattaccagttctttgaaagacacaaactaccaaaattcacttaaggagaaagagataaccagcacagatatatatatattaaaatttgtaaattaaaaaatttttaaatgtttccaaaaaagcacttgtcccatatagtttcactggtgaattctaccaaacattttagtaaacaatattgccaatcctccacaatccctttcagaaaatataagtagagtgaatacttctcaactcttttacaaggcccgtgtactctaatatgaaaagcagataaacacattataaggaaaatagcacagtaatatctgtaatggacatatatgtaaaacttcttaacaaaatactagaaaatctaatttggcaatatataaactggaaaatacaacatgatcaacttgggtttattctagga

SEQ ID NO: 333914 - DNA, 595 bp, Homo sapiens
ctttttctttttctttttttgagatggagtttcactctgttgcccaggctggagtgcagtgacatgatctcgactcattgcaacctcctcctcccaggttcaagcaactctcctgcctcagcctcccgagtagcttggaactacaggtgagtatcaccatgcccagctaatttttgtatttttagtagagacgtggtttcaccatgttggccaggctggtctctaactcttgctccatattttcacaaattatttaatgtcatttgtttatgtaactgctgtgttaccaagggcctgtgaaacaccacatagtggtataacggctatgaatacascaatgaacaaagtccctgtccccgcaaagcttatgttcttgtggttaaagagaaaatataaaataaaaaagtaagtgtacagcatgcaagagagtggcaaaagcaatgaagaaagatgtatggttaggggtttaggaatggggcatgattactatttaaagtgagaagattagggagggcttcatcgagtaggcgacctttgcaccaaggcctgaaggatgtaagagaatgggttgtgtgacacttggcttctgaataat

SEQ ID NO: 333915 - DNA, 633 bp, Homo sapiens
tcaaccatcaactcaaggcaagtcatctatgacccagatcccattgaaggggaggccatgacaccttgggaaagacattacaatgacacagctagtgtatatagtagtacttcccttgattattcaccagagatctacagccatttaacaaagtcactctcctctagggaaatatgttctgatggaagcatgctcaacaagaaggcagtaaactaagaaagaggaagacctgggaagtaaaaagtagaagagtcatgtagaaaaatattgaaagaaagtcccagaatgaatactttgggtcttggccaaagcaggagaacraattatgtaggacgacctttagaaactaagtaaagtaatttgatcatttgggagaaaatatgactgaaaagagttttacagttctgataggacatcaagtaaaaaatgtatatgtacataataaagttaggtatataacaaaaaacatgaggtagtatttaagaatagattaacattgtaaaaaatataattcacttcctggtgttatattaaaatttgtatttagttaaaatagttgaataaataatttaactaaatgttgattttaaaaatacttggaaaataaggaaaggtattatgaatgtgctacct

SEQ ID NO: 333916 - DNA, 556 bp, Homo sapiens
gttaatccccaagacaatgggggaaaatgtctccaggacatgtcagagacctttgtggcagcctctcccatcacagacctggaggtctaggagaaaaaaatggttttgtgagcagggcccagggtccctgtgctgtgtgtgtcctagggacttggtgccctgtgtcccagccactccagccattgctgaaaggggccaatgtagagctcaggccatggcatcagagggtgcaagccctaagccttggcagcttccatgtggtgttgagtgtgccagtgcacagaagtcaagaattggggtttgggaacctccacctagatttcagaagatgtatggaaatgcctggatgcccagccagaagtttgctgcaggggcaagcctgtcatgaagcaccttggctrgggcagtacagaaggaaaatgtgggatcagagcccccacacagagtccctactggggcactgcctagtggagctgtgagaagagggccgccattctccagaccccagaatggtagatccacctacagcttgcactgtgtaccaagaaaagccaca

SEQ ID NO: 333917 - DNA, 590 bp, Homo sapiens
tgagaactaaatgaataatttgtttctaactgctaaatcatatatacatatatatttacatttgcatragctcaacaagtacacaagatttttattcttctcattctgcatatgagactcatatgcatcacaaaaaaataaacaaatgaaagctcgatatatatttttttcaaaaaagtggaaaacttacaagctccataattttttgcaggaatatgtcaaatttcacctaactagaaaaaaaatccatacttactacaaatagcatccattctatttaccccatggataaggatatattgccaaaatattaaaaacacagatttcctaatttttaacctgcactgacccaaagtcttaaattacatattaaccacaaacaaggaaaatgttaaataatttacatacacatttagatgctctctaacctttttaatagaattaaatattggtttacacttcaacattcatttaataacagttattgagctaaaatgttcaacaaagcaatctcagcaatttggaaggccgaggtgggcggatcacctgaggtcgagagttggagaccagtctgaccaacatggagaaac

SEQ ID NO: 333918 - DNA, 590 bp, Homo sapiens
tgagaactaaatgaataatttgtttctaactgctaaatcatatatacatatatatttacatttgcataagctcaacaagtacacaagatttttattcttctcattctgcatatgagactcatatgcatcacaaaaaaataaacaaatgaaagctcgatatatatttttttcaaaaaagtggaaaacttacaagctccrtaattttttgcaggaatatgtcaaatttcacctaactagaaaaaaaatccatacttactacaaatagcatccattctatttaccccatggataaggatatattgccaaaatattaaaaacacagatttcctaatttttaacctgcactgacccaaagtcttaaattacatattaaccacaaacaaggaaaatgttaaataatttacatacacatttagatgctctctaacctttttaatagaattaaatattggtttacacttcaacattcatttaataacagttattgagctaaaatgttcaacaaagcaatctcagcaatttggaaggccgaggtgggcggatcacctgaggtcgagagttggagaccagtctgaccaacatggagaaac

SEQ ID NO: 333919 - DNA, 530 bp, Homo sapiens
ccaacaaaagcatggctcattaaggattcaaatttttcttggcaccacatgctggttttatggaatggagcttttgattattgaaatgtctattccttttctcacatcccaaactgttctaggaaagagcgttatctatagaagcattgctgctgttggcactctatgaatatattcacaatttcctgaaatctagatttgagtattgattagagatgttatattttctcccattcttcaatgtcaccagcatcttcaccaaccagtcactcattaatgggtacctatgtgctggcttagctattttgggatagaagggtcaaggatttcttacagctctttatragcctcatcaattagctatcatctggacctagttaagttgtattcaaatctaattctgctggtctttaaaatccaaatacatttttacttcttcccctaaagagttactctgctgggtgctaaacaaagtgaattggcaatggcatccacctctgggaacttaactttcaaatttttaatataat

SEQ ID NO: 333920 - DNA, 497 bp, Homo sapiens
gtctctttgttttgaacttcatctatttcttttggttcaagatggtataattgctttaaaaatactgtgggcttcctgtgtgtaaaattatagtctaatccatcaaacaaatgacaaaaccaaaaatctcttcaagaggctcctttttctctttgggatgagagtcaacgtactgtgggaaaacatatctaagatccttagaaacctaattttctaccatagaaatttaagaggcacgtacttaagattcttagaaggctttttgtctatctcagggtttggcaaaccatggcccatagacctaatctaacccacagcctgttttcgttaggcctgcaagttaagaatattattttttacattttgaaaggattgtaaaacacaaataatagtacactgaaaacaayaaaatattgttgaaataaattaaagaattcctaaataaatggaacaacatcccatgttcatggattagaaaacttaaaattgttcagatg

SEQ ID NO: 333921 - DNA, 609 bp, Homo sapiens
cctcaggcttgagcctggctctggggaaagamgatggcagctatctgcattgccttgccttctctcattcccatttctaagactgggcagagaatagggatttttagggaagtggaggcagtgtattttcacttaagtagtacagtttgtagtctttgctaatagtggccagcactgccatgtcagggatccatgagctggtctttcaataagcacatttgtcaccttttttgggaggctcccacgagaacatttacattgaatttctcaggaatacagaagcgtatcttctaagagtgcagagaagtgattgtcggattgaaagcctgaaaactaaggagatggcttgaatcaactacttttggaaatagaccatagactagcataagaggaataaaagtactcaaacttcatttgaggctatgccaacttaataggatattatcacaaccaaagtatatattaaaaatgtgccaagtaactatatgagtttttaaatcacatttaaaatgtaattaacacttaagtgtatatctaaatttagtaaattactcagttgacatacataatgttacaaagtgaattcagatagttgaatatgtactagaa

SEQ ID NO: 333922 - DNA, 608 bp, Homo sapiens
catgcagtggttacacatcatggcaaacatttttaaaattttttaattgaaattttaaaatggcaaaaacatcaattgtccaggccaaccattacatatacagaagcagcatataatcagttacatcgaaagagagctctgagattcacactccctgctagggttggtgctcaggtattacctgaagctgattacactaataactgcatgttaaagggaaaaagcaaatattttaataattttatattttatgccagcatgtggggaaaagtgcgaaattcaatctttttgtggtttcccacttactaaagaagaaagtttaaactctattttttccctttatgagcttccacaacatgccaaccttctcaggcttttctcaactcttgaccacaagaatctatttgctccagctgaataactagcttgtcactctctcccagttttkccctgtgcttttccactccactattgccactctcagaaaacaccctcttcctaaatctccctattaaaacttgcatcatccttcagggttaagttttgaaatatttggtttctctatgtgctgcccatctcagctgaatgttctatcacccttttttaag

SEQ ID NO: 333923 - DNA, 328 bp, Homo sapiens
ttggaagctatgttgtctattcttttccattggtctatgtttctttttttatgttgttacaatgctattttggttactatagctctgtagtgtaatttgaagttaggtaatgtgtttcctccagttttatgttttttgttaaaaatagctttggctattctgggccttttgagtttccatataaattttrggattgtttatctatttctgtaaataatgtcattgatattttgatagtgattttattaaatctgtagattgccgtagatgtcattgagtctgtagattggtatatagggatttccttgaatgtgaagcatggacattt

SEQ ID NO: 333924 - DNA, 575 bp, Homo sapiens
ctaatgacaaaaataaacatgggacttggcagctaaggaggagtagaagaaaaaatcactggaggtaaagaggtcaaagaactgagaggaaagcataacagccattaaaatatatcccacaaatctccagccaaggggatcataattaacagatgaccccagctactgtgtaccaaaatccatcaccacgtcacaacaaagtcatacttcccataggtttctcacagccaatgactgagtgcagcagggataaaaatgcaggcccattcctgggagacacaagacccctcttacaagcaattttkcctcaagccttccccattgtccttgaaaagctttccttacaactgaactgcaatttaagttacttttatccaacctctcttctctccctctttcctcccttggggtaaaacctgcagtatagtctgatgactctcaaaatttctcttgagttcctccacaaattttactctcaaaagcattcattcccctaataaattttacatatgtttaatcctatttaagcttctttttggaggacccagactaacacagcaatgtattagctgaat

SEQ ID NO: 333925 - DNA, 615 bp, Homo sapiens
ttgggaatattcttctttgctagggttcagaaacagtgatcaaggtattaagaagcgggtacaaagtatacttgagtctgaaggcrttgtggggactgcaactagatagttctcccaagaagagtgtggactctcacattcccaaggtggatctagcattggaagtagggatgacccttcagcattgataagaagactttatcctttagggcttaattgttagtgaccaggcatcattataaggcaatccctgtactctcccacttacttaggttgcaagtaattaacttaccttatttctcaagagaataaaaaatatattgttatgtacattagaatggttttaattttcttgtttctgtggtccttttctaatttatctcagcttctgctctttgcctctcctactgtctctgtattgtctgggtcatttctggttttgcattacctgcctggggaagcagcctgaatcagccttcctggccacagtgtacccagctgatgccaattatgcagagccaattcagatgcctacatagagcaattgattctagcgactttgagagtctagtgtgtgggattcaagcctggggagccagaaggctgagtgggagt

SEQ ID NO: 333926 - DNA, 537 bp, Homo sapiens
tatgctgttctagctctgctaaaaccaartggatattgtacatattcaatgagtcttatgtagtagacatttaaggctattgagctattgaatcaaatctttatggcaggtgattaattacctgcagattaattaattaattaattaatgccgcagattctcaaataaacttagaaatcatgatcagatgcagttattagcaactggtaaagtacacctatgactaccataacatatactgtttagataggcttatcagataagtctggaggaaaacaggattggaattaaactgaatattataatggtaaaaaaaagaatgatcaataataacagttccaagaatcttttggcagggagaggacaagccattatcacactaacctctttaaatttttacagattagattttagtttttgaagatgtagtttttcagtatatatattgttttgtgttccactctttttcgaagtacctgtggtttctataagtctacattaattattaaatataatggacttagtgattttatacat

SEQ ID NO: 333927 - DNA, 537 bp, Homo sapiens
tatgctgttctagctctgctaaaaccaaatggatattgtacatattcaatgagtcttatgtagtagacatttaaggctattgagctattgaatcamatctttatggcaggtgattaattacctgcagattaattaattaattaattaatgccgcagattctcaaataaacttagaaatcatgatcagatgcagttattagcaactggtaaagtacacctatgactaccataacatatactgtttagataggcttatcagataagtctggaggaaaacaggattggaattaaactgaatattataatggtaaaaaaaagaatgatcaataataacagttccaagaatcttttggcagggagaggacaagccattatcacactaacctctttaaatttttacagattagattttagtttttgaagatgtagtttttcagtatatatattgttttgtgttccactctttttcgaagtacctgtggtttctataagtctacattaattattaaatataatggacttagtgattttatacat

SEQ ID NO: 333928 - DNA, 485 bp, Homo sapiens
caggaaagacactttcttagtttgtgtttacataaatcagaccccaagagaatggtataactacatatattttattcaggaagtaatcccagaaagcacagacagggtgtgaggaaatagagagaaagaagaaaagccaataaagaaagcatgattgagttgkttacaagtgttgacaattggaactcaatttctctggggatcttttgagaaaccatgaagaatgttcagtattgtttcaccaacggaagaggaaactggtttatttatccagttacccggctttcagcaacaccctgtgtataggtccagcaagctttgtggtcctgaagaaagcccttagccagaaaagcagaaggaatcagcacttgaggtaggaagttttctgtgttttaggaaccatctcaattacaactgcaggtaatccgagtagaccgagagattcttggacatggcatcgacatctctactcaaattggttcatg

SEQ ID NO: 333929 - DNA, 597 bp, Homo sapiens
tcctataaagacagaaactactaaaattgactccagataaagttcaaagtctaaatagacctatacaagcaaagatattgaattacttttaaaacttatcacaaagaatagcccagatgagttcactggttaattctatcaaacrtttagagaagaattaataccaatatttcacaagctcttccaaaaaatagaagtgatgagaatagatgtgatgaaaataaaaggtgagtatacttcccaacttattctatgagatcaatattactctgataccaaaaccagatgaagacatcacaagaaaaccaccaaccaggtggcagagcaagacgggagaataaaagcttgcactgtttgtggcccctgaaagaacaccaaattttaacagctatgtgcacataggaaagtactgtgacaagaaccaaaaatcaggtgagcaatcacagtacctagattttacttcatattgctgaaagaggcattgtaaaggatagaagagacagtcttaaattgcctataccacccctccctcatcttccagcagaggtcctacagtgcagaaagagtctgtgcacctggaggagggagagtacagag

SEQ ID NO: 333930 - DNA, 542 bp, Homo sapiens
cacagtcccagtggtggtggccccaagggtgcgtgccatcaccacacccccagttccaggtaactcagcacagacagagacaaacttcactttgggggagaaagtaagggaaaagaacaagtctttgctggtaatccagataattcttccagatcttatccaagaccaccaagagagtacctctatgagtctgcaaaaaccacagtgacattgagtttagggcccaattcccttcaaatacctcaaaagccttctcaagaaggatgagcacaaacaagcccagactatgaagactacaataaaaacctaactctttaatgaccagacaccaaagaatayttgcatcagcaccatccaggaatacgtgatctcaccatatgaactaaataaggcaccagggatcaatcctggagaaacgtatatgtgacctttgtgacagagaattcaaaatagatgttttgagaaaactcaaaaaattcaagatagcacaaagaaagaattcaaaattcaatagcacaaagaaggaattcagaattatatca

SEQ ID NO: 333931 - DNA, 470 bp, Homo sapiens
cgtttcatgatgttttaacactcagtgaaggaggatagatggacacttcatcaatctgataaacagcatctagaaaaaacccatagctaacagcatgcttaataatgaaggacaatgctttccttctaagagcgggaacaacacaagatgtctacttttgccacgtctattygatattgtactggaaattctagccaggacaatagggcaagaaaaaataaaaggcatccaggtaggaaaagaaaggttaaaactatctctatttgtagagggcataattttgtatatagaaaacacaaaggaacccacaaaaatgattagaactaataaatgagttcagcagtgtcataacacaaaatcaattgctcttatacactagcaatggacaatctgaaagtgaaattaataaaacaattttatttacagtagcatcaaaaaaaataaaatacctaggaacaaatttaacagaa

SEQ ID NO: 333932 - DNA, 477 bp, Homo sapiens
acttcctacagcatgggggaaaactatctagtatcacagtgaatttaaatagggctggtgtagaactgggaatatgttttaaccaattctccaggttctaatgggaatggctattgaaccactctctataaaacacaatgttaatcacatctcagccttttggctaagatcaagtgtagtatctcttcttatcagtttaaaacacaatgtttattttctccactggtattatacattcatacaacctatcttgcaataatcatttttaaatgctaaaagaatatacatttatggtaaaagaataaaattccattttaaaagctttcgtaaactaaataattttttgtaaagataagacattttaatgactaagaaatcttaaaaccttagtaggckctaagattgcaaatctcttctgtcattttgccatttgtctattaacttcttccctttttgaaagaaatgttttatttgaat

SEQ ID NO: 333933 - DNA, 607 bp, Homo sapiens
aagtaaaataatgcaacaaaygactatcattattatcgttgctgtagaattattatcaaaggtttttgatgtagttgaatatttaattttgaccaagagcatacataattaaaaaaatacatgttctaaaactctattattcatatttttgcttgacaatttgatagtgcgagtgttttgccacatcttgcctttactgccaagaatgatttcaaggcctatctccatatgtaacttggtgtacaacccaggagaaatgtatgcctcttactgacatatggggaaacacatccaacaatccttttttagaatgtagcaaaagcttcctggcactttcgaacaatcttctgccatgctttgttccttcaaattgtacttcaagtgcatttgttactctctttctcttcgtgatcttcaagtttattatccattgccatatctttctgtttagttgtttaaataggaaggttctgtttagtttctctcttttggtacatgataactgcccctaagaggccccttttgtttctaattttatatccgtgattttaaagaaagattgagaaagtgtaggccacacagaattgacaaaaaaaagtaaacagta

SEQ ID NO: 333934 - DNA, 618 bp, Homo sapiens
aaaccaaaagtcaaatattaataattagagaaggcattaaattttcaaaacactaatctgttttttataaagaaaaaaattagtaagatgtatcacttgagttaacatgtaaaaaaaagtccaaaattgacctattgaattyatctaatatttggtccaatagcaaaaagaaagaaaaaggaaatgaattcatttatgagattgatcttacccagtgactactatgttaggaatgcacttgaatttggggaaaagtgattcaatattttttcagcataaaatgttttcataaaaaggcaaatttatatcacatgtgtatgtcacatgtaatatatagatacatatagatatttcatgacttattttacaaggttgcagtcttaacaactgtgaccccgcataattattggggcctttttcaattttgctttcttttcattacaatatctcttttgttcttttgtgtatctgcaatggttgagaaggcagttgaaaagcttcaaggcatatgaatgaagaatacacactacaccttccataaaagctaactgagcacctactatgtgcctggcatttatttatgccctttttacatacttcagcacatctcataaacac

SEQ ID NO: 333935 - DNA, 601 bp, Homo sapiens
agtgatatctgagtgtaaccagacagacatgtcttttctttagataaatttaattgtaagagaaaaaatcaaggttaggggaggggaggaggatgattattcacacagacctgtagtgctttgatctctctggtatttgtttctatttgttaactcaaaaacaggctggttattttttcccacgttgatcttactacaaggatgtcagcgttcatgtactgagtatgtatttgaggagacctttcataagtctcctcaattcatctatgtttggcaatcagtcaggcaacatatgaaggtgacatggcactaccattttaattccaagagaaggaataaaattattatatatcttatataaaatgacaaataaaaatatgacaatgtggtgattacaaatgaaattatttatttacattcctaaacatacattgagatagccagaactgcttttgtagtttgtatttatacagatctatacacatttgccagatatagaaaatacaaagrtgggaaactagttaaacattttttctgaaattcagatttaactaatgaactgtttttaatctgtaaaccagatctatgtaaaaaatgtatc

SEQ ID NO: 333936 - DNA, 538 bp, Homo sapiens
taaggcttatctcattttttttttgacagggtctgcacataacaaagatcttaatggaagttgattataccggatgtctaaaggtgggtcagcctagctttttaagctcttaaaatgtctttgatttttgtcaaggttaccaaattaacagaactctargaccttttgtccttacttaaaagttaaaacttagaggctcgcactacatacattttgattttttttttttttttagatttcccacattaggtttggagataaactcacgaatttataagaagggctctggagataagcaaggcaaggcttgaagctgaggtcccttgtagtcatgagtgctaagggagtatggcctctgatttcagaaatggagagaaagtttattttcatctatgatttattaatttctttagcaaatattaattattaattaagcatcctgacagagcaggagcatcgccatcttggacaagaaccaccattttaaagttccccttgatcaaaaaactgcctaatccaatcaaaagggcatcagcct

SEQ ID NO: 333937 - DNA, 541 bp, Homo sapiens
aacatttaataaattaattattactaaatgtgtcagaaaaacatttaaatatgtattaaaatatgaagtaggtagagatgtcttattccatacaatcctaaagaatttcatgtgaacacaaactaaaatgtaggtcatagttcctgaaattacgtcttgtctaatataatcatatagsatacatttctgaattttaaattcggaggatgattttaaaaaactaactttaagctattagaaatattaggaattggaaaaaccaagaaaataaagttcaccaaaaatatagatatagatatagatatagcacagcttttctggttgcttatttttaaatggctaataatatagatcatgatttcattttttgggaggatgtcatgtaagtatggtacccgctacccccgaagcaggttgctaacactaaatacagtgtgcataaaattagatatcctacataggaggcaagttatttcctcaaatttttttctcatcaatattatggttttagtactaggacaagggcatcttttttaacaga

SEQ ID NO: 333938 - DNA, 621 bp, Homo sapiens
tgaatgaaatcaataattagctgtgtttaaaatatacatgttgtatagaaattttagtattctatcttttttcagctttctatgtgggcttctgaaaagcttttatttcctaattttgtagttaccaaattatcatgaaaaatatttcttgtctgagacaatgcaggagaaatcctgttaaatattacacgttaacattttaatcatgttgaatcttatttagtttcattcaccattagcaaatatgggttctgcttacacagataaaattacaaagtttttacagtcactaaggactaatgataaagtgktttttttttgtctgttaaaatatctgtaatttatgtactacagaatttctgttttctctctccccctcctatcctcatttattcccaagaagtgcttgatttagttcccatgcattgcattcctcacaaagtgatacccctgcccccacccttgttttattaactcaaactaaatggaacacaactgccaaatgtgtctcacttggtctgctagcatcttcctttgagtaaaaatcgcaaactgtcagaatgtcatggactgaacatttttaactacatctaagaaaatgggcaatacaataatgagtga

SEQ ID NO: 333939 - DNA, 603 bp, Homo sapiens
catcgtatgttctcacttgtaagtgggagctatgatatgaggacacaaaggcataakaataatattatggactctgggcactcaggggtaaagctaccagggtaaagggtgaaagactacacattgggttcagtgtgcactgcttaggtgatgggtacacccaaatctcagaagtcaccactaaaaaatttatccatgtaaacaaacaccacctgttttcccaaacaatggaaataattaaaaaagaaaattgtactgtaaagtagcctttcctttcttcaacatatttttgttttcatttatttatttatttattcatttattggagatggaatcttgctctgtcacccagactggagtgcagtggcgcgatctcggctcactgcaagctgcacctcccaagttcaagcaattctcctgcctcagcctcccgagtagctgggattacaggcacctgccaccatgcccagctaatttttgtatttttagtagagacagggtttcaccatgttagccaggttggtctcgaacttctggcctcaggttactttcccagcttggcctctcaaagtgctgagattacaggcatgagccaccacgccc

SEQ ID NO: 333940 - DNA, 450 bp, Homo sapiens
cacatttttacgtataagattcctcactaacygatctagaagtaaaaatgacctctgtggtagtgcacttttccctggtttgcttgtgttgttttgtttttaccaccatgtggcttagctagttctcactagatgtgctctgctctatggaactgcctgaaagacacaaagctagaatcacagtgtttcctctcaccccctttgaatagttcttcacagctacttgcaggcagtacaaaccattttgctatttcaccttcttccccaaataccctttatttgcctgatgtttgggtcccacaaatgcttggtgttttatgcagatgctgcctcgtgcatgataaatacaatgggtgactgcacatctggattcctgcagatcctctgctcagagaccatgcccttccatcagctactcctctctgctatgaaatcagcagcgagcccttc

SEQ ID NO: 333941 - DNA, 450 bp, Homo sapiens
cacatttttacgtataagattcctcactaactgatctagaagtaaaaatgacctctgtggtagtgcacttttccctggtttgcttgtgttgttttgtttttaccaccatgtggyttagctagttctcactagatgtgctctgctctatggaactgcctgaaagacacaaagctagaatcacagtgtttcctctcaccccctttgaatagttcttcacagctacttgcaggcagtacaaaccattttgctatttcaccttcttccccaaataccctttatttgcctgatgtttgggtcccacaaatgcttggtgttttatgcagatgctgcctcgtgcatgataaatacaatgggtgactgcacatctggattcctgcagatcctctgctcagagaccatgcccttccatcagctactcctctctgctatgaaatcagcagcgagcccttc

SEQ ID NO: 333942 - DNA, 660 bp, Homo sapiens
tgcaatgccttctgtgtcccggggtctgcctggtctatccttcagaataaggtcagcggctcatggctaaggaggaacagatggaagccttcagagcaggtcgtcattcctaaggaaagtttttagcccctgtgaggtgcatgaacctttcattttactattctgactctgctgagagaggggaggggaatagatcctcagaaggaaagatttggaagcagctattttacatccatgctttggaaaccttgggtccacaagcctattctgagcgcctgggctctgcccagctctgtgcargagttgggggatgtcgaactcaaaaggtacaagccctcccctccaataactcactttcatagtacaaggtggtatatgctccaacacagggcactggaggcttatcaagatatgtgcaaagtgctatgggggcttaaaagactgattcattcatccaaccaaccaggataagcagctactatgtgtaaggcattgggctggcctctgcaggcgggggtcaaagctgaggaaaaaagataggttcctgccttcattggtcttacaataaagtaagggtggtggtgaaaaacttatgggagaaataaggcttcatctagggaactacctttgttggatcttgaaggatgcacaggagctttt

SEQ ID NO: 333943 - DNA, 577 bp, Homo sapiens
ttcattttactattctgactctgctgagagaggggaggggaatagatcctcagaaggaaagatttggaagcagctattttacatccatgctttggaaaccttgggtccacaagcctattctgagcgcctgggctctgcccagctctgtgcaggagttgggggatgtcgaactcaaaaggtacaagccctcccctccaataactcactttcatagtacaaggtggtatatgctccaacacagggcactggaggcttatcaagatatgtgcaaagtgctatgggggcttaaaagactgattcattcatccaaccaaccaggataagcagctactatgtgtaaggcattgggctggcctctgcaggcgggggtcaaagctraggaaaaaagataggttcctgccttcattggtcttacaataaagtaagggtggtggtgaaaaacttatgggagaaataaggcttcatctagggaactacctttgttggatcttgaaggatgcacaggagcttttcaggtaaaatggatggtgatgaagagaggacattcctggcagagggaaatcaagaacaaatgttt

SEQ ID NO: 333944 - DNA, 539 bp, Homo sapiens
gtgtgtaacattcatccaaaacatgaatacatggtcctctggccatggagagaaaactctgaaataattatttctctccttactcacattttctccagacttgtttttgagcccctaccaatccattgccttatttcttgccctcacccaatgttccagttccccatttacctttctgagatgccattcctatagaccattgtgcacacactgggctactgatggctcagctatatttggaaattcaagatgagctgttgccagttgaagtcgatcgtgcaggacctgagacctgaagttgagtcaatacacatgctcattccatttttaactatcactttcatgtgtgttgtacctaggtccatagtgaagaagtggaaaggaaatcacttcctttctgagacagtgtcaaagggtgtggtctcstaggttcccgtcaatcctgagtgtgtcattctgtcttttctcacctctgtccacacatacattggttcttagttgggtgcaaacttctagaagctgttgcaaagttgggtcac

SEQ ID NO: 333945 - DNA, 539 bp, Homo sapiens
gtgtgtaacattcatccaaaacatgaatacatggtcctctggccatggagagaaaactctgaaataattatttctctccttactcacattttctccagacttgtttttgagcccctaccaatccattgccttatttcttgccctcacccaatgttccagttccccatttacctttctgagatgccattcctatagaccattgtgcacacactgggctactgatggctcagctatatttggaaattcaagatgagctgttgccagttgaagtcgatcgtgcaggacctgagacctgaagttgagtcaatacacatgctcattccatttttaactatcactttcatgtgtgttgtacctaggtccatagtgaagaagtggaaaggaaatcacttcctttctgagacagtgtcaaagggtgtggtctcctaggttcccrtcaatcctgagtgtgtcattctgtcttttctcacctctgtccacacatacattggttcttagttgggtgcaaacttctagaagctgttgcaaagttgggtcac

SEQ ID NO: 333946 - DNA, 611 bp, Homo sapiens
ttatctgcataaaattgagtttgcctttaatgctcaataacaggtgaatagaagagaggcatcattgcaaatgcagtcagggtgatgcaaggtgtttaattgggcaagcagaactgcccaaggagttggcagggagccctaaaatgtggcattgcaagtctagtcacttgggccactattgtgattgatctttaatcagtaggttttcaaggattgagttaactcacaagtggtaatggaagcaatgaatggacagagtggcaatgtcagttacccgtcggttcgacaaaagaaaacccaccatgtcctgaaggtttccattactaggcatatcagaggtcacagagaatgacataggggcacatccatggcatttttctatggccattgaaatgtggtaatgactaaatctgactgtcaaatgcacattgaaggtcattatcagcacarttctagcctggatgctcactctgggaagcctgcaacctggccagtcacccaagacaatcactgatccatgaaatcacaataaaacagattaagaacacttccaaaaattatgaggcatgatgatgtaggtgttgacgctgtctgctgtcggtgtgttcgtt

SEQ ID NO: 333947 - DNA, 559 bp, Homo sapiens
tagctaatcactcaacagtggaaataaaacagaaaactaaaaattattcaattaaagttttaagtaaaaagagaaaaaacaatagattgtttaaawagaaaacaaggttcaaacgggtaaaatcaaactcatttgaatacttctattaaatgtaaaatagactccattaaatgaaaaaaattatattttgtaaaaagcaagctccaagtgtagactatctatattgaacactttaaatgtgaagacataagtgagttaaaaattaaaggataggaaaagaaatgccacgcaaacactaatcttaagaaaattggagtggccatattaatatcagagaatggagacttccagacagatcaaggaatatagctagggcattagggaatattttaggctgatggaaatatactatattatgatgttagtaaatacatgagtacatgtatttgtcagacatcatcaaaaagtacacttaaaatgattgtgtttcattgtatataaattgtacttccactgaaaaatgttgattttttttaaaaaaaagaagtagaaccatata

SEQ ID NO: 333948 - DNA, 371 bp, Homo sapiens
ctatcacgcctacggcctgactacattatctgtctccaggtggttttggccagagctgacttcacatgtggctcctgggcagacctgtaccccaggcctttgcaaccagcatgtgacccatgcagagtcaatgagattcaatcgagggcttaaaatgttttttgaaccatagagaaaatcaatgtagtgctgctccagrggagctgagaactggaacgatgctactagcagccatccttcctttatgagaaaggggccgagatcaagggaagcagagcagaggaaagaagtccttgacaccattgtttaagtctctgaatccagccatgcctgaagtcataacccctggacttttctgtcctgttagctaa

SEQ ID NO: 333949 - DNA, 476 bp, Homo sapiens
tgcttggcatgtaattaattcaaaattacagaaacattaaatgtgtaattaaatctgcacggaatgtttagggctttygctggcatttacaaaggaagctaagggaaatttattagctagcaatttattgctcaaaatactggcaactcaggagtatgttgatggaaatctagcttgttgtcaatctgctgttagaggccaattaaaggttcaaagccttacaaaccagtggccaaagaacagggttgccaagcatagagtttgtcagcttccaccgtttgtcctttccattccatctcaacaagtgtttgtatacccaggatgataagcacaccatactcgttacttaaatacttaattgacacattaaaatgtggtccacaggagacccggatgagataaaagcaatgttatatttggaatcctcaccaattgacaaacttcactatgtttaatcagaatacactatttttttt

SEQ ID NO: 333950 - DNA, 476 bp, Homo sapiens
tgcttggcatgtaattaattcaaaattacagaaacattaaatgtgtaattaaatctgcacggaatgtttagggctttcgctggcatttacaaaggaagctaagggaaatttattagctagcaatttattgctcaaaatactggcaactcaggagtatgttgatggaaatctagcttgttgtcaatctgctgttagaggccaattaaagkttcaaagccttacaaaccagtggccaaagaacagggttgccaagcatagagtttgtcagcttccaccgtttgtcctttccattccatctcaacaagtgtttgtatacccaggatgataagcacaccatactcgttacttaaatacttaattgacacattaaaatgtggtccacaggagacccggatgagataaaagcaatgttatatttggaatcctcaccaattgacaaacttcactatgtttaatcagaatacactatttttttt

SEQ ID NO: 333951 - DNA, 659 bp, Homo sapiens
ccccctgtggccaccttgtagcatttacctgcacacacgggggtgaatcctcttctattcctcctcctcttcctgccacactcacaaccatgcaggcacaaagtttctcaagcagttaagagggaaaaaagttgattggtatagtttgtgtagttgatttgcatagtctgtacagttgatttccatagttgtctatattttctgcattggtcamtttttccctttatccatagctcttttcagcaattgtcattttctgcttaatgtcaataattcagtcttttctctgcaatattctgtaactgcagtaggacttttaaattctttgagatcaggagtttgtctcatctatctctgcaacactaagggcacatggcacccaggagagcttggtgactgcttgctaaatgaaatattatcttccagaactctgaagacacagccattgatgcatagcaaattaaaaagaaaaaccctaaacaaaattggaatagtttatttttaaaaatgtcacagtgttgcctatttacaactatatataaacaacctgaacagcacagttcactttcaggttcggaagagagattgttgaatgtgtcatggccctgccacgcctatctccatggtgatgtcttctcactttgccttcctcctgagaa

SEQ ID NO: 333952 - DNA, 659 bp, Homo sapiens
ccccctgtggccaccttgtagcatttacctgcacacacgggggtgaatcctcttctattcctcctcctcttcctgccacactcacaaccatgcaggcacaaagtttctcaagcagttaagagggaaaaaagttgattggtatagtttgtgtagttgatttgcatagtctgtacagttgatttccatagttgtctatattttctgcattggtcaatttttccctttatccatagctcttttcagcaattgtcattttctgcttaatgtcaataattcagtcttttctctgcaatattctgtaactgcagtaggacttttaaattctttgagatcaggagtttgtctcatctatctctgcaacactragggcacatggcacccaggagagcttggtgactgcttgctaaatgaaatattatcttccagaactctgaagacacagccattgatgcatagcaaattaaaaagaaaaaccctaaacaaaattggaatagtttatttttaaaaatgtcacagtgttgcctatttacaactatatataaacaacctgaacagcacagttcactttcaggttcggaagagagattgttgaatgtgtcatggccctgccacgcctatctccatggtgatgtcttctcactttgccttcctcctgagaa

SEQ ID NO: 333953 - DNA, 579 bp, Homo sapiens
attgtcatcgtcatcatcgtggcaccatcaccattaatgccatttgtctgagaccctctcttttggtgaggaagggtagaaggttacaggtgaaaaccagagcaacamggagaaatctaaccggtgcctaacaattgctttcactgagtacccaaagtcaatgtgatctcaatggtacaaaggaagaactgagcgatagatatgttaacagtattgcttatgaatatatctttaactctcattcaccctgcacatctcagcccaatcatcagctacccagggaaaccttccctgaagccctggacaatcaaatcttcctggtatgtaatcttttcgtatcatgcacccaccagctttgtaattctcacaattgcatgtttatttttatttctattattgtttgactactatctgtttgtgccataacactgtaagctccttatatcattttgcttactgttataccccagttcttggcacacataggtaatcaataatttcatgttttgttttttagagacagagtcttgctctgtcacccaggctgaagtgcagtggtgcaatcatacctcactgcaa

SEQ ID NO: 333954 - DNA, 579 bp, Homo sapiens
attgtcatcgtcatcatcgtggcaccatcaccattaatgccatttgtctgagaccctctcttttggtgaggaagggtagaaggttacaggtgaaaaccagagcaacaaggagaaatctaaccggtgcctaacaattgctttcactgagtacccaaagtcaatgtkatctcaatggtacaaaggaagaactgagcgatagatatgttaacagtattgcttatgaatatatctttaactctcattcaccctgcacatctcagcccaatcatcagctacccagggaaaccttccctgaagccctggacaatcaaatcttcctggtatgtaatcttttcgtatcatgcacccaccagctttgtaattctcacaattgcatgtttatttttatttctattattgtttgactactatctgtttgtgccataacactgtaagctccttatatcattttgcttactgttataccccagttcttggcacacataggtaatcaataatttcatgttttgttttttagagacagagtcttgctctgtcacccaggctgaagtgcagtggtgcaatcatacctcactgcaa

SEQ ID NO: 333955 - DNA, 619 bp, Homo sapiens
gttcttttatatttcattttatccaattctcaacttcttttccatcccaaagaataccccatcgcygctctcaagcttttccggacattctgcagtaatatctacctcatctgaactgaaaactctctcgcctcttgtactcaattggcctttaccgttcactgtcttctgacatctcttaaatagtgattagtcattaatgcatctcgccaactagacagtaagcattttatacttctttttaatgtctattattttcagaaaatatgtgatacctaataagtaagtttttaaagtttgctgaacgaacacagtaagttctttgttgtactacttgttttctggaactgtgatgttgtttatgtcgagtcccagaagttaaggcagaagggaattgagaaactgaccctgaaattatgtcataaaaaactgagagttaaaaaagaagccatggctttctattgcaactttaactttcctagtatgcttagtacttattttttatttttatttatttattttttgagatggagtctcaaactgtcacccaggctggaatgcaatggcgcgatcttggctcactgcaacctctgccttccaggttcaagcggttgttctg

SEQ ID NO: 333956 - DNA, 660 bp, Homo sapiens
gtgtcagcaccaacctctcgggactttgcagagtatggcacagattttagcttcattataagagtagcaggaaggcactgaagagtttaaattggcaagtaatgggagctgaactgtgcttttcaaagactactctgtctgctcttyacagctgaagaaggactgaatatgggttggagggagagagtgagagcaagcgtagctgggagcaaacatggagtgtaagaacagaggagagaattagccgcaggctagggaccttggaaggacacttctcactaaaagccacactcagctagagagcctttttaacagtgagtgatcgttcttctctggtgtttctctctgtccgtccctaatccaagccaagagagaatgaaggctcttagtttaaaaggtcctctggtcctttgctgccccgttcttgcttttctagccagacatggttctctgaggatttgttaaattttagagcccagtggtcaagtaaacatggggtggtactcaaagaaactcacaggtatttattacccaaagctactgcatttggggattattaaatacagacatatagacacacatgtatgcaaggtcattggagtgacatcccatcctgagaacaggggccaccttctacaaatgccaaaaatgcacttcgcg

SEQ ID NO: 333957 - DNA, 556 bp, Homo sapiens
cagctgggccttcacctggtcttccaacaagccccaactcgacaagagccaaagcaagagacaccatttggaggggaagataagaagtcttcacaaggtcttttccggtgttctgctttttcctgggaggcggccttggcgtgtccctgagacctcctgtgatgctcacggctctggcgctgccatttttcttgggtgtcgtctggtgrtgtctgcaaggccagctgtaatgtcagggctgtgctcgatagcacagaaaagacagcgtcctggaggagagcttgttggagcagatttacaagggagggtgcgggtgtcactcatcgttcacgctacaggacaatccctttcactctgggagctgagtcccaggtgagagctaagttccaggcgagaccagggagtcgaggggactggatttctgcttctctcccaggagctgcgggctgggaaggggaaggaacagagctgaggtgtgacatcgcccccggtttcccctgttgcccaggttatagcttgggtggggctgacttcagaggcaacattagaacctttt

SEQ ID NO: 333958 - DNA, 556 bp, Homo sapiens
cagctgggccttcacctggtcttccaacaagccccaactcgacaagagccaaagcaagagacaccatttggaggggaagataagaagtcttcacaaggtcttttccggtgttctgctttttcctgggaggcggccttggcgtgtccctgagacctcctgtgatgctcacggctctggcgctgccatttttcttgggtgtcgtctggtgatgtctgcaaggccagctrtaatgtcagggctgtgctcgatagcacagaaaagacagcgtcctggaggagagcttgttggagcagatttacaagggagggtgcgggtgtcactcatcgttcacgctacaggacaatccctttcactctgggagctgagtcccaggtgagagctaagttccaggcgagaccagggagtcgaggggactggatttctgcttctctcccaggagctgcgggctgggaaggggaaggaacagagctgaggtgtgacatcgcccccggtttcccctgttgcccaggttatagcttgggtggggctgacttcagaggcaacattagaacctttt

SEQ ID NO: 333959 - DNA, 556 bp, Homo sapiens
cagctgggccttcacctggtcttccaacaagccccaactcgacaagagccaaagcaagagacaccatttggaggggaagataagaagtcttcacaaggtcttttccggtgttctgctttttcctgggaggcggccttggcgtgtccctgagacctcctgtgatgctcacggctctggcgctgccatttttcttgggtgtcgtctggtgatgtctgcaaggccagctgtaatgtcagggctgtgctcgatagcacagaaaagacagcgtcctggaggagagcttgttggagcagatttacaagggagggtgcgggtgtcactcaycgttcacgctacaggacaatccctttcactctgggagctgagtcccaggtgagagctaagttccaggcgagaccagggagtcgaggggactggatttctgcttctctcccaggagctgcgggctgggaaggggaaggaacagagctgaggtgtgacatcgcccccggtttcccctgttgcccaggttatagcttgggtggggctgacttcagaggcaacattagaacctttt

SEQ ID NO: 333960 - DNA, 556 bp, Homo sapiens
cagctgggccttcacctggtcttccaacaagccccaactcgacaagagccaaagcaagagacaccatttggaggggaagataagaagtcttcacaaggtcttttccggtgttctgctttttcctgggaggcggccttggcgtgtccctgagacctcctgtgatgctcacggctctggcgctgccatttttcttgggtgtcgtctggtgatgtctgcaaggccagctgtaatgtcagggctgtgctcgatagcacagaaaagacagcgtcctggaggagagcttgttggagcagatttacaagggagggtgcgggtgtcactcatmgttcacgctacaggacaatccctttcactctgggagctgagtcccaggtgagagctaagttccaggcgagaccagggagtcgaggggactggatttctgcttctctcccaggagctgcgggctgggaaggggaaggaacagagctgaggtgtgacatcgcccccggtttcccctgttgcccaggttatagcttgggtggggctgacttcagaggcaacattagaacctttt

SEQ ID NO: 333961 - DNA, 598 bp, Homo sapiens
ctaaatgaagcaagggagtgaaccaccacagccagctggaggaagagcattttgagaatacagaataagtgcaaaggccctggggtggtcggggagggtggtctgtgcaagagcatgacgaagtccatcgtggctgaggagtggtcagaagaacctgaccatgtgtgcctgttggttatttaaggattttggttttaaccaaagtgagctgggtggctgctggagggtgtgaaggaagagactcctaatctgagatggatctctgggatgaatggttgttggtgtttgagaagctattgcagtaatcgagtcaagaaatggtgctggcgtggccccgggtggcagtggtgggtgaaagcactgagagtgtgttctgcraggagacttgccaagattgacccacagaccacatgtgggatattagggagcataacagtcaggtttctggcccagcccctgcaagtatagagtgccattgtttttagattgggaatgctgagaaaggaacaggtttagggttatgtttggtttgtaaagtttaagatgccattggatactgaaataaatgtatgaatctggagttcacagaaaaggtttc

SEQ ID NO: 333962 - DNA, 573 bp, Homo sapiens
cctcactgattcatctttcagttggctgggttatatctgcaagtagatttttcagtgaggtttatgaatgccattaattcctgagcttttgcccatttgcaaatgtcttattatgctgcattttaatgacatttcaatccaatcacattgtcttccttcttgccctaactcccctactcttgttttttccttttgagccagagtctcgctttgtcacccaggctggagtgcagtggcgcagtcacaactcacggtaacctcgaactcttagattcacactatcctcccacctctgcctcccaggttactgacaccacaggcacgcatcaccacacctggctttttcttttagggggcagggggacagagacagggtcttgctatgttccccaggctggtctccaactcctgggctcaagcaatcctcctgccttggcctcccaaagtgctgggattacaggmattagccactgtgcccagtccccctacattcttaagcattgcttcatcatcttttggcacattacactgttgaaaaccccaagactaaggtgattttattttttccattat

SEQ ID NO: 333963 - DNA, 573 bp, Homo sapiens
cctcactgattcatctttcagttggctgggttatatctgcaagtagatttttcagtgaggtttatgaatgccattaattcctgagcttttgcccatttgcaaatgtcttattatgctgcattttaatgacatttcaatccaatcacattgtcttccttcttgccctaactcccctactcttgttttttccttttgagccagagtctcgctttgtcacccaggctggagtgcagtggcgcagtcacaactcacggtaacctcgaactcttagattcacactatcctcccacctctgcctcccaggttactgacaccacaggcacgcatcaccacacctggctttttcttttagggggcagggggacagagacagggtcttgctatgttccccaggctggtctccaactcctgggctcaagcaatcctcctgccttggcctcccaaagtgctgggattacaggcattagccactgtgcccagyccccctacattcttaagcattgcttcatcatcttttggcacattacactgttgaaaaccccaagactaaggtgattttattttttccattat

SEQ ID NO: 333964 - DNA, 550 bp, Homo sapiens
cccctgcttggcctcgcagggcaccactggccagctccccgctctccaatttttcttctgttgccgtgatggtgaatgttagttgtcaacttgattggattgaaggatgcctagatagctggtaatgtgtgatttctgggtgtgtcggtgarggtgctgccagaggagactgacgtttgagtcagtggactgggagaggaagacccatcctcagtgtgggtgggcaccatcccatcggctgccagtgcaggcagaacaaagcaggcagaagaaggtaagataagcttactcgctggttcttctggcttcttgctttatcctgtgctggatgcttctttcagcttctcctgcccttggacatcagactcccggttcctccgcctttggactctggcacttatgctagtggtttgccgggggctctccagcctttggccacagtctgaaggctgcattgtcagcttccctggttttgaggcttttggacttggactgagccactaccggcttctctcttcccgagcttgcagatggcctatggtgggacttc

SEQ ID NO: 333965 - DNA, 550 bp, Homo sapiens
cccctgcttggcctcgcagggcaccactggccagctccccgctctccaatttttcttctgttgccgtgatggtgaatgttagttgtcaacttgattggattgaaggatgcctagatagctggtaatgtgtgatttctgggtgtgtcggtgaaggtgctgccagaggagactgacgtttgagtcagtggactgggagaggaagacccatcctcagtgtgggtgggcaccatcccatcggctgccagtgcaggcagaacaaagcaggcagaagaaggtaagataagcttactcgctggttcttctggcttcttgctttatcctgtgctggatgcttctttcagcttctcctgcccttggacatcagactcccggttcctccgcctttggactctggcacttatgctagtggtttgccgggggctctccagcctytggccacagtctgaaggctgcattgtcagcttccctggttttgaggcttttggacttggactgagccactaccggcttctctcttcccgagcttgcagatggcctatggtgggacttc

SEQ ID NO: 333966 - DNA, 550 bp, Homo sapiens
cccctgcttggcctcgcagggcaccactggccagctccccgctctccaatttttcttctgttgccgtgatggtgaatgttagttgtcaacttgattggattgaaggatgcctagatagctggtaatgtgtgatttctgggtgtgtcggtgaaggtgctgccagaggagactgacgtttgagtcagtggactgggagaggaagacccatcctcagtgtgggtgggcaccatcccatcggctgccagtgcaggcagaacaaagcaggcagaagaaggtaagataagcttactcgctggttcttctggcttcttgctttatcctgtgctggatgcttctttcagcttctcctgcccttggacatcagactcccggttcctccgcctttggactctggcacttatgctagtggtttgccgggggctctccagcctttggccacagtctgaaggctgcattgtcrgcttccctggttttgaggcttttggacttggactgagccactaccggcttctctcttcccgagcttgcagatggcctatggtgggacttc

SEQ ID NO: 333967 - DNA, 449 bp, Homo sapiens
tggggaaccttaccagggttcttttggtctcygccttgcctggggcccagaagtggtggtgaggggttgctccctactctggagctctggatgctgatcagagaccctccatgcctggtgacatctcagactcagtgaacagcctcaggggcccttcacaaaactgggctgtcagggccacctggagctcagagtggtaatttggtttcatttgaacttcaattttcgttgctttgaaatctcattcagttgaatttaataacaaataaataattcatggggactggacaatgaaaggaaaatttaaaaatgtgttcacccaaatatataaaggggcaccttgtccctcagccctgttctctaccttcttttctcagctggcttctgggcagattcatggggccaaaggatgatgcattaactctctcagggtgctgagggttctctca

SEQ ID NO: 333968 - DNA, 449 bp, Homo sapiens
tggggaaccttaccagggttcttttggtctctgccttgcctggggcccagaagtggtggtgaggggttgctccctactctggagctctggatgctgatcagagaccctccatgcctggtgacatctcagactcagtgaacagcctcaggggcccttcacaaaactgggctgtcagggccacctggagctcagagtggtaatttggttycatttgaacttcaattttcgttgctttgaaatctcattcagttgaatttaataacaaataaataattcatggggactggacaatgaaaggaaaatttaaaaatgtgttcacccaaatatataaaggggcaccttgtccctcagccctgttctctaccttcttttctcagctggcttctgggcagattcatggggccaaaggatgatgcattaactctctcagggtgctgagggttctctca

SEQ ID NO: 333969 - DNA, 449 bp, Homo sapiens
tggggaaccttaccagggttcttttggtctctgccttgcctggggcccagaagtggtggtgaggggttgctccctactctggagctctggatgctgatcagagaccctccatgcctggtgacatctcagactcagtgaacagcctcaggggcccttcacaaaactgggctgtcagggccacctggagctcagagtggtaatttggtttcatttgaacttcaattttcgttgctttgaaatctcattcagttgaatttaataacaaataaataattcatggggactggacaatgaaaggaaaatttaaaaatgtgttcacccaaatatataaaggggcaccttgtccctcagccctgttctctaccttcttttctcagctggcttctgggcagattcatggsgccaaaggatgatgcattaactctctcagggtgctgagggttctctca

SEQ ID NO: 333970 - DNA, 449 bp, Homo sapiens
tggggaaccttaccagggttcttttggtctctgccttgcctggggcccagaagtggtggtgaggggttgctccctactctggagctctggatgctgatcagagaccctccatgcctggtgacatctcagactcagtgaacagcctcaggggcccttcacaaaactgggctgtcagggccacctggagctcagagtggtaatttggtttcatttgaacttcaattttcgttgctttgaaatctcattcagttgaatttaataacaaataaataattcatggggactggacaatgaaaggaaaatttaaaaatgtgttcacccaaatatataaaggggcaccttgtccctcagccctgttctctaccttcttttctcagctggcttctgggcagattcatggggccaaaggatgatgcrttaactctctcagggtgctgagggttctctca

SEQ ID NO: 333971 - DNA, 516 bp, Homo sapiens
agagatcagatatctactgtatttagatcaactattacattatcaacagtggaggaataaggaaatctaggatgctgtttagtagcaaggaatgcatcaacaatagataaaacgtggccaggcatggtggctcacacctttaatcccagtattttgggaggctgaggcgggtggatcatttgaggccagaagttcgagaccagcctggccaacatggtgaaaccccgtctctactaaaaatacaaatattagccaggtgtggtggcgcatgcctgtaaccccggctcctcaggaggctgaggcaggagacttgcttgaatccaggaggcagwggttgcagtgagctgagattatgctgctgcactcctgcctgggcaacagagtgaaactccatctcaaaaaaagaaaaaaaaaaaaggaatccctcagtaggtactaaataaaacagggaaaaaaacataactaaacatagctacaaactttcttttctttctttcttttttttgtgataagaac

SEQ ID NO: 333972 - DNA, 498 bp, Homo sapiens
ggatgacatgatcttatgtgtagacaacccaaactttcttatcttcacagaatattttgcaagagttgagctcctagaaaatgagcttagatcatttctcccctctggccagtaacaagatgctcctacactgagcttcatttagcacagccctggacacaccaccaggcactcagcaaacatcagacaatttccagttcaatggaaaattctcagttatccatggcagaatcatggccctgtcatgcactggctgagtttscttgaggaagctgcttaagctttctgactcttggttttgttatctgcaaaaggggaatagcagtgtctataccacagggataatatgaaggctaaatgagatcctgtaaagcaatctttccaagtcctgagcttgacacaataataaaaactaacctttatttaattattgaggtagaggaaggaggataaagaacaggaccaaagaacagaagttatttcccagtgaacttaaac

SEQ ID NO: 333973 - DNA, 498 bp, Homo sapiens
ggatgacatgatcttatgtgtagacaacccaaactttcttatcttcacagaatattttgcaagagttgagctcctagaaaatgagcttagatcatttctcccctctggccagtaacaagatgctcctacactgagcttcatttagcacagccctggacacaccaccaggcactcagcaaacatcagacaatttccagttcaatggaaaattctcagttatccatggcagaatcatggccctgtcatgcactggctgagtttccttgaggaagctgcttaagctttctgactcttggttttgttatctgcaaaaggggaatagcagtgtctataccacagggataatatgaaggctaaatgagatcctgtaaagcaatctttccaagtcctgagcttgacacaataataaaaactaacctttatttaattattgaggtagaggaaggaggataaagaacagraccaaagaacagaagttatttcccagtgaacttaaac

SEQ ID NO: 333974 - DNA, 566 bp, Homo sapiens
gttaatttaaatcagagtggagttagtgggcattattattttattcctgatttttagtgggatagttctggtgtttgtttgtttgtttgttttcacttattgtggtctaagagggtttgcgaatgttctttgtattcatttttttgagtcagagttycactcttgttgcccaggctggagtgcaatggagcgatcttggctcactgcaacctccacctcctggattcaagcaatcctcctgcctcagcctctcaagtagctgcaattacaggcgcccgccatcacacccagctaattttttatatttagtagagacgggcttccaccatgttggccaggctggtctcaaacccctgacctcaggtgagccacccaccttggcccctcaaagtgctgggattacaggcatgagccaccgtgcctggctaggagatacaatctttataagttctgagtttaatgtgtctatatgaactaccttattaattatgttatttagggcttccaattttttttttttaattgagactgagtctccctctgtcgtacaggctggagtgcagtgg

SEQ ID NO: 333975 - DNA, 566 bp, Homo sapiens
gttaatttaaatcagagtggagttagtgggcattattattttattcctgatttttagtgggatagttctggtgtttgtttgtttgtttgttttcacttattgtggtctaagagggtttgcgaatgttctttgtattcatttttttgagtcagagtttcactcttgttgcccaggctggagtgcaatggagcgatcttggctcactgcaacctccacctcctggattcaagcaatyctcctgcctcagcctctcaagtagctgcaattacaggcgcccgccatcacacccagctaattttttatatttagtagagacgggcttccaccatgttggccaggctggtctcaaacccctgacctcaggtgagccacccaccttggcccctcaaagtgctgggattacaggcatgagccaccgtgcctggctaggagatacaatctttataagttctgagtttaatgtgtctatatgaactaccttattaattatgttatttagggcttccaattttttttttttaattgagactgagtctccctctgtcgtacaggctggagtgcagtgg

SEQ ID NO: 333976 - DNA, 566 bp, Homo sapiens
gttaatttaaatcagagtggagttagtgggcattattattttattcctgatttttagtgggatagttctggtgtttgtttgtttgtttgttttcacttattgtggtctaagagggtttgcgaatgttctttgtattcatttttttgagtcagagtttcactcttgttgcccaggctggagtgcaatggagcgatcttggctcactgcaacctccacctcctggattcaagcaatcctcctgcctcagcctctcaagtagctgcaattacaggcgcccgccatcacacccagctaattttttatatttagtagagacgggcttccaccatgttggccaggctggtctcraacccctgacctcaggtgagccacccaccttggcccctcaaagtgctgggattacaggcatgagccaccgtgcctggctaggagatacaatctttataagttctgagtttaatgtgtctatatgaactaccttattaattatgttatttagggcttccaattttttttttttaattgagactgagtctccctctgtcgtacaggctggagtgcagtgg

SEQ ID NO: 333977 - DNA, 566 bp, Homo sapiens
gttaatttaaatcagagtggagttagtgggcattattattttattcctgatttttagtgggatagttctggtgtttgtttgtttgtttgttttcacttattgtggtctaagagggtttgcgaatgttctttgtattcatttttttgagtcagagtttcactcttgttgcccaggctggagtgcaatggagcgatcttggctcactgcaacctccacctcctggattcaagcaatcctcctgcctcagcctctcaagtagctgcaattacaggcgcccgccatcacacccagctaattttttatatttagtagagacgggcttccaccatgttggccaggctggtctcaaacccctracctcaggtgagccacccaccttggcccctcaaagtgctgggattacaggcatgagccaccgtgcctggctaggagatacaatctttataagttctgagtttaatgtgtctatatgaactaccttattaattatgttatttagggcttccaattttttttttttaattgagactgagtctccctctgtcgtacaggctggagtgcagtgg

SEQ ID NO: 333978 - DNA, 223 bp, Homo sapiens
ggaggccaggtcttggcttcctggctgccactggccctggttaccayggacataagtatttccctttcattcagggcaggggttcatggcccctcctgcaaacaacagtgtgcgtccacgtgactattaaactgtcaaattcacaagacccactccaaaataaacccttatggtctccacaagcctatttctcctcactactatctgggaagcacagacttta

SEQ ID NO: 333979 - DNA, 499 bp, Homo sapiens
gttcaatgtcttaattcctggaggaaggagggagggagcgggggagagagagaaagagaaggaggggagtggaggggaggggagggaaggggacagcagggcgagacagggcagggcagggcagggaagactcttagaccatagtcagaacaacccaggcacctattctgagaaggaaaatacacgatggcccaagacctgaacctgagcagaggccagaccttgggtgcctggaagaggtttggyggggccaggcagaacaccacacttacgggtggtagccaaaccaggcatcgagtggaggaaagggatgaggatctttggggtgtttccacttggaagtccaggtggaaggctcagtagagagcgggcctgagctgaagctgagtgagactcttgtctctgaggacagctggcaggaagaaggcgtgccctgtagtgagaggggccaagcacagggagccatcctcactcacacacctgcacagtagtggcccag

SEQ ID NO: 333980 - DNA, 604 bp, Homo sapiens
taaatttaggaggaagtgaataaggtctcaccctcatctgcaaaacttgccaaatttgtccctcaaaaatatygttttatttattgggaggaaaaagttgtgtgtatgtaagagtgtaaaaatgaaatatccaagtcctttttgtattttcaggctaatatttaacttttcagagagtacacaatttatgaattcaactcattcctattataattagaatttatgttgagtttcatgaaattgtttattcttttctccttgagcacctctatttgacatttacaaatcagagttgaaagggtaccttttccagatattttttccttaggctatcttcatttacataagaaacatagcttcctagtctatccctacagacgaggttagttcctccagatgtaattagtaagagaaaaaccccttagtattccacttactgatttaatcaaacattctgctaatccaatattctccaaacaggattttgataacttcctggatgcacattgtaattacagagcagtggttgggaagcagctgaaggggatgacctagttccacgtgggccttcccaatcacactgagcctctacttctttagcaat

SEQ ID NO: 333981 - DNA, 525 bp, Homo sapiens
acccaggctggagtgcattgccacgatctcggctcactgcaacctccgcctcccaggttcaagagattctcctgcctcagcctcccgagtagctgrgattacaggcacccgccaccgtgcatggctaatttttgtatttttagtagggacagggtttcaccgttttggcgaggctggtcttgaactcctgacctcaggcgatccacctgccttggcctcccaaagcgctgggattataggtgtgaggcactgcacccagccttttttttttaaaaaaaatattttaaacccagttttactctttacacataggaagaagcttctgacttcatcacagatgtcagtgccctagctgcagaccacctggcaagcaggacctgagcagtgacatgctgaaggacagataactggattataagttcattcctttatttagcctatatattgaaacttttaaagtggtatatgcatatacgttttatcacctatgaatttaatttaaattaggaaaggagcattaaaata

SEQ ID NO: 333982 - DNA, 525 bp, Homo sapiens
acccaggctggagtgcattgccacgatctcggctcactgcaacctccgcctcccaggttcaagagattctcctgcctcagcctcccgagtagctgagattacaggcacccgccaccgtgcatggctaatttttgtatttttagtagggacagggkttcaccgttttggcgaggctggtcttgaactcctgacctcaggcgatccacctgccttggcctcccaaagcgctgggattataggtgtgaggcactgcacccagccttttttttttaaaaaaaatattttaaacccagttttactctttacacataggaagaagcttctgacttcatcacagatgtcagtgccctagctgcagaccacctggcaagcaggacctgagcagtgacatgctgaaggacagataactggattataagttcattcctttatttagcctatatattgaaacttttaaagtggtatatgcatatacgttttatcacctatgaatttaatttaaattaggaaaggagcattaaaata

SEQ ID NO: 333983 - DNA, 525 bp, Homo sapiens
acccaggctggagtgcattgccacgatctcggctcactgcaacctccgcctcccaggttcaagagattctcctgcctcagcctcccgagtagctgagattacaggcacccgccaccgtgcatggctaatttttgtatttttagtagggacagggtttcmccgttttggcgaggctggtcttgaactcctgacctcaggcgatccacctgccttggcctcccaaagcgctgggattataggtgtgaggcactgcacccagccttttttttttaaaaaaaatattttaaacccagttttactctttacacataggaagaagcttctgacttcatcacagatgtcagtgccctagctgcagaccacctggcaagcaggacctgagcagtgacatgctgaaggacagataactggattataagttcattcctttatttagcctatatattgaaacttttaaagtggtatatgcatatacgttttatcacctatgaatttaatttaaattaggaaaggagcattaaaata

SEQ ID NO: 333984 - DNA, 525 bp, Homo sapiens
acccaggctggagtgcattgccacgatctcggctcactgcaacctccgcctcccaggttcaagagattctcctgcctcagcctcccgagtagctgagattacaggcacccgccaccgtgcatggctaatttttgtatttttagtagggacagggtttcaccgttttggcgaggctggtcttgaactcctgacctcaggcgatccacctgccttggcctcccaaagcgctgggattataggtgtgaggcactgcacccagccttttttttttaaaaaaaatattttaaacccagttttactctttacacataggaagaagcttctgacttcatcacagatgtcagtgccctagctgcagaccacctggcaagcaggacctgagcagtgacatgctgaaggacagataactggattataagttcattcctttatttagcctatatattgaaacttttaaagtggtatatgcatatacrttttatcacctatgaatttaatttaaattaggaaaggagcattaaaata

SEQ ID NO: 333985 - DNA, 458 bp, Homo sapiens
gcagcctctgacctgcctgtctctgcagggagggatgcttgtttaaccccttagctcctgactatttctctgaagaactcagccacataaccgagttcagggaaaggcacctgcaggctctacctagcaacctcctgatcctgtccctccccatgtctatcatatgcaggtggggacaaggttctaaacccttacccaatgcccaggacatgctttggatccccactgggatgggaaacacaggcacctaggggaagggctaatgagatgggaggacacccaagaccttccctgctccatggtgtctctcaagaggaacctyctaatgagaatggtattgcgaccctaggaacttggacgaagccctgcctatggaaaaccaatcaggcaaggatcgagggattgtaaatacccaaggacactgtgcccacagcccagggctgcccagcccacctcct

SEQ ID NO: 333986 - DNA, 449 bp, Homo sapiens
ctctttaacttggctatggtggatcaagatcgtcactggaactctttggttgtgagactcaatatttattctgtgtaggcaggagcatattggacccatcatgaaactggtactgtcataggctagacctgtgacctcctaggtgaaataacaaaggctggaaagaggtgtccccatgggctttggggaagacttctcttgcccaacagtgagcttgagcaattacttttctaaattgattggtttattaaagaaatattaattggacaagacaaccatcaatgtgaacctagttcaacacaaagaacattcaggccatcagatgaccaaagtgaagcytcctggtacttagcatctgccttatcaactcaggcctgacaaggaaacatgtcggttgctggagaaacacccaaaccctaaatacctcctgtcacacagtggaaacctga

SEQ ID NO: 333987 - DNA, 449 bp, Homo sapiens
ctctttaacttggctatggtggatcaagatcgtcactggaactctttggttgtgagactcaatatttattctgtgtaggcaggagcatattggacccatcatgaaactggtactgtcataggctagacctgtgacctcctaggtgaaataacaaaggctggaaagaggtgtccccatgggctttggggaagacttctcttgcccaacagtgagcttgagcaattacttttctaaattgattggtttattaaagaaatattaattggacaagacaaccatcaatgtgaacctagttcaacacaaagaacattcaggccatcagatgaccaaagtgaagcctcctggtacttagcatctgccttatcaactcaggcctgacaaggaaacatgtcrgttgctggagaaacacccaaaccctaaatacctcctgtcacacagtggaaacctga

SEQ ID NO: 333988 - DNA, 449 bp, Homo sapiens
ctctttaacttggctatggtggatcaagatcgtcactggaactctttggttgtgagactcaatatttattctgtgtaggcaggagcatattggacccatcatgaaactggtactgtcataggctagacctgtgacctcctaggtgaaataacaaaggctggaaagaggtgtccccatgggctttggggaagacttctcttgcccaacagtgagcttgagcaattacttttctaaattgattggtttattaaagaaatattaattggacaagacaaccatcaatgtgaacctagttcaacacaaagaacattcaggccatcagatgaccaaagtgaagcctcctggtacttagcatctgccttatcaactcaggcctgacaaggaaacatgtcggttgctggagaaacacccawaccctaaatacctcctgtcacacagtggaaacctga

SEQ ID NO: 333989 - DNA, 315 bp, Homo sapiens
ggaaacatgtcggttgctggagaaacacccaaaccctaaatacctcctgtcacacagtggmaacctgaattactgtgaatccatttatgcggctctcttctctaagagcagaggaagcaggtgtggccagactcagaggaggtcctcaagcaggaggtgtacaagtcagggttctccagaggaacagaaccaatagaaggtagatatagacagatacagatatataagaggggatttatcagaggagttgtctcatacgcttatggaggctgagtcgcatgcaggccatctgcaagctatagaatgggggaagct

SEQ ID NO: 333990 - DNA, 458 bp, Homo sapiens
gcagcctctgacctgcctgtctctgcagggagggatgcttgtttaaccccttagctcctgactatttctctgaagaactcagccacataaccgagttcagggaaaggcacctgcaggctctacctagcaacctcctgatcctgtccctccccatgtctatcatatgcaggtggggacaaggttctaaacccttacccaatgcccaggacatgctttggatccccactgggatgggaaacacaggcacctaggggaagggctaatgagatgggaggacacccaagaccttccctgctccatggtgtctctcaagaggaaccttctaatgagaatggtattgcgaccctaggaacttggacraagccctgcctatggaaaaccaatcaggcaaggatcgagggattgtaaatacccaaggacactgtgcccacagcccagggctgcccagcccacctcct

SEQ ID NO: 333991 - DNA, 458 bp, Homo sapiens
gcagcctctgacctgcctgtctctgcagggagggatgcttgtttaaccccttagctcctgactatttctctgaagaactcagccacataaccgagttcagggaaaggcacctgcaggctctacctagcaacctcctgatcctgtccctccccatgtctatcatatgcaggtggggacaaggttctaaacccttacccaatgcccaggacatgctttggatccccactgggatgggaaacacaggcacctaggggaagggctaatgagatgggaggacacccaagaccttccctgctccatggtgtctctcaagaggaaccttctaatgagaatggtattgcgaccctaggaacttggacgaagccctgmctatggaaaaccaatcaggcaaggatcgagggattgtaaatacccaaggacactgtgcccacagcccagggctgcccagcccacctcct

SEQ ID NO: 333992 - DNA, 315 bp, Homo sapiens
ggaaacatgtcggttgctggagaaacacccaaaccctaaatacctcctgtcacacagtggaaacctgaattactgtgaatccatttatgcggctctcttctctaagagcagaggaagcaggtgtggccagactcagaggaggtcctcaagcaggaggtgtacaagtcagggttctccagaggaacagaaccaatagaaggtagatatagacagatacagatatataagaggggatttatcagaggagttgtctcataygcttatggaggctgagtcgcatgcaggccatctgcaagctatagaatgggggaagct

SEQ ID NO: 333993 - DNA, 458 bp, Homo sapiens
gcagcctctgacctgcctgtctctgcagggagggatgcttgtttaaccccttagctcctgactatttctctgaagaactcagccacataaccgagttcagggaaaggcacctgcaggctctacctagcaacctcctgatcctgtccctccccatgtctatcatatgcaggtggggacaaggttctaaacccttacccaatgcccaggacatgctttggatccccactgggatgggaaacacaggcacctaggggaagggctaatgagatgggaggacacccaagaccttccctgctccatggtgtctctcaagaggaaccttctaatgagaatggtattgcgaccctaggaacttggacgaagccctgcctatggaaaaccaatcaggcaaggatcgagggattgtaaatacccraggacactgtgcccacagcccagggctgcccagcccacctcct

SEQ ID NO: 333994 - DNA, 513 bp, Homo sapiens
atctgctctcggcatggtagcatcagagcatctactcaattgtcagccataaatgaagttcagaattggacacaccttcacagtcttccatatgccaaagcggattgttccaacatcagatgactccctgccatgtattccttgttagtttcctatgctaaatactagtaagataccaaaggatgttagaaatctgaggagaagttgcctaggatttagagatcactcctagtctaatatcagtaggtttttaggattacaggttattcaagggctgcttcctgtgtgtagaggttgtattatgagtcctgaaaggagagagaggaaaagagtctgccrtattcagaataaaaaggcaacgaagacggagtgttttgcggattgccagataagtcttttctgaccgttcccaatcctgaaagttctaacatggggactgcttggtctttgaaggaggtgaattgcagtaaacaaatcatgaattatcatctgcagtagatttgaaagtctttg

SEQ ID NO: 333995 - DNA, 513 bp, Homo sapiens
atctgctctcggcatggtagcatcagagcatctactcaattgtcagccataaatgaagttcagaattggacacaccttcacagtcttccatatgccaaagcggattgttccaacatcagatgactccctgccatgtattccttgttagtttcctatgctaaatactagtaagataccaaaggatgttagaaatctgaggagaagttgcctaggatttagagatcactcctagtctaatatcagtaggtttttaggattacaggttattcaagggctgcttcctgtgtgtagaggttgtattatgagtcctgaaaggagagagaggaaaagagtctgccatattcagaataaaaaggcaacgaagacrgagtgttttgcggattgccagataagtcttttctgaccgttcccaatcctgaaagttctaacatggggactgcttggtctttgaaggaggtgaattgcagtaaacaaatcatgaattatcatctgcagtagatttgaaagtctttg

SEQ ID NO: 333996 - DNA, 478 bp, Homo sapiens
aaagtctgaataaggcgcattctgatcccttccctcagcccaggcacctgggcaaaaaccctcctccagtaacacacgagatgggaggttgaytctctggaggaactgaacctaaggtattcaggtctcagagactccagtcccagcggggaatgggaggaggctctgagttgaagatgggacagtgtgcaagtgcttgcatggaagagtgagacacccttcccagcctcctcctcccgacccgtgttctagagcagcagcagcccagctatcttccctgggcaagaggttgagggattccgccctgggaaaatgagggggctccagagaaaagtccatcaaataggagagtcctcagtttaaaagctgactcgctgcttaatcacagtaacacctgctagtggacaagctctactctcagcccccaaaattctattcagcttttattattctactgagacagacagataccaccaga

SEQ ID NO: 333997 - DNA, 478 bp, Homo sapiens
aaagtctgaataaggcgcattctgatcccttccctcagcccaggcacctgggcaaaaaccctcctccagtaacacacgagatgggaggttgactctctggaggaactgaacctaaggtattcaggtctcagagactccagtcccagcggggaatgggaggaggctctgagttgaagatgggacagtgtgcaagtgcttgcatggaagagygagacacccttcccagcctcctcctcccgacccgtgttctagagcagcagcagcccagctatcttccctgggcaagaggttgagggattccgccctgggaaaatgagggggctccagagaaaagtccatcaaataggagagtcctcagtttaaaagctgactcgctgcttaatcacagtaacacctgctagtggacaagctctactctcagcccccaaaattctattcagcttttattattctactgagacagacagataccaccaga

SEQ ID NO: 333998 - DNA, 478 bp, Homo sapiens
aaagtctgaataaggcgcattctgatcccttccctcagcccaggcacctgggcaaaaaccctcctccagtaacacacgagatgggaggttgactctctggaggaactgaacctaaggtattcaggtctcagagactccagtcccagcggggaatgggaggaggctctgagttgaagatgggacagtgtgcaagtgcttgcatggaagagtgagacacccttcccagcctcctcctcccgacccgtgtyctagagcagcagcagcccagctatcttccctgggcaagaggttgagggattccgccctgggaaaatgagggggctccagagaaaagtccatcaaataggagagtcctcagtttaaaagctgactcgctgcttaatcacagtaacacctgctagtggacaagctctactctcagcccccaaaattctattcagcttttattattctactgagacagacagataccaccaga

SEQ ID NO: 333999 - DNA, 478 bp, Homo sapiens
aaagtctgaataaggcgcattctgatcccttccctcagcccaggcacctgggcaaaaaccctcctccagtaacacacgagatgggaggttgactctctggaggaactgaacctaaggtattcaggtctcagagactccagtcccagcggggaatgggaggaggctctgagttgaagatgggacagtgtgcaagtgcttgcatggaagagtgagacacccttcccagcctcctcctcccgacccgtgttctagagcagcagcagcccagctatsttccctgggcaagaggttgagggattccgccctgggaaaatgagggggctccagagaaaagtccatcaaataggagagtcctcagtttaaaagctgactcgctgcttaatcacagtaacacctgctagtggacaagctctactctcagcccccaaaattctattcagcttttattattctactgagacagacagataccaccaga

SEQ ID NO: 334000 - DNA, 520 bp, Homo sapiens
gtaagagtaaatgagttaatatatgtaaagacctcagaacagtgactggcrcatagagaatcctatttaagtggtgggttaaaaacaaatcatgtaagtcatgtaaagctgcacctgtggcgcgctctatggacagaacggcagctgccggtggacctcatccgctctctaatggagtcaggcttgacctgagccctgtaaggaggagtataggttaagtgagtggcaaaggaaccactttgaacacaagctctgtggcaggaggaactatagaaggaagaactagcacacagggaagaaaactccacgcctctcgggaaagaatgacaaaaaataatgctgggtaggagggtgggaacctgattagaaaaggccactcactaactgagtgattttggacaagtcaccttatctctctgagcctcacttatctcatctgcaaaacacaaataaacacactacctatcataaggttgttaaagggactgagtgagtccatatttgtgaaccacttaaaatt

SEQ ID NO: 334001 - DNA, 520 bp, Homo sapiens
gtaagagtaaatgagttaatatatgtaaagacctcagaacagtgactggcgcatagagaatcctatttaagtggtgggttaaaaacaaatcatgtaagtcatgtaaagctgcacctgtggcgcgctctatggacagaacggcagctgccggtggacctcatccgctctctaatggagtcaggcttgacctgagccctgtaaggaggagtataggttaagtgagtggcaaaggaaccactttgaacacaagctctgtggcaggaggaactatagaaggaagaactagcacacagggaagaaaactccacgcctctcgggaaagaatgacaaaaaataakgctgggtaggagggtgggaacctgattagaaaaggccactcactaactgagtgattttggacaagtcaccttatctctctgagcctcacttatctcatctgcaaaacacaaataaacacactacctatcataaggttgttaaagggactgagtgagtccatatttgtgaaccacttaaaatt

SEQ ID NO: 334002 - DNA, 520 bp, Homo sapiens
gtaagagtaaatgagttaatatatgtaaagacctcagaacagtgactggcgcatagagaatcctatttaagtggtgggttaaaaacaaatcatgtaagtcatgtaaagctgcacctgtggcgcgctctatggacagaacggcagctgccggtggacctcatccgctctctaatggagtcaggcttgacctgagccctgtaaggaggagtataggttaagtgagtggcaaaggaaccactttgaacacaagctctgtggcaggaggaactatagaaggaagaactagcacacagggaagaaaactccacgcctctcgggaaagaatgacaaaaaataatgctgggtaggagggtgggaacctgattagaaaaggccactcactaactgagtgattttggacaagtcaccttatctctctgagcctcacttatctcatctgcaaaacasaaataaacacactacctatcataaggttgttaaagggactgagtgagtccatatttgtgaaccacttaaaatt

SEQ ID NO: 334003 - DNA, 663 bp, Homo sapiens
ggtatataaacttaatattattctcctttgtattagcaacacatatacttaccctggtctggatccaccgaatgttttctaccccactgccacacacctgcccaaatcctaagcagcatttagaaactagctcaagtgtctcactgcaggcagttttccttgttccctcaaaaacaaagtatgatactgtccctgaattccttactcagttttctttcctgtaaggtttcaattcctatcttacgttaataaagatttagatccacatgatccgtcttcatatgtaagctatttcagagcagtttccatatctaccatgtgttgtatccttcagaaggtccagtattccccagaaaactacagctctaacaatctcttgagaaaatcaacaagtattgcaaaatatcctgattacasattttgaggacagcaaaaatgtgaatgaatgcctgtattatgcaatttttgtaagattacaatcaccactgttgatgacaacaattttacattcagcttgtatttagtacttgcttcatttgtttgtcaatcaatttgggctgaaatctgaaaattatccttcctgccattaatccactctccaaataatttctatgacacaaattccagggatcgtaatttcttaaactgaatccttccagatca

SEQ ID NO: 334004 - DNA, 564 bp, Homo sapiens
accacatattccagccttctgtttatccttgcttcctatctgttaacaataaagttgttttacttagtgtattttaagagtgttctgtctcaccacactcacactctggcagctgggtttgagtaaaaccttctgccagatttagaaaactttgcagaaattggcaaggtgtttagtcttcacctgggattgatactagtgcacactattctgcttaacatcacacacgtggtcagatgatttttgacaggggtgcagagggagacaggagactctcttctcaaatgatactgggaaaactggatgttcatatgcaaaagaataaacttgaatccttatgttaaaccatatgtaaaaattactcagaattgatgarcaacataaacctaatacagacaaatcaaacagcagcacatcaaaaagcttatccgccacaatcaagtagtctttattcctgggctgcaagttgggttccacatatgcaaattaataaatgggattcaccacataaacagaactaaagacaaaacctacatgactatttcaaaagatgcagaaaagggc

SEQ ID NO: 334005 - DNA, 564 bp, Homo sapiens
accacatattccagccttctgtttatccttgcttcctatctgttaacaataaagttgttttacttagtgtattttaagagtgttctgtctcaccacactcacactctggcagctgggtttgagtaaaaccttctgccagatttagaaaactttgcagaaattggcaaggtgtttagtcttcacctgggattgatactagtgcacactattctgcttaacatcacacacgtggtcagatgatttttgacaggggtgcagagggagacaggagactctcttctcaaatgatactgggaaaactggatgttcatatgcaaaagaataaacttgaatccttatgttaaaccatatgtaaaaattactcagaattgatgaacaacataaacctaatacagacaaatcaaacagcagcacatcaaaaagcttatccgccacratcaagtagtctttattcctgggctgcaagttgggttccacatatgcaaattaataaatgggattcaccacataaacagaactaaagacaaaacctacatgactatttcaaaagatgcagaaaagggc

SEQ ID NO: 334006 - DNA, 562 bp, Homo sapiens
tgatagtgaaataagccagttacaaaaaaacttatgctaaaatttgtattaatttcacttatatatggcatctaaagctgtcaattttatagaaacagaaagaatgatagttattaggagacggggtagaggaaatggagagttatttaatgtgttgtagagtttcagcatgtaagatgaaaaagctctggagatctgttacacaacaacatgaatatattaacactactgaaccrtacacttaaaatggttaatgtggtaagtttaatgctatgtttttttaaaacctcaattaaaaattaaagttaaaaaaattagagaccaagttgtttggagatagattagaatttattaaaataaatcactctaaataaataattatttgcttcttctctccccaccccaaacaatgtacattttgagaaatgatcaagagtcagtggatgcagggtaatagcggtgagcatagtggataaagaaagggaataagataaattatgcttatgtcttgcataagcttgtcatgacagtgtgctacaaactgcacaggacattaacccca

SEQ ID NO: 334007 - DNA, 630 bp, Homo sapiens
ttattacctaaattatttttaagtactttattgtagccacatatgcatttgcttctgaggagaatgaatggcacataataccttaatagtmagaaaagaccacttaacttaggtgatgatcacatcatctgtgacagagtatttaggaaaagtcaccagcagactaaaaacatctgctgtacaacattgtacctatagttagtaataccgtattgtacacttaaaaattttctaggaggataattctcatgttaagtgttcttaccacaataaaaagaaaaatatatcattttaaccgatttaccagttgctgtgtaacagaaagaatataaactttggaatcaggaggacttatatttataatctttacttttccactatctcatttttgctccccacttacaacaacccacatcctctcccatgatttcaccaccattttaatgacagcataactttccagctacatgggcccttcatatacacaaggccattaaatccatcccaactctgcctcagaaaactgcatgtctggatgcttcagagtattatcataattctaaatagctgatttagaaaaatcccacaaataagggattaaaaaacaactaattacccttttaatatcat

SEQ ID NO: 334008 - DNA, 633 bp, Homo sapiens
actaccaattttacagaaataaaaaagattatgggagcatactgtgaacaattgtttgccatcaagttgaataacccaaatgcaatggacaaattcctagaaagacacaagttactaaaattgactcaagaagaaataaaaaacctgaatagacctatataaagtataaacaaaagtaaaattctaagccccctaactgactgaatggaccccttctctcagccaaggggattccaaagaaacctgaaaaactagttcaggccatgatgggaagtggagatcagacatgccttgtcatactctcctccctttggagttcaggcaaaactgacagcatcaacattaaaatggagacatcaagactgacacaagactctttgtagcaacaagacaccaaattccaacctgactctagtatagcgtcatatgacagatagcaggctctaaaagaaataaaaatattttaccccaaaatatatttctttgacatattttgaaatatccctgcacagcagtctcttgtggtggaaatttacattctgtagataattcygttccctttccaggtctttttctgatcctgaagagattagttgagagtttagcaccttttaaggtctgaataagaaacat

SEQ ID NO: 334009 - DNA, 568 bp, Homo sapiens
catcaaatcttcccaaatttattatgactttaatgtaattccaataaaaattaaatgaggtttcccgtgaaactttaataagccacattaaaaaggaaatgaacagtaggacagttttcaagaaaaattagacaaggagagttgtgctaccagaaataaagacttactgagtgccataataattaagacagtggcgaatttgcaatgggataaaagagaacaccaaaagaaacataawgtatgcctccagaaaatgtgataaattacaaaagcgaccttacatgtaagtggggtcttgtttatctgatatacgtcttttagctcttccctctttcctcttttctaccagggaggtagatctgaaggttggactgccagcagctcttttgtaccacaaggagatgaagacgggagcgatgtgctatttgtggcactgcataaatatgacaccttttcagccacagacaacctcgagatttattttatgtgatgggaaaataaagttcaaagctcttcgttgtttaagccactgtgtgaaggtttttacaagtgattaagtatattccta

SEQ ID NO: 334010 - DNA, 593 bp, Homo sapiens
ttccctttatcatatctatatctgttacagtttcttgctttgtggttaccatgaaacatcttatagttacaatagactattttttcttggtaataacttaccttcagttgcatacaaaactctagactattaccccctaacttatattttagatgygcaatttatatctttttgtaatatatatatttttaacaacttatatcaatcactattatttaccattttgacttttagcctttatactagagatatacatgttttaggggggtggagccaagatggccgaataggaacagctccagtctacagctcccagcatgagtgatgcagaagacgggtgatttctgcatctccaactgaggtaccaggttcatctcactggggactgacagacagtgggtgcaggacagtgggtgccgtgcaccaaatgtgagcagaagcaggatgaggcatcgcctcacccaggaagctcaaggggtcagggaattccctttccaaagaaaagggtgacagacagcacctggaaaattgggccattcccaccctaatactgcgcttttccaatggtcttagcaaacggcacaccaggaaat

SEQ ID NO: 334011 - DNA, 593 bp, Homo sapiens
ttccctttatcatatctatatctgttacagtttcttgctttgtggttaccatgaaacatcttatagttacaatagactattttttcttggtaataacttaccttcagttgcatacaaaactctagactattaccccctaacttatattttagatgcgcaatttatatctttttgtaatatatatatttttaacaacttatatcaatcactattatttaccattttgacttttagcctttatactagagatatacatgttttaggggggtggagccaagatggcygaataggaacagctccagtctacagctcccagcatgagtgatgcagaagacgggtgatttctgcatctccaactgaggtaccaggttcatctcactggggactgacagacagtgggtgcaggacagtgggtgccgtgcaccaaatgtgagcagaagcaggatgaggcatcgcctcacccaggaagctcaaggggtcagggaattccctttccaaagaaaagggtgacagacagcacctggaaaattgggccattcccaccctaatactgcgcttttccaatggtcttagcaaacggcacaccaggaaat

SEQ ID NO: 334012 - DNA, 593 bp, Homo sapiens
ttccctttatcatatctatatctgttacagtttcttgctttgtggttaccatgaaacatcttatagttacaatagactattttttcttggtaataacttaccttcagttgcatacaaaactctagactattaccccctaacttatattttagatgcgcaatttatatctttttgtaatatatatatttttaacaacttatatcaatcactattatttaccattttgacttttagcctttatactagagatatacatgttttaggggggtggagccaagatggccgaataggaacagctccagtctacagctcccagcatgagtgatgcagaagacgggtgatttctgcatctccaactgaggtaccaggttcatctcactggggactgacagacagtgggtgcaggacagtgggtgccgtgcaccaaatgtgagcagaagcaggatgaggcatcgcctcacccaggaagctcaaggggtcagggaattccctttccaaagaaargggtgacagacagcacctggaaaattgggccattcccaccctaatactgcgcttttccaatggtcttagcaaacggcacaccaggaaat

SEQ ID NO: 334013 - DNA, 603 bp, Homo sapiens
tctttttcccaggatactgggaacagtatggaaaatgcttttagaatagtgatgtggaaaaaagaagtcctaagttcaaattctacctctgttcttcactagctgaacaaatatgggcaagtcatgcattttctttaagcctgagttgtctgtctgcttaacatgagtaataatatatattcattcagttagataacatatgctcaaattattgaagaaataaacaattcaatcagaaaaaagagatatacatgttttatagagcatcatatgcatgttgaggtattttggatttgtctatgtacttacctttaccagcgaattttatactttcatatgttttcatgttggtaattatagccctttaatttctacttgaagaactccattaagcattttctgtagagcaagtctagyggtgattaagtccctaaacttttgcttgtttgggaaatactttatttctcttacatttttaaaagacagctttgcttgatataatattcttcactggcagttttctttcaatactttgaatatatcatcccattctgtcctggcctgcagagtttttgctgaataatctgctgatactctaattga

SEQ ID NO: 334014 - DNA, 603 bp, Homo sapiens
tctttttcccaggatactgggaacagtatggaaaatgcttttagaatagtgatgtggaaaaaagaagtcctaagttcaaattctacctctgttcttcactagctgaacaaatatgggcaagtcatgcattttctttaagcctgagttgtctgtctgcttaacatgagtaataatatatattcattcagttagataacatatgctcaaattattgaagaaataaacaattcaatcagaaaaaagagatatacatgttttatagagcatcatatgcatgttgaggtattttggatttgtctatgtacttacctttaccagcgaattttatactttcatatgttttcatgttggtaattatagccctttaatttctacttgaagaactccattaagcattttctgtagagcaagtctagtggtgattaagtccctaaacttttgcttgtttgggaaatactttatttctcttacatttttaaaagacagctttgcttgatataatattcttcrctggcagttttctttcaatactttgaatatatcatcccattctgtcctggcctgcagagtttttgctgaataatctgctgatactctaattga

SEQ ID NO: 334015 - DNA, 642 bp, Homo sapiens
tgagtctggactttgggatggtaggactcagcagtaactcagactctgaggccaggtgaaagtggcagcaaaagtctggaatggtggagcacagttgttgcttgggccctgggtggcagtgactctattccttaaggaggaggtgtctcagcagctcagactctaggaagcttgtccagttcsagggaagcagggtactagagctgtttggcctgtagtgtgggtgtctcagatcagcccctgctctgttttcatggaatgtggggtaccatgtcagctcagcttctgaatacatggctgctcagctcagccaagtaactgattccctgggaggtggcatgctgcttcagctcaggcccagaatgtatgtggctgctctgagtggccaagacattgtttccttgggatgcagtatgctgctgaagcttaggcacaggggagcgtggctgctgtgggtgaccaaggtactgttttctcaggacacagggtgccatttcagcttgggccctgatggggcagtgactgggaggcataaatggagcagctttcctaagacactgtttccctgggggggcagtgcatggcttcagctcaggccctgaggggcagggtgcagcagcgactggggggtgggtggtggtt

SEQ ID NO: 334016 - DNA, 555 bp, Homo sapiens
ctgaaaacacgagattcaccgataaggttcaacttcctcacttactagatggaaaactgagaggcccaaaggaggaaaagcagttgcctcaagacaaacagcagagatatcaaaaccgaaggcatttcaattcaattctaattctggcttcacactattgaccctggccacgtccaatacctcttcrcttctctgcaggacctaaaagatcaccaggaggagagggctggtgtcagagtcccggagaggtcgcaggcagtccagattctagcatcacagaaactctggccaagcgctcagccggggattgtctgccataaagacccccgcaccctgtcctcgcccccgccccgtggaattcctctgcataggtgactccacgtagaggaccgagcgcaaggagatcccggggcggtggagacagaggactcctgtgaaaaatgacgcctactctctctcctaacagagaggaggaagcacgcgcgccccaaaagcgggtcgggagcaaatccacgccactgggaggaggcgcaccgaagaacaacaggaaattac

SEQ ID NO: 334017 - DNA, 309 bp, Homo sapiens
agcatcacagaaactctggccaagcgctcagccggggattgtctgccataaagacccccgcaccctgtcctcgcccccgccccgtggaattcctctgcataggtgactccacgtagaggaccgagcgcaaggagatcccggggcggtggagacagaggactcctgtgaaaaatgacgcctactctctctcctaacagagaggaggaagcasgcgcgccccaaaagcgggtcgggagcaaatccacgccactgggaggaggcgcaccgaagaacaacaggaaattacgtaaggcgcacgtgcttatgagg

SEQ ID NO: 334018 - DNA, 309 bp, Homo sapiens
agcatcacagaaactctggccaagcgctcagccggggattgtctgccataaagacccccgcaccctgtcctcgcccccgccccgtggaattcctctgcataggtgactccacgtagaggaccgagcgcaaggagatcccggggcggtggagacagaggactcctgtgaaaaatgacgcctactctctctcctaacagagaggaggaagcacgcrcgccccaaaagcgggtcgggagcaaatccacgccactgggaggaggcgcaccgaagaacaacaggaaattacgtaaggcgcacgtgcttatgagg

SEQ ID NO: 334019 - DNA, 298 bp, Homo sapiens
ataccctcccaggggctactgagaataaagtgagatggtgccagatggcgccaatcaagggtaacttattaggaccagattctggccctcgaggtagcccaaggtccactaccaaggcctttstggcagctctccggagttgttggctggagcccctgaaagtgcatgtatggaattgttacacatgcctggcagcgctcctggctggggatacaggggcctgtgtgcaaagccaccttacagggctctcagtccagcacacaagagatgtcctgggtgaggtagatagaattggact

SEQ ID NO: 334020 - DNA, 298 bp, Homo sapiens
ataccctcccaggggctactgagaataaagtgagatggtgccagatggcgccaatcaagggtaacttattaggaccagattctggccctcgaggtagcccaaggtccactaccaaggcctttgtggcagctctccggagttgttggctggagcccctgraagtgcatgtatggaattgttacacatgcctggcagcgctcctggctggggatacaggggcctgtgtgcaaagccaccttacagggctctcagtccagcacacaagagatgtcctgggtgaggtagatagaattggact

SEQ ID NO: 334021 - DNA, 635 bp, Homo sapiens
tgcaagaatttcgttgcatcttgctgggaaaatcacacaccaaatcctagtgctttgagattcacatgtacctatcttgattaccttgcactggctctgtctcagaacacacttagtgttattagtctaaatactaagggaaaagaagaaactattaagcattcagcacgttctcatttcactttcacaatcctgtaagataggtaaacattatccccaatttatacattaataaaatgacgttaaatgatgttaaattacttgcccacaccaccagtaaagagaagctaggactctgaattccactttgtccactattcaagggctcctccccccacgcscccacccccgccaaaatagggctcctcccccctccaaaaaaatcaatcatggggtgccactggagagttgaccactcacatcaattatttgttattctagttcagcagttctgggagcgagttatggagaagataaaccaccaactcctcacttcacagaatcaactcagtattcagggaatactctaagagaaggggtaaaatgtccctagaggtgaatcccagctcttcgcatcatttctcaattccttctcaatagagactctaggaccagagctccctttatcacctcca

SEQ ID NO: 334022 - DNA, 601 bp, Homo sapiens
ctccataatggtaaatcccccatcacctttggtgaatgatactggccctctacaaagctcgatgagatacacttcatatcttctctccttgttttctgctgcctagagaatcacacagcagcatttaaggagccagccagtctgatgactcagctcataaaacaatgtgtggccacaaagatgatgtttatccatgagcattctggaggctcttgctactgaagtcggcaagcagtggataagtggcacacgatgctcattctcaagagtttctggcagcggtgccaacacagcactcacttycctctctcagcagttgatttcatctgatgctctgtccaaacagaatggtagaaaaaaacatcagagaaatgcagtgggtatagaggcaaatccaaacaaagtgcaggtgatagtggtgacattctgccttctcttgatcagaaggtgtcagcagctggagcttatccccatatgaaccccagggtcaggtaaatggaagacttaagaacacgttacccaacttacctctgcccttgtgggttctacaaggagggggtctgctgtggttagtaaaacgtttgcggatatagtttctttc

SEQ ID NO: 334023 - DNA, 602 bp, Homo sapiens
attgccacaaaagcactgaaaagcctgcttccatttccaacatcctatttttgtgcagcagagttttctgcagtgatggcaaccaaagcgagattaaggcattgactggacataagcaacacacttctggtgtcactgccttccgtcacccccagatgggaccatctagttgcaggaaaacaagttcagggctcccattgattctacatcatggtgagttgtataattatttcattatatattacaatgtaataaaaatagaaataaagtacacaataaatgtaatgcacttgaatcatcctgaaaccatcccctcatcctgtccatggaaaaactaccttccacaaaaccagtccctggtgtcraaaagcttagagactgctgtataaaggattaatatccaaaaaatataaagaactcctacaaaacaacaaaaaaccaaacaactcaattagaaaatgggcaaggctttggagacaccactgccccccaaagctccctgccaccagccaccgtcaaccccaccatgttctaggccatggacagcccttgagccacgtctcctttgagctgtttgcagacaaagttccaaagacagcaga

SEQ ID NO: 334024 - DNA, 599 bp, Homo sapiens
ctttgtggattctctgggtcacgtggtttgcacatggccaccactgagtcagagttctttgggaaccaggattcaactgtacaggcctgcccatgtacagatcccctcccaactcctgcaaacatgtactggccctgtctgggggctagacctggactgggactgggaatgctgccatgggcactctgtcctcaaggatttaggggtctatggatgagtcactgccaactgggatgcttgatgatgacatctacacctgggaaactggtcctggctccttcccttcccttctcctttctttccagaaccagaacctggcagaacaggcaagatggagaaggccagccccttctgagggaactcacaagaaaggaggacccctaaacaaccactccccttctaggccaaggccaggacacytgatggggggcagggtggcagcttgacaggctgggaacctccacctgaccacttctcaccagagttcttgggaggggagggagtagctgaggttccaagcctagtgtcttcccaggaagctctgggacaggatagccaacacaaattttgaaatcatcaagtcttaggaagacaagatt

SEQ ID NO: 334025 - DNA, 584 bp, Homo sapiens
caggtaatgtaggacaaagagaataaatcaaaaaaagtgaacacyaaggattataaaattaattccttcaattaaaaacaaatacacagcaagaatgtttaataacatgaatactagataaaattagtttacaatccaattaaatctcaacaagatttgctgaggctataattgtgtatattaaattatttttgaaactgttatgcaaatacttaaacctgaatatgataattctgtgctatatctgcacgatacatttataagacactaataaaactgaactgaactgaacttttctaaggtaatttttaagtaggaatgccacccattataaaaatacatttcaagagtgaacttcgatttttttgtgtacaaataaaagcttcttaagcacagaagcattcataagtataaccccttcctctacagctcaaattctgttgaagtaatccaataatgtaaaatagaggtactacgtccattctgacataatttcactaccattctacatggaatagaatttacagttgtttgttactgtaaaaccaacacacacacacacacacacataaaccccagtcaga

SEQ ID NO: 334026 - DNA, 584 bp, Homo sapiens
caggtaatgtaggacaaagagaataaatcaaaaaaagtgaacaccaaggattataaaattaattccttcaattaaaaacaaatacacagcaagaatgtttaataacatgaatactagataaaattagtttacaatccaattaaatctcaacaagatttgctgaggctataattgtgtayattaaattatttttgaaactgttatgcaaatacttaaacctgaatatgataattctgtgctatatctgcacgatacatttataagacactaataaaactgaactgaactgaacttttctaaggtaatttttaagtaggaatgccacccattataaaaatacatttcaagagtgaacttcgatttttttgtgtacaaataaaagcttcttaagcacagaagcattcataagtataaccccttcctctacagctcaaattctgttgaagtaatccaataatgtaaaatagaggtactacgtccattctgacataatttcactaccattctacatggaatagaatttacagttgtttgttactgtaaaaccaacacacacacacacacacacataaaccccagtcaga

SEQ ID NO: 334027 - DNA, 584 bp, Homo sapiens
caggtaatgtaggacaaagagaataaatcaaaaaaagtgaacaccaaggattataaaattaattccttcaattaaaaacaaatacacagcaagaatgtttaataacatgaatactagataaaattagtttacaatccaattaaatctcaacaagatttgctgaggctataattgtgtatattaaattatttttgaaactgttatgcaaatacttaaacctgaatatgataattctgtgctatatctgcacgatacatttataagacactaataaaactgaactgaactgaacttttctaaggtaatttttaagtaggaatgccacccattataaaaatacatttcaagagtkaacttcgatttttttgtgtacaaataaaagcttcttaagcacagaagcattcataagtataaccccttcctctacagctcaaattctgttgaagtaatccaataatgtaaaatagaggtactacgtccattctgacataatttcactaccattctacatggaatagaatttacagttgtttgttactgtaaaaccaacacacacacacacacacacataaaccccagtcaga

SEQ ID NO: 334028 - DNA, 584 bp, Homo sapiens
caggtaatgtaggacaaagagaataaatcaaaaaaagtgaacaccaaggattataaaattaattccttcaattaaaaacaaatacacagcaagaatgtttaataacatgaatactagataaaattagtttacaatccaattaaatctcaacaagatttgctgaggctataattgtgtatattaaattatttttgaaactgttatgcaaatacttaaacctgaatatgataattctgtgctatatctgcacgatacatttataagacactaataaaactgaactgaactgaacttttctaaggtaatttttaagtaggaatgccacccattataaaaatacatttcaagagtgaacttcgatttttttgtgtacaaataaaagcttcttaagcacagaagcattcataagtataaccccttcctctacagctcaaattctgttsaagtaatccaataatgtaaaatagaggtactacgtccattctgacataatttcactaccattctacatggaatagaatttacagttgtttgttactgtaaaaccaacacacacacacacacacacataaaccccagtcaga

SEQ ID NO: 334029 - DNA, 542 bp, Homo sapiens
gaacaaaaaactaaaatttacaagggataaagagtgtaagaaactgcattgtaaagttaatttgtttttcaccagatcagtgctctgatagctgtgaggtgaggtaatctaggaccctatcattaagagatgttctcagggtaaatgagtaaactaagttaagtgttggcaataaacctctttgttaatattttttacaaaatgcaggtgatattcagaagagcattttagcaaaaaaaattcatatgaagattaagatatagtcacacacaatcattatgtaccccaaatatccataaataaatctagagcaaaaggcatcttgacaagaactctgcatatggctttgacttgaagttaactggattttcagacattaaaaaataataatgaaatatatttatattggcatcacctraatgtgaaaaataattatacgctattggagattaaaagaggcctctgtgaccctaccttgttaaaagaaggcagaaggactttgccagttgtcaagcaaggtattttcttctgtgagccaagag

SEQ ID NO: 334030 - DNA, 542 bp, Homo sapiens
gaacaaaaaactaaaatttacaagggataaagagtgtaagaaactgcattgtaaagttaatttgtttttcaccagatcagtgctctgatagctgtgaggtgaggtaatctaggaccctatcattaagagatgttctcagggtaaatgagtaaactaagttaagtgttggcaataaacctctttgttaatattttttacaaaatgcaggtgatattcagaagagcattttagcaaaaaaaattcatatgaagattaagatatagtcacacacaatcattatgtaccccaaatatccataaataaatctagagcaaaaggcatcttgacaagaactctgcatatggctttgacttgaagttaactggattttcagacattaaaaaataataatgaaatatatttatattggcatcacctgaatgtgaaaaataattatacgctattggagattaaaagaggcytctgtgaccctaccttgttaaaagaaggcagaaggactttgccagttgtcaagcaaggtattttcttctgtgagccaagag

SEQ ID NO: 334031 - DNA, 571 bp, Homo sapiens
aaaacagctagagaaaagcagcttggcacttagaaaggaaaattcataatactattagtggatttctcagcagaatttgcaggtcagagggagtgagatgagatattcaatgtcctgaaattaaaagcaagcaagcaagcaaacaaacatctttcaactaagaatactaccccaaaaaaaaaaaaaaaaaagcaactctccaaaagtcaaggagaggtacatacttttggagacaaacaaaagctgtgggagttcaatttaaactgatgctaagcatcaatacaaaaacatataaaggtataaagttcactagtaaagagaaacatatagataagtgcagagtgctataaaacatgatggtaggggtttaaataacttttaattttaaaactataactatttaaagtatgtaaacagacacaaaatttgaaaagttctaaatcgtcacatagaaaattagtgttttgtcacttcaaaagtaatraaataataaaagtacacattaatgatatgtgactgaggttattatcagcttaaaatagactattaaaaaagtttgatgcaaacatag

SEQ ID NO: 334032 - DNA, 605 bp, Homo sapiens
tagaaaaaaaatcaaatcaaacaaatcatgcatggacaaaatcaaaagytcagcaaatatatttaaatcataaaaagaaccacacaggaattctggagctgaagaatacaatcactaaattaaaaaattcagtagatggcttcagaagaagacttgctcaagcagaagtaagtatctgtgcacttaaagaaagactacttaaagtaatctagtcaaaaataagaaaaaaatgagaaaaaaatgtgaagaggtttttgggacaccatcaagtgaactgacatttgcattatgggaatctctgaatgagaagatgccatgaaaagagagaaagttcactgaagaatgactgataaattcccaaatctgggaaaagaaatggacattcaaattcattaaatctgagggacctcaaatagattgagcatataagtgtatacatcatggcacattacattttgcttgtcaaaagtcaaagagataattttgaaatagacacatcacacatcatacttaagagattataagcagatttttcagcagaaaccttgcctgccagacaaaaaattggtttgatctattcaaagtactgaaaggaaaaatctacc

SEQ ID NO: 334033 - DNA, 605 bp, Homo sapiens
tagaaaaaaaatcaaatcaaacaaatcatgcatggacaaaatcaaaagctcagcaaatatatttaaatcataaaaagaaccacacaggaattctggagctgaagaatacaatcactaaattaaaaaattcagtagatggcttcagaagaagacttgctcaagcagaagtaagtatctgtgcacttaaagaaagactacttaaagtaatctagtcaaaaataagaaaaaaatgagaaaaaaatgtgaagaggtttttgggacaccatcaagtgaactgacatttgcattatgggaatctctgaatgagaagatgccatgaaaagagagaaagttcactgaagaatgactgataaattcccaaatctgggaaaagaaatggacattcaaattcattaaatctgagggacctcaaatagattgagcatataagtgtatacatcatggcacattayattttgcttgtcaaaagtcaaagagataattttgaaatagacacatcacacatcatacttaagagattataagcagatttttcagcagaaaccttgcctgccagacaaaaaattggtttgatctattcaaagtactgaaaggaaaaatctacc

SEQ ID NO: 334034 - DNA, 470 bp, Homo sapiens
ccaatttttactatatgtaccatggcaatattacataaaattaaaatattccagagtgtcttagtctgttttgggctcctataatagaatacctgagactgagtaatttataatgaacataaatttaytagtgcatagttctggaggctggaaagtttgatatcaatgtgccagcatctaataaaagcctttttgcagcataagcatgcagtagaaggctaggagagcaagacagagagagagtgacagagagagaaaaggaggtcaaacttgcctcttttcataacaaattagcacttgtgtaagggtgctaatccattcatgagggcagaggcctcatgtcttaatcacctcttaaatatctcaaacctttatatagttactatagcaattaaatttcaacatgagctttggagggtacaaacattcaaaccacagcacagagcatatttaatggagctagatgctat

SEQ ID NO: 334035 - DNA, 470 bp, Homo sapiens
ccaatttttactatatgtaccatggcaatattacataaaattaaaatattccagagtgtcttagtctgttttgggctcctataatagaatacctgagactgagtaatttataatgaacataaatttattagtgcatagttctggaggctggaaagtttgatatcaatgtgccagcatctaataaaagcctttttgcagcataagcatgcagtagaaggmtaggagagcaagacagagagagagtgacagagagagaaaaggaggtcaaacttgcctcttttcataacaaattagcacttgtgtaagggtgctaatccattcatgagggcagaggcctcatgtcttaatcacctcttaaatatctcaaacctttatatagttactatagcaattaaatttcaacatgagctttggagggtacaaacattcaaaccacagcacagagcatatttaatggagctagatgctat

SEQ ID NO: 334036 - DNA, 239 bp, Homo sapiens
tgtagaatctgtaagtggatatttgargtgatttgaagccttcaaaggaaacgggaatatcataaaaactagatagaatcattctcagaaacttctacgttatgtttgcattcaactcagagagttgaacgtttcatttcatacatcagttttgcagcactctttttgtagaatctgcaaatggacacttgcagcactttgaaggctatggtggaaaaggaaatatctttacataaaaa

SEQ ID NO: 334037 - DNA, 239 bp, Homo sapiens
tgtagaatctgtaagtggatatttgaagtgatttgaagccttcaaaggaaacgggaatatcataaaaactagatagaatcattctcagaaacttctacgttatgtttgcattcaactcagagagttgaacgtttcatttcatacatcagttttgcagcactctttttgtagaatctgcaaatggacacttgcagcactttgarggctatggtggaaaaggaaatatctttacataaaaa

SEQ ID NO: 334038 - DNA, 605 bp, Homo sapiens
ttcccgtttccagtgaattcctcaaagcagtcaaaatatccacttgcaaattatacaaaaagagggattcaaaactgctctatcaaaaggaaggttcaactctgtgagttgaaagcacaaatcacaacgaagtttctgagaatgcatctgtctagtttcatgtgaagatatatctgtatccaatgaagacttcaaagtactccaattaaccacttgcagattctacaaagagtgtttcaaaactgcactatcaaaaggaaggttcaattctgtcagttgaatgcatacactacaaggaactttctgagaatgtttctgtctagtttttatgtgaataggtttccrtttccaacgaaggcttcaaagcactccaaatatccacttccagatactgcaaaaagagtgcttcaaaactgcactatcaaaatgaaggtacaaggctctgacttgaatgcccatatctcaaagtggtttctgagaatgcttttgtctactttttatgtgaacatattactgtttccaacgaaggcctcaaatctgtccaaatatacagttgcagatactacaaaaagagtgtttcaaaactactctatcaaaaggaagga

SEQ ID NO: 334039 - DNA, 605 bp, Homo sapiens
ttcccgtttccagtgaattcctcaaagcagtcaaaatatccacttgcaaattatacaaaaagagggattcaaaactgctctatcaaaaggaaggttcaactctgtgagttgaaagcacaaatcacaacgaagtttctgagaatgcatctgtctagtttcatgtgaagatatatctgtatccaatgaagacttcaaagtactccaattaaccacttgcagattctacaaagagtgtttcaaaactgcactatcaaaaggaaggttcaattctgtcagttgaatgcatacactacaaggaactttctgagaatgtttctgtctagtttttatgtgaataggtttccgtttccaacgaaggcttcaaagcactccaaatatccacttmcagatactgcaaaaagagtgcttcaaaactgcactatcaaaatgaaggtacaaggctctgacttgaatgcccatatctcaaagtggtttctgagaatgcttttgtctactttttatgtgaacatattactgtttccaacgaaggcctcaaatctgtccaaatatacagttgcagatactacaaaaagagtgtttcaaaactactctatcaaaaggaagga

SEQ ID NO: 334040 - DNA, 605 bp, Homo sapiens
ttcccgtttccagtgaattcctcaaagcagtcaaaatatccacttgcaaattatacaaaaagagggattcaaaactgctctatcaaaaggaaggttcaactctgtgagttgaaagcacaaatcacaacgaagtttctgagaatgcatctgtctagtttcatgtgaagatatatctgtatccaatgaagacttcaaagtactccaattaaccacttgcagattctacaaagagtgtttcaaaactgcactatcaaaaggaaggttcaattctgtcagttgaatgcatacactacaaggaactttctgagaatgtttctgtctagtttttatgtgaataggtttccgtttccaacgaaggcttcaaagcactccaaatatccacttccagatactgcaaaaagagtgcttcaaaactgcactatcaaaatgaaggtacaaggctstgacttgaatgcccatatctcaaagtggtttctgagaatgcttttgtctactttttatgtgaacatattactgtttccaacgaaggcctcaaatctgtccaaatatacagttgcagatactacaaaaagagtgtttcaaaactactctatcaaaaggaagga

SEQ ID NO: 334041 - DNA, 605 bp, Homo sapiens
ttcccgtttccagtgaattcctcaaagcagtcaaaatatccacttgcaaattatacaaaaagagggattcaaaactgctctatcaaaaggaaggttcaactctgtgagttgaaagcacaaatcacaacgaagtttctgagaatgcatctgtctagtttcatgtgaagatatatctgtatccaatgaagacttcaaagtactccaattaaccacttgcagattctacaaagagtgtttcaaaactgcactatcaaaaggaaggttcaattctgtcagttgaatgcatacactacaaggaactttctgagaatgtttctgtctagtttttatgtgaataggtttccgtttccaacgaaggcttcaaagcactccaaatatccacttccagatactgcaaaaagagtgcttcaaaactgcactatcaaaatgaaggtacaaggctctgacttgaatgcccatatctcaaagtggtttctgagaatgcttttgtctactttttatgtgaacatattactgtttccaaygaaggcctcaaatctgtccaaatatacagttgcagatactacaaaaagagtgtttcaaaactactctatcaaaaggaagga

SEQ ID NO: 334042 - DNA, 456 bp, Homo sapiens
agctttcctgtgcttcacacattcatctccttattgaaagaaaagaaagaaagaaagacaatcaggcactcagagcagccctacgaaaaaattagtgggaagaaaggaactaacatgtacagggcattcacagaaattccaggcacatcataagcattacgytgagaaagagacttccgaagagtgacaacaaaagatactgaaagtcaagacaacttaaacagctcagtctggtagaaactcatttaatttctgctcataaaaacagatttagcaaaagaagacacatactcaaaaaatatcctgaagaagctaacaggaatttaacttcacctctaaggcatatggaaaaggatttattagaagcattttatgaggcataattatatcttatgacttgcagagtaggaggaaaaaagacagcacatcaaaagatattacaaagcaaatggctaa

SEQ ID NO: 334043 - DNA, 599 bp, Homo sapiens
ttttagttttactctctattaaattgttattttttacagttcatttatggatgacaagttatttcctgttggtagctgcaatgattgggaattttgtgatctctgtaaacgaattaatatctcatagagatctatttcctgttggatatgagacaacagagaacacagtttttgtccatttgtcttttttaaggtcaaatcgattagaaatttcttgccctcaagtaaggagaacaactctgatacctggactggcaagcttttgtgtttctgtgtttatttttcatttgtggctgaacttgtagaattgagggtatacacattctatctgtatgtctatgtatctgtaattcagaaagtcctttatttctcattgtgagtatggaatgttttcctgtctccagatggtattaataaattagatggtaaaggctctttaaaaataaagcctcattatgggttcattttccctctcaaactctgtagaacataaccagtttgaaaagyctctagatttgggggtgtaaaaattccatgcagcttgagagccatcagtcattaagccgctagttccaccccaagtcttgctgtccagaagc

SEQ ID NO: 334044 - DNA, 607 bp, Homo sapiens
ttcttcccttctttttagctcttaaaaacctggagactcatctatctctattttccttcacaggcctaccaacctaatgtatgcaggctacatggactgcttcctagatgtaaacagttctgggatatgtatacctataggaagacaggagtgagcaacagctactcatagttctgaagaagaaaagaataacaaattcctatacacaagcaccttctaaaggaatgttttataaatcgtgggtcacaactgctaaaattggaacatactgaaatagaattaatagattgaaatcagcatttctttgtattaaatagacaacaaaagagtagttcatcagaagtaaaggttaagcattatcgtgtgaaaattctgatttgattattcagacacacacatacacacacacgtacctgcaacaaatattgattgagggcctcctatgtgccaggtattagaggcagaacagtgaaaaagaccaagaaaagygaagctctgcctttaggtggctgacattccagtggtttcagagtatgtgtgtgtgtgtgtctgcacaggcatgtacacactcatgtgttttacaacctaagaatgcatactttatact

SEQ ID NO: 334045 - DNA, 592 bp, Homo sapiens
ttttcaaggacagtgaaaattttctttgctttcacatacagcgatgtgcctttataaatgcttatttttatatgtaatttatatgcgttctttcttgcattcataagattataagtttatatgaaaaccataactataccttttggtttttttatttccatatgggtcagttcatattatgtactaattaatattagagacacatacctgaacatgaaaaaatttaaactagattgttgacatttaaagacasatctgtggtgtatcagtagccacaatatttctgtgtagatgtagtggtaggagtagtggatttgcagataagggaaacagaagtgtccaatcagtaaacattcattgatcttacaattaatgtgatgcctaattaaaatggttgctaggcttttattaattacctagaaaatatttgaaatttttttcgtctttaatttctcttacatttcatttatattcctatttattttctgaggttggcttgaaaattttgacttgaatttccttaaatttttcttaaccaaaatctaaaagtaaacagctggcagttgctgtcttgggtgggtggtggtttctc

SEQ ID NO: 334046 - DNA, 580 bp, Homo sapiens
ggcattgtgagcgagactgctctgacaccatggaactcagcacctgtgttcctccccaccaggcagggtgtgggagcaccgtgtctgagacaggaaggcttcctttagctatgcatcctcatattttgtcttcccccatcctggagggttccccagtcaccgccagcctttcttgtctgattccaggggactttgtgcctgatctggccttcgtgatgccattttaggtactcagccgggctctcctttgcaatccatctccttatacgtggagacaggcaggagaattctgttcttcgggtgtgtggtgctaagattgttgagcgctcccacagaggtctctgagggagccacccattatctgtcaaaatcgagggaaygggaacagggaagaagatgggatgatgctgcagaggctggctagagtgctcatgtttgcatggggaaagaagtcaccttatgctctgccatcaggagtcctggcaatgcgcccctcactaatgcctgagatggcattgtcacagtttcatactcttgtctttcgatttctaaccttgctctttttcaaatatgcattact

SEQ ID NO: 334047 - DNA, 580 bp, Homo sapiens
ggcattgtgagcgagactgctctgacaccatggaactcagcacctgtgttcctccccaccaggcagggtgtgggagcaccgtgtctgagacaggaaggcttcctttagctatgcatcctcatattttgtcttcccccatcctggagggttccccagtcaccgccagcctttcttgtctgattccaggggactttgtgcctgatctggccttcgtgatgccattttaggtactcagccgggctctcctttgcaatccatctccttatacgtggagacaggcaggagaattctgttcttcgggtgtgtggtgctaagattgttgagcgctcccacagaggtctctgagggagccacccattatctgtcaaaatcgagggaatgggaacagggargaagatgggatgatgctgcagaggctggctagagtgctcatgtttgcatggggaaagaagtcaccttatgctctgccatcaggagtcctggcaatgcgcccctcactaatgcctgagatggcattgtcacagtttcatactcttgtctttcgatttctaaccttgctctttttcaaatatgcattact

SEQ ID NO: 334048 - DNA, 597 bp, Homo sapiens
acacttcctttgtgagatataatatctaacattcccatcctgaatcttatatgaaatagcagcatgattcaattaatgcttacccacatgtcatttatcaactagaagttcactgcaatgcagttttacttcctcctaatgccttctttaattgtactagctcgtgtaatcttgtcctattttgacctcctttgatccatattgcttccactcctccatctcgcctatcatcatactctacctcatgctttgggtcctttattgaaacttgtttctccagatggcacccaaaattcttgttggcagaggccacgttttattcaattgttcttccatgccatctagcttaaaactacacccacagaaagtatttacacagtagcctggactagggtaccatgctaaaacagcatttttctctggagactgtttacaggaaaattaaaatttaattaataatctaatattgtctgcatttttcttaagttggctcaaaatagtttytgtttaccttttcgttttctcccttgcatatacaatttttcatggatattaggatttcttctttagctaacatttcaggagagtttcctatgt

SEQ ID NO: 334049 - DNA, 569 bp, Homo sapiens
ttttattcaattgttcttccatgccatctagcttaaaactacacccacagaaagtatttacacagtagcctggactagggtaccatgctaaaacagcatttttctctggagactgtttacaggaaaattaaaatttaattaataatctaatattgtctgcatttttcttaagttggctcaaaatagtttttgtttaccttttcgttttctcccttgcatatacaatttttcatggatattaggatttcttctttagctaacatttcargagagtttcctatgtgctgggcaccttgctactctattgggaaacataaatgagtaagattcagtctaggttgcaaatgctgtctgatgatcaaaacagacatttatttaaatgatctcagtcaaatttgggaaatgatccaataaagttatgcacaagaggagaagagaaaagattaagtaatttattctgggggagctctctcttttcagagattaaaatccagcaaaaaagctcaaccccaaagtgccgcccataacacctcgattcttgaaacttgaaatataaacctcacctattt

SEQ ID NO: 334050 - DNA, 519 bp, Homo sapiens
tcaaatcctttctttaacatagacactgttctcagcaagctcctattctaaaactgttctctccaaagtgacagctggtcatgactaggggtctaggattagtcaaactgcaaacagcagttggcatactctattcaagagcargacgttgttgtgcaccactgcaggccttcaagtccttagggcaaagaaaaccagcagccaactaactcatggctgattaactcagcatatcaaagtcattggacagcatcatggctagatacttttacattgttgggggtaggaggcaggggaaagctcctaacttgggaaaagcctgttccctatccttggctccaacaaactgtttttcccctgaaactaaaaagagacctcaaccattgccaattgcccctcaaaaatgtgtctttggacatgaggggaatatgtggacagcatctatttctcaactgtgggttttagattatatggtggaagataataaggtaagttataattgttgcagaattgcttttc

SEQ ID NO: 334051 - DNA, 501 bp, Homo sapiens
tggccaattctagaatcacaaataaaagccaattaaaatctttaaactaaattttgttgtaattttgtcttttgacactattttcaatgttataacatgaagatttattggtttaaaagagatacaaagttataaaatctagagccagaaaaacctgagtcttaatgagtcatccatcctcttggagttcaattatccccagataataaaattaagatgaaacgagccaacaggcaacctgctccaatgatttagtgakggggttgtgtggaaggtatcagagaatagagttttatgtttctttttcaaataactatccgttttctattctgaggcttgtgcactggtgggcaagtttagctttgacaatggagccatttgggctttgtttatcttttctaaagctctggaaatgattgttgaaacagaagtagtccaaataagagaaaactacatctttatacagttgtaaaggtattagaggagggtttttaaggagca

SEQ ID NO: 334052 - DNA, 544 bp, Homo sapiens
taaagtgaaaacaagtttattgggaaagtaaaggaataaagaatgtctactccataggcagaggaggagcaggggctgctcagctgcttatagttattgttacttcttgattatatgctaaacaggtgtggattattcatgaggtttccaggaaaggggtggccaagtcccagagctgagggtcccacccctttttagcccatataggataacttcctgacattgccatgacattcatactgtcatggtgctggtgagagcatcttttagcatgctaatgcattataatcagtggataatgagcaatgaagaccaccaggggtcactttcatcctttcatcaccatcttggttttggtgggttttggctggcttctttactggaaactgttttatcagcaaggtcttcgtgacctgtaccttgtgccaacctcctatttcgtcctgtgatttagaatgcctaacctcctgggaatacagtcyaatagggctcagccttattttaaccagcccctattcaagatggagtcactctggttcaaacg

SEQ ID NO: 334053 - DNA, 505 bp, Homo sapiens
cctcatgttattgatggtcctagtggttgatttaataattttgtgtaatggcttcattttcaacaagtttgtcattagaaatttagcatatacaggcctttgactgtcagctatattgccatgtgtcaatcctgtcccccttggttatattttcaagtacctggaggccatgggtgatttctggacattgtctcttccccagcacacagtagtgtctttatagastaagatgctcaaacaacatttgatgcttaattttgattactgattaatatatgaagtaaatctaaaagaaactttaaaaacaactgattgtttgacggagtgtaggtgtttcaaggttttatttttaatcttagctggtttttttttttttttggagaagttaatgcagccctaggctgtaaagaatgaaattcacccagctcttgtgttgcattagtgatgtttctgctgtcaggggttggaaaacagtaacttggaaactagagggggttgtgaccag

SEQ ID NO: 334054 - DNA, 558 bp, Homo sapiens
tatacagtaaccaaaacagcatggtactggtccaaaaacaggcacatagaccaaagctacagaatagagaacccagaaataaggccacacatctatgaccatctaatctccaacaaagctgacaaaaacaaacagtgggaaaaagactccctattaaataaatagtgctgggataactggctagccacatacagaagattaaaaatggacctcatccttacatgtatacaaaaatcaactcaagatggaagttggtgcttcttacgtgcctgattccagagctcacacaacttcatttcaccccatctgtttggacaaagcaagtccaaaggccaggccaaggccagggctgggtaaatggatttcctctcttactgggaagagcttcaaaaccttgcagctatgatttccaatctaccgcaattrtcactttatggcaacgtcactcttcagggacacgctgtgactccactatctccatttaataatctcacaatcttgagataacaaacacaaataccttttaatcaaaccattggtatctattaatatgtgctt

SEQ ID NO: 334055 - DNA, 383 bp, Homo sapiens
gcaacaaattatccctggaaaggaatacctatcagcctgaaaaattcatgacgatttgaatcttctgcctaattagccacagtggttgatacaagagagagaaaaaaaaaacatagccyataagtaacaatgaatccattgaaatatccaaatgcccagttaaatacatggaatcaggaccactagaaagcttttacgtgattatgccatcacatttaagtataagtgacttacaaagcatgcatttaagtcacactcactgtcaaataagacatataggtgtatgtgatctgaggaggcttcaaaaagttcatgaaaaaagtgaaattaaaagataatttaaaggattaaatataaactttatttctcaacataagctccat

SEQ ID NO: 334056 - DNA, 482 bp, Homo sapiens
atacagactaagaaagatgggacattaaaaacaatgatagagcatggcttattactgcatcccaataactgatgtgggagggctcagtgacaacgggatgcctgaaagtttaagagaaattttagggatttcacgtgtatctgggctacactgtctaccccagatgtggccaccacagctgacaagtctttccttttgtttgccttcttccagcccttaagaactgctgaaaatccatgttaaagatttaagacattgatatttctcctgtggtataaaaggacaggattgcctcccaagaaatgcagaatgagggttggacatttttatttactaaagcagcacttgcctaatgttctgtattttttctgaaaaacatattgagaaaacctgaccatcaaygtatcgaaactccttaacatttcttttaagtattatgcagcacagatatgtaccctccttcccagaccatgtcaccttgc

SEQ ID NO: 334057 - DNA, 576 bp, Homo sapiens
tgattaatggagttttaattcaggtctatctgacagtggccccaataggtcctcaagcccatcctgtggttatttccccagttctggaatgtgtaatgaaaatagatacactcagcagttaacagaatccccacgttggtttcctgaactgtggagggagggctattytggtaggaattattaaatggaaataattagaattgtctctgcccaggaaaatagtaaccaaaggcaataccacattcctcgaagaaatgcagtgatctctgccaccatcaaagactttaaggatgcaggagtaataattcccaccacatccccattcaactggcctatctgggctgtgcagaagacagagggaccttggagaattgcagtggatcattgtaagcttaactaggcagtaattccaattgcagccactgtaccagatgtgattttggtactaaattaatagtctttatttcttacaaaagttttacatttacatgtatttatttatttatttatttatttaggacagagaaactattccatatgatactacaatgacaaatatgacattataattgtcaa

SEQ ID NO: 334058 - DNA, 583 bp, Homo sapiens
ttacacttgcagtaaatttgcacagagataacctacactcttggctgtgggcagttcttcaaatgctatagaaactttttamatatagttcatcaattatcaggaggagctaactgctttgagtgcctttggcagccccttagactatttttcactcgcccagtgtttccacttttgtttcccctgtgacaatgcagtgtgagagaaagagcacacatttagcaggtcacaaggctgtgatctgatctaccacttactagatctttgactttagggaaggcactcacctctgaacaggtgtaactatgtcttcccatagatttaacataggattaaatgagtcaatgcatgtgatatgcttatcttagtgcttagcaagtgatagatccatgaggttacagctattttaattactgttatcattataaataactgtagaacaaaatgggctatttgtttagagatagcaaggcatggttgttttagagagtgggaggtaatataagaatctgcttgaaatgtttccagtcagaagagacagagtagaggacactgataaaaaagagagaaaaggggcaaacat

SEQ ID NO: 334059 - DNA, 583 bp, Homo sapiens
ttacacttgcagtaaatttgcacagagataacctacactcttggctgtgggcagttcttcaaatgctatagaaactttttaaatatagttcatcaattatcaggaggagctaactgctttgagtrcctttggcagccccttagactatttttcactcgcccagtgtttccacttttgtttcccctgtgacaatgcagtgtgagagaaagagcacacatttagcaggtcacaaggctgtgatctgatctaccacttactagatctttgactttagggaaggcactcacctctgaacaggtgtaactatgtcttcccatagatttaacataggattaaatgagtcaatgcatgtgatatgcttatcttagtgcttagcaagtgatagatccatgaggttacagctattttaattactgttatcattataaataactgtagaacaaaatgggctatttgtttagagatagcaaggcatggttgttttagagagtgggaggtaatataagaatctgcttgaaatgtttccagtcagaagagacagagtagaggacactgataaaaaagagagaaaaggggcaaacat

SEQ ID NO: 334060 - DNA, 583 bp, Homo sapiens
ttacacttgcagtaaatttgcacagagataacctacactcttggctgtgggcagttcttcaaatgctatagaaactttttaaatatagttcatcaattatcaggaggagctaactgctttgagtgcctttggcagccccttagactatttttcactmgcccagtgtttccacttttgtttcccctgtgacaatgcagtgtgagagaaagagcacacatttagcaggtcacaaggctgtgatctgatctaccacttactagatctttgactttagggaaggcactcacctctgaacaggtgtaactatgtcttcccatagatttaacataggattaaatgagtcaatgcatgtgatatgcttatcttagtgcttagcaagtgatagatccatgaggttacagctattttaattactgttatcattataaataactgtagaacaaaatgggctatttgtttagagatagcaaggcatggttgttttagagagtgggaggtaatataagaatctgcttgaaatgtttccagtcagaagagacagagtagaggacactgataaaaaagagagaaaaggggcaaacat

SEQ ID NO: 334061 - DNA, 620 bp, Homo sapiens
gcctatgtggtttaattttttcggatgttaaaattcagttcctctgcaatttaggcagaaagggagtgataatgaagaggaaataggtggtctctgtgagtaagaaaggtgccttcaggtatcatttgtaccatataaaattcttttcagtttctgtgacccagatactgttagtgtctcctatctctgagccttttgggggtttcagagaacaaatgttcccactaatttgtcaatacctcttaggaggtacatggattatttttctctctcctctgccaagacagttaccacttcatcatcttatttccacagtccagtaatttactgaggccttccaccttgctctcctccttctgtggttgtggtcaattcaccatgtttaaaagaatatctatggtattttttaaaatatgtcaacttcctccatgttatttgctttcaaagagaggagcctcgaatgcataatgtaaaaaaaaaaatgaaatgatgtgttagtagtggacattctggacattgtggcacctcacagctattttagaytagggttgattctaggaagctctcggatgatgtcaatgggtggatctctatgatgcctaggcatgaaacaaacacgg

SEQ ID NO: 334062 - DNA, 549 bp, Homo sapiens
aattgatttccttcacttgagcctggctggtattcctttaaatacacagagatctacagcttgatcttctgatccttatcactcatgttagcaaatcctatgattttcccatcacgctttcccctgtggcagcagaatcatcaggggtgaaatagcaatgatgtcaatagtcaccttgaagtccccaaactggtgtgcatatcacaaggccaggatatgccgcttaagtagaagattcaagtgatatcaaccatccagctattcagggctgaatcaaagcaacattgcaacgctaaagtgaagttgctagcttttctaaattatttcttataatgtaccaaatatcatgtttggtgccagaaattctcatgtttatatatccagtttttaccttgtttcagaagatttacagattctttcagtgatgggcacacaactcagaaacacttgaatagatgaaaggcagaactcttggtaatttccaaatgaaaagaaggctgccatccagggccacacragatatggcatctaggaacagaggaacagaaa

SEQ ID NO: 334063 - DNA, 550 bp, Homo sapiens
aattttacagactatgccatgtggtgatgagaagaatgcatactctgttgttttggggtggagagttctgtagatgtctatcaggtccatttgatccagtgatgagttcaagtcctgaatatcttttttaattttctgtcttggtgatctctctaatattgtcagtgaggtgtttaaatctcccactattattgtgcaggagtctaagtctctttgaaggtctctaagagttcctgtgttgggtgcacctatattaaagacagacatctcttaagaatatagacataaaaaattttcaataaaataatatcagacttaatttagcaatatattatataccttgaacaggcaaagtcgattccaggaatgcaatattgatttaatatttgtccaaagacaaaattgcaacaaatttagtttaagatcttaattggcttttatttattattgtagaggtaggcaacacytcattcagacacaatgagtctttttatatgccaagcagaggaacctggctttatagacaaaaaatggtggaggaaagaagaaa

SEQ ID NO: 334064 - DNA, 588 bp, Homo sapiens
gcactgcaggtgctttgtccttaactcactgaatcctccagcaaccctacgaagtcaggactaatgtccccactttccagatggggtggcagaggctcagggaggggatgtgacttccccaaggtcacacagcgggatccatagccagcagctcttggttaatatgacttacggtgtccaaagccccctccccrtgtgcctcccccgaccctcagctggtgggactgagaagccagggccgcactgctctctgcggaccctgcaggactctccttctcccctggcttcctttgcgccacaccgaggggactggatggtgtgatgcttttcccacgctggatttggttgttttcctacctggaaacaccagttcggcctcttcctgtctacacctccctctgaaacgccctttctccccctccagcctcttctctcctcagagtcattgcttgtcttttgagtgcccttcatggcgggcccaggggccaggccgtgtgctggccacccagggaggatgctgtcccacctcagaacccccctttatcccctgtaccagccggggcctttgtgattggtctacaccagctt

SEQ ID NO: 334065 - DNA, 575 bp, Homo sapiens
ctcagtgggtcttccacaaggtgactcggggtccggtttcccggagcctcggcctccccactgctagtgatgagcagaggatggcacagaggtgacgtcacctcgacctacattgcgctgactggagccagtcctgtggcccccgcctgcagcgagggggtgaaaatgttgcttagccatgtgtccagagcgaggaaacgggtttagtgaccatccctctggccgttgttgcccagcccggaggcctagtggggtgcccggcattgaggacaggtggccaagcaacgggaagcggaggcggagttttccatgggacccactgccctgcttgccgcggtcactctggttgggttcctatctggggctccaggatatgccccagccccagtcatgctgaggtcagggcacaccctggaagtgagggtctatgacccctcggtggggagtcccgacccagatgtttccagaaaggaggtctgtggtttcccacctgtcggtctgasggtgccgcgcatcccctcctcctgcaggaagccctcccagccaccagagggcgccgcacccccgccgctgtc

SEQ ID NO: 334066 - DNA, 635 bp, Homo sapiens
tcagagcttccaggtgattctgtgcaggagaggaccctagggaagacgcaccttggtattctggggtatcttggagctaggtctccaaggttcggaccccgatgagtgatgttgtctctcagtacctcagtttcctcatctgcaaaatgggcgtgatgggatcacaggttcccaggatggttgtgagcactgggtgagatgaagtgagcaggtgaagaattcaggcgtctttggggaagtggagaaggaatgttaacatgtcgtgatttgcagtggcaaaacctgggacactgaggcctgaggggtcgcagagctcccaggggttagagcaggcragagcccagtccctcctgagcaggaggtggaggggaagtgtgccagctcccagtcagcaggtctgggtccagtaccgcctgtctgcttgatgtctgtgggtaagtagctgtgccctgctgctatctgtagactggggatacccctgcaaccccctgaggctgtggtgaggatagatggaggtaaagcgtgggagaactgcctaggacatggccacacatggccaaataatgatgatgttcccgcataatccgacaaaccgctgcatgactctggacctcagtttccccagctataaagtg

SEQ ID NO: 334067 - DNA, 585 bp, Homo sapiens
ataaactgtgatagtccattctagaagctgagatcctgaattgttacctggtacatctgttaatgcccagggaggaccctataagatagaactgagaatattcgcagtgcacrcacatttttctttactagaatttgtattccagattcttgtctggtctcccaccctagacagagctcttgggatcctcagggccttttttacttaaaatacagactgtagtaagatcctggtctgacctccctgcttcttttctcctgaccacattaaaagtttgccctatagtcatttcagggttcaagtgagaaggaagcatgaaccaacaacaagaacactggacccttctcttcatcttcctcatcaaggtttaccttcactactaaaccctattactatctcattgtgacattgggtttgaaattacagagcttccctaagtaagagtgtgtgggagatacatactgttcaattctctctgaacaattgtttccccagtaattttgttccttttgacccagtggttcaatagcaactcaaagattaaaatcagagggttacataaattcctgctggtagttttggaag

SEQ ID NO: 334068 - DNA, 585 bp, Homo sapiens
ataaactgtgatagtccattctagaagctgagatcctgaattgttacctggtacatctgttaatgcccagggaggaccctataagatagaactgagaatattcgcagtgcacacacatttttctttactagaatttgtattccagattcttgtctggtctcccaccctagacagagctcttgggatcctcagggccttttttacttaaaatacagactgtagtaagatcctggtctgacctccctgcttcttttctcctgaccacattaaaagtttgccctatagtcatttcagggttcaagtgagaaggaagcatgaaccaacaacargaacactggacccttctcttcatcttcctcatcaaggtttaccttcactactaaaccctattactatctcattgtgacattgggtttgaaattacagagcttccctaagtaagagtgtgtgggagatacatactgttcaattctctctgaacaattgtttccccagtaattttgttccttttgacccagtggttcaatagcaactcaaagattaaaatcagagggttacataaattcctgctggtagttttggaag

SEQ ID NO: 334069 - DNA, 585 bp, Homo sapiens
ataaactgtgatagtccattctagaagctgagatcctgaattgttacctggtacatctgttaatgcccagggaggaccctataagatagaactgagaatattcgcagtgcacacacatttttctttactagaatttgtattccagattcttgtctggtctcccaccctagacagagctcttgggatcctcagggccttttttacttaaaatacagactgtagtaagatcctggtctgacctccctgcttcttttctcctgaccacattaaaagtttgccctatagtcatttcagggttcaagtgagaaggaagcatgaaccaacaacaagaacactggacccttctcttcatcttcctcatcaaggtttaccttcactactaaaccctattactatctcattgtgacattgggtttgaaattacagagcttccctaagtaagagtgtgtgggagatacatactgttcaattctctctgaacaattgtttccccagtaattttgttccttttgacccagtggttcaatagcaactcaaasattaaaatcagagggttacataaattcctgctggtagttttggaag

SEQ ID NO: 334070 - DNA, 430 bp, Homo sapiens
tttgttaaatttagatgtcagtgaagagcttccagccagaagaaaatgaaatcgtgaggatggggaaaagacatttgttgcacaaatgacagtatttgataaaaacaggtaatgttgatgaacaagcgaggctcccacaatgttctggaaatgttttcattctgaagcagaatataattatttatattgattatttcattgcctttgtttctttttattcttacggatgaaaaaacaaatttgcaaacactgaatttttgtctgtttyatagaaaacaataattaaggaactatttgcatagatagctcagttaaacttacttatttggcgaatattttgagtgtctgctcttttccagacactgttctggacattaaggcaacaaaatccctgccttcaccatggagcttaacttttagtggaggaaac

SEQ ID NO: 334071 - DNA, 430 bp, Homo sapiens
tttgttaaatttagatgtcagtgaagagcttccagccagaagaaaatgaaatcgtgaggatggggaaaagacatttgttgcacaaatgacagtatttgataaaaacaggtaatgttgatgaacaagcgaggctcccacaatgttctggaaatgttttcattctgaagcagaatataattatttatattgattatttcattgcctttgtttctttttattcttacggatgaaaaaacaaatttgcaaacactgaatttttgtctgtttcatagaaaacaataattaaggaactattygcatagatagctcagttaaacttacttatttggcgaatattttgagtgtctgctcttttccagacactgttctggacattaaggcaacaaaatccctgccttcaccatggagcttaacttttagtggaggaaac

SEQ ID NO: 334072 - DNA, 430 bp, Homo sapiens
tttgttaaatttagatgtcagtgaagagcttccagccagaagaaaatgaaatcgtgaggatggggaaaagacatttgttgcacaaatgacagtatttgataaaaacaggtaatgttgatgaacaagcgaggctcccacaatgttctggaaatgttttcattctgaagcagaatataattatttatattgattatttcattgcctttgtttctttttattcttacggatgaaaaaacaaatttgcaaacactgaatttttgtctgtttcatagaaaacaataattaaggaactatttgsatagatagctcagttaaacttacttatttggcgaatattttgagtgtctgctcttttccagacactgttctggacattaaggcaacaaaatccctgccttcaccatggagcttaacttttagtggaggaaac

SEQ ID NO: 334073 - DNA, 621 bp, Homo sapiens
atcaatatcatacatatttaaaaacaactccaacagtgaaatgtattatctaaaatgacttctaaaactatttcaagaaaaagaactctgtaaaagcacatctttaaataaaatgtatgtctgtttaaataagytccttcccgtaagtctcttgaaggtaaaataataaaataataacgtgggggttattaataccaaaaacttaactagtttccaacataagataaatacttgtccaagatgtgcccttatggaagaagttaccaccgtttggctaaaccagcattattcattcactgctcatgtggaaatgttcctcaaacaaaagcataaatgcggcaatactgacggttttctgctgtgtatttagagacatacacaaaaaccaaagactctcagcattaattatacagcatgtcttgattattacaatctcaaaatcccttttaactcaagttccacttcataagaaccttagccacgtcatttacctaactcttcccatttagctcttcccacagctcagctcaggagtaccacccagactgtgggggtggggtgtgcgggacaggtttttcaggtctcagtgctggtttattacattgtctctctttgttccca

SEQ ID NO: 334074 - DNA, 621 bp, Homo sapiens
atcaatatcatacatatttaaaaacaactccaacagtgaaatgtattatctaaaatgacttctaaaactatttcaagaaaaagaactctgtaaaagcacatctttaaataaaatgtatgtctgtttaaataagctccttcccgtaagtctcttgaaggtaaaataataaaataataacgtgggggttattaataccaaaaacttaactagtttccaacataagataaatacttgtccaagatgtgcccttatggaagaagttaccaccgtttggctaaaccagcattattcattcactgctcatgtggaaatgttcctcaaacaaaagcataaatgcggcaatactgacggttttctgctgtgtatttagagacatacacaaaaaccaaagactctcagcattaattatacagcatgtcttgattattacaatctcaaaatcccttttaactcaagttccacttcataagaaccttagccacgtcatttacctaactcttcccatttagctcttcmcacagctcagctcaggagtaccacccagactgtgggggtggggtgtgcgggacaggtttttcaggtctcagtgctggtttattacattgtctctctttgttccca

SEQ ID NO: 334075 - DNA, 526 bp, Homo sapiens
tacagtcggccctttgtatctgtgggttctgcatctgtgaattcagctaaccatggtttgaaaatacttttttttaaaaaacattgcatcggccaggcacagtggctcatgctaggattataaatcctagcactttgggaggctgaggcaggtggatcacttgaggtcaggagtttaaaatcagcctgttctacatggtgaaaccccgtctttactaaaaatacaaaaaattagccgggcatggtggcacgtgcctgtaatcccagctacttgggaggctgaggcaggagagttccttagaacccgggaggtggaggttgcagtgagccaagactgtgccactgcactccagcctaggtgacagagcgagactctgtcttraaaaaaaaaaaaaaaaaaaaaattatgtctgtagtgaacatgtacagacttttttcttgtcattatttcctaaataatacaacaaccatttacctaggatttacattgtattaggtattttaagtaatctggagatgatttaaag

SEQ ID NO: 334076 - DNA, 497 bp, Homo sapiens
attattgggacatcattggaacaattgagaaaatctgaatttacatttgaactatggcttacatagataayacaaagcaagacagcaagtggggcaagatataaataatgaatgaatgtaaagggcatatgggagttccttgcacaattcttgaaacttttcatgagatgaaaggaaataattgttcctgaaccatcataacggactgggtagaaacaaaccctgtcttgttccctttttggccttttaatttgaagtcaatattttaataatctttttgatgctccagttggttgctcccagcctgcaaatggaccactaccaatatgtaattaaaggagaataacaaatagaatatagattacacaggtgctgacttacaaatgcaaatgttgtagcagaagattaagctccccggaggctagaggtgcgaatctttgcttattgccatcataattcattaatggtcaaagtaacgctgagatcaatattcctgc

SEQ ID NO: 334077 - DNA, 607 bp, Homo sapiens
tcctgcaactttactaaattggtttatcagttctaacagtttttttggtggagtcattagggttttctatacataatatcatgtcacctgcaaacagggacaatttgacttcctcctttccaatttggamgtcttttatttctttctcttgcctaattactttggctagcagttctaggactatgttgaataaaagtgatgaaagtggacatccttgtcttgatccagatcttagaggaaaacttttcaacttttctccatacagtatgatgttagctgtgggtttgtgtgagactttctgttaaacatttctttttttttttttttttggatggagtcttgctctgttgcccaggctggagtgcagtggtgctatcttggctcactgcaacctctgcctcctgggttcaagtgatgctcctgcctaagcctcccgagtagctgggactactggtgcccaccaccacacctggctaatttttgtattttcagtagagatggggtttcaccatgttggtcaggctagtcttgaactcccgacctcaggtgatctgccctccttgaccccccaaagtgctgggattacaggcatgagccactgtgccag

SEQ ID NO: 334078 - DNA, 570 bp, Homo sapiens
tattaattgcctatctttttattgactaaatatatagtttatcatatactaaaacttttgttgttgttgttctcctagtaacactatggactacatgcaattcttttgtcccagagtccttctctttggcactctttgtcctcctacttcaaaayggatgattttttttttttttttatcacacactactttcctttctcgtgttaaaaagatcccttgccttaatctttcttgggtaacttcttcatcctgctggaatacatgctcaaataacttaaaaaaggagtctttccaagtaaattttacaagtcctggtttgtatgaaacaccaacattctaccctcacagttgattgataggtaggctggatatgtaaattagtttcaaatttaatttctcccagaactgaaaggactactctattattttccagcagccagagatgttaatgagaatttggctgttcaatttacattcctctataggtggcctaatttttccttctcaaagctttcaaaaattttgtttattcttagagttctaaaattttacaaaattatgtccaagtgg

SEQ ID NO: 334079 - DNA, 647 bp, Homo sapiens
ccaaattacatattaagaaacaaaacaaagacttatcaaaactgtttttattccacaaggaatatgcacagcttttagacayagtcatatctagggcagctccttgggaaaggctggggctctcgtatcactctcagtcttcagtccacgtggtatcctgtcagtagactttattcccttgttctcagtttcttacggtttttggcatgaagttaatgacaaacttgatgttttctttgacgattctctttttacttcacgggttgttttaatttgtgactctctgagtgttttaatacttttagtgtcagaacccagagtaatttttgtaagtgctctggcttgcgattcttttgctaggtaagaataaagttagggaaaggcataaattagctgtgtttgtaagaatgaaaaacatgctgaatgtggagaagatggaatgtcattaggatgagaaggaaaggcagcatgttagtcatgaaacttatatatgatatgtttatgtttattatgcacataataactgtattcaaaaagacttccaggggtttgacattcctacttgatcttggtggataactctgtagcctatatgaacttattaagccaaaataaaaaaggaacatataaagactggcctatgtcaa

SEQ ID NO: 334080 - DNA, 647 bp, Homo sapiens
ccaaattacatattaagaaacaaaacaaagacttatcaaaactgtttttattccacaaggaatatgcacagcttttagacacagtcatatctagggcagctccttgggaaaggctggggctctcgtatcactctcagtcttcagtccacgtggtatcctgtcagtagactttattcccttgttctcagtttcttacggtttttggcatgaagttaatgacaaacttgatgttttctttgacgattctctttttacttcacgggttgttttaatttgtgactctctgagtgttttaatacttttagtgtcagaacccagagtaatttttgtaagtgctctggcttgcgattcttttgctaggtaagaataaagttagggaaaggcataaattagctgtgtttgtaagaatraaaaacatgctgaatgtggagaagatggaatgtcattaggatgagaaggaaaggcagcatgttagtcatgaaacttatatatgatatgtttatgtttattatgcacataataactgtattcaaaaagacttccaggggtttgacattcctacttgatcttggtggataactctgtagcctatatgaacttattaagccaaaataaaaaaggaacatataaagactggcctatgtcaa

SEQ ID NO: 334081 - DNA, 533 bp, Homo sapiens
gacccctggagatgcctgaatttattccaccagcttccttccatgagactcagtgaagctgttttgactacgggcacacaacacaggcttatggcacctgaaaaatatttttctcatttcattaatatccaaaaggaaagtccatggataagaggaagaagttattacttgccmagacaagtttattcctgctcttccagacataatggagaatcaagcccaataacgacaaaaattgtgatcttgccatgagaaaattatacaattccaggaggattttaagcctgtaaaagcagcatcatttatggagaaatatctagagacttctaattttggtccagagagagctttgttattttcagtgcccaattttcaattttctatttttcttttttggagatggagtctagttctgttgcccaggctggagtacagtgaccctatttcggctcactgcaacctctgcctcctgggttcaagcgattctcctggcctcagcctcctgagtagttgggattacaggcatgcaccaa

SEQ ID NO: 334082 - DNA, 607 bp, Homo sapiens
atgacagaaggagaacgagagacatgatatatattgaaggcaagattcaaattcagcatctttgacaatgaagccccgacttttgaccactataggatattgtcttccaaaggatacctttcacacaagcattgtccatagactgaataatgtcttatataaatgtattattcttttgaattatatgtagatgctattataatctaataattttagttttgtcattgtattttatcaatgaagaaattaaagtgcagctacaatcataaagggaacatgaccttttttaatattagtgaaaaacactaatttttttattgtgataaasaacacataacataacataaacaaccattattaagggcacaaaatagtgaaaaacacttatctaattcttaatttaataattgaaataagttttctgttagatttccattaagcttcaaattatgcatgagagatgtttgtgatggaggagaagctgacagaatgtttttcccatgtaattatttgtaagtattggcaatgacaccttttgttcttaaacctacctgttccagaaacccggcattgaaaacgggctggctgcccttcagaagtgacagtg

SEQ ID NO: 334083 - DNA, 410 bp, Homo sapiens
agttcatggaacccagaaattagaagaaatgacttctgtgaggctggtttctgacactatcatagaaaagatctttacttttctgtgcctcagtttctccwctactaatacagagataataagaactggatgccatgaccatttggtcttctaggaacctagggaatgctggcgatatggttcatctttgtgaatcttgagattacccctggagttcctgcatctgcctcaggggtattttattcaaagagatatggcctaggatgagaataggaagggaggttccatttttctcttgcatctaggttagactcaaaacaaggtcagcttgagattcagccttaagatttctaatgaggagagcagaggtttaacagcacttccctggggactgctcagaggctcctcag

SEQ ID NO: 334084 - DNA, 531 bp, Homo sapiens
cctggcctggaagctgtattggaagagggaaatgctacaaaggatgttagtgggtgaactgacaaaactggaatatggttggtagattacatagaagtattgtaccagtgttaaatttattgaagtttataactatactgtggtattatataaaactatatccctattagtaaatattcactaaaatattaagagaggaaggaccatgatatatgtaatttcctatatataatggggccctgcacartggctcatgcctgtaatcctaacactttgggaggctgaggtaggaggatcacttaaacccaggagttcgaggccaacctgggcaacatagcaggaccccatcttcacaaaaaacaaaaaaaattaactgggtatggtggcttgcacctatgatcctagctttgcaggaggctgaggtgggaagatctcttgatcccaggagttagaggttgcagtgaactgggatagcaccatttcactccactctggacaatagagcaagacactgtctctaaaagaaaaaaa

SEQ ID NO: 334085 - DNA, 582 bp, Homo sapiens
caaactacttgtgctttaatttttgtgttctaatatatgtaatagttctcaccccttttgtttatgttagcatattaaattcttaccacaaatatattggaaattatgttcatatgttacatctaatacaggaactttagaatgagtcattgatcacaaattgtagaagtacatttttattatgttaatcaggtgaggatgtttattgtttgtagcataggttgtttggataggatataagcaatctattaataccataatttttaatgaatgcacaaactggaaataatctcgtggaaaaacctaactgaaagctaaattaaattttatcctttttttttttttttttccatttaaacctgagttgacacagcacacgtttcaragagcacggggttgggggtaaggttatagattaacagcatcccaaggcacaagaatttttcttagtacagaacaaaatggtatctcctatgtcaacttctttctacacagacacagtaacaatctgatctctctttcttttccccacatttcccccttttcttttcgacaaaaccgccatcgtcatcatggcccgtt

SEQ ID NO: 334086 - DNA, 577 bp, Homo sapiens
gtgggggagggaattttcccgagcgatcccactaggcytcctgtctcatttaagagtcagataaggcaagaagaacttgagaatgccacagagcagggacacacactgtgaaaacacagatttaatagtaaaattataggatgccctccattccttaccaccacaatacagctgatactacagctgaaattaccactgaaaaagctacattatacccattatacctgatacagactctgtttaaggatttcatagagaagcccatagacaacaagggagagaaaactaaggacacaggagacttgaagcctctggcacctacaggtacagcaatattaaatacagcccaactcctagacagatttacgtaagtcctctcactaaaggccaatttacctcagctacttttgccaaaaattcattctctggtttaaacaaaaaatacaaggcatactaaaagtcaagaaaaatcatagtttgaagagaaaaggcaaacatcagaactagactcagggataataccggttttcaatgattacaccaggaattcatatttaacatattaatttgtattaat

SEQ ID NO: 334087 - DNA, 577 bp, Homo sapiens
ttctcccattctgtaggttgtctattaactctgatgatagtttcttttactgggtaagcactaagttttactgaagattttactttttatatgaacacatactataatcattyttaagttactactataaatatttcattaaataatttataatgttgagtggagtcttttagttccagctcaaggtcaaaattcatgttcatttgggaatctcaacaccaaaaaagtcaatggcatgtaggagctcagtaattaataattgttggaggaataaataaaagaataaatatgatttacatcagcatataaatatgtatgtttactgtaatcttaaaatatagctcaatgatttccttgcttcaaaaatagtattgcattctatgtgtataacgggttcaatactgctagttttgaatcatttcacttgagttacaaaatctgattaccaaattaggaaagagaaaaaaataacctctttctgaataaatggatctcaaaaattaataggtatttggagctataaaggattttaaaaatgattttgtccaaccctctaattttacagataaatatttgt

SEQ ID NO: 334088 - DNA, 596 bp, Homo sapiens
gtcacactccattctctactctcacatctggaaaccactaatctgtttttttttttctccataaatgaacstattttggatatttcacataaatggagccatataatatgttgcttattgtgtctggcttctttcacacagcataatgttttcaaggtttatttatgtcatagtatgcatcagaacgtcgcatctttccgtgtctgaataatattccattatacggatattttgtttacccattagtcagttttgtgaacatttgagttgtttctgcctttgggtattatgaataaagtgctatggagatttttgtacaaattttgtttgaacacctgctttgaattccttgtagtatgtaactaagtttgaaactgctgggctatatataaattctatgtataacgtaattaggaactaccaaactgcttttcactttgcattccagcaacctatgagggttcaaatttctgcacatccttgccaacacttgatattaaaaataatagtaatcatagccacctagtgaagtggtatatcattgtggttttgattgacatttcacaaattactaatgatgttgaacatcttttcat

SEQ ID NO: 334089 - DNA, 596 bp, Homo sapiens
gtcacactccattctctactctcacatctggaaaccactaatctgtttttttttttctccataaatgaacctattttggatatttcacataaatggagccatataatatgttgcttattgtgtctggcttctttcacacagcataatgttttcaaggtttatttatgtcatagtatgcatcagaacgtcgcawctttccgtgtctgaataatattccattatacggatattttgtttacccattagtcagttttgtgaacatttgagttgtttctgcctttgggtattatgaataaagtgctatggagatttttgtacaaattttgtttgaacacctgctttgaattccttgtagtatgtaactaagtttgaaactgctgggctatatataaattctatgtataacgtaattaggaactaccaaactgcttttcactttgcattccagcaacctatgagggttcaaatttctgcacatccttgccaacacttgatattaaaaataatagtaatcatagccacctagtgaagtggtatatcattgtggttttgattgacatttcacaaattactaatgatgttgaacatcttttcat

SEQ ID NO: 334090 - DNA, 548 bp, Homo sapiens
aagtatcattttgaattgtagctcccataattcccacgtgttgtggaagggacccrgtgggaggtaattgaatcatgggggcttgtctttcctgtgctgttctcatgatagtaaataagtatcacaatatctgatggttttacaaaggtgagttcccctgcacacgctctcttgcctgccaccatgtaagacgtgactttgctccttttttgccttccaccatgatcgtgaggcctccccagccatgtggaactgtgagtccattaaacttctttcctttataaattacccagtcttgggtatatctttattagcagcatgagagcagacaatacacctccaaagttgttcttgttcaagttatttttggctatccagagttccttgaaatttcatataaattgtaggaacaatgtttccatttctgcaaagatggatgttaagcatttggtagggattatattgaatctgtaaatagctttggctaatattgccatcttcataatattaaatcttagaaaccatgaccacaagatgtcttccattta

SEQ ID NO: 334091 - DNA, 574 bp, Homo sapiens
gtgtggcccgtgagggcagatagacatgctccatgggacccggaggctgcagagagggccagccctgaggaaagtgcttgctggagcatgagttgaggttgttgagagaacaggatgggaggtgrgcagacagtccccgtgcccattcgagagccaggaggggtggggagcagctcatccttgattccagaaggagtgttcgccaagcagaggctccgacccatgacccccagcagcaccacgtgtccacatgctcctgtgccaagcggagcccaggtgccatggccagagtgcctccaacaaggacaaaaccttggtcagctaaagccagggactcggctaacgtgtgtgccgggcccaccctttctgccagcctcttccagctcagctttgagtgggctaacatttattttgttggcctcccttggcccatcatccagcaaatgttccctcacgccggccacacgttctcagacctctggcagctttgcccagtaacctcacatttctcatacagctccttccgtgatccatggggctagagcttagagagtccccttgatattgtggggtg

SEQ ID NO: 334092 - DNA, 486 bp, Homo sapiens
ggatgctgcagctgcctctacctccttgtggacttgaaagttaacaggcattgccattattgctgctttcggtgttctatttctgtgctgtacctggttatgttttctttaagctactctacaaaatattattaattgttgctatgagattttaaagggaggtgaaatttctcaaaacaagagcttacattcttaaaatcgattcttcatctatattgctgaaatcaagctctgaagattgatcaatgactccttaattttaattattaaagactcctgtttgtcattttgcctgattgccttgtagcttttgatattcagcacacctggaatgctgayttttttggacaggctgactttttcctcccctgatgccaatgtgcgtgctgagcctaacattaaggactccccaagctttagtcttcaggcaattctctgtagtgtcaattatgaggaaactgtgttccctcccatgactttaatcat

SEQ ID NO: 334093 - DNA, 580 bp, Homo sapiens
ggccgtggtatattcagataatcaatgaagtatgagtacagaacagccagaagtactctggagcaacccgctggtattttcaaggccctggagagtataatggcaaccagtatacttggccctacacattgggtcttgccagatgatgtaagggataatgaggagggccacatggaaggaaacctctaaaattgcctcctgcctcattaatatagtaaataaaaaagagtgtcataccccagacaatggctgatactagtgccacccttaaaaacctaaaggctgcagggtggcgctttccatcacaaatccatttactcaccagcctcacctgatcctgcagattyaaccaggagacagccgtgatcacagctgctgtcccagaagtggtactgtagtcagcacacactgcgaggcctcagatgtggggtgtgcagccattaatttggtgacttttgtaaaaaaaaattctaattagagaagggcatcagaaacagcccacatttgtatgggaggattacaatttcatttatggttttgctacaggactctgttacctctctttccttctgtcattatt

SEQ ID NO: 334094 - DNA, 585 bp, Homo sapiens
ctgccaagggtgccagggctcaggaatactggcacggaagaaggaaagaggatgcgcttccttctgttcctcatgtaccctgggcatctgctaggaacagaagggagccagggatgcctgcgtctttctagatgggtaacattcatcttcagcctgtatccctttcaaatgcatactgaacccctgggactccattgaaaaaaaaaaaacaccttccttttcccccctctccttctctgtcttctcttcacagataagtaattgtgtctctgtactatggaacactctcctcagatgcatcctccaaactgagaaaagttwattttccaaatcttaaactggttggcttagtattgggcttaggggaagggaacccagaaataagacattccagcaaagggatgaagtttttttaccagttgagcttttggcctccctctccctgtgcaaactggcaaaacgccttgggatttttgagctccccttactcctccccttgtttcattttgatatatatcttctaataaccaggtttgtctcttcttgcctgcaggccatcaaactcaaaatcgtcttgcaaccaga

SEQ ID NO: 334095 - DNA, 585 bp, Homo sapiens
ctgccaagggtgccagggctcaggaatactggcacggaagaaggaaagaggatgcgcttccttctgttcctcatgtaccctgggcatctgctaggaacagaagggagccagggatgcctgcgtctttctagatgggtaacattcatcttcagcctgtatccctttcaaatgcatactgaacccctgggactccattgaaaaaaaaaaaacaccttccttttcccccctctccttctctgtcttctcttcacagataagtaattgtgtctctgtactatggaacactctcctcagatgcatcctccaaactgagaaaagttaattttccaaatcttaaactggttggcttagtattgggcttaggggaagggaacccagaaataagacattccagcaaagggatgaagtttttttaccagttgagcttttggcctccctctccctgtgcaaactggcaaaacgccttgkgatttttgagctccccttactcctccccttgtttcattttgatatatatcttctaataaccaggtttgtctcttcttgcctgcaggccatcaaactcaaaatcgtcttgcaaccaga

SEQ ID NO: 334096 - DNA, 660 bp, Homo sapiens
ttgagctccccttactcctccccttgtttcattttgatatatatcttctaataaccaggtttgtctcttcttgcctgcaggccatcaaactcaaaatcgtcttgcaaccagagccttggaggatggccccttttttctgagaactcttagatagccctctgagggagctctgactgccattttcccccaaacagcgccccctgtcagcaggaagcagtaaaaatttgtcttcatccttatccttattctaacagcagtacatgtactttttagaagggagaatgagacaacctggagggaaggggtcccaagagaaactcaggctggcctgggcacacagggaggagtgtgcactgggatagatccacagaagttctcactktttgcagaggggaggagcctggcccctcttcttcctgggtggaacctggaattcaaacttcgaggtggcaagcacactagcagggactctggctttgaggagggtccttgtttccctttttttcccccttttcagccaacaaaaccttgccttactcacccttcaaaacgtctatgagcctaaatttttatggccatgtgacaaggtcctcatatttagttgaactaaggaaaagtcctgcaacaaattgatatagtcatataatttttcttctttag

SEQ ID NO: 334097 - DNA, 559 bp, Homo sapiens
catggtgagggtgttaagaaggagaggcataagggaaagttccttgaaaccatgacatgtraaagaaaacctgaagagtgagcagggggtatccatgcaggttggtcagtgtgtttccaggtagaggccaaccccattccaaaggttctaagcaggcaggagcatgaggcagccgagagctaaaagtgtggagaggttggaaccaaatggacaaaggagcactgcacagaggaacctggagggctcaaatgagccatagaaactaaggtccatgccagcagagatgcctgggatgctggtgcttccctgtggctgaacttttctgagtcattattaaacatatttgcagcaggagcctctgggtattatgttccaacttataaagagcatctgccccccaaaagataaccttgcttcccactgacattgacatagttgtcactgtgagtgcctgcgtattaatccatgaatctgagacatcagccatgacaagccatggtgtgaagaaagctaacaggagaatccacaaggccacactcagcaatatgacaccacagcc

SEQ ID NO: 334098 - DNA, 559 bp, Homo sapiens
catggtgagggtgttaagaaggagaggcataagggaaagttccttgaaaccatgacatgtgaaagaaaacctgaagagtgagcagggggtatccatgcaggttggtcagtgtgtttccaggtagaggccaaccccattccaaaggttctaagcaggcaggagcatgaggcagccgagagctaaaagtgtggagaggttggaaccaaatggacaaaggagcactgcacagaggaacctggagggctcaaatgagccatagaaactaaggtccatgycagcagagatgcctgggatgctggtgcttccctgtggctgaacttttctgagtcattattaaacatatttgcagcaggagcctctgggtattatgttccaacttataaagagcatctgccccccaaaagataaccttgcttcccactgacattgacatagttgtcactgtgagtgcctgcgtattaatccatgaatctgagacatcagccatgacaagccatggtgtgaagaaagctaacaggagaatccacaaggccacactcagcaatatgacaccacagcc

SEQ ID NO: 334099 - DNA, 557 bp, Homo sapiens
tgtaggatgaacctcttccatgtaatgaatagtaaatatattttatcttccttatgattttcttagtaacattttctttgttctagcttactttattgtaagaatacagtatataatacatacaacatgtaaaatatggtttaattgaacatttatgttatcaggaacacttccagccaacagtargctattagttaagttttgagtaagtcagaaattatatgagcgttcttgactatgcaaggggtcagcacccttaacctcatgtcaactgtattcgtaagagtgaaattacagaatcatgtaattctatgtttaaacttttaaaaaataaccaaactattctccatgtagggtgaaacatcttacatttcctccaaccatttgtgaggattctagtcttgccttaatttcctgtttagatagatagataaagccatcatagtgggtatgatgtggtatctctgtggttttcatttctctaaagtataatgattttgtttatgtttcatgtatatactggccatttgtaaaaatcttaaagaagtgtctactca

SEQ ID NO: 334100 - DNA, 574 bp, Homo sapiens
gtgtgtatatattcatatacatgtaaattttcacttattcatctttgaatataaataaactagacctataagaatcaacttcaaaaatctcaaatatgtagcctgggtaacagagcaagactgtctcaaaaaaaaaataaatgaataaataaataaattaaataaatgtaagtttcaaaattctatatccagtatgacgccacttacataaggatttaaagcatgcacacctataaaatattttgattaagggtgtaytatttgtcggaaaaagataagtaaaggcattataataataaacaccaaactcaggttggtagttgtctttcataaggggaaatgcttgctattggacagggcactgggctttaactgttttgggaattatttatattttatcagaataatgagtatgtaagcgtctagtataacttttcattactatgccttttactctgaaataatttataataattatagataattaatgttgagattgatagatactattacccatctatccgaatattgaagattacttgaaattattccttgacaataatttgttttatgc

SEQ ID NO: 334101 - DNA, 476 bp, Homo sapiens
gagtagggataggattcagtgttcttcatttgcagccagtgccagaacatgctatgaattcacacctcaatcaggcccctgaattttcctcccatgttgagcagaactccccttcactagctccaagtgagggaacgtaggtaaggaattagaaggagttactgtgaggcatctgagtcatctgctcctgtagtttatttgtactttttagatttcttaggacaagtctcacaccttagacctgaagagacaaggaaastgtttggttatgggaaatgagagcatattgtaaatcacatatatgagggagctacctgagaggaatcacagcctcccattgaaaaagacacagtcaaaatgcagcaattgagcagtgagggaccctggataatagatatttgacatcacctttgtccactctctactgcctgtctcctaaaatgtcccagtggacaagcccaacagaaagcctgaga

SEQ ID NO: 334102 - DNA, 504 bp, Homo sapiens
gttaaaatggttttttgttactgttgttgtgttggttggcttggttttaatgtaattccattatttctgattttttaaaaaagtctatgtaatacgtttcatcaatatatgggaatgatgttatcagtttgggttgtattgggcagcrtacagcaaaaaacggtttagtgtggcttcatcaaatgaggaatgaggaatgtttttttcctatatcatgggaatatcagagctggtatggctgcttgagcaagtcatgaaggaaggacccttggagcttcccccttcccccttctcattctgtggctctcaacctcacaaatgcaaaacagcagctttatccacaggtaccactcctgcattaggttacctgaaagttgtggtgggtgtgggagtggtggggaggggtgggcagataaaattacacaccagtgaaggctatactcttttatgtaaaacatgaacttattcagagctctatttctcacataactgttcagcaccgaa

SEQ ID NO: 334103 - DNA, 531 bp, Homo sapiens
atgtttgtatgcctgcgtgacatgtctacaaatgtccatagacatcttaaaaaaaaagcctaattagcagttttctgttttattttcattacattcttctacgtaattataagctgtaattacaataatcctaacctcaaaacccaatgtatgttgggtctatttcataataaaatgtgtcacataagaataatatattaatgttatgtataytatattatttttattatatgttacaataaatgcagacgagcctcagaaaaaaccaaccctgttgacaccctggtctcatagttgtagcctccataattgtaagaaagtatatttctgttgtttaaaccacccagcatgtggtactttgttattggagccctaccaaatgaatataccaagccacataacaatggtcaaactggctgggcacggtggttcacacctgtaatcccagcactttgggaggcagaggtgggtggatcgcctgaggtcaggagttcaagactagcctgaccaatatggtgaaaccctgtctct

SEQ ID NO: 334104 - DNA, 508 bp, Homo sapiens
acagagatagcacaaagaaatttgtgtatcctcattcagtttgcttcagtagttactttcactcgtgtccctgagaagagaccaccaaacaggctttgtgtgagcaacaaggctgtttatttcatctgggtgcaggcgggctgagtctgaaaagagagtcagcgaagggagataggggtggggctgtttcataggatttgggtaggtaaaggaaaattagtcaaaggggttgttckgtggcaggcaggggcgggggtcacaaggtgctcagtggggagcttttgagccaggagaaggaatttcacaaggcaatgtcatcaattaaggcaggaacaggccatttttacttcttttgtgattcttcagttacttcaggccgtctggatgtatatgtgcaggtcacaggggatatgatggcttagcttggggtcagaggcctgacagttacagctcacataatcagagcataatgtcaaaatcagcgttttttatgtatatcacagatgta

SEQ ID NO: 334105 - DNA, 560 bp, Homo sapiens
ctatacagtcccgtcacttaccattctagcatgaaaagagttacaggtgacatattatggatagacagggatgggatctcatatgtctttatttataaaaacaggatctggttggattcagtccacagccacagtttgtcaatccctatttarggaattttataattcttttgtttccttattattttggtatagttcaccctaagtgggaatagtttatatgtagtaatgaataccaaatatgattaaaatgcaaaatagaaaatgtagtaaagcagcatataagatatagaaaagtgaggtaactaaaatctcacgatgtacctgaaatttataaaagggatcagtaataccacagagtaattgcaaaatagaatgcatattttctactggaaattagttgtgttatttttgaataatgtctaagtaagaataaaataatgataaatcaatcttacaaatccctgtaactgcttagaaaaaaccctcacaaactaaaatctgttcagtggaagctgaggctgtaatgagggttttttaataccaccataaaaggaagg

SEQ ID NO: 334106 - DNA, 579 bp, Homo sapiens
atttaataatacgtttgtaatattttattagctgcaaatggaaaatactacatacctgtctgtggcttttcatagtatttttttaagtcactaagctaaatgttttcattgacaattatataggatgacaataagagaggattagggttgaactgttgaagaagaatgttccctaagcaaactgtaaagtctcttcagttgaaataaatgtttcaaaataatgtttgyataatgtcagtattaatattaattcaatgatgtattattgtttataggccctgaaaaatgtgggtggtgtggacttttagaagccgatttgagtttcaatttttaaaatttaagcattaagcctaagatctcaagaaatgtgaaatgcacattagctaagaattgtccaattttataaattgattcataaaagtttattatgacttttgtccaaagtccaaaataaataactctaagcttaacattggtaacatttcagctttagttactgtatagttattttcatttaagagtgtatcagtaatttatcactctctaatgcctgactctattacggaacttactactgtt

SEQ ID NO: 334107 - DNA, 579 bp, Homo sapiens
atttaataatacgtttgtaatattttattagctgcaaatggaaaatactacatacctgtctgtggcttttcatagtatttttttaagtcactaagctaaatgttttcattgacaattatataggatgacaataagagaggattagggttgaactgttgaagaagaatgttccctaagcaaactgtaaagtctcttcagttgaaataaatgtttcaaaataatgtttgcataatgtcagtattaatattaattcaatgatgtattattgtttataggccctgaaaaatgtgggtggtgtggacttttagaagccgatttgagtttcaatttttaaaatttaagcattaagcctaagatctcaagaaatgtgaaatgcacattagctaagaattgtccaattttataaattgattcataaaagtttattatgacttttgtccaaagtccaaaataaataactctaagcttaacattggtaacatttcagctttagttactgtayagttattttcatttaagagtgtatcagtaatttatcactctctaatgcctgactctattacggaacttactactgtt

SEQ ID NO: 334108 - DNA, 550 bp, Homo sapiens
tttaaatgtaaggccttaaactacaaaagtcctagaagaaaacctactaaacaccattgtggacatcagccttgggaaaaaatttatgactaagtccttgtaacaaaaacaaaaattgacaagtgggaccaattaaaccaaggagcttctacacagcaaaagaaactatcaacagagtaaacagaaaacccacaaaatggaagaaaatgtccacaaactatgcatccaacagaagtctaatctttatagattctatagtctatagaatctataaagaactgaaacagtccatcaagctaaaacaaataaaccacttaaaaataggcaaaggacatgaacagacacctctcaaaagaagacgtacaagtggccaacaagtacatraaaaaattctcaacaccactaatcattagataaatgcaaatcaaaactgtaatgagataccacctcacaccagtcagaatggctattattaaaaacgacagcaacaaaaaaaaaaacaggtgctggcaaggatggggagaaaagagaatgcttatacattgttggt

SEQ ID NO: 334109 - DNA, 510 bp, Homo sapiens
aaagcaaatgtgctctgccattatgattattaatatttttgtttgtttgttgatattgggtctaacatamaattagaaaatgttgaagaaaataaaatgtgactataaatatagtagcttggaaaacctaacactcctaaactcttcaaattaaatatatacacactcaccacaaagatgcacaaacatacaaacttagatgattccttctgaatgcctaggttacctctatttttcttcccttaagtaagcacatctttcgaatctaataaatgcttgtgatttcaggcaaagaattaataggaaggtatctcaatagaagataagaaatcaggacgtaatactctttttatctccctttccccacctttggatggcatttgtaattttagtttactttaacttcccatgcctgtctatgccacaataatatttgaagacaatgaaaaaataccaggctaactttaatgccccaatctagccactgctaaccagccgtggaattcctat

SEQ ID NO: 334110 - DNA, 510 bp, Homo sapiens
aaagcaaatgtgctctgccattatgattattaatatttttgtttgtttgttgatattgggtctaacatacaattagaaaatgttgaagaaaataaaatgtgactataaatatagtagcttggaaaacctaacactcctaaactcttcaaattaaatatatacacactcaccacaaagatgcacaaacatacaaacttagatgattccttctgaatgcctaggttacctctatttttcttccyttaagtaagcacatctttcgaatctaataaatgcttgtgatttcaggcaaagaattaataggaaggtatctcaatagaagataagaaatcaggacgtaatactctttttatctccctttccccacctttggatggcatttgtaattttagtttactttaacttcccatgcctgtctatgccacaataatatttgaagacaatgaaaaaataccaggctaactttaatgccccaatctagccactgctaaccagccgtggaattcctat

SEQ ID NO: 334111 - DNA, 515 bp, Homo sapiens
gttgggttcatcctccttcacctgctcccagccatatggctacctacatgcttccagtgcaaagaaaaggagtggtgagataaaatgatttactccctctgaataaagctggcttgttgtcagggcgaaggccagagggaatcttccaaaacataaaaatacttatattgggattttgtagtaagtcggatattagccgcccaaaacctatgttcatgtcttggaagcagtgaataygacctttttggaagaagagtctttgtagttcaattaagttaaggatcttgaaaaaagagcatcctgtattactcagattagccttaaatctaaggacaactgtttttaaaagagagacacagagaaggccctgtgaagacaggcgagatcagagttaggaagccacaagccaaaaaaaaaatgcctgaagccaccagagctggaagaggtgaggaagaattctccctagagcccttggaggaagtacagcgctgccaacactttgattgcagacttct

SEQ ID NO: 334112 - DNA, 582 bp, Homo sapiens
tatcactggaactctgcctcccatcatcagatcatcatcagcattcgattatcattggagtgcaaaccctattgtraactgcgcatgtgagggatctagaatgcatactccttatgagactctaactaatgcctgatggtctgagatagaacagtttcatcctgaaaccattcctcccctccccacctccctgtctgtggaaacattgtcttccatgaaacaggttccttgtgccaaaaaggttagggaccattgttacagcctatgtcagaatttccttcctttttaaggcaatattccattatatgtatacgacattttgcttgtccattcatctattgctgggcattatgttgcactcttatgctcagtgatgcatcagtaaatgaattggttacctggagttagaggttgttccaggtacctacataactggaccatatcatggttaaacctaagatcttgaataaattactggaatacatttatcaataaaggaacgaatctcactttccttctggctggtataaggaaagccccattaataatcttatagttatccttttttttccctcagaataa

SEQ ID NO: 334113 - DNA, 582 bp, Homo sapiens
tatcactggaactctgcctcccatcatcagatcatcatcagcattcgattatcattggagtgcaaaccctattgtaaactgcgcatgtgagggatctagaatgcatactccttatgagactctaactaatgcctgatggtctgagrtagaacagtttcatcctgaaaccattcctcccctccccacctccctgtctgtggaaacattgtcttccatgaaacaggttccttgtgccaaaaaggttagggaccattgttacagcctatgtcagaatttccttcctttttaaggcaatattccattatatgtatacgacattttgcttgtccattcatctattgctgggcattatgttgcactcttatgctcagtgatgcatcagtaaatgaattggttacctggagttagaggttgttccaggtacctacataactggaccatatcatggttaaacctaagatcttgaataaattactggaatacatttatcaataaaggaacgaatctcactttccttctggctggtataaggaaagccccattaataatcttatagttatccttttttttccctcagaataa

SEQ ID NO: 334114 - DNA, 612 bp, Homo sapiens
tatggataactagcatttactgagaacacttataaaccagaatggcattgtcaaagtgaggcaaccaaatggaccaagaggagrgtgctatactggctagatgttattgattatgcaactctcattcacagggggaaatgaggcctattgagaagttcttgatgatgaaaacaggaggtgcaagaagggagatgcttattatcaagggtttcagacattgtgcccacaggagctgctgtggttgactgaaaccttttagatctgaactgggtgaatgatgatggctgcctggattcaacacccataaaattttcaattataaatggttaaaaaagaaataactgaatactcccagaagtgttccttacgggagccaggttaaaacctgtgggaaatataggtagaggggcagaggacttctaaaatgggagtgaaacaaaagatctttcagatgaggtgtgaattgaactaatgttaactacatatttattatcctatcagttgtctgagagtcaaaccaatgacttcatcattaagtgatgaagcccttaaaataaactcttggcatatgtggatgtaacatttgtggttccactatatttaaagcattct

SEQ ID NO: 334115 - DNA, 612 bp, Homo sapiens
tatggataactagcatttactgagaacacttataaaccagaatggcattgtcaaagtgaggcaaccaaatggaccaagaggagggtgctatactggctagatgttattgattatgcaactctcattcacagggggaaatgaggcctattgagaakttcttgatgatgaaaacaggaggtgcaagaagggagatgcttattatcaagggtttcagacattgtgcccacaggagctgctgtggttgactgaaaccttttagatctgaactgggtgaatgatgatggctgcctggattcaacacccataaaattttcaattataaatggttaaaaaagaaataactgaatactcccagaagtgttccttacgggagccaggttaaaacctgtgggaaatataggtagaggggcagaggacttctaaaatgggagtgaaacaaaagatctttcagatgaggtgtgaattgaactaatgttaactacatatttattatcctatcagttgtctgagagtcaaaccaatgacttcatcattaagtgatgaagcccttaaaataaactcttggcatatgtggatgtaacatttgtggttccactatatttaaagcattct

SEQ ID NO: 334116 - DNA, 612 bp, Homo sapiens
tatggataactagcatttactgagaacacttataaaccagaatggcattgtcaaagtgaggcaaccaaatggaccaagaggagggtgctatactggctagatgttattgattatgcaactctcattcacagggggaaatgaggcctattgagaagttcttgatgatgaaaacaggaggtgcaagaagrgagatgcttattatcaagggtttcagacattgtgcccacaggagctgctgtggttgactgaaaccttttagatctgaactgggtgaatgatgatggctgcctggattcaacacccataaaattttcaattataaatggttaaaaaagaaataactgaatactcccagaagtgttccttacgggagccaggttaaaacctgtgggaaatataggtagaggggcagaggacttctaaaatgggagtgaaacaaaagatctttcagatgaggtgtgaattgaactaatgttaactacatatttattatcctatcagttgtctgagagtcaaaccaatgacttcatcattaagtgatgaagcccttaaaataaactcttggcatatgtggatgtaacatttgtggttccactatatttaaagcattct

SEQ ID NO: 334117 - DNA, 553 bp, Homo sapiens
ccagccccactacttgctaataatgtgattttgtgcaggctacttaatctctctgtgcctcagttttagaatccattatatgggcatagtaaatcttatcttgcatggttcctgtgtggtataattgaataacaattataaataactaggacaatgtctcccatgctctcccttttcctccctgtcccactggctatctcttgcttgcaccctcaggactggcttaccaagatgctgtcataacgtctttgcagggtcaaaaatactttgtatgtatggaagactaacacagatacgtttagtagggaaaaagaaaggctattttctcacatgacctcacttgtctaaagaaygtaagaaatatcttagagtattaacactgagcattctgcaaaccctaattcttcttaaaatggtgagagaattaaaagccaccaatatttcccttcaagccttctgccaaatctctgatttttcttttgcccaaatacgtgggcctggttatttttgaatgtttacggcaaaaaggatccttagggatggggccaggttt

SEQ ID NO: 334118 - DNA, 507 bp, Homo sapiens
ggaagaaataggggaggtcccagactctttttaacaacagatctcacaggaactaagagtgagaacttactcactaatgggagaatagcaccaagccattcctaagggatctgcccacatgacccaaaaacctcacaccaggccccaccttcaacattggggattatatagcaacatgaratttgaaggagacaaatatctaaactctattaaggggtgagagtaaaagtcccagtcctctaatcctgccttagtttttctggtaactagccccaatcctaaagctatctaagggcccccagtcaatagttgtctcattcacctaaaaaagacactcatcactctagagatttcaagtattatagaaactaaatatctttaaatgaggaggaagaccaaatatatgtacatatgtatatatatatatatatacacacacacacacacacatgctcacacgcacacacacatatatatgtgtgtatatatatattctattataaatca

SEQ ID NO: 334119 - DNA, 597 bp, Homo sapiens
atgtcttcttttgagaagtgtcagctaatgtcatgtgcccattttttaatgtgataatttgtttttttgcttgttgaactgtttaagttccttatagattgactattagatmttttcagatgacaatttgagaatattttcttccatttggtaggttgtctctttactctgttgattgtttcttttgctgtgctgaagctccttggtttaattaggtcccacttgtcaatttttctttttgttgcaattgcttttgagggcttagtcataatttttttggccaaggctgatgtccagaatggtattttctaggctttttttttcttggattcttatagtttgaggtcttacatttaaatctgtaatccatcttgagttaatttttgcatagagtgaaaggtaggggtccagtttcattcttcttcatatggctagccagctatcacaggacaatttactgaatagggagtcctttctgcatcgcttatttttgttgactttatcaaagatcagatggtcatagttgtgtggctttatttctagatactctatcctgttccactggtctatgtgtctgtttttgtaccagtaccttgc

SEQ ID NO: 334120 - DNA, 601 bp, Homo sapiens
tttttttttacactaactcattacacaataaccctgaaagcacaaaagttatttttatctctattctgtaaatgagaaaactgatgtgctagaggatatccacgtggtcataagccaaactaggactaaaatttaagctgttggactccgcactctgtgtcttctcactctattgaaccacctcttgtgaaaattgctcaacttgctaaggactgtgttctctaggtaagcgcctgtraaatgcagttgaggtgatgacaccattccaaaggtgtgaaatctatcttaattttggttaggaaagcaatatatgtatgatttaaaatgaaaagagtttttttccccagaacttcacaaaacgtaattcccacgccctaataaggaaacatggtgtttaaataacccttcaagtgcacctcaaggaaatgatctgtgtcttactggatttcaaagacgcattcatgtctagggaaaagtattaatataaaaaaggaccttgataagtcacttagtctgtttcactggattttggctgggtactgtgttcttaaaagttctaactcaagatgcccagatggtgatgggatatgaggagctaatg

SEQ ID NO: 334121 - DNA, 570 bp, Homo sapiens
tgtgtgtatatatatgtgtgtgtgtgtatacatatatatatatatgtttgtcaggaagagttataatatacattaacaagttcatggcattcatttagtcactttacatacgcttaatgatcatgagaagactactgcattagaacatagactctctggattctaggtctctatgccagcctctctaccacaccccctacctggttcttagaagactggcatgataccatgagttccctttcacttcattagccaaatgaatttacacagcctaatttctactgtacaatattttagtaaaaaattcaacatttcaacattacttaaacattgttttcttaatttggtctaattttrtagcaaaattaggaaacagcgagttagtttcttcttaataacgttagggtgctaaagtaccaatattagctcactctttaagttgaaaagaattatttcccctaattaaatttagttatttatcaatggcacagattttcttaaactatcaagaaatcgcaccatttattgttcacaaggaaacaaatttttatgttctcctttaccaaaaaa

SEQ ID NO: 334122 - DNA, 618 bp, Homo sapiens
cctaactatgagaaaggggaaagtaccaagttctgtatttacagaaagtcattataagataatatgaygcaaattaatgtgtatgtttgaaggatccttgaggtgtcacctttctggctggatacctctgtggctggtggtgtgtttgcccaagttttgtttgggcctgctgggcttgttctgcccacttggcctggcaggctgcattcggctcatgctaccagtctggatcccatgcctgccaagggtgagccaggcagggagcagtgaggggtagtgtgagtgagtgagcatggtgtttgaccactgttcacagtcaggcacactggcagctgcagcagggcatgcagctctaggtgccagcatgggtgccagctctctgtgaggctgtggctagaccaggtacaccacaagcagcttccacagctgccaccagggaatgtggtgacgcccagaagcttggagactccaggaactgcagggtccaaaagagagagtcacaaccctggctcagggagctcccaggtctagctcaccaaagggccacagctcttctctcctcttcacctgcttgtgtcacagctctttcagccctgccattctataggtcctgagttc

SEQ ID NO: 334123 - DNA, 618 bp, Homo sapiens
cctaactatgagaaaggggaaagtaccaagttctgtatttacagaaagtcattataagataatatgatgcaaattaatgtgtatgtttgaaggatccttgaggtgtcacctttctggctggatacctctgtggctggtggtgtgtttgcccaagttttgtttgggcctgctgggcttgttctgcccacttggcctggcaggctgcattcggctcatgctaccagtctggatcccatgcctgccaagggtgagccaggcagggagcagtgaggggtagtgtgagtgagtgagcatggtgtttgaccactgttcacagtcaggcacactggcagctgcagcagggcatgcagctctaggtgccagcatgggtgccagctctctgtgaggctgtggctagaccaggtacaccacaagcagcttccacagctgccaccagggaatgtggtgaygcccagaagcttggagactccaggaactgcagggtccaaaagagagagtcacaaccctggctcagggagctcccaggtctagctcaccaaagggccacagctcttctctcctcttcacctgcttgtgtcacagctctttcagccctgccattctataggtcctgagttc

SEQ ID NO: 334124 - DNA, 532 bp, Homo sapiens
tcaaggttacagacgaaaagtctaaaggtaactccagggcccacttcatgagtgtgaaacccatgcagtcacacagggccccgtgattgctttaatgacctgctgtcgccatcttgaaattaacaatatttcttcaacacggggcccacatctttattttccacttatccttgcaaattatgtgacagtcctgggtaactgatttactttttttaagtatcagaggtagtctctgcattcaaaaattaagaaaaaataagcttatattatgatgagaaatactttgattggaaataagawaggcctggcacatcagtgaaatagttccttacatatggatattcaaacagatgcacaaaaatgaattaataaaagaaacagactagggggatgagtaatgacaatttcaaaatgattattaaaaaatgactattgggtagttttgtggaaagacaggcaatcaggccaaacaacatggcatatccttcttacccggataattctatgaaacaattcaacaacttatcattaa

SEQ ID NO: 334125 - DNA, 608 bp, Homo sapiens
gcatgctggttaagagtcatcaccactccctaatctcaagtacccagggacacaaacactgcggaaggctgcagggtcctctgcctaggaaaaccagagaactttgttcacatgtttatctgctgaccttctctccactattgtcctatgaccctgccaaatccctctctccgagaaacacccaagaataatcaataaatactaaaaaaaaaaaaaaaaaaaaaagaaaaaataagaatttgagcagttttaaaacttagaaatactccaaatattaatttaaagaatcctttaaaatgcaattaagtatttaagctaaatggatatgtaaaaagaaaaatttagtggtatcttcaggaaaaagaaaggatcaactttgtgaaaagtaactagcaattaaaattttaaaacagacttatttaacacacttcgaaaatgcgattaaatccatcagttgaacctgattacttctgttcctaaggcagtttayaataatatactaataatcacagtaagtgctaaatagtgagctaagcacttaaaatgcattctttcatttaattaattaatatattatgtaaagaatgcagagaggcctggagtggaac

SEQ ID NO: 334126 - DNA, 570 bp, Homo sapiens
tgagtgaactcattttcgacaaaagtgtcaagaacatacactgtgaaaaagtctcttcgataaatggtgcttggaaaaatggatatccatatgcagaagaaggaaacgatcctcctatctctcactatgtacaaaaatcaaataaaaatggattaaagacttaaatcaaagacctcaaactatgaaactactacaagaaaacattggggaaactctcctggacattggtcttgacaataatttcttgagcaatacccccaaaacacaggcaaccaaaacaaaaatggacaaacgggattgcatcaagttaaaaagcttctgcacagcacaggatgtaatcaacaaagtgaagagacaacccaaagaatggaaaaaatatttgcaaactacccatctgacaaggaattaataaccagaatacataaggagctcaaacaactacaggaaaaaatctaataatcccattaaaaaaatgggcaaaagagagacaktcagagaatgtcagaattagacatttctctaaaaaaacatgcaaatgggaaacaggcatatgaaaatgttctcaacatc

SEQ ID NO: 334127 - DNA, 568 bp, Homo sapiens
gtaggagtaagtccttgcttatcaataataacattgaatgtaaatggactaaactctctaagaaatatagactggctgaatggataaaaaaagcaagatccattaatctgttgcctacaagaaacagtggacttaatctgcactgtagaccaaatggatctaacactcatttatagaacatttcattccaaagctgcagaagactcattcttttcctcagcacatgtattattcgcaagaatagatcatatattggatcacaaaacaagtcttaaaacattcaaaaaacacttgaaataatatcaagcatcttctctgagcacaatagaataaaactagaaattaataagaggaatttggggaactatacaaatacatgaaaattaaacaatctggtcctgaatcatcagtgggtcagtgaagaaattaagaaggaaatgaaaaaaatttcttgaaacaaatgataagggaaacagcataccaaaacctayggaatacagaaaaagcagtaccaagggggaactttatagctataagtgcctagataagaaaaggagaggccaggcgt

SEQ ID NO: 334128 - DNA, 579 bp, Homo sapiens
tatgacagaaaatcttttgccttacattgacctagttaatcttcatcataacagtttgaggaatgttactaattatcccctttttacacatgaggaaattaaggcacaaagaaggtaagcaacttgtccagagttacacagcttaaaactatgaagccaagcttcaacttctggaagtcatccttttaaccaataagccattcttgacagaggacaccattttgttcatctttgtattcctacaccttacccagtgcctagaacttattaggcacttayagaacatttataaaacagagcgcttattaagctttagaatgtacctccctttatttcttttcttacctctgcagccagattcacaccttggccttccttatctgggaaagagctcctcattaatttcagcattcaatcttcaattgatactcagtttcaagtacagttttgaccttctcatttaattcccttgctcaaaaattgaccatggaccccattacctctgaactcttgtgtctggcattgaaggctctcttttctttgtcctagcctatgttagttcttgtctcccagaagcca

SEQ ID NO: 334129 - DNA, 579 bp, Homo sapiens
tatgacagaaaatcttttgccttacattgacctagttaatcttcatcataacagtttgaggaatgttactaattatcccctttttacacatgaggaaattaaggcacaaagaaggtaagcaacttgtccagagttacacagcttaaaactatgaagccaagcttcaacttctggaagtcatccttttaaccaataagccattcttgacagaggacaccattttgttcatctttgtattcctacaccttacccagtgcctagaacttattaggcacttatagaacatttataaaacagagcgcttattaagctttagaatgtacctccctttatttcttttcttacctctgcagccagattcacaccttggccttccttatctgggaaagagctcctcattaatttcagcattcaatcttcaaytgatactcagtttcaagtacagttttgaccttctcatttaattcccttgctcaaaaattgaccatggaccccattacctctgaactcttgtgtctggcattgaaggctctcttttctttgtcctagcctatgttagttcttgtctcccagaagcca

SEQ ID NO: 334130 - DNA, 429 bp, Homo sapiens
aagtgtggaggagccaaatccattttataatagctcacaaaaaatacttgaatttaatttaactttgcagggcaaagttaccctttacaacaatagctaattttatcttacaatttattgtattctaaaagaggtttaacattattttgtctggaatggaaggcagtcagccttactttaaggaatcttctatttcttttaaaaatgatggatgctaaaatgcttccatagcagaactagagaaaaataaaagactggccaaactaatttcctcttattctatttagttggtttatttggccctgcattagtagaaatacataaataattttaagaaatgayatatggaatattttgagagtataaatgtgcatacgggatacaagggcatcagagggattttgttttgaaatatgcacttttaatgta

SEQ ID NO: 334131 - DNA, 396 bp, Homo sapiens
tacaaacagaataaaatggcagcgtagtgtgagtaggccaagaaaggttctgtaatggcaggtctcaaagttccttggctgttgtgcagtggctcttgtgtccaggtattccttcatgatcccagcaggatatgtgaaaggtggttgtttatagagttaagagtgagaagccattctggtcactgtgagatgatccccacagcagatgctgcagagcagacagactaagccagggttcacagagtagatgtggttgagacatgaggacctgaaatgctgttgaaaaatgagaagaaaacaaatgagaaagggagagctataagctctgacagctctgaaagaayactggtttagttaatgatagactggaacagcagataaagaaacccagtaact

SEQ ID NO: 334132 - DNA, 543 bp, Homo sapiens
aagtttggcttctacatatccacttaatatgacattatcctgcaatattatacttcatttattcatgcattcatttattcattctggacagtcaccaagatatttattgccaatacacagagcctrtacacagtgctttgctacacatgggttcaaacacataactaaacactgtagacaaatgctacattccagaaattaaaggaaggtcatatatatagaacttagagagtgagggggctctagttgggagatgaggcaggaccagaccacactgagcctcaaagttcatattaaaggttttggtattaatcctagaatagtgaaaaaaaaagagaggagaagataagtaattaaattttcatttaagttgcaactcacttgtttctaaaggggatagtggtatggtgaaaacctggaaggatgcgaggacaatagttaggatgctgttaaagtaaatatttggtcagaaacagcaatacattgaactagggtatcagtagcagagctggagaaacgtaaatagatttaagcaatatttat

SEQ ID NO: 334133 - DNA, 543 bp, Homo sapiens
aagtttggcttctacatatccacttaatatgacattatcctgcaatattatacttcatttattcatgcattcatttattcattctggacagtcaccaagatatttattgccaatacacagagcctgtacacagtgctttgctacacatgggttcaaacacataactaaacactgtagacaaatgctacattccagaaattaaaggaaggtcatatatatagaacttagagagtgagggggctctagttgggagatgaggcaggaccagaccacactgagcctcaaagktcatattaaaggttttggtattaatcctagaatagtgaaaaaaaaagagaggagaagataagtaattaaattttcatttaagttgcaactcacttgtttctaaaggggatagtggtatggtgaaaacctggaaggatgcgaggacaatagttaggatgctgttaaagtaaatatttggtcagaaacagcaatacattgaactagggtatcagtagcagagctggagaaacgtaaatagatttaagcaatatttat

SEQ ID NO: 334134 - DNA, 571 bp, Homo sapiens
agggaagagcatgaggagatggcattcccatgagacatcttcaagaaataatgtttattattttctttggttttatccccagtctgatgtagcccagggaaatggctatcacattttaatttaatatgtgtgcttgcctctgctataaaactatacatttttataggtaaattatcttattcatcttcatattcccaatgtctagctgacacgrtacttggtatatacaggacactcagtaaacgacaatgggattaatgaatctagtgatatagtaccactatctagggttttccatatctggatttaaaatctgtaaaattttctatttgtaaaaatagaagtacttaccaaaaacatacttctataaatatttgtgctttaagaggtagcaactcagaagcaagttataattcaagattgacccagaagatctctgggaataaaaagaataaaattcaagtctatgcttattcattaggaaaaaacctccagctcaatgaattttctgttgcattttaaaaaattggccctgtgattacaccctagagaagaataaacagaaattatg

SEQ ID NO: 334135 - DNA, 571 bp, Homo sapiens
agggaagagcatgaggagatggcattcccatgagacatcttcaagaaataatgtttattattttctttggttttatccccagtctgatgtagcccagggaaatggctatcacattttaatttaatatgtgtgcttgcctctgctataaaactatacatttttataggtaaattatcttattcatcttcatattcccaatgtctagctgacacggtacttggtatatacaggacactcagtaaacgacaatgggattaatgaatctagtgatatagtaccactatctagggttttccatatctggatttaaaatctgtaaaattttctatttgtaaaaatagaagtacttaccaaaaacatacttctataaatatttgtgctttaagaggtagcaactcagaagcaagttataattcaagattgayccagaagatctctgggaataaaaagaataaaattcaagtctatgcttattcattaggaaaaaacctccagctcaatgaattttctgttgcattttaaaaaattggccctgtgattacaccctagagaagaataaacagaaattatg

SEQ ID NO: 334136 - DNA, 479 bp, Homo sapiens
aatacgagtcacttgtgattattcctctataggtttgaaagatgtatcaggccaacttactggatacagttttaatttaaaactctatacatcatacccccaactcacagacttcatgtatccattgaatactcttctgtttccacagtcttaatgtggccctaacaaagtcatccttttagaggactcaaaagaggccccccctacaacttctataatgtaatatttacagtagttaacatttattgatcactcastgtgtgccagacatttttcaggtagggattcatttaatcctcaaaactcatttgaggtaggtactattataatgacaaggccaaggaacagagattaagcaatttgcccaaatttacattattcacagagctgggatttaagcctagtctggctgtggaatctgtattcttaatgaccatgctatactgcttaagattaaccttgagaatttattccagtta

SEQ ID NO: 334137 - DNA, 520 bp, Homo sapiens
acgtgcctgtagccccagctactcaggaggctgaggtgggaggatcacctgagcccagggaggtcgagtcagtagtgaactgtgatcgcaccactgtactcccgcctgggtgacagagtgagatcctgtctcaaaaaaaataaaaagaacaaaagaacctgtaagctactcaactggmatactggggttttgaaaagttagcttccattctctctctctttttttttaattgttctttcttttttcttttttttttcttttttttagctcatgaaagaagttccaggagatgactataagaacaaactcatcttcgcaatatctgtgactgtaatactaataattttgattataattttttgtcttatagaggtaaggacaataattaattcaggttttcagaatacaatcctgtgtttgtgtggattcagaatccacaaactgaaaaccaacgtcactttcccacttgacattcttcttctgtcatttaaggctgaggtgtgctttgttcttttactgc

SEQ ID NO: 334138 - DNA, 520 bp, Homo sapiens
acgtgcctgtagccccagctactcaggaggctgaggtgggaggatcacctgagcccagggaggtcgagtcagtagtgaactgtgatcgcaccactgtactcccgcctgggtgacagagtgagatcctgtctcaaaaaaaataaaaagaacaaaagaacctgtaagctactcaactggcatactggggttttgaaaagttagcttccattctctctctctttttttttaattgttctttcttttttcttttttttttcttttttttagctcatgaaagaagttccaggakatgactataagaacaaactcatcttcgcaatatctgtgactgtaatactaataattttgattataattttttgtcttatagaggtaaggacaataattaattcaggttttcagaatacaatcctgtgtttgtgtggattcagaatccacaaactgaaaaccaacgtcactttcccacttgacattcttcttctgtcatttaaggctgaggtgtgctttgttcttttactgc

SEQ ID NO: 334139 - DNA, 520 bp, Homo sapiens
acgtgcctgtagccccagctactcaggaggctgaggtgggaggatcacctgagcccagggaggtcgagtcagtagtgaactgtgatcgcaccactgtactcccgcctgggtgacagagtgagatcctgtctcaaaaaaaataaaaagaacaaaagaacctgtaagctactcaactggcatactggggttttgaaaagttagcttccattctctctctctttttttttaattgttctttcttttttcttttttttttcttttttttagctcatgaaagaagttccaggagatgactataagaacaaactcatcttcgcaatatctgtgactgtaatactaataattttgattataattttttgtyttatagaggtaaggacaataattaattcaggttttcagaatacaatcctgtgtttgtgtggattcagaatccacaaactgaaaaccaacgtcactttcccacttgacattcttcttctgtcatttaaggctgaggtgtgctttgttcttttactgc

SEQ ID NO: 334140 - DNA, 611 bp, Homo sapiens
tacataacttcctatctacatgtagcttacaacacaagacatttatgtcatttcctcatgtatgaaaaggtatgtagttatatgctatagaagtacaaaagggagaataattatattcttctctctggtcttcccccaccactttttagcccatgactctcctttattttacctaattgtacttataacacctgacatgttatatatctactttttttggttattgaacaatggctatctccaactcttagcatgtaaattctatgtgagccttgttcactgcatgtccccagcccttagaatactacttggcatgaagacggccctccattaatatctgctgaaagaagcccttccagaagaagtgacatttgagttaggcttcgaccaayactaaggatttcagtaagtgagaaatgggataaagaatattctagaatattctagaaagaggaattgacactagcagaaacatgaaggcttctaagcagggtataactgaggtaacaaagtggctctaagatggaaaatgaaaaaatatggtggaatttaactatttttaaattaattttatgaaagaaaataatttttgccccaacagtattatactt

SEQ ID NO: 334141 - DNA, 611 bp, Homo sapiens
tacataacttcctatctacatgtagcttacaacacaagacatttatgtcatttcctcatgtatgaaaaggtatgtagttatatgctatagaagtacaaaagggagaataattatattcttctctctggtcttcccccaccactttttagcccatgactctcctttattttacctaattgtacttataacacctgacatgttatatatctactttttttggttattgaacaatggctatctccaactcttagcatgtaaattctatgtgagccttgttcactgcatgtccccagcccttagaatactacttggcatgaagacggccctccattaatatctgctgaaagaagcccttccagaagaagtgacatttgagttaggcttcgaccaacacwaaggatttcagtaagtgagaaatgggataaagaatattctagaatattctagaaagaggaattgacactagcagaaacatgaaggcttctaagcagggtataactgaggtaacaaagtggctctaagatggaaaatgaaaaaatatggtggaatttaactatttttaaattaattttatgaaagaaaataatttttgccccaacagtattatactt

SEQ ID NO: 334142 - DNA, 630 bp, Homo sapiens
caacaatgtgaactgcttgacctattcagtcagaaataatagaaaatgtattaaaagcactaccttttcatgctcttaacataatgctttgaatttccagtgcatcccagtggattactgtgaattkttttgtaggcacaaaattttctgtttgttttccctcctactgtatgctataatctttgaaagtgtatttatccaaagatgaaggcacttgtttctcccccagccttctctggaggagcacttaacagcatgtaggaaagcctatgtttaaagtctggttgaccccctagtcgatttcccacccccgtgattgctctcttttaattttcatcacagttcccacctcattctccaccccactgactctctaggctatcttcctgttacctgtgttagaatactcccactcctcttgccacccctgtgttcaagagtcataaccctttggagtgctgtgtctctgtgaaagaagacagagactggtcagactcaaggccttcaggagattttatgaatgtgatggtgcccatagctccataggaactatgattatcatcatcagcccagctagcaaaacagacctgctcatcacggtttatacatgaaagggaaaaaccatttttc

SEQ ID NO: 334143 - DNA, 619 bp, Homo sapiens
tgcacaaccagctctctatccatggctttatgtcagttaattctgaaattgctgggaagagagggatgaatcaattcactttccacagaaggtcaccgattttaattttctttattatctgaactatggcttgctggagagatctttctggcacaccrgggacctctttcatccaattatctttctgaccactcagctctccagcctgtactcctctctgtggcacatggctctgttatagtctaaacatacaaaggaactggactctcatgatgggattctgggacctttaacacttaagcagtaaagacatatttgaacagaggagtcttcccaggctcttcagcttactccatgtggccaattgttccctacacctatgcctaagttgcaccctgaccagatgaggccatctgattgaatgaatcataactttgggagctactttgtcgagtagcctcacggaaacatttccaaatgtagttttttctcaggttacttagaggctctcgcctggagccacagacttttagagctacatgtgatacagcatgtagggcaatttgcaaatagactattacagagtgagacagagaggcctttggtgcactcttcttta

SEQ ID NO: 334144 - DNA, 619 bp, Homo sapiens
tgcacaaccagctctctatccatggctttatgtcagttaattctgaaattgctgggaagagagggatgaatcaattcactttccacagaaggtcaccgattttaattttctttattatctgaactatggcttgctggagagatctttctggcacaccagggacctctttcatccaattatctttctgaccactcagctctccagcctgtactcctctctgtggcacatggctctgttatagtctaaacatacaaaggaactggaytctcatgatgggattctgggacctttaacacttaagcagtaaagacatatttgaacagaggagtcttcccaggctcttcagcttactccatgtggccaattgttccctacacctatgcctaagttgcaccctgaccagatgaggccatctgattgaatgaatcataactttgggagctactttgtcgagtagcctcacggaaacatttccaaatgtagttttttctcaggttacttagaggctctcgcctggagccacagacttttagagctacatgtgatacagcatgtagggcaatttgcaaatagactattacagagtgagacagagaggcctttggtgcactcttcttta

SEQ ID NO: 334145 - DNA, 609 bp, Homo sapiens
gggtcatctaggtttttaatatcttaagtgttacaaatttcaaattacctttcaatggtgaaatatgttttgttttctttcccttgtaaaaatccaagattgatcatgcatgtgcatgaataatctagataatgactttccatttattagaataacttacaaactctgcctcatatattctcctctgctgtcaattacatgcctcaagaatggacctcaaggtcagttttacagacaggtttgcatctgccgatttgttccctggtacccagttctgaaagtgaatttaaaggaccagctaaccaccacgtggggcatgcttcatggagagaatgtaagatttcaattaactagctgcgatttctcgtcccagttttaccacctttctgactgtaatctcaaagcaaatcacttaactctcctgagcatcagttttctcatctgtaacctaggagatgtaatgatacatttagtaataactatttaaatagaattcttgtgagattttgatgacatcctatatgcgaaagtgctaacgcaatgattattttagatttccccttagcattgattactggttagaagatrttaacattttgttttatttat

SEQ ID NO: 334146 - DNA, 506 bp, Homo sapiens
tatatattggggtttcccagctttgctacctttatactgagaaactgagcttccacttagctgaacctaatcactgctagagatttttctttctataaaattctctaaatgcttatttggtctcttgtgccaaatttctgaattaaaaagcgtagtaacttcacttataacgtctatgatttctgagcaaattattcttgtctttctaactcattcaatgcagatttgtccatctgagaaggtcatgagaaatgygtaccttctttagaagtcaccttagatatagtggtttctgtgacaaagtctcagagagacaaagtatattgcccagtggttaccagcactgtcaacaggtggacatgtttatttgtacagtaattttctttatatatactttttttccccgaaagaaagcattctgttagcacaccagatctaaatgtggatactctgtatgtgtctcattatggttttgtggacaaaggaactaaaaacaatggtagttt

SEQ ID NO: 334147 - DNA, 619 bp, Homo sapiens
aatttttttatagcacactgaacatggagtcccatttactgaatacataatcgtgatgttcaagtttaaccaatttgaaaattttcagcaatgcattatgtaggaaaattgagaacttcgtatgttttgcttaattctccaaattcttcaaagtagacrtagatttcaccgttacagagaagtcatatgcttaggaagtggcaaagctgcattattagtttgttaggactcctataacaaagcaccacagagtcagtggcttaaacaacaatttactttttcataattatggaaggtagaagttcaagatcaaagtgtcattaagtttggcttcttttaaggcctctccccttggcttgcaaatggttgccttctccctgtgtcttcagatggtctttcctctgtgtgcccacatatctcttataatctccttcaatagggataccaccatattggattagggcccacctataggagcccatgttaccttaattacctctttaaaggttctatttctaaatccagtcacattctggggtcctaggggttaggattcaacttctaaaatttaggagagagggacacaatttagcccataatattatgacatgattcaaag

SEQ ID NO: 334148 - DNA, 619 bp, Homo sapiens
aatttttttatagcacactgaacatggagtcccatttactgaatacataatcgtgatgttcaagtttaaccaatttgaaaattttcagcaatgcattatgtaggaaaattgagaacttcgtatgttttgcttaattctccaaattcttcaaagtagacgtagatttcaccgttacagagaagtcatatgcttaggaagtggcaaagctgcattattagtttgttaggactcctataacaaagcaccacagagtcagtggcttaaacaacaatttactttttcataattatggaaggtagaagttcaagatcaaagtgtcattaagtttggcttcttttaaggcctctccccttggcttgcaaatggttgccttctccctgtgtcttcagatggtctttcctctgtgtgcccacatatctcttataatctccttcaatagggataccaccatattggattagggcccacctataggagcccatgttaccttaattacctcttyaaaggttctatttctaaatccagtcacattctggggtcctaggggttaggattcaacttctaaaatttaggagagagggacacaatttagcccataatattatgacatgattcaaag

SEQ ID NO: 334149 - DNA, 619 bp, Homo sapiens
aatttttttatagcacactgaacatggagtcccatttactgaatacataatcgtgatgttcaagtttaaccaatttgaaaattttcagcaatgcattatgtaggaaaattgagaacttcgtatgttttgcttaattctccaaattcttcaaagtagacgtagatttcaccgttacagagaagtcatatgcttaggaagtggcaaagctgcattattagtttgttaggactcctataacaaagcaccacagagtcagtggcttaaacaacaatttactttttcataattatggaaggtagaagttcaagatcaaagtgtcattaagtttggcttcttttaaggcctctccccttggcttgcaaatggttgccttctccctgtgtcttcagatggtctttcctctgtgtgcccacatatctcttataatctccttcaatagggataccaccatattggattagggcccacctataggagcccatgttaccttaattacctctttaaaggttctatttytaaatccagtcacattctggggtcctaggggttaggattcaacttctaaaatttaggagagagggacacaatttagcccataatattatgacatgattcaaag

SEQ ID NO: 334150 - DNA, 619 bp, Homo sapiens
aatttttttatagcacactgaacatggagtcccatttactgaatacataatcgtgatgttcaagtttaaccaatttgaaaattttcagcaatgcattatgtaggaaaattgagaacttcgtatgttttgcttaattctccaaattcttcaaagtagacgtagatttcaccgttacagagaagtcatatgcttaggaagtggcaaagctgcattattagtttgttaggactcctataacaaagcaccacagagtcagtggcttaaacaacaatttactttttcataattatggaaggtagaagttcaagatcaaagtgtcattaagtttggcttcttttaaggcctctccccttggcttgcaaatggttgccttctccctgtgtcttcagatggtctttcctctgtgtgcccacatatctcttataatctccttcaatagggataccaccatattggattagggcccacctataggagcccatgttaccttaattacctctttaaaggttctatttctaaatscagtcacattctggggtcctaggggttaggattcaacttctaaaatttaggagagagggacacaatttagcccataatattatgacatgattcaaag

SEQ ID NO: 334151 - DNA, 527 bp, Homo sapiens
tcaaaggtctcaaggcccctttaagaagcctgtcaccaccaccagcagcttccgttatctggttcttctgtacatgtaagcctttcccatacaccccggatgtttagggcttccgccctctctccctggccgggagtgtgggaagagggctttatttcaatgcttgagagtagggtcaatggccagggtaagctgtgggggctcctccccgccggcccctctctgcagccctcaccttaacacagagyatcgataccacctgggctttgggaagacctggaggctgaccaccctggaggctcccagcgtcccacagccactctttggggaagaggcttcctgagggacttgtggcccttggctgggactctagtcccagagttctgccttccggcgccgagctttgatttgtttattgagtgccagcccggttcccggacaggtagggacctgttcccggagctcagcagagccttgggaagctttcccaggagggctcccgagggtggcggccatgcccagtccgc

SEQ ID NO: 334152 - DNA, 633 bp, Homo sapiens
ccagtctctcaactcttgtcagtccaggtgggtgctgcatggattgggggcacctggcacagttggccccttcacccctttcccccacctttccagcccctctggctataatcagacagttgtgtgcgatgtctttctccctcctgaaggggtcatttagtcaggctcctactcatggcccaggaatgtgcccctccctgcctgtcccccacccccaagcaggccgtgcctccagccccctgctstctctgaagggcctgggcatggggcagcctctgcagcatccccagggcccgagctgatctgcacagcagaagggaattgggggaaagctttttttctacccagcacctggcagggggccaccctgttgcaccccagagacccttgtctaagttttgttatttcagatgatttcataagttgggggaggcggagccccagcccccacagcccctgttgttgcctcactgctgagctctgctgtgtatctgctgacaggcctgctgatagcagaaggggctggagagagggaagctctgggccctgccctccccaacccctgcttaggggacatccctgataagaggaaattccagcctgtgacagatggccagtgtccacccacccacg

SEQ ID NO: 334153 - DNA, 633 bp, Homo sapiens
ccagtctctcaactcttgtcagtccaggtgggtgctgcatggattgggggcacctggcacagttggccccttcacccctttcccccacctttccagcccctctggctataatcagacagttgtgtgcgatgtctttctccctcctgaaggggtcatttagtcaggctcctactcatggcccaggaatgtgcccctccctgcctgtcccccacccccaagcaggccgtgcctccagccccctgctctctctgaagggcctgggcatggggcagcctctgcagcatccccagggcccgagctgatctgcacagcagaagggaattgggggaaagctttttttctacccagcacctggcagggggccaccctgttgcaccccagagacccttgtctaagttttgttatttcagatgatttcataagttgggggaggcggagccccagcccccacagcccctgttgttgcctcactgctgagctctgctgtgtatctgctgacaggyctgctgatagcagaaggggctggagagagggaagctctgggccctgccctccccaacccctgcttaggggacatccctgataagaggaaattccagcctgtgacagatggccagtgtccacccacccacg

SEQ ID NO: 334154 - DNA, 546 bp, Homo sapiens
caggtggctgtgttccagccctggctgcaggtctgaatggctttctggggtggctggccatgctccctgagagcccagctgtggcgatgtctgagcaggtaggtgggggagcacctaggaagcaggggtgtcaggcagagcacaaggagagagggtgtccaggtcagtttcaggacctggctgagaggagggggctcctcacgggcaccgcctctggcaagcacagggacaagggcaaggwcggcatggccagaggtccctgggagcctcttcccctctcttcttcctagcagctccccctcactcttcccagggaccctgtcactttcctttagcgtgtggcagctccttggcgtccctcccgtgccttcaggttgcttctgcgccgggcctgccgctgggcgcccctatctctgcctgccccctcctcctgctcccctcgccctgcccccttggagcaattccccaccgagcctcccttcccaggcagtcgaggtccctccctacctctgccccgcgctctgggaggctccttgttccgcgacc

SEQ ID NO: 334155 - DNA, 451 bp, Homo sapiens
taaaattaagaagacttgattgtcagtaatcttgctgccttacactttaatgtggaaaaaacaaaatgagtctcctcttggatgaattgatcagtaaacagaagagatttaagctttcagtacatggttagactgaaaatactcctgacaactttgaagttattttattccacatattgaatgcctactgtgtgttaggactgggagcatactaaagaagtaaaagatttagttcttaaccacaaaaacataaatttagctgaaaagacaagaacagggaaagtcaragaccaatacaactacttaaattaagttttcacttctggggtatagagaatatgttgaaataggttagaaaaggaggtgaatattatgggctgttgtcatttgtaaattctgcagtaacttcagcgttgagggttttttttgtttttgtttttgttttgagttt

SEQ ID NO: 334156 - DNA, 572 bp, Homo sapiens
aatccctaagaccccttctaggtttgacattctttgagttgcattccaaaaccctggactcccccaggtaagcaaggccagggcttgccccatcctccccacacaagctcaggcagcacccactcctgggctgggttcccgaggaagagcctgcrgagaggagaccccggagctgcctgcactggtcagtgcatgggggcaggggtggcagaccactttgtggattgatggagctcaggaaggtgagaagggacccacaggtgagagtttcgctcccctggtcatctctttaggtaaataaatccacatccgccacttccccttcccttcccaccctgggggcgctgagaactccagggagcccagagctgaggcctgagctctgcttgctcacactgggtcttccctcagagacccccaagccctcctatcttctgcagtcaccgtcatccacttttctgtagggagggaacagcatggagctctctgttcaccggtctccaggacctcggattccacctttaatcctgaaaacccaggaaggcttctgtatccctacaatgaagcaggtt

SEQ ID NO: 334157 - DNA, 532 bp, Homo sapiens
agaggggcggagggcctgaacctgggccaggaggcggggctgggataggcaggaccccaccccctggaagggaggccagcgtggggcaggctgggcaggtcccccaccccaaatgctccagggtggggcgaggggcaggtcttgcagaggctaggcagaggctgctctatggggagstgcaattggaaatgagcaacggtgcacagtaagtgttaaccccgcgcaggttaaatgtccagctctgagagctgctccctcactccccctgcctcaaaggtgatatttcccaccccctccctaggagagagtagcccctaacagatgctaatctgggtctagctctgtccagatggctgaggttgggcctgggataaaggtggaattagggatttggggcaggggctgagaaaagctgtcccagcacaggcagcggcatccaggtggagacaaaaccagcaaaaaaggtacattctcatgctagagctgaggctgttgccaggagccaggaaacctagcccgggtcgcaccttgc

SEQ ID NO: 334158 - DNA, 532 bp, Homo sapiens
agaggggcggagggcctgaacctgggccaggaggcggggctgggataggcaggaccccaccccctggaagggaggccagcgtggggcaggctgggcaggtcccccaccccaaatgctccagggtggggcgaggggcaggtcttgcagaggctaggcagaggctgctctatggggaggtgcaattggaaatgagcaacggtgcacagtaagtgttaaccccgcgcaggttaaatgtccagctctgagagctgctccctcactccccctgcctcaaaggtgatatttcccaccccctccctaggagagagtagcccctaacagatgctaatctgggtctagctctgtccagatggctgaggttgggcctgggataaaggtggaattagggatttggggcaggggctgagaaaagctgtcccagcacaggcagcggcatccaggtggagacaaaaccagcaaaaaaggtacattctcatgctagagctgaggctgttgccagsagccaggaaacctagcccgggtcgcaccttgc

SEQ ID NO: 334159 - DNA, 589 bp, Homo sapiens
ctacactacaatcacaaggatgtgagtgttaccaatttatttttttaaaataccattctcactttaaaaaaaaaatgtcctaatcatcgttttcatgatcattttaacttcaatatttgtttacttggaattctcattcactaatataattaaaayatgatggatagtttattgcagtcaaagaatcttagaactggaagtgtcttttaaaaatcatgtaacaaaatgcatttactttacctacctatgagaaactgaagttcctggaagttaactcacccacagtcatacgttaagaccggtatctaacgatccagtatcaaccgaactcttctctgcctaagttttacatagttccttgtgttttaaccgaatttggtgaagcagtagtacccaaagttcagcccaaatctgttgtcctatcatgcatgacactttttaagtttgacatccaggaatgaaccactgataggagacagaattgcaggagagcaaggggagaaaacagctgtctacagaggagccgtggggaactggagagagcctgcccaggaaagcactccctctgtgaccctttgcagacccagtg

SEQ ID NO: 334160 - DNA, 589 bp, Homo sapiens
ctacactacaatcacaaggatgtgagtgttaccaatttatttttttaaaataccattctcactttaaaaaaaaaatgtcctaatcatcgttttcatgatcattttaacttcaatatttgtttacttggaattctcattcactaatataattaaaacatgatggatagtttattgcagtcaaagaatcttagaactggaagtgtcttttaaaaatcatgtaacaaaatgcatttactttacctacctatgagaaactgaagttcctggaagttaactcacccacagtcatacgttaagaccggtatctaacgatccagtatcaaccgaactcttctctgcctaagttttacatagttccttgtgttttaaccgaatttggtgaagcagtagtacccaaagttcagcccaaatctgttgtcctatcatgcatgacactttttaagtttgacatccaggaatgaaccactgataggagacaraattgcaggagagcaaggggagaaaacagctgtctacagaggagccgtggggaactggagagagcctgcccaggaaagcactccctctgtgaccctttgcagacccagtg

SEQ ID NO: 334161 - DNA, 511 bp, Homo sapiens
cctagaattccttgaaacagrgtttgggtaatggaggtatccatatattttgttaagttttatgctttaaatttatagaatctgagaaataaatacctttagtagcaaatgatttgctgactggtcaattttaccatgaaccttgttggtatatagaaatatgttagagaaaaactctattaaactgcatattttccctcagagatagattcagtgaaccccactgaatacagagtttttatcatctgtgctagaccccatatgaggaacaagcctgactgaaatatgaattctcccgtcaaagacattctaagtctcttaagaagggttagacaggaataaatataacataaaggaatactcatctccaaaaggcagttaggtaaagcccattgggagttttgagttaggagagagtcctcgcagctggaggtcacctttagttagatgacaggatttctgatcaccctctcctgccgtggctagccccatctagcttgtaaagtgggag

SEQ ID NO: 334162 - DNA, 569 bp, Homo sapiens
aactgcactgtcctgccctctttatgctggtttctatgtccttatataactcacctgtatatgtcatccatcaacaccccagtgatgagtaataattctaatatgcaaggtctgtaagtgagaaagctgagcattatgattaaatggctctacatctccatttttcaaaatgtgtttgttaacatgaagcagaacaattttctgcacccaccttagaggtcccactgtgtagtgctctcctatctgagttgtattcttcaatatttggtgtgattaacagtgggggtagggctcacactcaaaacaacatactgctttgccatttctcctatgaattcttgaagcaatgaragtcagaaaaacattgtcaggatagggtcataataaaaggccctattgaatgctgttctcctgagcctataaattcagtgaagtttattgttctgatcttgagtccacagattatgctgtttgctttaaggcactaaagaagcagtcagtttgagcagcagtaaaatttctgcagaataaacaaactcataaactggcattctacaacttccttccac

SEQ ID NO: 334163 - DNA, 580 bp, Homo sapiens
agataagtaaaactctttctcttatttatgcagtttgggtctttgaaatgatgatagaaagtatcccycaggatctctcattgaaagggcaaagaagtgagaagagtgtggttcctattttttaatattcattttgtttcaaagtgttggctagatagtggctatataatgaatttgagtgtatcagtagctggttaaatctttaggggacagttttataaattaaattattatctcaaagtgataatttttttaacttttattttaagttcaggaatacacatgcaggttgattatataagtaaacttgtgtctgggggtttgttgtacagattatttgtcacccagatattaagcctagtaccccttagttattttttcctgatcttcttcctccttccaccctccaccttctggtagtccctagggtctgtttttcccctctatgtatgtatgtatgtgctctcctcatttagctgccacttataggtgagaacatatggtatttggttttttgctcctgcattagtttgctaaaggataatgatctccaccttcatctgtgttcccggaaaggaca

SEQ ID NO: 334164 - DNA, 617 bp, Homo sapiens
ttacctaggctataggaattctccaactgggatcttaaattggactcaggctaattaccctaaactgcagagaagctaatgttctggaagacagagccacaggctacaaaagttgacctatccagtagaagtcaggagagaaaaaaatttaaaaaagagaagcaacaaagaaaatacatggtaaagagaaagtacaaaataagatagtakaaataaatgctatgcgttagtaattgacataaacaccaacacatcacagtagtaaaaagacagagatcctcagattagaataaaataaaagaatccagtgttgggctacttcagaactaatatacagtgacataaatttcaggggaaaaaaatggaagaaagctgtgagtctggattcagcaatatggtaaaataatgtaactttaaaatactttcactctaaacaccttaggtcctgggtaaagttactatttgatatccatcaaagaaaagagaagaataggttggtgcaaaagtaattgcagtttgtaattgcagtttttgcctttgcctttagaggaataaaaacacaattacttttcaccaactaatacgagaatgccagaatctaagaagaaacttaaaac

SEQ ID NO: 334165 - DNA, 615 bp, Homo sapiens
gctcaatctctgaaagaaattatctctgagtctctgaaagattaatcacctgatctatcatctcagccaatcaggctcccttcactgacctctctaaagatggataaacagaaggaaaaagttatcagagggaaaragcatttcaatgtttataaaggttggcttaattcaaggaagcaaagtgaatgagacatttgaggcaaatactacaagtgaaaaagaaaatgggagcaagtctaattcaaatgggttaaagagatcaaaataaaagattccagtgaattaaaagtgaaataatctgacatacagaaagttttcctagaaatgaaaaacattcatttccaaaaatttgaaatagattaaaggagacagtgaaaagcagactagattctgcagaaaggcaaatcataagttgtgatgacaaagtaagaaattctctctgattcagaggaaacaaatgaggtgaataaatagaggagaggtttaaaaagacatggaggacatgtctggaattatagaacaggggcaaagggaaaatggataataataaaaataggcatttactgagtggttaccataggcccagaccctgttccagtttttcagcctgtgttt

SEQ ID NO: 334166 - DNA, 595 bp, Homo sapiens
catggtgaaacctcgtctctactaaaaatacaaaaattagctgggtgaggtggcgggcaactgtaatcctatttactcgggaggctgagacaggcgaatcgcttgaacctgggaggtggaggttgcagggagccgagatcgcaccgctgcactccagtctgggcaacagagtgagaccctgtcccaccaccaccccaaaaaaataaatgaacccacactgatatatcattatcactcaaagtccatagctgacattagggttcactcttggtgttgtacattctatgggtttttgacaaatgaattcaccattgtactatcgcacagaaaagttttgttttcytaaaaatcctctgtgcttgcctattcatccctgtctgcctcatcccattacaaccacttatctttttactgtctccatagttttgccttttctggaatgtcatatagttgaaatcatgctgtatgtatgcagtattttcaaattggcttttttcacttagtaatatactcccaggtttcctccacgtcttttcacggcttatttctttttagtgctaaataatattcccttgtctgaatgggtgattcttcc

SEQ ID NO: 334167 - DNA, 615 bp, Homo sapiens
gctcaatctctgaaagaaattatctctgagtctctgaaagattaatcacctgatctatcatctcagccaatcaggctcccttcactgacctctctaaagatggataaacagaaggaaaaagttatcagagggaaaaagcatttcaatgtttataaaggttggcttaattcaaggaagcaaagtgaatgagacatttgaggcaaatactacaagtgaaaaagaaaatgggagcaagtctaattcaaatgggttaaagagatcaaaataaaagattccagtgaattaaaagtgaaataatctgacatacagaaagttttcctagaaatgaaaaacattcatttccaaaaatttgaaatagattaaaggagacagtgaaaagcagactagattctgcagaaaggcaaaycataagttgtgatgacaaagtaagaaattctctctgattcagaggaaacaaatgaggtgaataaatagaggagaggtttaaaaagacatggaggacatgtctggaattatagaacaggggcaaagggaaaatggataataataaaaataggcatttactgagtggttaccataggcccagaccctgttccagtttttcagcctgtgttt

SEQ ID NO: 334168 - DNA, 600 bp, Homo sapiens
aatcacaccatgactataaaaatgaagaaatagaattctatttaattgaattattaaatatgactacttggagattttatgtatgttaaaatgtaaaacagtgaaacagggagccaactgtaaagtataatattatttgaattttattcttctgctttagttgttttaaaactaaagatgaatccctaaaatatggattattcattgattattgtgattattaataaaaataatttcatcacctagaaagaggattgggaaactcycttattatctattctggtagtcagattatctattctagttgtcaaatatgctaggtatgcaaccgttcaatgagatatcacgaaacaaacacctatataactgccatcaagttttaagaaatcgaatattgacagttccttgggtgtcttcttggtgccctctccactgtactacctctctctccttcttaaatgtaacaaatgtctttatttctattctaacagttcatctctttctcattttggagctgatattaatgaaaaagtttagtaaatttttttatgcctggcttctttcatgcagtactgtatatgcaagattcatacaccctgt

SEQ ID NO: 334169 - DNA, 600 bp, Homo sapiens
aatcacaccatgactataaaaatgaagaaatagaattctatttaattgaattattaaatatgactacttggagattttatgtatgttaaaatgtaaaacagtgaaacagggagccaactgtaaagtataatattatttgaattttattcttctgctttagttgttttaaaactaaagatgaatccctaaaatatggattattcattgattattgtgattattaataaaaataatttcatcacctagaaagaggattgggaaactcccttattatctattctggtagtcagattatctattctagttgtcaaatatgctaggtatgcaaccgttcaatgagatatcacgaaacaaacacctatataactgccatcaagttttaagaaatcgaatattgayagttccttgggtgtcttcttggtgccctctccactgtactacctctctctccttcttaaatgtaacaaatgtctttatttctattctaacagttcatctctttctcattttggagctgatattaatgaaaaagtttagtaaatttttttatgcctggcttctttcatgcagtactgtatatgcaagattcatacaccctgt

SEQ ID NO: 334170 - DNA, 587 bp, Homo sapiens
taacaatttgaactgatccagaagtctcctggccagaacccgggggagggtgtgaatctggtgtgcagatgccacagcrggggaagaaggaaagccatacttgctttcatagctgggaggtgggtagcctggggcaatttctcagccctgctcacccactgcctggaaacagacttggtgctgttgtaggggcacagtgggagtgagaccgacccttcagattgcataggatctaggtgaggcctgtgactgccagcttttccccactcccctgacaacctgcatgatacagcagagacagccataatcctcctaggaacataactccattgacctaggaacttcatcccatcccccagcagctgcagcaagacccacccaaggagattctgagctcagactcacctagccctacccccacctgatggttcttccctacccaccctggtagctgaagacaaagggcatatacttttaagagttctagggccccaaccgccacctgttcctcccacatactaccataactgatgctgtctagaaagtgccacctccaagcaggaggccaaccagcacaaaaatagtgc

SEQ ID NO: 334171 - DNA, 543 bp, Homo sapiens
ttgttttcttatttgaaacatagtttgttttttaattttaaaaagcgtgtgtgtgtgtgtgtgtgtgtgtgtgtgtgtgtgtgtatgctgtacctgtctatgctttgctttcctgacaggaaaatatacaagatcaatatcaaatataagaacaaacattgtggaaattctttatgtccaagcactttgatgagcactggttaaaagagtggtagctcttcttcctatttttattcacaagttctccatcttgggtgaatgaaggaaggatgatccttcaaaatggaatacattggtttgcctcaaattttatgtaaatttattaggactgtccactaataygccttgtgccttatttgtcagactcacaacatagggaaacctgttcagacagctattggaatgtgatcaatctcttgggtactcttccaaacttaccaaaagatttcattaatattccaagctatagggagattaatgtggtaaagagaccgtatgcctcttttctggatttcaggaagtgttgattatattgtattgata

SEQ ID NO: 334172 - DNA, 430 bp, Homo sapiens
gttcattgcaacagcagtaacacaaatgtagcaatactggtagtggtaatggtgtctgtttattaagtccatctaaggtaatttgtcatgtacaaatttaagcctcacaaacatttgataaggatagtatgtttctacataagaaagtragttttagaaaaatcagcaaacatagccagggtccacagctcttaacgtcacataacagttaactactgctatataacaatccactacatgtagtggcttaaacagcagccagtctcttagcttataatcccgttggttgaaaatttggactagacttagctgggaggcttttgtggtttgaggtggttgcataaatctatggtaaactgcagcttgtctcggcgggactacatctgcttttgggagttgtcaggctgtcactgagccacactggcttttc

SEQ ID NO: 334173 - DNA, 613 bp, Homo sapiens
aaggtggtgcatcctaactccacagtaacagaagctcctaaacttgggacctttccaggcttctccctgtatacctcttcatctggcagttcacctatattctctgtaatatcctttataataaaccagtaaacataaccaagtgtttctccaagttctgtgagcaaaggaycaaacctgaggaggaggttgtggggtcctccaatgtgtggacaagatggacagagttgtgggtaacctgaggacttacgattggtgtctgaagttgggggaagtcttgtggcactgagcctttaacctgtggggtctgcactaagtccagttagtgtcagaatggaattgaattatgggacacccagctgctttgaagaattgatagatgtgggaaaaaaatcccacacatcttgttagagtgtacatagaacaaaatagttggtttttctcatacaactgagaacctactaggtacaggacacagaagaaatgcggggaatgttttcccaattaaaagattttctaatctattgggagtaataggagatacacaactataaaacttaagtaaataatcaggaaccaccacatagacacaaggaaatttctgtaaggaata

SEQ ID NO: 334174 - DNA, 613 bp, Homo sapiens
aaggtggtgcatcctaactccacagtaacagaagctcctaaacttgggacctttccaggcttctccctgtatacctcttcatctggcagttcacctatattctctgtaatatcctttataataaaccagtaaacataaccaagtgtttctccaagttctgtgagcaaaggatcaaacctgaggaggaggttgtggggtcctccaatgtgtggacaagatggacagagttgtgggtaacctgaggacttacgaytggtgtctgaagttgggggaagtcttgtggcactgagcctttaacctgtggggtctgcactaagtccagttagtgtcagaatggaattgaattatgggacacccagctgctttgaagaattgatagatgtgggaaaaaaatcccacacatcttgttagagtgtacatagaacaaaatagttggtttttctcatacaactgagaacctactaggtacaggacacagaagaaatgcggggaatgttttcccaattaaaagattttctaatctattgggagtaataggagatacacaactataaaacttaagtaaataatcaggaaccaccacatagacacaaggaaatttctgtaaggaata

SEQ ID NO: 334175 - DNA, 531 bp, Homo sapiens
ctcaatgcctttttttctgtctttctcttttcctattacgtctcctctgtcatagcctcctatcatcaagagaaaagctttatgaatttattgtcctgtgtagaaggtctatctctgccaaactgtgggagaactctgtaagtatgtatctgtcaggcacggccgctgcaattttaaatagaggagataaagaaattttgaaaatcctgtctcaaaatgcttgcctctcaagctaattttcttgtggcaaaatcctagttttcttatcagaagctgattattgctttgttctttccatttcttctgaaacrtatgttcaactgcctgcagaaagatggataaggtaagagagagaacacattaataatgttcaaaatatcaacacattagaattacttactgtcttcgatcctatcttattaaagaataaagttataaaacagtgaaaaaattgtaatcatatagaagaaaattgaaaacctgaacacaaagttaatttcaattgcatagtagaaggcttgtggagatttt

SEQ ID NO: 334176 - DNA, 577 bp, Homo sapiens
ggtggtgcacacctgtagtcccaactgtttgagaggctgaggttggagaatctcttgatcccaggagtttgaggctgcagggagctatggtcacaccactgcactctagtttggggcaataaagcaagaccctgcctctctttaaaaacaaacaaacaaactgaaagacactaaagagcttggaaagagcttggtctctctctctctccctgtcygtgagaacaccatgagaagttggtagtctgcaacctagaagaggactcttcctaaaacccggcctttctggcactctgatcttggacttccagcctctagaactgtgagaaaaataactttggttgtttaagccactcaatctatgatattttgttacagcagcctgagcagactaagacaattatcttcagtccttccagctccattgacatctccagtgccttgtcttctcaccactgatctgccttttcttgaattcccttccttctctgatcagcttagtttcttagtctttcatcttaatgccaatatccctatatcccttgcctgctgcccttttattgcaccttcttggcaaaat

SEQ ID NO: 334177 - DNA, 618 bp, Homo sapiens
tatcatcacattaatgataagtgtaaaacaatgaggtagaaattagaaaaataatataatctactgaggctttgcagagatattgttcttgtttggggagagaagaataacattcagaacacatgaatagcaatttgagagcatatatttatacttgattctaagttggaaacatgaagtaaaaataatatttcaaatttgtwtttagtgtggacagtaacaccaaagcaagggcatgaattctgacacttaatgttcattcctagctgtcacttatacttttaatatttccctaaaggttagttttgctgtttgacagaccttctctctcaaatccaaatcttgagaaactctagataacacgcagccaagaaagcttccccaccctctttccctttgtccctctctatgagtatcattatgagggacagcatggttgatactctgtttcatttctttcttccattatgcaaaaaagaggaaaaatttgagaatgggctagcaattagtaacacttttcatttagaatattcacagaagaaatgaatctgaattatgatatggtaatcctttttctctgttttataatgataacatattaaaaactcagcactaatt

SEQ ID NO: 334178 - DNA, 536 bp, Homo sapiens
gcagtgtctaatttacatagagcccacagattggttggaccaggggtgaggtttacatagtgcatggggaagctggccatcccatcctaatcgtcttattatgcaaatgggatctttgcttgactaatgccatgttccctgctccttactgtacatgtggctggcaaagagaagggaagatggaactgacattttgaatgtgcccagtcccaggcagccttttcttattagcacaactgayggcattcaccagtgcaagcttccagcttgtttctctatgtctgcaagtcattttacagtctgctatttgtaggaaaagaaagtattttgggctgcttttcattaaaaggaaaaccttactgaggactcctgtgctctcactatctgcctaaataactttttaaaactcatatattactaacatatgttgcatcttggagaagtttccatatgcattgagaaaaatgtggttttttgttactgttgtgtggagtgctttgcatgtgtctgttaggtccaactgattatagtattgt

SEQ ID NO: 334179 - DNA, 597 bp, Homo sapiens
agtaattagaccctaaaatctcagctcctccagaaacaccttcaagggcagaacttatactcctataaaatacatasaaagcccttgaaaggaatatccattagaatagtattcctctatctcttaccaaaacagacttaaaaaaaaaaaaataggccaggcagggatggctcatgcctataatcccagtactttgggaggccacagcaggaagactgcttaagcccaggatcttgaaactagtccgggcaacacagtgggaccctgtctgaacaagaaattaaaaattagccaggcatgtagtcccagctactcaaggagactgaggtggaaggatcgcttaaactgggaggaagtggaggctgcagttagctatgatagcaccactacactccagcttgggcaatagagcaggatgctgtctcaaacaaaacacaaacaaaaaaatacagcccctgtaatgttggttaacacccctgaaaatgctatgcaaatgaagcattgcataagtaattttgttgttttttttaaatagagatggggtctcactgtgttggccaaggtggtcttgaactcctggcctcaagcaatcctcac

SEQ ID NO: 334180 - DNA, 597 bp, Homo sapiens
agtaattagaccctaaaatctcagctcctccagaaacaccttcaagggcagaacttatactcctataaaatacatacaaagcccttgaaaggaatatccattagaatagtattcctctatctcttaccaaaacagacttaaaaaaaaaaaaataggccaggcagggatggctcatgcctataatcccagtactttgggaggccacagcaggaagactgcttaagcccaggatcttgaaactagtccgggcaacayagtgggaccctgtctgaacaagaaattaaaaattagccaggcatgtagtcccagctactcaaggagactgaggtggaaggatcgcttaaactgggaggaagtggaggctgcagttagctatgatagcaccactacactccagcttgggcaatagagcaggatgctgtctcaaacaaaacacaaacaaaaaaatacagcccctgtaatgttggttaacacccctgaaaatgctatgcaaatgaagcattgcataagtaattttgttgttttttttaaatagagatggggtctcactgtgttggccaaggtggtcttgaactcctggcctcaagcaatcctcac

SEQ ID NO: 334181 - DNA, 576 bp, Homo sapiens
ctagagaatacatttttaaatgagatttaaaaaattttattttcaatgagattgttctattaattttattttttgattgtttattgatactatgtagaaatactattaataattttttgtatattgatcttatttcctgcaactttgatgacctcaatttttagctctaatagtgtgtgtgtattccttaggattttctatatacatggtcatgtcatgttgaatagagatagttttayttcttcttttccaattgggatgctatttctttttcttgcctgattgctctggatagaacctctatgaagagtgaatattctcataagtcctgatctcagtgggagcactttcagttttttactgttgagtctgatgtgagctatggggtttctgtatgccctttgtcaggttgagaaagttccctttcattgctagtttgttgagggttgttaccataaataggtgttggtgttagattttgtcaatgatttttctgtgtctgttgagatgatcatgtgatttgtgtactttgttttatggtatattaattggtttttatagtttgaaccaactttg

SEQ ID NO: 334182 - DNA, 576 bp, Homo sapiens
ctagagaatacatttttaaatgagatttaaaaaattttattttcaatgagattgttctattaattttattttttgattgtttattgatactatgtagaaatactattaataattttttgtatattgatcttatttcctgcaactttgatgacctcaatttttagctctaatagtgtgtgtgtattccttaggattttctatatacatggtcatgtcatgttgaatagagatagttttacttcttcttttccaattgggatgctatttctttttcttgcctgattgctctggatagaacctctatgaagagtgaatattctcataagtcctgatctcagtgggagcactttcagttttttactgttgagtctgatgtgagctatggggtttctgtatgcyctttgtcaggttgagaaagttccctttcattgctagtttgttgagggttgttaccataaataggtgttggtgttagattttgtcaatgatttttctgtgtctgttgagatgatcatgtgatttgtgtactttgttttatggtatattaattggtttttatagtttgaaccaactttg

SEQ ID NO: 334183 - DNA, 592 bp, Homo sapiens
ctgcttttaaccatagtaaagtattctggaattagttttgtcttctgtctagtcaagyactatagcaaacactctaacactcccatggggccaagaagctgctagaaacacaggttgtgggatcacgaaacaaagcaatgatacaactaacccattgcaagaacattttccccctaatgaggtcattggttctgagcagaaagaagttagaagccaagagaatatagagaacttatgggaaacatatgtgtctcacagatagaaactgggactcctatataattataatgcaccctgggaacaaataaaatgagttgtttcaaaccatggttgcgttacacattctttagtggggacactgatgtgtgggattctgaacttctcaccctcttaatcataaggggcctggattatgcctggaggacttccattttctagcactatcagcagacatacaacgggtacataataaagactagttgaattattataggtttgtttccatttgctacctgtttccctgaaagataagaaaaatatagcattatttaatgacaagcaaaggaaatgtacaaataagtgaatttagaac

SEQ ID NO: 334184 - DNA, 592 bp, Homo sapiens
ctgcttttaaccatagtaaagtattctggaattagttttgtcttctgtctagtcaagcactatagcaaacactctaacactcccatggggccaagaagctgctagaaacacaggttgtgggatcacgaaacaaagcaatgatacaactaacccattgcaagaacattttccccctaatgaggtcattggttctgagcagaaagaagttagmagccaagagaatatagagaacttatgggaaacatatgtgtctcacagatagaaactgggactcctatataattataatgcaccctgggaacaaataaaatgagttgtttcaaaccatggttgcgttacacattctttagtggggacactgatgtgtgggattctgaacttctcaccctcttaatcataaggggcctggattatgcctggaggacttccattttctagcactatcagcagacatacaacgggtacataataaagactagttgaattattataggtttgtttccatttgctacctgtttccctgaaagataagaaaaatatagcattatttaatgacaagcaaaggaaatgtacaaataagtgaatttagaac

SEQ ID NO: 334185 - DNA, 525 bp, Homo sapiens
taagaaatttcagaatgactatttctgaatagcactatctgtttccctcaaaaaaaatatagtgtgtgaagagtatttcttacttgacayagaagttctcgattatgaaatacaagaacagattttgagcacttcaaaattgcacctttttacctttaagaactaagtccaaaatttcaggtaggcagcctgactgtaaaaagtcagcaattccattaatttccagcaaatttcttcacaagtgtaacctatgaactttaatggctgtattaatatgaaaagtgaaattatttcagatatcatagaaagaagcacacagttgagatagataatttggggtagtacactttcatccacatatgatacttactatccttagtggcagagatactcagtgaacataattttgttttgaagtcagaattcacaaagcaaacaaaaacatacagtggggaaaggacatcctattcaacaaatggtgctgggataattggctagccatgtgtagaagaatgaaactggatc

SEQ ID NO: 334186 - DNA, 525 bp, Homo sapiens
taagaaatttcagaatgactatttctgaatagcactatctgtttccctcaaaaaaaatatagtgtgtgaagagtatttcttacttgacatagaagttctygattatgaaatacaagaacagattttgagcacttcaaaattgcacctttttacctttaagaactaagtccaaaatttcaggtaggcagcctgactgtaaaaagtcagcaattccattaatttccagcaaatttcttcacaagtgtaacctatgaactttaatggctgtattaatatgaaaagtgaaattatttcagatatcatagaaagaagcacacagttgagatagataatttggggtagtacactttcatccacatatgatacttactatccttagtggcagagatactcagtgaacataattttgttttgaagtcagaattcacaaagcaaacaaaaacatacagtggggaaaggacatcctattcaacaaatggtgctgggataattggctagccatgtgtagaagaatgaaactggatc

SEQ ID NO: 334187 - DNA, 525 bp, Homo sapiens
taagaaatttcagaatgactatttctgaatagcactatctgtttccctcaaaaaaaatatagtgtgtgaagagtatttcttacttgacatagaagttctcgattatgaaatacaagaacagattttgagcacttcaaaattgcacctttttacctttaagaactaagtccaaaatttcaggtaggcagcctgacwgtaaaaagtcagcaattccattaatttccagcaaatttcttcacaagtgtaacctatgaactttaatggctgtattaatatgaaaagtgaaattatttcagatatcatagaaagaagcacacagttgagatagataatttggggtagtacactttcatccacatatgatacttactatccttagtggcagagatactcagtgaacataattttgttttgaagtcagaattcacaaagcaaacaaaaacatacagtggggaaaggacatcctattcaacaaatggtgctgggataattggctagccatgtgtagaagaatgaaactggatc

SEQ ID NO: 334188 - DNA, 553 bp, Homo sapiens
acatggaattgtcgatatttgagcatgttcgactcacaaaacagcaattcgtatggtkcgagctaataaagatatgataattatgatagaagggctacaaataataaaagggcttttattaagccctttggaaagaaaaaattgaggtaagttctagttaaaatttcatgagggaacaataatctccaagacttattactcttatagtgaaggcaactttaaagatgttttctcactttcttttaatcttttgctaacaaggcccactttttagtatcaaatattcatagcacttatagtgagtacatatattatagtactaataacttacagctaggaaaatatgaggataacttgtaagataagaaatcagagttaaaattttgtatgctatctcttaccattccccttctcaaacagaaaagaaaagaaaggttaaagaagaaggaagggaaaaggagcttgaggtgaaaaaagaaaagcataaaacacatgagttgacacttcaaacttaggctaacttttggtgagggatgtgtatatgtttgtaatt

SEQ ID NO: 334189 - DNA, 655 bp, Homo sapiens
attctctgttttttggcaagttacttgacttctttacctcagtttccccaaggtgaccgtcatcacagcgctggggggacagttcaaygtaataatacatgtaaagtgtgcctggcacatagtaaggaatcagcaaatattatctgctataagtgcaattttgagggggtttatgaaaaaatttacatcaaaacgaaggcaattggtggtagctgtaggattgtcagcaatgaagaagaggaggataaactactgaagagacacttgtggactacaatctgggaaagcactctgatgagatcatttttagttaaatgccaactgacttgctaatttggcataacagtgcctttataaacatccgtaccctcagctaggatttctgtatggggaataaagtgagtgaagtggaagcaaaattttctattatttattctggttgataatttgtatgattgagaaactttagtagtttggagaaatacagtacagtagtgtttgcatggtctattcaaggcacttattgaaacatagcccatgtgtctgaggattattttactattaagtgtgtgtatatttgagaaccattttctggcttcactttcatgcttgaagtagaatgagaacaaatcagcaagcattgtgacctattcag

SEQ ID NO: 334190 - DNA, 613 bp, Homo sapiens
aagaggcttgatggaagagacttaataatgtttacagaatgtaccaagaggtccatcagggtgggtcagtttggaaaatacagaagaaaactcacattaatagaaagttcaaatacctatgtagtaggaaggagactgagtgaaaaacacatgcaagagattagttttgaatagtgaaagaaacttgtttatcccaagcccagagggtgagaatgagtacaaacataaatgtatcaaggagaaaggaaattaaaggacttctcatatgattgcttccattttttctctggttagtaggagaaaatataatatgctaaagaagataaggacatggtgaggtacgtaggtaaagaatataatgaaagtccggcatagcactataaaaatgcattaataattgtacagtgtgttaaggacccacatgtgattatgtaactccagtttacaagaaggcatgatttcktctagctgttctcagcagcttgcatgtaacagcaaatacagttgatagatcgttctgtggttgatgattatttgaatgggtgtcgggtaagtcaaggatgaagtcaccgagagtgctgtcaatagagtggctgaaataataaaacaaggg

SEQ ID NO: 334191 - DNA, 613 bp, Homo sapiens
aagaggcttgatggaagagacttaataatgtttacagaatgtaccaagaggtccatcagggtgggtcagtttggaaaatacagaagaaaactcacattaatagaaagttcaaatacctatgtagtaggaaggagactgagtgaaaaacacatgcaagagattagttttgaatagtgaaagaaacttgtttatcccaagcccagagggtgagaatgagtacaaacataaatgtatcaaggagaaaggaaattaaaggacttctcatatgattgcttccattttttctctggttagtaggagaaaatataatatgctaaagaagataaggacatggtgaggtacgtaggtaaagaatataatgaaagtccggcatagcactataaaaatgcattaataattgtacagtgtgttaaggacccacatgtgattatgtaactccagtttacaagaaggcatgatttcttctagctgttctcagcagcttgcatrtaacagcaaatacagttgatagatcgttctgtggttgatgattatttgaatgggtgtcgggtaagtcaaggatgaagtcaccgagagtgctgtcaatagagtggctgaaataataaaacaaggg

SEQ ID NO: 334192 - DNA, 652 bp, Homo sapiens
atcaatggaagttaatgaaaaatatcatcaaacaaaagggtaaacaagtcttagtgaaaaagggcaaactattggtgcaataatataccctttaaagacatcatcatttcaaatagggctgtacaaatatagaaagatgtaggatgaattcaaaacctatgactaaataatttaaaccaaacgcaataatgatgagaaagaaagaagatccatgttcaattggggatttatagtttctttataaagatgaagtacagtgactctagtgtagtggttctcaatgggggacartttcatcccccacatttagcaatgtctggagacattttggttgtcaatactgaggggtgctactaatgttaggagtcaggtatgccactaaatatcctccaatgcacaggacaactttaacaaagaattacttatacagtctaaactgtctatactgccatttttgacaaatcctgcttcagcctatgtctgtcattatgttgataattaactgagtaattttgaggccatacctcacagtattaaacagttggatgtgtagttgtgtgggtgtattattgaaagacagtaggcttttaaggacttgagtgactttgaggccttaccttatgaagcagtgagcagcagtgataagccagct

SEQ ID NO: 334193 - DNA, 595 bp, Homo sapiens
aagtagtcttctttgagtgaaatctgcttggtgttctataaccttttgtacttgaatatttatatctttctctagatttggaaagttctctgttattcctttgaataaactttctacrttgatatctctgtctaccttctctttaagactagtaactcttagatttgctctttggaggctttttttcaagatattgtaggtgtgcttcattcctttttattctttcttcttttgtctcctctgtgcatcttcaaatagcctgtcttcaagctcactaatcctttcttctgcttgatcaattctgccctattgagagattctgatatatccttcagaatgtcaatttttcaggtccagaatttctgcttgactttaaaaaattatttcaatctctttgttaaattatgtgatgggattctgaattccttctctgtgttttcttgattttcactgagcttcctagaaatggctattttgaatttaccgtctgaaagttaacacgtttgtcactccagaattggtcactggtgctttatttagttcattttgtaaggtcatatttacctgtatgttcctaatacttatgtttgttgat

SEQ ID NO: 334194 - DNA, 595 bp, Homo sapiens
aagtagtcttctttgagtgaaatctgcttggtgttctataaccttttgtacttgaatatttatatctttctctagatttggaaagttctctgttattcctttgaataaactttctacattgatatctctgtctaccttctctttaagacyagtaactcttagatttgctctttggaggctttttttcaagatattgtaggtgtgcttcattcctttttattctttcttcttttgtctcctctgtgcatcttcaaatagcctgtcttcaagctcactaatcctttcttctgcttgatcaattctgccctattgagagattctgatatatccttcagaatgtcaatttttcaggtccagaatttctgcttgactttaaaaaattatttcaatctctttgttaaattatgtgatgggattctgaattccttctctgtgttttcttgattttcactgagcttcctagaaatggctattttgaatttaccgtctgaaagttaacacgtttgtcactccagaattggtcactggtgctttatttagttcattttgtaaggtcatatttacctgtatgttcctaatacttatgtttgttgat

SEQ ID NO: 334195 - DNA, 595 bp, Homo sapiens
aagtagtcttctttgagtgaaatctgcttggtgttctataaccttttgtacttgaatatttatatctttctctagatttggaaagttctctgttattcctttgaataaactttctacattgatatctctgtctaccttctctttaagactagtaactcttagatttgctctttggaggctttttttcaagatattgtaggtgtgcttcattcctttttattctttcttcttttgtctcctctgtgcatcttcaaatagcctgtcttcaagctcactaatcctttcttctgcttgatcaattctgccctattgagagattctgatatatccttcagaatgtcaatttttcaggtccagaatttctgcttgactttaaaaaattatttcaatctctttgttaaattatgtgatgggattctgaattccttctctgtgttttcttgattttcactgagcttcctagaaatggctattttgaatttacygtctgaaagttaacacgtttgtcactccagaattggtcactggtgctttatttagttcattttgtaaggtcatatttacctgtatgttcctaatacttatgtttgttgat

SEQ ID NO: 334196 - DNA, 522 bp, Homo sapiens
catctatctttatattcatttcaagaatgtttatgaccacctcatgaagcatagctgctttaaggtcttcatctgataatttcaacatcttggttatcttagtgttggcatccattgtcttttcccttgaaaactggggaattggtcaaattccttcttttgtatatcaagtaattcctggtttttcatatatcaagtaattctgaattgtgtcttggacattttgaatattatgttgtgagcctctgggtcctgttaaaattctctggtgcattttttaaaagcaggcaaccatcttgaytagattgaaccagttctctcttactttctgtgggaagccattccaatattggttcagttttcaaagcttctgttatgctgttttgggtctgtattcagcctgggacttggttgtggtttatgccttagtttagctgtcaacgcctttgccatctgttttgtatctggttctgtgcatgcacaattcagaggtgagcctggaatttgtgtcacttcatacac

SEQ ID NO: 334197 - DNA, 508 bp, Homo sapiens
aggacaacctacaactttctattgaccatttcacatactgatcacttcttgaatgcagtattttaggaaaacagatatactactatcaaacagtggatcattcctgttcccctattctgcaatatacatatacatctagtagtaccctaaatctggggctttcttaacctttatctctaggttaattcctaacaatattactccttttcccttgctttatatttcttctttggttattttctaactacaagttctaccacactatctcttctcaatattttctttatcccaaataatattaatcttctttctcaacacttacaatacctatattctacaaatttttattttttaaagttttattttcttcccctctttggcccaagattacatacttttcacatttttcaactgataaattctcccctgytaatatatctgctctacaccctaacattgaggagtcatataaagatgtaaggtgaacacatttatagtcattcattca

SEQ ID NO: 334198 - DNA, 505 bp, Homo sapiens
atatatacacacataaaataaaatacatattcatttaatacatatatgtatatacacatacatatgttaaataaaatatatacgcatatatacacacacacaaacatatatatataaaattttagattattcaattattctgtccaaccaagtagtcttctgtctttttaaaaattaactaggttttgtctatgacacaccaacccagtgacatggaaatggaggacaagcacaaataaatacaaggttgtatttcaaaagaacttacagtctaaagaggagtgggaagcagatcaacaggcaggttcgcagggcgggtaaagactctgccagggttataaccatctttctcttggagtccagagacrtgagcagcccgtgtgtggttttcttgaagatgaacgtgagtttatagacacggttattcagaaaaccaccaggattctttgtaatgagtgcattaaaaacctatactgttctgaagaggcatttcagcagccactgc

SEQ ID NO: 334199 - DNA, 529 bp, Homo sapiens
cattttctctactgtgtatttcaaaagtgaatataagaaagcaaatatttaaagaggctatttcatgagttttgaaaaaataatatcatgacagtttttctgttttaaccagaattaagtgaaatatctgtattatgtactgatatttatttaacctatctaattttatttcaggggatcataayttatttcttattatttgtagttaatgctaccatttcaaatagtattttagagtagtttggcatttccagattcctccaggtaatgtattatccatatatggaaaaaatgtacaaggagtttatagttcctccaaaataattcttttcttctggcatccacattaatcccaaggaaaggatctggttcactaaagttgtttgtccccaagttttgacattttacagttagcagagttttgcaaattgatgggtattcagaacactttttcaagagatggaacatctatattgcttactacatataaagagctaaatttgtatttgttgaagaaagaaatcaatga

SEQ ID NO: 334200 - DNA, 488 bp, Homo sapiens
agaagcaggaaaccatctgaatgaccagcaaatcacctcacatataagtttaaccttaatttccagtgggaactctaggaagagacccccagttcactgcaaacccctgctgccttcccccatcctagacaataaccagaaatgcagtattcaggtactcagaagcaatatgactgggtatcaggaggcartttaaggatgagaacctgccggattgaaatagggatatttagcacaagttcaagtaatgaatgctgagaacatcagccatctccctaatgactcctgtatactggtaacaaagattcctcaaagcaggtgattggtaatgctttcctgggcgaatcaaatctgtttgaatagacaggttagatcacaagattgattgattaattgacatatagacagattaggtggatgataaatagattagatggatgaatgggtaaatagttggatggataaaatgatagatagatgataggtag

SEQ ID NO: 334201 - DNA, 317 bp, Homo sapiens
ctcttggttggctttttctctgaccattagtaatatatagaaaacctggaaactatggaaaacagttaaaaaaggacaaaaaagcatgggcgatttcatcagccagaaaccacatcaaatctttwtcttcattccaactatttttcttctacctgttaagagaaaacttttgacacatgaaatttagcagagtttatttgagtaaataggtgtatcaatcaggcagccttcaaatccaggcaaggtccagagagctccacccagcaatgtgggcagcagcactgatagaaaaaggaaggcacatggggaggcagctg

SEQ ID NO: 334202 - DNA, 357 bp, Homo sapiens
gtaatcccagcactttgggaggccaaggtgggtggatcrcttgaggtcaggagttcaagagcagcctggcccacgtggtgaaaccccatttctactaaaaatacaaaaattagctgggcatggtggtggacatctgtatccccatagtcccagcaacttgggaggctgaggcaggagaatcgcttgaacccgggaggtagagtttgcagtgagccgtgatcatgccactgccctccagcctggcagcctgggagacagagagcgagactttgtcacacacacaaaaaaagaatttaaaatataacactatgattctgaaaatagctatagtctctccagttaattcttcccagctca

SEQ ID NO: 334203 - DNA, 357 bp, Homo sapiens
gtaatcccagcactttgggaggccaaggtgggtggatcgcttgaggtcaggagttcaagagcagcctggcccacgtggtgaaaccccatttctactaaaaatacaaaaattagctgggcatggtggtggacatctgtatccccatagtcccagcwacttgggaggctgaggcaggagaatcgcttgaacccgggaggtagagtttgcagtgagccgtgatcatgccactgccctccagcctggcagcctgggagacagagagcgagactttgtcacacacacaaaaaaagaatttaaaatataacactatgattctgaaaatagctatagtctctccagttaattcttcccagctca

SEQ ID NO: 334204 - DNA, 550 bp, Homo sapiens
atacagtgagtctattcaatcctttctctgtttcaaaatatttttgctactttttttgaccttaagtggcacacatctgtctaacattgttggaaagttctgttagggacaaaattgtgctactgaaaacattgtagtctagactagtgtaacatagaggagtgatcagttcccaatttgtatgaacaaattaaatttctcttttgaacttccatgacactggaagccttagttctgttggaagaattttcctggcacttggagatggaagtttatccatctttgttttttcttctccactratgtatagtagacatcaacaaaggaatatgttataaacactttcttaagaaagggagatgtccattaagcactgattggatgccctgctctttaagatgtgaggaactgaaaatgcatggtccactttttgcagctcaaatgtggtgacaaagctaagaagttaggtaaggacagtatattgcacaataaaaagactggcttctgattctcctccgaggttcagggcctcaacaattgcctgccactc

SEQ ID NO: 334205 - DNA, 533 bp, Homo sapiens
ggaaggtgaaaaacaggaaacttagtaagcgagggcattattataaataccctgggacaggtgtttgagcctcctcacttgcaaagcatttgtcaaaaaaagaaaaagaaaagaaaagaaaagaaaaacatggcccagcaagacagtgacccatttctggctgcagcactaaaccgtccttcctgtgtcaccatcattcaacaggggtttagaacacaagaggtgtcctgtggtccagggttgcccagccctcacattcattaaactttcagggagagaaattggctttctttccccataactctcaaggaggaagcagccacatattttacctgaggagytcatttcaagtacagtattaaatactttttgattttccatcaataagtttttctttatggttaaccaaactccatcacgctataatcttaaatgtttttataattttaatttaatataatgttatatttaatgtaagtttaatttaatataaaatattactttaatatgaaatcaatgtgtatctataaaaa

SEQ ID NO: 334206 - DNA, 407 bp, Homo sapiens
attataggatagggatatggggagcagagccaaatgaagtgtactgctttcatttcctctggaaggtgtaccttgggcaaaaggtctaactgaatttaaataatatttgtttccagaaggggctttggaataggtaggttttgccctaagagagcctttatttttaccttaaaaatagcaggcaacgtttctatgaaaggaagacaaagtgatattgctttatgtaaaattaacgcttagagattttagaagatgaagtaaggcaaattgctttcttatttatgtttatgctctcacccatataccccgcagtagcttaaatgcaacaggaactaagaataatagagtaaaaatatgatgcaatgcctgattaaaaatgcaaattsaaagttgccagtgatcttcta

SEQ ID NO: 334207 - DNA, 458 bp, Homo sapiens
attataggcatgtgtaaccacacctggctaatttttgtatttttagtggaggcagggtttcaccatgtgggccaggctggtctcgaactcctgacctcaggtgatctgcccacctcagcctcccaaagtgccagcattacaggtgtgagccactgcgcccagactttcctccatttttgaagccaccggtgtagcatcttacttgtgttgtaagatgctttcattgccttcatcttctgtgtcaaatatccctctccctagctcccaccctgataaggaaggataatctctctgtctgtctcaatatccttagtcacatccacraagccactttttctataaaaggtaatattcacaggttttaaggattaaggcctgaatatctttgggggccaattagcctaccacaaagtttaaaccataattttaattgatgaaataaaatatgttgttccatt

SEQ ID NO: 334208 - DNA, 623 bp, Homo sapiens
ttttttggtatcatgttagtaatgaggatagcaggatattctacagatttagagaatgttgatgaagtggagaccttgtagaaaagcaacgtgctgcagagtaatagagtcttggcttctctgttccttccttaattaaattagaactttcatttaagaagaaagagaatctcagtctcatgtttggtctcaagtaagcatggaggttggaatggtactatgaaggtgaaatcttaccttcattgttgccatgtccactgcccctgtgcatatgctgccattgatcagctggaggaaatcttctctgtggggagaggtcagcagttggcagagcacrggtcagtgcggaaaaagcaggacattattgcagttgctccattgcattactttttcaactataaatgaggctcctcattaatgaatcatgcacacagattgctagggtctcagcattaattggcactaatgggaacatcttatggttgaaggaagaagctgtgggagccattttcagtctgatttgatttggaagaaaactcaggcaatttacattttccatgaaattttagggcagccttatacaccacattttcactccagacaccaaatagtttgctgaatat

SEQ ID NO: 334209 - DNA, 631 bp, Homo sapiens
tgggaacatcttatggttgaaggaagaagctgtgggagccattttcagtctgatttgatttggaagaaaactcaggcaatttacattttccatgaaattttagggcagccttatacaccacattttcactccagacaccaaatagtttgctgaatatctgcagaaaagtctaccgaattcttcatgagaaagaaggattaccaacaagtgcttcaatgagatttgccttcccctgccaggcagggcacctacagagtgtttgaatctccttgtgatggtactatgcgtgctaaggcctaatgcagtgtatataatttgttttattcatttgagatcattcagcagggattcagtgcaagttagcctggaggatgttttgtccaatacatttcatttaaaaatgtgttctcccatgataatgtactgttattccaacaarataggtgatgcaaaagtttaatctcagctgtcttggaatgttttgccccttaagaggaactgatatgtaacatctcttttttaatcgcagagtctcttgtaattggttttgtgatatatgttcagcattggagaatcaatgctaatagtgttggtatatttcagaccttttcagatcatagaacaaatgggt

SEQ ID NO: 334210 - DNA, 537 bp, Homo sapiens
aagcctcaatcatattgtgacttatagtacctaatatttgaggcaaagtgtttgttgttcttcgcaacaaacrtatgaggtcagtgcctttatctttatttcaccaatgaaaaatagcttgtccaaagtcacacagttgtaattggcaatgtctatatttcactctaaatctctcatattaaaactccttgttcttaaccattatgctttcaggaaaccacttctcaaatatgttaataaatatgtgaaataaccaatgcttaatcagaattgtattgaccagtttgcacaaccacttctctggctaatactgttaccaacacactacaccatcgctgtttagatctagttgtgtgttaggggaggctgaagacagggagcagatcgtgatggctttatcgctctccccaaatattcagcacattttctcactcacttaatcctaagtgtctcatcatatttttaggctataattcaaattagtttactgtccaagagcttttgtaatttggccccactttattaatccaaatttat

SEQ ID NO: 334211 - DNA, 578 bp, Homo sapiens
ttgagaccaatttaatcagctgatggtaaagtgttgagggatccttggtggctccaaactgcagtttgccagcatggaacctgatcaaatgtaatagctctcccagaaatgcattggaaactatctcaatatgcacactttaaaatgaaaagtatagtagaaaattgactgtcagccatgtgtggagacrgtaggtctgttctttctttcatttctctatttttcatggaggcatagcaatctaagacatttacctgtagaatgaagcctgggaaatttcttaactaaagcaccttccaacctacactggtaggaacaaagtgatgtccagtgatttttcttaatccaattccaaaatgaatatattgtattaatgcatatatgttctctcttactttacctttttgagggggaaaaaaagcttagagaaaagtgtgttgcttatatacaatcttcccttttatctgctgtcaagattaaaatgacaataatagcatcttattttttgtgttgtgtgaaacaaagagctaattcgggagcatataggcatctgctatctgctagagtgcaaaagagca

SEQ ID NO: 334212 - DNA, 580 bp, Homo sapiens
agaaaattgactgtcagccatgtgtggagacagtaggtctgttctttctttcatttctctatttttcatggaggcatagcaatctaagacatttacctgtagaatgaagcctgggaaatttcttaactaaagcaccttccaacctacactggtaggaacaaagtgatgtccagtgatttttcttaatccaattccaaaatgaatatattgtattaatgcatatatgttctctcttactttacctttttgagggggaaaaaaagcttagagaaaagtgtgttgcttatatacaatcttcccttttatctgctgtcaagattaaaatgasaataatagcatcttattttttgtgttgtgtgaaacaaagagctaattcgggagcatataggcatctgctatctgctagagtgcaaaagagcagcttagagcagctcagcatgtacccttgtagcccaacttctttcatattcctccctaacctgtcttcttaccttgaaccatttctgttttagagatttgagatactgacttcttaatgcttgtccaaactcctccggctggaatactgaaggaagactgc

SEQ ID NO: 334213 - DNA, 580 bp, Homo sapiens
agaaaattgactgtcagccatgtgtggagacagtaggtctgttctttctttcatttctctatttttcatggaggcatagcaatctaagacatttacctgtagaatgaagcctgggaaatttcttaactaaagcaccttccaacctacactggtaggaacaaagtgatgtccagtgatttttcttaatccaattccaaaatgaatatattgtattaatgcatatatgttctctcttactttacctttttgagggggaaaaaaagcttagagaaaagtgtgttgcttatatacaatcttcccttttatctgctgtcaagattaaaatgacaataatagcatcttattttttgtgwtgtgtgaaacaaagagctaattcgggagcatataggcatctgctatctgctagagtgcaaaagagcagcttagagcagctcagcatgtacccttgtagcccaacttctttcatattcctccctaacctgtcttcttaccttgaaccatttctgttttagagatttgagatactgacttcttaatgcttgtccaaactcctccggctggaatactgaaggaagactgc

SEQ ID NO: 334214 - DNA, 573 bp, Homo sapiens
taggattatattaatatcttaatgctcttccaagtctgatgtactagttgttattgtaattactgaatctcattggttttatggcaaatatatttctcatatcaatgtcatctattcatttacttgtgagacgagcattatattgtgtggtttctgccttccaggtacaacagtatgtactcttgtgataagaggcacaacccttcctctaaaatccttcagagtctagatgactgtaacagtaaaagctcttagttgcaagctacaaaagctatgctgtctaagataagtgggaaaaaatttactagaggacatgaagtagctcaaagaatctaccaaataacaagagaatcagattcaggtyaaaacaccaaaaaacaagtccaaaatgacatcactgtagaagcagcaagaacatcaatgttgtgaacacaagcagtagaccctgtgtcttatcctggagatacatctggtattggtcactggagactgctactttcacctctgcctctgctaccctaagcaacctgatcttgctgcaactgctgacatcatctgaaagagttcctcccc

SEQ ID NO: 334215 - DNA, 571 bp, Homo sapiens
aatgatattgattcttccaatccatgagcagggaatgtttttccatttgtttgtatgatctttttcacagtacatttatgatcagtaaatgaaatttgtttttccatcatatttcttacttcagggcctatttcaaatcctacctatgtcctgaatacttctctgataagtctagcatagcaaattccctgttctgaagttgtacaattattttccaacatggatttgagatcctgactactagcaatactctgctttctctgtgaatccttgaatatgcatatggaagttgagagctgaaagatgatttttatgttgaaaggatacctgggtggggcctcccaggctgagatcccagccatcctcaccctgggctcttgtagggtagcagctctgcacttccctgggatgacgctttcagagtgagcaggcaggtcactattttactgcagccctcactcctgttgcccttaagcttggaagagagttcggtgattwggaactaatgtggacctctagcacatcacagctaccttatggaaaagcagccagactattttccacatggatc

SEQ ID NO: 334216 - DNA, 484 bp, Homo sapiens
ttttaagtgcctattatgattatgaagatagtagaaattccattctcttatgctatcaaatcattacatttacatatgtattcaaccctgccaaatcccaaatgaaggttaatgttcatgatggagaagagccattagcacatttatgaatttgaattccacttagctttattgacaaaaatawctgtgaaagtataagtaactaatttatattaatatcaggaataccaggcgtatttgtgatatctggactaaacagacaggcatttgtactgtcaaacccctgccctctgtatcttactgagaatcaggaagcatgccaaataggaaaaatagaatcaaggtttctcatgcattgagccttaaacactgttttccaaagtgggtttatttaaactactagctgttggagagtatgtataattcttatgttaaaataaatcccatggtcaatgaggtacaggaaatacaggttttaaccaag

SEQ ID NO: 334217 - DNA, 570 bp, Homo sapiens
ttgcttgaagttgttttaaagacaaaagtggccaggcacggtagttcacacctgtaatgccagcactttgggaggatgaggtgggcagaacacgaggtcaggagttcaagactagcctggccaacatggtgaaaacccgtctctactaaaaatacaaaaattacctgggcatggtggcaggtgtctgtaatcccagctactcaggaggctgaggcagaagaatcacttgaacctgggaggtggaggttgcagtgagccaaaatcgcaccattgcacaccagcctggctgacagagcaagactccatttctaattaaaaaaaaaaaacgataaaaatatgatttgttaacatcaaatagttgtttctaaaactatgaacttaacaaratatagaaattcatgaccaaatcagataaaattctattattaatctctattcaaaggagtaaggaaagatttcttattaaaataactttagaagatgctctaaagagtacattttattctcttattaatttttattatgacatatttacaactcacatgacatgtctagagaaaattaaaacaa

SEQ ID NO: 334218 - DNA, 526 bp, Homo sapiens
acagatgatatgattctatacctagaaaacctgatagtctctgcccaaagctcctagatctgataaacaactacagcaacagttcaggatacaaaatccatctataaagattagtagcattcctgtacaccaacaacatccacactgagtgaaatcaagaacacattctcattcacaatagacacaaaaataataaaatacttaggaatatagctatccagaaaggtgaaagatctctgcaatgagaattacacacactattcaaagaaatcagagaggaaacaaacaaatggaaaaacaagcaatggggaaaggacactctatcaataaacggtggtaggataaccggttagtcatatgtagaaatagaaattggaccccttacaccacgttmaaaactcaatttgagatggattaaagcctaaatataaaacctaaaactatgaaaacacctagaagatagcctaggaaatactattctggacttaaattaacaagtgaaaacaaccccattaaaaaagtgggt

SEQ ID NO: 334219 - DNA, 545 bp, Homo sapiens
tgaatggatagatgaatgcagctaatattatcattttggtctcatctaaaagcggggaaacataggaaacattagaaagaaagctaaaatgcacaagatgctattttactattaactcagacttttcttatgccagatggtgttggaggaaagcttttgttttcttgatgataggcatcttcttttaattttgccaaccagacacagttcctctcttttcagcatgcagagacacagcagccatcttttatacacctcttagatacagtaactggtttggcatttcctggtgactgtgagtctgacaattgctcagaatttcatcactgcttcagtcatgtgtagaagatgctcccagagataagcataagacccccatcagtagagttattttaggctcagctttacttaaacagcatcaaattctaattgggcctaccagacttaatttaaggagctagagtggaygaacaacgatgtactgtgacatccaaaatatcaacacaacgttatatgtaatcacaagtatgtatctgtgtgtgtgt

SEQ ID NO: 334220 - DNA, 550 bp, Homo sapiens
ttcaagaccagcctgggcaatacaatgagacctcgtctctgcaaaaataaaaaataaaaactatccaggtgaggtagcacacatctgtagtcccagctccttggaaagttgaagcaggaggcttgcttgagcccagggctttgaggggtgacctgagacaggattaatggcatcaaactgaatataacctgtttggaaaacagaacgttttagcatttcctctcactttatactttaccacaattagaggatgcaagttgggaaatctgcatcatagtttccctggagaagcaaaaggatataaagaatgaaacaacttacatagtgagatgattagaagagtaagaaaaccatgcagaagccctgaagtatcagagctacatcttcgcaaaatggcatggcattatactctaagaaaattttgaggcttaatttcacccaktatcaggtaaaatcaaaattattttaagcagtgattatcaacatatacaattaataagattaacaattaatatttgggtgtctttattttgttctagtctttccccca

SEQ ID NO: 334221 - DNA, 465 bp, Homo sapiens
ctctgtcctccaaggattggtcccttgaatttttggcactgtgtgcagaagctgtcttttctttttttcctttaattataattttagtttcaaatgtgtggcttttttatttccaataagctgttgtgataaacacatctcattatccatggaataaagggagtgccattcaattcagcaggggcgtatctayaagaaggaaagaaaataagactttccccacagccaacgtgctgatgagacaacttttggccctgagggactgatgctgaacaagctctcaagaagtctagattgtggggagcttagtcaatatattagctaatttaactgaaccagaatttaatttcaattcagcagtcatcatattcacacttcactttaatctcaagctctattattaatattacagtcagcaacacagttaataggaagagtgggtctgatacggtggttcatgcctat

SEQ ID NO: 334222 - DNA, 634 bp, Homo sapiens
attatgtgctaaaatcaataatttttaatgtggacacattaacattttgaaaatgaaaaagagtgatttatattttgtaacaaatatgacaaaaatttaaacaaatatttataacaaatatttatataaatataattttcagaaatatgtttatcataaaaacttccatttatatgaaattaactgagcaacttaattgcatccttctcactactgactttttaaaaaaaatcatatatagtaaactgtgcaatgaagcaaatatttacaagatcattgtccccattttacaggtagaggaagtaacttcagggaacttaggagttctctctaagattacacacaaaatcaataacagaggtagaaattcatttcacattttctggctcccaagtcatttccatcagaccgtggatgcaaagaaactgcttgcaaatgttaatgaagtatttrtttttgctccatagaaagtagagccaaaaatgtcattttgtaggtcccagaagtgaattctcagctaaaaatagaattgccatgaattttcatccaaaatttagagtatatttagttcaaacagtcagcaataatgtcctttgcctacagtggtttaagaaaaaaataagtttcctaacaa

SEQ ID NO: 334223 - DNA, 604 bp, Homo sapiens
atggtttcattaaaactgaaatctgatactgccaccaggccactttggsgttctcatgccaacaaataagcaaagaagggggttaccttgccagctagactgatggatcttgactttcaaaagtgaaattaaattgcccctacaggtgatacactgaggaacatcttaataattccatgtcttatggtaaaagttaatgtagaactacacaatgcaataaatgttagactgtcaaaggtccacacctttctggagtgaagtcttgggttaccacaccaggcaataaaacattaacatctgaggcccttgctgagaacaaagggaacatgaaatggacagtgaaagaagatagttttaaataccagctatgactatgtgaccagtaatagaaatgagaagtgtaatagttattaatgtcttctatattttgatataaacaaattgtgaatatattaatcatttgtttttcccttttccatttcccataagatatgttaatagtagttaactttatatctcagtaattaaatgcaaatatgctcatgtagaagattaatgaacatctcccaaagattgataaaaggactttgtatcttattttgga

SEQ ID NO: 334224 - DNA, 597 bp, Homo sapiens
tttgttaaaccctgtgacccttacgatcctgaattgctagcctttaggttcaaaaataaaggttttagggttttggcctctatggattagcttgatcatgtcaaccctcccataagtaacaataattaaacctaaacaaaaacagtagcaaacaaacaactatttgaaggtattgcagtgaccaaaaacaagcagaaactagagaagactgcttttgaaagataagctgcaataggtgaaacataccattttgtggctatttgcctaaaaaaaaaaaatacagtagaaagacacaaaactctatatgcttgaggtctcacagaatatagttctgggttgtcagaggggtcagaatgcttgggaaggaaatctggaaagtgaagggactaaggagatgatccctaaaacaagcgtccaaaatttacccagactcttggctaaccagtaaactatatatttacagggaagatccttggrggccagaataaaagcagcaggtggaggctaaaattactgcgtagagagtcagctaataccagtgtaagagacagagtttgactatcaaattaactgcctactagaatatttttttaaaat

SEQ ID NO: 334225 - DNA, 537 bp, Homo sapiens
ctatgctcatcctttactcatcccctattatatcttctgaatcttctctgscctttcttggcaaagaggaaacttccaagccaagtttgtgatgagtgaatgaagtcatagatcacgtaaatgatgaaagccaacagcttttacatatcaaatggaaagaaatgatacaggaaaattcaaacaaaacaacactaagtaaaatagtagtagagaaaactatttacatatcgtagtcctatacattaccttataggattgaggtgaggattaaatgagttaatacatgtagaacacttagaaaatcagctggcagaaagtaagtgttccatatacaatagcttattattcctggtatcatataaaaatattttaagatttttaccatttacctgactgtctttctctgtaccacagtacctgacctttctctgtcattcatcctccagatttccttgtacagcctcctctttggaattcaacatctctattgaggcaggggtgttacaggtgagcctgatattctaagtccagcctatt

SEQ ID NO: 334226 - DNA, 591 bp, Homo sapiens
atttatacttagtttctttcagttccttgaatactctttgctttatctttcttttgtgacttccgcatgtgagtttctaggcctcttgccttcactcattgccattcacccttcaggtttccattgagcctcccttcccctrgaaaccttactggcaccatttccaacctctcagggcccaagttaggtaattctctaatatactttgacttcccttattggaggaattatcaccaatacgaatactggacttttaattgtctctcttcatctcaatatcgtaagctctaataagacaaaaaaatttgccttgtcaataattaagcccaaagatcacaataaaagttaaatacgtgttaatggaagtgaatattttaaaaattatatattaaacttaaaaaaaattaaaacatacaaagatatcccaattctgactctttgtattcattataatgtatgtcttaatttacataaattataattcataagtgatatatgaaatgcatatattcataggaatataattacatattatatagccatatatgtatgcacatgtatgtatatgtactcatgtactgtattagtcca

SEQ ID NO: 334227 - DNA, 591 bp, Homo sapiens
atttatacttagtttctttcagttccttgaatactctttgctttatctttcttttgtgacttccgcatgtgagtttctaggcctcttgccttcactcattgccattcacccttcaggtttccattgagcctcccttcccctagaaaccttactggcaccatttccaacctctcagggcccaagttaggtaattctctaatatactttgacttcccttattggaggaattatcaccaatacgaatactggacttttaattgtctctcttcatctcaatatcgtaagctctaataagacaaaaaaatttgccttgtcaataattaagcccaaagatcacaataaaagttaaatacgtgttaatggaagtgaatattttaaaaattatatattaaacttaaawaaaattaaaacatacaaagatatcccaattctgactctttgtattcattataatgtatgtcttaatttacataaattataattcataagtgatatatgaaatgcatatattcataggaatataattacatattatatagccatatatgtatgcacatgtatgtatatgtactcatgtactgtattagtcca

SEQ ID NO: 334228 - DNA, 559 bp, Homo sapiens
aattataattcataagtgatatatgaaatgcatatattcataggaatataattacatattatatagccatatatgtatgcacatgtatgtatatgtactcakgtactgtattagtccattctgcattcctataaaggaatacctaaaactgggtaatttataagaaaagaggtttatttggctcacacttctgctaactgtacaagaagcatggtgccagcatctgcttcaggttgggacctcaggaagcttttcctcatgttccgcaggtgtgccacataagagagagaataagagaaagaagtgaagaaatgccaggctcttcaatcagctatcttgtgaactaatagagcaaaactcactcattactgtggggaaggaaccaagctattcatgaggggtccacccacagacccaaacacttccacagggtcccacctccaacactgggatgggagattttaacatgagatttggaagggacaaacatccaaactatatcatgtacacatatatatacaaacacataaacacacatacaataattaattcaatgtat

SEQ ID NO: 334229 - DNA, 559 bp, Homo sapiens
aattataattcataagtgatatatgaaatgcatatattcataggaatataattacatattatatagccatatatgtatgcacatgtatgtatatgtactcatgtactgtattagtccattctgcattcctataaaggaatacctaaaactgggtaatttataagaaaagaggtttatttggctcacacttctgctaactgtacaagaagcatggtgccagcatctgcttcaggttgggacctcaggaagcttttcctcatgttccgcaggtgtgccacataagagagagaataagrgaaagaagtgaagaaatgccaggctcttcaatcagctatcttgtgaactaatagagcaaaactcactcattactgtggggaaggaaccaagctattcatgaggggtccacccacagacccaaacacttccacagggtcccacctccaacactgggatgggagattttaacatgagatttggaagggacaaacatccaaactatatcatgtacacatatatatacaaacacataaacacacatacaataattaattcaatgtat

SEQ ID NO: 334230 - DNA, 561 bp, Homo sapiens
atggccaatgataccccttgtctttttgttttgctttttttatttaaagggagaaataaaagtttgtttcctaaggaagtgtagaatgtggaataagaagctaatttagattcttgacatgctttaaaataagcttcctacaaaagaagctgcagaatactctagccagaaaccactggtgaaaggcttttagctagacagagcagagttgaagttcaactctgccacttcttagttgtgtgagcttgggctgcttctccatctgtaaaatgggatggtgaccactaggttccctaccactattcccatttatagaattatggccactgctgtatttgttagcaaattgggttcttaggaatatstgtgccagaacacttaagatatcttatcttatacaggtcattagctgtctcaaaatgcttcttatattcttaggcatttagagaaactagttaaaacttctacttttctgcattaagaaaaaggccttaaggttataggctcttttaatttttcaagagcaataaaaagtacaactatattattctgataaagaat

SEQ ID NO: 334231 - DNA, 589 bp, Homo sapiens
tgtatttgttagcaaattgggttcttaggaatatctgtgccagaacacttaagatatcttatcttatacaggtcattagctgtctcaaaatgcttcttatattcttaggcatttagagaaactagttaaaacttctacttttctgcattaagaaaaaggccttaaggttataggctcttttaatttttcaagagcaataaaaagtacaactatattattctgataaagaatgatccaggttcaaactctgggaaatttaagagggaagggtgactttataaaaagatttgcatctgggaagtcaagacaagcatttgaagacagattatatagatgtaaccctgcatgcctgcccacccaatttattttacctaatgtattttatcttaattgccagaaaaatacaaaatcatgttttgacctctatcgtcttagcgtctagctttaacattagagccagaagctcttttaaaaatattaagtcagatcatgttactcttctgatgaaaactctccaaggagtcccatcctacttcamataaaaagtcaaaaccttcacagtgagctaccaagttcaatgtgacccctt

SEQ ID NO: 334232 - DNA, 600 bp, Homo sapiens
cctgtctataaatctcccagccatgtcttcagaaaccttaattacggggcctcattacccttcacacctctaggcacgggggaccctcctgggctggggcggctgctgacactgcggctggcctgccatggacagkctgaaccccttcaggaagatgtgcctagcgggggtgtccaagggacactattcaggaccacgtggctccgaggaacgagcagaggctcagcctctaggcaagggcaagggggtgaaagggactttggaacaaggggaacataagctgggtttacattctagttttgccagtccttctggactctgatgggcaccttccctctctgaacctcagtttcctcatctgtacaatgaggagagggctgtggtgaagattacgtgagcaaggtctgtctagtgttgagcacagtgcctggcatgtgctgtgtgagtaacatctgtccctttcatctcttctcggtcactgtctgaagctaccaagaaagaaaagcggcccctggtggccaggagctggcggccacagctggaccctggtgtcattcacaacaccactctctgaccactctgtaaagtgtgtgaacacag

SEQ ID NO: 334233 - DNA, 600 bp, Homo sapiens
cctgtctataaatctcccagccatgtcttcagaaaccttaattacggggcctcattacccttcacacctctaggcacgggggaccctcctgggctggggcggctgctgacactgcggctggcctgccatggacaggctgaaccccttcaggaagatgtgcctagcgggggtgtccaagggacacwattcaggaccacgtggctccgaggaacgagcagaggctcagcctctaggcaagggcaagggggtgaaagggactttggaacaaggggaacataagctgggtttacattctagttttgccagtccttctggactctgatgggcaccttccctctctgaacctcagtttcctcatctgtacaatgaggagagggctgtggtgaagattacgtgagcaaggtctgtctagtgttgagcacagtgcctggcatgtgctgtgtgagtaacatctgtccctttcatctcttctcggtcactgtctgaagctaccaagaaagaaaagcggcccctggtggccaggagctggcggccacagctggaccctggtgtcattcacaacaccactctctgaccactctgtaaagtgtgtgaacacag

SEQ ID NO: 334234 - DNA, 560 bp, Homo sapiens
tcactgccccggcccttcccacctggggagagacactcactgtgtcatgggacatctcaggcaccagaggttcctcctctgcttctcgtggagtggacgtgctcaagtccattgtggagctcactgtgtccttggaccaggactcttggatggttctcagcttcttatccaggatcttggggtccaaggtaggaagagccttgctgttgtttggtgtcaagaagttttctggtctctgagaagagaaggtgcagagaaacttcaggacaggccccttctctgtgcccatctaccataagcacaccrtctacaccccaagcctctcctcctcatggctcaggaggccctgcatggctggcccgtgcacacctcctaccatctgccccttgctcaccgggtcccaaatacatggcccttgctgttcctccaacaagccaagctcgctcctgcctcagggcctttgcatttgctgttctcttcctggaggtcctcagggatccttacgcagctgtctccttcttatcattcaagtctcagcccagatgtgatctgctcagagg

SEQ ID NO: 334235 - DNA, 574 bp, Homo sapiens
cgctggctttgggctctgcccgcctgtatcccgctcattaggtatctaacaaagtgagtcccaagaaatctgcttccaatcgctagtaattcaggaggcctgatgcaattttctccctgataagggtgtctcgcccactggcaagcgccataatgagccctgtgcagcagttccccgatcagtcactgctttgtcatttcctgtggctgcagttgtaggttcttatctcttcagctgtaggcgaagctcagacaacaggcccctccaagagggcttgctgcctcccctgcatacagcgagcctcatttatggcatcctgcgtgctcttgcagctgcagtggggtttgaagctccgggtctgtctcccagccaagaagggccccagtgttaatccttggtggggccatgattcatttgccagaagtggtrttagagggttaatcccaaagcacattttgaggccagaggaggggtgccactgataagaatttttaaaaattctgttggggattttagtatgaaagtcctgcctgtggctcagtggtttgactgtgggctcactcttgttaccctg

SEQ ID NO: 334236 - DNA, 542 bp, Homo sapiens
aaggtggacattgcagcacttcaagtgtcttggccacctccacagatgacctggagcttggggttgggggtacagatgggkctgtgagtgtgttgcatgataaaatcagggtccagaatgatctcaagcttagaagatgggctgagataaaaaaggtgaaataccacaggggagagaaaccctgtctaagttcagtatagaacagcagggaggcaagatgcagacatgctgcttactgatgtgccagagttggactctggctctaaacagaccctcactgctttgataaatactaaaatagaaccaaagctaggcttcagctgcaccaaaggggagaatgtattcagagagagggagtgatgttcctactctacctctaatgctgattgggccccacagttttgggggatactttaacaggaatgttgtcaagaggagacaatcagcaggacaagaatcagaaaccaagtgctacaaagaggaagaggaatgagagtgggttcaggctggagatgccataaatagtttgcaaatgtcagtag

SEQ ID NO: 334237 - DNA, 585 bp, Homo sapiens
aaaccactgcactccagcctggatgacacaatgagatcccatctcaaaataaaaaaaaatttatgaacaatttcgtagaaaacagtatccactacacttaaatacactgatctgtccccatgtaggacaaatgtctcactgcccctttagcctgtatgggactcacggtggcaggtccctgctctatttgtcactgtatctccagttcctggcacaagtcctgattcatcaaggatgctcagtaaggtgggactcagtgagcaaaccagtcagtgagaactttgccagatctttaattattcattaggatcttcagcatggccatttccctgaaggctggcagagcaattcatcatcatcatcatcatcatcaccatcatttgttttagggaggcaggaaaatgayggggattcacctagaggccctgctaggaggcacagggcaagcctggcctcagcccctcacccccagcctctgccctctccacagctccccaccacctccctccagtccctgggagatggcccaggactcacttcaacaggactcctatgggtctctggtaatactggtgataggcgacc

SEQ ID NO: 334238 - DNA, 617 bp, Homo sapiens
actacagggatatgttgcaagattcagatggaagtgactcagaaaacagaaagataattagggtctggaggcagggaacataaggccaattcacacttgagctgtgacaggaaatatcctctccatagggcgtatgctgtaaatgactttgtaactttacttcatcctctccatttacataaggcrtatggaattaaccaatggaatgctctaaggggtatttaaactcccaaaaattctgttaacggggcccctgagctcctacactcaggcccctcccacaccgtggtgtgcattttcatgttcaatacatcccttcatcccttccgtgctttgtttgtgcgttttgtcaaattctttgttcaagacaccaagaacctggacaccctccaccggtaacatgtattttggccagccagccaggaggaagaggtaagcccaaagtttgggattcgtttttctccctttcctttctgctccatacaggagctctctctttctcttttctgttccaacttgggacccttgctgggccccacctaaacacggagacaactgcaggtttctggccgtggccagtgaaactaaggggtttccacgtggagaagcagcctgac

SEQ ID NO: 334239 - DNA, 440 bp, Homo sapiens
ctccttggtctgcctccacccagcaagggtccctggctccctgctctgggcctccattcatttctctgtccatcttggtggcctgaggcatcttgccacaaaccccctccagcttaggcccttcactggcctgcaggatggaatccaagctcctgagattgccacacccctacttactccccaaccagcactctgccctccaggaagtcaccgrctttgttcctgatcatacactctctctcctccctgcctttgccacagtgtctcctctgcccaagagccctctcccctaccccgggtaacacctgctcaccctcctagagtgagctcaggctatcaccacctccaggaaggcttcctagacctggggttaggaaaagagactcctgtaagctctcctctgccacagatgtcactgccatctccttggtgtagatggg

SEQ ID NO: 334240 - DNA, 600 bp, Homo sapiens
ggagtcagtccttctagaggaggctaagcctagggacaagacagggaagtggctggtgcctgaccctcccccagcagactggaaagtggggagggggctggaggggagggattggagcaggggagtcagcaggaccacaacaggaatctgggccatggtgtccttcctgttctcaaggctgggctgtgacgcagagcatggccctgggggttggggaggcccagctccaggctgtagggagtggtcagggctgctcatctgcaggcagtgtcctcccagaccagctgtgctgctcaaggtcactgctgtgccgggtgggggaagccgaggagggaaagcaggtccttcagtttcccacagatgtagagggaagagagcatacagactgaggggtaagccagggccgagatccctctccatgccctgggggagccctctctctcagagagcagccaggcttggtgggggagggggataggcacctgtggaggcctayaggactagtctccgaggagtggagtccagcagggaccgtctgactgagacagggacgcggcctcaccagaagccatgctctccctccatctccttcctcgctct

SEQ ID NO: 334241 - DNA, 311 bp, Homo sapiens
gatgtggagagaacaaacatccagaccatatcagrtacttattttaatgttgatggttccaaattatattcaattttcttcagcaaaggaaatgatgtaaaattgttatgctaaacaaattgtgcaaatctgatttaaagtatgaaacaacatgttttaaattgttaaattcaattgtaaacattgaatgcatcatatatagatgatattttctttggtgctgatatttaagttacaagaaataatttcagagataggtgagaaaaattcatagtagtaatagtaatatcttggctaaaaatgtattatct

SEQ ID NO: 334242 - DNA, 608 bp, Homo sapiens
agcctggccaacgtggagaaaccccgtctctaataaaaatacaaaaaaagttagccaagtgtggtggcacacatctgtaattcccgaagcaagaaaatcrcttgaggtgggaggtggaggttgcagtgagccgagatcgcaccactgcactccagcctgggagacagaatgagactctgtctcaaaaacaaacaaaataaaaaacaacaaaaacggtgcggaggggctcttcttttcccctcagtctaaatatccagtcaccaaattctatctcatctctctctagtatttccctcatgttggaccaccatggcctaatttccaacactggaattaccgccacagcttcccacttgaccttctgcttgcagtgttgactcctctgtcccttctttgcaggaaaaaaaacaattttccaaatatgcaaatctggtcatatcacttttctgctttgtttttccgtatgtcgctgaagcactccgggtgaaggctgagttcttcagagaggcctgaggaacactttagcttaagcaatcaacaccacctctcaacccacgctttcatgtggtcacgtgcaattacattactcctgaaaaagcatgctctct

SEQ ID NO: 334243 - DNA, 608 bp, Homo sapiens
agcctggccaacgtggagaaaccccgtctctaataaaaatacaaaaaaagttagccaagtgtggtggcacacatctgtaattcccgaagcaagaaaatcgcttgaggtgggaggtggaggttgcagtgagccgagatcgcaccactgcactccagcctgggagacagaatgagactctgtctcaaaaacaaacaaaataaaaaacaacaaaaacggtgcggaggggctcttcttttcccctcagtctaaatatccagtcaccaaattctatctcatctctctctagtatttccctcatgttggaccaccatggcctaatttccaacactggaattaccgccacagcttcccacttgaccttctgcttgcagtgttgactcctctgtcccttctttgcaggaaaaaaaacaattttccaaatatgcaaatctggtcatatcacttttctgctttgtttttccgtatgtcgctgaagcactccgggtgaaggctgagttcttcagagaggcctgaggaacactttagcttaagcaatcaacaccacctctcaacccaygctttcatgtggtcacgtgcaattacattactcctgaaaaagcatgctctct

SEQ ID NO: 334244 - DNA, 596 bp, Homo sapiens
tttcattcattgttgtggcttcagttgttaaataggattttacattgtwagaagatgtggtctgtggaatcagatgtgttagtcactggtatggaggtggtggtagaaatcatggatgtggatggtattgctcagctaagaaatatcgagaaggacgaagacagaccatctgagtaggtttgctggcaagtgaatagatgggctgttgtttgaggagccagaaataaatactgaaatggctggccagaagagcacagtgaagtatcaggtagtggggtaagggggtcttgaaaaccaagaggaagagacatattctgttaccttgatgaggtaatagtatacctcatcaagaagattttgcagtcagaaggcataattgacaaccctatcaagtacagtttttcctgcagtggtaaatgaaaactcaatgttcagagaagaaaataggggataaaaagtgaacaactggaacccataagtgtagcataatctttcggaaaccttttctgtgaaaggaatcttgtgatggaaggattaagaaagaggagatggtgaatttgagggaaaatgcagtcaaagtggaggtggttaaaatt

SEQ ID NO: 334245 - DNA, 596 bp, Homo sapiens
tttcattcattgttgtggcttcagttgttaaataggattttacattgttagaagatgtggtctgtggaatcagatgtgttagtcactggtatggaggtggtggtagaaatcatggatgtggatggtattgctcagctaagaaatatcgagaaggacgaagacagaccatctgagtaggtttgctggcaagtgaatagatgggctgttgtttgaggagccagaaataaatactgaaatggctggccagaagagcayagtgaagtatcaggtagtggggtaagggggtcttgaaaaccaagaggaagagacatattctgttaccttgatgaggtaatagtatacctcatcaagaagattttgcagtcagaaggcataattgacaaccctatcaagtacagtttttcctgcagtggtaaatgaaaactcaatgttcagagaagaaaataggggataaaaagtgaacaactggaacccataagtgtagcataatctttcggaaaccttttctgtgaaaggaatcttgtgatggaaggattaagaaagaggagatggtgaatttgagggaaaatgcagtcaaagtggaggtggttaaaatt

SEQ ID NO: 334246 - DNA, 596 bp, Homo sapiens
actgggacatctggattgattgacatttgcattgatggtgcaaaaacaatggtggagagaattgctggtgtcttagcaatgaatcaggactgtggcaccaaaccttagcagctagtgttcactgcataattcactgccatgcaattgcacagcaggaaaataaaaaagaatttkacttaacatcatcatgatgaagcattaaaaacaattatttagattctgaagtctagagtaacagttttaatattctgtaagaggaaatgttaagtacagataaggcacttttgctgcagactgaattgtttcctgtttttcttaagaacaagcaccttgtagttgtttgaattgtgtgagttactcatttttctcatggagcatcatttctgcttgaaaagcatattacagttgtttagatttggatgtttggcagatattttcttgaaaatgaacaaaatgaatctgttgatttttaagaaaaacaaccgacaatatttgttgccaatgataaaattcaagtttcaagggaaggagatgtatttgctagagtgcacttgacagcttcccaacgctgagagaatttttaaatgagattgttg

SEQ ID NO: 334247 - DNA, 583 bp, Homo sapiens
tggctttgaaatccagaaatagcctcattttctctttcttttgttgaattcattttaaaattacatatatactatctttgctaacccctacctcttctccaccatctcttgttctgcaaccttcaaaagtttcccaatgcttcttgtagcttcagtcagtttggactacagtygccaactgtcaacaaaataaattcctgtttattctaagtatctttgacgtttttcaggccctacctttctgtatcattgtgtatgtaatttccatctgtcccattactgacattgtgacatatgtgttttccaatctgatattctagattaagtaaattattatacattagaataaacttcttccacctcagtcttatatcacaattttactaagtattccagtcatgatttcctatatttttccttaaaaatgactctttattaacaattaacaggcatcatgtatgagtagactttctttaaaatcaattaacccaatgaactgcattactgtgagggagagagtggtcaggtccatttatttttctgtcataagtattccaagaatgagatggatgtgatgaggttt

SEQ ID NO: 334248 - DNA, 594 bp, Homo sapiens
atgggcttgggaaatattaattaagtgcatagagattgataattaactcaagacctgtttattttgttgttgaatctattttacaatttcttggctgggtcctttacgctagagtgcaatagatagaaatgaatccatggagggaaaagggcacagagaaaaatggcaccgaagctagctcgcctcagtgcaattagacaaaaccctaactcacttttcaaagcatatttatttagaattcaaagaattttaaaaatgttgtttatttaacttcccttcagagagggaatctgacatgactcattttcatcagagatacacaaacttcataagatgctattatttatttcactgacaaaacatcagtaaattaattgccgccactttaatcaaggtaataggaaccagggggtcatatcttgtaatttattatgatattctgaggttgaggaaaacccattcatggaatttttttaaagctgtaaaatttgaggaagacccraattaaattcctaagggaaaaatacagaaaaaaatgagacagaagcttaagtgaatattaaagtaatgccaaccgtctaagttacttaacac

SEQ ID NO: 334249 - DNA, 579 bp, Homo sapiens
tgtttataacaacgcaaacatccgcttgacctaatatttctcattgtaagttaataaactatctawtaagagtcatttagtgtgtactagctgagtctgataaactgtggaacactgataagatggggttttggaatccctaatactatccatggtaaattaccccttagactatggtaattcaacaagagataatgagcataggccctaacaacatgatctagtcagttccttccttatgggacaccaaatgaaactaatctggctgtcagcattattaaaattacaggacagtctcacccatggagaagttcacctgcaactgtgcaggcttcattaatagcaacttctgttcacacaggctgagaagtcagtggtgacccctgggtcatgggagggggtgccctgatcaccagcacatgtaacagccttggcagctcacaatgaaaaacacaggtttataatattggaatttaaaagattcctttgtgtcattcagacaaatgtgatacacacacacacacacacacacacacacatatatacacacacacaaacaatggaatacagccatccctc

SEQ ID NO: 334250 - DNA, 579 bp, Homo sapiens
tgtttataacaacgcaaacatccgcttgacctaatatttctcattgtaagttaataaactatctattaagagtcatttagtgtgtactagctgagtctgataaactgtggaacactgataagatggggttttggaatccctaatactayccatggtaaattaccccttagactatggtaattcaacaagagataatgagcataggccctaacaacatgatctagtcagttccttccttatgggacaccaaatgaaactaatctggctgtcagcattattaaaattacaggacagtctcacccatggagaagttcacctgcaactgtgcaggcttcattaatagcaacttctgttcacacaggctgagaagtcagtggtgacccctgggtcatgggagggggtgccctgatcaccagcacatgtaacagccttggcagctcacaatgaaaaacacaggtttataatattggaatttaaaagattcctttgtgtcattcagacaaatgtgatacacacacacacacacacacacacacacatatatacacacacacaaacaatggaatacagccatccctc

SEQ ID NO: 334251 - DNA, 623 bp, Homo sapiens
ccttttgatgactcaatgtttttaagacagcctttagctatgatgtcttactgtccctcaacagttgatccagtggctcccactgactacagtaccatgcacactcttgttctggcctccaaggcctccaaaatttggatccaatctgtctttccagacttatcctccctctaattcttacaaatatcctctcctcaggccaggtgtggtggctcatgtctgtaatcccaacactttgggaggccaaggcaggaggatcatttgaggccagtggtttgagaccagcctggacagcatagtgaaactctgtttctatacaaattaattagcaggcrtagtggcatgcacctgtagtcccagctacttaggaggctgaagtaggaggatcacttgagcccaggaatttgaggctgcagtgagctatgattgtgccactgcactctagccttggtgacagaacgagaccctgtctcaaaaaaaaaaaaaaaaaatcctctctagatactttgtctctactcttcctttaacctcaaatgcccctttccctactgtctacaatttatttctcacctatcctacgtctagtcccaccttttctttaaacctgttttaagaaagcccag

SEQ ID NO: 334252 - DNA, 623 bp, Homo sapiens
ccttttgatgactcaatgtttttaagacagcctttagctatgatgtcttactgtccctcaacagttgatccagtggctcccactgactacagtaccatgcacactcttgttctggcctccaaggcctccaaaatttggatccaatctgtctttccagacttatcctccctctaattcttacaaatatcctctcctcaggccaggtgtggtggctcatgtctgtaatcccaacactttgggaggccaaggcaggaggatcatttgaggccagtggtttgagaccagcctggacagcatagtgaaactctgtttctatacaaattaattagcaggcatagtggcatgcacmtgtagtcccagctacttaggaggctgaagtaggaggatcacttgagcccaggaatttgaggctgcagtgagctatgattgtgccactgcactctagccttggtgacagaacgagaccctgtctcaaaaaaaaaaaaaaaaaatcctctctagatactttgtctctactcttcctttaacctcaaatgcccctttccctactgtctacaatttatttctcacctatcctacgtctagtcccaccttttctttaaacctgttttaagaaagcccag

SEQ ID NO: 334253 - DNA, 457 bp, Homo sapiens
ccagaaatagacggaggtcatttgaaaagaaaactggaaagtgagcagatgatcaaacaggataacgctatgcataaagtgtggcataactccaaaggttagagattatttttcttctggagcttataatctagttcagaaagcaatttcaaagagcttttcaaactctctcaatcagctgtccaggggagmaattatacttaattttaccatgaccctttccccatcccctctgctaggtatgtaaaacaggtgggatttcacacatatttagtgaataaatgatcaaatggacaaattcatccccatttcctctttcctggttcctggaagaaaattattctcttgggtcatcccatattgcaaggagacctttttcttctatgagcgctcaccatgagcttctctccagaatatttttcagaactggggtccaaagactcctatggacatagtc

SEQ ID NO: 334254 - DNA, 527 bp, Homo sapiens
  misc_feature (1)...(527): n = A,T,C or G
tcccagtttgtctcaaacttgtttgacctcagaatatctagtaacagctcaaggaagcgatgytcccaagaaatgcactttaggaagggctcatctaagcttcatttccaaaaccgtaattagtgataaattattctgatcttgtgggtaaccctacctgtgggaaacccagctgtgataaccagagttccaccattcaatggtaaccactccccttcactttgggtaagagaaaaacacccaccacagagcgccgctctataagangaaangngngttggtggggggaatgacaagtaaataaggaactttgagggcgttggtctaacacaaaaaaattacccatgtgcctctcaacatcttccagtttcagagagcagaagggggaaagacgtcctgaatgaaagcaaataattggacaggttacacagccaagctaggcaaggagtttgtgcccttcaaatttcactattgcaccaacctgctgccacccatgtcaatctcaaaacctgcagctccaacgctta

SEQ ID NO: 334255 - DNA, 527 bp, Homo sapiens
  misc_feature (1)...(527): n = A,T,C or G
tcccagtttgtctcaaacttgtttgacctcagaatatctagtaacagctcaaggaagcgatgctcccaagaaatgcactttaggaagggctcatctaagcttcatttccaaaaccgtaattagtgataaattattctgatcttgtgggtaaccctacctgtgggaaacccagctgtgataaccagagttccaccattcaatggtaaccactccccttcactttgggtaagagaaaaacacccaccacagagcgccgctctataagangaaangngngttggtggggggaatgacaagtaaataaggaactttgagggcgttggtctaacacaaaaaaattacccatgtgcctctcaacatcttccagtttcagagagcagaagggggaaagacgtcctgaatgaaagcaaataattggacaggttacacagccaagctaggcaaggagtttgtgyccttcaaatttcactattgcaccaacctgctgccacccatgtcaatctcaaaacctgcagctccaacgctta

SEQ ID NO: 334256 - DNA, 634 bp, Homo sapiens
ctctgccaggcaaagataaattgccatttgcacaacgatcttgcgcttaaaagtagctcggtccagagagctttggaaaatttattatgacagggaaaagtggaaacttaaagggggccaagatatttagtctgckgataagatggcttaggagcgacaataattatctccaagaattttaagggtcattataaggtcattaggagggcacagaccagctgggcttcctcaactcggacaacgggaactgacttaaattacaccaagaagaattggaatcagaatcacagaaagtcatcaatgtcataatgacataggcccccacgacttgaaggcagctctgtgcaccagcagcgtcacctgggagcatgttggaaaggtggactctcaggccctacctcagatctgccaaatcagaactctcactttaacacgtgcccctgtgagttgctggcatattttaagtctaagaagcactggtctaacctaacccctaaacaaaggactagagaagtcaaggaacctgcccaggtcctggctgatagtccaggcaaggagtacagtcacagtaagcagcaagcagtccccaaggaacactccaatggttcccacctttcctgactggcagagccac

SEQ ID NO: 334257 - DNA, 607 bp, Homo sapiens
cagtgagccgagattgtgctactgtgctccagcctgggcaacagagtaagactctatttcaaaaaaataaataaataaaatttaaaaataaaataaaattacaagaagacatttaatatagataaatattttaaagtcttcaaagccagtyaaaaaaaaaataaactacaagctagagacctgatttggcaatagtttatggggggaaattttttgagggaggatcttataattgatcaaaagcatgggactgttagaaaagcttacacgggcagtgttcaaatctcaaacaatcctatgctcctaatctaaaccaccttcctaacaactcaagtaggcttctgttttgttttgtttttatttaactatttatttatttttcaataatcaggcagtctgtctgaactggaacaggttcagagagactccccaggcagacctctgtattccatgatgatggggctaccagctagtagttccgttaggcgagcagcagcatccttactcagcagtacttgtgaaatcatgggaatattttattgcaaccattttcaaattctgtttcagagcatcttaagctccccaggaacctagtccaggggagaag

SEQ ID NO: 334258 - DNA, 552 bp, Homo sapiens
ggagggacccagtgggagatgattgactcatgggggtgggtctttcccatgctgttctcgtgatagtgaatgggtctcacaagatccgatggttttaaaaacaggagttactctgcccaagctctctctttgcctgctgccaacgatgtgacttgctcttgcctttcgccatgattgtgaggcctccccagccatgtggaactctaagtccaataaacctctttcttttgtaaattgcccagtctctgttatgtatttatcagcagcatgaaaatggactaatacagtggtatatacatacaatggaaacttattcagccttaaaaaggarcaaaatctatcacatgaaagaacctcgaggacattatgctaagtgaaataggccagacacaaaagggcaaatacacttaatgattccacatacatgagatacctagagtggtcaaatttatagagacagcagaatggtggatgccaggggcttgggtgacaggggaatggggagttagtgcttagtgggtacagagtttcagtttgggatgatgaaaaagt

SEQ ID NO: 334259 - DNA, 588 bp, Homo sapiens
acaaagattctgacaaagctttatatctatttatgagtggttaattttaccattctgattgatagcagccccaaagaaatactaatgcaaatcacaatagccagcactttcaattacatcccatgtgattgaaaagatagggatgcatatatgctatcccataggtgcatagctatatatgcagatacatgacttttgttgtcttgctatcctggaaatctacagcagaatccatatggaaatgataaccctctgtcattctatatctgattcactgagaacacatctgcccctcctagccctccaagattttttyctttcattataaaccataaatcctgtccccaagtttgtagagctggaaatcatttgaatttgcgggctggatttgttagaaatgttttttgcagtaaatgtgaaatgagatgaatgttaaattgtgcagtgtttttttcttcttctgatttaatggtgactattatgctcaggttttgctttctttcattagatgagtcattttaaagaagaatgacctgtcctgagattgtcttctgaagttctgtatttgaccaagcacagctggctggt

SEQ ID NO: 334260 - DNA, 632 bp, Homo sapiens
tgtttctggaagagactagcattggaatcagtagactaagtgcagaagattcaccctcattaatgtgggagggcatcatccaatcccttgggggcacagatagaacaaaaaggtagagaaagagtgattctctcccatcaacagtccctccaccccacctactgttgtccagttcctaggcctttggcctgagactgagagtgacaccatcagctcccctagttcaggcccttggactaaattacaccacgggctttcctggttctgccatcttgcagacagcagatcatggtacttcacagyctccatgattgtgtgacccagttcccataataaacctcctctctctcaccctgtctctcctattgattcagtttctctgaagaactctgactaatacacttgcttagcccaaggatgtgcttttgtcttctgtgatggtttttgcagcaggtttactgtcttctcctctcttctctaccttcttctccataatgatgacagcagtagtcatagtgaggatgcccagataaagaacctgacctcacagttctgtattgcctcatctctcctgacccttttacttattctctactgaactacccctaacattgccactctcttgtccttgt

SEQ ID NO: 334261 - DNA, 632 bp, Homo sapiens
tgtttctggaagagactagcattggaatcagtagactaagtgcagaagattcaccctcattaatgtgggagggcatcatccaatcccttgggggcacagatagaacaaaaaggtagagaaagagtgattctctcccatcaacagtccctccaccccacctactgttgtccagttcctaggcctttggcctgagactgagagtgacaccatcagctcccctagttcaggcccttggactaaattacaccacgggctttcctggttctgccatcttgcagacagcagatcatggtacttcacagtctccatgaytgtgtgacccagttcccataataaacctcctctctctcaccctgtctctcctattgattcagtttctctgaagaactctgactaatacacttgcttagcccaaggatgtgcttttgtcttctgtgatggtttttgcagcaggtttactgtcttctcctctcttctctaccttcttctccataatgatgacagcagtagtcatagtgaggatgcccagataaagaacctgacctcacagttctgtattgcctcatctctcctgacccttttacttattctctactgaactacccctaacattgccactctcttgtccttgt

SEQ ID NO: 334262 - DNA, 541 bp, Homo sapiens
ggacaacagaaagcctacaaattaattctcagaacaaaatttttcctggaattgaactcagctgggaatttatcatgtggaactttatgtaaagactgaagagtgacatagaaaaaaaaaatcttcgttgctggtgttacaaaagatggaaagataaaactccccgttactgccttcctctaccatcctgttatgtctaggggagtgaactgcacttctgtgaggactgggtgtcatctcagagtatggggccagggaaatcctatacaaaggagacaatggtaccttaagtgcaggaagagctgacacccatctctgtgaatgtagagagcaaggcgtccggggtgctcaaccataaagggaaggaggcttatcatagtatagcccagagaggggtgggctgagactgtggtctgagaaggggacaggtasggcatagcacgttggaagggccagcatccaggaatcctgacccccggggaagcaggcagggagttcacacagcattataggattccattcatatgggcaagtctacttc

SEQ ID NO: 334263 - DNA, 564 bp, Homo sapiens
ctagtctcagctacttgggaggctgaggtgggaggatcacctgtgcctcagaggtcaaggctgcagtgagccctgatcatgccaccgcactccagcctgggtgacaaggtgagagtctgtctcaaaaaaaaaaaaaaaaaaamcaatatctgttttcaaatcactataatatagttttccctcaaattttgaagaatttctaatctattatattttctgtaccttccaagcgagagcaatttaaaatctgaatcaaaaatgggttttcttcattcattatagaaaatagttaacaattgttattacacaaacctttttataaaaaatttttacatcaggcagccctgctgatccagaatatgttcagagtgcctcccttacataaacctttgatggtttcatagtagcagtgacagtgacaggaggcagtcaaatgcctaggcagataggggcgggtccccagtgaaaccccaccttcaagccaaagaccgtttaaagcctagatacaagtcctgggtaaatccacagaccggattgagaagctgtcttcctgtttggcatgct

SEQ ID NO: 334264 - DNA, 576 bp, Homo sapiens
tgcttgggtatcctatgtgattctgaaattattgaaaaatatgacaacaatcacccctcatttacccatggtaaaattttatatcttcttgacagggaggtcaatttcttctcactgttatttaatctgagttaggagaatgcaaaataattttcatatttggctaatcaaaacataaaagtagatatgggtgaatttgcttcattaaaagtcacctgattacttcacgattaatatttcaactcattactttctggggctgattacataagagagcatgctcttctaagtctccaaacaccttttctccagacagttctagaacagtgcagagtgtaaaaataaaggctacaatgaaccacaaatattggctaaatagggatcagaaagagaagaggggaaataggttatgataaacatatattttaaaaaccaytatttgacctatgctttccttaatgagttacatttagattcacattttattgctgacttgtaagaaatcaggtgttaggggcatggtcaaggagaacctggagggacgagggtgtggttccagtcaacaatgctggtgag

SEQ ID NO: 334265 - DNA, 481 bp, Homo sapiens
tctgaagccacatcccaagctgagctgtaccttggccccttttaaccatggctggagctggagtggctgggacacagagtgccatgtcctgaagcagcacagagcagcggggccctgtgctcagcccaggaaaccatttttccttcctaggcctctgggcctgtgatgggaggtgttgccatgaagatctctgaaatgccctggagacattttccccattgtcttggctattaacattcagctcctaaaaaaacaaaaatacaaagaagaaaaagaaagaggaagaaagaaagaaagaaagaaagmaagcaagcaagaaagaaagaaagaaagaaacattcagctcctcattacttatgcagatttctgcagccaacttgaattcctccctagaaaatagttttttcttttttactgcatggtcaggctgtaaattttccaaacttttatgctctgcttcccttttaaacataagtttcaa

SEQ ID NO: 334266 - DNA, 556 bp, Homo sapiens
tgtagcaagctgatgttatgggggccaagtatggcccatagacatattttctttggactttaaaatattaaaaatgtttgaattagttgwcagtattttaaaatcaggagatttcacatcccctagccaacttcactagtctaggtgactggtttggccccccttggcatattctttcagagttctgagatggccctaccaaaacttactctagctatttacatatagtgatctgttttagattatttcaatttttaaattgtcagaatgaacactataaggaatattatcatattttctgcatttctgaatgtttccttaagaaagatttcagaagtagattgatttcattgaggtttcaagtgtttttttttttttaattatactttctggacattcacctgacaacagccttctttccatttggccaatctgttcatactgtcagctaagttgggtctcagactgactgcatgggcattagccagaccaggccttctgcttgtctgggatggaggggctctcagcagccagcaagagagtgtgcccaggcctg

SEQ ID NO: 334267 - DNA, 556 bp, Homo sapiens
tgtagcaagctgatgttatgggggccaagtatggcccatagacatattttctttggactttaaaatattaaaaatgtttgaattagttgacagtattttaaaatcrggagatttcacatcccctagccaacttcactagtctaggtgactggtttggccccccttggcatattctttcagagttctgagatggccctaccaaaacttactctagctatttacatatagtgatctgttttagattatttcaatttttaaattgtcagaatgaacactataaggaatattatcatattttctgcatttctgaatgtttccttaagaaagatttcagaagtagattgatttcattgaggtttcaagtgtttttttttttttaattatactttctggacattcacctgacaacagccttctttccatttggccaatctgttcatactgtcagctaagttgggtctcagactgactgcatgggcattagccagaccaggccttctgcttgtctgggatggaggggctctcagcagccagcaagagagtgtgcccaggcctg

SEQ ID NO: 334268 - DNA, 556 bp, Homo sapiens
tgtagcaagctgatgttatgggggccaagtatggcccatagacatattttctttggactttaaaatattaaaaatgtttgaattagttgacagtattttaaaatcaggagatttcacatcccctagccaacttcactagtctaggtgactggtttggccccccttggcatattctttcagagttctgagatggccctaccaaaacttactctagctatttacatatagtgatctgttttagattatttcaatttttaaattgtcagaatgaacactataaggaatattatcatattttctgcatttctgaatgtttccttaagaaagatttcagaagtagattgatttcattgaggtttcaagtgtttttttttttttaattatactttctggacattcacctgacaacagccttctttccatttggccaatctgttcatactgtcagctaagttgggtctcagactgactgcatgggcattagccrgaccaggccttctgcttgtctgggatggaggggctctcagcagccagcaagagagtgtgcccaggcctg

SEQ ID NO: 334269 - DNA, 538 bp, Homo sapiens
tcttgatttgtaattcactcctttgctacttctagtatgaatgcaatgattacttatagggtgctatatagcctataaaccactctcataaacactagtgtttcattcaattatttcytcactcacttagtaaaagcatattagtccctgcaatgtattagtctctgttccaggagctggaatgtattaaccacagcgggtaagataggcacagcccctgggcccataaaagattcaagctcatttgttcctactcttccttacctccggtttttggaacctctccacccaagtttggcttgagccaccaggagccatacactgactgatatgaaaatagtggtctgactagtctcctggtgtagaatgtcaacccatccctgaagcgcagttttcagtgacaagaaaactgaagatggggttctcagcttctctggtgtgattaaggcactagaaaaaaaaaccagcactgaggagaagtaaaatctgctgatgttcagctacatgcacgagttgaaattgtcatttgcattaaaat

SEQ ID NO: 334270 - DNA, 556 bp, Homo sapiens
atgagaaatttcttcttatgaatgagcaaagaaagttgttccttcagatggaatctacttctggtaaagatgctgtgaacagtattgaaatgacaataaaggatttagactattagataaactcagttgataaagaagtgacaggatttgagaagattgactccaattttaagaggacttttagataaaatgttatcaactgcattacatatcacaggraactctttcgtgaaagaaaaaatcaattgatgcggccaaattcattgttgtcttatttttatgaaattgccacagttacctcaatcatcagcagccatcattctgattagtcagcagccatcaacttggaggcaagaccctccagaagcagaaagatgatgacttgctgaaagctcagaggattgtttgcattttttagcaataaagtattttaaaattaaggtatataccttttttagatgtaatgttattgcacttttaatagactacagtataatgtaagcataacttttatatacactaggaaaccaaaaaatatgtgacttgctttattggg

SEQ ID NO: 334271 - DNA, 597 bp, Homo sapiens
ggaggcactgtcaggaaccattgttcattcattcctcacacccaagtcctctgtctcagattcctgtgtttccacaaggacccatttgtctcagttctttacattcaattccaatctgaaattatggtttcaaaccattcaaaactgaagtgcctagaaattccctgtgagttcattcaggctgctgtaataagacaccttagactgggcaacttatagacaacagaaatttattgctcacagttctggaggctgggaaatccaagatcaaggtgccagcagattcagtgtctggtgagagcttgttccttatagatagtaccttcttctctgtcctcccatagctggagatgcaaayaagttccctcacctcttttataagggcactaatcccattagtgaagggtggagccctcatgaactaatcacctcccaaaggccccacctgttaatactattgcattggggattaggtatcaatacatgaaatttgggggaacataaacattcaggctacagcacccccttccattccttatccccttaaatccaccctccctgcaataaacctaagtgtactcattcctgattacaaga

SEQ ID NO: 334272 - DNA, 360 bp, Homo sapiens
agctccaacactgtcagtgatgtaagcaatttacaggtatgtctcttgtagtttacaatacctaatttcattctaccatgtagctgatgtcaagcayatgtgtgtttaatttttttaaaaacagagtcattgcaactctcttatgttgacagctccagtcatttacagtttataaaaattatatcacaaatttaaactaagtcatggaagcaatttacataataagacgaagagggagctaatttctgttcagagcagtgtagagagctcctcattcttaaatcgaagtcaatgaactgcagatacacacagcaacatggatgaacctcacaggggctatgctgattggaagaagccaga

SEQ ID NO: 334273 - DNA, 520 bp, Homo sapiens
gtcaaaagtcaccaagtagtacatataagatttatgcatttcactctgtaaatttcacctttaagaaagtaaacaaatattgagctctagttaatgatactcatactgaaatatctagagggaattgcactgatgtcttcaacttatgaaatacatttaaaggattagatggttaagctaggcatggtggctcacacctgyaatcccagcactttgggaggccaaagtaggcagatcactcgagcccaggagttcaagattagcctgggcaacgatatcttgtctctatgaaaattacaaagaaattagctgggcatggtggcacgtgcctatagttccagctactccggaggctgaggtgggaggatcatctgaacccagggagatcgagtacgcagtgaggtgtaatcacaccactgcacttcagcctgggtgacaaagtgagaccctgtctcaaaaaaaaaaaaaagatggttacagagatagacacataataaagcaaacataataaaatgttaac

SEQ ID NO: 334274 - DNA, 520 bp, Homo sapiens
gtcaaaagtcaccaagtagtacatataagatttatgcatttcactctgtaaatttcacctttaagaaagtaaacaaatattgagctctagttaatgatactcatactgaaatatctagagggaattgcactgatgtcttcaacttatgaaatacatttaaaggattagatggttaagctaggcatggtggctcacacctgcaatcccagcactttgggaggccaaagtaggcagatcactcgagcccaggagttcaagattagcctgggcaacgatatcttgtctctatgaaaattacaaagaaattagcygggcatggtggcacgtgcctatagttccagctactccggaggctgaggtgggaggatcatctgaacccagggagatcgagtacgcagtgaggtgtaatcacaccactgcacttcagcctgggtgacaaagtgagaccctgtctcaaaaaaaaaaaaaagatggttacagagatagacacataataaagcaaacataataaaatgttaac

SEQ ID NO: 334275 - DNA, 575 bp, Homo sapiens
attcttttttctctctgggctatagctggagttcactaatcctatcttctactgtatctagtcctctattaaacttgtccaataagttcctaatttcagatatgtcattatacatcttcagctctagaacgtctatttgattttttttttgtatactccatgtcttcatccattttgtttcatctttggctttatcttctctaacctattaatcaaatcattttaaagttcttatctgccarttacagtatctggatcacctgtggttctatttctttctctttaaaaaaaatcttgattacctgtaacatgtgcctgcctctttgcttgcccagtgatatagttttgctgtgccccgacccaaatctcatcttgaattgtagttcctataatccccactgtggtgggagggacctggtaggaggtaactgaatcatgggggcggttttcccccatgctattctcctgatagtaacttctcatgagatctgatggttttataaggggcttcccccttcgctcagctctcattcttctccttgctgctatcatgtaaaaaaggatatgtttgcttc

SEQ ID NO: 334276 - DNA, 573 bp, Homo sapiens
ttttaactgaatagaggcagttcatggcaaaagttatgaaacatctaaaaagccatatggagaagtggggccaacctgattttagccacagaaaaaagccattaccattccaagagtacaaggaaaraaagtagagagccagagctgttcgatgccggggctggtgttacccagtgaaaacagaaagtgtgacagacctttaaaacaataggaagagggaggagatacagtcactgccagagatactcactgaggcagagagactgggggaaacactatgacttctcctttccccttgctgtctagtttccccacaatgccttccactggctgaaccaagttgggagacagttgactcggaagtctacaaaatgcaactacagagaagtgcaaggggataaagggatccaatagcaatcaagacatggacaggaaagaaactagaaaatgaacagagtaaacccaaagaatgtatagggtggcaataaggaaaaaaaacagtaattaatgaaacagaaaatcacagcaagaagaaataaccaacaaaaccaaataagttcaattctaaagtta

SEQ ID NO: 334277 - DNA, 573 bp, Homo sapiens
ttttaactgaatagaggcagttcatggcaaaagttatgaaacatctaaaaagccatatggagaagtggggccaacctgattttagccacagaaaaaagccattaccattccaagagtacaaggaaaaaaagtagagagccagagctgttygatgccggggctggtgttacccagtgaaaacagaaagtgtgacagacctttaaaacaataggaagagggaggagatacagtcactgccagagatactcactgaggcagagagactgggggaaacactatgacttctcctttccccttgctgtctagtttccccacaatgccttccactggctgaaccaagttgggagacagttgactcggaagtctacaaaatgcaactacagagaagtgcaaggggataaagggatccaatagcaatcaagacatggacaggaaagaaactagaaaatgaacagagtaaacccaaagaatgtatagggtggcaataaggaaaaaaaacagtaattaatgaaacagaaaatcacagcaagaagaaataaccaacaaaaccaaataagttcaattctaaagtta

SEQ ID NO: 334278 - DNA, 573 bp, Homo sapiens
ttttaactgaatagaggcagttcatggcaaaagttatgaaacatctaaaaagccatatggagaagtggggccaacctgattttagccacagaaaaaagccattaccattccaagagtacaaggaaaaaaagtagagagccagagctgttcgatgccggggctggtgttacccagtgaaaacagaaagtgtgacagacctttaaaacaataggaagagggaggagatacagtcactgccagagwtactcactgaggcagagagactgggggaaacactatgacttctcctttccccttgctgtctagtttccccacaatgccttccactggctgaaccaagttgggagacagttgactcggaagtctacaaaatgcaactacagagaagtgcaaggggataaagggatccaatagcaatcaagacatggacaggaaagaaactagaaaatgaacagagtaaacccaaagaatgtatagggtggcaataaggaaaaaaaacagtaattaatgaaacagaaaatcacagcaagaagaaataaccaacaaaaccaaataagttcaattctaaagtta

SEQ ID NO: 334279 - DNA, 606 bp, Homo sapiens
gactccaaaagtcacaaagcaaggtaatgcagagatgaagatggagtccaatgtttattataataaggtgggatccttactaccacacatctctgtcaaaatgcaaaacagattgaactgcatatcactgggcaacagcggagagcctgacggtaatgccagtcatatggctcccatattttataatgtccagaacagtttagaatctcacatcccaagtacactcatccttcagtggctcacagccttcctcatgccgctgccctctggacccacctgtttagcagcccatggcctgacgcccttgcttttcccactggactgaaatgaaactgctcagcagacagctgctcaccycagttccacctgctgggctgctcatcttttaaagtgatgagccttattcagagggaggaaggccagagaacaacataagcaataaggatgcctcatctggattataccaccatcctgccaaaattctctcgtctgctccaacagtactgccaaaggggaccagacataacccaaccattaattcccaaagcactgtgcatcttgatgttccttaaactttaatcaccatgttctttacagtagcagagt

SEQ ID NO: 334280 - DNA, 606 bp, Homo sapiens
ttcaaatttacttcctggatcacaaaaaacgtcatgtcagattaatcacattcctttctattaaaaggttactaggcagacagaagaggaaaatgtgaagcacatgatttacctggataccagcatggcatttgaacagggtctgtcataggaatcttgacaaaaagattgagaaaatatgagccaggtgcttggtaaaattatgtggctgaacagtacctaatgaagacattaaaatcaaccaagagggaggtgtgagtagtcygctgcaaggttctgttgtctgctctttcttgttcatcatttttattaacgacttgaagacatgaaaataatggtcatcattggaaattgaattttttgatgacataaagctggaggaagccctcaatatgctcgatggcagaagcaagactcaataaggtcgtgacagactaaagagacaggcttaatttaataaggtgtgatgtcacctagagaaatgttagctagatcctctccatggtaattacataagtaccagataaaagaaatggggcttggtacttttcaggtttaatagtaataataatagcagcttaagagtttccacacacaatgtgaaca

SEQ ID NO: 334281 - DNA, 567 bp, Homo sapiens
ggtcacttttgtatagacccagcttccctaattctgttcaatatcacattaattcattgctcttctgattaaagcttatggaagctgaagaaatgacagaaacatagcaaaataagcagggaatgaaattaagaactaattcaaattcaaatatttttcttctcttttcatgaatacccaaggagcagatgttaaaatttacaacaagatctgtggaagtaagacaccaacagagaaattgaagtgggcatcatcataaaccatgtccatcactttggagtgatgaacactgagaaggtcctcttgattctgaattaggaaaagagaaagcccagaccrcttctaattgataataataattttgaaaataatcaagttccagtaaaagtttctcatctgccagaaatactcctcttaagttaaggagagcctgttaccagcaaaataggtacagcacacttctcatatgtgtagtacttttacagggggaacaaagtggttcatgtatcaatagaatattaaagcccaagagatagctaggatggaagaaccaaaggcatggagcat

SEQ ID NO: 334282 - DNA, 594 bp, Homo sapiens
ccatccttatttcctctttaagaaacaaaatgattcataaagaactcacggttttgtttccaaatgtatgaggtttcttcctttttcttttcaaaggcatacaaatttattaatgtgagtatgggcatggaagtcatayagaatataaaaaactgaagttttttattctttgttttcatcaccatcattttatttaaaatctctaatttaattgcaaatatttaaagagaatgtggtttcaatgataatcagctctttgaaagtagtctagacattgtatttggctcagtgtatggtcaacatgttgaaatatattaaatgtttaggaacagggccgcacagcaggaggtgagtggctagggagcgagcattactgcctgaactctgtctcctgtcaggtcagctgtggtattggattctcacaggagcatgaaccctactatgaactgtacatgcaaaggatctaggttgtgcattccttatgagaatctaactaatgcctgatgatctgaggtggaacagtttcttcccgaaatcaacaccccccacctgcactctcacccatggaaaactgtcttccacgaaaccagtccc

SEQ ID NO: 334283 - DNA, 594 bp, Homo sapiens
ccatccttatttcctctttaagaaacaaaatgattcataaagaactcacggttttgtttccaaatgtatgaggtttcttcctttttcttttcaaaggcatacaaatttattaatgtgagtatgggcatggaagtcatatagaatataaaaaactgaagttttttattctttgttttcatcaccatcattttatttaaaatctctaatttaattgcaaatatttaaagagaatgtggtttcaatgataatcagctctttgaaagtagtctagacattgtatttggctcagtgtatggtcaacatgttgaaatatattaaatgtttaggaacagggccgcacagcaggaggtgagtggctagggagcgagcattactgcctgaactctgtctcctgtcaggtcagctgtggtattggattctcacaggagcrtgaaccctactatgaactgtacatgcaaaggatctaggttgtgcattccttatgagaatctaactaatgcctgatgatctgaggtggaacagtttcttcccgaaatcaacaccccccacctgcactctcacccatggaaaactgtcttccacgaaaccagtccc

SEQ ID NO: 334284 - DNA, 601 bp, Homo sapiens
aagtgctgcaacagccacaggcatctcatcatctggagagccactgcctgagactgcaataggccctccagcttgtcagkcagcctgtcctcagccttaagtaataagaacagtcacatttcattttgaatttggctagactagatggttcccattacagttaccagggggatgtttaaataataacatctgaaaagacagtagtaaaaagagcaataaaggtagccaagtcccaggcctccactctggggactgtctcccatgtaaatcctcctgcaaagctacggtgttagaaatgtccatgttcctggagcactggcctccaggaaaagtggaaattgggcagattattgtgaaaggtggaggaaatcagaatcattcccagtaagctcctcattctctagctgcccttttgtgcccacatgccattccaccccaatgtatcataacctccatatagacacctctacacacatatgcagtctgctctgattcctatccaaccccagcccccatgatttgcacctactgcattctgaccatagcatttcagaatctctagagatctataatcaatttcctaacatgctagagccatggg

SEQ ID NO: 334285 - DNA, 601 bp, Homo sapiens
aagtgctgcaacagccacaggcatctcatcatctggagagccactgcctgagactgcaataggccctccagcttgtcagtcagcctgtcctcagccttaagtaataagaacagtcacatttcattttgaatttggctagactagatggttcccattacagttaccagggggatgtttaaataataacatctgaaaagacagtagtaaaaagagcaataaaggtagccaagtcccaggcctccactctggggactgtctcccatgtaaatcctcctgcaaagctacggtgttagaaatgtccatgttcctggagcactggcctccaggaaaagtggaaattgggcagattattgtgaaaggtggaggaaatcagaatcattcccagtaagctcctcattctctagctgcccttttgtgcccacatrccattccaccccaatgtatcataacctccatatagacacctctacacacatatgcagtctgctctgattcctatccaaccccagcccccatgatttgcacctactgcattctgaccatagcatttcagaatctctagagatctataatcaatttcctaacatgctagagccatggg

SEQ ID NO: 334286 - DNA, 601 bp, Homo sapiens
aagtgctgcaacagccacaggcatctcatcatctggagagccactgcctgagactgcaataggccctccagcttgtcagtcagcctgtcctcagccttaagtaataagaacagtcacatttcattttgaatttggctagactagatggttcccattacagttaccagggggatgtttaaataataacatctgaaaagacagtagtaaaaagagcaataaaggtagccaagtcccaggcctccactctggggactgtctcccatgtaaatcctcctgcaaagctacggtgttagaaatgtccatgttcctggagcactggcctccaggaaaagtggaaattgggcagattattgtgaaaggtggaggaaatcagaatcattcccagtaagctcctcattctctagctgcccttttgtgcccacatgccattccaccccaatgtatcataacctccatatagacacctctacacacatatgcagtctgctctgattcctatccaaccccagcccccatgatttgcacctactgcattctgaccatagcatttcagaatctctagagatctataatcaatttmctaacatgctagagccatggg

SEQ ID NO: 334287 - DNA, 544 bp, Homo sapiens
ctttctgtttccaagaacatcccattgagagacactgacagcttgtcagggctaagcaaacagtcacaccctcgtctacctgcccattaggtgctctgccgattgtgagttttcatcagatctctctattcagtgggggcccattgtttatctcactctaatgcttctcaggtacaaaggagatggagggtttccctgaaatagcacttagttctaatctcaatgcatccaaawgtacatggtcacaaacagatggattcatttgtatgctgttttgcgttcacgcctatctggctacctatcatttcaatttgtaggaaacaacatgcctagttagcctagctaaagtttccccagcttttcaattattactcttattttctcttaaaggtgatgtagctattatttaaatctgagagccactacatcccagtgggtaatctggtgtctttttcctattcaaatattaatatacatacatctgtatataaaacaatgtcagtctgagatctatgacagaaaatggcaatgaactgattaccta

SEQ ID NO: 334288 - DNA, 572 bp, Homo sapiens
aatttcccacggcatgttggggttccaagcaagaaaagaaggaacatgataggaaacgttgaatgccatgtggtctctgaaaaatgtttaaaaagttcatctctgaaccttatgtcaccccctagatgtccctttctatgcttacccatctgtttttttcccastttgctcgtctctgtactttgttccataggactttacctttaattaactattaacattccctctgagatgggagtggctgacaagaactgaaggagttaccccttccagcaaacatgtttttctgctcagaagaggcctgtagatgggtatttcataacaatggaagttgaggcattgtgattagtagtaatgaagatatcctggggcagatgatccagcttggaggcctggcatctgtctctttccatgccactagctcactatgtgactttggataactcccatatcatctgtgggactcagccaatggtcgctttgaaattggtggaataagccctattcctcttctttttcccagttggctggcaaaggatccatgagactatgcaaagcactcaccagtgttc

SEQ ID NO: 334289 - DNA, 452 bp, Homo sapiens
tggtgcctcttcgccctcctataggaaacaatgaaacaaattttgaaaagatagtccctaaaccaaccccatcacccccactaatatttacacctgttcttttgtcaagtctcagagaagagccacaataccaataattttgtagaagcaaaattagagccgggacagtgtaggagacaagtggctggcccatgacgtggttggtgygctgctggaggatgaatgccaaattgctaaatgcagccatccctgccaactgaacgtctccttttctttataacaaatatgacaccatgcaaggtcctccctctccaaaagcctatcattagctttgttattatggttattatcaacaatgtggcaatttccttgcatcttttaggatctttcaattattccatgcttctttctcttcccctttttttaagtctccctgacaccctcaaattcct

SEQ ID NO: 334290 - DNA, 622 bp, Homo sapiens
tgcaccagaaagtttgatttgcctcggggaagtctactgctgcggattctgcaaacacacacacattttccttcaagaaataagtcacctctatgtctttctcaactataacagctttagaagttctaaaactttttcatttccgggaacctgcatgttttccaaatcccatccagggaaaaggcttagattctaaaggagggatagccaggacagtttagaaataataataataataataataataataataaayctctgcatgccaaaataggaagggatacttttattcttggatccagtctcctaagttggtagactggaaaagaaaagcaaaaagaggagaaatgactttgccaaagattgtacacagctgacagtggcagaggtgataatggagactcctgatccctgttcagcatgagtccaatcccatagggcacccactggctcattaaggagggccctagtccccaggaatgacattctgagactcttggagctaaccaagaagtcatggtctcttccagacaagctgcaggggctctcagaccactcatagccatatcacagcctccctgattcccatttctccatcctcccatctgccagttgagattcc

SEQ ID NO: 334291 - DNA, 576 bp, Homo sapiens
acatagtcccaccactacctcctgcaggaagcgttccatgattacttcagttcagtgatctttttgttctctttgttttgtgtatctatagcacacacagtcagaaccagtgctgttcaatagaactttgtatgataagagaaatattttatattaagctaatatggtagcccctaactagtgcaatgaaggaataacattttttatttcattttaactcaaataaccacatgtaactatgatagctttggaccataaaattcagcatttaattatactcattattttctgctatgccttcttttagtgcaataactcttttgtatattttataaagtttgtatattttgtaaataacaatgttgtttattgtcttgtttatcctctgacttgtccactgcggaaacacatccttgcttgtgctccayaggcagagtactcaagcttactctggggaaccactagattaatgtacttcggatacatctgaatgtatgtgctgtgacacccccaaatctcctcccctgtcttctacatcaccactcaataaacttgctttgtggatgtagtgccata

SEQ ID NO: 334292 - DNA, 601 bp, Homo sapiens
tgtgactatcagtgctagaatttttgcccagaccagtaaatgttaatggaattactgatgagaaaatattttacagttcttatttcttctcacttgtgatgctacccaacaatgggtgagggtctattatggcacacagagacacaggagaatatgtatcatgacaaattcaaagacagtgtgcctcaatggagttagtctgcagaaggacacaaggaagcctaaaattaatattctgaatattcaggtwgacatcaatatgtcacaagccataattttgagtggcctactgcactcattgctgtgactatttttgcttaattgtgattaataattgaaaatatttttcacaatgtgaaaatatactttgctgccaagggctcaaaatggtcacagaaaggactctgctagtcaaacttaaattacacttagtatatctcattttcatgaatttcactgaagccatgctttcctaggtatgagtttaaggataaagaacaggtggagagcagagtcactcctctggcttccagttatattcctagcagaaagtgggaaacaaaggatagtttctagtacaaatcaagctaaaaaaccagct

SEQ ID NO: 334293 - DNA, 598 bp, Homo sapiens
cctggagtgatacaaacagctgagagatggaaagaagtgatttgacttagaatgtgttttgagggtagaaactgcaaggacttgcagatggcctggatctgacagtgaaagaaaaggagaaaccaaacccttctggcaactgagtggatagctgtgtgttttattgaaattagaaaaactgggcaagggactccttccaatgaaggggattcaagaaaagctttgctttggctgccttaagtttgataaccctgatagtgaatcaagaggagatgaatgctgagtagacagccagacacatatgtgtccaaccaagagaagggggaggccagggccagaggtaaatatttggaaatttgggagtaattgtctataggtgagatttgaatttcattaagtgagatttaaggttgttctccattgctgttattagggggagaaaaaggaaayaagagagaggtcacgtagaagagcacagtgagagtgcatgtggctggaggcaacagcaaggcagtagctctctaacctctgtcaatgcccagcacaacttctccagtagtttccaatacagctgctcagtgtagatgagaagaagccc

SEQ ID NO: 334294 - DNA, 611 bp, Homo sapiens
gagcagataggggaatgtagaagcttgagaataccactgcttggcacaaggacaacaaagtgattttcctttagagttgcatgggatgtcctggattaggatgggtgtccgatgtcccaagtttcagtgatatctatgctagtaattggctttgtgaaatgtctagacattagtctaattttcccatcctttgatgaggtaagaggggtctcttctagaagtgatattctaaaataaaaatataatctttttattgacaaatatagtatagtaaagtagaaagagcacaggatttaaggtaatttattcattgattcaaaaaatgcttaataaatgttaaccatttgccaaacactgtgctaagtcgtgtggatagcagagaggatagaaaacatagaccttgcctacatggggctgttagtatagtgggacagaaagacagaaaacaagtcaatmaacattgcctattacatcaccctaaaccaacaccatatttatttcttacataggcagtgttgcatcgtttcatgtttataatggaaagttggatagtcaggggaagcctctcagagacgacatgtaagccaagctctgagaagagcagagggcag

SEQ ID NO: 334295 - DNA, 546 bp, Homo sapiens
accattttaatatctataagatttgtagtgatgtcccctctttcatttcggatattagtaatttgtgtcccctctcttttttcttaattagcctggccagaggcttattaactttattgatattttcaaagaaccagattttaaaaattgattttctctattgatttcctattttcagtttcattgatttctgttctagtttttattatttctttttttctgcttaccttggagttttttttttcttgtttcctgagatgggaggttagatgactgattctagatacttctttttaatatatacactcaatgctataaatttccttctaagtactgcttttgctgcatcccacaaatgttagatttgttaaattttcatttagttgaacatactttttagtttctcttgacatttattttttgactaatrtgttatttagatgtgtcttgtttaatctccgtgtattttgggactttctagttatctttctgttaattatttattgctcaatttaattgtgttctgagagccgacattgtatgatt

SEQ ID NO: 334296 - DNA, 544 bp, Homo sapiens
acatgcatttataccatttttagttgttcctcattcttggatattcttttcctttttttttttttactttttgttgtttttgcttttcagttttggcattttctgttgagatgttctcaagctcagagattcttcctcagctgtgttcagtctgctaaaaacacatcaaaggcatttttaaatttcaggtacagtgtttttgatccctagcatttctttttttttcttagaattttcaactttctgtttacattgctcatctgttttggcatgctgtctaccttatccatgaaatcttttagcacattaattaaatttgtttgaaatttctgcactggtcattgcaacatccctgttgtatcagactctgatactttctctgtgtcttctatgttttttccctttagtatgccttgtaatttttttcttcacagctggacatgatatactggtttgaaaggaatggctgtaaataagtctttagtaatgtgatggtaagctrtggaaggaggggaagctttttatcaacctgtgattagttctc

SEQ ID NO: 334297 - DNA, 594 bp, Homo sapiens
ctctacagctctatttttttctttgagtgctgtttctaagacctgaaatgccatgcagtgtctgataggtatatgactaaaaacaaataaatgaacaaagcaattggggattctagtttatacttctgtaataattatctgtgttaaattgaatgagtcacttaatttgagtttgtatcgatttctctaaagcaaggatactataatatgtaatatatgaacatgacttagttattatttgaaatctactgtgtatctctctgtctctccacttctctatcaagcaatcaatcwatctatctatctatctactacctacctcatatatattatgccatattatgagaaggcatttttaaattacatactggcattataattttatgttttttaattaatggtgacgagaggtatttccttggttaggaatttttaatccaaaagcttgaacatgaaatgctgcacaaatacccaggtcccaaaggtcttactaagtggttttgttcccaaagaaccaagagaatgacaatacatgagaggcagtagaatggagtggttgcagaacaagacaaacctaggttggagtccagaccg

SEQ ID NO: 334298 - DNA, 580 bp, Homo sapiens
caaaatatacagaataaatatgaagaaaatagtcatttttaaagattgactaatgattatttctaaacagtgaaattaagggcaacttttattctttgcttttgcatctccatacatactacaagtattacatatgcaataaaaacgaaagatttttaaaatctggatagatctaaataactagttagtaacacactgctaaaaagttacaaatgcctatctctacatatacacacctcccagggcctacccaaattgtaaaaggccttcaatgttagtccagggaacttaagatttcattttgtctaatgaagctatctatataaatgttaatttgaggcacagtggtggaaaggacagagsgattacagcctagctataaggcaaacaagtataaagctcttatgatagtactgtgaggagatattatgggacttaatcatgaatctagtagcaggtaagcaacaatgagctcaagaaaaaataaactggtagccctgagcagttcaactgaatgtggtggcctaaaaaagtgtcattaagagagatttatttcaaagtatacacacaagagaatggt

SEQ ID NO: 334299 - DNA, 599 bp, Homo sapiens
ctaactgaactcctgctacatttgtagcaacataagttctgtaggcatacatcagtcatgacaaaaacagtacatctgtatacagtggcaagtggatgcaccctgaaaaatctgtagttaataattctctgctaagaaacagtatttttatctaattctggaaactcrttaattgctaggaatctttaaaacaaagacaaagctaataaaatgtcaatatatagccaattaaatgttttcaatagttacagcacattattggcctgccattttcccccaatgttatagccccttcaaatatttctacagctagctttcatgaatctaagtgggtgttaatcattttaattaatggtttaaatataatggtttaataccttagtacaggttaaaagcttcattaattgtgttagttttgatgaaaaatgtaagttataatcttatttaaaaaacagacaaaccacagacttgcacttttatttgccctgggctgaaaatgtgccaaagtcccacttaaaattttttttttaatgcttgaagcttttctgaccatttgatcttgtgttggattgtgttttgtaataatctaagcaagattg

SEQ ID NO: 334300 - DNA, 469 bp, Homo sapiens
tactgtttttgcccaaagacttctggaagtgcaaaataacaaagttatttctggggagtaaggggatctctgtctcactaccgtgcccctctcaatccccatactatacacacatatgtgagttttggggttcttttcagttttaggcatcaraaattgtgtgtgtgtgtgtgtgtgtgtgtgtgtgtgtgaaaaaacgtaaaatgtcccaactttgtgctcttccttgtggatgctgtctctctcttggcatagcaccctccttagaaactttcacactgtgtgatgcctggtgctatgtgatttccaaaaatctggcatgagaattggtccttgtttgcgttttctgactgcagtggagctgttaataaagagattgatgataaagttgtcgaaaagagacagttgggcagaactgctccccatgagtgacagagggcatgatctgccttcacagccaagaaagttg

SEQ ID NO: 334301 - DNA, 534 bp, Homo sapiens
tttctggggagtaaggggatctctgtctcactaccgtgcccctctcaatccccatactatacacacatatgtgagttttggggttcttttcagttttaggcatcaaaaattgtgtgtgtgtgtgtgtgtgtgtgtgtgtgtgtgaaaaaacgtaaaatgtcccaactttgtgctcttccttgtggatgctgtctctctcttggcatagcaccctccttagaaactttcacactgtgtgatgcctggtgctatgtgatttccaraaatctggcatgagaattggtccttgtttgcgttttctgactgcagtggagctgttaataaagagattgatgataaagttgtcgaaaagagacagttgggcagaactgctccccatgagtgacagagggcatgatctgccttcacagccaagaaagttgcccccagctgagaaccgaccatgcctggacactgtgccaagactgttaggggaactttactgcactattaggctactacctctctctctgtcgctttggcttacttcacatt

SEQ ID NO: 334302 - DNA, 654 bp, Homo sapiens
tgcttcctagactttagactcacctggggagatgttacaaagatctttgcttgggcaccatccccagagattctctctaaattggacttggaggaggtgggggcatgttttagaaatgacaatatataaaatctttctaggtgattctaaattgaagaaaagtgtaaaggtataagaatcactgatataaacttctgcatatagaaattaggtaataggtatttccagttggtagatttctgatgatctgccwgttgttaatataaatagctttataatatttttattataaaaccggtcccaatagtaaaaagttaaatggttgataaagtttcataattgcttttcttgtaaaaaatagcttatatcataaagcccatacttacgagagtaggagttattgcttcatcatttgctttttataatataattaggttgcataatattattatagttatttgaactgtttgaaatctacttgacatcagatagttctgtaatatgatccaagtcctttgtctagtgcatgaataaaagattataccatgtcttgttcattcaaaataactcagcagttttgaagttttaacagtgcagtaagacatttgctaataaaaaatagtttgtctttgaagagaaataaccacaaacaag

SEQ ID NO: 334303 - DNA, 562 bp, Homo sapiens
ctctctagctttaaaagtaatagactttattttacagcagttttgctgtaccaaaaaattaagacgatagtaaggaaatttctgatgtgccttcccccctcccccagtttctccaattattaatcttaacatcttacattaatacggggcatttggaacaactaatgaacaaatattaatatataattatgaattaaatccatggtttattaaaattttcttattattttttacctaatgtcctttttactttttcaggattccatccacgatcccacatgacatttagttgccatgtctccttagggccttcctggctttgacactttgttttttttttttttcacgtccttgactaattttgaggagcactgttgagacatagtgcaggacaatcctctattaraatttggggctttttctcctgatgaaactagggttgtaggtttttgggaggaagatcacaaaggtaaagtgtcattttcatcgtatcactgccagggtccatatggtttgcctggctgcatctagcttctcaggtttcccacggaagttacccttg

SEQ ID NO: 334304 - DNA, 631 bp, Homo sapiens
tacagagttatttgacaatcttcaaaacagtagtttaattatagtgagaggtcaaatactttctgcagtgaatttaagagagagtggtaggaaaggaaatagaatcaataaaaatagataactcttttgaaaagktttcactggaagatggaggtgaaatgggtccaaataattctgattttgctttttttaaacaagatgaaataagacagcaagcgtgcatactaatggagtgatccagaagagtgggcatcattgatgacataaaagagagtagatagaattatgacagtaaggggattgcttgatgtacaagaggaggggctgacactacataagctcagaaattgctcagccgcattatgaggagggaagacactgtacattcctgtagatactaatgatactagttaatgtagaagtagtagaagtagaaagcaaactaaaaatgaaaatcagagaagaggtttggaattttgaggacagtgacatatctgacagtgatcaaggaaagagggccaaaaaagaaaatgaagccaagaaacagattcaaattataaggcagcatgggggcccacttgagctcatagttgtgaatttagtaaaactagtcatcatggttatacattgt

SEQ ID NO: 334305 - DNA, 445 bp, Homo sapiens
aaatatgcaggttagcaaacctggcaaactgaagaatatatgccggtaaaaagtgagtggcaggcactcagctccactaattgttgctgagcacacaaatgcaagttcaatattttccatcagtttttcaagaaaagagaaaagttgtgatttttttaatgctaaccttcttgactataaatgttaaaatcaaatctaattattttaaaattactaagcagcccaaacaaatcagttatacagtccaacgattttcaacttctgtgctatatcacagcaagatactatcttctgccatctgttttctcttctcaatcatctccattccttcagtaatgtgcaytggctactttcctattctgtcctaacaaaacccgaaatctagctgcaccatccagtaatgtagccctagatagacaatatgcccattcttaatcatgtatct

SEQ ID NO: 334306 - DNA, 539 bp, Homo sapiens
acagtggcctgatctcagctcactgcaacctctgcctcctgggttccagtgattctcctgcctcagcctcctgagcagctaggactacagcaacctgactttaycaggtatttcaaagtatattacctttgtttaccccatatttcaccaatattaggaatcattagttcattgttcattgagtgccaaagaactatggtgagtaaattatcaggtcagttaagacagattctactctatttcgatatgctttcagttaaaatattttaggtatacatgtcttttttttttttagttaagacttattttatattaacatgtttcaagtaaaaacttttaaggtatgtacacattaatttttttataatgtattgcttttagttactatttgactaggctactagctgctagtccagatagagtagaaaaagtgtcttctactgtctgccaccaggaaaaatgttttattttcattattactgatcaaaatgagggtgaaagaactgcttttgcatatcaactaatttagagatctatac

SEQ ID NO: 334307 - DNA, 649 bp, Homo sapiens
ttagatatttttgctcaaatataaggtaatggacgtgttctgagcatgtgtaacgtaggcttggctaagctatgatgatctgtaggtcaggtctattaaatgcatgttcaacttatgatattttcaggttacaatgggtttatccggacataaccctatcgtaagtcaaggagcatctgtaaatgtatttttactagagatccaaaactcacatcatagattgttgaacaagtaggtttgctttggatgcaatcatcctgtctggattgatgtggctgaatttggaatgacccagataaagggattcagtagccaattttttctrtgttattttaagttgatggcagtccaagtgggtacggaataagcaacacagagatcatgagtatctaccctagaaagtgccaaggtatccacaaaacacctctcttgtactggccatgcaaattaagcttcttggacaaaggacagaagttatctatatagaatgttcttttcttatcattcggtgtggctggggaagggtgtttacctcagtttttagtttaggactcaagtatagatgggatgccaggtaggtctgaactatttctggagcacagtaagaggaattctgatgattaacatttcaaaacgtgtaaaaaattgt

SEQ ID NO: 334308 - DNA, 603 bp, Homo sapiens
tgtgcaattccaataccttgcagagaggatcctttgaaacatttctgtaaatgtctatttaggtcaagggttatactgcaaaggataattgagcctatataaaacatgggcacctaatgtgcaagattaaagacactcgaatctcaagggcctgtgattgtttccatgggtcctgaaacaacaacaacaacaacaacgacaacaaaattctgcatgcttccagtagattattaaagcgatcaaaaaagagccattcacttactgtttttaactaggcataccatagttctaaacatcatactaatcaaaattctagaagtatgccagatctccagtcactattaatgaataataagrtaggagacaaaatatttgaagcaacagtgtactaaattatgtcacatattattttttattttcacctacttgtacatcaataaatgtcgcaatgttgcttttttaacaatcaattctaagcgatattgtaaaattttttctctcataaaaaatacaagcgaagtgaaagaaaacatcagttatcatagcagttagggaaaatatattgatatattcccttcaagtaatgctacccaagtgctagcc

SEQ ID NO: 334309 - DNA, 681 bp, Homo sapiens
ctgcctcaggataattcgtaacaacaacataaacaactaacctttgctaagcatttgttgtgtgccaggaattctgttaaatctatcaagtgcattatttcacataattcttaaagctgaaaactaaattctgaaaactaaagcttaaagaggttaaataacttaccaaacattgcacagatagataatggtggaaatgtgtgttccaatactttgaaacttaccttattctttatatttgttatattttatatttgtcctagaaaatatgcttatattttatatttgcctcttggcaagaatactctttctgctctgagtgtcaaaattttatcattcaatataaagctttgtatgatgatcacagacaagtatcctctgcatttgagctgttcttacttctataatagatcgtgtsacagtgatttgaaatattttttaaatttcaatattccttaccatgctacattttgtaagggcagtgaacgtatcttttatataataacaattattattgttactgctattcttagtgttctaagactgaacacaatggcaactgcatatatgatgttccataaatgattgctagatgagagcatataaaattagcatcagcatcttataatgtttcatgttgctttcctttataaatggtgaaatctacagtagcatggaaaa

SEQ ID NO: 334310 - DNA, 573 bp, Homo sapiens
tctgtcttattacattcttggccaatattttttttgtgatctagttttgtgcatcacttgttattctaattgatcctggtaacagaataccccagggctccccctcagaagccctttagttatggtactctatcatgttctttgccctctccatggttataaccctttatgtggacaacacttaaaaagcagaaaatggtttatctgggacagtaatgaactgatccatccaggcaatagaataatgatgatgatatattyttctgctctcaatgactagttgatgatgtgacccagaatagacaggggtgaggcaaattataacaatgtatcaacaggactcctcagaaagttatttcatggtgttaaaaatctcttgatgttccattcaactaagatacttaatactaagaaagaaatactacaagccaggaaacaaacttcaaaataagtataataagatattaaaatatcttaatgttttcatctcaaaaaaattaataaaggtttcatgaaaaataggctaattttaaaatatatttttggatggttgtaaggaaatgggtatgcatt

SEQ ID NO: 334311 - DNA, 611 bp, Homo sapiens
acgcattatgacttttaaaccttcaattgctttaagaggtgtaaataatttttggttcatatgcttcatcaatttgatttattatagtgcrttttagttcaacacatacttattcctagattgtctatattgtctgtatataacatggtaaattatttgagataaagaactatttctcattcatttggtaggccaagtaactaggataacacttggtttactgtaagtacttttattgattaaatttgcaaataaaaatccagtaagcctattcgtagtgctatggtttgcataagtcccccaaaattcacgtgttagaaacttaattcccattgcagcagtattaggaggtgggatatttaagaagtgatttgatcataaaagctctgcccccatgaatgaattagtgccattattgtgggaatccatttgttatctcaagagtaggttcttataaatgatgagtcagcccctgcctctctctctcccacccatgtgatgccttctgccatattatgaggctgcaagaaggccttcagcagatatgatctcttaatctcagacttggaattctccagaattatgaccgaaataaatttctgttcattaca

SEQ ID NO: 334312 - DNA, 576 bp, Homo sapiens
ttccaacttgagcaaaagagcaagattctgtctcaaaaataaaaatgatctttctagacattttggaattagctagatgagtaataaggaaaaagattttggacaatgagaaaacaacatatacaaacatataaggacttataaaaacacaacattttgaagaaatgtgaatatttcaataagagtatttataaaaatctaattaataacaagttatagataaggatatagccatatctaaacagtgaggagtcaaaaaatattttatctgagagagtagcctcatcataatyaggatttaaaaagattaatctttgagtaataaataaattgaaagatagattttaaggttaagaaaatggagattgggagactagaatattgacaaatttgcaaagtgattaatcttgaacttgggcaaaagcattgaggaaagagaatggacatccagaagagatatttaattaagtttggaggacatagcagattaagaagaaaagcataagaagttttgaacatattaattttgaggtccttgaaggatgtccagaatttagcaatcaaatatttagttaa

SEQ ID NO: 334313 - DNA, 541 bp, Homo sapiens
acactatatctctccatatttgaaggatagctttgcggaataggagttttattctttcttccagaactttgaaaatgtcatgctactccctcctgtcctgtatggtttctgttgacaagtctgttgccagacaaattggagrtcatttatatgttatttacttcttttatcttacttcttatagaatcctttcttcttccttaacctttgagcatttgattattatgcacttgtagtagtcttatttggctcaaatctgttttgtgttttctgaacgtccttcagttgaatatttatctctttcttaacttttgcaaagttttctgttattatttatttgaataagctttctataccttacttttgctcaactccttcttgaacactaataattcttaaattttgactttttttctttttctttctttttttttaacctagccattaaccacctaatatagatctggtcttttgaggtaattttctgtatcttgtttgcaatctttatggcttttcatttctttttctcttctgttttcaa

SEQ ID NO: 334314 - DNA, 541 bp, Homo sapiens
acactatatctctccatatttgaaggatagctttgcggaataggagttttattctttcttccagaactttgaaaatgtcatgctactccctcctgtcctgtatggtttctgttgacaagtctgttgccagacaaattggaggtcatttatatgttatttacttcttttatcttacttcttatagaatcctttcttcttccttaacctttgagcatttgattattatgcacttgtagtagtcttatttggctcaaatctgttttgtgttttctgaaygtccttcagttgaatatttatctctttcttaacttttgcaaagttttctgttattatttatttgaataagctttctataccttacttttgctcaactccttcttgaacactaataattcttaaattttgactttttttctttttctttctttttttttaacctagccattaaccacctaatatagatctggtcttttgaggtaattttctgtatcttgtttgcaatctttatggcttttcatttctttttctcttctgttttcaa

SEQ ID NO: 334315 - DNA, 550 bp, Homo sapiens
tgtgtcttgttctcctaaatttagtaattagggttaactttatcaatatttaccattttacttttaaatacgcttaaacattttctctttttgtaaaaacaattttatctaatttctcatgtttctttgtgtcaggcctgggaatattgctgatcacttacactcaaatcctctggccaaaaataagttacttgagttcatgtaaatgaaaatgaacatagagaattcaggaaaaaaaatgtgggttttgatgattgctgagaaatttctgtttctccgaaatgttagaaataatcttatctaatttctaataaaatttttgtttttggttttgttgaaaaaagaaaacctttcaaaaatttgaaaaacgaaaacaaattttgtttacatttttctttcttttttgttaagttttacwgttaattatacacaggatctttttatggatgtcatgtttattctttttcaaaaaacatattacattttgttgaattttcttggactggctattagcaagacgaatccttggaaaagtgagagaggcccgatg

SEQ ID NO: 334316 - DNA, 595 bp, Homo sapiens
taagtgttcgcttttctccacaacttcaccaacatgtgttattttttgactttttattcatagccattctgacgggtgtgaggtggtatctcattgtggttttgatttgcctttctctaatgatcttttcttcgtatgctttttggctgcgtgtatgtcttttgtgaaatgtctgttcatgtcctttgcccacttttaaatgagattatttgttttcctcttttaatgttttttaagttccttgtagatgtgggatatcagaactttgtaaggtgtttctttacaattctcatacaatttctattgatatagtgaaggactgtatcttaaaataatacctcttagtagctatactccctttgcctctcagaatctggtgtaagagtgcttctcccaccagcacagatattgattgacataytagtcaatatgaactattagcacagcctctaccatcaaggctaccacttttagaaaaaccagtttttttaaagtgacctcccacttctgccttctttattcacctctctcactgtgcacatctatttgatctcagtacaatttataacagtttcgacatagggaaataatattt

SEQ ID NO: 334317 - DNA, 605 bp, Homo sapiens
cccaaacaatctgggattctggctgaaagcaaagaaaatatggaatgggtacyggaaacaagtcgtagatatcacaatgaccttgtgaccaattacaaaagtgatagtagtagttttgcatatttcatttcaatcattagcatatatagaagcttgattaactactttttccttctttctacttctttcccttgttattttatgtaaattgtttgatgctacctttacaatataatgtttaggtaatggaatattaaatgagattttcaataaatttcaataaaaatttgcataactaacagtaggtacaataatactgggacacgtgtatctttattaggggagacagtgagtaccttaaaagtatgaagaagtttcctatctttaggtggacacatacagttgttttattgctgtgtaaatgttcaaatgtcgtacagaagggtgcaagtgtgggtagaaggatgcctaggctaaaacaggaatgacttttgttccttcttccagtgtgtggtttctggcacagcatccacttgataggatacgtgtgtgtgtgcgtgtgtgtgtgtgtatgtgtgtgcatcctgtggcttttgtccagcttg

SEQ ID NO: 334318 - DNA, 617 bp, Homo sapiens
atcttcccccaccgaggcctccaacctacctgtgcttgttgggagccagggaagagtccacataggagacgtggttggggctaaagagaaaagacagcagacaatgactctccaggggcccagaagagagtagggtctaccccatacataagaggaggtaggggcccagagccagaccctcaggatgtcttaagccaggagtggtctgtgcctaagatctgcatgacagagttgttggtgtgtgtgtgttagtgtgtgtgtgaaaagaagagttgtgggtgtgcctgtgtaagacaaagagagaygcagagtgacagacagactgtgtctctgtccagggacctctgagggtaccttcccaacaattgaggccaggatgtaccgggtggaggagaggtgagagtccatgtttggggacaggatctttgctccccttggaccacagcaggagacctggcaggatgggggatgatagaggcatgggagggggtgcatgacatttccttcaggtccctggggggtggcacagaggtatttcctcaagaaaagagctcacctggagacaccaccaggctgatatttctaagaacagtgatgatgttttcggaagcgttgta

SEQ ID NO: 334319 - DNA, 617 bp, Homo sapiens
atcttcccccaccgaggcctccaacctacctgtgcttgttgggagccagggaagagtccacataggagacgtggttggggctaaagagaaaagacagcagacaatgactctccaggggcccagaagagagtagggtctaccccatacataagaggaggtaggggcccagagccagaccctcaggatgtcttaagccaggagtggtctgtgcctaagatctgcatgacagagttgttggtgtgtgtgtgttagtgtgtgtgtgaaaagaagagttgtgggtgtgcctgtgtaagacaaagagagacgcagagtgacagasagactgtgtctctgtccagggacctctgagggtaccttcccaacaattgaggccaggatgtaccgggtggaggagaggtgagagtccatgtttggggacaggatctttgctccccttggaccacagcaggagacctggcaggatgggggatgatagaggcatgggagggggtgcatgacatttccttcaggtccctggggggtggcacagaggtatttcctcaagaaaagagctcacctggagacaccaccaggctgatatttctaagaacagtgatgatgttttcggaagcgttgta

SEQ ID NO: 334320 - DNA, 617 bp, Homo sapiens
atcttcccccaccgaggcctccaacctacctgtgcttgttgggagccagggaagagtccacataggagacgtggttggggctaaagagaaaagacagcagacaatgactctccaggggcccagaagagagtagggtctaccccatacataagaggaggtaggggcccagagccagaccctcaggatgtcttaagccaggagtggtctgtgcctaagatctgcatgacagagttgttggtgtgtgtgtgttagtgtgtgtgtgaaaagaagagttgtgggtgtgcctgtgtaagacaaagagagacgcagagtgacagacagactgtgtctctgtccagggacctctgagggtaccttcccaacaattgaggccaggatgtacygggtggaggagaggtgagagtccatgtttggggacaggatctttgctccccttggaccacagcaggagacctggcaggatgggggatgatagaggcatgggagggggtgcatgacatttccttcaggtccctggggggtggcacagaggtatttcctcaagaaaagagctcacctggagacaccaccaggctgatatttctaagaacagtgatgatgttttcggaagcgttgta

SEQ ID NO: 334321 - DNA, 586 bp, Homo sapiens
tcagtttaagattctggccatgcaagcctgaggactttttgctctgagacctgttaaaattaatgaaaatggagaccaggcctgaagagtccctgagcagacaaaaccagttaggcctcataagtaacctcaactttgcttgatttgcaaacatcagtgaaacttcacttgagctatttcttgtaaatgtgtgtattaaggaagaacagaacttaagctcaaccaatcagaagccaacaaacttatgtaggtaactagggtctttccaacaggataggccaaataagggaactttataactgtaactaattaaatattttcttcagtttacttgtcctgtaggagtcttccccttgcattcccccagtggagctcctcaacctcttctgtttggagctgcctgattcatgaattgttgtttgctcaaataatctgtttaaaattttattgtacctcagtttactttttgacagtcccatctaaggagtagaaacatggcactggtgagtagggggagcatacataaccacgggcrtccagctgggtccccacacactgaaggaggagatgacacagatactggaca

SEQ ID NO: 334322 - DNA, 535 bp, Homo sapiens
ctgtcctgcctgataccatgttgtgtgactgtgtttatctgtttcctgtctttctgacccaggaatgtataagcgccctgagggatgggatcttgtcttcctgttgctcagtcatttaataggtacttgctaagtatttgtggaatgagtgaatgacttaattaatctacaagctgtggagactcaggaaggatcgtgatagtgacagctgttggtaaatttaattcaatatgtattgtgcgcttattttgtgcctactgtgtggcattcagcatcatcttgttgctgctattcattgtggtgaagagaatacggcagcaggtaagtctgatctgggcccagagcacagaccgtaggcgcagctcatctcttcattgctttctccccattcttggagtggcagtaggaacccccacccccccccccccccacacacacacacayacacacacacagagagagagagagagagagagaaaaagagagagagacgggacagcctcctctatgcactgttttctcttccccagccctg

SEQ ID NO: 334323 - DNA, 535 bp, Homo sapiens
ctgtcctgcctgataccatgttgtgtgactgtgtttatctgtttcctgtctttctgacccaggaatgtataagcgccctgagggatgggatcttgtcttcctgttgctcagtcatttaataggtacttgctaagtatttgtggaatgagtgaatgacttaattaatctacaagctgtggagactcaggaaggatcgtgatagtgacagctgttggtaaatttaattcaatatgtattgtgcgcttattttgtgcctactgtgtggcattcagcatcatcttgttgctgctattcattgtggtgaagagaatacggcagcaggtaagtctgatctgggcccagagcacagaccgtaggcgcagctcatctcttcattgctttctccccattcttggagtggcagtaggaacccccacccccccccccccccacacacacacacatacacacacacasagagagagagagagagagagaaaaagagagagagacgggacagcctcctctatgcactgttttctcttccccagccctg

SEQ ID NO: 334324 - DNA, 646 bp, Homo sapiens
aatggctaataatttatttctccttgcatttctgatagtgttgcttgatatatttcatggccaaaatttaagcacatatacgtttatgatgggtctattttcatattcaagtgcatctttcatcagtatatattacatatctttgtcttttttataaacaaatgttatagacataatattttaccttaaattctattttgttccatattaagagtgccagaagagtttattttgtttcctaatagtcaaatatatttttctaacttttaaccttttaaaatcttttgtatgtttatctcttatagatagtataacattgcactttttaaaactcagagtgtccctgtccttattttgtgagtttaatccacttaaatttattggaattgcatttattttaggacttgattctacctttttatttcattttttccatttattgtgctttattttttaaaaattcgattccgactttcctttggctagagttttattttgctggatgaaagggtatacattctcttgacttaacctgaagactcttatcyacattgatttagtacaattgctacattgagcttatcaatatctacatattgcctctcatgagacaagtacccaaccattctttcatgggcttctggtc

SEQ ID NO: 334325 - DNA, 632 bp, Homo sapiens
tgctatgcttcctgtacagcctgcagaatcatgagccaattaaacctctttttaaattacccagtctctggtatttatagcaacgcaagaatggactaatatacctagacacaatgtatgtgtgcatgtatgcatgtgtgtgtatgcatgcatgtgtgtgaatgtgtgtgtgtaataacaggaaagaatgtgtgcaagaattgcctcaagatgctaccatgggtaatgtctgggtaggggcaggtgactgggatggaacagggagtgtgaaggggggctttcgcattttaccctgtattctaccatattgtttgaatgtttttacaataaaatgtacttgggtgttttaaaaagtagacatgttttaatgactgttgaagtgagtgaagaatatggaagtcagaggtcacagcagccctgcccctgggacagccattgaagggtgtgtgcgtgtcatcctgaycaagtcccctggggataggctactttcagtgtcctcactggagactcagcttctgtgtggtgtgtgctgtctggcttcattacactttactcccttgttctgtcctctcaatagtctagcaaacctaacactaccaatgaagccctactccatgtcctgcccctggctt

SEQ ID NO: 334326 - DNA, 589 bp, Homo sapiens
ttcataaatgaaggagagataaagcctttttcagacaaacaaatgctgagagaatttgccactattaagcagcactacaagaactgccaaaaggagttctaagtcttgaaacaaaacctcaaaatacaccaatgttacatacactgcaggtttatagcagcacaattcacaattgcaaaaatatggaaccagcctaattgcccatcaaccaacaaatggataaagaaaatgtggtatatatacacaatggaatactattcagccataaaaaggaatgaaataaggtcatttgcagactcacctggatgaattcggagaccattattctaactgaagtaactcaggaatggaaaaccaaatgttgtatattctcacttataagttggagctaagctatgaggacacaaagrcataaggatgatataatggactttgggggctcagggggaaggatgaaagggtgtgaaggataaaagactatacattggatacagtatacactgctcagatgacaggtgcaccaaaatctcagaaattaccactaaagaacgtatccatgtaaccaaaaatcacctgttcccccaaaact

SEQ ID NO: 334327 - DNA, 570 bp, Homo sapiens
aaaacagtgatgatgggcttaaccaaaaattgagatgtaattaaaagaggtttagataaggagtgtaaatagctaaactcttcataataagatatatattagtcaggatgggctaagttattcaatagtaagaagtccaaaatctaaatggcaaaatatgcttttgtcttacacaacactgctcacatggatgctcaggggctttgctccatgtgatcattcagggattcagtcagcagctccaccagcttgtagcaataccctctggaacacatggcatccttggtcccatggcaggacacasagaatggagaaagatgcatgagtttttaccatctctcctcttataatttcacttgccaaaaacagtcatatgttcctgttgaacaggcaggggcttgacagtacagtcttccatgtgctctgaaggggaggaagactgggaatatttgccaagggaagtttataaaatcacctaaaatgaataaatcaagagacagcattatatacacattcttttaaaatatggaagtaagtaccacaacatgttgaaaagctaaaagaaaaaag

SEQ ID NO: 334328 - DNA, 541 bp, Homo sapiens
cagccagtaaaacaggaaagagcacagaaaactgcacagatgaagtctttatggacctgtcctgaaattgacacatatcatttccactcacattccactggggaaagtttagccctgtggctacacctccctgcaaggaaagctgagaartataaccttactttcatgctgaggaagaagaaataacagatttggatgcccagccagcagtctctcttccacggtcagtggtgtgtgtagccttcttgccacatgtagaagacatccagtccctttccaagggagtcaaagcaaaaccccatctagcctctgcattcagctcagtgtccagaacttctaggtgatgtacagtcctttccaacaagtctgatggaatttctcttggtccacagacttacgaactgtgctctactccccatccctgcacacacccaaaatataggataattgcaattaagattgggagacacaggcagtgccttgtccataacaatgatggaaccctgccagacaaacattgtgaagaacctctgccctggca

SEQ ID NO: 334329 - DNA, 541 bp, Homo sapiens
cagccagtaaaacaggaaagagcacagaaaactgcacagatgaagtctttatggacctgtcctgaaattgacacatatcatttccactcacattccactggggaaagtttagccctgtggctacacctccctgcaaggaaagctgagaagtataaccttactttcatgctgaggaagaagaaataacagatttggatgcccagccagcagtctctcttccacggtcagtggtgtgtgtagccttcttgccacatgtagaagacatccagtccctttccaagggagtcaaagcaaaaccccatctagcctctgcattcagctcagtgtccagaacttctaggtgatgtacagtcctttccaacaagtctgatggaatttctcttggtccacagacttacgaactgtgctctactccccayccctgcacacacccaaaatataggataattgcaattaagattgggagacacaggcagtgccttgtccataacaatgatggaaccctgccagacaaacattgtgaagaacctctgccctggca

SEQ ID NO: 334330 - DNA, 541 bp, Homo sapiens
cagccagtaaaacaggaaagagcacagaaaactgcacagatgaagtctttatggacctgtcctgaaattgacacatatcatttccactcacattccactggggaaagtttagccctgtggctacacctccctgcaaggaaagctgagaagtataaccttactttcatgctgaggaagaagaaataacagatttggatgcccagccagcagtctctcttccacggtcagtggtgtgtgtagccttcttgccacatgtagaagacatccagtccctttccaagggagtcaaagcaaaaccccatctagcctctgcattcagctcagtgtccagaacttctaggtgatgtacagtcctttccaacaagtctgatggaatttctcttggtccacagacttacgaactgtgctctactccccatccctgcacacacccaaaatataggataattgcaattaagattgggagacacaggcagtgccttgtccataacaatgatggaaccctgccagacaarcattgtgaagaacctctgccctggca

SEQ ID NO: 334331 - DNA, 569 bp, Homo sapiens
ccaggaatcatgttattcaaacttgtgttccccttaaaacttagactgtttcttagaacagaggagatacagtaaaactaagttggagaaaaaaatataaagtcattgaacacttgaagtgaattatgggatcagttgatttacactaaaatgtaactcctaagcaaaagcacttattgtttagagcacccactatgtgcaatttcagcatttaatggctaaagtatccattgaaatgagtgttattcttcccagagatgttcacatggatctgcagctcaggccaaattaatagcaaytgtggccaacatcttaatttttcccttgctaaattactatggaaatgaattttagcaacttaatccacccagcttaaactaattcttcattaaagcataactttctcccatagggaaacttctaaatccagcagatagaagcatgaacacctccggtttgttttaattatttttcttaaatgagaagctgagcacattctgccaaggattaaatcacctcaggtctcacaaatttggtattctcaaactaaatccatgttctcatgttgc

SEQ ID NO: 334332 - DNA, 493 bp, Homo sapiens
aaatgggtctcactgtgctaggctaaaatcaaggtttcargggggttgtgttccttttgggagactctagggaaaaatctatttcttgtattctccaggttctagagctgcccctattcttggctaaggactcccttccattttacaagccagtaatgactggttaagtttttgtcacattgcctcactctaatactgactctcccatatttaaggacacttgtgattacactgtgaccactcagataatccaggataatctccctactttacagtcagctgaatagcaatgttaattccatcagcaatctgaattcccctttcccaaacagaataacatattcctgggttctgataattaggatatgaacatctttgggaggctattgttctatctaccacagtaatttaccttcaattactatgcatatgtacacaggtgactcctaattttttattttgtgtttctagtctagacttctcttctaaacca

SEQ ID NO: 334333 - DNA, 493 bp, Homo sapiens
aaatgggtctcactgtgctaggctaaaatcaaggtttcaagggggttgtgttccttttgggagactctagggaaaaatctatttcttgtattctccaggttctagagctgcccctattcttggctaaggactcccttccattttacaagccagtaatgactggttaagtttttgtcacattgcctcactctaatactgactctcccatatttaaggacacttgtgattacactgtgaccactcagataatccaggataatctccctactttacagtcagctgaatagcaatgttaattccatcagcaatctgaattcccctttcccaaayagaataacatattcctgggttctgataattaggatatgaacatctttgggaggctattgttctatctaccacagtaatttaccttcaattactatgcatatgtacacaggtgactcctaattttttattttgtgtttctagtctagacttctcttctaaacca

SEQ ID NO: 334334 - DNA, 493 bp, Homo sapiens
aaatgggtctcactgtgctaggctaaaatcaaggtttcaagggggttgtgttccttttgggagactctagggaaaaatctatttcttgtattctccaggttctagagctgcccctattcttggctaaggactcccttccattttacaagccagtaatgactggttaagtttttgtcacattgcctcactctaatactgactctcccatatttaaggacacttgtgattacactgtgaccactcagataatccaggataatctccctactttacagtcagctgaatagcaatgttaattccatcagcaatctgaattcccctttcccaaacagaataacatattcctgggttctgataattaggatatgaacatctttgggaggctattgttctatctaccacagtaatttaccttcaattactatgcatatgtacacaggtgactcctaattttttattttgtgtytctagtctagacttctcttctaaacca

SEQ ID NO: 334335 - DNA, 481 bp, Homo sapiens
taaatttatgttgagaaatatagccattgcacagactagaatgctggtgtcagcagatcactataattttcctataagcagccaatgtgggaagccaaattatattttcaaaggcaattctaaaatattcaatgataaatgaaactgcatcaagtgagccagtcattccattggcttgtattgtgcaacgagtgtatgagttttcagcagctggggaattggttggacaaatgatggacaaatcacttttatgtccagctgaattcacctttctcccatacattcacaaggaactgaatttatgtgagtttccagggacaacataatagagttcaaagcccagcgttattaatgtttttcctttgtgtttccttcgtataaagagaggatgrcctttgccaacctactcagctcactttgttagccgagtctgtgaacaggggaaaattacagccttagagccactatctgatagacacac

SEQ ID NO: 334336 - DNA, 627 bp, Homo sapiens
gttttatctaaataagtgtttagtgggacattagaaagtcatataagaygaatcacaactctgatgtgtagactttcctgtgtgctacaggaacccttgtagtcctgttttgtgttttctgaatgccaggaaggagtttctgttgttgtcactgacaaacaaaaaaaaacccactctgaaagagtcccagaaatgcccataggtatggctaccctgacggctctcagggagaacctctggcctacaatatctggctcctgacttctttcttctctagttgtaactcctaccatcctttcctcacaagctgcaaactcactgcctccttctcactttcttaaaagagtgagtagtttacttttctttttctatactttgaactgccgtgtctccaaatctttgcctggtttggttttcttgttattcacacctcagctcagatgtcacctcctgagagaagcactcctagactaccttggctcaaggtagcatccttgtccacatcactgtttctttaccctattatactttctttgcagcatatttgatagcacctaatactatttggaaaaaagttttaaaatttatttacatgctcaatattattcctttctgtcattagaatat

SEQ ID NO: 334337 - DNA, 611 bp, Homo sapiens
ttgggctgggttctggagatatatctcctaagttaagtttaattagcaactactcaatatcaatctgcctttggatatctggagcatgaatctcacagcttggattcttctccggttttggttcattagcaaagattctgagttatctgtggtataaagttcagaagtgtataaggtaagaagagagctttgaatcagtttggtagctgagggacacagacaggaaaatctagcttgaaaaacaatgtagtccccatcatccctgggtgacttcctagggccctccaaggaaaccccattttgttctctccctctttcccctactcttcccctctcctcttctcccttaatccttcttcgtcaagytttcaactctcctctccttctcttgcacataggttgtacaactattttctaccctctttatctttctagctaatattaagcagcatctctttctgtcaggtgattctaagcaaggctttagaatcagacaggatagatattttatttcacctatgccacttgctagctgtgtgaccaagggcaagctcctccctcagacccagttttctcatattccaaatagaaggaataaaggtgttcatgtg

SEQ ID NO: 334338 - DNA, 554 bp, Homo sapiens
atttttggatctgccctatattaatgtctaagaaacaccacttgtgtttctccacctttctgccaccactcttgccaagccaacatcgtctcccacttggactattgcatggcccccgaagtaatcaccttgttcatgctctttgcatatttcagtcctttgtccatacaatcagccagagtcattttttaaaagctattttctgatcctattactacccttcttaaatttttctaatggcttcccaaagcacttagagtgaaatctaagcttcttatcacagcccttctggcttcctttccagctcatctcgtattgcttgtttcctctgctccaagcatcctggcttgcttcgtttttctagcaagccaagtcctttcttacctcctgctctttgtagttagccagagtaatcacaggaccaccctaatttgtttttcttycttcggggatcactgccgtttactgcctgttgtccaaacatttgaatactgttgtttcatatattttatcaatttttaagttgtctaagtcaggagggtaaatctagtctc

SEQ ID NO: 334339 - DNA, 570 bp, Homo sapiens
gggtagattaggatgtagtgacatttctataggttgcttaattcagacttggttttcccttttagcctcagattaggaagaagaaaaaatgactgtgatcagctagcatttcttaacaataaactcttgtctcagtattattttraaaatctgcattgacagaaatttttaaaaacagtaattatgaattctcccctgaccaaaggacaaattgcattttgctcctggaaatgcctctatattattaatattattgttgttatttatgaagtgactcaagggtgtgttcatgagtgttggaagatgtatggaagaagcagaagaccagatttctttctaattaggtcagccaaggctagaaagtgattatattcatattatttctgctttcacctaaatagtcttttaaatagaacctagaaaaaaatggaatgtcagacctgtaaagagcctttagcacgggcctcattttgcaaaatgagaagaagccccagccagttgtctctcgtttctcttgacttgggatccattgatctgtcatggacaagcctaagatcataccaggggact

SEQ ID NO: 334340 - DNA, 588 bp, Homo sapiens
taaaggtgctgagtttgtggcaatttgttacacaataatagaaaactaatatctcctctttcacgtctcagctcttaccatttcctcagataggctttccctgagccctctaatgttttgtgtcccctgcccctatgatcttgatttgttcttttgtgagcacttaacagaatctaaagccaccttatttgcttactattttgatggttgctgtattccctagcacttgcgatgatgttgcacacatagtaggcatgcaataaatatttgttgaatgaatcactgaatccaaattaattaattaktttttatcagctgcccatgactaaactgctaaattagtccctggaccaccaggtggcagatcatttagagagtaaagtaaatagaagaaccttggcctagtgacagaacgtcaattctctaatgacaacgttgccatccagactttaatctaaaaccatctgcctttatttttcttaacctggtcagttggacagcacatctgccattgctagtgtttctgtagccaaattatatgattaactcttttaaaacaggagcttagaaacagaatggattgatgct

SEQ ID NO: 334341 - DNA, 582 bp, Homo sapiens
atttgtgtatctaaacataaaaaaggtactgtaaaattatggcattataagcttaaaagaccaccatcctgtatgtggttaattgttgaccaaaacattattctgtgaatatatttgcttggaagggtgaattaaataattaccatggaaatatgctatgaagtgcaaatcttagtgtaaatagaaagcaatatctttcttctcctcatcaccatcaccattaggatcatgaaatrtaaggaaaaggtaggaggcaaagtaaggatgtccaatttggcatcagctttatcttgccctacttgtctctcactctttgtagttgtattgaaatccttgctgccttctaataaatcataccaacagcatttattcatttccctgacaaagacttactgaggtctaaaaataaacaaccatctttaccattgttttgagctctgatcctatggctgacactagaccaggtatgcacttgacccacatgatctcatttgatcctaccctaaactccaggaggcagattctcttatcaccccctattttttacagatggggaaaccaaagctcataaatgtgaagctg

SEQ ID NO: 334342 - DNA, 582 bp, Homo sapiens
atttgtgtatctaaacataaaaaaggtactgtaaaattatggcattataagcttaaaagaccaccatcctgtatgtggttaattgttgaccaaaacattattctgtgaatatatttgcttggaagggtgaattaaataattaccatggaaatatgctatgaagtgcaaatcttagtgtaaatagaaagcaatatctttcttctcctcatcaccatcaccattaggatcatgaaatataaggaaaaggtaggaggcaaagtaaggatgtccaatttggcatcagctttatcttgccctacttgtctctcactctttgtagttgtattgaaatccttgctgccttctaataaatcataccaacagcatttattcatttccctgacaaagacttactgaggtctaaaaataaacaaccatctttaccattgttttgagctctgatcctatggctgacactagaccaggtatgcacttgacccacatgatctcatttgatcctaccytaaactccaggaggcagattctcttatcaccccctattttttacagatggggaaaccaaagctcataaatgtgaagctg

SEQ ID NO: 334343 - DNA, 563 bp, Homo sapiens
gcttacatagccagcacatggcaagagggccttgtcagtggttcaccacttcagcatctagatgagtgatgtcttagtccattcagactgttatttaaaaaattctttagactgggtaatttatgaacaacagaaatttacacttcacagttctggaggttgggaagtccagggtcaaagtgccagcagattcagtgtctggtgagggctcgctctctgcttcaaagatggtgccttgttgctgtgtcctcacatggcasaaaagaggggtgagggagctcatccaagcctcttttacaagggtatttttaatctcattcataagggttgagcccttatgacttagtcacttcccaaaagcccacctcttgaaaccatcacatcgggtattaagttccaacgtatgaattggggagggggtggggaaaataacattcagaccatagcaagtgaccagtatgtagtggacacctgatagaaatgtgttgactgaatgagctgaaaaagttaagagtcacatttggcactgtttggcttgcctaccacattactgcctttcttac

SEQ ID NO: 334344 - DNA, 503 bp, Homo sapiens
cagtactattgtgaggtacacactattatttccaaatgacagatgaagaagcaggcttagagatgtttagtaaccttctcaaggccacagggaaaatatactgcagagcaaagactctaccctgtaaaccatttaatcccacctggctcttaagcccccttccttatcagaatttatcatttgcacttcatggtagtctttcccggtagattatgaactaactccttggagcaagaatcctaattgagagcttcatttcccaccacacccagctcagtgcatggcacagactaggtaaaggtttgctgaagggaagaggaaggagagagaggagaaaaaacaaggaaggaagmaaagaaggaaaaaaaaagtgactcgatgaacaaggagatgggggagggtgtatctcagtgctacaattcagcgtgtgcatgcaaaagtaaacccaatgaattcacgcataggtgctggagctctgtcaccaggtgggctctaaattgcaa

SEQ ID NO: 334345 - DNA, 503 bp, Homo sapiens
cagtactattgtgaggtacacactattatttccaaatgacagatgaagaagcaggcttagagatgtttagtaaccttctcaaggccacagggaaaatatactgcagagcaaagactctaccctgtaaaccatttaatcccacctggctcttaagcccccttccttatcagaatttatcatttgcacttcatggtagtctttcccggtagattatgaactaactccttggagcaagaatcctaattgagagcttcatttcccaccacacccagctcagtgcatggcacagactaggtaaaggtttgctgaagggaagaggaaggagagagaggagaaaaaacaaggaaggaagcaaagaaggaaaaaaaaagtgactcgatgaacaaggagatgggggagggtgtatctcagtgctacaatycagcgtgtgcatgcaaaagtaaacccaatgaattcacgcataggtgctggagctctgtcaccaggtgggctctaaattgcaa

SEQ ID NO: 334346 - DNA, 606 bp, Homo sapiens
tatgaacttcatcattcttcagtttacaagtgtttagcttgataattattcggtaaatgactgcataaacgtcttaggaatcctaaatacctcagcagatactggccctgcagaaaagaagcaaaaggcccagcaggcatctgaattatccccatttattctttgaggaagactacccatttcttctctttattcyagtctactttatgagattgtcatgaaagcatctgacaatttattggttaaatactccagcttcctaacctaactccttcttggtgatttactcaattttcaactatgccttgtgattagaatgctttttgtagtttctataatatatggctccaataacttttggctccttcttcatccatccccattctccagcatactccagaccctcaccaaactgtaaagaagttttctggtaggatgttcactagatgttttaaaataacttcattccccaaagtagaacccttcagcatggtaacttagcaacatgacaaaacacctccacaagcaaaaagaagcaggaaagaattggtcttttgtcatacttacttatttgcaacaagtgtgttacttactgataagcaaaat

SEQ ID NO: 334347 - DNA, 603 bp, Homo sapiens
tattgaataagcatgtatgttttaaatatgaacattatattctataatttaatgtraaaatcaatataatgggagattttgataacagaaagaatactgtaatttccaaattcaggatatgacactgtaccaaatcaatgttcagttaagggttaaaaataaatttatacgtaaggattttcatgagtgctttattttgtaaaatttcctatttaacagaaactttatctgaattcataacaaatcatttgcgtaataaagagaaacaccagttaaatattcacataataaaattttggctcaaacaccataatgttcttatttatatacattttcttgtagataagaagaaaactaatctgtgacagaaagaccataggttcacttttgcaaatggaaatgctacgtgtaatgtttcctttggcatttctcctatggctaagttcattctgaattttactttcaaaagtccatgctgctcctttgaatttgttattggattatgtgcctgcattgtatatgtcatctatgctatatgccactatgatactcctttctagtggaagctattctattcaaaacccatgatggtagataatcata

SEQ ID NO: 334348 - DNA, 603 bp, Homo sapiens
tattgaataagcatgtatgttttaaatatgaacattatattctataatttaatgtgaaaatcaatataatgggagattttgataacagaaagaatactgtaatttccaaattcaggatatgacactgtaccaaatcaatgttcagttaagggttaaaaataaatttatacgtaaggattttcatgagtgctttattttgtaaaatttcctatttaacagaaaytttatctgaattcataacaaatcatttgcgtaataaagagaaacaccagttaaatattcacataataaaattttggctcaaacaccataatgttcttatttatatacattttcttgtagataagaagaaaactaatctgtgacagaaagaccataggttcacttttgcaaatggaaatgctacgtgtaatgtttcctttggcatttctcctatggctaagttcattctgaattttactttcaaaagtccatgctgctcctttgaatttgttattggattatgtgcctgcattgtatatgtcatctatgctatatgccactatgatactcctttctagtggaagctattctattcaaaacccatgatggtagataatcata

SEQ ID NO: 334349 - DNA, 634 bp, Homo sapiens
tgaaggttgaatcgtattttatcgtgcgcatatgccacattttctttatccattcatctgtctacaaaaatataggttgttatccacattgtggctacagtgattagagcttcartgaacatgtgagtgctaatattattttgagaccttgatttcaattcttttaaacaaatatccagagtgggactgttatattatatggcagttacatctttaatttattttaggaagctccaaactattttccatggtaggggcaccattttgtattacaaccaacaatgcacatgagttccaatttctcacatcattgtcaatacttgtcttttgattttttgatgatagtcatcgtgacaggtgtgaaataattttttattatgtatttatttaaacttttattttaagttcaggggtacaagtgcaggtttgttacataggtaacttgggtcatgagggtttgttgtatagattatctcaccactcgagtattaagcctcatatccattagttattttgacttatcctctccctcttcccaccctctgtgctctgaaaggcaccaatgtgtgttgttcccctctacatgcccatgtgttcccatcatttagctcccacttataattgataacatgtg

SEQ ID NO: 334350 - DNA, 517 bp, Homo sapiens
atttaggagttaagggttaaacctatatatttagatagtacagtatctgaaacatagcaattaatatcaatttattctgttgttccttaaagatatctgtaatcagtattcatctttaaaatgccaatttgttcttaccacaccaggatgtggtgtttttcatggaatattattccatggaattttattaaaataatcttttaaggagttactcaccgttgattaataaacaaaggaaatcgaaagaaaaatgcctatttttctatatttcttagaatatgtggaatctaaaaaagtttaactcacagaatgaaagaacgrtagttattagaggctaggcagggaggtgggaaggggaaaaatggggagttggccaaagagtacaaaatgtcagatagaagaaataagtttgggatctattatacaggagggtgactatagtcaataataatgtattgtatatttcaacataactgagaagatatttcaaatatctcaccataagaatgataggtaa

SEQ ID NO: 334351 - DNA, 583 bp, Homo sapiens
ttgagagtctattacaaatacgtgtggtacagtgacaataagaaagctagagtgtccatatcaacattacacaaagtgaacttaagacatgttgccagagataaataggaacatttcaattataaatacattgattccttacaaagtcataaaaattgtaaacacgtatgcacttactaagagagacctcaaaatatatgaagcaaaaactaacagaattaaaaggagaaagttggcyggcacggtggctcatgcctgtaatcccagcgttttgggaggccgaggtgggtggatcacctgaggtcaggagttcgagaccagcctggccaacatggtgaaaccccttctctaccaaaaatacaaaaaaaaaaaaaaatgagccgggtgtggtggcaggtgcctgtaatcccagctactccagaggctgaggcagcagagtcacttgaacccaagaggcagagtttgcagtgagccgagatcacaccattgaactccagcctaggcaacaagagtgaaaggccatctcaaaaatcaatcaatcaataaataaaataaaaggagaaaatagataattgaaaaataa

SEQ ID NO: 334352 - DNA, 583 bp, Homo sapiens
ttgagagtctattacaaatacgtgtggtacagtgacaataagaaagctagagtgtccatatcaacattacacaaagtgaacttaagacatgttgccagagataaataggaacatttcaattataaatacattgattccttacaaagtcataaaaattgtaaacacgtatgcacttactaagagagacctcaaaatatatgaagcaaaaactaacagaattaaaaggagaaagttggctggcacggtggctcatgcctgtaatcccagcgttttgggaggccgaggtgggtggatcacctgaggtcaggagttcgagaccagcctggccaacatggtgaaaccccttctctaccaaaaatacaaaaaaaaaaaaaaatgagccgggtgtggtggcaggtgcctgtaatcccagctactcsagaggctgaggcagcagagtcacttgaacccaagaggcagagtttgcagtgagccgagatcacaccattgaactccagcctaggcaacaagagtgaaaggccatctcaaaaatcaatcaatcaataaataaaataaaaggagaaaatagataattgaaaaataa

SEQ ID NO: 334353 - DNA, 600 bp, Homo sapiens
attcatgtcgtaatttggatgacttttttatattactttgtatctcgacaagcaaattgcaggggtcatatgacaactttatgtttagcatttttagaactatttaactgtttttcatatagagtgaaccattttacattcacactgggtgtgtatgatatttctaattttttcacattcttgtcaatacatttttttcttttgtaatatatctaatccagtgagtgtgaagtgacacttcactatggttttgatatgcattgtcctaatgactaacaatgttgagcacctttctatgtgcttgctggtcatttgtatatcctccttggagaaatgtctactgaaactctctgccaatttttataattgggtgtttgtctttttgttgctgagctgtgatacatttttatatattctgaatatgatayccttatcacatatttggttagcaaatattttatcgcactctgttggatattttttcactttcttaacagtgtttttgatgtactttaagtgtttgatgaaatctaatttatctaagttttttattttattgatagtaattttagtgtcttatttgaaatttattgccaaatt

SEQ ID NO: 334354 - DNA, 573 bp, Homo sapiens
agcccattggaattcttatagaggtcacatttgttgtgtatatcacttgggatagtattgacatcttacggacattatgccttccaatacatgaacaccagatgtccttctacttatttaggtgttatataattttttcagcaatgttttgtagttttcagtgtgcaaatattttacctctgtattagtctgttcttgcattactraatattacacctaagactggctaatttacaggaaaaaaaaagaggtctaattggctcacgattctgcagtctgtacaggaaacatgatgctggcatctgctttgcttatggggaggcctcaggaaacttacaatcacggtggaagccgaagggggagcagacacttcatatggtcagagcaggagcaagagagaagaacaggggaaggtgccacacacttttacacaaccagatctcgagagaactcactatcatgagaatacggccgaggggatggcactaaaccattcattagaaaccacacatatgattcaatcatccacagtatgaatcatccacagtatgagctgtacctccaatattgggg

SEQ ID NO: 334355 - DNA, 573 bp, Homo sapiens
agcccattggaattcttatagaggtcacatttgttgtgtatatcacttgggatagtattgacatcttacggacattatgccttccaatacatgaacaccagatgtccttctacttatttaggtgttatataattttttcagcaatgttttgtagttttcagtgtgcaaatattttacctctgtattagtctgttcttgcattactaaatattacacctaagactggctaatttacrggaaaaaaaaagaggtctaattggctcacgattctgcagtctgtacaggaaacatgatgctggcatctgctttgcttatggggaggcctcaggaaacttacaatcacggtggaagccgaagggggagcagacacttcatatggtcagagcaggagcaagagagaagaacaggggaaggtgccacacacttttacacaaccagatctcgagagaactcactatcatgagaatacggccgaggggatggcactaaaccattcattagaaaccacacatatgattcaatcatccacagtatgaatcatccacagtatgagctgtacctccaatattgggg

SEQ ID NO: 334356 - DNA, 616 bp, Homo sapiens
aggcattgaaatgtttgtcaaatgattgcaacctgctaaggattgacttgttttcaaccaaaattaatatactgaagccctaaggcccaaagtaattgtatttggagatggggctttttggagataattcggttcagatgaggtcatgagggtggagcttttgtggtaggattaataactaatatagttttgctatgtccccaaccaaaatcataacaatcctcaggtgtcaagggtggggccaggtggagataattgaatcacgggggcggtttcccccatactgttcccatggtagtgaataagtctgacaagatctgatggctttataaatgggagttcgcgtacacaagttctcttgcctgccaccatgtacgatgtgatttgttcctcattcaccttccaccatgattrtgaggcctccccagccatgtggaactgtgagtcaattaaacctctttcctttataaattacccagtttggggtatgtctttattagcagcatgagaacagactaatacaataaccttatatgaagaaacactagagcatactctcacattctcacattctctctctctctctctctctctgcctctgtctctttctctctca

SEQ ID NO: 334357 - DNA, 467 bp, Homo sapiens
cctttcctcttcctttgtctgctgccatgattgtaaggcctccccagccatatggaacttttgagtccattaaacttctttcctttgtaaattacccagtctctggtatgtctttattagcagcatgagaacagactaataaaaacattgaatgtaaatggactaaagtatccaatcaaaagatacagactggattgactgatgaacaaacaagacccattgatctcttgtctacaagaaacatacctcacattcaaagacacacctagattgataataaaagatggaaaaacaaattccatgccaaatggacacacagaaaagagcaggagtagctgtacttatattagtcaaaactgatttcaaaataaaaatataagagacaaagaaagtcactatgtaattattagagggtcaattcagcaagawgacacaacaatgttaaatatatataccctcatcacagg

SEQ ID NO: 334358 - DNA, 510 bp, Homo sapiens
catgcaaatagacaccaaaagcgagcaggagtagctaatcttacatcagacaaaacagactttaaagcaacaacagtaaaaaaaagacaaagaagaacattatataattataggaggattagtccaagaggaaggtatcacaattctaaatttatatgcacctaacactggtgctcccaaatttattaaaaaattactactattcctaagaaatgagatagacaacacagtaatagtgggggacttcaatactccacttacagcactagacaggtaatcgagacagaaagtcaacaaagaaacaatgcacttaaactataccctagaacaaatgtatatayggatacttatagaacattctacccaacaactacagaatatacattctattcataaccacatggagcaatctagaagacagaccatatgataagccacaaaacaagtctcaacaaatttaagaaattagaaattatataaagtaccctctcaaagcacaggggaagaaaa

SEQ ID NO: 334359 - DNA, 510 bp, Homo sapiens
catgcaaatagacaccaaaagcgagcaggagtagctaatcttacatcagacaaaacagactttaaagcaacaacagtaaaaaaaagacaaagaagaacattatataattataggaggattagtccaagaggaaggtatcacaattctaaatttatatgcacctaacactggtgctcccaaatttattaaaaaattactactattcctaagaaatgagatagacaacacagtaatagtgggggacttcaatactccacttacagcactagacaggtaatcgagacagaaagtcaacaaagaaacaatgcacttaaactataccctagaacaaatgtatatacggatacttatagaacattctacccaacaactacagaatatacattctattcataaccacatggagcaatctagaagayagaccatatgataagccacaaaacaagtctcaacaaatttaagaaattagaaattatataaagtaccctctcaaagcacaggggaagaaaa

SEQ ID NO: 334360 - DNA, 585 bp, Homo sapiens
aatggtaaaaattactgtctcctctgcacacatttacctatgtaacaaacctgcatatcctgcatagaccccagaatggtagttccattggcagctttcactttgcatctggaaaagcttcaggcattcaatgccacgtttaaaagcagtgatggaggctgtaccctgcaaagctacagagtagagctccctaatgccttcgaagcccatcagttgcatcattatgccctggatttgagacatggcatcaaaagagattattttggagctttgagatttaatgactgccctgctgggctttggacttgcatggggcctgcagcctgtttgttttggccaatttccccttttggaataggaatatttatccaatgcctgtactccattgtatcttggaagtaactagctagtttttgatctcacagattcaaaggtagaagggatttgtcttgtctcagatgatactttggacttggacttttgagttaatgatggaatgagttaagaccttgggggactgtttytaaggcatgattgtgttttgaaatgtgaaaagaacatagattttggagggaccagggctag

SEQ ID NO: 334361 - DNA, 634 bp, Homo sapiens
aaactacaagattatctcaataggtgcagaaaatgccttcaataaaattcaatatccctttatgttaaaaaccctcaacaaactgggcattgaagaaacatacttcaaaatagcaatagccatatatgccagactcacagatagcatcatactgaatgggcaaaatctggaagcattcccctcaaagtccagaacaagacaagaatggcctctttcgcctctcctgttaaacatagtactgaaagtcctggccagagtaatcgggcaagaggacaaaaaaaawaataataataaaaggcatccaaatagaaagacaagaagttaaactatccttgtttgcagatgatacgattctatacttagaaaaccccagtctctgcctaaaagtttcttgatctaataaacaacttcagcaaaggttcagaatacaagatcaatgcacaaaaattagtagcattcctatacatcaataacatccaagctgagagctaaatcaagaatgcaatcccattcccaatagtggtgacaagaataaaatacctatgtagacagccaaccagggaggagaaatatatatacaatgagaactataaaacactgctcaaagtgtacacacacacacatacacacacac

SEQ ID NO: 334362 - DNA, 590 bp, Homo sapiens
ttaaactatccttgtttgcagatgatacgattctatacttagaaaaccccagtctctgcctaaaagtttcttgatctaataaacaacttcagcaaaggttcagaatacaagatcaatgcacaaaaattagtagcattcctatacatcaataacatccaagctgagagctaaatcaagaatgcaatcccattcccaatagtggtgacaagaataaaatacctatgtagacagccaaccagggaggagaaatatatatacaatgagaactataaaacactgctcaaagtgtacacacacacacatacacacacacacatatatatatatatatttgtatatgtatctcattggttctgtttctctgtagaatccttaccaataatgaaataattaccatctaatttataattcaatttacatatttatttggttatgtttttgtggccactataataccagctttgcaagtgcagtgatattttgcttcttattttaaaactgatgcctcctaggtaataagatatacmtaaaacaattttttgctccataaatattagttgcatacatcaatcagtgattgaatagagcat

SEQ ID NO: 334363 - DNA, 552 bp, Homo sapiens
ccttgcttgtcagggctcagcaccagtttccacccaggcataatttcctatgcctgtctttacttttatctcttaatcccatcattttcataagctgaggttgtatgtcgcctcaggaccctatgatgattgtgtgaactgcataaattgtttgtaaaacacgtgtgttcaaacaatatgaaatctgggcatcctgaaaaaagaaaaggatagcagcaattttcagggaacaagggagataaccatgaggtctgactgcctgtggggccggkcagaacagagtcatatttctcttcttgcagaaagcaaataggagaaatagtgctgaattattttcccagcaaggaataaccctgggaaaggaatgcattcccagggggaggtctctcaaatgaccactctgggagtgtgtgtcttatgtggttgaagataagggatgaaatacgccctggtctcctgcagcgccctcaggcttgctaggattagaaaattccagcctggcgaattctagtcagaccagttgtctgctctcgaaccctgtttcctgttaag

SEQ ID NO: 334364 - DNA, 277 bp, Homo sapiens
atattgcccaggctggtcccgagctcctgggctcaagttatcctcccacctcggcctcccaaagtgctgggattacaggcataagccaccttgcctggcctacttcaaattttgttgartaaacacaaactcctttttttgtaaaaacagagaacaaaaacaaccaaagcagatatctaaaaacaggctttcgtagagcaaggccaggcatgcagctcacctgtctcttagttcatcttccaggaaggcctgaatgagcctgctgctgctgctgctg

SEQ ID NO: 334365 - DNA, 588 bp, Homo sapiens
tagaaaacccagactccaattaattctattctgcagtgtcctaggtctgcaagcatccaaaagtgcaagcatcagtcacatccgttaagagagaatatgttttcaaattaaaaaaaaagggagaatatccaaaagaaaatcaatgacactatcggaaagggggccacccctcgcctatgagcaacacaagtctgtggagagccttgtgctaaaccaccccaaaatgacctgcttctgggtctgggttttaaaagaaaaaaatcaggctgtctttggagttgggcatgttctggggagcatcggggatgctagagtatctgggttggttcaaggggaggaaaaggtagagaagaagcacacctcagagatgctgccagatagagctcctcaagttcaaggtgacattcttctccctgaaacccaggtgggagaaagagctgtgtctcgccgtatttatycccatcccaagccccccccccacagagggcagcatacagcagagcctgagaattattggttggatgaatgctcaagtgctgcacctgcttctttcagactgaggggacctgaggagtaaaattgagcctt

SEQ ID NO: 334366 - DNA, 553 bp, Homo sapiens
cctggcctcatgagttagattgtggcacccttgtcatggatgaggaaagtgagactaagcggccttaagtgactgcagtggtcacccagctaaggtgttctgacttctaaatactggccttgtctacccagcacactgccccgcgtctcaccttgtcagcattcttttgcagtatgttgccatttcaagatggcatgttaatgtctgtgatcatatagaaggtctattttggggtgccttttttctcaagacatttaggacagtgccttcgttaattggacatgtccctaaatcttacttgagtcacaaactgatcccctcattggcacgctggtttctgttagcctcaaggtgtactcttttctaacttttcctgcctttttttctccccacatctgatgctcatggtgcctgggactttcctgagaattggccagaccccatgttcttattacctccaacagaggctttagttctgccaggcaggggacgarcctacctttacgtaggtgttctgtttgcattagtttgaaaatgggtttgagggcagggg

SEQ ID NO: 334367 - DNA, 637 bp, Homo sapiens
ttaaaatcacgaacctacacacatacctttaagaaatggactccaggcttgtaaaacatgtggccgtaatattgrcagagcaagaatctttggcctctgaataagctcactggccttcatgtctgtgataatttgccatagagaccaggctttttttctgaggatctatcccagtcactgtagttgtggaagtggtggttcttgtataacaaagtcatctgaggtaatatttccacacaataatttttagcaaaaagaaaatgtttaatggttatcccaggtggcagcagattcccttgtggaaacaagaatggcgggaatcaaaggttgggcatagagaagaactttcctctttgtgattcaaggacagatgttggcaacctctttgaactgaatgattggactccatccttttcactcatgttgtcctttacccccagtcctcacctggatttaagcgatctggtctgaaagaactccttccatttctaccctttaaataggttcttatttaatgccactgtagtcaaggaagagagggggaacaggattggagcaggggtgaggttcacaggcaccccgagggaggaaaccagacgtgaacatcccacacatagcagctttgcatatggacaga

SEQ ID NO: 334368 - DNA, 572 bp, Homo sapiens
caggattggagcaggggtgaggttcacaggcaccccgagggaggaaaccagacgtgaacatcccacacatagcagctttgcatatggacagacctgatttccttctatgcctcttcccacagtgctgtctgggccattaagaatcaccttgactcatagttctggttttcagttcagcttctaggaatgcatgatttcacaccttgtggaggtagaacgcaktatcactgatcagggcacagctatcgggcaacctcagcctctctggaactcagcgggctgtgaggaagtcatgtatctaagaagcccaaacacatactccatggcccttgactgtctgaaaaactcagtttcggagtttaatacattcccccagggtaccaaataactagatttgtaaatgtaaattttttcagtcagttcttaaggtttgatgaggaacaggatatttacatagtcgcaaagtatctcaccacaaatcactttgcatttgtaataggaaaaattacgcagtggggaagttggaaaatacttaaccaaatgatgaaagtgaatatcacctacaaatatca

SEQ ID NO: 334369 - DNA, 550 bp, Homo sapiens
caaaaaagaggtcctgaaaggaggtttgctggttgccctgttcacatttgaatacaagagctcctatatagccaagctgatggggctgggttccctatttgtataagatgcaaattcccggtgtctccaccccatccttccagtgcacaagcaggccctgagtctgagctactccatgttgatttatttttcttactgagcatgcgttaaagaataaaatttttcactaggggaatgtttaggcaagccccctgtgcaagttcccttatctgcacaaaacatctggggtaaacacttgtgggccaagtcagaggttctctgggaaaactttcccttactgtctgcctraagcaagctagctaactctttttattacccccttcaggagtggagaccccgactgctgttggggaaagtggatgatgaccactcttaactgcttcctgcatacaggggtcgctgttttgggaaagtggcagttagggcttctcctgagataggtttaaggttccccagaagaatggcatgtccatgcatgatttcatttgca

SEQ ID NO: 334370 - DNA, 472 bp, Homo sapiens
ctttcctcttttactaatccacctcagcacagaccctttacgggtgtcaggctgggggatggtcagatgtttctcatcccacgaggccatatttcagactatcacatggggagaaaccttggacaatacccagctttcaagggcagaggtccctgcagctttctgcagtgcatygtgcccctggtttattgagactagagaatggcaatgacttttaccaagtatactgcttgtaaacattttgttaacaaggcatgtcctgcacagccctagatcccttaaaccttgattttatacaacacatgtttttgtgagctccaggttgggtcaaagtggctggggcaaagctacaaattaacaacatttcagcgaagcaattgtttaaagtacaggtctttttcaaaatggaatctcttatgtctttcctttctacatagacacagtaaatctgatctctctttcttttccctgc

SEQ ID NO: 334371 - DNA, 424 bp, Homo sapiens
aggctgggggatggtcagatgtttctcatcccacgaggccatatttcagactatcacatggggagaaaccttggacaatacccagctttcaagggcagaggtccctgcagctttctgcagtgcattgtgcccctggtttattgagactagagaatggcaatgacttttaccaagtatactgcttgtaaacattttgttaacaaggcatgtcctgcacagccctagatcccttaaaccttgattttatacaacacatgtttttgtgagctccaggttgggtcaaagtggctggggcaaagctacaaattaacaacatytcagcgaagcaattgtttaaagtacaggtctttttcaaaatggaatctcttatgtctttcctttctacatagacacagtaaatctgatctctctttcttttccctgc

SEQ ID NO: 334372 - DNA, 424 bp, Homo sapiens
aggctgggggatggtcagatgtttctcatcccacgaggccatatttcagactatcacatggggagaaaccttggacaatacccagctttcaagggcagaggtccctgcagctttctgcagtgcattgtgcccctggtttattgagactagagaatggcaatgacttttaccaagtatactgcttgtaaacattttgttaacaaggcatgtcctgcacagccctagatcccttaaaccttgattttatacaacacatgtttttgtgagctccaggttgggtcaaagtggctggggcaaagctacaaattaacaacatttcagcraagcaattgtttaaagtacaggtctttttcaaaatggaatctcttatgtctttcctttctacatagacacagtaaatctgatctctctttcttttccctgc

SEQ ID NO: 334373 - DNA, 544 bp, Homo sapiens
attctttatagcagtgtgaaaatggactaatacaccttagcactgtagcacagtcagattaaatccatgtaaaaaattagccaaattttaatgtatgtatatattttgtatgcataaaacaggaaacatcttgataaattactaaacttagttttgtataatagaagtagtctaatttatgtcagatatatgaattctagggttctgttcctgacagaaagttcccatgtgactttgagtataccattaaacctatctgtatctcaatttcttcttctaaagactggaaaagataatatatcttcccaacttttctctcaaaattgttgtgaatrtcaaatgatgcaattattgtggaaatactttggaatgtatgaagcaatatataccttcaagatgtagttatccagttagccattgtgattgattcaacgtacctctttgtcatttctattttaattcagggcagagactatgtatctaatagtcttaaaaattctctacatctattgcaagcaccacaacttgtgccaaagaagtggtt

SEQ ID NO: 334374 - DNA, 566 bp, Homo sapiens
ttttattaaagagcagatcactaccttaagaaaaccttgctgtgcatttatttcaattctcaatgtacctaaaaaccatatacctttttgaagtcagtcaatatgttaacacacagaatttcttttgcaagattaatttttatatkccttccaccacatgtttaaaccttcagctttatcttatccaattgaaaacaatcatttaaccctaggcaaaaatttacatttccataccttcttataattatttattaaatacacattttactttcctttcacagcttacatgtaaatctattttcaatagtttcaattacatgttataattgtaactcttagcaatttttaactttaatgtaatacttggtaagttattttgattatgtactaggcacagataaaatctgacatttttccagcttagttaagggcacagttaattccatatgtaaccaggccttaccaattgtgaagcaggcaggtcaaagagtttttaaaagtcaaagaagtttataaacttgaaacatttagcaaacctaatatctgacctacatgattcagcccac

SEQ ID NO: 334375 - DNA, 566 bp, Homo sapiens
ttttattaaagagcagatcactaccttaagaaaaccttgctgtgcatttatttcaattctcaatgtacctaaaaaccatatacctttttgaagtcagtcaatatgttaacacacagaatttcttttgcaagattaatttttatattccttccaccacatgtttaaaccttcagctttatcttatccaattgaaaacaatcatttaaccctaggcaaaaatttacatttccataccttcttataattatttattaaatacacattttactttccttwcacagcttacatgtaaatctattttcaatagtttcaattacatgttataattgtaactcttagcaatttttaactttaatgtaatacttggtaagttattttgattatgtactaggcacagataaaatctgacatttttccagcttagttaagggcacagttaattccatatgtaaccaggccttaccaattgtgaagcaggcaggtcaaagagtttttaaaagtcaaagaagtttataaacttgaaacatttagcaaacctaatatctgacctacatgattcagcccac

SEQ ID NO: 334376 - DNA, 532 bp, Homo sapiens
tgggtaaggctcttctgcttttgggaaggagagggaagagtaggaaagtctgcatcttgtggtttgagtgccagctcagctacagtacaatagagcaccaggtagamttgtaaggtttttgactttagtccctgacacacggacgacacttctggatccacctggggcctaaggaaccttcctgccctgaagtggaggacacaggcctggctggcttagccaccagcttattgtagagcacccaggccttgagtgaacataggcagtagcatgggaatagttaaagccagccttgggtaaaacccagtgttgtgctggcactggatctcaccacagcacagtaatagtggtggtggccacaggggtacttgtgtcactccattccaagcctcacctggctcagaacagagggagagacagactttttttctttgggagaaagtaaggtaagggaacaaaagtctctgcttgataattcagagaactctcccagatcttgtccacgaccatcaaggtggtacttctatgagtc

SEQ ID NO: 334377 - DNA, 532 bp, Homo sapiens
tgggtaaggctcttctgcttttgggaaggagagggaagagtaggaaagtctgcatcttgtggtttgagtgccagctcagctacagtacaatagagcaccaggtagacttgtaaggtttttgactttagtccctgacacacggacgacacttctggatccacctggggcctaaggaaccttcctgccctgaagtggaggacacaggyctggctggcttagccaccagcttattgtagagcacccaggccttgagtgaacataggcagtagcatgggaatagttaaagccagccttgggtaaaacccagtgttgtgctggcactggatctcaccacagcacagtaatagtggtggtggccacaggggtacttgtgtcactccattccaagcctcacctggctcagaacagagggagagacagactttttttctttgggagaaagtaaggtaagggaacaaaagtctctgcttgataattcagagaactctcccagatcttgtccacgaccatcaaggtggtacttctatgagtc

SEQ ID NO: 334378 - DNA, 532 bp, Homo sapiens
tgggtaaggctcttctgcttttgggaaggagagggaagagtaggaaagtctgcatcttgtggtttgagtgccagctcagctacagtacaatagagcaccaggtagacttgtaaggtttttgactttagtccctgacacacggacgacacttctggatccacctggggcctaaggaaccttcctgccctgaagtggaggacacaggcctggctggcttagccaccagcttattgtagagcacccaggccttgagtgaacataggcagtagcatgggaatagttaaagccagccttgggtaaaacccagtgttgtgctggcaytggatctcaccacagcacagtaatagtggtggtggccacaggggtacttgtgtcactccattccaagcctcacctggctcagaacagagggagagacagactttttttctttgggagaaagtaaggtaagggaacaaaagtctctgcttgataattcagagaactctcccagatcttgtccacgaccatcaaggtggtacttctatgagtc

SEQ ID NO: 334379 - DNA, 593 bp, Homo sapiens
aaataacgtctatctgcatcaacaccatccaggaaagcatgacttcaccaaatgaactaaataagaaactagggatcaatccyggagaaacagagatatgcgacttttcagacagataattctatagcagagaaataattcagaattatatcagatacagtcaacaaaaaatatttaaataattaaaaagaagcagaaattctggagctgaaaaatacaattggcatactgaagaatgtatcagagttccttaataacagaataaatcaagcagaagaaagaatttgtgagcttgaagacaggtgatttgaaagtacaatagtgagaggagacacaacagaaaaaaaagaataaaagcaatgaaacatgcctacaggatatagaaaataacttcaaaagtgaaaatgttagagtctttggtcttaaagatgaggtagagaaagataaagggataggaagtttattcaaaaagataataacagcgaagttcttaaacctagaaaaaaaatcaatatccaagtacaagaaggttatagaacaccaaggagatttaacccaaagaagactatctcaaggtatttagtaatgaaact

SEQ ID NO: 334380 - DNA, 571 bp, Homo sapiens
gaggttttcaattgattaaagaaatacaaatattcttactaatgaattagataacatacactatatttttattgaccaagttcactgtgggaaactagcaagacatttattttgttaatgaaatgactactgctttaaaaaatgaaacaaaaacaaaagcaaaagccacacaaagtggcagcaaaataagtggtttacaatcactcagaaaatgaatagccagagtagcttttagaaaaattgtgcaatttgtagttttgctgtacatttaattttattttaatcaaaattatatatgcacagagtttaaaaactgaaattattccacatgttaataaaggaaaataaattgttcggtcatctgccctgttcctcttaatgacttattcttcttctctaaaacaggttctcaactcttatagattatttccacagtcctaaatagtgtgattatactagtagtattcattttyttctactttcatattacctgttaacttcctactatagaatatgaggctttagctttatgctctcaacctccaataaagaaaaaaaattctttcttctc

SEQ ID NO: 334381 - DNA, 549 bp, Homo sapiens
ctatgtatttcacgggacaggtctactgagaagtgctgagcataatacataaaataactaaaataacasgcagaaataacaaattttattttaacaatttctagctgaatttttagttctttttaaataaaaatagccagatgaagtggctcatgcctgtaatcccagcactttgggaggacaaagtgggtgggtcacttgagctcaggagtttgagaccagcctgggcaacatagtgaaatcccatcccttcaaaaaatacaaacattagcgggatatgatgttgtgcacctgtggtccccaaatactcctgatacagagttgggaagatcgcttgagctggggcggtggagtctgcagtgagccaaaatcgcaccactgccctccatcctgagtggcagagcaagatcctgtctcaaataaactaaaaaaataaattaaaataaaccttttaatactgtaaacaaagacaattggatctcaatgtagaacaaagatggaccttttcctctcactttcatccttcttccagtttatttttagtaccac

SEQ ID NO: 334382 - DNA, 497 bp, Homo sapiens
tcaagcagctctgatgcttgtgaagggacttggataagataacttctcccctattacccacccattgtagacacatctgggactatttttgtagatcagyatgggtacacctataagctgcatttctggagaactttggaatgagtgcatccccatgataagtgttccctctgggctcagacttacatgggtattaaatctccattctttacacacaaaaatgtcagtgttcctgcagataaacagagatgcctgtccgatctgaatattcaaaaacagcaggacaggtgtatgatggggataagaatcattttcctgcaggcctggtagtgaaggttgagatggttccctttatttcccctgtgaagacctcagtgcatttcactgggatttccctcagctacacctgtcaagtctaagaatttcatccaccactgtagtattgcacatacataactgtttcagccacaatcatttcttaccaatgaatatttcct

SEQ ID NO: 334383 - DNA, 484 bp, Homo sapiens
tccaaacaaaaaatgaaatctttgaaataccagataaagaattcaaaaggttaattagaaagttattcaatgagattccaaagaaagttgaacaccaacatacagaaatataaaaaataattcaggatatgaataacaaatgtcctwaaaagatagattttaaaaaacaaacagacaaaacttctagaaataaaagattcatatagggaattaaaacatgcagagtaaggttttaaaaacagaatagacaaagcagaagaaaacaattatagagcttgaggacaaggctttcaaagtaatacaatcaaataagataaagaataaagaattatgaaataaagtattagacaaagatgggattatgtaaaatatccaaccctaagaatcacaggtgttcctgaggaagaaaaaaagaaaacagtttgaaaaccctgtttgaggaaacaattgttaaaaacttccctggtcttgctagaaatttaaa

SEQ ID NO: 334384 - DNA, 620 bp, Homo sapiens
ctgttaaaactttattttaaagcttcttaatttagtataattgaataatttaacaaatgtttattgagcaccttctatatgcaaaacattgggtgggaagtatttctctggcrctctactttgttttatcagtgtgtctcctatgtgtctctatgtctctttctctgtttctattccacacctgcttcaaggaggttgttagaacacacgtaaacaatgttctctgagttgtgtggagagtactatttgtgtaatcttcattaccaagtttaactgcaagattatatctaattgacagagccataggtaaatgatatcaacttgtttcaaagaacagctgaaccagtagctgacaggtttggccttaaactcacctttaagctctatttgttagagtctcattacagcaaaagggattaatagtggtttgatttttgctataactcaaagaaatcaaccccagtgtctgaaagaaataatatgccaagatttttagtgtgagaaaagagaaataatcctgttaacaatagatttggcattgtttaatttatatttctaatctgccaaggctcttcatcctccttcttagacggttgatgaagtaggtagtatttatatca

SEQ ID NO: 334385 - DNA, 620 bp, Homo sapiens
ctgttaaaactttattttaaagcttcttaatttagtataattgaataatttaacaaatgtttattgagcaccttctatatgcaaaacattgggtgggaagtatttctctggcactctactttgttttatcagtgtgtctcctatgtgtctctatgtctctttctctgtttctattccacacctgcttcaaggaggttgttagaacacacgtaaacaatgttctctgagttgtgtggagagtactatttgtgtaatcttcattaccaagtttaactgcaagattatatctaattgacagagccataggtaaatgatatcaacttgtttcaaagaacagctgaaccagtagctgacaggtttggccttaaactcacctttaagctctatttgttagwgtctcattacagcaaaagggattaatagtggtttgatttttgctataactcaaagaaatcaaccccagtgtctgaaagaaataatatgccaagatttttagtgtgagaaaagagaaataatcctgttaacaatagatttggcattgtttaatttatatttctaatctgccaaggctcttcatcctccttcttagacggttgatgaagtaggtagtatttatatca

SEQ ID NO: 334386 - DNA, 613 bp, Homo sapiens
aattaaactcttttttttttctctacgtggcagatttagaagtagtaggtcacagacaaggcagaaaaaacattgattcagtaaaagaaatattttcagtgatatgaattgccaaacaatagattgactttccacagaagacatttactgtacattgctgaatctgtttaatcagaggcctaatttcctcatggtagacaaatatacaagaaagtaatatattgacagaagattggtccagatgatttccaatgctcctttcacctagagaatctatacttctttactcttaaaaacaaccagaaaaaataagcaaacaaaaacaggaacctttagagagttggccctatgcaataaataatggggctaattgctgtgtactgttcatactaatactggaagatcaaaaatcttgcctcaaatacctactaatcttgcttgcttcagtgcatggggttctcattatatagtttacatctttggaatcttctggacacatgtatgtttggccttgatgtaaggaatgagggtttctatatgagttaygagagcattccataggagtcagtttattttatgaaaactctacctaatctccttaccacaaattgag

SEQ ID NO: 334387 - DNA, 373 bp, Homo sapiens
gtcaagcaagcaacgtgaggcttcctgtcacaacaggtaattcttggctcttaaaaagcaaatactttgcagaagcgcaggtgtatctgtatttcccccatgagtctagcaagttattttcatggttacctgaatctcttattctgccagccatagttttcttatccatgctatcacttcagtcctctaagaaaaggcaactccacaagttcagaggtttccacatttgttgaattttagatgttcaaatcacattgtatttaaaattgcttggggactgttgtcattgcaaataggtaatacaacagctttgkgcttaccagcttccctgatatattatcaactccatgttgtggattatttgggcacatct

SEQ ID NO: 334388 - DNA, 607 bp, Homo sapiens
ctagtccccagaggtttatttgctttaaaaaaagtttttgtttgtgtttttagttagcatttttttttctcctgtatacaagaacaaatttctgattgatttaagatgttgacaagtgaatccatgtctcagcattaaaatgggcctgggcaattgcattattcacttcaaaaagtgacactgatgaagcactgtctaggaaacactataagagatacaatttatactgatttttgtggcctatactgattttctaaagaaggaaaagcattttaatttcacttgcagtctcttatacttgaaactaaaaggagtctacagttaatacattgttctaaatattatttttcccttcctattcatgtatgggtcagctctccagttgtagggcatctcacgtatttactatgtagaaagtattagcagtagccacgcacatagaaattcacagacacrctaaaatgcaaaatttaaaacaagacattgaaatgtatatgcacccaacaacctgctattgtccttttattggaccaagttatatcaaaacacaattttggagagatagttgtatagcctcttgcctgatctactgtacacataaaattta

SEQ ID NO: 334389 - DNA, 337 bp, Homo sapiens
acagtatgtttagtctttagtccttataacaggcatgaaagaatgcattagaatckttactttgcaagactataattgtcataaaattcttgttagctcaagaagacatttaactggcagactgtatgtttctgacagtttccaaagatttcagacaaaggcagaaaaaggagcttacaaatgtcagtgacttgggctaggattgtttttcacaccttgtgtgtaatcatgtcttatttaatcacttttgtcttattcaatcactttagcaaactttttttaaatcaatgtgcttctaaaaatgcatttgaggatctttgtcaaataaactacttta

SEQ ID NO: 334390 - DNA, 558 bp, Homo sapiens
agaaaaaaaaaacacctcaactgaacactctaatgatgtatcttaaagaattagagaagcaagagaaagycaaactcaaaaatagtaggagacaagtaattagtatgatcagaccataaatacataaatctgaaatgaagaaaacaataaaaaatatcactgaaataaaatttttttaatttaaacaaaattgacaaaaccttagactaagaataaaagaagatacaagtaaataaaatcagaaatgaaaaaagatacattacagctgataatgcagaaattcacagaatctttagtggctactatcagcaacttgtatgccaataaattggaaaatctagaagaaatagacaaatgtttagacacattcaacctgcttaggttgaaccaggaataaatctaaaatctgaagagaccagtaacaagtaacaagattgaaactgtaataaaaattctcccagtgaaaactaaaacaaaaacaaacagaaaacaacccaggactggatggcttcactgctgaattcttccaaacatttaaagaagaactaataccaatgc

SEQ ID NO: 334391 - DNA, 558 bp, Homo sapiens
agaaaaaaaaaacacctcaactgaacactctaatgatgtatcttaaagaattagagaagcaagagaaagtcaaactcaaaaatagtaggagacaagtaattagtatgatcagaccataaatacataaatctgaaatgaagaaaacaataaaaaatatcactgaaataaaatttttttaatttaaacaaaattgacaaaaccttagactaagaataaaagaagatacaagtaaataaaatcagaaatgaaaaaagatacattacagctgataatgcagaaattcacagaatctttagtggctactatcagcaacttgtatgccaataaattggaaaatctagaagaaatagacaaatgtttagacacattcaacctgcttaggttgaaccaggaataaatctaaaatctgaagagaccagtaacaagwaacaagattgaaactgtaataaaaattctcccagtgaaaactaaaacaaaaacaaacagaaaacaacccaggactggatggcttcactgctgaattcttccaaacatttaaagaagaactaataccaatgc

SEQ ID NO: 334392 - DNA, 440 bp, Homo sapiens
tgttctcgttgatttatagtttatattatagagaactttctttagttaattcctagatatttaattttgtgtgtctattataaatggaattaattttttacttatttttcaatttgttcactgtcggcatatagaaattatactgttttttgtatgttaaatttgtatcctgcaattttactcaatttatcmgttcaaatagttttttggtagagtctttaaggttttccaaatagaagatcacatcatctgcaaacaaggaaagtttgacatttccttcccaatttggatgccctttatatccttctcttttctgattattccagctaggtcatctatgactatgttgaatagcagtagtaaaggaggacatggttgtcatgttccagaccttagactaaaggctttctgttttgctgcattcagtatgatactagctg

SEQ ID NO: 334393 - DNA, 564 bp, Homo sapiens
tttgggcagacaccgagctagccatgggagattttgttcataccacagtggagcctggaaccccagggagatagaaccgttcactcccctggaaagggggctgaagccagggagtcaagtggtctcgctcagcggctcccactcccgcagagcccagcaagctaagaaccactgtcatgaaattctttttgccatcacagcaatctgaagttgacctgggatgatcaagcttggtgggggcagaggcatccgccattaatgaggccttagtaggcagttttcccctaacagtgctaaggaggctgggagatctgggttgggcgcagcaaagcggctgtggccagactgcttctctagattcctcctcattgggcagggtatctctgaaggaaaggtaacaggcccagtcaggggcttacaaacaaaacccccatttccctgggacagagctcctgggggaaagtgcagctgtgggcgcagcttcagcgaatttaatcgtttttgcccracagctctgaagacaacagctgatcctgacgaggattcttccagcatagcgcacca

SEQ ID NO: 334394 - DNA, 591 bp, Homo sapiens
ctctgttctgctctcccagtcttgtgaagccatatattgttgagttttcctccacctctctggccgttcctttctagtattccttatgggatcatttttctatgccttatctcacaaaatatgggcgattctcaggactttctattttgyatttttgctggaaaataccatcagctctcaataatccacattatctccatatgcaacctaataagagagaactattccaagagaaagaatggtggggtaatataaaaagacttaagtcatagatcacataagctttatcaggtaaaatttagattcctatgttaaacatttactgactccaacaaaatatgtgcactcatttaaatcatttacacttgcagatgatagccattctcatttattatcaagcatcattccggttttaatcagtatcaattccgatctgaatttgaaaaatgagactcctgttattcacacagacatagaaggcctcagtaagagttgttgttcttttgtttttataagtgaattcattaaataacagcaggtgaattattatggcaacatcttcttaatcaatttgagtaaaccatggcaagt

SEQ ID NO: 334395 - DNA, 643 bp, Homo sapiens
ttcatcaaaatattataaactgttaaaatctttggaattatcaaagattacattacattcagaataactttaatgataagtatttattttaattttagtacactctatttgttttctaaaaggatttgcrttgttgtacaataataggacatacaccttaaggttaataaaataagaataggtggaagtcagggaaactagtaaagggtaaaatgaaggcatttcatatgctaaattctatgcattagcataagtcttgtgttggagagtaaaatttgactgtgaacctccatgttgtcaatgcaaaacagttatacaacccttgtcaaaaggaggaagtctgttaattctaaaaggcatagaaactgtcacctgactctaaattaaaggcatagaaactgtcacctgactctaaattcttaaaggaattcctaacctgaccttttatataaatgagactaaatgacattatggacattgtgttaagttttttttcattaaatacgtgaggatattttatatgtagtgctaagtacattttttagacttgaattttctaagaatgtttaattgagactcaggtaaattcagaacactgctacctacctattcattcagaacaaataagagtttaacatatgat

SEQ ID NO: 334396 - DNA, 591 bp, Homo sapiens
aactgcaaataatgttttaaaaggactttcatcctaataatttatttctttaacaaaagtggaagaaaatataacaaaacaagtaaaatattcacaggtattcattctgattgtaggtgtggaaaatacagatttttgctacattattcttgtaattttccctatttgaactctttttaaaataaagtattttattcccatctgctttgtgctgggatcgtaatgccatagatatagacagayttctaggcagacagattatagaacaagactgtgaagagtaacaattagatatgctgttccatcctctgagatacactgtgagcagtaacatgatgcagcacaaacagcacttagctcttggctgagtgaggtgatagacagacaaacactttcagcctataacacatctttatattgtgtattacttcaatactacctaaataccatgggatctctttctgacaacaaagttaacagaaagtgggcagcaaaatatgttctatgtaaaaagaagaaatgtgagtactaagctattttctagaaatcagtgacactatatcaactataagcattcagtgactataaaaa

SEQ ID NO: 334397 - DNA, 491 bp, Homo sapiens
aaaaacaagaaaatgacaaaagactcaaagctttcatttgcaaaatgcatccacagtcagtagagtctgaataatctaaagattagtgtcagatgtgtgtaggagttgtggggtcctttcaatggatacaagwagtcaatggatgatgagaaaactccatggcatttccttctatacttcacagcacgtttctggtgttgatatatgtggaagattcaaaagcacttactcatatattcattgactgaacagggcaacacagaggcaaatttgttcttgggatatgcatatgtacagtctttctcaatacagaatcacctttcttggttcttacatattattaaacagttaaaagtccttaacttaaaaaattctggatttaattaagtagatggtcaatggttgcaggtgaaagaggtacctttgaattgtgttcatttaagggtgtaagtggtcaatgaacataagcatcatttttaactagagttggc

SEQ ID NO: 334398 - DNA, 491 bp, Homo sapiens
aaaaacaagaaaatgacaaaagactcaaagctttcatttgcaaaatgcatccacagtcagtagagtctgaataatctaaagattagtgtcagatgtgtgtaggagttgtggggtcctttcaatggatacaagtagtcaatggatgatgagaaaactccatggcatttccttctatacttcacagcacrtttctggtgttgatatatgtggaagattcaaaagcacttactcatatattcattgactgaacagggcaacacagaggcaaatttgttcttgggatatgcatatgtacagtctttctcaatacagaatcacctttcttggttcttacatattattaaacagttaaaagtccttaacttaaaaaattctggatttaattaagtagatggtcaatggttgcaggtgaaagaggtacctttgaattgtgttcatttaagggtgtaagtggtcaatgaacataagcatcatttttaactagagttggc

SEQ ID NO: 334399 - DNA, 651 bp, Homo sapiens
catttaaatgtatcagattttgaatatttaaacaaataataacaagtaaaattttatattaattctcattattataactggttctcatgttaactttctctgttcagcacagtgtatcccaaagtgtagacctaagaccatattaaacatcagaattgtttggagtaaggagaagcttattagaaatgcagattcctggttccctacctactgaatcagaatctcttggcaaggacaatagtaayctccattgttaataaacagtcccaatgatctttatgcacgaaaatttgagtttcagtctagtaaatgaatgcttacaccccttaaaaaaaaaaaaaaagaagaagagaaacactctatgaagtgtcaccacaaataaggaaattatagacaattacatttcatagaattataaatgtacaaaagaggccaactggacaaaatatgctgagttcctattactccatgctgcaccttgtatttactcttgagtgcagcactcaccacaatgttttgcctcatcatatatttgatatatttattttccctccttgactattagctattagggagaagtaacagtgtcttccattattttcttagtatcaaaaaatagtgtcaattatatatactgaaatgaaagaataa

SEQ ID NO: 334400 - DNA, 596 bp, Homo sapiens
tcttcaagaaccatagtctgagattttctastgaaagatattttcccattcaacactagccaaagtaaatacaatttaccagaaaatatgggtctcaacagacactgactcattgattatccaaatggagcacttgtctctccattcagcatgcattttttcaggccacagagctctgtaatatgagccttaacttgtactcagtgtttaaatgggaataataaacataagtgggtgggccagggatagaagccatctatttaaatgaattttaaacctaattaggtaactaactgtgcatcagaacttagttggtgtacaacatgtcatgtatggttaacggtgatttattctaaaattcttcatttaaactgctttgttctccattttcaatgagtcaaatcactaaaagacagctttaattttgacaatgttctctcttttaatcattttctgtctgtgaaatttgcagaaatttaaaaatatcatgaaatagaagccgatgttagaaaaatgaaaagtaagaaaatttgctgtataaagcccccctggaaccttatatgtggcacagaattgaagcagtaaattctgggcca

SEQ ID NO: 334401 - DNA, 647 bp, Homo sapiens
agttgaatgaaggtaatgcttatttcagaatgtgaaagaagttgtgtttataagggattggcagcttcaacacaatatgtgaaaaaaacaggctaaaatagaaaatacgaatttcttaaagaattcagactttgttgtaaagcaatgataatatggtttggatatttgtcccctccatatctaatgttgaattgtaatctccaatgttgaaagtgggtcctggtgggaggtgtttggatcccagaggtagatccctcttgaatggcttggtgccatcctgatgataatacgtgagttctcgctctaagttcatgcaagatctgattgtttaaaagagtgtggcaccttcccctcttctctcttgctcccactctcaccgtatgacatattggctcctcttttgccttccaccatcactgaaagcttcctgaggtctcaacaaaagccaaccagatgctgacaccatgccttctgtatagcctgtggaactgtgaggtacttaaaccgcttttcttcataaattacccagtctcaggtattcctttayagcaatgcaaaagcagactattacaagtgggaaacaaaaaaaagaagattttaaatcaaagaggagcatgaatcaaattctagaacaatcactcttgctt

SEQ ID NO: 334402 - DNA, 651 bp, Homo sapiens
gcaaaaggaacgttgaaaatatgattaagttaaggatcttgagatgcgagatcaacctggattagccaggcggacctgatgtagtcacataatgatgcttgtaagtgaaagaagcaggagagtcagaagagacatgaygacggaagcagaggtcagagtccagtagttgctggccaagggccaggagccaaaaaatgcaggaagctctagaagctggaaaaaaacaaagaagcagatttttctctaaagcctccagaaggaatcagccctgccaacatttttactttagccctgcaagacccatttcagatgtctgacctccagaactgtaagataataaattcaccttgtttttaagccattacattggtagtaatttattacagcaaaacaggaaaataatacagcaatggtgagcctcaatgctttttccaatattgtttttatgttcttcccacatctccagtttcttcttaggacattttggtattcaagaagcatagcatctgcttctaaggcctctcatagaccctttcaatgtctatgtctgctctacttcccaaaattctattatgactccaggatcacatttaatatcattactccttcacatcacctcctattttcttctgaaggattctagtccccatg

SEQ ID NO: 334403 - DNA, 651 bp, Homo sapiens
gcaaaaggaacgttgaaaatatgattaagttaaggatcttgagatgcgagatcaacctggattagccaggcggacctgatgtagtcacataatgatgcttgtaagtgaaagaagcaggagagtcagaagagacatgacgacggaagcagaggtcagagtccagtagttgctggccaagggccaggagccaaaaaatgcaggaagctctagaagctggaaaaaaacaaagaagcagatttttctctaaagcctccagaaggaatcagccctgccaacatttttactttagccctgcaagacccatttcagatgtctgacctccagaactgtaagataataaattcrccttgtttttaagccattacattggtagtaatttattacagcaaaacaggaaaataatacagcaatggtgagcctcaatgctttttccaatattgtttttatgttcttcccacatctccagtttcttcttaggacattttggtattcaagaagcatagcatctgcttctaaggcctctcatagaccctttcaatgtctatgtctgctctacttcccaaaattctattatgactccaggatcacatttaatatcattactccttcacatcacctcctattttcttctgaaggattctagtccccatg

SEQ ID NO: 334404 - DNA, 600 bp, Homo sapiens
agtttgccaagatcattgctgatgaaaatctgacaccagaacaagttacaaagctgattaaacatcactgttttgtcattgttgccctagaagggcactgactacagcatatggaacagcccctagaggaactaaaggtgaaaaggacagaatggctgtactgggatgtcctaatgcagcagacatgtataggtgtaaacttgctgtgatagacaaaagcttgggtccccactgttttcaaggagtgaatttcttttcattccattattattctaacacaaaggtatggatcaccaggaacatcttatctgattggattcacaagtattttgtaccagtggctcatgcttactgcagggaagctggactgcatgatgattgcaagattttgctattgcttggcaactgttctgctcatcctccagctgaaattctaatagaaaataatataatgtttatgtcatgtattttatctcaaatatgactttattaattcatctrtgtatcatggtttccttaaatcagtgaagtataatcataaaaacactttcttgaacactttcttgttcatgctagcagcagtgaacagaggcgtagatg

SEQ ID NO: 334405 - DNA, 474 bp, Homo sapiens
gatgattgcaagattttgctattgcttggcaactgttctgctcatcctccagctgaaattctaatagaaaataatataatgtttatgtcatgtattttatctcaaatatgactttattaattcatctatgtatcatggtttccttaaatcagtgaagtataatcataaaaacactttcttgaacactttcttgttcatgctagcagcagtgaacagaggcgtagatgtggaaggtttctttttttttttttttctttttagacagggtctcactctgtcgcacaggctggagtgcaatrgtgtgatcatgggtcactgcagcctcaacttatctggggttaaggtgatcctccaacctcagtctcccaagcagttggagctaaaggcaattgtcaacatgccaggctaatttttgtattctttttgtagagacagggtttcaccatgtttcccagtctggtctagaactcctgg

SEQ ID NO: 334406 - DNA, 558 bp, Homo sapiens
aggctactctcggtagtgactggaagggaagattagggagtttgtagggtttcgctcaaaatccttcaatgtgtttccatctcatttaaaactcattgaactataagamctcatatgatttgttccctgagctctcccagtatcactctgtcctcactactagtcccctccctcactacgctaaattccttgaacctcccaagcatgcttctacttcaaggtattttctcctgctgctgataggcttggaaatttcttccctccagattttggaatgcctcggagcttcaccttcttcagactttgttcaaaaatgagtttatcagagaagatttaaattaccattctatataaagttgctttcaaacctactttatttttgtcatgacagttgtctatatctgccatatcactgcaactcatttatttacttaatatctgtcctcctctactagacaataaactccaggagcaaagacttcattgttttttaattgctgtttctgtggaatatagaacaatgccactctttaaatgtttgattttggggttttgtgg

SEQ ID NO: 334407 - DNA, 560 bp, Homo sapiens
aaacaatctactaaagttaatatgctaagacatgaataaataatctgttggactccaatcattccgtgtgttttctatttaaaagccagaaaggtttaaaccaagcactttgtaatttggtgggcttgccaacaaaatgatagcaaacatgggcaggcagtaagaatttgagtggacgtgtactccagcacaatgaaaccctactatgtgagttatgtcccaccacttctgtcattggtcaaaggcagcttttggaaccatgtatgcgcctcatggtcaagtgtgttcctgcaaccagacaaaagccccagattacagtcttacgtgtttaacagtgattagccttcagtgggtagagtttagagcatctgctaccaaaaggacaagtggcaataatttgaaaaatcccaccattatcctctcccatatccaagtcttcgmaagtagaaataaaccataagttaacctaatgattcatcaatattattccaacgaattatcatcatcttcatccaaaaatatttactgagccctctgtgcacatccctggctagaagaac

SEQ ID NO: 334408 - DNA, 493 bp, Homo sapiens
aatcacactttcttatttgattagatgtcaaaaaggaggtaatactcgagagatagtttcctggaactcttcttccatcctaaaatgagaaagcacaatcccattcactggatttttcctttttcttgagtatgaactaatggtgtgtccttgctttgtttctaataggatacttgccccatggtcttgacagcctatggagtcatgaataagaatattttgaatctgttctttcaatgtttttgtaagtggggaaattgatgcttctccatgatttcctgttctgttcattagcatagcttggccaatgttcccctgttatagtcaggattatgttcaggatgatattctctattatgccctctggcccctacrtgtaatggtactaaagatggtgatgctaataatgaagagagatggacttgtagcataaagacctatttctttaatttaaacatttttggaggtgcacatttatgaataattcccaagg

SEQ ID NO: 334409 - DNA, 543 bp, Homo sapiens
cacttctgtaatggctgaccagattaatgcctctatttccctgtttggttatctcaaatatctatgcatcaggaatggtttttaactgtaaacgacagagctcattccatccaatatacagaataaaagtatgtgttaaagtttatgagagggaaggctgaagatatctarcatgcatactatgcagccaggaagaatagttgaattacactgataaaatgctccagtaaagttctcactccaccaacacagcccgagtttgcactacctacccacagcatggggctgtaaccccaggatgacttgcttctgtgacttctgaaagctcattttctattaccttcacaagatttaattccctttggtgttactgcttcatgtcactctcttctgaactaagtcccaactggatttcctccaacctgcattccagctttaatgaaaagtgggaaagtatttctgtcttccaccttaaaatgatataccatgagggattctatcaggggtatttataaggggcttggaaggcagtaaacaagacaa

SEQ ID NO: 334410 - DNA, 541 bp, Homo sapiens
accctcagtctgtttgtctcctgactaaaaytgcatttctttaggagaaaaacccagattggcccacccaggatgcctacccatgaattaatcagttacagtctcagaaccactgagacctaaaattgtgtattaggagccatgcctactgaaaagtgaatagctatgaagcaagttctcaaatgtgcaaattgatctgccatttttaaaacttttacaaagacaattgaggaaggacaactactcaactttatgtttttattgttttaaattttattcgagctattcctaaacaacatcaaaatatttttattttgataagaaaatgtaaaacctttcagaaatatattcctgaaaatttaattatatccttatatgtttgagttcattttttttacacacttaaaagaatgtgttagacaacattttttaaaggcagggagctggacttattgatcaatgtactctgttctaggcactgttaaccacattatattaaatgaatatatgtaccaatcagtacattagcaaagcatcacaa

SEQ ID NO: 334411 - DNA, 611 bp, Homo sapiens
tctccttgcaaagactcttgccagtttaagagtctcctaaaccacctacatttaaatttagaaatttaaattctctaaatctcagatttaagaattcactagaagaacttacagaattcacttacagctattatacccacagttattgtttattatagtgaaaggatatggattaaaatcagctgcaggaagaggcctatgaagtagagtccagggcatctccaagcatgaagcttccagttttcctcttccagtgcagttatggacagtactaaattctcccacmagtgatgtctgacaatacacatggagtattgtccacaagggaagctcacctagccttggggtccagcgtttttagtgaggtttggctgtgtagacattgttgcctgtccacttggctgacctaagtttctaagtcctctagaggtcaagataatgtgtgtcacccaaagttcccatcatatattatattgttagcatagactatttggcatggcccaaggtttctaggtaaacaaagacaaccttataaggcagaatattccaaaggcttaaaggttacctcccaggagctgagggcaaaggccagacctctatttgggtaaggt

SEQ ID NO: 334412 - DNA, 611 bp, Homo sapiens
tctccttgcaaagactcttgccagtttaagagtctcctaaaccacctacatttaaatttagaaatttaaattctctaaatctcagatttaagaattcactagaagaacttacagaattcacttacagctattatacccacagttattgtttattatagtgaaaggatatggattaaaatcagctgcaggaagaggcctatgaagtagagtccagggcatctccaagcatgaagcttccagttttcctcttccagtgcagttatggacagtactaaattctcccaccagtgatgtctgacaatacacatggagtattgtccacaagggaagctcacctagccttggggtccagcgtttttagtgaggtttggctgtgtagacattgttgcctgtccacttggctgacctaagtttctaagtcctctagaggtcaagataatgtgtgtcacccaaagttcccatcatatattatattgttagcatagactattyggcatggcccaaggtttctaggtaaacaaagacaaccttataaggcagaatattccaaaggcttaaaggttacctcccaggagctgagggcaaaggccagacctctatttgggtaaggt

SEQ ID NO: 334413 - DNA, 590 bp, Homo sapiens
accataccaccattattatgcttaaataattaacaataaatcattttttacagcatcaaatatcaaggtagtgtccaaattttcctaataaaatatatatatatatatatattttgagacagagtttcactcttgttgaccaggctggagtgcagtggcgcaatctcggctcacaacaacctccgcckcctgggttcaagtgattcttctgcctcagcctcctgagtagctgcggttacaggcatgccccaccatgcccagctaattttgtatttttagtaaggacgaggtttttccatgttggtcaggctggtctcaaactcccgacctcaggtgatacacccagcttggttggcctcccaaagtgctgggattacaggcatgagccaccatgcccagtcttttctattgtaaaaaaataataattttttacaataaataaatacaataaatacaataaaaagtaaaattttattgtaaaaaatatatattttttacaatctgtgtattcacataaagattcaaccaaggtatacatttctagcaaatagtttaaaccactgtccccttagatacctaagtactatatt

SEQ ID NO: 334414 - DNA, 590 bp, Homo sapiens
accataccaccattattatgcttaaataattaacaataaatcattttttacagcatcaaatatcaaggtagtgtccaaattttcctaataaaatatatatatatatatatattttgagacagagtttcactcttgttgaccaggctggagtgcagtggcgcaatctcggctcacaacaacctccgccgcctgggttcaagtgattcttctgcctcagcctcctgagtagctgcggttacaggcatgccccaccatgcccagctaattttgtatttttagtaaggacgaggtttttccatgttggtcaggctggtctcaaactcccgacctcaggtgatacrcccagcttggttggcctcccaaagtgctgggattacaggcatgagccaccatgcccagtcttttctattgtaaaaaaataataattttttacaataaataaatacaataaatacaataaaaagtaaaattttattgtaaaaaatatatattttttacaatctgtgtattcacataaagattcaaccaaggtatacatttctagcaaatagtttaaaccactgtccccttagatacctaagtactatatt

SEQ ID NO: 334415 - DNA, 590 bp, Homo sapiens
accataccaccattattatgcttaaataattaacaataaatcattttttacagcatcaaatatcaaggtagtgtccaaattttcctaataaaatatatatatatatatatattttgagacagagtttcactcttgttgaccaggctggagtgcagtggcgcaatctcggctcacaacaacctccgccgcctgggttcaagtgattcttctgcctcagcctcctgagtagctgcggttacaggcatgccccaccatgcccagctaattttgtatttttagtaaggacgaggtttttccatgttggtcaggctggtctcaaactcccgacctcaggtgatacacccagcttggttggcctcccaaagtgctgggattacaggcatgagccaccatgcccagtcttttctaytgtaaaaaaataataattttttacaataaataaatacaataaatacaataaaaagtaaaattttattgtaaaaaatatatattttttacaatctgtgtattcacataaagattcaaccaaggtatacatttctagcaaatagtttaaaccactgtccccttagatacctaagtactatatt

SEQ ID NO: 334416 - DNA, 590 bp, Homo sapiens
accataccaccattattatgcttaaataattaacaataaatcattttttacagcatcaaatatcaaggtagtgtccaaattttcctaataaaatatatatatatatatatattttgagacagagtttcactcttgttgaccaggctggagtgcagtggcgcaatctcggctcacaacaacctccgccgcctgggttcaagtgattcttctgcctcagcctcctgagtagctgcggttacaggcatgccccaccatgcccagctaattttgtatttttagtaaggacgaggtttttccatgttggtcaggctggtctcaaactcccgacctcaggtgatacacccagcttggttggcctcccaaagtgctgggattacaggcatgagccaccatgcccagtcttttctattgtaaaaaaataataattktttacaataaataaatacaataaatacaataaaaagtaaaattttattgtaaaaaatatatattttttacaatctgtgtattcacataaagattcaaccaaggtatacatttctagcaaatagtttaaaccactgtccccttagatacctaagtactatatt

SEQ ID NO: 334417 - DNA, 541 bp, Homo sapiens
accctcagtctgtttgtctcctgactaaaactgcatttctttaggagaaaaacccagattggcccacccaggatgcctacccatgaattaatcagttacagtctcagaaccactgagacctaaaattgtgtattaggagccatgcctactgaaaagtgaatagctatgaagcaagttctcaaatgtgcaaattgatctgccatttttaaaacttttacaaagacaattgaggaaggacaactactcaactttatgtttttattgttttaaattttattcgagctattcctaaacaacatcaaaatatttytattttgataagaaaatgtaaaacctttcagaaatatattcctgaaaatttaattatatccttatatgtttgagttcattttttttacacacttaaaagaatgtgttagacaacattttttaaaggcagggagctggacttattgatcaatgtactctgttctaggcactgttaaccacattatattaaatgaatatatgtaccaatcagtacattagcaaagcatcacaa

SEQ ID NO: 334418 - DNA, 541 bp, Homo sapiens
accctcagtctgtttgtctcctgactaaaactgcatttctttaggagaaaaacccagattggcccacccaggatgcctacccatgaattaatcagttacagtctcagaaccactgagacctaaaattgtgtattaggagccatgcctactgaaaagtgaatagctatgaagcaagttctcaaatgtgcaaattgatctgccatttttaaaacttttacaaagacaattgaggaaggacaactactcaactttatgtttttattgttttaaattttattcgagctattcctaaacaacatcaaaatatttttattttgataagaaaatgtaaaacctttcagaaatatattcctgaaaatttaattatatccttatatgtttgagttcattttttttacacacttaaaagaatgtgttagacaacattttttaaaggcagggagcwggacttattgatcaatgtactctgttctaggcactgttaaccacattatattaaatgaatatatgtaccaatcagtacattagcaaagcatcacaa

SEQ ID NO: 334419 - DNA, 557 bp, Homo sapiens
cttcaccaggagtagattccgtctcaagaaaccacttcctttggtcatccataagaagccactcytcattcattgaagtttcatcatgagattgtcaacactccagtaccgtcttcagactccacttataattctagccctcttgctatttctaccacatcttcagttactttctccactgatgctttggacctcccaaagtcacgcaggagggttagaatcatcatcttctaaacgcctgttaatgttgatattttaacttcccccatggatcatggatttcttaatggcatctagaatggagaatcatttccagaaggttttcaatttatattgcccagattcataagaagaatctatctatattggctatagccttatgaaatgtatatttaaaataaccagacttgagagtaattactccttgatctaattgcaaaatggatgttgtgttagcgcatgaaacaacatgaatttccttggacatctccatcagagctcttgggtgaccacatgcattatcagtgatcagtaatattttgaaacggagcctttat

SEQ ID NO: 334420 - DNA, 557 bp, Homo sapiens
cttcaccaggagtagattccgtctcaagaaaccacttcctttggtcatccataagaagccactcctcattcattgaagtttcatcatgagattgtcaacamtccagtaccgtcttcagactccacttataattctagccctcttgctatttctaccacatcttcagttactttctccactgatgctttggacctcccaaagtcacgcaggagggttagaatcatcatcttctaaacgcctgttaatgttgatattttaacttcccccatggatcatggatttcttaatggcatctagaatggagaatcatttccagaaggttttcaatttatattgcccagattcataagaagaatctatctatattggctatagccttatgaaatgtatatttaaaataaccagacttgagagtaattactccttgatctaattgcaaaatggatgttgtgttagcgcatgaaacaacatgaatttccttggacatctccatcagagctcttgggtgaccacatgcattatcagtgatcagtaatattttgaaacggagcctttat

SEQ ID NO: 334421 - DNA, 557 bp, Homo sapiens
cttcaccaggagtagattccgtctcaagaaaccacttcctttggtcatccataagaagccactcctcattcattgaagtttcatcatgagattgtcaacactccagtaccgtcttcagactccacttataattctagccctcttgctatttctaccacatcttcagttactttctccactgatgctttggacctcccaaagtcackcaggagggttagaatcatcatcttctaaacgcctgttaatgttgatattttaacttcccccatggatcatggatttcttaatggcatctagaatggagaatcatttccagaaggttttcaatttatattgcccagattcataagaagaatctatctatattggctatagccttatgaaatgtatatttaaaataaccagacttgagagtaattactccttgatctaattgcaaaatggatgttgtgttagcgcatgaaacaacatgaatttccttggacatctccatcagagctcttgggtgaccacatgcattatcagtgatcagtaatattttgaaacggagcctttat

SEQ ID NO: 334422 - DNA, 557 bp, Homo sapiens
cttcaccaggagtagattccgtctcaagaaaccacttcctttggtcatccataagaagccactcctcattcattgaagtttcatcatgagattgtcaacactccagtaccgtcttcagactccacttataattctagccctcttgctatttctaccacatcttcagttactttctccactgatgctttggacctcccaaagtcacgcaggagggttagaatcawcatcttctaaacgcctgttaatgttgatattttaacttcccccatggatcatggatttcttaatggcatctagaatggagaatcatttccagaaggttttcaatttatattgcccagattcataagaagaatctatctatattggctatagccttatgaaatgtatatttaaaataaccagacttgagagtaattactccttgatctaattgcaaaatggatgttgtgttagcgcatgaaacaacatgaatttccttggacatctccatcagagctcttgggtgaccacatgcattatcagtgatcagtaatattttgaaacggagcctttat

SEQ ID NO: 334423 - DNA, 580 bp, Homo sapiens
aaactcccatggtatgaacaacactcctctgtaattttgatttgtaagcggtgctcttttttttttttttaaacaagacttccctgagctggtagggttttcttaatccttaagaattctgaatttaacatctaattcaacatgaaggagaccaagttagcacatgttktactctttttctccccctctgatactcttaaagccatgtcctgctctgtgtaaggacaacccctctcattttagcctatctactcattgactttgttcccgtgggtatccttttatctcttgaattctttctcctgaatcatttcaatcaggctgtgaacatactgtttcatatcttatcttaaaaacaaaaatctagtagacaaacagaatagaacccttgactccactgcatctctcacttttggagccatctatctgttatcttttacagaaaaagtcttcaaaatatttgtgaccctctctatgcaccccctcctagtctcttctcagttgtctggccaacttatggcaacttaattgcattgtgggctctaattaataacctccctgtattcatgaactttggtct

SEQ ID NO: 334424 - DNA, 580 bp, Homo sapiens
aaactcccatggtatgaacaacactcctctgtaattttgatttgtaagcggtgctcttttttttttttttaaacaagacttccctgagctggtagggttttcttaatccttaagaattctgaatttaacatctaattcaacatgaaggagaccaagttagcacatgttgtactctttttctccccctctgatactcttaaagccatgtcctgctctrtgtaaggacaacccctctcattttagcctatctactcattgactttgttcccgtgggtatccttttatctcttgaattctttctcctgaatcatttcaatcaggctgtgaacatactgtttcatatcttatcttaaaaacaaaaatctagtagacaaacagaatagaacccttgactccactgcatctctcacttttggagccatctatctgttatcttttacagaaaaagtcttcaaaatatttgtgaccctctctatgcaccccctcctagtctcttctcagttgtctggccaacttatggcaacttaattgcattgtgggctctaattaataacctccctgtattcatgaactttggtct

SEQ ID NO: 334425 - DNA, 622 bp, Homo sapiens
aaaagtcttcaaaatatttgtgaccctctctatgcaccccctcctagtctcttctcagttgtctggccaacttatggcaacttaattgcattgtgggctctaattaataacctccctgtattcatgaactttggtctttaactttgtagtctccacccactctgattctggaatggactttgatatggtttggatatgtgttccctcaaaatctcaggtggatatgtgatccccagtggtggaggtatgacctagtgggaggtatttcgttcatgggggtggattccacataaatggcttgcaggtaatgagtgagttcttgctttgagatctcgttgtttaaaagagtgtggtacattttctgccttgctccctctcttaccatgtgatacactggttctcccttcaccttccaccatgattacaagcttcccgaggccctcaccagaagcagatggtggaagctttcttcctgcacagcctgcagaactgtgggygaaaataaacctcttttctttataaattacccaatttcaggtattcctttatagcaatgcaaaaccaggctaatacagacttggacttacttttgccagtaggatgtggggagtgatggtatgcc

SEQ ID NO: 334426 - DNA, 459 bp, Homo sapiens
agagggatttttaggtcatcctagctaaagtagcttttttctacagcctcaattcattctctaacctactaccctttaaatttactttcttcatagcacttattattaatatcatctaaaattagcttatttattcaattcctacatatttattgtcgtttttttctctattagagtgtagttttcctcaaaattagaatcttgctttccttgttaacatctgtatccttcaatcyctgaacagagtttggcactgagtgggttctcaatatggatgtattcaaagaatgaacgtacctgaagtagtaaactaatggtgaatatgtcaaaatgttggattttgaccttatttaaaaattataatgacaataacccataatatatatccaaatccttagattcctgaaatgtgtgaaaaataaggcattgtaatggataaaatggaagaattatgtattt

SEQ ID NO: 334427 - DNA, 275 bp, Homo sapiens
tcaaacagatctcatgcttttctcatttttcttcttgaaaaaaagaccttgattttggcatctttagttaatttgtaaaatagagtaagctctcagcaaatgtctatggtattgaatagaataaattggtgctggattgaattactaattaattgytttatgtgaatatctaagcttatccttagagtataaaactttggaggacaggaaccaggtattatacttgtcctttttccttagattccagtatactacacttcacatggcagtagtgt

SEQ ID NO: 334428 - DNA, 275 bp, Homo sapiens
tcaaacagatctcatgcttttctcatttttcttcttgaaaaaaagaccttgattttggcatctttagttaatttgtaaaatagagtaagctctcagcaaatgtctatggtattgaatagaataaattggtgctggattgaattactaattaattgttttatgtgaatatctaagcttatccttagagtataaaactttggaggacaggaaccaggtattatacytgtcctttttccttagattccagtatactacacttcacatggcagtagtgt

SEQ ID NO: 334429 - DNA, 609 bp, Homo sapiens
ccagtgggtgtgtgttacagtgtgctcttttagttttgccgtgtgtaggcaacttgtattaatcagctcaattagacccttatcacaaggacaaagggctttctgtatcccagagttcttgccttggtgtgctggaaaaaatcagatcacacatgggcttggagaatgaatgcaagaatttattgaatggtggaagtagctctcagcagatggatggggagccagaarggggatggagtgggaaggtggttttcccccggagttcagtcactcaatggctgcactctcctctgaccaccctgggcaaattcccctcagcatccacattgttccactggtcgatggcctgctggtgtctgctgttgcctgttggtgtgctcttctgttcctctgctcctctagacgtctaactgcctgtgtgctcttctgctggtgtgttcctctcgatgtccagccacttgtgtgcatggccactagagtctcagggtttttataggcacaggatagggggcatggcaggttagggtggtcttagaaaatgcaacatttgggcacaaaaacaggagtgcctgtcctcacctaggtccgtgggtacaagctcgagggtgg

SEQ ID NO: 334430 - DNA, 533 bp, Homo sapiens
gaaggagctagaacaatgactaaaaggaaaaaaaaagaatatckttaagcacaacatcacacaatttcagaaccataaaaataaagagaaaaatcctaaaagttttcagagagaaaataaatgtcatatactgagaaacaggcattaacatttattttagacttgttaactactacaacggaagctaaatgctactagagcagtgcctttagaacatgagaggccactgttagtaacatataattctgcttccagtcaaatatggacatagaataaaggtatatttggattcacactctttcccttaaagctctttatgctctatgataacagggaaatcaagccgaaaagcagaagaaatcatatccaggaggcaagagagacaaaactggagagaggcaaagctaattcacagcacaagtcccaggatgacagatgagtagcaagcctagagagcaattggtccatacccagtaactagatatcataaattcttttcaatcacctgtggatcgtttataaaaactgaccac

SEQ ID NO: 334431 - DNA, 533 bp, Homo sapiens
gaaggagctagaacaatgactaaaaggaaaaaaaaagaatatctttaagcacaacatcacacaatttcagaaccataaaaataaagagaaaaatcctaaaagttttcagagagaaaataaatgtcatatactgagaaacaggcattaacatttattttagacttgttaactactacaacggaagctaaatgctaytagagcagtgcctttagaacatgagaggccactgttagtaacatataattctgcttccagtcaaatatggacatagaataaaggtatatttggattcacactctttcccttaaagctctttatgctctatgataacagggaaatcaagccgaaaagcagaagaaatcatatccaggaggcaagagagacaaaactggagagaggcaaagctaattcacagcacaagtcccaggatgacagatgagtagcaagcctagagagcaattggtccatacccagtaactagatatcataaattcttttcaatcacctgtggatcgtttataaaaactgaccac

SEQ ID NO: 334432 - DNA, 590 bp, Homo sapiens
gactttccttattttgtgttcttggcatatttattgaaggtaaattggccatgaatgtggatttaattctgagctctcctattctgttccattgatgtatatgtctctttttatgcctgaactattctgttttggttggtatagcttcgtagtacattttgaaatcagatagttcgatgcctccagcttggttccttttgttcaagattgctttggctatttgaattctcttgtagttccgtatgaattttaggatttttttctatttttattaaaaatgtcattgtatttttatagggattgcaagactctgtagcttactttgagtagaattgccattttacaatgttaattattccartccataaacatgagaaatctttccagttatttgtgtcttcaaaatttatttcattaatatcttgtagttttcagtgtacagatcattcaactgcttggttaaatttattcttaagcattttattcttccataatgccattgtaaaggagattgttttgcttttttatagagtcatttttagtgtgtagaaatgcaacattggtttttctttttattcttctgacttgtt

SEQ ID NO: 334433 - DNA, 533 bp, Homo sapiens
gaaggagctagaacaatgactaaaaggaaaaaaaaagaatatctttaagcacaacatcacacaatttcagaaccataaaaataaagagaaaaatcctaaaagttttcagagagaaaataaatgtcatatactgagaaacaggcattaacatttattttagacttgttaactactacaacggaagctaaatgctactagagcagtgcctttagaacatgagaggccactgttagtaacatataattctgcttccagtcaaatatggacatagaataaargtatatttggattcacactctttcccttaaagctctttatgctctatgataacagggaaatcaagccgaaaagcagaagaaatcatatccaggaggcaagagagacaaaactggagagaggcaaagctaattcacagcacaagtcccaggatgacagatgagtagcaagcctagagagcaattggtccatacccagtaactagatatcataaattcttttcaatcacctgtggatcgtttataaaaactgaccac

SEQ ID NO: 334434 - DNA, 533 bp, Homo sapiens
gaaggagctagaacaatgactaaaaggaaaaaaaaagaatatctttaagcacaacatcacacaatttcagaaccataaaaataaagagaaaaatcctaaaagttttcagagagaaaataaatgtcatatactgagaaacaggcattaacatttattttagacttgttaactactacaacggaagctaaatgctactagagcagtgcctttagaacatgagaggccactgttagtaacatataattctgcttccagtcaaatatggacatagaataaaggtatatttggattcacactctttcccttaaagctctttatgctctatgataacagggaaatcaagccgaaaagcagaagaaatcatatccaggaggcaagagagacaaaactggagagaggcaaagctaattcacagcacaagtcccaggatgacagatgagtagcaagcctagagagcaattggtccatacccartaactagatatcataaattcttttcaatcacctgtggatcgtttataaaaactgaccac

SEQ ID NO: 334435 - DNA, 534 bp, Homo sapiens
ccagtgtcatttgctttaggatagagtcttacacaaagctttccagtatttgataaattgatcctttggatccaagggacaggaaatccatgtgrtcatacactctcctgatagttgttaggcttgtgaaaacagccagattctgagagacggtgttctgttcctagtatgaatttttgagctatatattctctgtggtgtgtgtgtgtgtgtgtgtgtgtgtgtgtgtgtgtgtaaggagcaaggagaagataggtttatcaaagaacagtaaactgacaataacattgattattttcaaattgaaacataacttattagttggtttatttgaaaaaataaaagcctaaaataaacaaaatcagtgtatcatacattggaaaggtgagagtatttgatatggcttggatctgtgtctccaccaaatttcatgttgaattgtaatgcccaatgttagaagtagagcttgttgggaggtgtttgggtcatgggaactgtgatagttaatactgagtgtcaagttgattggattga

SEQ ID NO: 334436 - DNA, 581 bp, Homo sapiens
gaacagtaaactgacaataacattgattattttcaaattgaaacataacttattagttggtttatttgaaaaaataaaagcctaaaataaacaaaatcagtgtatcatacattggaaaggtgagagtatttgatatggcttggatctgtgtctccaccaaatttcatgttgaattgtaatgcccaatgttagaagtagagcttgttgggaggtgtttgggtcatgggractgtgatagttaatactgagtgtcaagttgattggattgaaggatggaaagtattgatcctgggtgtgtctgtaagggtgttgccaaaggagattaacatttgagtcagtgggctgggaaaggcatacccacccttaatctaggtgggcacaatctaatcagctgccagcatgaccagaataaaagtaggcagaaaaatgtggagatattagactgttgtagcctcccagactacatctttctcctgtgctggatatttcctgcccttgaacactgaactcctaattcttcagctttgggactcagactggctcctttgctcctcagcttgcagatggcttattgtgagatc

SEQ ID NO: 334437 - DNA, 579 bp, Homo sapiens
atgagaaactctgtcagatatggagggtgaatacgtatcaagggtaaggaactctggctaatcaaacttgacaggattcttgctaacaccaggttcttggasaacatacctgaggatggagcctcattgggctcagaggagtctgactaaaatttggtcaaagagacaatctttgtcagggagaatgaaaaacattggagttattaatggagttatttttcctcaagatgaaaaatctaggtgttgattatggaaaatatgtgaggaattactattctattcttcatatatactcaacaaggaataagagaaaataagcttgaagcatcccaagcagggaggaaatagtagatttaatgaatgaataattaaaccaactagtggcatacaagggaaatattccaatgtttcttcctttgtttaccattctcaatggatctttttggtccattctcattatactgctttcactgtcagttactgaggcacagaccctagtagtatactagacatttcttacattgtccagtgcccctcttgaaggattgtggtatctagctatcaatttggagctgattg

SEQ ID NO: 334438 - DNA, 642 bp, Homo sapiens
cggcccattttcagttggtgtagccccagaaaatctactgcagtcgtttttgttctgcaacatttatagtaccacgattattcccatcatctcaggtagcacagattattgaattaaggctggttattgttggatcagattgggtttgagacaggtactcggtggagaggcctgagggtgggtttagaagccagatgttgctctttgacctatttaataccgagcttgacacacacacacaatctctctctctctctctctctctctctcacacacacacacacacacacacacacwcactcctatgcccatccctagagtgtagggtgggcctaagactgcgcttctaacaagtctcccagttgctgctgctgttggtgctggttccgggaccacattatgagaaccactgaactgaatgaagcatgtgaaaattcacatatattaaagtgaaaattggagaaatggaaacaattacagtacccttcaggggactcggggtgggggagggggagccttatttctgtaaacctaggcctcaaaggtgcctggtgatagtaggcactcaataaatattgaatgagtaaatgagtacagataagactaaaacgtttttgctggcgcggcggatcgcttgaggtc

SEQ ID NO: 334439 - DNA, 642 bp, Homo sapiens
cggcccattttcagttggtgtagccccagaaaatctactgcagtcgtttttgttctgcaacatttatagtaccacgattattcccatcatctcaggtagcacagattattgaattaaggctggttattgttggatcagattgggtttgagacaggtactcggtggagaggcctgagggtgggtttagaagccagatgttgctctttgacctatttaataccgagcttgacacacacacacaatctctctctctctctctctctctctctcacacacacacacacacacacacacacacactcctatgcccatccctagagtgtagggtgggcctaagactgcgcttctaacaagtctcccagttgctgctgctgttggtgctggttccgggaccacattatgagaaccactgaactgaatgaagcatgtgaaaattcacatatattaaagtgaaaattggagaaatggaaacaattacagtacccttcaggggactcggggtgggggagggggagccttatttctgtaaacctaggcytcaaaggtgcctggtgatagtaggcactcaataaatattgaatgagtaaatgagtacagataagactaaaacgtttttgctggcgcggcggatcgcttgaggtc

SEQ ID NO: 334440 - DNA, 642 bp, Homo sapiens
cggcccattttcagttggtgtagccccagaaaatctactgcagtcgtttttgttctgcaacatttatagtaccacgattattcccatcatctcaggtagcacagattattgaattaaggctggttattgttggatcagattgggtttgagacaggtactcggtggagaggcctgagggtgggtttagaagccagatgttgctctttgacctatttaataccgagcttgacacacacacacaatctctctctctctctctctctctctctcacacacacacacacacacacacacacacactcctatgcccatccctagagtgtagggtgggcctaagactgcgcttctaacaagtctcccagttgctgctgctgttggtgctggttccgggaccacattatgagaaccactgaactgaatgaagcatgtgaaaattcacatatattaaagtgaaaattggagaaatggaaacaattacagtacccttcaggggactcggggtgggggagggggagccttatttctgtaaacctaggcctcaaaggtgcctggtgatagtaggcactcaataaatattgaatgagtaaatgagtacagataagactaaaacgtttttgctggcgyggcggatcgcttgaggtc

SEQ ID NO: 334441 - DNA, 615 bp, Homo sapiens
tctctgagtctccccgctaaattttgggggccctggaaatttcccaatttggcaaaatgcagaactatattgttttcttaggtccttcagttggcaagctttaattaaaatgggacaagtggcgaagtaaaagtgaatcccaaacaaagattttacgaaagtgcctctctgccagtcttgacggagaggtgaaagctgcaagctttcttactcagatttgatgaccttttcacttacccagacttccacctcagcaatttggttaattacccctcgacaagctgaatcaccttccccaaataagtatcatttacaagagctttttaattaaagtgkatattgaacacaggtaaaggtttctagaaaattaaaggtttctggtaaaacttgaagtgtttcccagttaactaattgcaaagtagatacaaagaataaagattttggcccttaatctgcaaccttgaactctgcttactcaaattcagagtttgagatggaatctggtgccctaatgagctgacactgtaccaaagggtctttaatttgtgcaactccaaacaaaatctgttatgcttgagtgcacccatgggcacgtatgtgtttgagaacacagct

SEQ ID NO: 334442 - DNA, 334 bp, Homo sapiens
tgtataaaagctaaatagcaattgcaacaatgatggccctacacacagaatatttcctttttttttttcttttctaaaataatttttaattaaaaaggaaatagagatggggtattcttgtgttgcccaggctggtcttgaactcctgtgcttaagcaatccttccgtcttggcctccccaaagtgctgggattacacacatgaagccaccatgcccagcctatgttcttatttccctacagcatcaagtartggtgtcatagcctgaagatcccacgttctagttttggctctccagcatttactagctgcatgaccttgggcatgttggtga

SEQ ID NO: 334443 - DNA, 511 bp, Homo sapiens
caccctctccactccaccaacagcccaggcatggcctyaactgcccctgccccccgccccgtctgcttcccaaacactgagccatgggctaaaaggaactggaggatggtggggggcagcgcttccctgtcctggcatgggccccaaccctggcctcccacctcactcacctgcagctcctggaacagcaggttggccacgacacggtggcagagccgggtcacatggtccagagcactagcagatgcttcccgggccggctcgctttctgggggccccacccgggccaggcgctcggccagagctctgtggggatcaacagagccaaaactgagggaccccaacatctcagcccaactgcctaggcctgtcttcccttaggtagatcagaggggcacaggggtgacaggtcagatggggggctgagaaaggtcagggactctggagaggggtcaggggatgcttgacaggttgggggtgtctggggattggggtgtctggggacgtcagg

SEQ ID NO: 334444 - DNA, 577 bp, Homo sapiens
agctgcgactagtggagtgcactaccaaacccagctaatttttaaagtttttaaagagacggggtcttgccatgttgcctagcctggtcttaaactgttgagctcaagcaatcctcccacctcagcctcccaaagtgttgggattacaggtgtgagccaccatgcctggcccctggtggaatttttaactctctgagttgtccacactgtttctccaaaaattggggcagttacagtttaggttttcctattcctgttttcaaacctcctgtagaggcttctgctcatctgttgcatttccagtaacttgtgactgcctgtatttcctgtctctccaattttggcggcagcaatctgcctagtggtctcattcctctaacaaatctaagaagagttgttcagcttttgtttggttttgttattgttgctcagccttttaacctgtttagatggagtgttaccttctaagctccttacatgctggacyggaaaccaaatttctgtccttcgtttctgaaggacagttttcctgaatactattcttgcttggcaggttttctttcagtgctctgaatat

SEQ ID NO: 334445 - DNA, 579 bp, Homo sapiens
ttgaatatgtgttaccaagatacagcacaggttcagggaaaagagttcgctactccaggggttatttagaagacactttctctgcctcatcctgccctcaagctttagtcaagaagttatggcccccagtccctgacttcttacttatcccattgaggactgcctttctctctctcagttctggcctctgccccccaaagtcagctctctaaaagcaagcatgttttagaccactcactctttccctctttcttcaggaatgaattgggaaaggctgatgagtaaaacataccatccttttctattttcttgatgctgtttacaacatagtttggtgatatccagagctaatgtacatgctttcaaaagctaatctgcctgttgatgrtaactaggtacagcgactttaaatacagttgctataatcctgaaaagccccaggagcacatcagggagctgggaaacacagttgcagagaactcagctgtatgttgccctctgaccttggcccagaccttcagaggctcagtctgttgagtctgttgtgactgtcttatgaatcaatctgttgtgccaacc

SEQ ID NO: 334446 - DNA, 549 bp, Homo sapiens
gtgctttttctgggcccacgtgtggccacccatggatcaataagcacacacttcctcccttctgaagcccataaaaaacccagactcagccagactcagagtcacacagatgttgggacaacctgcctgcagataggagctacccactctgggtctcctctcttctgagggctgcacttgacaggatgaactgcctgtggaaaggagctacctacattgggtctcctgagagctrtactgttggtcaataaagcaccttttcgccttgcttaccttccagttgtctgcatacctcattcttcctggatgcaggacaagaactcgggacccgccaaatggtagggctgaaagagctgtaacacaaacagggctgaaacacatcccaccccctcccactggcttgccacattgcaagtgatgagaaggagagaagagctgcagtccttcagggagtccaaacctaagggctctctgagccagggctgtgacaccctctttggggctctgtggttcctggtatctccaagcttcctggaggcaccacattcc

SEQ ID NO: 334447 - DNA, 555 bp, Homo sapiens
gagtccaaacctaagggctctctgagccagggctgtgacaccctctttggggctctgtggttcctggtatctccaagcttcctggaggcaccacattccctggagcccacagtggaagccacatgcactatgcctggtccagccacagcctcacatggagccagcacctgggccagcgcctggagctgcccacccacagcarctggtgtgcctggctgtgtgcagtggctggaccccatgcacctctctcatgcacctctcatcactctgcacctggctcacccttggcaggcatgggatccgggccagtagaacaagctgagcacagcctgtgaggttgagtgggcagaatgagcctagtagacccaagcacaactcgggcaaaggtgccactggccacagaggcttccagctggaaaagtgacaccctaaggatcctgtgacaatttggctatacaaagaattctacagaaatgttcatagcagctttatttgtaataaccccaaactggacacactcaaaatgtccatcaagaggtgaatggataaacatat

SEQ ID NO: 334448 - DNA, 585 bp, Homo sapiens
gcctgtggtcatttctccagtgccagaatgcataattggcatagacatacttaccagctggcagaacccccacattggctccctgactggtagggtaagggctattayggtgggaaaggccaaatggaagccgttagagctgcctctacctagaaaaatcaaaaacaatatggcatccacggagggattgtggagattagtttcaccatcaaggacttgaaagatgcaggagtggtgattcccaccacatccccatttaactctcttatttgacttgtgcagaggacagatggatcttggagaatgacagtggattatcataagcttaaccaagtcatgactccaattgcacctgctgtaccagatgtggtttcattgcttgagcaaattaacacatctcctggtacctgatatgcagccattgatttggcaaatgctttttccccattcctgtccatgaggcccacgagaagcaatttgccttcaattggcagggccagcaatatacctttactgtcctacctcaggggtttatcaactctccggctttgtgtcataatcttgtttggagagacgttgatcaat

SEQ ID NO: 334449 - DNA, 585 bp, Homo sapiens
gcctgtggtcatttctccagtgccagaatgcataattggcatagacatacttaccagctggcagaacccccacattggctccctgactggtagggtaagggctattacggtgggaaaggccaaatggaagccgttagagctgcctctacctagaaaaatcaaaaacaatatggcatccacggagggattgtggagattagtttcaccaycaaggacttgaaagatgcaggagtggtgattcccaccacatccccatttaactctcttatttgacttgtgcagaggacagatggatcttggagaatgacagtggattatcataagcttaaccaagtcatgactccaattgcacctgctgtaccagatgtggtttcattgcttgagcaaattaacacatctcctggtacctgatatgcagccattgatttggcaaatgctttttccccattcctgtccatgaggcccacgagaagcaatttgccttcaattggcagggccagcaatatacctttactgtcctacctcaggggtttatcaactctccggctttgtgtcataatcttgtttggagagacgttgatcaat

SEQ ID NO: 334450 - DNA, 607 bp, Homo sapiens
tcaattttaaggcgtgtgccatgtgcaaatgagaaaaatgtacattctgctgtttggggtagagagttctgtagatttctgttaggtccatttggtcaagtattgagttcaggtcctgaatatctttgttagttttctgcctcagtgatctgtcttatactgctaatggggtgttgaagtctcccactcttattgtgtggttacctaagtccctctgcaggtctctaagaacttgttttatgaatctgcatgctcctgtaatggatgcatatttatttatgatagctaagtgtttcttgttgaattgaaccctttaccaatatgtaatgctcctttgtctttttccatcattgttagtttaaaatctgttttgtctgaaattagaatagcaacccctgcttgttttttttcctttgctttgttgtatatgtttctctrtccctttactttgagccaatgggtgtcactgcatgtgagatagatctcttgtagacaacatagatttgggtcttgcttctttatccaaattaccactctgtgccttttaactgggggcatttagcccacttacattcaaggttaatattgatttgtgtttatttgatct

SEQ ID NO: 334451 - DNA, 458 bp, Homo sapiens
ctgtgcattttctgaatttgaatgttggcctcttttgtgaggttggggaaatttctgtggatgatatcctcaaatatgtcttcaagttctttgctttctctccctctctttcagggataccaaagagtcatagatttggtctctacataatcctgtatttctcagaagttttgtttattctgtgttttttttttctgttgttgcctgagttaattcagagaaccaatcttcaggctctgagattctttcctctgcttggtcgaytttgctgttaatacttgcaattgtattatgaaatttttgtagcgtttttcagctctatcagattaagtgtgcttttttctttaaatgcccactttatttttcagctcctgtatcattttattgtgttccttagattctttggattgggttcaactttctcttgaatcccgatgatctttgttcctatttatatt

SEQ ID NO: 334452 - DNA, 597 bp, Homo sapiens
agtttgagagagagtaagaaagcagtgtagtaagagtgaccatgggcatttgggccacttattcatgtaacttactagtgcctttagggattgctctggacttactgcatatataacacttctatttgatgacggggagctgctatgcacacccaactttatggcttggtgagtcggataacacctcatcccatgatgggcagctcaggtaacatggtaacttggtggcctatggtcaggtgtttagtttctactaaggcacagtagcaggctaagagctgtctctcaaaagaatagcactgtgtaatgtttcagtcaatgatggaccgcatatactgctgtggctccataaaaycataaaactgtattttgtactgtacttttctatttttagatacatgaatacttaccattgtgttgcagttgcctacagtatttagtacagtaacatgcggtacaggtttatagcctaggtgcaatagtctaattgtagagtaggctataatatctaggtttgtgtaagtaaactctatgatatttgcacaatggcaaaatcgcctaacaacatgtttctcagaacatatccctgtcattaag

SEQ ID NO: 334453 - DNA, 597 bp, Homo sapiens
agtttgagagagagtaagaaagcagtgtagtaagagtgaccatgggcatttgggccacttattcatgtaacttactagtgcctttagggattgctctggacttactgcatatataacacttctatttgatgacggggagctgctatgcacacccaactttatggcttggtgagtcggataacacctcatcccatgatgggcagctcaggtaacatggtaacttggtggcctatggtcaggtgtttagtttctactaaggcacagtagcaggctaagagctgtctctcaaaagaatagcactgtgtaatgtttcagtcaatgatggaccgcatatactgctgtggctccataaaaccataaaactgtattttgtactgtacttttctatktttagatacatgaatacttaccattgtgttgcagttgcctacagtatttagtacagtaacatgcggtacaggtttatagcctaggtgcaatagtctaattgtagagtaggctataatatctaggtttgtgtaagtaaactctatgatatttgcacaatggcaaaatcgcctaacaacatgtttctcagaacatatccctgtcattaag

SEQ ID NO: 334454 - DNA, 542 bp, Homo sapiens
tgttcatttgttcaagcaatgaaaccacatcaagtatagcaggtgcagttggagtcaccagttgggtaagcttatgataatccactctaattctgtaagatcatttgtcttctgcacaggccaattaggagagttgaatgagatgtagtgagaatcaccacccctgtatctggtgtcactaatctctgcaatgaaargaatgcagttattgcttctgttttactgttttcctaggtggtggcagttctagtggcttctagtggccttttccatggtaatatccctcatttcattgtcagggaaccaatgtggaggttctactaactgctaagtatatctgttccttatgcatcctgaaactggggaaataactacaggatgggtttggggacccactgggccccctgagagatggaactgaactaaaattccattaatcacctggcccccataatcccctactctgattggagtgccacagtgacattttgagtctcctggaatcaaggtcagttcagagtcagtgtccagtagtctctgaa

SEQ ID NO: 334455 - DNA, 542 bp, Homo sapiens
tgttcatttgttcaagcaatgaaaccacatcaagtatagcaggtgcagttggagtcaccagttgggtaagcttatgataatccactctaattctgtaagatcatttgtcttctgcacaggccaattaggagagttgaatgagatgtagtgagaatcaccacccctgtatctggtgtcactaatctctgcaatgaaaggaatgcagttattgcttctgttttactgttttcctaggtggtggcagttctagtggcttctagtggccttttccatgrtaatatccctcatttcattgtcagggaaccaatgtggaggttctactaactgctaagtatatctgttccttatgcatcctgaaactggggaaataactacaggatgggtttggggacccactgggccccctgagagatggaactgaactaaaattccattaatcacctggcccccataatcccctactctgattggagtgccacagtgacattttgagtctcctggaatcaaggtcagttcagagtcagtgtccagtagtctctgaa

SEQ ID NO: 334456 - DNA, 612 bp, Homo sapiens
aagctgactcagctgtctcctggccctgacttttctaagatgagaggagctgataggaacaatttgggtgagatgtttgtcctgagtccatttggttatggtcaggtgatacggtcacagagcacaaacaaggctggcagagccccactctgtgtgaggatggggtggaggaagcatgtgttcctcctgatgttgtcacacaggcacacatgcattcattaaaaatgtttttgggccaggcgcagtggctcacgcctgtaatcccagcactttgggaggctgaggtgggtggatcacctgaggtcgggagtttgagaccagcctgaccaatatggagaaaccccgtctctactaaaaatacaaaattagcygggcgtggtggcacatgcctgtaatcccagctactcgggaggctgaggcaggcgagttgcttgaacccaggaggtggagggtgcagtgagccgagattatgccattgcactccagcctgggcaacaagagcaaaactgcatctcaaaaaatatatagtaatagtaataataaaacagttcctacctcccagggatacagtgtgtgttaactaagacatttattcacttattccataaatac

SEQ ID NO: 334457 - DNA, 612 bp, Homo sapiens
aagctgactcagctgtctcctggccctgacttttctaagatgagaggagctgataggaacaatttgggtgagatgtttgtcctgagtccatttggttatggtcaggtgatacggtcacagagcacaaacaaggctggcagagccccactctgtgtgaggatggggtggaggaagcatgtgttcctcctgatgttgtcacacaggcacacatgcattcattaaaaatgtttttgggccaggcgcagtggctcacgcctgtaatcccagcactttgggaggctgaggtgggtggatcacctgaggtcgggagtttgagaccagcctgaccaatatggagaaaccccgtctctactaaaaatacaaaattagctgggcgtggtggcacatgcctgtaatcccagctactcgggaggctgaggcaggcgagttgcttgaacccaggaggtggagggtgcagtgagccgagattatgccattgcactccagcctgggcaacaagagcaaaactgcatctyaaaaaatatatagtaatagtaataataaaacagttcctacctcccagggatacagtgtgtgttaactaagacatttattcacttattccataaatac

SEQ ID NO: 334458 - DNA, 620 bp, Homo sapiens
acagtacaacatgaacataatttccacattgtttaaaaatccacatagctcttttaataaataaagcatattcatggcttagattttaaatcacatttacagatgagagaaaacttctaggcctaaacrggtaacagtgaagcgactactgctggaaggagtggtgtgccacatgcgccttaagcctcaagagtggggactgcagggctaggaacaccaaacacatcacctctaggccagatggaaagccgagacccaggaagcccatgcaaccacctctgccccctcccctagtgctgcagaaccaactggatgctgtgttactttcagatgaactggaggtgggtcctgatcatattacatgaagcttcccaccattgtgaataattaggcaaggcgttagtgtcagaggggcatcactgataaatgcaaagcaatattggggcagtaaagaggaagctacagaaacattcgcgtttcttcaaatatcagaatcttccacatcatagcaggagagctgagaacgtgctctacctcctgaaggcttagtccaaaaatttcctgttggcttttgcaccaaagaaggctccctggacttctagcatcatctgctgggctat

SEQ ID NO: 334459 - DNA, 566 bp, Homo sapiens
ccttgccttcaacatgcagtcacaggagaaataaaggacacacaattaagttatagtgtagtatcatgattcttggccaaaagaaaragtaaatgtcagcagtaaatatgaatgatagagtgaggtaatacaaagaactttgaagtgagagaggtaaggttgcctactatactggacatctattttggctgcctgccatccaatcacccttttcaaggaagattgttccttccctactctcagtccatatgtttatggtatagttaattccaccccgaactccaagggtcaacttctgaccccaggcatgaccattaaagcatcaccttcccctggtcacagtgattagttccagaatggacccatgacctactcttcagtgagatgcaatgattcttttgtgagaacaattagaagagaggcagtccatgttttagctatactttagcccagagggatagctccagtggtcttgtaccacaaagggaaagaaagcctgtctctgaatggagccaacacagtctgtagctaccacgtctgaggccggacttttcagctacgtgagc

SEQ ID NO: 334460 - DNA, 435 bp, Homo sapiens
cacatgatgtctctttgcctgccagtgggaggtcctcaggtgtgagtaactgctcctgttctttgacacacgttccatatagaagacatggagcctggaaactatgccgatggctggagtaggccattcctaattccatgccaaactaaaggctaatggctactttcttcttttaaagaagcttaggtgagaaaacaattcctaattccaaaccagtacctatctttaccaccgcatctgccaaacaccactctcacttcctgctgagctgtggctctgactcaracatgttcccctcttacaggcagctccagctttcctttcagctgccctccgtgtgccaaccttttcttaaaaatgttaaataagcttgtaatgttgtaaattcagagctgcacagatgaaattctgggctatggtatacaataagcctcc

SEQ ID NO: 334461 - DNA, 495 bp, Homo sapiens
accaaatttttatccctttttttttgctagaatttttatgcatggtgtatcttaattttggcaaagtgtttgatagagattccaaaaataaacttgtgaatacaaaaatgaagtgagacctactagttgtaagtggatttgaaggtggttgaaaagcatactcaaaatatgatcagcaaatctttataattgataaaaataggtccacagcagagtatcacattaattaggccttaatttcttacttgatcaatatttttatccatgactttaatagaaacaaagaaaccatgtcaataatatttaaatatgccacatgcacctatatagaaaacatacatagttaagtttcaccagctggaagaacaacagttcagttaccttaaccagttgaaataatgaacctacagtaaccaagtgaaataagcagaactctaagaaaagkcccgcatttatgttctaaaaccaactgtacaaatacaggatgaagaagac

SEQ ID NO: 334462 - DNA, 496 bp, Homo sapiens
agcgattcacctgcctcagcacccccgagtagctggaattacaggtgtgcaccaccatgccctgctagttctttttgtatttttggtagagatgaggtttcaccatgttggtcaggctgttttttttttttktttttttttttttaatgtactagaaactcaaatatcccaacttaggagcgtattttttcaatctcagaatgaaatttaaggactaaacttaggaaattcttaatccaactgaaatattctatgaaattctatttacatgggatcatagcaaatgtgtttgtgcagaggccaccctgccccaagacaaaaacttcccagaagagaaataattcaatgcaatgtatttttgtcacctatacttcatacaatggattctattttttcttttgaacttttatttctgtgattccactgctgtgaagagcctaataaatctaagtcactatttctccaccagcactctcttgctcctgaatagaagatg

SEQ ID NO: 334463 - DNA, 496 bp, Homo sapiens
agcgattcacctgcctcagcacccccgagtagctggaattacaggtgtgcaccaccatgccctgctagttctttttgtatttttggtagagatgaggtttcaccatgttggtcaggctgttttttttttttgtttttttttttttaatgtactagaaactcaaatatcccaacttaggagcgtwttttttcaatctcagaatgaaatttaaggactaaacttaggaaattcttaatccaactgaaatattctatgaaattctatttacatgggatcatagcaaatgtgtttgtgcagaggccaccctgccccaagacaaaaacttcccagaagagaaataattcaatgcaatgtatttttgtcacctatacttcatacaatggattctattttttcttttgaacttttatttctgtgattccactgctgtgaagagcctaataaatctaagtcactatttctccaccagcactctcttgctcctgaatagaagatg

SEQ ID NO: 334464 - DNA, 577 bp, Homo sapiens
aataaagaacttgattgtgttcagcttcctttgtaggtgaaaacttcctgctttcaagtggtaattaccctttaagtcccatttatcatcctttaayccaaaggcaggagaaaacccacgaatctcaatttacccacctcaaatgaaaaaggagtaagatctagaaaagagaaaagaaagagttctggttacggggccttcccaccttcccctgtaggattcaaagcatttgtttgtactcgctaatgcaccacccatggccccaaaatgtcttgtttcatctcaacgcttgtagtagagattgtgatttctagaaaatccatgttggtaaaacagattcctgcccctggaatctgttaaaaacaggtctttctctgtacactgttggtgatcctaactgttgatcatctggatgtgttccctgtacacgaagcagatctccctttcatgtccagtgcccactcatccacatgagaacccttcagaggaccttcatagccaccccagaagttaagccacaagagtctgcctcaaaaatgctgattgttttggcaacatacaaactaacagtctcaaa

SEQ ID NO: 334465 - DNA, 577 bp, Homo sapiens
aataaagaacttgattgtgttcagcttcctttgtaggtgaaaacttcctgctttcaagtggtaattaccctttaagtcccatttatcatcctttaacccaaaggcaggagaaaacccacgaatctcaatttacccacctcaaatgaaaaaggagtaagatctagaaaagagaaaagaaagagttctggttayggggccttcccaccttcccctgtaggattcaaagcatttgtttgtactcgctaatgcaccacccatggccccaaaatgtcttgtttcatctcaacgcttgtagtagagattgtgatttctagaaaatccatgttggtaaaacagattcctgcccctggaatctgttaaaaacaggtctttctctgtacactgttggtgatcctaactgttgatcatctggatgtgttccctgtacacgaagcagatctccctttcatgtccagtgcccactcatccacatgagaacccttcagaggaccttcatagccaccccagaagttaagccacaagagtctgcctcaaaaatgctgattgttttggcaacatacaaactaacagtctcaaa

SEQ ID NO: 334466 - DNA, 627 bp, Homo sapiens
tacaaactaacagtctcaaacctttctgtgaactttgggagttacaaattacaagcagccttttgctaatattaggaacaattcatgatatcctgagacccaaattaatcctcatttcagtccttcagtaaactacaaaggaaattatgactgcattgagggaaatatgagaaggagactactttccccagatttggtgtatggtttccacataatgccaagccctttgttctctcttccctatgccttccttacagtgccaggagcacaatcccagctgtgygaagggaaatttaaaaagcttcaaaagttgcaagagcaaatgaaggtgatagtgttttatgactaccttaacaagtgggtaaatgttaggattggaaacctaggaaacactacagattcaaggctccgttatctgaaaagccatggcctatcctctttaaagcaacttctttcagagctttctgaacttgggcatgcatcaccaagatctgcaggtgttcagtggtctaaagactagttgcatctaacagatgctttctctagcatgcaattagagaaacataaaagaataattaccaaggggatgctttcaagagaaagtaagcagacccctatagtattttg

SEQ ID NO: 334467 - DNA, 627 bp, Homo sapiens
tacaaactaacagtctcaaacctttctgtgaactttgggagttacaaattacaagcagccttttgctaatattaggaacaattcatgatatcctgagacccaaattaatcctcatttcagtccttcagtaaactacaaaggaaattatgactgcattgagggaaatatgagaaggagactactttccccagatttggtgtatggtttccacataatgccaagccctttgttctctcttccctatgccttccttacagtgccaggagcacaatcccagctgtgtgaagggaaatttaaaaagcttcaaaagttgcaagagcaaatgaaggtgatagtgttttatgactaccttaacaagtgggtaaatgttaggattggaaacctaggaaacactacagattcaaggctccgttatctgaaaagccatggcctatcctctttaaagcaacttctttcagagctttctgaacttgggcatgcatcamcaagatctgcaggtgttcagtggtctaaagactagttgcatctaacagatgctttctctagcatgcaattagagaaacataaaagaataattaccaaggggatgctttcaagagaaagtaagcagacccctatagtattttg

SEQ ID NO: 334468 - DNA, 527 bp, Homo sapiens
cttcattgtaaatctgtcttcaaaatattttactgtggtattgctcttgaaaaggtctctgatggcctcttaaggaccagatttaatggcctcctctaattccttatcctacctgaaatctctgcaacacaaggcactgttgactgagcagccctccttctcaaaactctctcctctcagcatgagtgacacaggtgctcttcttggctgggttctctttctgtgcctccaaccgacttataaatatatgggttcctcacagcctttaactttttctatcctcctaatcaagtctctggagttctcaaaccagacatggcggtttggcagatttgggtacacagatgccagaaatcaatggaaaggtctgaagagttggagagactctgaaattactcagggcctctgcttccttccacagctccatgttaagccataagaaggcatcagatcagtccccaaacatataytgcatgatggagtgagtgcccagagtcaaaggagaaatcagtacatgacacctgaaa

SEQ ID NO: 334469 - DNA, 426 bp, Homo sapiens
ttaaatgcatatcttttaatctaaaaacatctgtagtgttaacygtgtatcttttaatcgaagaaacatttgcagcatgttttcattggacctcccagtttcttaagggaacctctgcatgggtcagagcccagcccctgggatagagcaccagggctattgtgatgctccaggaccattcagagctcaggtaccattcagatactatgatgctcaggtgggattcaggcactgaggcgcttgggtaccaccattcaggtaccgagatgcccagttaccattcagagctccacagaaaatgctggctcagattactcctctcatcccaaccccaaacactgcaaaaggcccaggggaagagtaagcaatatctaaatgatagatgtcttgttttttacttgattttaatttgagtctaactgattg

SEQ ID NO: 334470 - DNA, 426 bp, Homo sapiens
ttaaatgcatatcttttaatctaaaaacatctgtagtgttaactgtgtatcttttaatcgaagaaacatttrcagcatgttttcattggacctcccagtttcttaagggaacctctgcatgggtcagagcccagcccctgggatagagcaccagggctattgtgatgctccaggaccattcagagctcaggtaccattcagatactatgatgctcaggtgggattcaggcactgaggcgcttgggtaccaccattcaggtaccgagatgcccagttaccattcagagctccacagaaaatgctggctcagattactcctctcatcccaaccccaaacactgcaaaaggcccaggggaagagtaagcaatatctaaatgatagatgtcttgttttttacttgattttaatttgagtctaactgattg

SEQ ID NO: 334471 - DNA, 567 bp, Homo sapiens
caatgctagtaagtggtgagcttggattaagatccatccattttaactccagaacccatgctgttcttttcctgtttactcgcagtgcatagcaaactgtgtatataagaccactgctaagaagcaaattatacaaaatccaacttttgcctttttgtctcctccaacattgtatcactctcttccagttaataacacttaaactaagaacagactcatctgttcctaaacctttatactctgccccatttgtgactaggatttcagatggcttttccaatctttctacatgttcactgaaaactttctaactatgcatatctggaaaagtttttccatgactcttagtacaaaatccttctacaaccctyagagaaagttagtgtataacctacctaagtctttaaaatgtatgctatgctttcagcaggctagaatagttcttttggagtttttctgctctggtgggtaaattcacattcaatcaatttctgaaaatacatattcagttgccaatgggcttgcattttgatatgcagcttataatatgcagttaatgggcaggaa

SEQ ID NO: 334472 - DNA, 633 bp, Homo sapiens
tttattttctttaagagacagggtctggctctgtcacaggctggagtgcagtggtcatagctcactgctgctcctctgacttaatgggctaagttgaatctggctagaagttctaaggactcagctgagatattgaagtctccgccccaagaagttcttcagagcattgtcccccaggtccccagttttgctaatggaaactgtgatgccttctggtaacaaagggctaaaagtgaacccaccccaaacaccaaaaaaggctcaccatttgcattcagaggtttaagaggtatttgtttattaaagcacatacaatagccagtatttccctttttctccattctactggtcaaaagaactagatactgctttttctcttycagctttcaggacccagtgaatgaatgaggcaatgttaatcagacggctgatgcgaatgtagcttttactatcccttcccctgtgtacatccataactcactaacagtggcaacacttaaaaaacaaaaaggagagcttcagactcccattgctaggcatggtggtgggttggggacagcagcaaaaacagtgtggagaggagaaaagggaaactagcctgagctggggcccctcgcctgggtcaggcatgct

SEQ ID NO: 334473 - DNA, 574 bp, Homo sapiens
gtcttcctggctcctggcccattatttcctccaaactcaaaataacactgcattagcatttggcaagacctgtgtgtgcacatttttcttaacagtttagagaaaattctgatccaagttcctccagtcagaatgatgaattacagamtttatagggctgctgaattatgatttctttaaattacggtttatggtggaaatgccgataccagctattcattaaaaactttctattttcccctttatgtctctgtcataacccagacccataatttctaaaactatagctattctctttgttgtggctcaaggctgatacagtactttggagtgtaattgtgtgggtgctaactaaaatgtggacccatgatgattaatttacaaggtcttatatgcttgcggctctgtctggaagaggggttttggcattacagcactcaccctctcccctccccagacagagggtcacggaggagttgctaattgtctcaactaagcttcatgtaccaatttagttgacaccttgcttcacattttcccatgacccacactccttcccaccagcatacgaggc

SEQ ID NO: 334474 - DNA, 574 bp, Homo sapiens
gtcttcctggctcctggcccattatttcctccaaactcaaaataacactgcattagcatttggcaagacctgtgtgtgcacatttttcttaacagtttagagaaaattctgatccaagttcctccagtcagaatgatgaattacagactttatagggctgctgaattatgatttctttaaattacggtttatggtggaaatgccgataccagctattcattaaaaactttctattttcccctttatgtctctgtcataacccagacccataatttctaaaactatagctattctctttgttgtggctcaaggctgatacagtactttggagtgtaattgtgtggrtgctaactaaaatgtggacccatgatgattaatttacaaggtcttatatgcttgcggctctgtctggaagaggggttttggcattacagcactcaccctctcccctccccagacagagggtcacggaggagttgctaattgtctcaactaagcttcatgtaccaatttagttgacaccttgcttcacattttcccatgacccacactccttcccaccagcatacgaggc

SEQ ID NO: 334475 - DNA, 499 bp, Homo sapiens
ggaggagttgctaattgtctcaactaagcttcatgtaccaatttagttgacaccttgcttcacattttcccatgacccacactccttcccaccagcatasgaggctttctgtgatagcttgatgacctccttatcctcatcacacatccttgctgccttcctgatttctccagtcttgttgaactgtttgcaatttagcaacagttctattctctctcacctgtgggtctttccatgtgctcttttcacttgtggcagtgccctttgtcatcacctctccattcctcccaatgtgtccccagattttcacttggataactgctatttatctttctggattcagcattgacagaaccttctctaggaaacttttacagtggaaagcttctcatagggcttctagaagatggaataataatttctctgctaggtggtgccataactgggggaccaatgatacccaaatattgatttcatggacataagcctgaaatttcct

SEQ ID NO: 334476 - DNA, 594 bp, Homo sapiens
tagcaacagttctattctctctcacctgtgggtctttccatgtgctcttttcacttgtggcagtgccctttgtcatcacctctccattcctcccaatgtgtccccagattttcacttggataactgctatttatctttctggattcagcattgacagaaccttctctaggaaacttttacagtggaaagcttctcatagggcttctagaagatggaataataatttctctgctaggtggtgccataactgggggaccaatgatacccaaatattsatttcatggacataagcctgaaatttcctccaaattttcaaggaggacccctggaacatctggaatactgtagaaaggacatcagcgatggatgggaggtcaatacggattccgcataaccttcctttcactctgggaattttaagttcctttttcaagtcaatgagaaatgtgaccactaggctttttggcccccaagtctgtgatctgggccaggcacttactatatacaaaaccaggacactctatcaaatcccatcagcgtgctgtgtgcctcctctaagtggaaaccacaagcctcccacccaactcacagtca

SEQ ID NO: 334477 - DNA, 489 bp, Homo sapiens
acactgttttcctcactgcctcctagatctattcctacccttggtaaatggtattcccacccctcgaatttctgtgaccagaaacctggaaactatctgcaaagctccttctcccttaccccccagggctgagggagcaccaacctctgttgcttctattatgttaaatcatatgaaattgccactcagaccatttttgcagacaaaacagcaatctgagatgagccaacctaacatactattaatayctggtgaaatcgtgaccccttctctttatcccctcagcaacgttctcattagaggatttctctcatctggatttctgcagctacctcctaaagaactttctgcctcagtgttttcttccaagccatcttccgcagatctttctcttcacagaaatgcagtcgcgacacttcccagaatcttcaaggcatccccacgggtgtaccaaggccctacagaccagtcctgctccctcccacttca

SEQ ID NO: 334478 - DNA, 489 bp, Homo sapiens
acactgttttcctcactgcctcctagatctattcctacccttggtaaatggtattcccacccctcgaatttctgtgaccagaaacctggaaactatctgcaaagctccttctcccttaccccccagggctgagggagcaccaacctctgttgcttctattatgttaaatcatatgaaattgccactcagaccatttttgcagacaaaacagcaatctgagatgagccaacctaacatactattaatacctggtgaaatcrtgaccccttctctttatcccctcagcaacgttctcattagaggatttctctcatctggatttctgcagctacctcctaaagaactttctgcctcagtgttttcttccaagccatcttccgcagatctttctcttcacagaaatgcagtcgcgacacttcccagaatcttcaaggcatccccacgggtgtaccaaggccctacagaccagtcctgctccctcccacttca

SEQ ID NO: 334479 - DNA, 489 bp, Homo sapiens
acactgttttcctcactgcctcctagatctattcctacccttggtaaatggtattcccacccctcgaatttctgtgaccagaaacctggaaactatctgcaaagctccttctcccttaccccccagggctgagggagcaccaacctctgttgcttctattatgttaaatcatatgaaattgccactcagaccatttttgcagacaaaacagcaatctgagatgagccaacctaacatactattaatacctggtgaaatcgtgaccccttctctttatcccctcagcaacgttctcattaraggatttctctcatctggatttctgcagctacctcctaaagaactttctgcctcagtgttttcttccaagccatcttccgcagatctttctcttcacagaaatgcagtcgcgacacttcccagaatcttcaaggcatccccacgggtgtaccaaggccctacagaccagtcctgctccctcccacttca

SEQ ID NO: 334480 - DNA, 551 bp, Homo sapiens
ggtgtaccaaggccctacagaccagtcctgctccctcccacttcaagtctcaccactgtcayaggactcaactctttatgggtgtctcaataaataatcctctttggcccattttctgaaatgttctgcctccaaagctccaaattcctctaattctcactcacctttaaaatcatctcagttgtgacatcctccggaaagctttcatacccactccacacactcacatacacacactccagtgtgggtcagggtcctgttccatgggctcatctcatatcctgcactatgcacagagtaccacagcaatatcatactaaacacccactcccttctgttgtgggctgaattcattctctgaaaattcatgtgttgaggccatatcccagtacctcagaatatctgtagttggatatagggcctttaaagaggtaattaagttaaaataaggatattaaaggatgggtcctgatccaatgtgaccaatatagttataagaagagaagattaggacatgcggagggaaacaggggcacatgtgcaaagaggag

SEQ ID NO: 334481 - DNA, 551 bp, Homo sapiens
ggtgtaccaaggccctacagaccagtcctgctccctcccacttcaagtctcaccactgtcacaggactcaactctttatgggtgtctcaataaataatcctctttggcccattttctgaaatgttctgcctccaaagctccaaattcctctaattctcactcacctttaaaatcatctcagttgtgacatcctccggaaagctttcatacccactccacacactcacatacacacactccagtgtgggtcagggtcctgttccatgggctcatctcatatcctgcactatgcacagagtaccacagcaatatcatactaaacacccactcccttctgttgtgggctgaattcattctctgaaaattcatgtgttgaggccatatcccagtacctcagaatatctgtagttggatatagggcctttaaagaggtaattaagttaaaataaggatattaaaggatgggtcctgatycaatgtgaccaatatagttataagaagagaagattaggacatgcggagggaaacaggggcacatgtgcaaagaggag

SEQ ID NO: 334482 - DNA, 571 bp, Homo sapiens
aatatctgtagttggatatagggcctttaaagaggtaattaagttaaaataaggatattaaaggatgggtcctgatccaatgtgaccaatatagttataagaagagaagattaggacatgcggagggaaacaggggcrcatgtgcaaagaggaggcagcaagagggccaccatctacaagctaaggagagtggcctccgagtaagccaagcctgcgggcaccttgatcttggacttccagcctccaaaacttggagaaaataaatttccattgtttgagccacccagtctgtggtattttgttatggcagccctagcaaactaacactttcattcactaaagagtccatttcttgtaggcaagctccatatttgatttgtctttatatccccagagcccagtacaatgcctggcacagagcaaaggcttcataaatgtttgatgaatctgtacatgagtgaatgcattgcaatgctacagagaaaagtagaggtgttagataagtcatacatttagtgaaaaagtaaactttggggtcagcacagttctctgaaagttcaataactgaaat

SEQ ID NO: 334483 - DNA, 571 bp, Homo sapiens
aatatctgtagttggatatagggcctttaaagaggtaattaagttaaaataaggatattaaaggatgggtcctgatccaatgtgaccaatatagttataagaagagaagattaggacatgcggagggaaacaggggcacatgtgcaaagaggaggcagcaagagggccaccatctacaagctaaggagagtggcctccgagtaagccaagcctgcgggcaccttgatcttggacttccagcctccaaaacttggagaaaataaatttccattgtttgakccacccagtctgtggtattttgttatggcagccctagcaaactaacactttcattcactaaagagtccatttcttgtaggcaagctccatatttgatttgtctttatatccccagagcccagtacaatgcctggcacagagcaaaggcttcataaatgtttgatgaatctgtacatgagtgaatgcattgcaatgctacagagaaaagtagaggtgttagataagtcatacatttagtgaaaaagtaaactttggggtcagcacagttctctgaaagttcaataactgaaat

SEQ ID NO: 334484 - DNA, 571 bp, Homo sapiens
aatatctgtagttggatatagggcctttaaagaggtaattaagttaaaataaggatattaaaggatgggtcctgatccaatgtgaccaatatagttataagaagagaagattaggacatgcggagggaaacaggggcacatgtgcaaagaggaggcagcaagagggccaccatctacaagctaaggagagtggcctccgagtaagccaagcctgcgggcaccttgatcttggacttccagcctccaaaacttggagaaaataaatttccattgtttgagccacccagtctgtggtattttgttatggcagccctagcaaactaacactttcattcactaaagagtccatttcttgtakgcaagctccatatttgatttgtctttatatccccagagcccagtacaatgcctggcacagagcaaaggcttcataaatgtttgatgaatctgtacatgagtgaatgcattgcaatgctacagagaaaagtagaggtgttagataagtcatacatttagtgaaaaagtaaactttggggtcagcacagttctctgaaagttcaataactgaaat

SEQ ID NO: 334485 - DNA, 571 bp, Homo sapiens
aatatctgtagttggatatagggcctttaaagaggtaattaagttaaaataaggatattaaaggatgggtcctgatccaatgtgaccaatatagttataagaagagaagattaggacatgcggagggaaacaggggcacatgtgcaaagaggaggcagcaagagggccaccatctacaagctaaggagagtggcctccgagtaagccaagcctgcgggcaccttgatcttggacttccagcctccaaaacttggagaaaataaatttccattgtttgagccacccagtctgtggtattttgttatggcagccctagcaaactaacactttcattcactaaagagtccatttcttgtaggcaagctccatatytgatttgtctttatatccccagagcccagtacaatgcctggcacagagcaaaggcttcataaatgtttgatgaatctgtacatgagtgaatgcattgcaatgctacagagaaaagtagaggtgttagataagtcatacatttagtgaaaaagtaaactttggggtcagcacagttctctgaaagttcaataactgaaat

SEQ ID NO: 334486 - DNA, 658 bp, Homo sapiens
aggggacattttgcttctcagaaatttctagcagatgaggggggaatccacacacagcaaactatactgcaacttctctctagagtcaggcaccatccagacactcccttcaagccactaccactgggatgcttattttatcagcaatacttaattaaaatacaaagaacagaaaaagtcctctttctggaggttatcgtgagctgcctctgaagttcaattccttagagacaaagttatgccaaagctatgtcttctccaaaaaaaccaccaaattaacaagagatacaacactgaaacaaaccaagagagtcayggtaaggtgtaagcaataaggataagggtggcaaagaatcagaggcggctgcagctgcagctgcattgacgctgccaagggagcagcaggagcaagcacatggaagcagatttaagaacttctctgccaaggacaaggaggtctaagcaggtctgagtccaagaggaggggatgtgaagggctggagctgggtagattttgcaggaactgatgaattccctcctggcacgtggctggtgggaagcaaaggcacagatttcaagtaaagcctctggattctggcaagaggccaagagaagataaggagttatttaagaaaaaaaaaaagcaagcaagcaagaa

SEQ ID NO: 334487 - DNA, 658 bp, Homo sapiens
aggggacattttgcttctcagaaatttctagcagatgaggggggaatccacacacagcaaactatactgcaacttctctctagagtcaggcaccatccagacactcccttcaagccactaccactgggatgcttattttatcagcaatacttaattaaaatacaaagaacagaaaaagtcctctttctggaggttatcgtgagctgcctctgaagttcaattccttagagacaaagttatgccaaagctatgtcttctccaaaaaaaccaccaaattaacaagagatacaacactgaaacaaaccaagagagtcacggtaaggtgtaagcaataaggataagggtggcaaagaatcaraggcggctgcagctgcagctgcattgacgctgccaagggagcagcaggagcaagcacatggaagcagatttaagaacttctctgccaaggacaaggaggtctaagcaggtctgagtccaagaggaggggatgtgaagggctggagctgggtagattttgcaggaactgatgaattccctcctggcacgtggctggtgggaagcaaaggcacagatttcaagtaaagcctctggattctggcaagaggccaagagaagataaggagttatttaagaaaaaaaaaaagcaagcaagcaagaa

SEQ ID NO: 334488 - DNA, 658 bp, Homo sapiens
aggggacattttgcttctcagaaatttctagcagatgaggggggaatccacacacagcaaactatactgcaacttctctctagagtcaggcaccatccagacactcccttcaagccactaccactgggatgcttattttatcagcaatacttaattaaaatacaaagaacagaaaaagtcctctttctggaggttatcgtgagctgcctctgaagttcaattccttagagacaaagttatgccaaagctatgtcttctccaaaaaaaccaccaaattaacaagagatacaacactgaaacaaaccaagagagtcacggtaaggtgtaagcaataaggataagggtggcaaagaatcagaggcggctgcagctgcagctgcattgacgctgccaagggagcagcaggagcaagcacatggaagcagatttaagaacttctctgccaaggacaaggaggtctaagcaggtctgagtccaagaggaggggatgtgaagggctggagctgggtagattttgcaggaactgatgaattccctcctggcacgtggctggtgggaagcaaaggcacagatttcaagtaaagcctctggattctggcaagaggccaagagaagataaggagttatttaagraaaaaaaaaagcaagcaagcaagaa

SEQ ID NO: 334489 - DNA, 656 bp, Homo sapiens
ctcaaaatatgatgtagatatcaaaatcctctagactcacaacgggagtacggtgataagggctaaaaattgaaatgagtaccctccttttccttcttctcgttactttttgttttcttcttggtgaaagggtcttgctctggcacgcaggctggagttcagcagcatgatcayagatttctgaagcctcaaacttcaggcctccagcaatccttccacctcagcctcccaaaccactgggattgtaggtgtcagccactgtgctcagtctttttgtgttttctttttttaaatgaacatgattcaacatccccaatctctcattctgactagattagaaattctttaagagtaaaaatcacatctttttcatctctatgatccctgcagtgcctatcacagtcccttttccctgtcatgtcataaattctcaataaatgaatttctgctgactaaatgggtggccaggtagtgtgtgtgggggtggatagatggatgaaagcattggcatcatacttatctacttcttctgtctttgaaaatttctttcagcctctttctctaaccacctcataaatattgaagcttcccccagttccaccctttatccttccttttcttactcttgggcaaacttttccatagatttaatgatg

SEQ ID NO: 334490 - DNA, 557 bp, Homo sapiens
gcaaggctacttgtgggaacagaaaggaaactataatacttccctttcatctcctcaaccactcatagatggcctggctattgagtcaaattatttattcaggatgtcatcaattctctgtagatgatatgccaaggcaaacagcagaaatcacttctaaattctgacagaagtccagattttgccctgaagggaccaattcatattcagagtagcaaattagaagraataataaatgaaattctacaatgagctctgagtcttttgtaactacacatagtggtccctgaaagaatttctgtctgggactcctgcgaatggaaccttggaaaaggtggagtggaagggattagctctttaagatcatctatggttcacaaagggagggaggctattggtgggggctactcttttgcacgttggtctcctgctttattcacaagcatctaggaaccattctaaaattaaacatcggtcttcctggctttggtcccacctcacaggatctctcaagagataagcccagaggctacctaacactttctcaaatcatgctt

SEQ ID NO: 334491 - DNA, 516 bp, Homo sapiens
tactaaactggtaagtgctaagggttggcccttaaagtgcagtcatgactaggtagcctaaagggggcttagtactgtgatttctccrttagtgaggacatgatacagactagcctccacaacgatagaaaactagtgaggaatgaggattatgagtgggctgaggatgcatgcacaactgaagaggtttaactatcctgcagctcacacatccctggaggcagcctggactctagggttgtctgatttatggaggtggctgagtcaaagcccaggacattacctggaagttctcgctttgacctctctctctctaactgtgtattccctaaggacaatattatctgtccaagccacacgggctgtcatgatgctgtccctccattttgaaatctggttgagatgatattatggcttctggacaaaatgtccacttccctgagaactttcagaagtgagcttaaaaggctaattagggtaaggaagggaagagatgcttgtttgaaaggtggctta

SEQ ID NO: 334492 - DNA, 516 bp, Homo sapiens
tactaaactggtaagtgctaagggttggcccttaaagtgcagtcatgactaggtagcctaaagggggcttagtactgtgatttctccgttagtgaggacatgatacagactagcctccacaacgatagaaaactagtgaggaatgaggattatgagtgggctgaggatgcatgcacaactgaagaggtttaactatcctgcagctcacacatccctggaggcagcctggactctagggttgtctgatttatggaggtggctgagtcaaagcccaggacattacctggaagttctcgctttgacctctctctctctaactgtgtattccctaaggacaatattatctgtccaagccacaygggctgtcatgatgctgtccctccattttgaaatctggttgagatgatattatggcttctggacaaaatgtccacttccctgagaactttcagaagtgagcttaaaaggctaattagggtaaggaagggaagagatgcttgtttgaaaggtggctta

SEQ ID NO: 334493 - DNA, 553 bp, Homo sapiens
tgtgcctgtaatcccagcagtttgggaggccaacgcgggtggatcactagaggtcacgagttcaagaccagcctggccaacatggtgaaatcctgtctctactaaaaatacaaaaaaataaaattagccaggtgtggtggcacacccctgtagtcccagctactcagaaggctgaggcaggagaatcgttcgaacctgggcaggcggaggttacagtgagccaagattgcgccactgtactacagcctgggtgacagagtgagactccatctaaaaaaaaaaaaaaagaaggaaatatctacycaggcatacaaaacaataagagaatatacatacaaaaagtacacactaaatcacattagtgtagttatttaaaaggggagctgggaagaaggagaatgggaatagggcatgataacaaaaggaatagacaggcagatggatgggcagacaaataagcaagagaatagcttggcccagaccaatgatgaaaatgggccatcaactgacaagcatgattaactccacatgcttcataagaatccccaaaata

SEQ ID NO: 334494 - DNA, 583 bp, Homo sapiens
ttcataataatggtttaaagtagataatatcgtccccattttgcagttgaaaaaattgaagttcagagaggttaaatggtttgccaaagccctcttgcagcaagtggtagaggtgccattcaaaataatcctatcccttataatcctgtaaaatgttcagttgtttgattctttacgtctcaaaatctgagaccatacagcactcagatatagaataaacttcaaaggcttttggattttgtttttgtttgttttgttttattttacatmtctataagcaacaactaacctgccttgactgtgagctcactataggcaaagactgaatcttatttactttatacacttcatgtactcaggacctagaacaatggtcaaaaaagaatgaaaggggaaatgaaataaaaggaacaaggaagaaggacaatagaaagcagaacccaagtctctaaacttatatgaagggctttctagacaccaggtaccatctcctaaaccagcggtccccaacccccaggcacagatcagtttcagtgtgtggcctgttagaaactgggccacacaacaggaggcaagcagtggg

SEQ ID NO: 334495 - DNA, 543 bp, Homo sapiens
cagaagctgtgcagacatactaacgcatgaaaagcatggtccaaggtagaggtcaaaatggttctagagtgggtctcctgaaggttcacagctgagccttttagaatatttatgtctataacagggtaatacatatgcctccatttctgaatgatttttttgcagtatataaggagaaacagataacactaagaaaaagaagtataattcttggamataagcaagatggcagaataagagattccagctctaaaacctgtacagaacactaattttcacaaccatctgcagatgacaataccttcacagaagcctggggtctagctgaaagtttccagtaccccagtggagtaaaagaaaaaaaaaatcaacaatagatgcattgaagagggtaagaaacacagtttcattttaccctaatactctcctccaagtacgcacaactcaaggccaagagagaccacttcagcccataatttctcctacagaggaaagtaagattgaagtgagtgcccagcttccccagccttgtgggatgctgcc

SEQ ID NO: 334496 - DNA, 594 bp, Homo sapiens
ttcagaaatgaaggagagagaaagcctttcccagacaaaggctgagggagtttgttaccactaaagtcctgtcttacaagaaatgctaaaggaaattcttcaagttgaaatgaaargacattaattagcaacatgaaaacacattaaagtataaaactcactggaaaagctaagaatataatcaaagtgagaataacactgtaatggtgatatgtaagtcagttttaactctagtgtaaaagttagaagaaaatgtattaaaagttactataactacaaattctttaaatgaatacatgatataaaaagatataaattgtgatgccagtaacataaaatgatgagggtcagggagaagtaaacagttttgtatgcaattggagataagttagtcatcttaaaatagaccattataagatattttatgtaaccctcatggcaatcatgatgaacaaacctgcagtagatacacaaaaaataaagagaaataaataaaaacataccactacaaaaaaaaatcatcaaatcacaaaggcaaacagcaagagagacagaaaggaagacaggaactacaaaacagtcagaaaacaacga

SEQ ID NO: 334497 - DNA, 594 bp, Homo sapiens
ttcagaaatgaaggagagagaaagcctttcccagacaaaggctgagggagtttgttaccactaaagtcctgtcttacaagaaatgctaaaggaaattcttcaagttgaaatgaaaggacattaattagcaacatgaaaacacattaaagtataaaactcactggaaaagctaagaatataatcaaagtgagaataacactgtaatggtgatatgtaagtcagttttaactctagtgtaaaagttagaagaaaatgtattaaaagttactataactacaaattctttaaatgaatacatgatataaaaagatataaattgtgatgccagtaacataaaatgrtgagggtcagggagaagtaaacagttttgtatgcaattggagataagttagtcatcttaaaatagaccattataagatattttatgtaaccctcatggcaatcatgatgaacaaacctgcagtagatacacaaaaaataaagagaaataaataaaaacataccactacaaaaaaaaatcatcaaatcacaaaggcaaacagcaagagagacagaaaggaagacaggaactacaaaacagtcagaaaacaacga

SEQ ID NO: 334498 - DNA, 594 bp, Homo sapiens
ttcagaaatgaaggagagagaaagcctttcccagacaaaggctgagggagtttgttaccactaaagtcctgtcttacaagaaatgctaaaggaaattcttcaagttgaaatgaaaggacattaattagcaacatgaaaacacattaaagtataaaactcactggaaaagctaagaatataatcaaagtgagaataacactgtaatggtgatatgtaagtcagttttaactctagtgtaaaagttagaagaaaatgtattaaaagttactataactacaaattctttaaatgaatacatgatataaaaagatataaattgtgatgccagtaacataaaatgatgagggtcagggagaagtaaacagttttgtatgcaattggagataagttagtcatcttaaaatagaccattataagatattttatgtaaccctcatggcaatcatgatgaacaaacctgcagtagatacacaaaaaataaagagaaataaataaaaacataccactacaaaaaaaaatcatcaaatcacaaaggcaaacagcaagagagacagaaaggaagasaggaactacaaaacagtcagaaaacaacga

SEQ ID NO: 334499 - DNA, 630 bp, Homo sapiens
tttcagtagcatatggacaaaatgttgtagaatggttatgtattatttttcatattttagaaaaaaagtataattctacattaagcccatgatttcataagtattatttattaagatgaggctacaataaaaagtaagttgatacaaagaaaaatattaagtaaataatagtacaggtgcttgtggatatggcgaaaacataaaaaggtggcatgtcaatgactcaggctgagcaaaaatgctatttatttatttatttagagatagggccttgctctgtcatccacgctggagtacagtagtgtgatcatggctcactgcaacctggaacttctgggttaaagtgatcctcccacctcagccttytgagtagtggagactataggtgcatgccattgcacccagctaatttaaaaaaaaaaaaaaaactttagtagagacaagatttctccacgttgctcacgctggtctcaaactcctgagctcaagtgatccccttacctcaacctcccaaagtgctgagattacaggcatgagccactgcacctggcccaatgctctttattggctcctactccctagggcaaagatccctaggattaccaaaagagtttgctcatcctactttag

SEQ ID NO: 334500 - DNA, 630 bp, Homo sapiens
tttcagtagcatatggacaaaatgttgtagaatggttatgtattatttttcatattttagaaaaaaagtataattctacattaagcccatgatttcataagtattatttattaagatgaggctacaataaaaagtaagttgatacaaagaaaaatattaagtaaataatagtacaggtgcttgtggatatggcgaaaacataaaaaggtggcatgtcaatgactcaggctgagcaaaaatgctatttatttatttatttagagatagggccttgctctgtcatccacgctggagtacagtagtgtgatcatggctcactgcaacctggaacttctgggttaaagtgatcctcccacctcagccttttgagtagtggagactataggtgcatgccattgcacccagctaatttaaaaaaaaaaaaaaaactttagtagagacaagatttytccacgttgctcacgctggtctcaaactcctgagctcaagtgatccccttacctcaacctcccaaagtgctgagattacaggcatgagccactgcacctggcccaatgctctttattggctcctactccctagggcaaagatccctaggattaccaaaagagtttgctcatcctactttag

SEQ ID NO: 334501 - DNA, 568 bp, Homo sapiens
ataaaaacagcatcattaaaaatttacagggggatctggcaagatggccaaataggaacagctctggtctgcagctcccagcgagacccatgcagaaggtgagtgacttctacatttccatctgaggtacactgttcatctcattgggactggttaggcagagagtgcagtccatggagggctagcagaagcagggtggggcattgcctcacccaggaagtatgaggagtggggggcctccctttcccagccaagggaagccatgagggactatgctatccagcccagatactacatttttcccagggtttttgcartcttcagatcaggagattcccttgtgtgcctacaccatcagggacctgggtttaaaaactgggcatctgtttgggcagacaccgagctagctgcaggagttttttttttgttcccctcacactccccacccccaatggcacctggaactccagcgagacagaaccattcactccccaggaaagggggctgaagtcagggagtcaagtggtctcgctcagcagatcctactcccactgggcccagcaagcta

SEQ ID NO: 334502 - DNA, 606 bp, Homo sapiens
atgaagtccctgcatttgtaataatgatagttkaggaacataaatataagagcatgaatcagtcaaaaataagtgaatgattctgggattgaatccaaattttatttaaaccaaattagttaacccattgcttggccaatatacaaattcatagttaggctaatggaagaatatctagagcagaagtagcatgctcaaatacttacagaggccaggatggtattataaatgttgaatatagaatgatgaagaatattaggtcccccataaaccttcaaaattcaataaaaataactatagaagggcagtgttactttcagccataagttgccacttttgatatggtgaaatgactagagtatgtaactgcatccccaaatgaaggagcccaatattagaatcccatgtaagagacaaccaagtctgtgaccagttattattctttgctcaagaggctgtccaatttgcctcttgctaaggagataagatacagtcatagttcccaagaagctgatagtttgagtttataagttaatacctagtgaataacaattaattatgacaaatactatagtaaatgtaagtacagaaaagagaaccatctag

SEQ ID NO: 334503 - DNA, 606 bp, Homo sapiens
atgaagtccctgcatttgtaataatgatagttgaggaacataaatataagagcatgaatcagtcaaaaataagtgaatgattctgggattgaatccaaattttatttaaaccaaattagttaacccattgcttggccaatatacaaattcatagttaggctaatggaagaatatctagagcagaagtagcatgctcaaatacttacagaggccaggatggtattataaatgttgaatatagaatgatgaagaatattaggtcccccataaaccttcaaaattcaataaaaataactatagaagggyagtgttactttcagccataagttgccacttttgatatggtgaaatgactagagtatgtaactgcatccccaaatgaaggagcccaatattagaatcccatgtaagagacaaccaagtctgtgaccagttattattctttgctcaagaggctgtccaatttgcctcttgctaaggagataagatacagtcatagttcccaagaagctgatagtttgagtttataagttaatacctagtgaataacaattaattatgacaaatactatagtaaatgtaagtacagaaaagagaaccatctag

SEQ ID NO: 334504 - DNA, 606 bp, Homo sapiens
atgaagtccctgcatttgtaataatgatagttgaggaacataaatataagagcatgaatcagtcaaaaataagtgaatgattctgggattgaatccaaattttatttaaaccaaattagttaacccattgcttggccaatatacaaattcatagttaggctaatggaagaatatctagagcagaagtagcatgctcaaatacttacagaggccaggatggtattataaatgttgaatatagaatgatgaagaatattaggtcccccataaaccttcaaaattcaataaaaataactatagaagggcagtgttactttcagccataagttgccacttttgatatggtgaaatgactagagtatgtaactgcatccccaaaygaaggagcccaatattagaatcccatgtaagagacaaccaagtctgtgaccagttattattctttgctcaagaggctgtccaatttgcctcttgctaaggagataagatacagtcatagttcccaagaagctgatagtttgagtttataagttaatacctagtgaataacaattaattatgacaaatactatagtaaatgtaagtacagaaaagagaaccatctag

SEQ ID NO: 334505 - DNA, 588 bp, Homo sapiens
tgaaatgactagagtatgtaactgcatccccaaatgaaggagcccaatattagaatcccatgtaagagacaaccaagtctgtgaccagttattattctttgctcaagaggctgtccaatttgcctcttgctaaggagataagatacagtcatagttcccaagaagctgatagtttgagtttataagttaatacctagtgaataacaattaattatgacaaatactatagtaaatgtaagtacagaaaagagaaccatctagtgaaaatagaggtagtgatatctgcattaagtcattaagtataaataggaattattcagcaatgaaagtggggagactccgcaggcaggaaaacagcatattgtacatgttagtgatcagtcttycttgtcattctcttgccttctttatttctcaacctacaataactacaatagctagctagctagagctcactcagtaaatagctattattactatagtggcacaattggttgatgttttgagttagccagagctggctgattcaaatcctgttttgtgagtttattagctgtgtgacctggattatgccacttaaattcacta

SEQ ID NO: 334506 - DNA, 512 bp, Homo sapiens
ttatctattaattaaatagatcagtaagaaaagaagtctaagcaagtgagtgactttctcaatcacacagctactaagtagaaaaattgggattcatttaaacttgattttctggctctaatgttcagatcttctcaccatgccacactaaggatttaaactatgctctatggtttataaatgtattattaataarttatttcttaacaacaaatcaaatatttttttctccatctttttttttaaacagtaactttttcattattctttgaacatgtgccaagagtatgattaacatatgcccgggaagatggatgaatatcttagttaccaacaggcaccttgctatgaatccataaacattttaaatcagagatatggcaacacttgatagacattccgttttcaagtgtctattactgtacacatcttttaatcataattttctcaccgtattacacaaaagaatttgtataatacaaattgaaactgtcaaaatctgattgcttaat

SEQ ID NO: 334507 - DNA, 512 bp, Homo sapiens
ttatctattaattaaatagatcagtaagaaaagaagtctaagcaagtgagtgactttctcaatcacacagctactaagtagaaaaattgggattcatttaaacttgattttctggctctaatgttcagatcttctcaccatgccacactaaggatttaaactatgctctatggtttataaatgtattattaataagttatttcttaacaacaaatcaaatatttttttctccatcttttttttwaaacagtaactttttcattattctttgaacatgtgccaagagtatgattaacatatgcccgggaagatggatgaatatcttagttaccaacaggcaccttgctatgaatccataaacattttaaatcagagatatggcaacacttgatagacattccgttttcaagtgtctattactgtacacatcttttaatcataattttctcaccgtattacacaaaagaatttgtataatacaaattgaaactgtcaaaatctgattgcttaat

SEQ ID NO: 334508 - DNA, 512 bp, Homo sapiens
ttatctattaattaaatagatcagtaagaaaagaagtctaagcaagtgagtgactttctcaatcacacagctactaagtagaaaaattgggattcatttaaacttgattttctggctctaatgttcagatcttctcaccatgccacactaaggatttaaactatgctctatggtttataaatgtattattaataagttatttcttaacaacaaatcaaatatttttttctccatctttttttttaaacagtaactttttcattattctttgaacatgtgccaagagtatgattaacatatgccmgggaagatggatgaatatcttagttaccaacaggcaccttgctatgaatccataaacattttaaatcagagatatggcaacacttgatagacattccgttttcaagtgtctattactgtacacatcttttaatcataattttctcaccgtattacacaaaagaatttgtataatacaaattgaaactgtcaaaatctgattgcttaat

SEQ ID NO: 334509 - DNA, 512 bp, Homo sapiens
ttatctattaattaaatagatcagtaagaaaagaagtctaagcaagtgagtgactttctcaatcacacagctactaagtagaaaaattgggattcatttaaacttgattttctggctctaatgttcagatcttctcaccatgccacactaaggatttaaactatgctctatggtttataaatgtattattaataagttatttcttaacaacaaatcaaatatttttttctccatctttttttttaaacagtaactttttcattattctttgaacatgtgccaagagtatgattaacatatgcccgggaagatggatgaatatcttagttaccaacaggcaccttgctatgaatccataaacattttaaatcagagatatggcaacacttgatagacattccgttttcaagtgtctattactgtacacatcttttaatcataattttctcacygtattacacaaaagaatttgtataatacaaattgaaactgtcaaaatctgattgcttaat

SEQ ID NO: 334510 - DNA, 499 bp, Homo sapiens
gatttgtggtcttgctgacttcaagaatgaagccgcagaacttcacagtgtaacagctcttaaagatggcacagactcaaagagtgggcagtagcaagatttattgtgaagagtgaaagaacaaagcttccacagtgtggaagggaacccgagtgcattgccactgctggctggggtggccagcttttattcccttatttgtccccatccatgtcgtgctggttggtccattttacagagtgctgattggtccattttacaaacctctagctagccacagagtggtgactggtgcattttgcaatcctagctagagtgctgattggtgcattttacaatcctcctgtaagacagaaaagttctccaagtccccacctaacccaraagttcagctggcttcacctctcaactatacaaaacaacagattttcaatgtggatgaaagagtcttatattgaaaaaaagatgtcatttaggactttaatagctagagaggaga

SEQ ID NO: 334511 - DNA, 530 bp, Homo sapiens
gaaacttgtttcttttttgttcagttggacttgaattctatgcttagctctcataaggttttgtgttcactgttttgtaaacactgcatgccttattcccatctccagatgcatatgcaaatgcatatgccccaaaactaattacagatgcatatgctccaaaaaccagttatggtgttgaaagtcttcctgtacaataatctcctgaggtcagtgttgttattcttatttaattaataataatagttacaataaaaggaacaagaacaattcccatcattttctgagaacttgctatatgacaggctctgtgtgaagtacttcatatgcatcaycttcttgaaatctcacagtgatcacacatgacagattctagtctaattccaacatacaatgaaataacctagcacttactaattttctaagggtgatgcatcttgtaatggagcagagagtgaaacacagatttgtgtgactccaagtctagcatccctttctcttctaaatatccagagcttacctattcttcc

SEQ ID NO: 334512 - DNA, 604 bp, Homo sapiens
cactgtgggttgtcttagttaccttttcctttttttggaaagtgggcacagaggacagtgagatctaattttatacaatattatttcaattgatgtacaaaatagtcaataatagctagtaataaggaggatgaaattataattatgatcacaaattgttatgaattttagatgatattaaaaatatatttcaaaaataaggaatataaaatttggtgagattacttaactttttaaaggtgacacacggggctaaagaaaaggtagagtctctatttgactccctgtctcgcaaacacctaagtccaygacgaattcacagtaaagcaaggtatcactgaatctttattgtggccaagtatccttcctttgctttgctttagcaaagccctactttcttgcttttcttcagtgttgcttactgaacaggaagaataataaattgtgcgactctctctggcatttttgattgatagaaggagaaaagatcaatacttctgctttctacattttaaatcatgaggtcaccatgctcaaacactctcctctacatttccactttgaattaggtccagcaaacagagctatcatttctgaagctcat

SEQ ID NO: 334513 - DNA, 457 bp, Homo sapiens
ttttttatggtcttcaacaataaaatttttgttttgccaagaaaaggttactccttttctaggctaggttactcctagctcttgactctgtcactctggaagttctgcctcctatatacgtatttgcatatgcaactcatgcagagaaatgtatttatagtgtgtgtgcaaccacatacatttacaattgaatagaaaaaaatctggcacactaagcacactaatgttagcaaaatagaaccttgggtatggttggctaagtgcagactagtttttattttatcagttatttctattgatacagtgctgtcactctcctgctttatatacctcattaaattcttgccattccaaatagtaaatacttaaatgttgccatcctaggtcctttctartctgtttccaagacttttgtccaacatgtccttactctcctttcttcctgttaaaatttgac

SEQ ID NO: 334514 - DNA, 589 bp, Homo sapiens
aagatttcttgtattatgtattatactttccattatgatcacctcactgatactaattctcataatgttgatcttggggmaagttagtaaacataacaataataatgccaccttttatcaagtgccaacagggtgttgaatttggttctttcctgatatttcacataacagtcttatcaggaatcattgttatccttttatgggtgacatcttaaatccagagaagtgtgtaatttactcaagaccacacagctaatgagttaaaggaactaggatttgaatcaatggtcctcggacttaaaagcttaattagtattactttagactttacaaagcagttatgatttcattttgaccccacaacttcccaatgtggtaaatattcacctgattttcacctggtaaaagaaattcagagaggtgaatattcacctgaactgagactcagtgtgataaatattcacatgattttcacctgatacaagaactgagactcagagagataacatgacttccccatgagttaaggttgaaatatggtatagtttgcattccattccaggttttctttttaattaaagtatggttg

SEQ ID NO: 334515 - DNA, 622 bp, Homo sapiens
tatttcacataacagtcttatcaggaatcattgttatccttttatgggtgacatcttaaatccagagaagtgtgtaatttactcaagaccacacagctaatgagttaaaggaactaggatttgaatcaatggtcctcggacttaaaagcttaattagtattactttagactttacaaagcagttatgatttcattttgaccccacaacttcccaatgtggtaaatattcacctgattttcacctggtaaaagaaattcagagaggtgaatattcacctgaactgagactcagtgtgataaatattcacatgattttcacctgatacaagaactgagactcagagagataacatgacttccccatgagttaaggttgaaatatggtatagtttgcattccattccaggttttctttttaattaaagtatggttgtaccacgaagttgaattggatgggctttttyactactgggatgttgtaggcggctctcagtttgattttgagtaaatcaactggagcacggagattaaagaaaaataaaacaaaacaaaacaaaacattaataagttcttcccatcacaaaattaaatatttttaataaaaactttttcgtttttaata

SEQ ID NO: 334516 - DNA, 586 bp, Homo sapiens
gttgtaccacgaagttgaattggatgggcttttttactactgggatgttgtaggcggctctcagtttgattttgagtaaatcaactggagcacggagattwaagaaaaataaaacaaaacaaaacaaaacattaataagttcttcccatcacaaaattaaatatttttaataaaaactttttcgtttttaataaactcttatttctcatttaaacatctatccattatggccaaccacacagccccttaatgagaagcaaattaagttgtttgaaaacacattcagtaagctgtgtttttccatggaccagtggcagagggaagagaaagtgattgtgccaggctgttggctgactagagctaatggcatttggtcttgtgaaatggatattaattattctacactattgaacttggtttgctcttgatagatttttccccttctgaattaatgtctgtcctctcttgattaatttagagtgattgtactgcaagtcacttaattacatattctttctaaagtcaaaaattattcatcgtgatgaaggcagtcattttgatttctcataaaaagagttcccaagtg

SEQ ID NO: 334517 - DNA, 586 bp, Homo sapiens
gttgtaccacgaagttgaattggatgggcttttttactactgggatgttgtaggcggctctcagtttgattttgagtaaatcaactggagcacggagattaaagaaaaataaaacaaaacaaaacaaaacattaataagttcttcccatcacaaaattaaatatttttaataaaaactttttcgtttttaataaactcttatttctcatttaaacatctatccattatggccaaccacacagccccttaatgagaagcaaattaagttgtttgaaaacacattcagtaagctgtgttyttccatggaccagtggcagagggaagagaaagtgattgtgccaggctgttggctgactagagctaatggcatttggtcttgtgaaatggatattaattattctacactattgaacttggtttgctcttgatagatttttccccttctgaattaatgtctgtcctctcttgattaatttagagtgattgtactgcaagtcacttaattacatattctttctaaagtcaaaaattattcatcgtgatgaaggcagtcattttgatttctcataaaaagagttcccaagtg

SEQ ID NO: 334518 - DNA, 580 bp, Homo sapiens
ctcttatttctcatttaaacatctatccattatggccaaccacacagccccttaatgagaagcaaattaagttgtttgaaaacacattcagtaagctgtgtttttccatggaccagtggcagagggaagagaaagtgattgtgccaggctgttggctgactagagctaatggcatttggtcttgtgaaatggatattaattattctacactattgaacttggtttgctcttgatagatttttccccttctgaattaatgtctgtcctctcttgattaatttagagtgattgtactgcaagtcacttaattacatattctttctaaagtcaaaaattattcatcgtgatgaaggmagtcattttgatttctcataaaaagagttcccaagtgtctcaagtatagatcttgcagagttagtgggaaaagttctactttatccaggaagggcaccaaagctagagaagcctcctcataaatctcatttaggatgtttccctataactcgccaggcagagctatttgagttgcacatcatgatatctgaaaaaaacagagacttcacctagctaaagtataaaa

SEQ ID NO: 334519 - DNA, 609 bp, Homo sapiens
taaagtaatgttttcgaatctcacttggattaaattagtatacatctaaaatagattctgataagttgtatattataaaccctacatagatccctcaaaattaactcaagaaggtcaggcatggtggctcatacctgtaatctcagaactttaggaggccaaagcaggaggattgcttgagctcaggagtttgagcctgggttacatggcaaaatcctgtatctacaamaaatctaaaaatcaactgggcatggtggaacatgcctgtagtcctagctactggggagactgaggtagaaggatgtggcttgagcccaggaggtggaggttgccgtgagccatgatggagccactgcattccagcctgggtgacacagcaagaccctgtctcaaataataataataataataataataataataataataataaataactcaagaatattgtgaaaaactcattaaataaactaaaatattttactatatttacttaatgcaaaacaaacagtaaaagagaaataaaggaacaaaaaagccatgaaacatatagaaaacaagtaacacggtaaataaaaattcaactatattataataacattaaatgta

SEQ ID NO: 334520 - DNA, 609 bp, Homo sapiens
taaagtaatgttttcgaatctcacttggattaaattagtatacatctaaaatagattctgataagttgtatattataaaccctacatagatccctcaaaattaactcaagaaggtcaggcatggtggctcatacctgtaatctcagaactttaggaggccaaagcaggaggattgcttgagctcaggagtttgagcctgggttacatggcaaaatcctgtatctacaaaaaatctaaaaatcaactgggcatggtggaacatgcctgtagtcctagctactggggagactgaggtagaaggatgtggcttgagcccaggaggtggaggttgccgtgagccatgatggagccactgcattccagcctgggtgacacagcaagaccctgtctcaaataataataataataataataataataataataataataaataactcaagaatattgtgaaaaactcattaaataaactaaaatattttactatatttacttaatgcaaaacaaacagtaaaagagaaataaaggaacaaaaaagccatgaaacatatagaaaacaagtaacayggtaaataaaaattcaactatattataataacattaaatgta

SEQ ID NO: 334521 - DNA, 632 bp, Homo sapiens
aaagggagaatatgtgaagcacagagtcacagatccatagcaattttgaaattcatccaggcaaatgtaggaagttccttgattaggactcagtcctgttacttcctggaaatgattcttcagaacattcaactccaccctcagagcttttggtccttcccggtagccaattgctttgccatctaagtcacccttcctttgccacgaaatgcagcccaggctttttcgatgagtagttgctttagcctgttgctggcttgtcaatatttagggttccaaaagtytcttttcattttgtactgtttctgtctctttttcatcaagctatgtttctgcatctatgatttttcttaaagatttgatgcatcacctttgaatattaataggattcacttcattagacaaaagccatacccacaaatgtcttcaggataataacttctctaccttatccctttgctacagaacaacatccttaagtttcttagttatattgtttgattgagagactgtttgaattatacccttacaagaaatttcataaggatacagaaagtctaaacaaaactgtaacaaaattggccccactgacagtatagaatactccagccaacaaccaaagaatgtgcatc

SEQ ID NO: 334522 - DNA, 632 bp, Homo sapiens
aaagggagaatatgtgaagcacagagtcacagatccatagcaattttgaaattcatccaggcaaatgtaggaagttccttgattaggactcagtcctgttacttcctggaaatgattcttcagaacattcaactccaccctcagagcttttggtccttcccggtagccaattgctttgccatctaagtcacccttcctttgccacgaaatgcagcccaggctttttcgatgagtagttgctttagcctgttgctggcttgtcaatatttagggttccaaaagtctcttttcattttgtactgtttctgtctctttttcatcaagctatgtttctgcatctatgatttttcttaaagatttgatgcatcacctttgaatattaataggattcacttcattagacaaaagccatacccacaaatgtcttcaggataataacttctctaccttatccctttgctacagaacaacatccttaagtttcttagttmtattgtttgattgagagactgtttgaattatacccttacaagaaatttcataaggatacagaaagtctaaacaaaactgtaacaaaattggccccactgacagtatagaatactccagccaacaaccaaagaatgtgcatc

SEQ ID NO: 334523 - DNA, 544 bp, Homo sapiens
aatgataaatgagtgaattaagtaacaggacataacaattgtaaatatatatgcacccaacactggatcacccagatatataaagcaaatatcattagagctacggagagaaatagatctcaatacaataatagctggaaacgtcaacactcaactctcagcattgaatagatcatccrgacagaaaatcaacatagaaacatctgatggaactattagatattaacagaacatttcatccaacagctttggaatacagattcttttcttcatcacaaagatcattctcaaggatagaccatatgttaggccacaaaacaagtcttagaaagttcaaaaaaaatgaaataatatcaaatatcttcttagaaaataatgaagtaaaagtagaaaccataacaagatattgacttaggaaactatacaaaacatggaaattaaacaatatgctcttgaatgaccagtgggtcaatgcagaaattaagaaaaaaagttatgaatttattgaaacaactgataatggaatcacaatgtacttaaacct

SEQ ID NO: 334524 - DNA, 544 bp, Homo sapiens
aatgataaatgagtgaattaagtaacaggacataacaattgtaaatatatatgcacccaacactggatcacccagatatataaagcaaatatcattagagctacggagagaaatagatctcaatacaataatagctggaaacgtcaacactcaactctcagcattgaatagatcatccggacagaaaatcaacatagaaacatctgatggaactattagatattaasagaacatttcatccaacagctttggaatacagattcttttcttcatcacaaagatcattctcaaggatagaccatatgttaggccacaaaacaagtcttagaaagttcaaaaaaaatgaaataatatcaaatatcttcttagaaaataatgaagtaaaagtagaaaccataacaagatattgacttaggaaactatacaaaacatggaaattaaacaatatgctcttgaatgaccagtgggtcaatgcagaaattaagaaaaaaagttatgaatttattgaaacaactgataatggaatcacaatgtacttaaacct

SEQ ID NO: 334525 - DNA, 544 bp, Homo sapiens
aatgataaatgagtgaattaagtaacaggacataacaattgtaaatatatatgcacccaacactggatcacccagatatataaagcaaatatcattagagctacggagagaaatagatctcaatacaataatagctggaaacgtcaacactcaactctcagcattgaatagatcatccggacagaaaatcaacatagaaacatctgatggaactattagatattaacagaacatttcatccaacagctttggaatacagattcttttcttcatcacaaagatcattctcaaggatagaccatatgttaggccacaaaamaagtcttagaaagttcaaaaaaaatgaaataatatcaaatatcttcttagaaaataatgaagtaaaagtagaaaccataacaagatattgacttaggaaactatacaaaacatggaaattaaacaatatgctcttgaatgaccagtgggtcaatgcagaaattaagaaaaaaagttatgaatttattgaaacaactgataatggaatcacaatgtacttaaacct

SEQ ID NO: 334526 - DNA, 649 bp, Homo sapiens
agaaatcaagaaagtaattccatttacaatagctacaaataaaacaaactacctaggaataaacctaagcaaagaagtaaaaatctcaagaatataaactataatacactgatggatgaaattgaagaggacaggcaaaaatggaaagatattctgtgttcattgattggaagaatcaatatttttaagatgttcatactacccaaagcagtctacagattcaatgcaatccctgtcaaaaaccagtaataatcttcatagaaataaaaaaacccataaaatttatatggaataacaaaagatccagcatagcaaaatctattcagatcaaaaagaacaaaatttaaaaaattacattatttgatttcagattatactacagaactataataagcaaaatggtatgacattattataaaaacagatacacagaccaatggaacaaaatactaccatgaattcattttcaatgaagktgccaaggggatgcattggggaaaggatatattctttaataaatggtgctgagaaaactggatatccatatacagaagaatgaaacttgactcctatctctcaccatatgtaaaaataaaaccaaaatcaattagagacttaaatctaagatctcaagctatgaaactaacaa

SEQ ID NO: 334527 - DNA, 605 bp, Homo sapiens
tgtatttaaatctcttttgctttatgtggtgatcctagaaataattttttatgtccaattgatgtctgtgctttctcatcctcatgattctttctctctcaaatatctcaaagtcattggggttcaatagaaaacgcaatccttcatctggtctgttctctgagaagtttttactcagtctccatcaggtaaagtcttttcaaatcccattccttatatttgcagtctacaatttccaatcctgagagaccccgcatttacggattctctgttcattttcatctatgtttgcaaagtgactcattctttcctgacctttcccacttctgaaaaggcttcccaaacataaacaatcacaactaaaccaaaacaatctagttcatgcatggaaattaagatgctgttctgctagcttcatggaaaggggctaaagtagaactttctatactcaatcttcttmttttttttttttttttgacaaagtctcgctctgttgcccaggctggagtgcagtggcgtgatctcggctcactgcaacctccacctcccgggttcaagtgatgatcctgcctcagcctcctgaatagctgggattacaggtgccc

SEQ ID NO: 334528 - DNA, 583 bp, Homo sapiens
caagtcattctattgttagagctggaagcagcgtatatcacttctgtgcccatctcttggcctgaacccagccatatcatccaattgctaaaggaatttagtctttcgaaagtgtttccatgaagacaaaagttcagtgagcatgtagcctgtgttttcaatatcgaggatgattattctcaagaaatcagttcaattaattccatgtaatgataatggcctaagtatgatttctgaaacaagcaaattgtgtgttctgagtgtgggtgtatgtacatgaatatggacaktcacacattgggtacatacggaggacattgacatcttcagaatttgctgatcttgccactggcttcctctgcaatgttgtcattccaagaaaagaaagctcaattctaaaacggacaaagatgcttttcaaagttgttcaacagccgcaggcaaatgccttaagctgctgcatttcagccatcaaggaccttccttatgctttctctgcctaagatcctcaaacagaacttctcccagtgaggtaacactatcctcacatgaaaagataaggagatgcaaggaaagaaagcag

SEQ ID NO: 334529 - DNA, 595 bp, Homo sapiens
aattctaaaacggacaaagatgcttttcaaagttgttcaacagccgcaggcaaatgccttaagctgctgcatttcagycatcaaggaccttccttatgctttctctgcctaagatcctcaaacagaacttctcccagtgaggtaacactatcctcacatgaaaagataaggagatgcaaggaaagaaagcaggttagggatggatccctgtaatgtctttcatgttcctggagagctttctgtccttttttctatatattcaaaaagaatattctagtctaggctataggattcctttattttattatatgtatttttaatgacagtgctctccttttaatttttattttatttatttatttttggagttttcactcattttcacacatcacttcccatgacatgtatatatgggagtcatcattgatttgtcttttatttttaaatgtatgtttcttttaaaaataaagtgtattcagtccaatcaactggatcctgaaaaaagtaaaaataaaaataaagtgtaaaagaaaagcatctgtggtttaaatgtcatcaattaaggaatggtgagaacactcctattttatagaat

SEQ ID NO: 334530 - DNA, 635 bp, Homo sapiens
caccatcttaattttcatgaatccagtttccacaactttgccaaatagatcaaacacgtttacattttcattaataaaataaccacatgtgttgttaagagtactagtgtgggtggctctgtcacctttattttcttctctgcaacccaaagcttcctttactctgaatcaccaccttgatgccctttcatctcatgacagttggataggtcaccttatatcagttcttacttgatctaatggttgatctaatctcgctgtctctggcagcttattttttttttcttttcattcataaactggggtaaataacagtataacacctgtcatgtaagaattgttcagtagtattagctgtctttattcaaaacacgttttctttcttgtctaatgcaacataataacaagtttaatataatagttatttgaaagaattggctagagatttatttgtaaagtgcttacaacttgccagccactatacctggagccatggagagacatgacatagtcccagtctttgtaaatctcataagtytagtggagaagatagatgagcaatcagatcattgtaatatgttaattaatgatggagaggcagaacaaaatataacaattcactttttttcaaatga

SEQ ID NO: 334531 - DNA, 545 bp, Homo sapiens
gcttagctcccacttatgagtgagagcatacgatgtttagttttccattcctgagctacttcacttagaataactgtctccagttccatccaggtttctgtaaatgccactatttcattcctttttatgactgagtagcattccatggtatttatataccacattttctttatccactcattgaatgataggcatttgggctagtttcatatttttgcaattgtgaattgtgctgctaaaaacatgcgtgtgcaggtatctttttcgtataatgacttcttttcctgtgggtagatacatagaagttggattgctggatcaaatggttaatatatttttagttatttaaggaatctacactgttttccatastggttgtattagtttacattccccaccaaaggtgtaaaaatgttcccttttcgccatatccccgtgccaacacctattgttattattttttattattaccattcttgcaggagttagctggtatcaccattgtggttttgctttgtatttccctgataattagtgatgttgag

SEQ ID NO: 334532 - DNA, 645 bp, Homo sapiens
ccattaaatgttccaccatttccttaatgtgccacactctttgacaactccatgcctttttcttaaaatgtttcttgttcctctgtctggaaaaaaaatctgtttatcattcaacattcaggtttaatgcctccttgtatatgaaattcttccccaatatactcaactgtgtagaaacaaaacaaaacaaaatgcactcttagtattactctggaattccatcaccttattttcatctgaattcactcttttacgaccatacttctaaataatggtatgcccctaaatctttctagtattcctgcaaagccaattcattttagtattgcataactgaccacctaaatacaaaaaagacatgtatatgtgagcatgcctaattggttatgtgttaattgttgctcacatctcaggagatagtcctgggttgataagctcattgtctacgatccatgactctatgacttgagcaaggaaagggaagaggaagctatttttatttcaggcgttcccatttcccatggtttttgagacctgtctaactcrtggttttctactgagaaacctcaatcatagtcagcagctgcctccatctattctcagcaacatgtttgaaaatgcagtgagccaatgtactgtattgaa

SEQ ID NO: 334533 - DNA, 496 bp, Homo sapiens
ccgatctctctcttttctttcatctgtggaatcttcatttttaagtatgctcgaggtgagtggcaatatgtataatgttcaagttctccacgtttccatggatatactttcttgcaatttcaaggagaaaagcagccctttttctctcaatgtgagttgttcagaaataagttagccgtgccacagaactctctgtagctagtaggattggtcagtcctaggtctttattaccatccctttagccccaggagggatgaattcagtcgcactcaaatcaaagggattaaactggattattgagaatgagtgaaaagaggttaaccaaaacgattctgaaagggaaaaacaaaataaaacaaaacaaaacraaaaccaaaaacaaataaacaaaaaaacatgtgtccacaaaacactcacagctttgacaatattaggtgtgtgaccactggaaagccagtaggctaacgtgtgggagagggacagcattcacaacag

SEQ ID NO: 334534 - DNA, 534 bp, Homo sapiens
tttttctgtggagacggggtctcactatgttttacaggctccctgtcttctaatgaattactcaggccctgtgctcattcactcaatcagcaaacaagcctcaagaacttaccatgcgctatgcccagtgctaggtcctgtgaatacggagatgaatcattcagagttgctagttggaggtgcttatagtcttcaaaagaaataaatccagaaaccaagtgccaaactacaagtaaaacagccatgtgaagcttctggataattcaggcttctacactaagccctgtgtggtgtaggggagacaggtcagggcacagtgtcaggaggcttgagctcagtsaattactagctgtgcaatgttggtcaaagaacttaatcatgctggcacccggtttctacctctagagtatgctggctatatacacctcctgtggttgttacacatatcaaaagagagaatcaaaatctcaacacacggctactgtttttactatagagggaggatataacatgcacacacacaggataagctct

SEQ ID NO: 334535 - DNA, 674 bp, Homo sapiens
aaagtgaggagctgtcagacatagtgcctggccacacagcatatttgaagagaagagatttttataaaggtttgtgatgatttgtagcaattcaaagcttcccttaatagggaaatgtattgctcaagggctggatatgcgatgacttttgggcaatcactatgtcttggttcccttatacttttgaggcaatagcatttcgctaggaaaaagattccctctatgagtatcacttgtttatattctggacatggtagcatatatgtatattctgaccaagagtcatacactcgcggatctagacactgaggtggttcatatccacaagcccattgatctacaagaagaaactgcagctcttgagagctaggagtaaaaaactgatctcttctttgctttttttttggcatgcctgagtgtacctgctttgctaaatccagcattgctaaatcctccctttgcacagggttttcatttkcaaagttgctagttactgaacatttgcaacagaagcataggcgctagttgagctttggacatgtctttcactatttaagtgcgataactggggagggttttaaaagataactagaaatttgtcaagttatgagggtaatgatattataggtaaagagcactaaatgtacaaaggtataggccaccatctgccctcc

SEQ ID NO: 334536 - DNA, 569 bp, Homo sapiens
attattattttatgcatactttagtaagttataatcagactgcccacaatttttgtatcttgctttcgtcaaagtgattaaagatttttttacgttacaatcatagcaaaatatttcactttctaaatcttcattaaggtgtgatttagacacaataagactcacccattttaactgtacagtttaaagattttttgacaaatgtatacattcatatcaataccatcaaagagatgggatgtttctatcaacctcaaaaattaccttgtgcctcttcacagtaaatccttkttcccaaccctaattaatactggggctaattctttctgtaagtatacattagtttttgccttttctagaattttatgtgaatggaaccatgcaatatggatgtgtctggcttttgtgtctggcttgtttcatcagcatattagttttaagatatatctttactgttgtatcagaattatacatctatttgtttattcattcacctgttgataaacagttgggttgtttccagtatgtggttatcattaataaagctgctatggacatttttgtacaag

SEQ ID NO: 334537 - DNA, 452 bp, Homo sapiens
ctggtcttgcaaggtcccttgtgaatagctgaatccctggatgctaaattcacaacagctaatggtctactctgttttcttaagttttcacctaacttgcattttgctttttatgtgttaatatccacagctctaagtcctttgtgtatactatgtcctcagcctgtcttgggtctctctttgaccttctayctttgactgtgaacttgccacatgactttaatcaatttatcattgacactgaccttgaatagcacctccccaaatccccatagccagttctgattattctgttaatctgtttctatgaaagttcatcaaccaaggatataaaccaactcagactgtctaaagctctagtttatactactctgagtgaaagaaatgccgactaaaatatatttttttaattgtttcaagtgacaaagtcataaattcaataaagtactgta

SEQ ID NO: 334538 - DNA, 452 bp, Homo sapiens
ctggtcttgcaaggtcccttgtgaatagctgaatccctggatgctaaattcacaacagctaatggtctactctgttttcttaagttttcacctaacttgcattttgctttttatgtgttaatatccacagctctaagtcctttgtgtatactatgtcctcagcctgtcttgggtctctctttgaccttctacctttgactgtgaacttgccacatgactttaatcaatttatcattgacactgaccttgaatagcacctccccaaatccccatagccagttctgattattctgttaatctgtttctaygaaagttcatcaaccaaggatataaaccaactcagactgtctaaagctctagtttatactactctgagtgaaagaaatgccgactaaaatatatttttttaattgtttcaagtgacaaagtcataaattcaataaagtactgta

SEQ ID NO: 334539 - DNA, 622 bp, Homo sapiens
ctctagtttatactactctgagtgaaagaaatgccgactaaaatatatttttttaattgtttcaagtgacaaagtcataaattcaataaagtactgtatgttcacaaatattataaacagtgatataggaaatgattgtgatataatattaagtgaccaaacacaatataaaattgcaagtatagtgtgatttcaattgtataaaacaygtactaaaaatactaaaatttaatatacaacaaattaatagcaatcatcttctaggattgtaaataattttaatttcttcatattaatctggatcaccaatttttaaagactcaataaacaagattattcaaaacatcaatagtacctatgaggtattttagtcttaaaacattgtagaccaaccccttaaagcactgctcaaattcctccacagtttcaaaggctaaaaatcagggccagcaacttgaggaatttaataaagaacaagttcaattcccaacttcaattcccctgaaaatatgacaggattttaaaatgtgcctggaaaactgcatctggggttttgccaatcccataacgtttgggacgtttgctgaacccaaaacacagccgggcccacccatccataatt

SEQ ID NO: 334540 - DNA, 608 bp, Homo sapiens
gagataacataaaggtcaaaattcatttcttcccatatccatatccaattgttcctatctagcttgttaaaaaagttattgtttttccattgaattaccktggcatatttttgagtctgttctagacaatttatgctgtttccctgagctctatggatactcttatgttaatactatactgttttgattactgtagctttataatgcatcctgaaatcaggtagtataagcccttcaacgtctttttccaaactgcttttgctattctattttctgcatttccatttaaatgttagaatcatcttactgaacacagtcattattatataatctctgagagagagaggaagggagaataaatccctttgtaaagagaaataaaacacatgcatttttctctcatattgctatacaggcaaatataagatcaagctaagttgttgaagatgatttgtttatacattagagtagatgcattcattctagtaagtaactcttcctgggccttagtttccttgtctacaaagtgagattgttagtattaccagtggttttcaaatcctgctctacaaaacctcagggtttagaaggagaaatgttgtgttaaa

SEQ ID NO: 334541 - DNA, 608 bp, Homo sapiens
gagataacataaaggtcaaaattcatttcttcccatatccatatccaattgttcctatctagcttgttaaaaaagttattgtttttccattgaattaccttggcatatttttgagtctgttctagacaatttatgctgtttccctgagctctatggatactcttatgttaatactatactgttttgattactgtagctttataatgcatcctgaaatcaggtagtataagcccttcaacgtctttttccaaactgcttttgctattctattttctgcatttccatttaaatgttagaatcatcttactgaacacagtcattattatataatctctgagagagagaggaagggagaataaatccctttgtaaagagaaataaaacacatgcatttttctctcatattgctatacaggcaaatataagatcaagctaagttgttgaagatsatttgtttatacattagagtagatgcattcattctagtaagtaactcttcctgggccttagtttccttgtctacaaagtgagattgttagtattaccagtggttttcaaatcctgctctacaaaacctcagggtttagaaggagaaatgttgtgttaaa

SEQ ID NO: 334542 - DNA, 575 bp, Homo sapiens
gtttttgtttttgttttgctcgtaaatttaagtttgttttgaatattagacctttttcagatgcatgggttgcaaatattttctcccattctgtaggttttctgtttactctgctgatagtttattttgctgtgcagaagctttttagtttaatttggtcccatttgtcattttttgtttttgttgcaattgcttttggagtcttcctaatgaaatctttgccagggcttatgtccagaatgatatttcctaggtttactcatgaggttttttttttatatataattttagattttgcatttaagtgtttaatccatcttgacttgayctttgtatatggtgaaagaaagagatccagttttaatcatctgcatattggctaatcagttaccccagcaccttttattaaatagggagtcctttctccatagcttgttttgttgactttgtcaaagatcagatggatgaagctgtggagttttatttctggattctttaagctgtttcattagtgtatactttttttttttttttttaccagtaccttgttgttttgaaaaacgtagccttatagt

SEQ ID NO: 334543 - DNA, 591 bp, Homo sapiens
ctacttctaccctctgccctctgacaggccccagtgtgtattgttccccacccatctgtccatgtattctcatcattcagctcccacttataagtgagaacatgtggtatttgcttttctgttcctgtgttagtttgctaargataatggcctccagctccatccatgtctctgcaaaggacatgatctcattcctctttatggctgcataatattccatggtgtatgtgtaccatattttctttatctgccctgggcatttaggttgattccatgtttttgctactgtgaatagtgcttcagtgaacatatatgtgtatgtctttataacagaatggtatatattcctttgggtatatacccagtaatgggattgctgggtcaaatggtatttttgcctctaggtctttaaggaattgccacactatcttccacagtggttgaactaatttacactcccacaaaccttttataaatagaatacagcaacaaaattcttcatcaaagatgaggcttctccttactggttttttcaatattggattggaggccttagtcaattaataggataataaatattgataagaatgt

SEQ ID NO: 334544 - DNA, 591 bp, Homo sapiens
ctacttctaccctctgccctctgacaggccccagtgtgtattgttccccacccatctgtccatgtattctcatcattcagctcccacttataagtgagaacatgtggtatttgcttttctgttcctgtgttagtttgctaaagataatggcctccagctccatccatgkctctgcaaaggacatgatctcattcctctttatggctgcataatattccatggtgtatgtgtaccatattttctttatctgccctgggcatttaggttgattccatgtttttgctactgtgaatagtgcttcagtgaacatatatgtgtatgtctttataacagaatggtatatattcctttgggtatatacccagtaatgggattgctgggtcaaatggtatttttgcctctaggtctttaaggaattgccacactatcttccacagtggttgaactaatttacactcccacaaaccttttataaatagaatacagcaacaaaattcttcatcaaagatgaggcttctccttactggttttttcaatattggattggaggccttagtcaattaataggataataaatattgataagaatgt

SEQ ID NO: 334545 - DNA, 559 bp, Homo sapiens
gtggaaaagtttggaacttcctagagactttaaggaagacaggaagatgtgggaaagtttggaacttcctagagacctgttgaatggctttgaccaaaatgctgatagtgatatggacaatgaagccacacatgcacaaaataccttcaaaatagttaagaaatccaggtgagaaattttagcacttaagtggagcagagaaataagaaaagacacaataaagggtaggaaggatagttccacaataccaacattagccgccccactcccgccaagctcacacagcatgacacagagaaatataccctccacatgaaggaaagagactgaagtgagtccgtgaattctctgcagatgccaatacaaagcccattccagtgaatcccagtgccagggcagcccccrtggacccaagctccagacttcctccagtggactcaagaccaagaccagccccaaagccagaccatcatgtctggacccaaactccaggcacacctctgtggattcaggtgccagccttacccacctatttacccaggcacgagactaacctacc

SEQ ID NO: 334546 - DNA, 572 bp, Homo sapiens
acaaattactaacatcagtaatataagagaatagcaaaacatatctgatagtcattaaaaaataataagagaatatgtgaacaattttatgccaaaagattttaaaacttagatgaaatggattgttttcttgaaaaaattaaacttaccaaaactgacagtaaatgacactgaatctgaatatccccaattttgttaaaaaaaaaattaagctattatcaatatccttcccataaaatagattctaggcccagatgtttgtgcttgtgaattgtatcaaactttaaaaagtaaccttatattaaaataaagaagaaaatatttcccattagtcttatgtggtgagtatagccctaaggccaatatctgacaaatattacagaaaaagtaaattaccattaactatycctcataggaattaagccaaaaatacttttaaaaaattaggaaatctaatcatgtatatatcttaaaaaatataccacaatcaagtaaagtttatctcaaaaatgaaagactagttttatcatttggcaatgaagaatataatttactatatttacagaataaaa

SEQ ID NO: 334547 - DNA, 527 bp, Homo sapiens
aagtggaaggtctgaactggagtggtattcatagaattaatgatctatattaaaggaagggggagggataaataactaaagaaaaaaataaaggtatgtgttcttttttctacagaggatctcataatcggaaatagatttaaatgaagccccatgcttttgtatttataataaattttagcttaaaagagggttaatggtctgtgtttagcttggacacatgactgaaatgagattcaagtacatatggaagatttagtaagtagtttccatgaacaaagcatgttaagaactttgtagctttatgggttctaaataagtttaggctaatgatacagttcatatttattctttgataagagagscttcaaattttatcttgatattatgaatttaatatatatatattaaattttatctagattgcatgacaatacctggtctgtttctgttagaattacccttatctgaactcaaatacatagtgagttgaaagcaccaggccccagcttctgttccagctgatt

SEQ ID NO: 334548 - DNA, 489 bp, Homo sapiens
ctcttgcctgctgccatgtaaacatgcctgcttccccttccacctgattgtaagtttcctgaggcctctccagccatgtggagctgtgagtcaattcttttctttataaattacccagtctcagggaagttctttatagcagtgtgaaaacagactaatacaggggtggagtgatgtgaaagagctcttttgtgtataggatgttgagcagtaaccttggcagtttctcacttgttgtcagtagcacccacttccccagttgtgacaaccaaaactgccttcagacattgccaaatagggctatggggaagattgctcctgattgaaaagcactgttttgagccactaagatttttaatcattgcagtggcataacctggstaggactggcatatactccaattccttgcttttatcttttgctccctctcttgtaaggttaattcttcacatatacttttgatctgtgagacgttatgttttatatct

SEQ ID NO: 334549 - DNA, 550 bp, Homo sapiens
ttttcaaatatatctgataacaatataagatttctcagttattttattaaaaaaactcagatgccttagcacctctgtctgtcatatttcaaggctgtaaaaatctactttgttttccattcagtagaaatttcaagtttcagtttccttgctgacaccttatttgcaattataagcatgaaaacaccaggattctgaaaagctgttgtatttttgctarctacttaatgaatggagttccttcactgatacacacatttttttttcttccttaaaatctttgaaatatttatgctagcaccttgcctttagttcatcataaaacctttctgtaaagaaggctattctggaacatactgccaatgtaattaccagcaactctgaacaactgcagttttaaggctgcatcttaatataactgattatttatatggcccgatccaacactgtttagaaagatgcttgcatgtttgtaggaagttaacacctagtgtttggctatacagtgccatcaaacagtcattagactacttgaacacattggatagta

SEQ ID NO: 334550 - DNA, 588 bp, Homo sapiens
attctcgcaatagtcttgtgaatagctatagattaggaacctagatcatagacaggttaaacaatttggctaaagtgacactgctaatagtggtagagtcagaatttgaatcctgctactgatatcccagagcacagcacaaactctgaagcaagtaattaatttttaaggaaaaaaagtaaggaaaagaaaatcttctaagtaaagtaatttttctaggtttgataattactgtttttctatatcttcatcagttttctagtttcaaatttatcagttgaaattgttgagtgtagtctcttatgacatttactagctttcaacatctattttcatgtctcctgtattgttcataagactgttcgtggaaatctgtttttccccctctgataatactgcccaaaaatctgtctactttattagtctttaaaaagaacacattaaaawttctaatcagtatgatctattttttaaaatagattttattttatcctttaaaaatcttcaataactcccaggtcacatttcttttgcattattttgcttctcctttaagattcttgggtgagggtctgactcgtttatttt

SEQ ID NO: 334551 - DNA, 568 bp, Homo sapiens
tgctcagaatgtgccagtcttcttcatagtctggtctcttggtggagatgctcttcctggttttgtctagtcagccatcttgtctcttctagccacacaaacttttttaatcatcagattctatggtagagtaataaaacttcttttcatagattaaacacactaggtaagctataatttttttctaaaaaatgtcttcatcatcttgctccaatctcaactagtttatatttgggcccaccgtgcaaatatcatcctttcactttctgaatttcctgaaattccttcttcgggttccttgtgtttaaacacctatttcttggatgtcattttatcatttttcttaattttgttttagtacattacttcagtacaatattgagaaagagtacatgggaactatttcatttttgagaatttgaatgtctamaaatatatttttctactcatatacttgattgataatttgcttgtatatgtaattctagattggaaatcatttcctctcaaaatatggaaggcatttttttcccattgtttctgcttccgtgatgttgctgtaaaaagt

SEQ ID NO: 334552 - DNA, 567 bp, Homo sapiens
tacaggcagaagaggggttctgagatgtttgcagttcttttgtcctggctttaagttaaaaaaaaatgtgcttccagtctgctccctggatcttgtatgaaatattcagcccactaagtgctatttgtaaagcatttatcaaaaggctaggagtgatggattccctcctctcctctcgagcttacagccttcttttaccctgatttctctgtaggagagaatgatttatgttctgttgtaccttcagctctttcagaccaggawtgcaaattcttgggatgagttcacatgcataatcccccaacatgtgcatgtgcagacacacacatacacacacacacaaaatcaattcaggaattctaaatatttagacagatacccattatgcaaaatattttagaaccatctatatagagactttaaaaaatatgaacagaacaaattcaagagttttaatttgtatatttaatctaatttggacaattgcattagagcattaaaattttacattttctttttactactttaccttcatcaaaagtcatcatcctctgcccatacaggctg

SEQ ID NO: 334553 - DNA, 507 bp, Homo sapiens
atcactttttaactttccaacttttgttttagattcaaagggtacatgtacatgtgcaggtttgttacatgggtacattgcacgttgtgggggtttggtgtatggataatttgtcacccaaaactgggaaatattctrtctagttaagtctgcagattgttggagaatttttttcagaggcagtcccaaatccccagttcatttatgactagaaagcctaaatgggcaataagccaattccacctgcttgaaacatccttgttagacagtaaagtcaagtggtgaaaggattagaatgcagtctgggaattcattagaattggagaaagtctcaggccccagataagttttctctaaatacacagattggctggggaaagatgtgtaatttaataacagtacccaatcacataaccacatcaagagcccatccaaggatactgatgattttagagagtgttctaagcttataggaaccccttgcatatggggagatcctacatgtgt

SEQ ID NO: 334554 - DNA, 600 bp, Homo sapiens
aacccgatcctcctgaaagcaatatcaaatcccacatttggcctatcagaaacagtgcaccctccatatagcagaataaaagcatcaaaatgtttaaaaagcaaaaaacaaaagactggcaggaaggcttcgaatgaagacctgaacattgtgtttggatatggaggagatgctgggaacaggacaaatattaggtcacagagacaagtgaaaacatttgaggaatatttaaaggccaatcaatacattcttatgaaagtgcatgctgcctgagataaggtcayttcaaaaaaatctattccattacaacatatatttactaaaagggatgttcttaatggtgcttgttggaagtcagagagcatccattagagatggtgcaggtaagtagcacggaggctgaggtccgagaacgtcagttactagctccactaaacaaaaaacaaacctggctgggcatggtggctcacgcctgtaatcccagcagtttgggaggccaaggtagggggatcacgaggtcaagagatagagaccatactggccaacatggtgaaaccccatctctactaaaaatacaaaaattaggcgagcatggtggca

SEQ ID NO: 334555 - DNA, 600 bp, Homo sapiens
aacccgatcctcctgaaagcaatatcaaatcccacatttggcctatcagaaacagtgcaccctccatatagcagaataaaagcatcaaaatgtttaaaaagcaaaaaacaaaagactggcaggaaggcttcgaatgaagacctgaacattgtgtttggatatggaggagatgctgggaacaggacaaatattaggtcacagagacaagtgaaaacatttgaggaatatttaaaggccaatcaatacattcttatgaaagtgcatgctgcctgagataaggtcatttcaaaaaaatctattccattacaacatatatttactaaaagggatgttcttaatggtgcttgttggaagtcagagagcatccattagagatggtgcaggtaagtagcacggaggctgaggtccgagaacgtcagttactagctccactaaacaaaaaacaaacctggctgggcatggtggctcacgcctgtaatcccagcartttgggaggccaaggtagggggatcacgaggtcaagagatagagaccatactggccaacatggtgaaaccccatctctactaaaaatacaaaaattaggcgagcatggtggca

SEQ ID NO: 334556 - DNA, 434 bp, Homo sapiens
agtcttaagctgtggccagggccaactactttgataaagagatgctcagaagctgagtggtgagatcactggcttgcttgatgtgtcagtcactctaggtcacactaacttgggaacccttgcctcaccagacggggcaccaacctrgcaagaagaacaaataccaacagcacgttatcgccaaagggtgttggactccacagatattccattgaatagcatcaaggaaagaacgaaatatttctagtactacacctcctcaaggctgaagattaaaatgcaggggtggtaaaccagtgatggtgaatttttaaaagaaactgaaaacacatgaatcatgagattgaaaagcaaccaaatgatgaccacattcagctacggggagtcccggaggggatccgagcggaatgaggaatggatgggcccaaacagtg

SEQ ID NO: 334557 - DNA, 560 bp, Homo sapiens
gggggtgaggtttccattttactttttgaaaaaaaaagggaaaagaaagtataaaatgaaccttycattttttattctgcataaggcaaaaacaaaatctaaccatgttaagcaactaaacataaattccttgtttttatatatatataaaaaaacaacccaccacctctgaactcctattctttgcctctcaccagtacaaataaaaaatgaaaaaataaaaagcaaaccatgacaccaagtatgtataaccagatggccagccaacaacagtatcttattacttctcaaatactgcagattataaaatcttcatgacagcatattactcatacatttacatttcttacagagcagatcttatagctcccatattttagtaaacaaagctagttactctgaaataattccttttgaaagctatcactctaattcctgcgtatcaacaagagcaacggtcaagtgcataaacacttgagccactgccctaattaaattaaaatctcattgtcacacaggactcttagtgaggctgattcttcagtgatgcactctcagat

SEQ ID NO: 334558 - DNA, 590 bp, Homo sapiens
acatcacaaatgccagcataatagcaagtagattcttccaagacatgaacatataggaaaatacaagttttactcaatttctcagcatttttcaaactgtgttcctggatttgttttggtgttaatattaaagtagggttctattgccaagaagcttgggaaacactagttaaataaaattaaacaagtctctctgctgcaggacttctcagagccttgtagatgccactgtgctttgtaactttctgagacaagaatgaatgatgtaccatcttccagcttttttgttgaaggatgttctgagggatgagaaattctagtcacacatgttgggaaccactacctggtctggtttaatgagcaataatcctcayggcggatcaaattacaaaactttgtgcctactttggctagtttgggtaactcttgtacccaaacgaattctaagcatcctctacaacccatgcttaccccccacctctcacctgggttcctgcagcagccaaatgaggtctcccgcttcccacttcctgttcctctcatcaacctccacatcaacatctgggttactcttacgcacagagctgatg

SEQ ID NO: 334559 - DNA, 569 bp, Homo sapiens
ggggtgggggaagctgtctttctatacacatattaatatacctgggagccaacgtgcccctgtatcaacacattttccaagcagtgacttctccccttcctctctgattcattttgtaccaaaacaatggcaacacctgtagccgttaatttctgcgctttgatttttgtccagttataaaggaggctcccagcaggctcccctctcaggagccatatgtggagttgatgtgccagccgccttggaagggaaacggcctccggagaagtgcacaatggctccataatccccatcaactggaccctcttgaactgcctctttattttccagtcaaagaaatgccaatctcaagataaaagctgtggctgccctgggagcccaggggaaacctgtrtcgcttgcctggttcagccccagggtggtgactctgagtcccgccatctagtctcgcaatctggagcccagaaactgcctgtagcacccccaacactttcccttgcactcccctctaggatgaggcttttaccacaaggccacctcccgcccagcctctcccggcggctggcgac

SEQ ID NO: 334560 - DNA, 574 bp, Homo sapiens
gaagctgtctttctatacacatattaatatacctgggagccaacgtgcccctgtatcaacacattttccaagcagtgacttctccccttcctctctgattcattttgtaccaaaacaatggcaacacctgtagccgttaatttctgcgctttgatttttgtccagttataaaggaggctcccagcaggctcccctctcaggagccatatgtggagttgatgtgccagccgccttggaagggaaacggcctccggagaagtgcacaatggctccataatccccatcaactggaccctcttgaactgcctctttattttccagtcaaagaaatgccaatctcaagataaaagctgtggctgccctgggagcccaggggaaacctgtatcgcttgcctggttcagccccagggtggtgactctgagtcccgccatctagtctcgcaatctggagcccagaaactgcctgtagcacccccaacactttcccttgcrctcccctctaggatgaggcttttaccacaaggccacctcccgcccagcctctcccggcggctggcgaccacagcgcaccctg

SEQ ID NO: 334561 - DNA, 638 bp, Homo sapiens
gttctaatgcccagcacacagkaagagctcagaaatgttagcgattattcttccttgcccattgccttcttatcttttatgcttacacgaaggttaatgggcatgcataaagttacaaatttcaaatttcatgcatattctgttattacttactttaccacctggaaaagctcaaaatatgcaattctgcctttgaaataaggacaattttctatgggcaacagagtcagctcaaaggaatccaaaccacatgataggctgtactataatctggagaaagactcggtgtgtgtttacagaaatgcatacattgtgcaacacgtgcagtgtgaattccccaaagctgagttcagtgtgaccatacttttcagctgatctcagtggagatgctgacgactgaaaaaaacccggcatgcaatcatgttccgaaaagaagcaggatggggaaataactgcgggggtgactagacataactcacctcacgaccatgggacggtacaccgataaaataaaagagcagattagatgctctcaaaggaccctttgagctctaaattccttctatttccccaaaatcttataaagggacttaggtctataggcaagagaaggaggacagtaaaggtactggcatact

SEQ ID NO: 334562 - DNA, 504 bp, Homo sapiens
aaagaagcaggatggggaaataactgcgggggtgactagacataactcacctcacgaccatgggacggtacaccgataaaataaaagagcagattagatgctctcaaaggaccctttgagctctaaattccttctatttccccaaaatcttataaagggacttaggtctataggcaagagaaggaggacagtaaaggtactggcatactgtagcctttagtttcttcacagattatcagtgaaatcttacctttggaggtaatgccrtcttccttggaaaatgcatgtctttaaagatactttaaaagtgatccagtatcttagcttaagttcaaaataatgtacccaaataatagaatatgatatagttatttaaaaatactttttacaaagggtttgcaataacattttaatgtaagcattttccctcactaactgaagaaaaggatgcaaaacctgacctcaactacataaatagagaatccaaaatgctgacagcagttg

SEQ ID NO: 334563 - DNA, 495 bp, Homo sapiens
aaatttatcctccaaacagaggcctgctaccacggaaacaggcagttcaraccgattctgagcagttttatttgcagcgttcactagatgggaaagtcttcataatgagaaaatatcaagtccctcaggcaccgaaggcaatctgggttaaccaggccatccacaatcagactcatttctggtggacaggactttatagattcagtggtttcctgctggggcccaggacattaagaactgttcagtaggcaattggtcacagtcacaagatggctatcattggtgcttcagttttctttctgattttctttctttttttttttttttttcatctgacagtggtctgtagcatgacttggctggcagagattgaaagcaactgagaatatttgttctggtggtcagtgaattctctctaagcctcatctacatagctacaaccccctgtgcagaatttggaaataccacccagtgggtggaatagtacctgtattg

SEQ ID NO: 334564 - DNA, 592 bp, Homo sapiens
agtcagcaagacagactaagagctgggccaaaaaataagtctcaagaaatttcaaagcactatagttgaacattgctcataaagttgaacatctacttaccttatgaccaataattgttttaggtatccaagagaaatggaaacatgcccacagtgagacagacatacacaagaatgtttatagccacattattcccaattacccagaagtgtgcacaatccaaatatccatcaacaagaaaatggataaacaaactgcggcatatctacatgatggaacagcactcggcaataacaagggataaactactgatacacacaacaaaatggataaactgcaacaacactaggctgagcaaaagaagccagacacaaaagattgtgtactgtttgattcayttaaatgaatctcatgaataggcaacacttagctagagtgacagacattagaatggtgcagtagttgcctgttggggaggggagatggcaggaattgactgggaaggggtataaaggatccatctgaagcgataagaatgttctaggtcctgcttggggtttggattatctagttggagattatatgtatata

SEQ ID NO: 334565 - DNA, 541 bp, Homo sapiens
gcttctgtgtgctttggcgtctgatggccttcaggctgctggagccactttgaccctgagtgcagagaactggaagccagggtgggacgcttggccagtggcagagggccttgctttgagtctgaccaacacagaggcgtgatctacattgtgggcacccctccccagcctcctgcatgtaccctggctgggtgcctccctcgccctcaccagctcccccaggagcacacccttgatgcatyccttgtacaggaatcctcatctcagactttactcctggggtctggccagagcagcactgtacccggggccctttctatctggtcctcacagttcctccccgaggcggggagggtgactattcttatctgacaggaaactgaggctctgatcagctcacagaccgcaaaggttaagccagaatcggaacccagaccctggagaggatgcttttccttcctgaacttggattctgcagccttccacacagccccttcccctggactcctcctgcagccctggggaacgggaatcgtcctgg

SEQ ID NO: 334566 - DNA, 541 bp, Homo sapiens
gcttctgtgtgctttggcgtctgatggccttcaggctgctggagccactttgaccctgagtgcagagaactggaagccagggtgggacgcttggccagtggcagagggccttgctttgagtctgaccaacacagaggcgtgatctacattgtgggcacccctccccagcctcctgcatgtaccctggctgggtgcctccctcgccctcaccagctcccccaggagcacacccttgatgcatcccttgtacaggaatcctcatctcagactttactcctggggtcyggccagagcagcactgtacccggggccctttctatctggtcctcacagttcctccccgaggcggggagggtgactattcttatctgacaggaaactgaggctctgatcagctcacagaccgcaaaggttaagccagaatcggaacccagaccctggagaggatgcttttccttcctgaacttggattctgcagccttccacacagccccttcccctggactcctcctgcagccctggggaacgggaatcgtcctgg

SEQ ID NO: 334567 - DNA, 541 bp, Homo sapiens
gcttctgtgtgctttggcgtctgatggccttcaggctgctggagccactttgaccctgagtgcagagaactggaagccagggtgggacgcttggccagtggcagagggccttgctttgagtctgaccaacacagaggcgtgatctacattgtgggcacccctccccagcctcctgcatgtaccctggctgggtgcctccctcgccctcaccagctcccccaggagcacacccttgatgcatcccttgtacaggaatcctcatctcagactttactcctggggtctggccagagcagcactgtacccggggccctttctatctggtcctcacagttcckccccgaggcggggagggtgactattcttatctgacaggaaactgaggctctgatcagctcacagaccgcaaaggttaagccagaatcggaacccagaccctggagaggatgcttttccttcctgaacttggattctgcagccttccacacagccccttcccctggactcctcctgcagccctggggaacgggaatcgtcctgg

SEQ ID NO: 334568 - DNA, 602 bp, Homo sapiens
atcccctgtgttgtaagaagccctccccctgaccctgatgcatggcagtttaagaaccacccatgtacgtgaaaagacctttaagaaaaaatggagatatatgttgtataactattagtctgctctggagtcatctggggaaatcagggtccggtgggtggagcattcactaaatgagggggattcagttaggacacatcaagccatggctccagataattagatcatctaactgaggtttaaattatgctaaactgttttaaaatyacatttgtgtaaattatattacacagactgagaatggcaatgctcaggtgtggcaaagacctgattttatgtaagtatttacgtccaacacaaatattattttgtaccctcatttgtctgatgggctcattccaggtcaacagctttctgttaccaggattgatgccatatcacccattaagtggagagagtaggcattgtcactcctcttggccaaatgaggggaatagagactcaggacagcaaagtggaatcccacagttgatgatcttgcagtgcccctgaggcctggggacacgtggaaggatgagacttaaggagcctattgctattcg

SEQ ID NO: 334569 - DNA, 602 bp, Homo sapiens
atcccctgtgttgtaagaagccctccccctgaccctgatgcatggcagtttaagaaccacccatgtacgtgaaaagacctttaagaaaaaatggagatatatgttgtataactattagtctgctctggagtcatctggggaaatcagggtccggtgggtggagcattcactaaatgagggggattcagttaggacacatcaagccatggctccagataattagatcatctaactgaggtttaaattatgctaaactgttttaaaatcacatttgtgtaaattatattacacagactgagaatggcaatgctcaggtgtggcaaagacctgattttatgtaagtatttacgtccaacacaaatattattttgtaccctcatttgtctgatgggctcattccaggtcaacagctttctgttaccaggattgatgccatatcacccattaagtggagagagtaggcattgtcactcctcttggccaaatgaggggaatagagactcaggacagcaawgtggaatcccacagttgatgatcttgcagtgcccctgaggcctggggacacgtggaaggatgagacttaaggagcctattgctattcg

SEQ ID NO: 334570 - DNA, 573 bp, Homo sapiens
tcagcgtcctgactcctggaatgtgagtggaaaaggccagtcttagtggttagctcaaagatagtctctgaccacgcttagggcactgggataatgagcctacaccycttcttcccagacgcccaaagagcttcaggggcctcaggcaccactccttagacacccatggctagctgccccatggggtcctgattcctgtgaggctacaggggcccaggcaggggcactggactagggatctagcccgtgttgtgctgcccacttgctgtgtgacaaagggtgagtccttgccctctctgaacctctatgtcctcacctgaacaacttgggggctggatttaagaaaggcagctctggtttgcacattttgacatcttcaaaccctcaagcgtttggggaagcattcctttattcagcatcctggaatgctccctatgtatctggtgctcagttacaacgaggaacaacacagatgtggccgctcacttcatggagcttacaggacacttaaaagaagcagccgtatctggcatgaagctgatcatgatatgcctatgaaggaagagcgtaggg

SEQ ID NO: 334571 - DNA, 573 bp, Homo sapiens
tcagcgtcctgactcctggaatgtgagtggaaaaggccagtcttagtggttagctcaaagatagtctctgaccacgcttagggcactgggataatgagcctacacctcttcttcccagacgcccaaagagcttcaggggcctcaggcaccactccttagacaccyatggctagctgccccatggggtcctgattcctgtgaggctacaggggcccaggcaggggcactggactagggatctagcccgtgttgtgctgcccacttgctgtgtgacaaagggtgagtccttgccctctctgaacctctatgtcctcacctgaacaacttgggggctggatttaagaaaggcagctctggtttgcacattttgacatcttcaaaccctcaagcgtttggggaagcattcctttattcagcatcctggaatgctccctatgtatctggtgctcagttacaacgaggaacaacacagatgtggccgctcacttcatggagcttacaggacacttaaaagaagcagccgtatctggcatgaagctgatcatgatatgcctatgaaggaagagcgtaggg

SEQ ID NO: 334572 - DNA, 573 bp, Homo sapiens
tcagcgtcctgactcctggaatgtgagtggaaaaggccagtcttagtggttagctcaaagatagtctctgaccacgcttagggcactgggataatgagcctacacctcttcttcccagacgcccaaagagcttcaggggcctcaggcaccactccttagacacccrtggctagctgccccatggggtcctgattcctgtgaggctacaggggcccaggcaggggcactggactagggatctagcccgtgttgtgctgcccacttgctgtgtgacaaagggtgagtccttgccctctctgaacctctatgtcctcacctgaacaacttgggggctggatttaagaaaggcagctctggtttgcacattttgacatcttcaaaccctcaagcgtttggggaagcattcctttattcagcatcctggaatgctccctatgtatctggtgctcagttacaacgaggaacaacacagatgtggccgctcacttcatggagcttacaggacacttaaaagaagcagccgtatctggcatgaagctgatcatgatatgcctatgaaggaagagcgtaggg

SEQ ID NO: 334573 - DNA, 573 bp, Homo sapiens
tcagcgtcctgactcctggaatgtgagtggaaaaggccagtcttagtggttagctcaaagatagtctctgaccacgcttagggcactgggataatgagcctacacctcttcttcccagacgcccaaagagcttcaggggcctcaggcaccactccttagacacccatggctagctgccccatggggtcctgattcctgtgaggctacaggggcccaggcaggggcactggactagggatctagcccgtgttgtgctgcccacttgctgtgtgacaaagggtgagtccttgccctctctgaacctctatgtcctcacctgaacaacttgggggctggatttaagaaaggcagctctggtttgcacattttgacatcttcaaaccctcaagcrtttggggaagcattcctttattcagcatcctggaatgctccctatgtatctggtgctcagttacaacgaggaacaacacagatgtggccgctcacttcatggagcttacaggacacttaaaagaagcagccgtatctggcatgaagctgatcatgatatgcctatgaaggaagagcgtaggg

SEQ ID NO: 334574 - DNA, 615 bp, Homo sapiens
tagttgcaaaaaaattcatatggaataggagaatctcagagagcagaggcaggagctcaaagaatggaggcaagagctaaaaagaacaatgaactggagaccaccaccaggaagccaagctaggccctaatcaaggagcgtctcctatccccagaggaggtggacttgacaagatgtgcctggatagatttcaaaattgctagggaccagagatttttacatrcctaatggtccttccttgttatggattgtgtccataatgtcttgccattgtatgttgggtgtctgcaggttcaaacaacttgcctttttatttcacaaatgttggatggagaggagccccactgacatccaaacctgatctagaccatgagactttggataatgatcctgatgctataagtagggtaagatttatgggggcttggagacaggatacacataatttcctgtggaaagaacatgaataatttgtggccagaaggcagatgtggtaggacttgtaatggctgcaatccaatcccacatgtttacccctttgcaatgtagaatctattccatcccctcaaatctaaggtggtctttggattgctttcactaatagaatgtggcaga

SEQ ID NO: 334575 - DNA, 581 bp, Homo sapiens
ttccttttctgtgaaaaaagcaaattactgcatggggttgtgtggacattaaatgagatattatatgtaaaagggtcctcagtggggccttttcccctgaaaggtgaggtggaacctggggtttgcagcttaatgtagcctccaatggccaaaggcttgctgtaggctgggctccatgctaaaccctttgtgtccttttttcatttcctttccatgatascattcccattcagatgagaaaactggggatcatagaggctttgagaggttccagctggtaagcagagagcaaaggctcaaaccaggtctgttgggctccaagcatgcacccctaatcactactctaaattgcttttacagaaaaataagtcaatgcagagcttccaacaccatcagctcactgtggttctgccttcatgggccagtaactcagccaaagcctggagattctggaaactgcctccattgcctttgctgtccctgcccctctgctggaagtcgcccacaggtgccagctggggccagcctcccccaagactgcctcccccatcaggagtggagtcctgccaggttagcagagc

SEQ ID NO: 334576 - DNA, 657 bp, Homo sapiens
gtgtccttttttcatttcctttccatgatagcattcccattcagatgagaaaactggggatcatagaggctttgagaggttccagctggtaagcagagagcaaaggctcaaaccaggtctgttgggctccaagcatgcacccctaatcactactctaaattgcttttacagaaaaataagtcaatgcagagcttccaacaccatcagctcactgtggttctgccttcatgggccagtaactcagccaaagcctggagattctggaaactgcctccattgcctttgctgtccctgcccctctgctggaagtcgcccacaggtgccagctggggccagcctcccccaagactgcctcccccatcaggagtggagtcctgccaggttagcagagcggcttccaattagacatcatctcctgcccaggcaggaggcagaaagcaggcggagctcagtggggtgcaggcagttagagggtaattagatgtggatgcggaacagctcccttaatgagraggctgctgtgggtgagggacacgcaagagaagcatcacttcaggcacctgccgccaccagcatctggccctgggcaggctggggaaggaaaaaagaattcacgttatttgtggcccaggctctgtgctggctacagggctcctt

SEQ ID NO: 334577 - DNA, 644 bp, Homo sapiens
ctcaggagagggctggggtggttggaacagctgtggtggtaaaaatactcaggggcttgggggagcagcttttaaccaactggtataaaagaatctcagtttttaataaccagcattgctctaataaccaacacatgtcgaaagaaccttcatctcctattrggtctacccttaaaggtaacgtttgcttctatgccagagggctggaaccaaggaggctgctagtggcatcctgttgaacacaccccgcccttcacccagagctggcacccaatgcccaagatgagtgactcatgctgtctccccagagcaagcaagagagggaacagagacttcccaggcaggagcagccagcctcagggaagcccccatctggctgaggcaatctagtccatctggaaaaggggagaatgtgccaaacactacagcagctgtgcccaaatcaagttctgcagatccaaaaagttgtcctcagcaaagagggttccttgagtaaatctgtttgggaaataccgcatgccccacactccctcaggacagtcacagcacagattggcatattcaaggttctgagaaattccagggtaaaaaggccttccgattttatgtaacctcacattttccaggcacatttaattacagag

SEQ ID NO: 334578 - DNA, 644 bp, Homo sapiens
ctcaggagagggctggggtggttggaacagctgtggtggtaaaaatactcaggggcttgggggagcagcttttaaccaactggtataaaagaatctcagtttttaataaccagcattgctctaataaccaacacatgtcgaaagaaccttcatctcctattgggtctacccttaaaggtaacgtttgcttctatgccagagggctggaaccaaggaggctgctagtggcatcctgttgaacacaccccgcccttcacccagagctggcacccaatgcccaagatgagtgactcatgctgtctccccagagcaagcaagagagggaacagagacttcccaggcaggagcagccagcctcagggaagcccccatctggctgaggcaatctagtccatctggaaaaggggagaatgtgccaaacactacagcagctgtgcccaaakcaagttctgcagatccaaaaagttgtcctcagcaaagagggttccttgagtaaatctgtttgggaaataccgcatgccccacactccctcaggacagtcacagcacagattggcatattcaaggttctgagaaattccagggtaaaaaggccttccgattttatgtaacctcacattttccaggcacatttaattacagag

SEQ ID NO: 334579 - DNA, 644 bp, Homo sapiens
ctcaggagagggctggggtggttggaacagctgtggtggtaaaaatactcaggggcttgggggagcagcttttaaccaactggtataaaagaatctcagtttttaataaccagcattgctctaataaccaacacatgtcgaaagaaccttcatctcctattgggtctacccttaaaggtaacgtttgcttctatgccagagggctggaaccaaggaggctgctagtggcatcctgttgaacacaccccgcccttcacccagagctggcacccaatgcccaagatgagtgactcatgctgtctccccagagcaagcaagagagggaacagagacttcccaggcaggagcagccagcctcagggaagcccccatctggctgaggcaatctagtccatctggaaaaggggagaatgtgccaaacactacagcagctgtgcccaaatcaagttctgcagatccaaaaagttgtcctcagcaaagagggttccttgagtaaatctgtttgggaaataccrcatgccccacactccctcaggacagtcacagcacagattggcatattcaaggttctgagaaattccagggtaaaaaggccttccgattttatgtaacctcacattttccaggcacatttaattacagag

SEQ ID NO: 334580 - DNA, 626 bp, Homo sapiens
taagccattctttcgaggctacataacaagtactctaaagggcccagactagaactcaggtgtcccgttctggacttcatagtctccccagttggctatgctgcttccaggaaacctctgattcaaaaaagaacttcaaaactgaaggaaaattgttagaggtcagagatcctgaaaggtcaactcctagatccagcctgctaataaaaatagaawgtaactggtgattcacaggcatcttcaatcctcagagagtctagagctttttagaagctaaagcatttgtgatattcttcagtgagtagtacctgcatgggcaccttttgagctgattttaaatgaatgcttctaatggcactcaatctatcagtagataagtatttactgaacaaaacatcttagtaaagatgcaggatccctggctaggagcctggggtacaggtcccacctccaatgtctgtgtcatcttggaaaagtcacctcctctccctaggctcaatggacttatttgtaaaatggaatgctatacttcactcacagagatctctttcggctctctcaatatatgattctaaagcatcagtaactgggctttttacccccagaataagggactttggagaaag

SEQ ID NO: 334581 - DNA, 593 bp, Homo sapiens
atggagcaatggtgaaacatgttaaatgcaaagggaaggrtacaaacctaactatgtgctataatcataggtatggaaaatacatattttcacccttggaaaaagactacatgagatacatcagagtgctttcagcagtgcagtttggggggtatttcctatttttggcaataatttctataaagtagtttttctctataattacaaaaaaaatcgcaagttagaaatgcctacaggaagcatacaagcacctaaaaagtcaccaatatactttcctaagcaaggaaataaagccaagccccatctttctgtttcatctggtatcagaaaacttgttgccagggcttctgaagacagtgcccaaacctcattgattcaggtcctgccaattcagtattgacagtcttcttctacacaactcactggcctggcacaagaatccaaagactctaagtgtacaagtgagggaaaaatcatttgagcctagacagaaagtcaccttctgattgtgtgcagctgaacagcatttggtggccatgaagaggaattctaaacaggtgttagggcagagtctcagttacttaagaagaaat

SEQ ID NO: 334582 - DNA, 620 bp, Homo sapiens
gtcctgcttgaccaaggcagcaaatgatttatgaccagatgagggtccagacagtgaactgtgaattcagaggagggtgaggacacagtggtctggagatatctggagaggctttggggaggagttaggaaaatatatataaagtctgggaaactgaaggtttgcttggagagttaatgaygaggccagtttgaatcaagtataatattcttgtaggagagtggttcttgactgggggatattttgcctctgaggagacatgggacacttggtaacgtctgaagatgtttttcattgtcataactggagggagaggtgttactggcatgtagaggatagaggaaagggatgctgctgggcatcctacaatgcacagctcagcacccgcagaaccaagagctctccagctcaacatacctgtagggttgatgctgaggaaccccattccacggcttgtcactcagtaaatggcacctgctattataggtgaagccatgtggcagggatataaagtctcttgcttattgtttgtcttgtgagctagagattattattctcatcttataagtgaggaaactgaggctcaaggtggataaataattggcccaaggtctcacagt

SEQ ID NO: 334583 - DNA, 620 bp, Homo sapiens
gtcctgcttgaccaaggcagcaaatgatttatgaccagatgagggtccagacagtgaactgtgaattcagaggagggtgaggacacagtggtctggagatatctggagaggctttggggaggagttaggaaaatatatataaagtctgggaaactgaaggtttgcttggagagttaatgacgaggccagtttgaatcaagtataatattcttgtargagagtggttcttgactgggggatattttgcctctgaggagacatgggacacttggtaacgtctgaagatgtttttcattgtcataactggagggagaggtgttactggcatgtagaggatagaggaaagggatgctgctgggcatcctacaatgcacagctcagcacccgcagaaccaagagctctccagctcaacatacctgtagggttgatgctgaggaaccccattccacggcttgtcactcagtaaatggcacctgctattataggtgaagccatgtggcagggatataaagtctcttgcttattgtttgtcttgtgagctagagattattattctcatcttataagtgaggaaactgaggctcaaggtggataaataattggcccaaggtctcacagt

SEQ ID NO: 334584 - DNA, 605 bp, Homo sapiens
aaagtctcttgcttattgtttgtcttgtgagctagagattattattctcatcttataagtgaggaaactgaggctcaaggtggataaataattggcccaaggtctcacagtcaatactctgtggaacctggttatgagacccagtccatctacccagggaagtcagctgacttttcatttgaccccctcagggtacagaagaaacacagggaacacrgtcctcctcagtgtccctcacctagccctttcctcttgttggatccacccatcaaacactgaggcagagctaaccctgaatgtctggaatttcatcaagtcacatatctacccaaatgcatttagtacttctccgctgcctccaggaaagctctattgatatctcctaaacctatatattctcataaaattatactcaataaatgtctatactatggccatgttcttactataattcacaacatccattccctctttattgtctgtctcatcaacacagtgatatcctcacattgctgataaaatcagataaaacacagcaacattaacaccaaggttggcccagtccaagtcctggatgaacatcagtttcctcctttccttcttag

SEQ ID NO: 334585 - DNA, 605 bp, Homo sapiens
aaagtctcttgcttattgtttgtcttgtgagctagagattattattctcatcttataagtgaggaaactgaggctcaaggtggataaataattggcccaaggtctcacagtcaatactctgtggaacctggttatgagacccagtccatctacccagggaagtcagctgacttttcatttgaccccctcagggtacagaagaaacacagggaacacggtcctcctcagtgtccctcacctagccctttcctcttgttggatccacccatcaaacactgaggcagagctaaccctgaatgtctggaatttcatcaagtcacatatctacccaaatgcatttagtrcttctccgctgcctccaggaaagctctattgatatctcctaaacctatatattctcataaaattatactcaataaatgtctatactatggccatgttcttactataattcacaacatccattccctctttattgtctgtctcatcaacacagtgatatcctcacattgctgataaaatcagataaaacacagcaacattaacaccaaggttggcccagtccaagtcctggatgaacatcagtttcctcctttccttcttag

SEQ ID NO: 334586 - DNA, 469 bp, Homo sapiens
gtgtgtctcagggggcagatacagagacaaggaaagatgagaaacaggattggggagatggactccagaaccacacttgtcgtgaattagccgtgtgactttgggtaagccattgtgcttccctgaggctccgcatcctgatctgtaaaatgcacatcaattgttgtgggtgatcagaactctgagttctttcaggtataagacttcaccttctagtagttcccatccctgagtgggacaagggaacatgtacaggcttgggagttagctagacctaggttaaaagccccactccgctatttaatgactgtgtaaccctgargctcctctttctgagttcaacgcagcattttttcctcacaacagccccataagatgaacaagaaaccccatttgacagatgtggaaaatgacagttggagaccagccctagaccttacacagctcatggtatagagggaaaaacaaa

SEQ ID NO: 334587 - DNA, 578 bp, Homo sapiens
gagtgcctgctgtgtgccaggcacaggactgggtgtgctgtttatattcatctcatgccagcttcgtaacagcctgcctgggtagtatcattttacatttgaggcaactgaagtcacactgctggaaagtggcacagccaatacttgacctcaggattgtctgatttcaaatcctcagaggcttccactgcagtgtgccacctcccttgagttatagaacctacacaggcgtttcatatctctttgacctcatggtcactttgagattaaaatgagataaattacttaacttctctaaacttcagcttgctcaacaatatacatatatattgctgactatagctgactaaatgtagtatggrtgaaatatgtaataataagtaaaagtgcaattataaacagaaacacttgagaataaaaattatgacttatttgcctctggttgtctgatgccaagtgtgcttactcttggcaggtatttcaaaagttgtttaagtgaatgattgaatgaatgagtgaagagatagttttcagtcattacctcccatttcacagctcttctgccaacatacacattg

SEQ ID NO: 334588 - DNA, 596 bp, Homo sapiens
acattcccttttgttggtacaactgatcatattatattaatatrtagtatttataatcatccaaggaagccatatgagtgaatttgaatcccaaatccattgactgtgactttaggcaacttgtgtatcctttccaagtttccattttctaatctataaacaaggatgacaatatatccttgtttataggttataaacaaggattttaataggtttgttgtgatgattaaacaggcttacacattgcatagtacacagtaaacattcagtaaatgatggagtagagaaggtagctatttatatattagtaatagtagcatctgccatttaattagctccttttgtgtcaggcacattatatacatacataatccttacaggaacatgctgttaatgtgtttttttaatagaggcagaagtgaggctcatggaggttatataacttgttcaaggtcacacagctgaaaagtggtggtaggagctgagattagatcccaatcccttgtctggccttcatttcccttttatcttaaacaactaaaaaactggacaaaatattcaaaacaagtattttcagacattgaacaagagccaat

SEQ ID NO: 334589 - DNA, 596 bp, Homo sapiens
acattcccttttgttggtacaactgatcatattatattaatatatagtatttataatcatccaaggaagccatatgagtgaatttgaatcccaaatccattgactgtgactttargcaacttgtgtatcctttccaagtttccattttctaatctataaacaaggatgacaatatatccttgtttataggttataaacaaggattttaataggtttgttgtgatgattaaacaggcttacacattgcatagtacacagtaaacattcagtaaatgatggagtagagaaggtagctatttatatattagtaatagtagcatctgccatttaattagctccttttgtgtcaggcacattatatacatacataatccttacaggaacatgctgttaatgtgtttttttaatagaggcagaagtgaggctcatggaggttatataacttgttcaaggtcacacagctgaaaagtggtggtaggagctgagattagatcccaatcccttgtctggccttcatttcccttttatcttaaacaactaaaaaactggacaaaatattcaaaacaagtattttcagacattgaacaagagccaat

SEQ ID NO: 334590 - DNA, 548 bp, Homo sapiens
gtggctccaaatcagaactcaagctctttttgtctctgcagaagtctaatttgtataataaagttgaactattgtgcaaagatatcatcagacaaaagcaacagccaagggtggcattcccagaaagaaacatctggggaaggatactcagcagtgggcagacgaagggctgattgatacagagcacaacaattacctgaagraaatttagaaagaacattgagagaggttgaattgaaggatttatcaatgtttgaggatgatctggagggagagaatagaaataattaataggatttctccttctgaaatgctggagacatgctattctgaacgtggttctttattccaacagtcactgcaccaatgtcagagatgaaactaaaaatattaacccttttaaacctggttctaaaggcttgggacttgcttgtccattgggatgatcagtatgggtggagtcactgcttcccctgaaaggcagcaagaaatatcatggaaccaaaatatagtcttgagaactcactctgctcagctctgtgctaggc

SEQ ID NO: 334591 - DNA, 548 bp, Homo sapiens
gtggctccaaatcagaactcaagctctttttgtctctgcagaagtctaatttgtataataaagttgaactattgtgcaaagatatcatcagacaaaagcaacagccaagggtggcattcccagaaagaaacatctggggaaggatactcagcagtgggcagacgaagggctgattgatacagagcacaacaattacctgaagaaaatttagaaagaacattgagagaggttgaattgaaggatttatcaatgtttgaggatgatctggagggagagaatagaaataattaataggatttctccttctgaaatgctggagacatgctattctgaacgtggttctttatyccaacagtcactgcaccaatgtcagagatgaaactaaaaatattaacccttttaaacctggttctaaaggcttgggacttgcttgtccattgggatgatcagtatgggtggagtcactgcttcccctgaaaggcagcaagaaatatcatggaaccaaaatatagtcttgagaactcactctgctcagctctgtgctaggc

SEQ ID NO: 334592 - DNA, 548 bp, Homo sapiens
gtggctccaaatcagaactcaagctctttttgtctctgcagaagtctaatttgtataataaagttgaactattgtgcaaagatatcatcagacaaaagcaacagccaagggtggcattcccagaaagaaacatctggggaaggatactcagcagtgggcagacgaagggctgattgatacagagcacaacaattacctgaagaaaatttagaaagaacattgagagaggttgaattgaaggatttatcaatgtttgaggatgatctggagggagagaatagaaataattaataggatttctccttctgaaatgctggagacatgctattctgaacgtggttctttattccaacagtcactgcaccaatgtcagagatgaaactaaaaatattaaccctwttaaacctggttctaaaggcttgggacttgcttgtccattgggatgatcagtatgggtggagtcactgcttcccctgaaaggcagcaagaaatatcatggaaccaaaatatagtcttgagaactcactctgctcagctctgtgctaggc

SEQ ID NO: 334593 - DNA, 657 bp, Homo sapiens
catccctaaaggtgagaatgaagaaatggatgactgaaacctgttttacaatgtaagattcaaataatttgtataaattctgaagataaaagatgatatttaaataaatgttgttaaggggccactttgtcccctcccctgaaaacctccagaattgctatgttccatcttccttgtcattatgcacatttagatggaaaggtctgatattcagtgcctaagatattctatgtattttctttcactttccaagcttccttcatttccctctaacttttactttcccagtggaatcacagattccttgtmattttcctcctgcactctccctcttcccacactccctgtctcctgcacctcaggaaaccagcttctgatgaatgaggagtctctccctcctccttccacacacacacagcctggaagaaggggggcatcaaatacaactgaacagcattcaatatggttgaggacaaaaaaccatcaaaatacagaagggcaggggctggcagctgggtcctgagcccgtaatatttattctcctccctgactgccagggcagggccttctagggtcattaacacccactacaggctgggccagagccttcattgagattctgctcacagctaaagccatttctaagcctgcccagct

SEQ ID NO: 334594 - DNA, 657 bp, Homo sapiens
catccctaaaggtgagaatgaagaaatggatgactgaaacctgttttacaatgtaagattcaaataatttgtataaattctgaagataaaagatgatatttaaataaatgttgttaaggggccactttgtcccctcccctgaaaacctccagaattgctatgttccatcttccttgtcattatgcacatttagatggaaaggtctgatattcagtgcctaagatattctatgtattttctttcactttccaagcttccttcatttccctctaacttttactttcccagtggaatcacagattccttgtcattttcctcctgcactctccctcttcccacactccctgtctcctgcacctcaggaaaccagcttctgatgaatgaggagtctctccctcctccttccacacacacacagcctggaagaaggggggcatcaaatacaactgaacagcattcaatatggttgaggacaaaaaaccatcaaaatacagaagggcaggggctggcagctgggtcctgagccmgtaatatttattctcctccctgactgccagggcagggccttctagggtcattaacacccactacaggctgggccagagccttcattgagattctgctcacagctaaagccatttctaagcctgcccagct

SEQ ID NO: 334595 - DNA, 628 bp, Homo sapiens
ttccttcccgtttctatcttatttcccatttcctcctggtttttctcattttccaaaaaaattacttgcattcagggtcttgtctcagggtctgctctgggataacccaaaccatgcactctcatgatactatttttattttatatacatacatacatatacatatataaatatacattatatatatatatttagagacagagtctcactaygttgctcaggctggtctcaaactcaaactccttggatcaagcaattcacctgccttggcctcccaaagtgctgggatcataggcatgagccactgcacccggatgttaatgacactattaactcctctgtgcccctttcccttccccttgcctccacctagaaggtgcccagcagataatttcacacacaatagagtctatcaaatgcctgcacattgctcataggttccctccattttggctcccaggaatccagctatttggggcaatgtctgtagggcagttcctgaagctggagcaagttatccagcacatccaggctccctctgacagtatcctgtccatgatgctccttgtgctcttcttccaggatggttagcaaggagagggctgcacagcacaattgaaatgcacag

SEQ ID NO: 334596 - DNA, 628 bp, Homo sapiens
ttccttcccgtttctatcttatttcccatttcctcctggtttttctcattttccaaaaaaattacttgcattcagggtcttgtctcagggtctgctctgggataacccaaaccatgcactctcatgatactatttttattttatatacatacatacatatacatatataaatatacattatatatatatatttagagacagagtctcactacgttgctcaggctggtctcaaactcaaactccttggatcaagcaattcacctgccttggcctcccaaagtgctgggatcataggcatgagccactgcacccggatgttaatgacactattaactcctctgtgcccctttcccttccccttgcctccacctagaaggtgcccagcagataatttcacacacaatagagtctatcaaatgcctgcacattgctcataggttccctccattttggctcccaggaatccagctatttggggcaatgtctgtagggcagttcctgaagctggagcaagttatccagcacatccaggctccctctgacagtatcctgtccatgatgctccttgtgctcttcttccaggatggttagcaaggagagggctgmacagcacaattgaaatgcacag

SEQ ID NO: 334597 - DNA, 470 bp, Homo sapiens
gcagcacaacaggaagtaggggataggctggcatccaggaacacctggacacttaaagaaaagcctggtaaacagggatgaaatagaaagtgcattggaggtagtgcatgctgcagggaaggagggtcttttaggtactattctgggcaaggaggaagtacaaattgcatttgattccgtagtcagaaaatctagaagttgaccctggagtaaaaccaacttcaggcaggcaaaatcagcccacaaacagaactggggcagggcaccttgacttgaatttcaggtctaaatctggagatgcacatcccacagtgaggggttaacagtgctttacttttaagcttcctttttgcaaatgccaggtctgcagagactctgctctattcaaagatgattaagcaaaacaaaataawacctccaagaaacaaaaaatgggcctttaaagagatacactacagcaaaaaggaaac

SEQ ID NO: 334598 - DNA, 622 bp, Homo sapiens
atcaactatgacgtcctgcgcatgattgtatgtgctgtacttttatatgaccggcagcacagtagctctatttacaccagcatcactgcaatcatgtgagtaatgctttctactacaatatagcaatgtctgcgctgtcactaggcgatgggaatttttcagctccattataatcttatgggaccactgttgtacacacagtccatctttgaccaaaacatcattatgtggcacacgactataactgtatgtcacacattttaaagcatgcattagggaatgaatttacaaagagtactttaaacttctatattaattttaaaaataaaaaacagtttattaaaaaaatagagaaaacattaagagcaaaaaatgtataaaaaagagaaagtatacaattgggtgacaaagtcaaacagcagatatgaaatgatggtaaacagtctgaattattctattaggggacaaaaattcccaagctaaaatgaaaacattaaattatgtgcaacttacaagagataaatctcataaaaattgttaacatttattgcatacttgccatgtgtattgcattgtactaascatttcacatacattgtctcatctaattctcccaataaac

SEQ ID NO: 334599 - DNA, 510 bp, Homo sapiens
gattccacttacatgacgttcttcaagtgatcaaattcatacagacagaaagcagaacggtggttaccaggggctgggaggatggagaaaatggggagttactayttaatgggcatagggcttcaattttacaagttaaaaagaattttggagatggatggtgttgttggtagcacattatgaatgtgtttaatgccatcaaaccctacacttaaaaatggttatgatggtaagttttatgttatgtgtatttaccaccgtgttacaaaaaacaatggtatggctactgacaatacaatgggaatattttcagagagttctggaaggatctgggacctaggagtcttgagggatgaacattgtaacttcaggtattacagagccaagaagctgcaagcaactcctagttggaaggcaactggagttgggggatgatgggctgaaccagtgtagaatcggttggtaattctcaatgtcttacagaaagcatgcccacaacacacactgcag

SEQ ID NO: 334600 - DNA, 535 bp, Homo sapiens
tggtattttagcggaccttggacagcacacaaggcacaaacccagagggttacagaggtattagtgatccagctctaaaaagttgaaacagatatgcaggccacaatggctttctcctttttcaaaactttcagccagcttatgatctagccaacaggacattttctcttctttttgcattctcctctctaaaacrgagataataatccctacctggcttgcaataagactatcggaattgtccaatgagataaaaatgtcaaggtgctttaaaacctgtaaaatgccatgcacatgtgaattactgttattactctagttatctatgcctcttctggttagaattcatcatttttgcctatattccctgacaaagcacacacaaaatctaaaaccatcatctgcctccctcctgcaattagagcactgattttatttgcctggtgtcacactgcgtacatatttgtgttccctgtgagacttgtgtgcatcctgaaggcaaggattatgtctgctcctctttgtattcctcaca

SEQ ID NO: 334601 - DNA, 542 bp, Homo sapiens
tattagtgatccagctctaaaaagttgaaacagatatgcaggccacaatggctttctcctttttcaaaactttcagccagcttatgatctagccaacaggacattttctcttctttttgcattctcctctctaaaacggagataataatccctacctggyttgcaataagactatcggaattgtccaatgagataaaaatgtcaaggtgctttaaaacctgtaaaatgccatgcacatgtgaattactgttattactctagttatctatgcctcttctggttagaattcatcatttttgcctatattccctgacaaagcacacacaaaatctaaaaccatcatctgcctccctcctgcaattagagcactgattttatttgcctggtgtcacactgcgtacatatttgtgttccctgtgagacttgtgtgcatcctgaaggcaaggattatgtctgctcctctttgtattcctcacagagcccttgagagtcttatttgaactaatgttacccgagtcacaccacaatgaattatactgtct

SEQ ID NO: 334602 - DNA, 420 bp, Homo sapiens
tatcaccagtcactgaagggagcaggaggcagaggtcaggagttcatcatttgccctgggaaggtctattataaacccaaacctcctgggctgagcctctcatctctctctgtttccaggcatagasgtggagaaagggaatggaagcaaaggaaggctccttcctgccaggccagacctggctcttcctggatctctaggagatgcagaaatgcctccatttatgtgcaagtagagtcagattgtaagagactaattagaagtagaaaaaaaatacgtttttatttctcatcttgctgcttctgatgcattttctccacacctaagcattagtctcagaataatcctgaaatatattctgctgaggtcaaggaggccacaaatacagggctgggctattctgaatagagcttagcccca

SEQ ID NO: 334603 - DNA, 544 bp, Homo sapiens
catcttttctttctgagcttatagtggtaagtgcagcagtagctaacatttaagaagtgcttactagtacctttacacgaattatcacatttcattttcgcttttatgccayacaagccctgtattaacattttacagaggagaaaacaaaggcttagaaaatgtaaataactttctctaaggtcactgagctactatgtaatggagttagaatttgagctcaggtcaacctgattctcagagtccaaaatcttaccaattgctctccttactctgctctcctctgactacattaaattgtctttcagaaaggaaacattcaatgctgtgactagtgccttgatctacagacatattcatgcagttcttaaatattcttatctgacgtattgctactcatgaaagtgattaaggacagagagagagccccacagccacactcatctgaaacctgctcagggtaattcggccagcatatggtggagcaggcttcaaacccaggactatccagctttaatatctatgctcttctagggaacaaaca

SEQ ID NO: 334604 - DNA, 573 bp, Homo sapiens
cacacctgtgaatagcccaactgtactccagccttttaaaaaaaaaaatcagatgaattatgaatttttagctacaaggtaacctcctttgaggtaatagctataaattgagaaaagaacagagctcaagactgagtcttgttgatctgaccacatatattcattcatccagaaatacctcatcgagtgctgctkctggctggtcactatcttttcgtttggaatttttttggaggcagggcggtggttttgagatgagactgtctcccagccaaaagcacggtggcatgattaagtctcacgcagccttgacctcctaggtgcgatcctcccacctcagccttctgagtagctgggactgcaggcgcataccaccatacctggctaatttttttaatgtttagtagagatgaggtctcactatgatgcccaggctggtttcaaactcctgcgcttaacaattctccctctttgggctccaaaagtgctgggattacaggcatgagcctccatatccagccaagttgggatttttaaagtaagcttttgaagagtttatgcaaagtgatgaca

SEQ ID NO: 334605 - DNA, 588 bp, Homo sapiens
atgttcgtggaatgtatacaatgggtgaagactgatggtaaacaatgtgggatagggtataaagatgaacaaaagagaatctactttcatgatttttcccaatctagccaggagaacacatacatacaactacctttaatagttaggagagagctccattagaaatatcacaaaaaaagttacaaaggcatgaagatatytggtatacctagagactttctaatggtctacagtagggatcacaaactcaaatgtcaggcaggtcacttaaagatgcgaagtgagttgggttggagccacaatagggtgtggtgagaattgtggacaacttataaaataatgtttcaaagaagtaagagatctgtattttcgcttgagtgctcccattccttaaatgataagacttgtgtgcacacacacactggtattgggtgaaccaaaacaatgtagcatgtctttgggttggatcctgcttgtgtgctcccagtttatgacctttggagaacatagtgtttttggggtaaggacaaggggccagagagtggtaagagatacctctaaggagataagttggagctattttgtgag

SEQ ID NO: 334606 - DNA, 466 bp, Homo sapiens
tattgtcagtggggtgttaaagtctctgagtattatcgtttgggagtataagtctctttgtaggtctctaagaacttkctttatgaatctgagtgctcctgtgttgtgtgcatatatatatctaggatagttagatcttacgaattgaaccctttagcattatgtaatgcccttctttgtcttttttgatctttgttggtttaaagtcttagtttaaaactagatttaaatcctagttttgtcagaaactagaattgcaacctctgcttttttctgttttccatttgattggcggatttttctgcgtacctttattttgagcctatgtctgtcattgcatgtgagatggatctcttgaaggcagcatatcaatgttcttggtgtcttatccagcttgccactccgtcttttcattgggacatttagcccacttacatttaaggttagtattgttatgtgtggattt

SEQ ID NO: 334607 - DNA, 532 bp, Homo sapiens
ccactgcactccagcctgggcaacaaagtgagattctgtctcaaaaaacaaacaaacaaaaaacaagacaaaacaaaaaacaacagaagagactagtgcaatttataataatgttgtattgaaaattaccctttggatattgtcatcttccaaaatatcattttttcacagttatttggtagttttctcccttaaaattgccatttctgagggtaatggccactagaatttctaaacagaaggataagaaagtgacttgttttgtactgggaaagtttgacagctgagctctgtaggagagaaagtgctgtaagaggcctgcacttacgatggagagaggaagcgggaaraatgaaatcaggggctttcagggtcaccaaactggactaaaacacatcaattgaagtccttttccatgcgaataaataatccctctcagtccccttttctgattagttgtggttgaaggactttttacttttaatgaagtctgtctcaggttatctatgactgtgtaacaaaactccctcag

SEQ ID NO: 334608 - DNA, 485 bp, Homo sapiens
caccctattccagccgtatatattatcaaatgtgtctaaactgattttaaaggttcttttttaaaaatgtttttatattcttataatttgaaaatttttatgtttttctgtttaattggtaattgttaatagtgcttgcttatagaacaccatctaattattaacacttcattttaactaaatctttgtgtgaatgttttcttacargttctgtatgttcctgatcctgaatatgtctccagtgttgagagctctccatctctaagccccgtaagtcctctgtcaccaacatcatctgaggctgaatttgataagaccactgtaagtatctctgctttgcaaagatggcgatgaagaaatctcactttgtctacattgactgtcttgttttttacattccattttgactatggttagaatgaaatatttcctttttattttgttgcttaagtttgtaaatcccagctttaaaaataagacattct

SEQ ID NO: 334609 - DNA, 485 bp, Homo sapiens
caccctattccagccgtatatattatcaaatgtgtctaaactgattttaaaggttcttttttaaaaatgtttttatattcttataatttgaaaatttttatgtttttctgtttaattggtaattgttaatagtgcttgcttatagaacaccatctaattattaacacttcattttaactaaatctttgtgtgaatgttttcttacaggttctgtatgttcctgatcctgaatatgtctccagtgttgagagctctccatctctaagccccgtaagtcctctgtcaccaacatcatctgargctgaatttgataagaccactgtaagtatctctgctttgcaaagatggcgatgaagaaatctcactttgtctacattgactgtcttgttttttacattccattttgactatggttagaatgaaatatttcctttttattttgttgcttaagtttgtaaatcccagctttaaaaataagacattct

SEQ ID NO: 334610 - DNA, 561 bp, Homo sapiens
tttcatctcacacattgcaatttttctccctgtaagttcatactgggtcccttatattttccatatccatactgtgtataatcttctatattgttgaatatggttataataattgttttaacgtctttttttttgtactctgttacttctgggtctgtttgcgtttattgatttttctctttaatgtggttcatttttttctgtttatttacatgcctggtaatttttgattggctaccagacatcatgaattttatgtaattggatactgaatatttttgtattcctayatatattcttgcactttttatctgggacacagttatttcttgatcctattgtggcttttatttctttgatgatcacttggtaatggcttgttcataagttttgttaggaccagaatagcctttagtgtgtagctaatttttctccttactaagacaataatacacttgtaagtattctgaggctttgtaaatacaagatttttttttgctttaatgtttagtgagaacacgaactattcttactgtgtgggcgctgactattgattcttct

SEQ ID NO: 334611 - DNA, 629 bp, Homo sapiens
gtgtatatctatggaaatcagtttatttttactttattgggagatttaaaattttaattaaacatttctctgtgtttattttccatattccatcagtgagtaaattttagtttagaattacagctttacccagggtttatgtcatcaagttcccttcaagtagattacttgcaaggaaatcttactttgatatttcctaaatattaagcaattgatataaaagtttgacttaattacttgatttatagaattacttggtctataaggttaattatttggtcatattgaataaatcagattttttatattctttggagatacgtgctacatccttttgttaaaaagtctttttagtgatactaattctgtgttcagtgtgtgaaaagtaaaataccacaattttaaaagtctaattatttttaattttgtttaatgacagagatatagatcagctatcaggaagggacttctgccattcaaagaaaatkacaggaagtaacactgaggaaatagactcaagaatccgagatgcaggtaatgatagtgccagcactgctcctaggagcactgaggagtctctttctgaagatgtgttcacagaatcagaactttcccctatacgagaggag

SEQ ID NO: 334612 - DNA, 626 bp, Homo sapiens
ctttgactacatctgatagttaccttatattataaaacctttgaaaaagataaaataatctgtttaagctgatgatgtggtggaccaattttgttgtgggggttgggggtttaatggggttaggggaggttattataaccaaatattaaaaggacaaaaattgatagatgtttttaaacagtcatctctaaactgttaccatttggtttcttctttttttggaataattagttttaagtaattttaagttacttaatattctgtaatagaaatattcaaactttctgatctttatgactttataataaaattatgtaataaatrtaaaagtgtctagtccaattatgagaagaatggtgaaagctcatcgttttaaccacatgaaaatagtggggttcccatagattatctaccttgtgtaatactgcacagaaaaagccatgatgagtacccaggtctcctgactataagtgctatttcctccagtgtgctgccttggtaagctaatcaatgtctgggttcctaaattcacctatatattcagaccctcagtatactctatcagcacctctggttgaaagagttagaactaattcgttcttaattaactgtccaaacaggtggca

SEQ ID NO: 334613 - DNA, 555 bp, Homo sapiens
tatttgttacaataagcttaaggaaacatatctttgtaaattggattcatttatctttattctgtcttccaatgcaagtcaataacaacaagaaacattttctatttactgcgatagtgtgaaaatgtttgtcttcccttttaatcttgtttcagaattattttttccagtacttcaactgtttaactttatgaactctattcagatcttattcatatcagtacccyaaaatatgttaaaagagttcataaactatggcaccccaaattactaaaatgtacacttgggatagcaggaaaaattccgtaatatttttaaaaattttaatttccaaatatgaacattgaagatcagtcctattgaagacagacagaaacatatatttactaagaaaaagaaaatttagccaaattttaaggtggtcaggagtaaaagttcctaatgataaatcagttcctaagtatttggataaaggatctgagaaatactattcttactgctcacgatgtgtaaaggactgaatttcctctttttgtagtgttactttgtatgcca

SEQ ID NO: 334614 - DNA, 555 bp, Homo sapiens
tatttgttacaataagcttaaggaaacatatctttgtaaattggattcatttatctttattctgtcttccaatgcaagtcaataacaacaagaaacattttctatttactgcgatagtgtgaaaatgtttgtcttcccttttaatcttgtttcagaattattttttccagtacttcaactgtttaactttatgaactctattcagatcttattcatatcagtaccccaaaatatgttaaaagagttcataaactatggcaccccaaattactaaaatgtacacttgggatagcaggaaaaattccgtaatatttttaaaaattttaatttccaaatatgaacattgaagaycagtcctattgaagacagacagaaacatatatttactaagaaaaagaaaatttagccaaattttaaggtggtcaggagtaaaagttcctaatgataaatcagttcctaagtatttggataaaggatctgagaaatactattcttactgctcacgatgtgtaaaggactgaatttcctctttttgtagtgttactttgtatgcca

SEQ ID NO: 334615 - DNA, 604 bp, Homo sapiens
tttgttagtgtgcaagacattgaagaaagggagatttggggtttgttttggagtaatcttggggaaacactggaacgtccataaggtattgttctttatatctaagagatgaacgtgttcttaatcatgggattggcagcaactgtgaattttctctagtctctgtttttgttagtccatttgtaatagtgatgggtggatttacccctgcctttccattggtaattctgtagaagtaaaggcttaggaaaatactttctctttgtgagggtcctttgtcaaagactgaaaagactagagagtggcatttaattctgcagagtataggtcatggtacttagttcctatagataggagttagcagtatatccaaatactttattccttaagaaacgattttttagccagtgaatgcacttttaattggaaggtcttggttttctcaactgtttactcctaataattcagagcgtgataagggatattttggagaaatgtattcattttttatttaggtttaatcttttgggtaaagtaataaattgtatacrtggagtatggtttaccaagggtttaaaattaatgtaagagtaattccagtttc

SEQ ID NO: 334616 - DNA, 546 bp, Homo sapiens
gatggctagtggctaccatattatacaaggcagatataaaacatttttaccattgcagaaagttttattgggcagcattgatagcaatgagtcccaatgcagggtacacattagaattccctgggtagccatgaaaaaattttgatgccaagatctgattayaatcaaagatttgatcttgaaatctctgtttaagatctccacttacagtttcttacggaattctaatatgtaactagggttaaaaaccactgacttaggatgtgaaggactctacatcattctgttttccttaatgatatttctctcaatcaaactcttgctgaatttagcaggttattatttatttatttttctttacaagtacttggggcatgcacctattttatgatgcaagttaataaaagaaatgcatgtttaagttttctgccaacctctggatagtattgagaccttaggaaagttgaggtgacttacaatgaaaagttcctaaaaggaagacatgtttgtatgctgagagaaagatgctgaagataaaatgactgt

SEQ ID NO: 334617 - DNA, 575 bp, Homo sapiens
aataaatttctattacttaarctacccagcctagggtattttagtacagcagttcttgaaaactaatatgctaacaaactatctaagaaaaaaaagttaaaatcctatttcctgtcctggaagagctgatataataggaaaggaggcttgacttgtaaacatttccaccattagtcagaatgatcttatagcgacagctggatcgcattgcttccctgttctcaaacctctagtggcttctccttatacttaaaataaaaaccgagctgtgtcctacaaagatcctagtgtgacccagcatctgcctaatggctaactaggtttgtattccccacctctcctcataccacatgcccccttctcccttttctgctcctctcacaagcctaacaagcatgccaaggtctgagaatattctgctctttctacctagttcaagccatcttctcatcactccctgctgggctgcaggaaggggtggcagaggaagaaggaggaggaacttccattttctaagctacagatgcataggaggcaatgtgctcggtgcttcacatgcattatctggaatatta

SEQ ID NO: 334618 - DNA, 575 bp, Homo sapiens
aataaatttctattacttaaactacccagcctagggtattttagtacagcagttcttgaaaactaatatgctaacaaactatctaagaaaaaaaagttaaaatcctatttcctgtcctggaagagctgatataataggaaaggaggcttgacttstaaacatttccaccattagtcagaatgatcttatagcgacagctggatcgcattgcttccctgttctcaaacctctagtggcttctccttatacttaaaataaaaaccgagctgtgtcctacaaagatcctagtgtgacccagcatctgcctaatggctaactaggtttgtattccccacctctcctcataccacatgcccccttctcccttttctgctcctctcacaagcctaacaagcatgccaaggtctgagaatattctgctctttctacctagttcaagccatcttctcatcactccctgctgggctgcaggaaggggtggcagaggaagaaggaggaggaacttccattttctaagctacagatgcataggaggcaatgtgctcggtgcttcacatgcattatctggaatatta

SEQ ID NO: 334619 - DNA, 532 bp, Homo sapiens
ttttctaagctacagatgcataggaggcaatgtgctcggtgcttcacatgcattatctggaatattaacctcacttaacagatgagaaaactgaggttcagagaagtcacaaagcttaagtaggaagagtggattgtatttgaacctaagtcttcctggactggaatgcccagcctgaccctgcctagtcatgctgcctggtcacttgcttgagggaatgtggaggggcttgttggcctttttcttacaactgtgaagtctttgtgttaaacaagcccctctataggctttcttgttaaatgcacatgaccattgacatccctcccctccactcctctttgctgaacttaataaataaagctgttcttttatttaacctggcatcttcagaagagtttytgcctgcagctagaccaggaagaaaggagactgagcagaggaaatgaaagagtaaaggagaggagagagtgggtaggacacaaagctgaggtgactgaagcagcaggaagtaggcagggcatgaagaattggg

SEQ ID NO: 334620 - DNA, 424 bp, Homo sapiens
gtctgtcttcctaactgatctcggaaatagaagcttccttatttttactttaatttcaagcacaaagtgtcttatacaactagggtttcattatgtgcttgataagtgaattaatgaatgtrcagagccaatgggcaaactttacaggacatttgagcctattgggaaaaaattctaacagccagagctgtccaacaatggaagaggctgccttctaaggtagagaactccccatcatcagacagtccaagcagaagctgggcaacaatttggcagggctattaaagatgatacagggagtgttgaattaggtctcttggagcagcattcattaatgaggatctgtgtaagcttcattttaaggctgcagtaaaaatataacatttcatctgtgtgttcagaggtgagcttcagggattgggaa

SEQ ID NO: 334621 - DNA, 424 bp, Homo sapiens
gtctgtcttcctaactgatctcggaaatagaagcttccttatttttactttaatttcaagcacaaagtgtcttatacaactagggtttcattatgtgcttgataagtgaattaatgaatgtacagagccaatgggcaaactttacaggacatttgagcctattgggaaaaaattctaacagccagagctgyccaacaatggaagaggctgccttctaaggtagagaactccccatcatcagacagtccaagcagaagctgggcaacaatttggcagggctattaaagatgatacagggagtgttgaattaggtctcttggagcagcattcattaatgaggatctgtgtaagcttcattttaaggctgcagtaaaaatataacatttcatctgtgtgttcagaggtgagcttcagggattgggaa

SEQ ID NO: 334622 - DNA, 603 bp, Homo sapiens
taagcaagtttctttccaggggggagggaagataatataattattattgccgtgatatcccaatgtttacatcaatgggctcaaactagccatgccaacccttctgggggctgtgtgaattcatgtactcaaacagtagacatgctcgctcagaagtcacacctgctacctgtgtgatgctacctgatcctggtacccacaggtaagtggacaaccacatgagtaaaatgatgagcaacagttctacttcctttggaaatgtctcttcagaaagttcttgtcttcttcctccttcctcacaaaagtttctcttccttgacatttttctttagcagaccttatgttataatagaaccacagctcctcagccgtttgctgagtgtagccacatctaaaactctgagaccagttatgtaaccaaagctttagctctcaggtagactgctttatgccagtggactttcatatttgttgtcagtagtttccaagtcactttcagccaccttcaggaatttattcctggtatctgtcwcacacacacacacacacgtacacacacacaggtgcaggcccacacactcaaatagttacaccgtgggtgct

SEQ ID NO: 334623 - DNA, 629 bp, Homo sapiens
ccaataacacccatttctttatgaattgcacagattcacttatcagattagcccaaacaaagagcaaaattctaaggaatgggtgagttttcatgaagagagagcaaggaggacaagtcaaaggcaaaagaagtcggtctaggctggggtatagcagcaagaaacccagaaggtgaaggtcggcaaagtgctaagtaagggccaagaaccactggagacgatctttgtcaacttcacacctgcttcccaaagccagctatatgtataactttttgatgtacatgcttctgcccaaaattttaaatagcgcctttcagctctccagcactctccttgagctttggcacactcctccaagggtctgtattgctcacccgcatgcatttgcaaagtaactgctcatggactgtgccaaggaaaatatatccacartgtggccatggtcagaggctagaagacttgatttaatacagcagtgctcagcttttcatgttttcctctacggacctcagaaagtcctacaatggcaacagcagataatcagaggttctgatctgcatgagataaccaggatcaccaggcacaaagaaattccatcccaaagtacagaatcttgaaatatttgtagg

SEQ ID NO: 334624 - DNA, 518 bp, Homo sapiens
attgatggaaggatttattcaaacatcaggaatagaccgggagtggtggctcacgcctgtaawcccagcaatttgggaggctgaggcaggtggatcacctgaggccaggggtttgaggacaacatggcaaaactctgtctccactaaaaatacaagaattagccaggtgttgtggtgtgtgcctgtggtcccagctactcgggaggctgaggcacaagaatcacttgaacccaggaggtggaggctgcagtgagccgagatcatgtcaccacactccagcctgggtgacagggtaagactctgtctcaaaaacaaacaaacaaacaaacaaacaaacaaacaaacatcagggataagcaactgtcttctggaaagtgagctttcacaggaaaggagggcttgggtggaagtccctgtagttgggctggttaagcccaggcaggattcccatccccaggacagtctccattctcagagggcacagttttaattcaaagacttgggtgcagctggagcag

SEQ ID NO: 334625 - DNA, 453 bp, Homo sapiens
tagggtgtgtgctatatcccaagcactgtatataattgaaagcacttawttctcaaagactctaggaggcaagttctacttgtgcaagtaaagaatgtgggacatagcagggtttagtgacttacccagggtcacacagctaataaatggcagagccaagattctagcctgggttttctgtatgcaaagtctgtgctcttagccactttgtgctatgctaggaaatgctccttagtggtccctaaggtgggaccaatggatgacttttaagtccccatcttagatagacacctaaaatgggaatgtatcacaaagactctcagagagatcttgagacacagctagggcacagcatttcctggcaatggtcaggaagctgggtagacctggcttctagtcctggcaatcaccaagtcactgtatggtgttgaaccagtcacttcactctcagag

SEQ ID NO: 334626 - DNA, 562 bp, Homo sapiens
gggcttgatgttttgtttccacttttcaaaggcgctcctttttttcctcccagtgataaggcccaggaaatggttagtgacatgctcgtgggaacctatggaaaagaatacacaccatatcaatggagcagccgccggcccaggagcagagagggtgggtgggggagccgcacggcgtgggctgtggtggtgagatagcattgagaggccgcctgaagctgtgtgcccccagtctggggaccgrgcctctttatccagccagaatgggtggaaggccagacaatgtagtgctatatttggtttcacaacaaagggccctagaaagatttgatagtgcagggatggtcgggaaggcagcgcaggatgcagcacaatacaagctttgcaaaggtatttagccaggccctttatgccagggacatggcaaggtatggatgtcgtcatgatttctaatggcttttgtctgagccagggttctatttgctagggaggtccctaggcagggctgagagcagtgccagggtgctcctggtgccactacacttcagggccacctgaagtc

SEQ ID NO: 334627 - DNA, 563 bp, Homo sapiens
tccaggccttctgtgataaggctggcaagagtctaagaaaactagccccatgatgtggtggggtatatacaggacttctgtcctargtcctgggaccttctggggaggaggcaaagtgaggagagcaaccccagaaatgtaggggagtagagccattgagtcactgggtagcctggctgtaccagagaagtgttctggacaaggggtgtgggaaaggcggctaccactcagtaacaatcctcacacatttagggcttcattccagggggaggagcatcagtgactattttcaactttttactggtttttaaaatgtaaaaacccttgttgggctgcccccgtactggttccaggaaaggaacatggcaacaggcaggctagggctgggacaggatgagagatattctggcaggtgacctcagcagtcatggacccatcagaccaatcctcctgctgaagctagagaagtccagaacaatgcaacctcaattggtggagttatctctggtatggggacacttttttcttattgacttctttgcgcatcaggattaactttgtgg

SEQ ID NO: 334628 - DNA, 631 bp, Homo sapiens
aggctagggctgggacaggatgagagatattctggcaggtgrcctcagcagtcatggacccatcagaccaatcctcctgctgaagctagagaagtccagaacaatgcaacctcaattggtggagttatctctggtatggggacacttttttcttattgacttctttgcgcatcaggattaactttgtggaccaattctggtacaggggatctctctgagaaggcctgtcaaactgttctctctgttgcccccttattctcatcactggtgccatggaatcctccagaagtgttccctgggtattgtctttactttttcagcttttatcagttccatccatctatctatgcacccatacaacagagctctcctttactcctagatgccaagtttaccccaggtattagaaatagagtattgagctcctgcagcctccttggaagttcttggactggtaaggaagatacttgtctaaacacataactactactacaaattcagaaaagcagttgtccaagcagtagctccaaggagagaatatcaaattctatccaagaaagctcaaaagtcttcatgaagaaagtgaagtttagtaaagacatgaacacatgaaatgtatctctcataatac

SEQ ID NO: 334629 - DNA, 563 bp, Homo sapiens
tccaggccttctgtgataaggctggcaagagtctaagaaaactagccccatgatgtggtggggtatatacaggacttctgtcctaggtcctgggaccttctggggaggaggcaaagtgaggagagcaaccccagaaatgtaggggagtagagccattgagtcactgggtagcctggctgtaccagagaagtgttctggacaaggggtgtgggaaaggcggctaccactcagtaacaatcctcacacatttagggcttcattccagggggaggagcatcagtgactattttcaactttttactggtttttaaaatgtaaaaacccttgttgggctgcccccgtactggttccaggaaaggaacatggcaacaggcaggctagggctgggacaggatgagagatattctggcaggtgacctcagcagtcatggacccatcagaccaatcctcctgctgaagctagagaagtccakaacaatgcaacctcaattggtggagttatctctggtatggggacacttttttcttattgacttctttgcgcatcaggattaactttgtgg

SEQ ID NO: 334630 - DNA, 631 bp, Homo sapiens
aggctagggctgggacaggatgagagatattctggcaggtgacctcagcagtcatggacccatcagaccaatcctcctgctgaagctagagaagtccagaacaatgcaacctcaattggtggagttatctctggtwtggggacacttttttcttattgacttctttgcgcatcaggattaactttgtggaccaattctggtacaggggatctctctgagaaggcctgtcaaactgttctctctgttgcccccttattctcatcactggtgccatggaatcctccagaagtgttccctgggtattgtctttactttttcagcttttatcagttccatccatctatctatgcacccatacaacagagctctcctttactcctagatgccaagtttaccccaggtattagaaatagagtattgagctcctgcagcctccttggaagttcttggactggtaaggaagatacttgtctaaacacataactactactacaaattcagaaaagcagttgtccaagcagtagctccaaggagagaatatcaaattctatccaagaaagctcaaaagtcttcatgaagaaagtgaagtttagtaaagacatgaacacatgaaatgtatctctcataatac

SEQ ID NO: 334631 - DNA, 570 bp, Homo sapiens
gagccattgagtcactgggtagcctggctgtaccagagaagtgttctggacaaggggtgtgggaaaggcggctaccactcagtaacaatcctcacacatttagggcttcattccagggggaggagcatcagtgactattttcaactttttactggtttttaaaatgtaaaaacccttgttgggctgcccccgtactggttccaggaaaggaacatggcaacaggcaggctagggctgggacaggatgagagatattctggcaggtgacctcagcagtcatggacccatcagaccaatcctcctgctgaagctagagaagtccagaacaatgcaacctcaattggtggagttatctctggtatggggacacttttttcttattgacttctttgcgcatcaggattaactttgtggaccaattctggyacaggggatctctctgagaaggcctgtcaaactgttctctctgttgcccccttattctcatcactggtgccatggaatcctccagaagtgttccctgggtattgtctttactttttcagcttttatcagttccatccatctatc

SEQ ID NO: 334632 - DNA, 579 bp, Homo sapiens
tagatggcatcaaaagcttgaagaaaaaagtcagtgagcttgaagatagatagattaaaaattacccaacttgaaaaacagaactaaaaaagaatgaattaattaatataaatagatccctagggacatgtaagattaaaaacaaaggttctgacatttgtatcatagcagaaggaagtagtacaacacttataaattgctgagagaaaggaactataaacatagagttctatatctagtgagaatgtccattaggaataaaggaggaatagtgatatctttagatgaaaggaaactgagagaatttgttgccacctgacttggcytaaaataattgatataaatagttctttggacagaggataatgataccagaaggaaacctggaacatcccaaacaaaggaagaacaacagtaatggtaagtagattgtcctcctcttgaattatttaaaatatatgatggttgaaaacaaaaatcataaaattgtccgatggggctttcaatgcatgtagatataacacataacaactataacataagtgaaaagggtaacgaacttatatggtgtcaaagttt

SEQ ID NO: 334633 - DNA, 568 bp, Homo sapiens
tttctgttacagtgttgttgatttctagcacttccttttgattcttagaatttccatctccctgtttacattagtcatccattcttgtatgtcgtctgctttttccattagggcctttaacatattaatcatagttattttaaatgccatgtctgataattacaacatctgtgtcatatcttagtctggttctcttgcctgctttgtctcttcagactgtgtgttttttcttgacttttagaatgccttgtaatttttgtttgttgaaagactgacatgtgctgagttgtaggaactgaagyaaatagggctttactgtgaggatttatgttaagctggctagcactggggctatgttaatatttctgtagctggtgctagagatttcaaattcctctaacgtccttgtttttgttttccttgtctttgggttttactaagtattctttcttggagacagtcagtgacctaatggttctattggctgtgacccactgttattgtgctggagccctgttggtgcagtggtaaagtttgttaggatagaaatattctataacttattaaa

SEQ ID NO: 334634 - DNA, 568 bp, Homo sapiens
tttctgttacagtgttgttgatttctagcacttccttttgattcttagaatttccatctccctgtttacattagtcatccattcttgtatgtcgtctgctttttccattagggcctttaacatattaatcatagttattttaaatgccatgtctgataattacaacatctgtgtcatatcttagtctggttctcttgcctgctttgtctcttcagactgtgtgttttttcttgacttttagaatgccttgtaatttttgtttgttgaaagactgacatgtgctgagttgtaggaactgaagtaaatagggctttactgtgaggatttatgttaagctggctagcactggggctatgttaatatttctgtagctggtgctagagatttcaaattcctctaacgtccttgtttttgttttccttgtctttgggttttrctaagtattctttcttggagacagtcagtgacctaatggttctattggctgtgacccactgttattgtgctggagccctgttggtgcagtggtaaagtttgttaggatagaaatattctataacttattaaa

SEQ ID NO: 334635 - DNA, 509 bp, Homo sapiens
ctttggggcacctggcagatgcaaggtttatgtcattattttccttatttatgtaattcacagtgaaacacttaactaatacaatgaggaaaaaatctgagtcaagacagtaggaaaaataacagggccatgttttcaagaaaattagataatataaatattggaaaattgtaaaataatagtctaactcattaaaagcaaaaagaaacagaacatgagaagtgagcaagacattaaggaaaagagtcaggcagatttttttaaagatccaaawatcagtaatagaagtaaaaattgttgccattgaaatttaaaagaaaaaaaaaccctcaatgaatgggttgaaaactcactataaagagggaaaagagaattagtgaaatgggagatacatattataatgaaaatgtggaagtccaaagaaaatgtctcagaccagtaagaaaagaaatgagttaactgactgacagaatacttctcaacagaaataggagaaaacagaatatagt

SEQ ID NO: 334636 - DNA, 497 bp, Homo sapiens
aagtcacaaaagtgtgtatgagaagagcaaagtcctcctctgagaagcctaaaataaagagttgagataccagagggaggaaagccctacccacttcagctggggcagtatctgggcactgcagtctaattccagctgcaatgatacctcattccttcttcatgagagcaagagaggcccaaacactgggtcaatgtcccaggtggagccacagaacccaaatgtccaccagggagcaccagtgagtcatatgggtctttggcagagatgtgmgggaactggtgggggattcagggtcatttccaggttcataaccaaatatctttgaattttcctcacttgggtgcaggtgggctagagaaacaagggacaggtgcagtgacttcagggtcactttgctgtgtttcatcctctcctcccacaagtaacacacacacacacacagacacacacacacagaggtacatatgtacatgccatgcggagccctgaatcca

SEQ ID NO: 334637 - DNA, 515 bp, Homo sapiens
cactctccaggaggccaaagctctgacccacccaaattctattcctctgctccaaatatttcttatgccaaccaggcaagaaatgctgaaggggcagaccaaaaaaataagactctaataataataggcttacattaaaccaaataaagtcattctgaaatgactaaagagaaatagcagaggagaaatgcccctgggctcacactctgtttatgcattgcacattataccttttcatcacaattacctaaagtggtacatttgtacttccataatgtatggaattcattacatagttttgcaatgaaattatcacactgtgcctgggacatctgcaccctgtcatacatcattctattcatttctagttaatttaatcccaatatctgcccacatgataagacagatgttcagctatgctgcagcttcartggttttctgccttgaagaaagttgaagccgttgaaagaaatgacatcttttagacagaaagcttacagtattaaaagttggga

SEQ ID NO: 334638 - DNA, 589 bp, Homo sapiens
cccacctcatggtagactctaaggactcaacagatattactattattaatactactactataattgttattattccacaatgaatcctgctacaccaaaaacaagttttgccccagcagccacaagttaaagtcatttctaatttttgaagtggtcaactattgtccttattagttcacataatatctgcagtggaccctggaatgctatgtgctaatggctataggtaagagagtcacaagtgaaataaaaacattatttggagctgggacagaagggtatgaatgtattatttgtatcaccttcaagcaggctgcccttagagtacaggaggaaacactgcacaacggataaagaatctaattgttcccagttccattcatttgagaaacatttcgtgagccccarctgagagtctattatgctgtgctggactattatgtgggacaggaccgctaaagacatactttatattaatatgaacatgtacatatacatacatatatacacatgcatatgtacatatgcacacatacatatacttatatacacacatacatatacacatgtacatacatacgtatacata

SEQ ID NO: 334639 - DNA, 589 bp, Homo sapiens
cccacctcatggtagactctaaggactcaacagatattactattattaatactactactataattgttattattccacaatgaatcctgctacaccaaaaacaagttttgccccagcagccacaagttaaagtcatttctaatttttgaagtggtcaactattgtccttattagttcacataatatctgcagtggaccctggaatgctatgtgctaatggctataggtaagagagtcacaagtgaaataaaaacattatttggagctgggacagaagggtatgaatgtattatttgtatcaccttcaagcaggctgcccttagagtacaggaggaaacactgcacaacggataaagaatctaattgttcccagttccattcatttgagaaacatttcgtgagccccagctgagagtctattatgctgtgctggactattatgtgggacaggacckctaaagacatactttatattaatatgaacatgtacatatacatacatatatacacatgcatatgtacatatgcacacatacatatacttatatacacacatacatatacacatgtacatacatacgtatacata

SEQ ID NO: 334640 - DNA, 537 bp, Homo sapiens
cctaacttaattctaagttacttaatggcagaggctatgttttaatgtgcattggtgtcctcacaattccagtataccacagctgcttaatagatgtttatcacttggttcagggaagtgtcaacaaagtcttcagcccaggtaaatmcttgggaagctttttcactgggagtcagttctaaaagaacatctctctcttttgaggacaatggtgaccagacttcttaattattgctattctttgcagggagtgccattagcaagggagaaagagaagaataatctgtttggatagggaagggcaaacccaataaatttgccagctgcacttgatatcttagcagcaaaacaagccatcccacactgccttgtaactgcaacacaagacagaggacatagtcataaactactccatggtagggatccttatctgtagcagattataaacccagagaccacatggggacaaatttgtaataaatgatattgttccaattagggcctggttcagctggaaattaaaagcacaaaatcaaa

SEQ ID NO: 334641 - DNA, 537 bp, Homo sapiens
cctaacttaattctaagttacttaatggcagaggctatgttttaatgtgcattggtgtcctcacaattccagtataccacagctgcttaatagatgtttatcacttggttcagggaagtgtcaacaaagtcttcagcccaggtaaatccttgggaagctttttcactgggagtcagttctaaaagaacatctctctcttttgaggacaatggtgaccagacttcttaattattgctattctttgcagggagtgccattagcaagggagaaagagaagaataatctgttwggatagggaagggcaaacccaataaatttgccagctgcacttgatatcttagcagcaaaacaagccatcccacactgccttgtaactgcaacacaagacagaggacatagtcataaactactccatggtagggatccttatctgtagcagattataaacccagagaccacatggggacaaatttgtaataaatgatattgttccaattagggcctggttcagctggaaattaaaagcacaaaatcaaa

SEQ ID NO: 334642 - DNA, 437 bp, Homo sapiens
cttgtcttacaaaagggagttataaagaatgacattagcgtctttttggctattgttgctcttataatcatgtcttgcttactgattcattttccacatttaactttttcaacctgatttctcttctttcgttattctttcccaaattatmtccatcagcagccataggtccagcactgcaggccctttgactggatgctcttttctgttctggcctgaatgcgtttggcaggtgacttgctatgcatgaccctattactgcagcagctgctcctaggactgagccacagcaaagtgtgggagaagagtctctcctaccacattcaacacaaataccgtctccaaacatttagttacccttggagcccgatagcacctgagtataagcttttgctcttccaggattccacaataggatttagcactgggatgaaaag

SEQ ID NO: 334643 - DNA, 437 bp, Homo sapiens
cttgtcttacaaaagggagttataaagaatgacattagcgtctttttggctattgttgctcttataatcatgtcttgcttactgattcattttccacatttaactttttcaacctgatttctcttctttcgttattctttcccaaattatatccatcagcagccataggtccagcactgcaggccctttgactggatgctcttttctgttctggcctgaatgcrtttggcaggtgacttgctatgcatgaccctattactgcagcagctgctcctaggactgagccacagcaaagtgtgggagaagagtctctcctaccacattcaacacaaataccgtctccaaacatttagttacccttggagcccgatagcacctgagtataagcttttgctcttccaggattccacaataggatttagcactgggatgaaaag

SEQ ID NO: 334644 - DNA, 563 bp, Homo sapiens
gaagtcaaatttgagtcagagcttgaagaatggataggattttgatggggcaaagatggccttggcatttgagttttgagcaggcattcatttgctttttcatccatttaagatacatttatttggtgcaactggtaggtgccagccagcctggtctagatgctagycagcctgatctagatgctggggatttatcttttaattcaaaaaaccctgggtctgtgaagttagagtttacagttcagtgatatatattaataataatgacacatataatgttacctaataatttcacatggaatataaaaaatagttgcaatacagtgagacatggatccaatagaatgaccacctccactggggacatcagagaattcttcaagtggtggagactcttggtataaatcccaaaggagtcatttatccaattactcattcacagcaaatatttactgagtacctacacataccagacacactttgtgtatccggatagtacaataaacaaaacaaagtctttttctcatggtgtttatatcctaaaagtttagcaaatgaaggga

SEQ ID NO: 334645 - DNA, 586 bp, Homo sapiens
attcacccactgacatttcctgggcagaattagtgttgctgatcaaaaccataacttgtctccaaggcctgtgcacatttcatctgtttaattttatttactattatgaatatttcaaacattctgaaatgtatagcaaaccctataactaataccagcattaccaccaccagctttatcagattttacattgtgtaatgtttgcttccagtcttttgcttcgggtacagtatctgcccctgtgtactcatctttgatccatgtctgattccacttttcccacaggagactacccttctgtatctggtttttgtcattgccatgaacgtttgaatactttttttcaacatatgcctrtattcatggactatacctatggcatcctatgcagaagtagaattacgcagactttgccactaatttattttagcttcagtattctcatctgtaaaatgaagataatgatatctccttcccagacttgctctgagtaaagtactaggcacagtacttggcacatggtgggtgctaaataagtctttgcttttatcagagataatatttaatacatgtttaacttgaaagt

SEQ ID NO: 334646 - DNA, 529 bp, Homo sapiens
catagcatatttaaatgcacaagtagagatgagttagtagcagtctacggtctgcctaggyctattcttatggtcctccacttagtcccaaagcagtgactaatagaggcaggtggtatacaaagaacaggaacatttcagtgatgcagacctgtgtttggttccttgtattaacacttaacagttgtgggggctatagtctctgcttcaggctggctgtagtggttcatgcatataatcccagtgctttgggaggccaaggcaggaggatcacttgaggccaggagtttgagtacagcttagacaacatagcaagacgccatctgtacaaaaaaaataaaataaaataattagccaggtatggtggcacgtgcctatagtagtagctactcaggaggttgaggtggaaggatcacttgagcccaggagtttgagcttacggtgacctatggttgtggcagtacactccagcttgggcaacagagcaagagcctttctctaaaaaaaaaataaaaataggccctgcttt

SEQ ID NO: 334647 - DNA, 529 bp, Homo sapiens
catagcatatttaaatgcacaagtagagatgagttagtagcagtctacggtctgcctaggtctattcttatggtcctccacttagtcccaaagcagtgactaatagaggcaggtggtatacaaagaacaggaacatttcagtgatgcagacctgtgtttggttccttgtattaacacttaacagttgtgggggctatagtctctgcttcaggctggctgtagtggttcatgcatataatcccagtgctttgggaggccaaggcrggaggatcacttgaggccaggagtttgagtacagcttagacaacatagcaagacgccatctgtacaaaaaaaataaaataaaataattagccaggtatggtggcacgtgcctatagtagtagctactcaggaggttgaggtggaaggatcacttgagcccaggagtttgagcttacggtgacctatggttgtggcagtacactccagcttgggcaacagagcaagagcctttctctaaaaaaaaaataaaaataggccctgcttt

SEQ ID NO: 334648 - DNA, 594 bp, Homo sapiens
tatcaaaatgtgaatccaagagccatgaagagaaatgcctgcacccatgaagcagacctgatatctaaacaaagaatattccccaccccagggtatgggtttacaatatttgcccagccasatttcggaatagctataggccagtgaccacttgatgtcttccatcttttcattcttctcctttacaaatgggagagtttattgcagctttcttggccctgttccacaaatgtatgtggagtttgagaaagaaaaggtaactgttttgttttagttttggtacataggtctctggatcaaaaggagccacatttttatcacatttggtatatagactgttataagaacctgggcttttgatttaatgtcatattcctttagacttctggccttctcctttggagagtaggtgaattttatgtgcagaagagaggaaagcaaagacttatgagaaaaatacatactgtttaactatataacattgcttccaatttttgtttcctcatttccagaagatttgatatccctgcctcttgccatgtaatttgcagagcatccccataggaagagtagcataggttctcatcaatgaaa

SEQ ID NO: 334649 - DNA, 576 bp, Homo sapiens
catatttgagaaggatgagttttcaggcataacaagagcactggatgcaatgaggagatgtaactgtggagagtaaagctggggtaagatcctggaggaccctacaagtgccgccaaggagtttggatggtatcctggaaattacgggaaacttttcaagtcctggaggaatgtgagaagatttccataggcatcatccagagtggaagtggggatgcaaatggagaagaaggaaaaacagaagaaacatttaaggggtcaaataaaaatgtcctggggcttttggtgtcccaagacatcaaaatggcttgggatgggtatgtaatgactatgagcaaggacttcaacaatgaccctccagtttccatatctggagattggatggatggayggtggcattcattgaattaagaaggaacagcatgagggagagtgatattgaaatggcatgtatcagctgaacttgaggagccatgagattccaaggggaagctgtccaggaggtcagcggacctgagaagtgggagagatagattgagttaatctgctcagcagatgattatggagtgtttatca

SEQ ID NO: 334650 - DNA, 533 bp, Homo sapiens
tgcttctctagtgcctgtggattctcacctccctggctgccttcaagttccatcccagaacaaggtcatgtccattaatcagctgtcataggcctgggagagagcttacagtttccaggcctgcttagtcttgctgatcttgtcctagcccagcctaaagggacatttcgagccaaggaaatcagcttgctgtcagtgaacttgcagaatgttaggccaaaggcacctctggaacaattacgttgttggaccaattaacagatgagtagacggaagcacagctggggaaagtgacttgctcaggttcacatggttgccaagagccaaagccagatgttccgaatctcatgccagctctttcctgggcttgtgacagacaagggccaagtgtgaatagagaatgctgtgctgccttcttgtcatgcaccccatgtccacataaygcacatactgagacaaactcagctagagctgggggaggatcatgacaccaaagccagcctctgcttcagatgatcagaccaccccaggga

SEQ ID NO: 334651 - DNA, 536 bp, Homo sapiens
cagttttctttaaatattccttttatgatgtgacttttctagtcaagaactttcagaagctcttcattgcccagaatattaagctcctctatcagcctaggtttagtcaggaagatagagcctctgggacgttatgggaatataggatttaaaacaggaattaggattcacatcccaagtcctcagtaacagaaaggaagattctggaagtcagtaagtgaccactctaagtagataacatgggcctcagagtggatgctcttagattgtttggcctcagccaataaatagccaacaggcatgtggaccgtgaatctagctggtcttgttcataacctggatgtcaacacctaaaaatgaattggtacaaaatcaactacatctataaatccttgttatgcgccaagacctttgtcaggrgcttgggaaggtacaaaagtgaatgaatcatggacttaataacattcttttattcttgaaacattttctttgatgaccctgaattgtgtaacacttgagttactcagttatatcag

SEQ ID NO: 334652 - DNA, 632 bp, Homo sapiens
tggaggttcttgtagctgactagggagggcaaggtgctgctttagattggatagcccaagaattagatcttgagaagtggagatgaggaaagggcaggtaagacagagaagggaaggaagccaatgtcagttattgagtgggtcactgctgtaggtctcggccaatcagcacatttccacctccttgctgttgtgattgttcagagatgggcacttggcttaacttggtctaatctgtaaccccaattgtttgttagtcggggaagtgagtctctggacattaagcaaggaagaacatagacccaagtgcaattggtagacatctcgtgaccatggagtcaaccttaagatgaagctgaactgtggatggtagaacaaagatgtagaaagaaactgaatattggtgatttcttgaacaaacctaccttaggactcttcctttacaggagccaaartactgccttgttgctaagctaatttgagttgacttttctggtacttcctacataaagactcttaacagagatattgatagtgtatacaaagtatttggtgtagaaactgacatataataagtgaaacataaatggtgcctataattacacaaaatgaagtgataaacagaaaaattc

SEQ ID NO: 334653 - DNA, 632 bp, Homo sapiens
tggaggttcttgtagctgactagggagggcaaggtgctgctttagattggatagcccaagaattagatcttgagaagtggagatgaggaaagggcaggtaagacagagaagggaaggaagccaatgtcagttattgagtgggtcactgctgtaggtctcggccaatcagcacatttccacctccttgctgttgtgattgttcagagatgggcacttggcttaacttggtctaatctgtaaccccaattgtttgttagtcggggaagtgagtctctggacattaagcaaggaagaacatagacccaagtgcaattggtagacatctcgtgaccatggagtcaaccttaagatgaagctgaactgtggatggtagaacaaagatgtagaaagaaactgaatattggtgatttcttgaacaaacctaccttaggactcttcctttacaggagccaaaatactgccttgttgctaagctaatttgagttgacttttctggtacttcctacataaagactcttaacagagatattgatartgtatacaaagtatttggtgtagaaactgacatataataagtgaaacataaatggtgcctataattacacaaaatgaagtgataaacagaaaaattc

SEQ ID NO: 334654 - DNA, 584 bp, Homo sapiens
ctttatgcactttcacagatattgtgtttttacaaattcaagattctgtggcaagcaagtctgtcagcgccatttycccaatgcaagtattcactttgcgtctctgtgtctcattctgtaattctctcaatatttaacattcttgttatggtgatctgtgatccgcaatctttgacgttactattgtaattgtttggggcaccacaaactgagcatatgtaagatggcaaacttaataaatgtgtgtgtcctgactgtgtcaccaaccagtcattcacccatctctctccctctcctcaggcctccctattccctgagacacaacaatattgacatgaggccaattcataaccctaccatggactctcagtgttaaagtgaaagaaagagttgcacatctctcaccttttaccaaaagctagaaatgattaaacttagtgagaaagtcatatcaaaagccaagacaggccaaaagctaggcctcttgggccaagtggtagtcaagtggtagatgcaaagtaaaagttcttgaaggaaattgaaagtgctactccagtgaacatgaatgataagatagcaaaaca

SEQ ID NO: 334655 - DNA, 525 bp, Homo sapiens
aattacttaatctacttaatctagtgaatccagtgaatctagtgaatcttagaagagagactacgccctccckgagagattgttcttgctggcctgatgaagtaagaagccctgctgaggaagtctccatggcaaggaactagggccacagcctccaggacctgggggcggcctccagccaacagccagcagacatctgagggcctcagtcacacaaccacaggaatgcgtgacagcctcagtcacaccacaacacaaataaacttgaaagtgaattattccccagtcaagtttccagatgagaatgctaccaaatgaatgccttgatcacagccttgtgaggcaccaagcagaaggcctgtttaagatgcacctggactcctggcccacagaagctgtgagagaataagtatgtgttgttttaaaccattaagagtgtggtgatttgttaggcagcaatagataactaatgcaggcagtgacatgagctgatcccagggaagagtgggacagaaatagcaacca

SEQ ID NO: 334656 - DNA, 506 bp, Homo sapiens
ttcaaacatgatctagtatttttaggtggacacaagtaatgactgatttggctccctgaggtaaagctagcatcttrgttgccatggtactctgatgtcattggccccctcctgaggaagtcgagctggtattgatggataccagagagactggggccacgggggctgctgatgcaggagacatggaaggtgctgatctgggtgggagttgggaggagcagtcaagaacacactgacttttaacacttcctcttcctctattttctggagtagaacctgtggaacaccatcagcctggggaacactaacaaggaattttaaaaaattgctagagccccagcataggctagctggagatgagaagctcctggggccacagtcatggttgagggggagggtccactttcatagtcttttccaccagcaacatcaccaggatctcacagtgaggagagttgtatgtaaatccagagaaagccccccacttcctgaaactgctgatggag

SEQ ID NO: 334657 - DNA, 506 bp, Homo sapiens
ttcaaacatgatctagtatttttaggtggacacaagtaatgactgatttggctccctgaggtaaagctagcatcttggttgccatggtactctgatgtcattggccccctcctgaggaagtcgagctggtattgatggataccagagagactggggccacgggggctgctgatgcaggagacatggaaggtgctgatctgggtgggagttgggaggagcagtcaagaacacactgacttttaacacttcctcttcctctattttctggagtagaacctgtggaacaccatcagcctggggaacactaacaaggaattttaaaaaattgctagagcccyagcataggctagctggagatgagaagctcctggggccacagtcatggttgagggggagggtccactttcatagtcttttccaccagcaacatcaccaggatctcacagtgaggagagttgtatgtaaatccagagaaagccccccacttcctgaaactgctgatggag

SEQ ID NO: 334658 - DNA, 448 bp, Homo sapiens
gcataatcatgttcatttatggaawtgaaagaactgggcctctagagaataggtcacttgtcccatttcacattactattgcaaatattgagaaagaaccaggatttggcatgcggtatttcttccaccaaagggaaatgttaggaaaggtgaatgaatgtgtgagacaatgttttcacccagaaccaatctctatattacatcagtgaaactcatccatcaaaaactcaagctcttccttcttttaggtggaaataattactatctattcttgcagcaagcctattaaaattgagaaacactttgcttcaatgattccacaatcacttttgattgaatgacttattttttgattcattcattcatcaaacacacagccttgtgagctatgtacttgacatagagataaataaagcaaaaaacttttgctctaaaggaaggccttgtc

SEQ ID NO: 334659 - DNA, 590 bp, Homo sapiens
aacagctaatagtgagatagcaagtcaaaattaatgacaaacctcawatatatgttatatattataaatgtattacatataatacatattatatatacacatacgttatacaacacacaaatagagttggaaaaggaagtcattcccgtggactatgaagaatccacgaaaaagctaaaaattgaggtcagcatcaaaagacagtagaagaaaataatactgccttccataccctcccctagtgtccaactcctacagggtcaggagatctttggggctaagctttcctgactctataggggttgtgggctcagctgaaaagtgtgaacactgcaaatattagtcatccttaggaaggaagatagtgggatagtatattcacttatttgttttattattattattgctatataattaattactgcaaacttagtggcttaaaatgacacacattgctgggtgcagtggctcacacctgtaaccctagagctttgaaaggctgaggtgtgaggactgcttgaggccaggagtttgagaccagactgagcagcatagcactaccccatttctacaaaatttttaaaaattag

SEQ ID NO: 334660 - DNA, 550 bp, Homo sapiens
atacaattcggtggtttgtaggatacatccagagttgcgtgtataaccattaccacaattcattaccttgatgctggctgaagacaaacaagatcaagaaggatttggaaaaaatttcagaaaacatgccagtaattcaagaaaagatggaagatgtgtagtgagagttctttgaggaaattcaggaatcatactaataaagggatggttagagttcagaagaaaaatgtgcacgatttcatgctacctttaaattcttatcactttggatgctgtcttcgagacacaaaatctagcatggtgcctggtacattatttgagttcattaaatatttgttaaatgaatgaatgaattgttcatccactagccagggaatcaaacctcrttgtatgtttctgagtgttttcaaaatgtaattaatttgaagataccttggaactgctgtctctctactctcactatgcaccctggggaaactgctattggcaactgcattttattttggagacttattttttccccactacacatattaattttgtaataatg

SEQ ID NO: 334661 - DNA, 572 bp, Homo sapiens
gatctcctagctattcttagtttagtgtctctgtttagtgtccctttactcacagatatagaattccatgtaagtcttcatagatttatttgaacttattgtcaatacattttgtcttggattaaatgctcacacagatgagacttaactgttgagtttagttcaattgtggaatgaaacagacactgttagttgcaaatccaacatctatttccacctatctctcttcagttacagagggaaggcttaactattggctcaggggaggattattttaatattcttattggagagaaataaagaagtgaaagctcctgttgccactggaagccatattgtgatgaggaagaaaattgtccttaggatgaaattgaccctgagcacagccatggaaggaatctaggcccttttgatatcagtaagtggtttatcacactaggctaggtatctgtgctaattctccactttttattttgtgggraaaaaaaaacaattttaaaaaataacttaattttcattatttaggttagaaagtaagaaaatgaacatagaagccaaatgaaagatcactg

SEQ ID NO: 334662 - DNA, 572 bp, Homo sapiens
gatctcctagctattcttagtttagtgtctctgtttagtgtccctttactcacagatatagaattccatgtaagtcttcatagatttatttgaacttattgtcaatacattttgtcttggattaaatgctcacacagatgagacttaactgttgagtttagttcaattgtggaatgaaacagacactgttagttgcaaatccaacatctatttccacctatctctcttcagttacagagggaaggcttaactattggctcaggggaggattattttaatattcttattggagagaaataaagaagtgaaagctcctgttgccactggaagccatattgtgatgaggaagaaaattgtccttaggatgaaattgaccctgagcacagccatggaaggaatctaggcccttttgatatcagtaagtggtttatcacactaggctaggtatctgtgctaattctccactttttattttgtgggaaaaaaaamacaattttaaaaaataacttaattttcattatttaggttagaaagtaagaaaatgaacatagaagccaaatgaaagatcactg

SEQ ID NO: 334663 - DNA, 538 bp, Homo sapiens
tatatattcttaaaggtgactttttgatgaacagtagtttttatttttcatgcaatcaaacttatcaatcctttttgctgtcattaataattttttttctccttttcagtaaacttgtcagcttatccttcctcagtatcatgaagatatyctcctatttctagaagttttatcttattgattttcatattgaggtaaattatatgcctgaaattaacttttgtgtatgatacaaagttgggaatggtcttattttttattttctatactttttgaaatacagctttttgcccactttgtgcagggccaatgataagtttctttgtatggaatgtttttatgtgtctaaagatctaagggactaggtctcaagtggccccctcatcaccctacccagtcactaggcaatctagaaaggccattcacccattgttagcaagtgaacatgcgatgaagtcagttcttatgtagactcacgcagcgtccacctactctgttaaatgcagttcctgtccctggaaagagatataagccagta

SEQ ID NO: 334664 - DNA, 362 bp, Homo sapiens
tatctgtctcatctcccatatcacarttcttactgcaatccctactgaccttctacccattcctcaaggacaccactccagtaatttcaaacatgaatttcttcccccagaaaatcatacccttctgtgactttcctgtcttggatatttcctgccccatcttttccctggctaattcttattcttgcctcaaatttcagaataaataatccctctttagaaaagactaccataatccatcaaaatcacatcattccccattataatttaattttcagtcctcattacaattatatttggttaatttttgcatacttatcaggtgagtttttttctcccaatacactgagagtttcacaaaa

SEQ ID NO: 334665 - DNA, 552 bp, Homo sapiens
ttaaaaaaaaaaaaatcagctgggcgtgctggcccatgcctgtaatcgcagtactttgagaggccgaggcaggcggatctcaaggtcaggagttcgagaccagcctcgccaatatggtgaaactctgtctctactaaaaatacaaaaattagccaggcatggtttaggcacctgtagtcccagctactcgggagtctgaggcaaaagaatcrcttgaacccgggaagcagaggttgcagtgagctgagatcgcgccactgcactccatcctgggcgacaaagtaagactctgtctaaaaaaaaaaaaaaaaaaaattcaagaaaattactcagccattgagaatgtggaatctagcccaggggtcagcaaacatcctgtaaagaacccaatagaaaacagttcaggctttaccagccacgttcccttttctgtctatgtcacaatgactcaactctgctgttaaagcacatccatagatacaggcaacccatcagtgaaggagaccagctgtataccaataacattttatttatggacactgaactttggat

SEQ ID NO: 334666 - DNA, 552 bp, Homo sapiens
ttaaaaaaaaaaaaatcagctgggcgtgctggcccatgcctgtaatcgcagtactttgagaggccgaggcaggcggatctcaaggtcaggagttcgagaccagcctcgccaatatggtgaaactctgtctctactaaaaatacaaaaattagccaggcatggtttaggcacctgtagtcccagctactcgggagtctgaggcaaaagaatcgcttgaacccgggaagcagaggttgcagtgagctgagatcgcgccactgcactccatcctgggcgacaaagtaagactctgtctaaaaaaaaaaaaaaaaaaaattcaagaaaattactcagccattgagaatgtggaatctagcccaggggtcagcaaacatcctgtaaagaacccaatagaaaacagttcaggctttaccagccacgttcccttttctgtctaygtcacaatgactcaactctgctgttaaagcacatccatagatacaggcaacccatcagtgaaggagaccagctgtataccaataacattttatttatggacactgaactttggat

SEQ ID NO: 334667 - DNA, 603 bp, Homo sapiens
aacggttgataggagagcaggtactgtatgtcagtcctgatattttccatctttgctttgacagcactggcagagggaaatacattttttttttttttgccagaagtcttcagtatgggctttctatagaaagaaggattcttctttggcaccaaaagtaaatcaaatctatgccactactgcatggagaaggggaaaattaaaaaaaattaaattaaaaattwaaaaaacagcaacaatgaaacaaacatacaaacaaaaagctttcctgtatatcaggcttttccatgtaaggttgctgaacactgtctctttgccttgatttttcaggagtctgctttctctcacacctgattttcactagaaattgtgtggtctctctaaataaagagcaggttcaaacctatatagtcccacaccctgttactagaaccctgctggcatgaggcttcacttgagcaatttctgtttttaaaaatggagtgagaatgtatagcacattctctgcccacacttagcaaattagtgatcaaatgtcacccacaaacaggacggttaatgattttctttaagctgaaacagaagttgatcactggaaaaagg

SEQ ID NO: 334668 - DNA, 443 bp, Homo sapiens
ttaaaataaaaaaaaaagtatctatgagcgtaattggttggaaggaagagagagctttcaaggtcaagtttagcatacaggccagagaacccccaaaatgcaaaagggagcgcaggttgtaagggkagggcactaaagaagaaaccgagattctaagaccctggttttcctttgacttatgtctttgctttattagggactcctttctttggcttccagagaagccctcaatgaaagtgagaatatagattgtctttagcgtctagctctacattttccaacaaccttcccacttttgctcccacaattctagaagattccattttaaaaactggcacacactgtgagatccagaatttacagaagctcttcactagatatattaggttcagaaatatctgctaaggtgggggtagtagttcctctaaagtggtacacgccaa

SEQ ID NO: 334669 - DNA, 603 bp, Homo sapiens
ccctgaataaacaacaagtattattattattggttatacttatcaactctagcttaaccaggaattttatttctcctccaaaacagtgatattaggatgattacatcttaaatagtgagtttttctgaacttaggggcactttctgaggttcaatgtttcttgtgctgctggaatagcacagtcacctttccatgaacaagaagggtctcagaactggtagttccttgcccctgagaactgggtggtcggcaagggctgaagtgattaatacgtgattcagcccattcatattccttcttgttaagacttcaggactattttcagttgtatcaaagatagagtgataaagtgagactagggagagaaaragagagagagagagaggaataaaccaagtctgccttacacctctgtgctagaactggaattatgacagctcccttgctactccaagagggggctgtaaaccagccatatgggcatcaccttggagcttgttacaaatgcagatatcaggccccagcccagacgtactgaataaaatctgcattttaataagatgcccaggtgatgtatatgcacattaatatttgagaagtgct

SEQ ID NO: 334670 - DNA, 603 bp, Homo sapiens
ccctgaataaacaacaagtattattattattggttatacttatcaactctagcttaaccaggaattttatttctcctccaaaacagtgatattaggatgattacatcttaaatagtgagtttttctgaacttaggggcactttctgaggttcaatgtttcttgtgctgctggaatagcacagtcacctttccatgaacaagaagggtctcagaactggtagttccttgcccctgagaactgggtggtcggcaagggctgaagtgattaatacgtgattcagcccattcatattccttcttgttaagacttcaggactattttcagttgtatcaaagatagagtgataaagtgagactagggagagaaaaagagagagagagagaggaataaaccaagtctgccttacacctctgtgctagaactggaattatgacagctcccttgctactccaagagggggctgtaaaccagccatatgggcatcaccttggagcttgttacaaatgcagatatcaggccccagcccagacgtactgaataaaatctgcattttaataagatgcccaggtgatktatatgcacattaatatttgagaagtgct

SEQ ID NO: 334671 - DNA, 524 bp, Homo sapiens
gattgcctttgcttcttcctttgaaaacagacattccccagtagctgctgaacatccccaaggatgttctttgaggatattcctctttactttgtaaccatcacttgcccatccctactgcaaactcttggccctacctacggcaccctgtgtgacatagcaattgctttttctttggtcctctggagaactgttggtgggaccactgatagtcttatcagtgaattccctaagctgtaatagtctcaacaaaggatccattctgcagcattatataatgctgcacytttcgttgttctgctctcgtgtgaccccaaatgttgcttctgcaggaagttttatgcaggtggaggggctaacttaccacttacacacttccaaaatcactgccatcatcttctccctgcctaggcctcatgacatttctgctcaccaaagcatacactactattccgttcacctttacctccatgacattgttgaggaaggttgagtggaaataaagaagatggagattctaggaa

SEQ ID NO: 334672 - DNA, 524 bp, Homo sapiens
gattgcctttgcttcttcctttgaaaacagacattccccagtagctgctgaacatccccaaggatgttctttgaggatattcctctttactttgtaaccatcacttgcccatccctactgcaaactcttggccctacctacggcaccctgtgtgacatagcaattgctttttctttggtcctctggagaactgttggtgggaccactgatagtcttatcagtgaattccctaagctgtaatagtctcaacaaaggatccattctgcagcattatataatgctgcacctttcgttgttctgctctcgtgtgacccyaaatgttgcttctgcaggaagttttatgcaggtggaggggctaacttaccacttacacacttccaaaatcactgccatcatcttctccctgcctaggcctcatgacatttctgctcaccaaagcatacactactattccgttcacctttacctccatgacattgttgaggaaggttgagtggaaataaagaagatggagattctaggaa

SEQ ID NO: 334673 - DNA, 562 bp, Homo sapiens
tgtgtacttttacaacgtagaagacattctgtggaggggcagataggggctacgttgatctagaaggggattcacatatttaaaattcacataaaaatgtcctaagggttaggagtggccctgctcatgttgagcaagaatgaggctttcaaatctcttgtttaccatctcctaccatgagttcctatcacaraagtttatcatggtgagcttaacagagacaacttaaggggaaaaaaacttttagagcacttactggcaactaacattcgctgttcttcatttgtttcactcacctgctatggtagaaatcttggttttggcacttaatggtatagtaaccaccagcctgggtcggccaaggagtggcatttggaaagaaaatcctagaaagcctatcaccatagatcagctatggggaagggcagagttgttctacttatagattttttaattatattaataggtcagctgcatgctcaatttatttgatcatactatgcatttagaaataactcaaacaactcaagtttatcactatgtttatttgtttttttttttt

SEQ ID NO: 334674 - DNA, 562 bp, Homo sapiens
tgtgtacttttacaacgtagaagacattctgtggaggggcagataggggctacgttgatctagaaggggattcacatatttaaaattcacataaaaatgtcctaagggttaggagtggccctgctcatgttgagcaagaatgaggctttcaaatctcttgtttaccatctcctaccatgagttcctatcacaaaagtttatcatggtgagcttaacagagacaacttaaggggaaaaaaacttttagagcacttactggcaactaacattcgctgttcttcatttgtttcactcacctgctatggtagaaatcttggttttggcacttaatggtatagtaaccaccagcctgggtcggccaaggagtggcatttggaaagaaaatcctagaaagcctatcaccatagatcagctrtggggaagggcagagttgttctacttatagattttttaattatattaataggtcagctgcatgctcaatttatttgatcatactatgcatttagaaataactcaaacaactcaagtttatcactatgtttatttgtttttttttttt

SEQ ID NO: 334675 - DNA, 562 bp, Homo sapiens
tgtgtacttttacaacgtagaagacattctgtggaggggcagataggggctacgttgatctagaaggggattcacatatttaaaattcacataaaaatgtcctaagggttaggagtggccctgctcatgttgagcaagaatgaggctttcaaatctcttgtttaccatctcctaccatgagttcctatcacaaaagtttatcatggtgagcttaacagagacaacttaaggggaaaaaaacttttagagcacttactggcaactaacattcgctgttcttcatttgtttcactcacctgctatggtagaaatcttggttttggcacttaatggtatagtaaccaccagcctgggtcggccaaggagtggcatttggaaagaaaatcctagaaagcctatcaccatagatcagctatrgggaagggcagagttgttctacttatagattttttaattatattaataggtcagctgcatgctcaatttatttgatcatactatgcatttagaaataactcaaacaactcaagtttatcactatgtttatttgtttttttttttt

SEQ ID NO: 334676 - DNA, 572 bp, Homo sapiens
agtgttagagaatcctcagcttggtactatgagaggcacttaacctctaatgggagtcagcacagctgagggctttgggaggattgacacagccagcctctgtgagctcagtctagtccctatcctctctgggccacagctttccaaagaacaacatcagaataataacatctgcccctctgccacgcatgggtgttttcaaagcaacgtaagttaaaagacggataaataatgggccaatgtaaagcacagtttgtataactttagccaactctaaacaccagaaatttacccaaaaaacagtgccaattaaacccacaaagatcagaagtccaagtagcagcracaatgtgccaagtacaaatggtttcctgtttatatttttcttctctataagctcagggagtcctgagattgtgtcttttgatattttatctgttccatctatatgaccccggaaacgattccaaaattactgatccatgggtagatcagtcttagaccaggtttgggagtcgtcaccaggccattttcaagtggaaaaggagaatgtcttaaagtccattcacaca

SEQ ID NO: 334677 - DNA, 595 bp, Homo sapiens
ttgataacaccagcaagagagtatttgaggatgtcttggaagccctaaaatgaggagcaacaagaactgttaacagatgaaaaaagcagaaaatggagtgaaggaaagaagacgtaatgaagctggctatctggagatggaacattcagtttctcagttgcaagtctctgaaataccctgtgtgtagctgagatattttcccaaagttccacaatgcatatgagcaatgaggccatacaagcttgtccaacccaccttattttgttgttgttctgctttgttttgtttgttttaggcttycagcagcccaaagccatggtttttagtttctgtctctagtgattaagtggaaatgagagatgcgaaaggggctttactggcctaaccagaaacagaaactaaggacccatgactgtattctctcccttggacaaccttgtatggagtaacaaagggccattggatcattcctcaggtgccccatcaagattaactaccgttgacaatgcctcataatgataagtggaaaagagagatgaaaaggggctttactggcctaaccagaaacagaaactaaggacccatgactgtattc

SEQ ID NO: 334678 - DNA, 496 bp, Homo sapiens
gttgacataagaaaatctccttagttactagcctatgtgccctgtttgaaataaatgatctatataaaatccactgcaggctgggagggtatttatagacccacaaggctgtaggtggcagcaaaaggcattttctgggttgaattctccctggaagggtcctcttatctacactcaaagcatttttctccccagtcattcatccaacaaatatttattgagagtccactggttaccaggcatgttatgcttgtttccccttctccctttgattagctttctccatgacctccagaactagccactagccactgytgggggttttaaaagctattcatttgcagtaccatgctgcctccccaaagcatttctatttaactgccatgtgcctactccatatggaatacacaggaggtctggaaattcacgattcaattaacaggaatttaattagtgcctactctttgtgaggtagattaagaagaatatggtatgt

SEQ ID NO: 334679 - DNA, 616 bp, Homo sapiens
tgtgaaggctagtttggctcccaagacatagcactgaactatgaygaacaaaaggaacattacaaggtggagttttgataaaagtgggattcctagaagaagcagatagtagtatgtgactgttgtgaaaaacgtttgaggggtaagttgaggtaaaattgatagaagaccttaaatggtagaagaggaactcagatatctttttatgagcatggaaaacacattctagatgtgtcagtgagaataggccaagttaaggtgaaccaaaatctttcaaatttcaaagttttgatgcagcagatgccttcttaattcattttccatgaccaatattggttggtaagggctctgctcatcacagttgctcagtgtagtcttatgtcctcaactcatgttcctgcaatcagtgggagaaggaaatatggcccataatgcacttgtcccccagagcttcctccagaaagtgtcaaacatttcctctgttcacattgtgttagccaaagcaggtcacattgccatgccgaagttaaaagggcacaaggacatcaaatcttaaccatggtgcaaaaagagaacacaaacatttccgaatagttctagtaactttcacttcaga

SEQ ID NO: 334680 - DNA, 616 bp, Homo sapiens
tgtgaaggctagtttggctcccaagacatagcactgaactatgacgaacaaaaggaacattacaaggtggagttttgataaaagtgggattcctagaagaagcagatagtagtatgtgactgttgtgaaaaaygtttgaggggtaagttgaggtaaaattgatagaagaccttaaatggtagaagaggaactcagatatctttttatgagcatggaaaacacattctagatgtgtcagtgagaataggccaagttaaggtgaaccaaaatctttcaaatttcaaagttttgatgcagcagatgccttcttaattcattttccatgaccaatattggttggtaagggctctgctcatcacagttgctcagtgtagtcttatgtcctcaactcatgttcctgcaatcagtgggagaaggaaatatggcccataatgcacttgtcccccagagcttcctccagaaagtgtcaaacatttcctctgttcacattgtgttagccaaagcaggtcacattgccatgccgaagttaaaagggcacaaggacatcaaatcttaaccatggtgcaaaaagagaacacaaacatttccgaatagttctagtaactttcacttcaga

SEQ ID NO: 334681 - DNA, 386 bp, Homo sapiens
tcttttagcctgactgcattaattagtactttatgctcaaacaacaggcatatattagctcatgttttattgtgggttggcaattggaactgcattcagctgaatggtcctttcactggtattgcctgagcttgctcttgaagctccaagtagctggtggctcagctggggctggatggttaaagttggcctagtcgcatgactggtaggtacccagctgttggtcaatggcacgtcatttctcctccatgtggtttccacaccagggtagcctggacttctttataggatggtctcaatatttccaacaggaagaaaaggcatgccccaatgtgcargcactttccaagcctctgtttgtattatgttttctaatgtccaattga

SEQ ID NO: 334682 - DNA, 601 bp, Homo sapiens
atcccgctctgttgaatgtcttcctttgaaagcttctctaagtttttactttgaaatrtagatttggttacccattcagaaattgccatctcacatgtttaatcaagaccttgtctgtcattgttgcccactacaaagttttatttaaccctggagtgaatttactgttctactcctgctgtgggccccgtgaggtggtgtgtggacctgagatgaaaaccacttgatgtgtggttggagggtaatagacttctctcacccagactgataagtcattacaggcccttacatccaataaatctgagctgattcccagcttgcacttagtgtggcggaggggagagaggactgagggaggacagagtcttttctaaaatgctgttcaacgttgtacagagtacttggtaacagatgagctcatcggcaggggttggagaatggttgttgaagtggtggcacatttggtggcaaaggtggtaccacatgtaatgtctgctgcagacataacagaggaattctcggatttggggaaaacttgcaaatgaaaatagtaaagtttatctcctgcagagttattggaagagaacaagagggaggcact

SEQ ID NO: 334683 - DNA, 601 bp, Homo sapiens
atcccgctctgttgaatgtcttcctttgaaagcttctctaagtttttactttgaaatgtagatttggttacccattcagaaattgccatctcacatgtttaatcaagaccttgtctgtcattgttgcccactacaaagttttatttaaccctggagtgaatttactgttctactcctgctgtgggccccgtgaggtggtgtgtggacctgagatgaaaaccacttgatgtrtggttggagggtaatagacttctctcacccagactgataagtcattacaggcccttacatccaataaatctgagctgattcccagcttgcacttagtgtggcggaggggagagaggactgagggaggacagagtcttttctaaaatgctgttcaacgttgtacagagtacttggtaacagatgagctcatcggcaggggttggagaatggttgttgaagtggtggcacatttggtggcaaaggtggtaccacatgtaatgtctgctgcagacataacagaggaattctcggatttggggaaaacttgcaaatgaaaatagtaaagtttatctcctgcagagttattggaagagaacaagagggaggcact

SEQ ID NO: 334684 - DNA, 541 bp, Homo sapiens
catccaataaatctgagctgattcccagcttgcacttagtgtggcggaggggagagaggactgagggaggacagagtcttttctaaaatgctgttcaacgttgtacagagtacttggtaacagatgagctcatcggcaggggttggagaatggttgttgaagtggtggcacatttggtggcaaaggtggtaccacatgtaatgtctgctgcagacataacagaggaattctcggatttggggaaaacttgcaaatgaaaatagtaaagtttatctcctgcagagttattggaagagaacragagggaggcactaagactcagattaagaggagaaaatgttccaaatgctttggcaaggggatcttacatattggcagattttgacccttttcagagtcatgcaatgcttcttaagctggagtctatagatagacactgagagctccacaaattctcaattagagaaacactggctttaaaaatagtgtcaactcttagcctgatatctcaatgtctcccaaatctagctccatctgcccc

SEQ ID NO: 334685 - DNA, 524 bp, Homo sapiens
ctgcttctgctccaaggcatgccattatcttttggttctgggctgggaggcttagagatggcaaagttgccgccagaaccgctgccacctcagccacaatttgcaggagcctctccagctgtgtccgcctttagccatctatggtgagagcccagtttaatgcagacagcctccaggccttgactcagctctcatccagatgtcttacaagggtggtttctgcagaggtatagcagttcagtgaacctatgggaggggactatgcagtgaagtcaagggcaagaggctaccagacagaagcaaatatatactgtgctctgactggaagccaagcatccttgacatgactctcccmtgctcattcttggactcagtgagatcgagaaatcctggtctagagagacaaaatagcaaattttattcagtacctaaatagtttaatcttttcccctaatagatgaatcaattgattgactgattgatttttaggaagggaagggctgagctgatactaggtggtagga

SEQ ID NO: 334686 - DNA, 555 bp, Homo sapiens
cttggtacctgagttcttgtctggtgtccaggaagaattaggtcatgcaaatgaattgaaagatggtgtatgaggaagattttgttgagcagtggaagtgggtctcagmgggaaggggagctggaaggggcaaggcagtgggaagataatcttcccctcgagttcgaccatccccggccaagctcttctctgaagtcctgccatcaagccgttcctctgaagtcaagctgcttctctccgacatccagctggttattttcttctcttctcctctgccactccactttgcccttctgccagtggagcttggggtttttatgggtacagggtgggtagcgggatgggccagggtggttttggaaatggcaacatttgggtgggaaaacagaaatgtgaagttctcagttagggccatgggtccaggcttgagggtggaaccctcgccagggacccaccctcttctacccagcattcccctgcctcctgtcggtatcagagggatgagagcacctgctagatgtaaggaagcataggaaggaacatagaggaaggaac

SEQ ID NO: 334687 - DNA, 614 bp, Homo sapiens
agttaatgaggactgctgaaaggtaatcttgagttctgtctcagtcttctaacctgtgtcctgggaggtgcaagtgacactcaaattagggaactccatggctttgtaagagggaatatgtgagaagggtgagaaatatttcattactctgctcacggataaaagatgagaaggggtagggagctattatttctcaatgtttgtcaaacattgtgcaaagaacatttatttatataatcacattaatcacatttaattctaagaaaagttattggaggtaggtggcaattttatcagtgaaggagtataccttgatgagtctaatcaatttgcccaggttcatgcaacttgtaaagtaacaaagccaacatctgaacctaggacggtctgtttcccaagtctgtcctctataaataatctcttttataaaatgtttccaactatccaacgtagagatcatggcttaagaagttagactgtaaataatcttagatgagagtgtattgwcttaatctctgtctctctctgtctctctctctgacacacacacacacacacacacacagacacacaccagctttgtatagtctacattttttctagtatcctcaaaa

SEQ ID NO: 334688 - DNA, 531 bp, Homo sapiens
tataaataatctcttttataaaatgtttccaactatccaacgtagagatcatggcttaagaagttagactgtaaataatcttagatgagagtgtattgtcttaatctctgtctctctctgtctstctctctgacacacacacacacacacacacacagacacacaccagctttgtatagtctacattttttctagtatcctcaaaattgctcaggatgaatgatacctttaattgtgcagaatctcctcccataataaacaggctttcatttaaaaacttttaaatatatatttaaaaagcgtatatgtgtgaatgtgcatatattttcatgtatgtgtgcacatgtgcatgcctgtgtgttttgggaatattgcgaagtacaaacacactagacagctgcatttcacagttgagtcttcaggcagcaatattttagcagaatgaacatcaaatcttcccaatgacttgcgagctgtgaaagacattgcagctaactccaactgtaaaaaatatattggcttcagaagaga

SEQ ID NO: 334689 - DNA, 555 bp, Homo sapiens
cttggtacctgagttcttgtctggtgtccaggaagaattaggtcatgcaaatgaattgaaagatggtgtatgaggaagattttgttgagcagtggaagtgggtctcagagggaaggggagctggaaggggcaaggcagtgggaagataatcttcccctcgagttcgaccatccccggccaagctcttctctgaagtcctgccatcaagccgttcctctgaagtcaagctgcttctctcckacatccagctggttattttcttctcttctcctctgccactccactttgcccttctgccagtggagcttggggtttttatgggtacagggtgggtagcgggatgggccagggtggttttggaaatggcaacatttgggtgggaaaacagaaatgtgaagttctcagttagggccatgggtccaggcttgagggtggaaccctcgccagggacccaccctcttctacccagcattcccctgcctcctgtcggtatcagagggatgagagcacctgctagatgtaaggaagcataggaaggaacatagaggaaggaac

SEQ ID NO: 334690 - DNA, 555 bp, Homo sapiens
cttggtacctgagttcttgtctggtgtccaggaagaattaggtcatgcaaatgaattgaaagatggtgtatgaggaagattttgttgagcagtggaagtgggtctcagagggaaggggagctggaaggggcaaggcagtgggaagataatcttcccctcgagttcgaccatccccggccaagctcttctctgaagtcctgccatcaagccgttcctctgaagtcaagctgcttctctccgacatccagctggttattttcttctcttctcctctrccactccactttgcccttctgccagtggagcttggggtttttatgggtacagggtgggtagcgggatgggccagggtggttttggaaatggcaacatttgggtgggaaaacagaaatgtgaagttctcagttagggccatgggtccaggcttgagggtggaaccctcgccagggacccaccctcttctacccagcattcccctgcctcctgtcggtatcagagggatgagagcacctgctagatgtaaggaagcataggaaggaacatagaggaaggaac

SEQ ID NO: 334691 - DNA, 565 bp, Homo sapiens
ttgattagctttaatgtcacaagatctaggatattggaggcagatctaaaggaaagaattgcagactgtttgtcttctactgggaataaaggtggggaatattttgttcactattgtaaactgtagtataatggcctcaaattctaataagtaattcattaatgtaaagtaaataatttttgtggatatatggcacatataattcagttatttaggccatgtgaccattcaaagaatacaaaattttcattaggaggagtaagttcaggagatgtattatataacacggtggcctatgtattgtatacttgaaaattgctgagtgtagattttaaatgttctcascacaaaaaaaaatgataagtgtgtgaggcaatgcatatgttcattagctgtagtcattccataatgtacacatctatcaaaatatcatgatgtatatcataaatacatacaacttttgtcagttaaaaaaataaaataatactattaggccatgtaaccataaactgtcatttccatttgcagctcctagagtgtggaatgtggtggtctttgaggaggg

SEQ ID NO: 334692 - DNA, 565 bp, Homo sapiens
ttgattagctttaatgtcacaagatctaggatattggaggcagatctaaaggaaagaattgcagactgtttgtcttctactgggaataaaggtggggaatattttgttcactattgtaaactgtagtataatggcctcaaattctaataagtaattcattaatgtaaagtaaataatttttgtggatatatggcacatataattcagttatttaggccatgtgaccattcaaagaatacaaaattttcattaggaggagtaagttcaggagatgtattatataacacggtggcctatgtattgtatacttgaaaattgctgagtgtagattttaaatgttctcaccacaaaaaaaaatgataagtgtgtgaggcaatgcatatgttcattagctgtagtcattccatratgtacacatctatcaaaatatcatgatgtatatcataaatacatacaacttttgtcagttaaaaaaataaaataatactattaggccatgtaaccataaactgtcatttccatttgcagctcctagagtgtggaatgtggtggtctttgaggaggg

SEQ ID NO: 334693 - DNA, 591 bp, Homo sapiens
attatcccatacaaacacacaacaactgcaaggtagcaatatcagcactatgagcaataatttgatgtgaaactactaaatttgaatactgcaaaatagtttaagtggttttyttctgtagatctttttgctattagagtataccccactggggttatccagtcaaatcactctgttataaagttaagctagagtttttgatgaaacaagacattttgacaagaccatttcaaaacaactcaaactgctgaagcattgtttttattaccaaggtatatttgcaacagaaaccacaatccccacccaatctctaaaccacaccccagatgcgtaggttcagaaatgaggtgtgttcattgtatacattacaaaaatatatttcttaggaggaactatcaggttcttttatttttttttctttccaaagtaaacattcttccaggaggagtaaaaaatccaaaccattactggtaacttaccctttagtattaaggggctctcaaagaactaggggaaaaagtttgaagtcactaactagccaagggaaggaggatcaaagaaaaatgtcaatgcaaaaagcagaacattaag

SEQ ID NO: 334694 - DNA, 591 bp, Homo sapiens
attatcccatacaaacacacaacaactgcaaggtagcaatatcagcactatgagcaataatttgatgtgaaactactaaatttgaatactgcaaaatagtttaagtggtttttttctgtagatctttttgctattagagtataccccactggggttatccagtcaaatcactctgttataaagttaagctagagtttttgatgaaacaagacattttgacawgaccatttcaaaacaactcaaactgctgaagcattgtttttattaccaaggtatatttgcaacagaaaccacaatccccacccaatctctaaaccacaccccagatgcgtaggttcagaaatgaggtgtgttcattgtatacattacaaaaatatatttcttaggaggaactatcaggttcttttatttttttttctttccaaagtaaacattcttccaggaggagtaaaaaatccaaaccattactggtaacttaccctttagtattaaggggctctcaaagaactaggggaaaaagtttgaagtcactaactagccaagggaaggaggatcaaagaaaaatgtcaatgcaaaaagcagaacattaag

SEQ ID NO: 334695 - DNA, 527 bp, Homo sapiens
tcctgtgtggtcatgctaccacagcctctctggtcattacctctgggcccccaggatgtcctgatcatcctggcataacaggtggcctcctgcaaggctgctacagctccaagactgctgtttgttcctgtagatgggtgctctgactgtgccacttgttaactacagtgcgccttaccactagatcaaygcaaatgaaaataatagtgatgggctcccactctgtgtgtaggaccattctgtaaactctggagggaagtggccctgtttccattcttagggccagacacacacgagcacttgataaacattttctcagcagtcaatgatctcatgcgattccatcagtgacattataaggcaggtgttttaaatccagttttgtaattgctaagaagatgtcctaaagaattcaaataacatgacctgagtccagctgagaggggaaggagtggatagttcaacccaggagtgtcatggcaggttaaaagacttcactcttctagggtgcttgagatgttctgaaa

SEQ ID NO: 334696 - DNA, 527 bp, Homo sapiens
tcctgtgtggtcatgctaccacagcctctctggtcattacctctgggcccccaggatgtcctgatcatcctggcataacaggtggcctcctgcaaggctgctacagctccaagactgctgtttgttcctgtagatgggtgctctgactgtgccacttgttaactacagtgcgccttaccactagatcaatgcaaatgaaaataatagtgatgggctcccactctgtgtgtaggaccattctgtaaactctggagggaagtggccctgtttccattcttagggccagacacacacgagcacttgataaacattttctcagcagtcaatgatctcatgcgattccatcagtgacattataaggcaggtgttttaaatccagttttgtaattgctargaagatgtcctaaagaattcaaataacatgacctgagtccagctgagaggggaaggagtggatagttcaacccaggagtgtcatggcaggttaaaagacttcactcttctagggtgcttgagatgttctgaaa

SEQ ID NO: 334697 - DNA, 563 bp, Homo sapiens
  misc_feature (1)...(563): n = A,T,C or G
gggtcccctgggagcacaacagtagcatcaagtctgactcatctgaaagataagcccttctcagaaccacacctggaattgttgctggggagaaggtggaagaagcaacacacttttctggacggatcatgatgtctggcaacacagcaagcactggtgttctgaaattwactcctggtctaagagtttcatctttgttcataaatttacccacaaataaatacatgggtaaacctcggtatgggtataagtttacccataaataaatatatggatcattcaagtcagggtttcaaaaatatccatcctttcagtggcctgcatctcaaatgggataaactcctaagaaccaaagagctcaaagtagcatgcaaggttgtgacctttgcatgctgcaccctcccaagctgcaccctgggctaggctttgttgactgaagggaagagaagtgnaaactttgtggggtgctaacccaggaggatggaaatagcaaggctcaacatgccattcaaataaatggctggaaacactctaagaaatatgtatcattaggaagagtctta

SEQ ID NO: 334698 - DNA, 563 bp, Homo sapiens
  misc_feature (1)...(563): n = A,T,C or G
gggtcccctgggagcacaacagtagcatcaagtctgactcatctgaaagataagcccttctcagaaccacacctggaattgttgctggggagaaggtggaagaagcaacacacttttctggacggatcatgatgtctggcaacacagcaagcactggtgttctgaaatttactcctggtctaagagtttcatctttgttcataaatttacccacaaataaatacatgggtaaacctcggtatgggtataagtttacccataaataaatatatggatcattcaagtcagggtttcaaaaatatccatcctttcagtggcctgcatctcaaatgggataaactcytaagaaccaaagagctcaaagtagcatgcaaggttgtgacctttgcatgctgcaccctcccaagctgcaccctgggctaggctttgttgactgaagggaagagaagtgnaaactttgtggggtgctaacccaggaggatggaaatagcaaggctcaacatgccattcaaataaatggctggaaacactctaagaaatatgtatcattaggaagagtctta

SEQ ID NO: 334699 - DNA, 600 bp, Homo sapiens
ttatattttatatcaacttttaaagaaatgaacatctaaagtacaactaagtaccttctccacaaattcttagctttttttaaattgccttgtctgaattgctaagcttggcaccaaaatcscttctcagcaatttgttgaaaacttctgagtttctttgaattgaaatagccctgtgggtcttgctaacacccatatattctctttctgtaccactaacagatattctatgcacctcatccaggctaatggaatgaattcagtgctcaaagcctcttcttttttttttcatgtggcaatagagagtatgcaagcttgctttttttgtttctctacaactacaagtagctaagttttcactttattcatttttgtcctaactttcctaatccccattcagccatatccaataagggcatctggcagaacttgctaaaactaatttctatagaggacttaattagttacataaagctctcatctaccttagcaaaatacggttagatctctcagccttgtgaactgtcttagtgatatttttttaaaacaaaaacctcaaaaactgttttctggaggcatttatatcccttaaccatagca

SEQ ID NO: 334700 - DNA, 600 bp, Homo sapiens
ttatattttatatcaacttttaaagaaatgaacatctaaagtacaactaagtaccttctccacaaattcttagctttttttaaattgccttgtctgaattgctaagcttggcaccaaaatcccttctcagcaatttgttgaaaacttctgagtttctttgaattgaaatagccctgtgggtcttgctaacacccatatattctctttctgtaccactaacagatattctatgcacctcatccaggctaatggaatgaattcagtgctcaaagcctcttcttttttttttcatgtggcaatagagagtatgcaagcttgctttttttgtttctctacaactacaagtagctamgttttcactttattcatttttgtcctaactttcctaatccccattcagccatatccaataagggcatctggcagaacttgctaaaactaatttctatagaggacttaattagttacataaagctctcatctaccttagcaaaatacggttagatctctcagccttgtgaactgtcttagtgatatttttttaaaacaaaaacctcaaaaactgttttctggaggcatttatatcccttaaccatagca

SEQ ID NO: 334701 - DNA, 600 bp, Homo sapiens
ttatattttatatcaacttttaaagaaatgaacatctaaagtacaactaagtaccttctccacaaattcttagctttttttaaattgccttgtctgaattgctaagcttggcaccaaaatcccttctcagcaatttgttgaaaacttctgagtttctttgaattgaaatagccctgtgggtcttgctaacacccatatattctctttctgtaccactaacagatattctatgcacctcatccaggctaatggaatgaattcagtgctcaaagcctcttcttttttttttcatgtggcaatagagagtatgcaagcttgctttttttgtttctctacaactacaagtagctaagttttcactttattcatttttgtccyaactttcctaatccccattcagccatatccaataagggcatctggcagaacttgctaaaactaatttctatagaggacttaattagttacataaagctctcatctaccttagcaaaatacggttagatctctcagccttgtgaactgtcttagtgatatttttttaaaacaaaaacctcaaaaactgttttctggaggcatttatatcccttaaccatagca

SEQ ID NO: 334702 - DNA, 618 bp, Homo sapiens
agttcagtgccaaggtttgtgacagtttgttttgaggtcccctgagtgaactgagaggttgttttatttttaatgtattctggcactgagagtatagtytcacggagccctagctttccagagggtcttgtattagattcctacttctagttggtcgtgagctttgtcttccaaatcttattaagccccacgaggcctcaaaaactacactcagttttacccagaaaagtgacctcatgtcagtaactggactttactacctctctgggctcctattttcacccaatttttggtctgagtattccttactttcttgcaagctcatggaaaaattatagaaatatttcttaaaattttattctgcatattttgttgttttcagtggaggatcagttcaggcatcttgtctaccattttaccatctggaaaagttattttatgtgattgaaacacaatttgcgtatatacatatgatggattcaaattagtgatacgattaagttcatagcttgttattaagattgaatgagattagctatatgaaaagcggtcttaacattgggtgctacaaaaattagccacgcatttactccttcttctactcattcacaaatgttt

SEQ ID NO: 334703 - DNA, 618 bp, Homo sapiens
agttcagtgccaaggtttgtgacagtttgttttgaggtcccctgagtgaactgagaggttgttttatttttaatgtattctggcactgagagtatagtttcacggagccctagctttccagagggtcttgtattagattcctacttctagttggtcgtgagctttgtcttccaaatcttattaagccccacgaggcctcaaaaactacactcagttttacccagaaaagtgacctcatgtcagtaactggactttactacctctctgggctcctattttcacccaatttttggtctgagtattccttactttcttgcaagctcatggaaaaattatagaaatatttcttaaaattttattctgcatattttgttgttttcagtggaggatcagttcaggcatcttgtctaccattttaccatctggaaaagttattttatgtgattgaaacacaatttgcgtatatacatatgatggattcaaattagtgatacgattaagttcatagcttgttattaagattgaatgagattagctatatgaaaagcgktcttaacattgggtgctacaaaaattagccacgcatttactccttcttctactcattcacaaatgttt

SEQ ID NO: 334704 - DNA, 604 bp, Homo sapiens
tcctgaagatttcctagaactgggcataaaccctgaaagctccccatagatatttgtgaatgagtcagtggatgagcaacttgaggaatgaatgaaatcaagtcatgtacagaatggcaacataggtaatggtgaagcctgaaaatcacatagtccacaggttgcctacatgggaattacagaaacactgttccygtaatagcaaatatacctgcgccagagtagagacttggtgaactgagcttgggctgaatttcagttcccactagccctctaagctgaacctctttaggcagtgaaaaacctgctcaactgtacaaggcagctctgagttaagagtgaaggtttgaaaccagatgcatgggttcaaatcctatcttctcttcttactaatactgtgaccttggacaagtaattaaacatccagtttccttgtgagcaaagtgaaaataaaatacttctccactagacttgttatgaaattccaatgagtgaatgcatataatatggcactgagaacattgtttttagctaatacttggtcaatcaagatttgctatctttcatatttctacctcattaactttgggtacatttgcaaaat

SEQ ID NO: 334705 - DNA, 604 bp, Homo sapiens
tcctgaagatttcctagaactgggcataaaccctgaaagctccccatagatatttgtgaatgagtcagtggatgagcaacttgaggaatgaatgaaatcaagtcatgtacagaatggcaacataggtaatggtgaagcctgaaaatcacatagtccacaggttgcctacatgggaattacagaaacactgttcctgtaatagcaaatatacctgcgccagagtagagacttggtgaactgagcttgggctgaatttcagttcccactagccctctaagctgaacctctttaggcagtgaaaaacctgctcaactgtacaaggcagctctgagttaagagtgaaggtttgaaaccagatgcatgggttcaaatcctatcttctcttcttactaatactgtgaccttggacaagtaattaaacatccagtttccttgtgagcaaagtgaaaataaaatacttctccactagacttgttatgaaattccaatgagtgaatgcatataatatggcactgagaacattgtttttagmtaatacttggtcaatcaagatttgctatctttcatatttctacctcattaactttgggtacatttgcaaaat

SEQ ID NO: 334706 - DNA, 594 bp, Homo sapiens
ttttaatcccacctcacaccatacttgtttgggaattcctgtactcatcatactatgaggtccttgaggataagaacagtatctgacacttgtttctagtatgcacatggctttacatcaccttgagttttgtgaaatgagtgttctatcaagatgtgtggattgtttgattaattgattgattgactgcaaagggtaagaaatggcctctgcagtattcaataattaatattcattctgcttctattcctagcccctatactcatrgtatgcctgttagctacaaattctaaaatgtctcacgaatccacatgtgagaatgtaaccactgatactcaaaatcaataagaggtgccatacacattagcataatggatgacctcttgcttttcctagagcagaaaatcaagggcaccctcacccatcctaatgtcatatacactggaaaccctggggccaatccaggggcactgccagtatgaacatccaacctccatggaggttttcagctacctcaaaggctgctctgatgttctttaaaaatctttccaacaaggctgaattgaaattgctttgactcttacattgaaacag

SEQ ID NO: 334707 - DNA, 591 bp, Homo sapiens
aggtttttgcatgctgaaaaatccctttactcttgaattgccaaggaatctgttgtagcagttccttaaaatgtagtgtgttgctaattaatggcaaccaggcattcacagtgcatagtgattgatttgtcatattggttttagttactcagtaggactttgaggacaaaaaagtaagacagataagttttgattaactgggagacacyggcaagggcaatagggctaatgatgccagggaaggttctggttggctaggacatgaaaatgctgaaaaccagaaagggctaagagagggaaagggaaagtgccaaaaagaagtgatttaagagctgaaggggacatacactgactctaggtatcatcgttctaaaaagcactgggaacacggatgtaccatgtttgggattatgaaagtaatgtttaggaagttttataaatataatttccaggatctaaaagagaccatccaatgtaaagctccagaaagtcacacacacagaccatccactacagatggggctcacccagtggacatgtctgcttcactccaaacatcagccagcattcactcgtccggaccactgagac

SEQ ID NO: 334708 - DNA, 591 bp, Homo sapiens
aggtttttgcatgctgaaaaatccctttactcttgaattgccaaggaatctgttgtagcagttccttaaaatgtagtgtgttgctaattaatggcaaccaggcattcacagtgcatagtgattgatttgtcatattggttttagttactcagtaggactttgaggacaaaaaagtaagacagataagttttgattaactgggagacaccggcaagggcaatagggctaatgatgccagggaaggttctggttggctaggacatgaaaatgctgaaaaccagaaagggctaagagagggaaagggaaagtgccaaaaagaagtgatttaagagctgaaggggacatacactgactctaggtatcatcgttctaaaaagcactgggaacacggatgtaccatgtttgggattatgaaagtaatgtttaggaagttktataaatataatttccaggatctaaaagagaccatccaatgtaaagctccagaaagtcacacacacagaccatccactacagatggggctcacccagtggacatgtctgcttcactccaaacatcagccagcattcactcgtccggaccactgagac

SEQ ID NO: 334709 - DNA, 647 bp, Homo sapiens
ccccctccctcctctggagatatatatgatcaaggcttccacatacttgttacttgttattcctcttgtccaataaatgtggtgtcatcaatatctacaatgtccagtagattccaatccctttaaattgtagatgcaggaccactgctacaagtgccatgagagttagcatagcccaggagcaatcatgtaaatgcattctgttgcctgttccataatgaaagagaactgtttctgatccttgttcctgataaggatgtaaaacgccgcattcaccagctcaatggccatgtacttgaggctgtgttggtctactctctagaaaaggtactacacctgacacagaagctgcaattggagctaagtttgatgttatccactattatcctctaggatctgtttttatttttaaggaaataggastggtgagttaaataggaatataatggggccaccacccttgtaacctagttctcaataaagcatttggaggtgggaccaatctcttccattttccccagaacatgagagtgtattttatttacaatttttgacttggaaggcacagttttagagactttcaccttggccttcccgacttcaatagctcttacttcaaaagctaagaagctcatggaaggattttg

SEQ ID NO: 334710 - DNA, 342 bp, Homo sapiens
agcttcctaattgctctccctgcctcttcctttgaccctgcttcccttttctccttttgcagccagagggatctctctaaaacgtaaatcagacccacattactcctttmctttaaatccttcaatgccttcccatggccttaaatccaagtttcttctcataacttttaagactttacataatctgtttttttttgttttgttttgttttttgagacagagtttcactcttgttgcccaggctggagtgcaatgtcatgatctcggctcactgcaacctccaacttctgggttcaagcgattctcttgcctcagcctctcactgggattacaggtgcctag

SEQ ID NO: 334711 - DNA, 503 bp, Homo sapiens
cagtaacttactttcttacaaactcagtaatttttaatcgggatctcctatttcagtgaagtaagatccagatagacctgcatagaaggtacatccctctaggaaaatttgtgtttccttttatggggatccgagtacgcaatagagggccattttagtttcatttctcagtttgaagtttccttactctccgggatagaataactttgaaccccagactagtattttctccagctggaattggaattgcagaatacaagttttcattgtggctaccttttctagcctgttgtttcactgaatgtgggggcctcatcttgtgtgtcttcccccaatcttgtgtgctctcagtgtagtctctcctgtgccccctgtgaccactaaccccccgaagcgctagacttctaacagtgtttgcctcagggcagacccagcttcaccattagcttaccaggcgaatgcatcagttcaccaggcggctctkgactcatgtggatctcccc

SEQ ID NO: 334712 - DNA, 494 bp, Homo sapiens
ggactatagctcaaacatgtaaaagctcacagctgtctcagagccttttcacctgttatttgttttcttgaaaagrctcttttcttcaattcttcacgtggtcacgctttatcaccattcaggtcttagctcaaatgttccacctccagattctcccctggtcactctcagttattaatacgttctcttatctcagctaaatatttctgtgtagtacttcccagaacctaaggttattttgtttattgatttgtttatgttttgttctctagaatgtaactgtttaagggcagggaccctgttctagaaaagtgcttggcacacatagacactctaaaagtaaatatttgttgattggttgggtaatatctctgttctttatctcctgctgaaataccttcctattctctcttgcaggctggaaaccagggccatgttcatagtcccaatagttagcttactacagcaaggtcaccactaaaatgccatcctgt

SEQ ID NO: 334713 - DNA, 613 bp, Homo sapiens
ccctgcatgttttacctgatttttgtaaggataagatgagctttgcctatgaaggcacagtacatgttgagacaaagctggccaacagaacttccaagtatatgggtggaaaagaataaaatatctcagtagtaaaaatggaagacctcaggaaatggaagcagctggggaatgcagtgtgtgagtataaggcatgcagaatctggcacaaacaggaaattaacaggaggatgcatatgtttgcatcaacaatatctctgtaagtcgaccccccatacacacataccatactctcactratcagcaaagggaagcaggaggtacccaatgtaatcagtggccagtcttgcccaacttgcttccatttcagcccagttcatttggctgttggctcggcttctgtgctctggtcttggtattttaatgtggctctcagctgggctctgcatgtcccttccaggcatccagcttgggctcatggggactgggatgggttcaacttgtcctcctaatcagagaattaaaaagcactactgcaggaatgtagctgtatccctaagattttgtcatctgtcttttgctgtggcaaagagggagtcctagtggtcattca

SEQ ID NO: 334714 - DNA, 613 bp, Homo sapiens
ccctgcatgttttacctgatttttgtaaggataagatgagctttgcctatgaaggcacagtacatgttgagacaaagctggccaacagaacttccaagtatatgggtggaaaagaataaaatatctcagtagtaaaaatggaagacctcaggaaatggaagcagctggggaatgcagtgtgtgagtataaggcatgcagaatctggcacaaacaggaaattaacaggaggatgcatatgtttgcatcaacaatatctctgtaagtcgaccccccatacacacataccatactctcactgatcagcaaagggaagcaggaggtacccaatgtaatcagtggccagtcttgcccaacttgcttccatttcagcccagttcatttggctgttggctcggcttytgtgctctggtcttggtattttaatgtggctctcagctgggctctgcatgtcccttccaggcatccagcttgggctcatggggactgggatgggttcaacttgtcctcctaatcagagaattaaaaagcactactgcaggaatgtagctgtatccctaagattttgtcatctgtcttttgctgtggcaaagagggagtcctagtggtcattca

SEQ ID NO: 334715 - DNA, 578 bp, Homo sapiens
tttgtttttaatataatttaattataagtttatataatttaatttttgataatgcctgtgtttaacaaccaccttgtaaaatttctcacaatctaacaatgggctcccatgagccaaaaggggmcagctctagcacatcatttactccacatgattctccatgaatgcaaacatgaacctttcagcaagtgtatatatcgatagagtgacacttagagcgaggtgcttctgaataggcacatgttttcataaacgtagtccagttgcatttatttatatatctaagaataagtgcctaatacctaatccaggtaggttgtctatgaacatcgttttctcaacctccccaacatgttagtccatgtgcaccaatcttgtactgtcaactacagatcttcgttgtgaggagcctggaataaaatgtgcccacattcttatacagctgatgaaatagttgggcttccctttgttagttcttgccaggcccaacccaatgtcatagataagctggtgacttgtagatggccatttgtaagctacttcctcctcatttggtaaaacagatcagaatgctcccc

SEQ ID NO: 334716 - DNA, 515 bp, Homo sapiens
tgatccaaaatcaatggctcagatctccactgtggcaagcagaagcaagttcaaagccttttcatttatactccaaattttagaaatgtccacagtggacaaaactgtaggaattcagaaggcaatagttgtyaggctctgcattttccctgactaattcaaaatgattttataatgaatttttccaggccattagctcaaaatactgtctgatacctgtgacgattttgaaagggaaaaagaaattaagcagggaacaaccactgaatttagaaagagaggtatgcttttatatagcagcatttttatcttggcccacattgtaaataatttttttttaaccagaagaaccactggttcctacttgtaaggtgtaatcctcttagccagcattttcagaccaaaaaaaaaaaaaaaattgatctcttgactcaaatagaatcaactgattaccaaagttctttgttaagaatcttctctactgaccattcaaataaatgttgattaaaaggaag

SEQ ID NO: 334717 - DNA, 560 bp, Homo sapiens
attcatgaaaactgatgaaaataaagtcagcatagttcttaccagtcttcgcattctatcacctttctccacttcaggccttagttcatcatctatcgttagtgaaatactcattctcattttatttgtatttcagtgcaggcagtaaccaatgcattactctgtctccacttccccaaatatgcatttatgtttttgttttggtaagagaaacaaaaagggccaaagttgtcataggttttgatataagtctacaccttattttgcttttttctatctcttatcttatagacggggaggtagaaatccagtaaaagtaaaagagcagactaggagaraagacagcaatagcaatacaaagatgaatttgatccaggtagtgttgggagttaatcaatttagagtttcagtctattcatggttttggtttttgctttagagaaaaataaaaatcctaagctcccacagaacatctggaaaatgaaacttctgcctgtcataataaaactagctggagatgtaagcaagcctccacactctggaaaatacttagccaagtg

SEQ ID NO: 334718 - DNA, 548 bp, Homo sapiens
ctgacctccgtgagccttccggccttggacacagatgagaaagtcatgccatgttgtctcttaaccacagataagagtcagcctctgttctttaaagccatgcttcatgcgttaatttaaagggctataattccagacatctgagacaattgggagataggatgctaaaaaacagttcaatrtagttcatgtccactttgttataaagtgattcatgagaccagctcaatctgaagtatagaaatatgaaataataatagaacccagaatttataggatgccttcactcccaagcatatgaaatatcttcatgtgtactctatttgatttaggttaatattctctctattagctaatgtatggacatggaataattcccgtttaagagagagaagaacaaagacacagagagatgaggtgatttacccagcacctgggtatcaaaagtagaactagaattttccattcactagccacttcccataaatatggatggtccagattctagtggattatccgaggggtatcaaaaacactgtaaatggccc

SEQ ID NO: 334719 - DNA, 578 bp, Homo sapiens
caacaaaataatcacaatataaaattcrtaactccaggatatgagttgtgagactaaaagggtcactaagtcccaggcacatagagggaaagcaggtccacatcaaggcacatcactagaaaatttcagaacaccagggatagaaagtggatcccataagctcccaacaagaaagttcaggaggacgatgaaggaggattctaggataacagctgaatactagatacaatggcaagcagctcagataggagcactttgacacaagaaaaaaaattcagggctttcatcaccaacatctcctataccactgtactgtcttttcaacccaagaatagagtgcccaggtgcacttggcccagattctgatctgtacttggcttgtctttaccatgtgcaggtcaagtttctgccatccacaccctactgccggattggatgatgatgcccatttcacccacagaagacttgctcctgagagctggagctaagatagagcataaagcgcatcccctcctgtgctagtctgctcaggctgccagaacaaaatgccaccaactgggaggtgtaaataacagaaa

SEQ ID NO: 334720 - DNA, 547 bp, Homo sapiens
agggatagaaagtggatcccataagctcccaacaagaaagttcaggaggacgatgaaggaggattctaggataacagctgaatactagatacaatggcaagcagctcagataggagcactttgacacaagaaaaaaaattcagggctttcatcaccaacatctcctataccactgtactgtcttttcaacccaagaatagagtgcccaggtgcacttggcccagattctgatctgtacttggcttgtctttaccatgtgcaggtcaagtttctgccatccacaccctrctgccggattggatgatgatgcccatttcacccacagaagacttgctcctgagagctggagctaagatagagcataaagcgcatcccctcctgtgctagtctgctcaggctgccagaacaaaatgccaccaactgggaggtgtaaataacagaaagtgattttctcacagttctggaggcaggaagtccgacatcaaggtgtagtcatcaggattggtttcttctgaggcctctctccttgttttgcagatggctgtct

SEQ ID NO: 334721 - DNA, 559 bp, Homo sapiens
tcaactcatcaaagaaactttttaatatagttggcttgatttgtactttgttttttaggtacaaatcccaaatcgtgttagtactatattrggtattttttgctaaatttctacagacataagctccccaaggacaaggatatgtttcatgtatctgtgtctctgctcagcatacagcatggaccccagaggagccactgacacagaaccaattgttggcttctgaactagatatacaggcacagagcccaaaagtgaagaaattgcctaccaagcctataggtatgcccactgaccagcacaagctacaccaagctccacccatcatggaattttgcattccaggattttcttcagatataacagtcctaaaagtaacagcaaaacctcacatatctatacttacattgcagtttaaagagtacctctatttcacatgttagtcaggaaaatagaaaccattattcgttctacaaacagaagaaagttaatacagaaaaatcagttacatcagtgagggaaaagttagaaatacaatcagggttattgagggtgaacc

SEQ ID NO: 334722 - DNA, 559 bp, Homo sapiens
tcaactcatcaaagaaactttttaatatagttggcttgatttgtactttgttttttaggtacaaatcccaaatcgtgttagtactatattaggtattttttgctaaatttctacagacataagctccccaaggacaaggatatgtttcatgtatctgtgtctctgctcagcatacagcatggaccccagaggagccactgacacagaaccaattgttggcttctgaactagatatacaggcacagagcccaaaagtgaagaarttgcctaccaagcctataggtatgcccactgaccagcacaagctacaccaagctccacccatcatggaattttgcattccaggattttcttcagatataacagtcctaaaagtaacagcaaaacctcacatatctatacttacattgcagtttaaagagtacctctatttcacatgttagtcaggaaaatagaaaccattattcgttctacaaacagaagaaagttaatacagaaaaatcagttacatcagtgagggaaaagttagaaatacaatcagggttattgagggtgaacc

SEQ ID NO: 334723 - DNA, 508 bp, Homo sapiens
gtgttatttaaagcagtattcgctttggaagtcctaagctcttaggggactgtcctcaggacccctcagcaaaacatctggtggccctcattccctcgtcgctccccacgatcccgagcttccagagctccttcagcttcctcccctcacggcacgtgccacattgagcagcaattatttgttgcaggtctcccctcgcagactgatgggaacaaactctcagccatcttgaaactgacacaatgtctgacacactgtccgtgctctacaactgcttgaaggagtgaatggatataactgaagatctccttccaccagatagttgaggtattcaaaattgagactgctaatctgtccctgagtctctgaagattgtaagatgcaccagttcacaggtccatgtcatcaggaggagtttatccctttatttctagtgtcttaactttggtgccccagcattacartcatccaagtacaagattgtggagtcctgctttttcatttagta

SEQ ID NO: 334724 - DNA, 410 bp, Homo sapiens
taccaacacaaaatacatgacatttaaattaggtttcttttttctttttttttttttttttttttaattaaaacaagttttggccagggatggtggctcatgtctgtaatccctgcactttgggagccaaggtggctggatcacttgagctcaggagagttggagaccagcccgagcaacgtggatagatcccgtctttacaaaaaaatattwaaaaaaaatagtggggcatggtggtgtgcacctttagtccccagtaacttgagaggctgaggtgggaggatggcctcaacccagggggtggaggttgaagtgagttgagatcatgccactgcactccagccagagcaacagagcgagactctttgttttttttgtttttgtttttttttttggtagaaatggagtct

SEQ ID NO: 334725 - DNA, 592 bp, Homo sapiens
ttttttcgggaagtcaaaagtacggtgaggcatgagaagaaggatctccagctccaagttgttctccctcttgtggctgaacacactgttaccatatgcttatgaaaccatttgcatatggtacaagcccatgtgggagaaatgagagctctgwcaacttctacctgtcttctgtcctctcctgacaatgcatctccatcactaatagtggcctctgggttttactttcttctgtgcacaaagaaaacaactggtggcacctgtacatagagaattccagaggcaggaaactctccttacttttggacagtgcacagcaaagagaatgtagttggaagttcagccaacctggattgcaagccacctggagcaacatggccttacatgagtcacatgactgctgggagcaactctctaaaagagagtggtgaagaaacctaggtcatcagaaggttaaatagaataacgtgtgtgactgggcagagcacacagaaggcaccaaatatgtgttttttagattctttcccaaatctaggaggtggaacttagcaataaaatgccttaaaacctaaaaaaaagttataaaagtgca

SEQ ID NO: 334726 - DNA, 480 bp, Homo sapiens
catctccacatcatcccttccccttctcccgggtccgtggaagaattgtcttcaagaaaactggtctcaggtagcaaaaaggttgggaaccgctggtgtaaatgcttcaaggaatagttaagcagcttaaggtttacatgctacaaaaagwacaggttcaaacgctaataaaaatgggtgcaaatgaaaacactctcttgctgtggtccaaggagttttaagcattctatcagaaagacttgcagcttggagctgcagctgccctcccacatcctgtccactgtaacccctgcaacacacaaacacacatatgcacacacgcgtgcacacacacacacacacacacacacacgctgtgcttcatgccctcacttgggtggcctgggagggaatgtgtttgtttgtttgtttgtgtgtttgtttgtttgttttttgagatggagtttcactcttgttgcccaggctggagtacaatggcga

SEQ ID NO: 334727 - DNA, 507 bp, Homo sapiens
attagttactttaaacatcaatgttctaaatatatcagttaaaaggcaaagattgtaraaatggatttaaaaaaaccttcccaattgtatgttgcctacaagaaacatgcattaactataggagcacatactgaaagatatactatgctgatgctaatttttaaaatgggaacagctatattaattttaaacagactagacttcagagcaaagaaagttatcagggctaaagatgggtattacataatgataaaggggtcagttccttataaagacatgacaatccttaatgtatagatgcctaacaatggagcatcaaaaacatgaggcaacatctaatagaactgcaaggagaaaaacatgagtccactatcatagttggtaacttcaacacccctctatcaaaaatggacatatcaagcagacagaaaaaagagtaaacacagcaccgtcaattaactggatataactgacatctactgactgtcttatgattaaagaacacac

SEQ ID NO: 334728 - DNA, 507 bp, Homo sapiens
attagttactttaaacatcaatgttctaaatatatcagttaaaaggcaaagattgtaaaaatggatttaaaaaaaccttcccaattgtatgttgcctacaagaaacatgcattaactatargagcacatactgaaagatatactatgctgatgctaatttttaaaatgggaacagctatattaattttaaacagactagacttcagagcaaagaaagttatcagggctaaagatgggtattacataatgataaaggggtcagttccttataaagacatgacaatccttaatgtatagatgcctaacaatggagcatcaaaaacatgaggcaacatctaatagaactgcaaggagaaaaacatgagtccactatcatagttggtaacttcaacacccctctatcaaaaatggacatatcaagcagacagaaaaaagagtaaacacagcaccgtcaattaactggatataactgacatctactgactgtcttatgattaaagaacacac

SEQ ID NO: 334729 - DNA, 556 bp, Homo sapiens
tgctcaacatcaccgattatcagggaaatgcaaatcagaatcacaatgcgataccacctcacttctgcaagaattgtcataatcaaaaaataaaaaaaaatagatattggcatggatctgatgaaaagggaacacttttacactgttagtggggatgtaaactagtacaaccactatgggaaactgtgtggagattccttaaagaattgaaagtagatctatcatttgattcagcaatcctactcctgggtatctacccataggtaaataagtcattattcaaaaaagatacttgtacacacatgtttatagcagcacaattcacaattgcaaacatatggaaccagcccaaatgccatcaatcaacagtggataaagaaaatgtgatatcgatatatgtgtgtatatatataaaatatatatatatatataatgaaatactactcagccatacaaaggaacaaaataatgacatttgagcaaccttggaattggataccrttattctaagtgaagcaactcaggaatggaaaaccaaacatcatatgttctcact

SEQ ID NO: 334730 - DNA, 538 bp, Homo sapiens
  misc_feature (1)...(538): n = A,T,C or G
aaacagagaagaggccaaagcatgttgtctcaatcttccttcttgttttagtccattctcacactgctaaacgatactacccaagamtggataatttacaaagaaaagaggtttaattgactcacagttccacatggctggggaggcctcaggaaacttacaatcatggcagaaggagaagcaagcacatcttacatggtggcaggtgagggaacatgagcaaaagcagggaaaactgccttataaagccatcagatctcatgacaattcactcactatcacgagaacagcataggggaaaccacctctacgatccaatcgtctcccatcagattcctccaaccacacgtgaggattaccggtattacaattcaagaggaggtttgggtggggacacagccaaaaagtaacactttttatttattacaattttatatcatccctagcaaattgttccaaattcttgcccatccttcatcaatatctaaaattgcacttgtaannnnnnnnnnnnnnnnnnnnnnnnnnnnnnnnnnnn

SEQ ID NO: 334731 - DNA, 538 bp, Homo sapiens
  misc_feature (1)...(538): n = A,T,C or G
aaacagagaagaggccaaagcatgttgtctcaatcttccttcttgttttagtccattctcacactgctaaacgatactacccaagactggataatttacaaagaaaagaggtttaattgactcacagttccacatggctggggaggcctcaggaaacttacaatcatggcagaaggagaagcaagcacatcttacatggtggcaggtgagggaacatgagcaaaagcagggaaaactgccttataaagccatcagatctcatgacaattcactcactatcacgagaacagcataggggaaaccacctctacgatccaatcgtctcccatcagattcctccawccacacgtgaggattaccggtattacaattcaagaggaggtttgggtggggacacagccaaaaagtaacactttttatttattacaattttatatcatccctagcaaattgttccaaattcttgcccatccttcatcaatatctaaaattgcacttgtaannnnnnnnnnnnnnnnnnnnnnnnnnnnnnnnnnnn

SEQ ID NO: 334732 - DNA, 612 bp, Homo sapiens
ctgtgtccccacccaaatctcatgttgaattgtagttcccataatccacacatgtcatgggaggaacccagtgggagataattgaatcaggggggaggtttcccatgtcctgttctcctgatagtgagtggtgctttttccccttttgctcggcacttctccttgctgctgccatgtgaataaggatgtgcttcctttaccttstgccatgattgtaagtttcctgaggcctccccagtcatgccaaacagttagttaattaaacctctttctttatgaattacccagtcttgcgcatgtctttattagcactgtgaagagcagagttgcttgaacatctatgataacttgccacagctctagttaagggcaaattcagaattcaaagccaggaggagtccaaggccaaaggccactttcatgaccattataattctccactcccaggcagtatggacagatatagaaattatccattgaaagtttatggagtcagagaaatttcatgaattttacagttttttttttatttagtaactagcaggattttgttaagattaataatttgggctccagagccaactttcctgggttcaaatacacttattaaaa

SEQ ID NO: 334733 - DNA, 612 bp, Homo sapiens
ctgtgtccccacccaaatctcatgttgaattgtagttcccataatccacacatgtcatgggaggaacccagtgggagataattgaatcaggggggaggtttcccatgtcctgttctcctgatagtgagtggtgctttttccccttttgctcggcacttctccttgctgctgccatgtgaataaggatgtgcttcctttaccttgtgccatgattgtaagtttcctgaggcctccccagtcatgccaaacagttagttaattaaacctctttctttatgaattacccagtcttgcgcatgtctttattagcactgtgaagagcagagttgcttgaacatctatgayaacttgccacagctctagttaagggcaaattcagaattcaaagccaggaggagtccaaggccaaaggccactttcatgaccattataattctccactcccaggcagtatggacagatatagaaattatccattgaaagtttatggagtcagagaaatttcatgaattttacagttttttttttatttagtaactagcaggattttgttaagattaataatttgggctccagagccaactttcctgggttcaaatacacttattaaaa

SEQ ID NO: 334734 - DNA, 611 bp, Homo sapiens
tatttgacctctaggctcaagtatgattttgtttcataacaacagtattcaaaaatgttcaagatgtagctggcattataaaattttagatgatttccttccataagccaaaagtaaattaagatttctttcctcttcataaaggaaaaaacctattttcagagttaatatgacagtggctacggctatagctttcttttacttcaaaaaaaaaaagtagagaacggtatggtgtatttggtataaataaaggaaacatgaggatgagacagaaaacacgttcaagaagaagtaatcttctcccctttgacagccaaaacacaggtacatttttagcctcatttggtttctaagacagttctttttaaacaaagaaaaaaaatcatattttgcacmctcagtctcttcaatgcatggtaaattagtagcaaagtaatgatgaatgtggaaattaatcaaaagcaaaactatagtttttacacgtttcttagtgaattaatgatttccctttattacagtaaatgtgtcaagaccataaaatgtgaacaaaaatttaaagtgtaagattaaatgctgttgaaactttgcctgacccttattaatgcaacact

SEQ ID NO: 334735 - DNA, 590 bp, Homo sapiens
attatataaataaaagaaaaaagcaatgactactaaaatagaatataaaacaataaagaaaatctgtagtaaactaagaaattgttgagaaaaatattattggtattttcaaaaggcaaaattgaagtggcagtattaaaaaagggttgttgcacaytgtgtatatttaaaaggcaaattagaaaaatggcttaattacctatgtagcttattcctgcagaagaaacatacctcaaaaatagaatgagtcaactcatggctaataaatacatcaggagaaacaggacattccagcaatgaaagaaccatcattaaggaaacaattgaggacaaacatcctgactaatgaaaagcccaattctttgataccgcacacagctcaattcaggaatgatattccaaaaaataatcaaagtgcctttagaactattatccatgcttttactttcagaaggcattttgtagttacaaaagaaagaacagagatatttgtaattgtatctataaggatgcaaactgccctctgccctaaaatctttaatgacagtaccactgctgtaaatatacgtaaacatactttagacacatgc

SEQ ID NO: 334736 - DNA, 590 bp, Homo sapiens
attatataaataaaagaaaaaagcaatgactactaaaatagaatataaaacaataaagaaaatctgtagtaaactaagaaattgttgagaaaaatattattggtattttcaaaaggcaaaattgaagtggcagtattaaaaaagggttgttgcacattgtgtatatttaaaaggcaaattagaaaaatggcttaattacctatgtagcttattcctgcagaagaaacatacctcaaaaatagaatgagtcaactcatggytaataaatacatcaggagaaacaggacattccagcaatgaaagaaccatcattaaggaaacaattgaggacaaacatcctgactaatgaaaagcccaattctttgataccgcacacagctcaattcaggaatgatattccaaaaaataatcaaagtgcctttagaactattatccatgcttttactttcagaaggcattttgtagttacaaaagaaagaacagagatatttgtaattgtatctataaggatgcaaactgccctctgccctaaaatctttaatgacagtaccactgctgtaaatatacgtaaacatactttagacacatgc

SEQ ID NO: 334737 - DNA, 590 bp, Homo sapiens
attatataaataaaagaaaaaagcaatgactactaaaatagaatataaaacaataaagaaaatctgtagtaaactaagaaattgttgagaaaaatattattggtattttcaaaaggcaaaattgaagtggcagtattaaaaaagggttgttgcacattgtgtatatttaaaaggcaaattagaaaaatggcttaattacctatgtagcttattcctgcagaagaaacatacctcaaaaatagaatgagtcaactcatggctaataaatacatcaggagaaacaggacattccagcaatgaaagaaccatcattaaggaaacaattgaggacaaacatcctgactaatgaaaagcccaattctttgataycgcacacagctcaattcaggaatgatattccaaaaaataatcaaagtgcctttagaactattatccatgcttttactttcagaaggcattttgtagttacaaaagaaagaacagagatatttgtaattgtatctataaggatgcaaactgccctctgccctaaaatctttaatgacagtaccactgctgtaaatatacgtaaacatactttagacacatgc

SEQ ID NO: 334738 - DNA, 590 bp, Homo sapiens
attatataaataaaagaaaaaagcaatgactactaaaatagaatataaaacaataaagaaaatctgtagtaaactaagaaattgttgagaaaaatattattggtattttcaaaaggcaaaattgaagtggcagtattaaaaaagggttgttgcacattgtgtatatttaaaaggcaaattagaaaaatggcttaattacctatgtagcttattcctgcagaagaaacatacctcaaaaatagaatgagtcaactcatggctaataaatacatcaggagaaacaggacattccagcaatgaaagaaccatcattaaggaaacaattgaggacaaacatcctgactaatgaaaagcccaattctttgataccgcacacagctcaattcaggaatgatattccaaaaaataatcaaagtgcctttagaactattayccatgcttttactttcagaaggcattttgtagttacaaaagaaagaacagagatatttgtaattgtatctataaggatgcaaactgccctctgccctaaaatctttaatgacagtaccactgctgtaaatatacgtaaacatactttagacacatgc

SEQ ID NO: 334739 - DNA, 578 bp, Homo sapiens
aggaaatattacgtagttcttaatcaaaatgagagggatatctgtataaaacctmagctattgttaacagaaaaaaagcatgtaaacaaaattattaaattatggttttaataaaatccatatatatgaatttggacacgtgtatacacaagtaaagccagagaaaatgacagaatataacgtatgttgaaatgatagcaatgactaccactaaaaaaaaatcagaatagaatggtaatttaaaataaatataagacagcagtgggcaggatgaggacacatttaaatctacataatactgcactgtgtaagctaaatttttcaagacctgcttgtgtaattatttttaaaaagaaaacaggtttgtttccttgtgttgagaattattcaacatggaaagtgctacctaaaagaagagagagctcattgactccatttgttctaaaaaacaaaccaacaagcaacaaaaaaccctatatattttatacaagtagaaaccctatatattttatacaagtagaaataactagcaatatatttctatagggagaaataagccagcatattttcaacgttct

SEQ ID NO: 334740 - DNA, 578 bp, Homo sapiens
aggaaatattacgtagttcttaatcaaaatgagagggatatctgtataaaacctaagctattgttaacagaaaaaaagcatgtaaacaaaattattaaattatggttttaataaaatccatatatatgaatttggacacgtgtatacacaagtaaagycagagaaaatgacagaatataacgtatgttgaaatgatagcaatgactaccactaaaaaaaaatcagaatagaatggtaatttaaaataaatataagacagcagtgggcaggatgaggacacatttaaatctacataatactgcactgtgtaagctaaatttttcaagacctgcttgtgtaattatttttaaaaagaaaacaggtttgtttccttgtgttgagaattattcaacatggaaagtgctacctaaaagaagagagagctcattgactccatttgttctaaaaaacaaaccaacaagcaacaaaaaaccctatatattttatacaagtagaaaccctatatattttatacaagtagaaataactagcaatatatttctatagggagaaataagccagcatattttcaacgttct

SEQ ID NO: 334741 - DNA, 578 bp, Homo sapiens
aggaaatattacgtagttcttaatcaaaatgagagggatatctgtataaaacctaagctattgttaacagaaaaaaagcatgtaaacaaaattattaaattatggttttaataaaatccatatatatgaatttggacacgtgtatacacaagtaaagccagagaaaatgacagaatataacgtatgttgaaatgatagcaatgactaccactaaaaaaaaatcagaatagaatggtaatttaaaataaatataagacagcagtgggcaggatgaggacacatttaaatctacataatactgcaytgtgtaagctaaatttttcaagacctgcttgtgtaattatttttaaaaagaaaacaggtttgtttccttgtgttgagaattattcaacatggaaagtgctacctaaaagaagagagagctcattgactccatttgttctaaaaaacaaaccaacaagcaacaaaaaaccctatatattttatacaagtagaaaccctatatattttatacaagtagaaataactagcaatatatttctatagggagaaataagccagcatattttcaacgttct

SEQ ID NO: 334742 - DNA, 463 bp, Homo sapiens
ccttcttttagatatctatttatggcactttctctcttatctatgttacaacatttttgcatatgtcaaaaattcaattactagtcacatattagtatgtcrtctactcaggaggagtcttagtgatccaaagtgcatgggtagtaccgagagactgatagatctatctaaaatgaagggtatggacattgccataaaagcctcacaatgcatgaaatggataatagatgtgagattccctggggagctgtgtgcacgtgacttccaaaaagctgtcatttcactatgtagaaggacaatatgaatttacatggaaatttatttccaccatcagtaatatattcctattgcaaatgtacattttagagaaagtatattttcagttgaagtgaaaaaaaaagagatgcacaaatagatgtttgaatggcatttgtataattctgggtcaagtttttaggacaag

SEQ ID NO: 334743 - DNA, 463 bp, Homo sapiens
ccttcttttagatatctatttatggcactttctctcttatctatgttacaacatttttgcatatgtcaaaaattcaattactagtcacatattagtatgtcatctactcaggaggagtcttagtgatccaaagtgcatggrtagtaccgagagactgatagatctatctaaaatgaagggtatggacattgccataaaagcctcacaatgcatgaaatggataatagatgtgagattccctggggagctgtgtgcacgtgacttccaaaaagctgtcatttcactatgtagaaggacaatatgaatttacatggaaatttatttccaccatcagtaatatattcctattgcaaatgtacattttagagaaagtatattttcagttgaagtgaaaaaaaaagagatgcacaaatagatgtttgaatggcatttgtataattctgggtcaagtttttaggacaag

SEQ ID NO: 334744 - DNA, 463 bp, Homo sapiens
ccttcttttagatatctatttatggcactttctctcttatctatgttacaacatttttgcatatgtcaaaaattcaattactagtcacatattagtatgtcatctactcaggaggagtcttagtgatccaaagtgcatgggtagtaccgagagactgatagatctatctaaaatgaagggtatggacattgccataaaagcctcacaatgcatgaaatggataatagatgtgagattccctggggagctgtgtgcacgtgacttccaaaamgctgtcatttcactatgtagaaggacaatatgaatttacatggaaatttatttccaccatcagtaatatattcctattgcaaatgtacattttagagaaagtatattttcagttgaagtgaaaaaaaaagagatgcacaaatagatgtttgaatggcatttgtataattctgggtcaagtttttaggacaag

SEQ ID NO: 334745 - DNA, 468 bp, Homo sapiens
tgaactaagaagcaggataaaattatggagaggtggtatgtggrtgagtgcatactcaaaaggatgagaagaaaaatttaaatttgtatatcaactaaaaaataaagaatatttcaaagatcaaaagaggaactgttaagaagtgagtttccactcaataaaaatatatccggtttttctattgtatgtctctcagtataactgaaactcatttttgcatgcagcatagtatattgacagcagaaatattacatgatttttgtctgttttgcaaatatatatcccctattcaataagtgaacactggaatggatagaaacacataatacaaacatgtccacaggatattcacagttgaaacagggacaattatcagataatgagcatggcttgaggactgcaaaactccctcaaaattcctcgcacataaatataaccttttttggttcacctgcataatcagtccaa

SEQ ID NO: 334746 - DNA, 468 bp, Homo sapiens
tgaactaagaagcaggataaaattatggagaggtggtatgtggatgagtgcatactcaaaaggatgagaagaaaaatttaaatttgtatatsaactaaaaaataaagaatatttcaaagatcaaaagaggaactgttaagaagtgagtttccactcaataaaaatatatccggtttttctattgtatgtctctcagtataactgaaactcatttttgcatgcagcatagtatattgacagcagaaatattacatgatttttgtctgttttgcaaatatatatcccctattcaataagtgaacactggaatggatagaaacacataatacaaacatgtccacaggatattcacagttgaaacagggacaattatcagataatgagcatggcttgaggactgcaaaactccctcaaaattcctcgcacataaatataaccttttttggttcacctgcataatcagtccaa

SEQ ID NO: 334747 - DNA, 468 bp, Homo sapiens
tgaactaagaagcaggataaaattatggagaggtggtatgtggatgagtgcatactcaaaaggatgagaagaaaaatttaaatttgtatatcaactaaaaaataaagaatatttcaaagatcaaaagaggaastgttaagaagtgagtttccactcaataaaaatatatccggtttttctattgtatgtctctcagtataactgaaactcatttttgcatgcagcatagtatattgacagcagaaatattacatgatttttgtctgttttgcaaatatatatcccctattcaataagtgaacactggaatggatagaaacacataatacaaacatgtccacaggatattcacagttgaaacagggacaattatcagataatgagcatggcttgaggactgcaaaactccctcaaaattcctcgcacataaatataaccttttttggttcacctgcataatcagtccaa

SEQ ID NO: 334748 - DNA, 468 bp, Homo sapiens
tgaactaagaagcaggataaaattatggagaggtggtatgtggatgagtgcatactcaaaaggatgagaagaaaaatttaaatttgtatatcaactaaaaaataaagaatatttcaaagatcaaaagaggaactgttaagaagtgagtttccactcaataaaaatatatycggtttttctattgtatgtctctcagtataactgaaactcatttttgcatgcagcatagtatattgacagcagaaatattacatgatttttgtctgttttgcaaatatatatcccctattcaataagtgaacactggaatggatagaaacacataatacaaacatgtccacaggatattcacagttgaaacagggacaattatcagataatgagcatggcttgaggactgcaaaactccctcaaaattcctcgcacataaatataaccttttttggttcacctgcataatcagtccaa

SEQ ID NO: 334749 - DNA, 604 bp, Homo sapiens
caaggaaaatacagacactctgatatacagattgaattacagcacatctcttccctcttagaatttataatctagtagggaatatgagacattgatgtatgacaattgttatagaataaaaaatacctttgattaggtcctaaagcatagttaaaaccatgcatgtcataggcattttacaaaattatcaatagtggtgggaccgattagaaatgagttcatcaaattacagaataaggaggcatttgcaggtctatatacatgacactactcattcagtctcatctgggttactctactacatttctgccaaactcacacataacaacatacaggagtggcaaatacttcacctgttaaggtaagtcatttgagcagctgtgagattcaatattccaataaagaagcttagatttaaatgtgttagaggatacaaaattgcagctagataggaggaataagttctagtgttctataccattgtaggatgacaatagttaacattaatatattatatagctttamatagctagagggagaatattgaatgttcccacacaaagaaatgataaacttttgagataatggatatggtaattattcc

SEQ ID NO: 334750 - DNA, 604 bp, Homo sapiens
caaggaaaatacagacactctgatatacagattgaattacagcacatctcttccctcttagaatttataatctagtagggaatatgagacattgatgtatgacaattgttatagaataaaaaatacctttgattaggtcctaaagcatagttaaaaccatgcatgtcataggcattttacaaaattatcaatagtggtgggaccgattagaaatgagttcatcaaattacagaataaggaggcatttgcaggtctatatacatgacactactcattcagtctcatctgggttactctactacatttctgccaaactcacacataacaacatacaggagtggcaaatacttcacctgttaaggtaagtcatttgagcagctgtgagattcaatattccaataaagaagcttagatttaaatgtgttagaggatacaaaattgcagctagataggaggaataagttctagtgttctataccattgtaggatgacaatagttaacattaatatattatatagctttacatagctagagggagaatattgaatgttcccacacaaagaaatgataaacttttgagatratggatatggtaattattcc

SEQ ID NO: 334751 - DNA, 565 bp, Homo sapiens
cattaagcgacagaacattggttcttgtgtcataattaggctgcatctcacataccagaaatatattttgtaccgttgggtgaatgaaagagaatcttttgtgttatgccaataaaatgtagttttttttgttatggaagctacttttttctaactaatgtgactatcctaagagaaatttggagccattgagcagttttaaggaataaaatagatgccaatttaattgattttagaaagatattcttctggctacagactgaagatggaatttgagactaggcaaagtggatgcagatattccaactaggagacttttgcaatagttaygatgagttgatgatagcttggaacttgaacaagaccaaaccttgattagcaatatctgtgcttaagctttgcttacaacagagaaaaaaaagattcatgacttactacttgttctttcttgatgcagacaatcctattgtttcctactgtcatgacatgtggccaataaaactgatggaaataccattaactaatgaaagtcataggtgaaaaagactcatgaacttgtattctg

SEQ ID NO: 334752 - DNA, 565 bp, Homo sapiens
cattaagcgacagaacattggttcttgtgtcataattaggctgcatctcacataccagaaatatattttgtaccgttgggtgaatgaaagagaatcttttgtgttatgccaataaaatgtagttttttttgttatggaagctacttttttctaactaatgtgactatcctaagagaaatttggagccattgagcagttttaaggaataaaatagatgccaatttaattgattttagaaagatattcttctggctacagactgaagatggaatttgagactaggcaaagtggatgcagatattccaactaggagacttttgcaatagttatgatgagttgatgatagcttggaacttgaacaagaccaaaccttgattagcaatatctgtgcttaagctttgcttacaacagagaaaaaaaagattcatgacttactacttgttctttcytgatgcagacaatcctattgtttcctactgtcatgacatgtggccaataaaactgatggaaataccattaactaatgaaagtcataggtgaaaaagactcatgaacttgtattctg

SEQ ID NO: 334753 - DNA, 565 bp, Homo sapiens
cattaagcgacagaacattggttcttgtgtcataattaggctgcatctcacataccagaaatatattttgtaccgttgggtgaatgaaagagaatcttttgtgttatgccaataaaatgtagttttttttgttatggaagctacttttttctaactaatgtgactatcctaagagaaatttggagccattgagcagttttaaggaataaaatagatgccaatttaattgattttagaaagatattcttctggctacagactgaagatggaatttgagactaggcaaagtggatgcagatattccaactaggagacttttgcaatagttatgatgagttgatgatagcttggaacttgaacaagaccaaaccttgattagcaatatctgtgcttaagctttgcttacaacagagaaaaaaaagattcatgacttactacttgttctttcttgatgcagacaatcctattgtttcctactgtcatgacatgtgkccaataaaactgatggaaataccattaactaatgaaagtcataggtgaaaaagactcatgaacttgtattctg

SEQ ID NO: 334754 - DNA, 576 bp, Homo sapiens
actgtagtcaccatgttgcacagtagatctcctcaacctgctcttcctgtctcagtaaaatttcgtatgcttttgaccaacatctcctcracccctactgtccccaaacccctggtgaccagcattttgttctctatttctctgagtttggctgttttagattctagttacaaatgagatgatgaggtatttgtttgtctgtgcctggcttatttcacagtttatccatgttgtcacaaatcaccaggattttcttctttcttaaggctgaattgtattctactgtgtataccgcattttccttatccattctttcattgatgaatacttagtttgattctatatcttaggttttgtgaataatgctgtaatgaatattgtggtgcagctatctattcaacatactgatttcatttcctctggatatgttcccagaaatgagattgctggatcatatggtagttctatttctagttttctgaggaacctccatactcttttccataatggttgaactaatttacattcccagcaatagcacacaagggttccctgtctctacatccacacgaacac

SEQ ID NO: 334755 - DNA, 584 bp, Homo sapiens
tatcttactaatgttcaagtatacattatgtggttattaactgtagtcaccatgttgcacagtagatctcctcaacctgctcttcctgtctcagtaaaatttcgtatgcttttgaccaacatctcctcaacccctactgtccccaaacccctggtgaccagcattttgttctctatttctctgagtttggctgttttagattctagttacaaatgagatgatgaggtatttgtttgtctgtgcctggcttatttcacagtttatccatgttgtcacaaatcaccaggattttcttctttcttaaggctgaaytgtattctactgtgtataccgcattttccttatccattctttcattgatgaatacttagtttgattctatatcttaggttttgtgaataatgctgtaatgaatattgtggtgcagctatctattcaacatactgatttcatttcctctggatatgttcccagaaatgagattgctggatcatatggtagttctatttctagttttctgaggaacctccatactcttttccataatggttgaactaatttacattcccagcaatagcacacaa

SEQ ID NO: 334756 - DNA, 500 bp, Homo sapiens
agctccagtgttaggtgcatatatatttcagattatgataatttccagttggactaatgcttttatcgttatattatatccctctttgtcttkaattgttgttgccctgaagtctgttttgtctaatataaaaataactactcctgctcacttttggtttccgtttgaatggaatatctttttccatcccttgaccttaagtttatgtgagtccttatgtgttagatgagtctcttgatgacagcagatacttggttggtggatttgtgtccattctgtcattctgtatcttttaaacggagcatttaggccatttacattccatgttagcattgagatgtgaggtactgttctattcatcatgctagttgttgcctgaataccttgtttatttttaattgtgttattgttttataggccctgtgagatttatgctttacagaggttctattttgatgtattttgaggctgtgtcaagatttggaactccttttagcatt

SEQ ID NO: 334757 - DNA, 500 bp, Homo sapiens
agctccagtgttaggtgcatatatatttcagattatgataatttccagttggactaatgcttttatcgttatattatatccctctttgtctttaattgttgttgccctgaagtctgttttgtctaatataaaaataactactcctgctcacttttggtttccgtttgmatggaatatctttttccatcccttgaccttaagtttatgtgagtccttatgtgttagatgagtctcttgatgacagcagatacttggttggtggatttgtgtccattctgtcattctgtatcttttaaacggagcatttaggccatttacattccatgttagcattgagatgtgaggtactgttctattcatcatgctagttgttgcctgaataccttgtttatttttaattgtgttattgttttataggccctgtgagatttatgctttacagaggttctattttgatgtattttgaggctgtgtcaagatttggaactccttttagcatt

SEQ ID NO: 334758 - DNA, 690 bp, Homo sapiens
gttatcattagtaattctgtaggctccatattgcctaaggacctaaagatatgatatgtattccctgtgtgtgagataacaatctctatagtcaatttcagtttgacttatataatatccttgattttattttctcaaaattatgcctgtttacttggtacttgcttttaaaatggtattcaccgaagctttaacatccagtgattaacagtgagagagagtaaggctctttttaaaccaccagagtgtgttagggtagtactgagtcaaagtctaagagttttatggttaaaaaaacaaataactttttactgctgctcatttaagtaggattttatgttgttcccaagatgggagtctacaggcaactaataagcgggaakaagtgactgtgaagacaaaccagctgcatcaaactgcaggcacctcaggaatcagcagatcatgcagggcacaaagaggtgaaaccagtcaagtgtacagtggagacgatttctcaattttttttccttggaatactagcatcactcaaaaatgtcaatagtgtttggtgaacaaaataagctttttaaattaaatgtacagaaatccctgcttatcagaatgacaccttgaattttcataatacatattagtatacccaagtaaagaagcctgtctaatttttctgagatctttatttctcccaat

SEQ ID NO: 334759 - DNA, 583 bp, Homo sapiens
gataatgacaaatgaaattatgmaggtaattctgagcaattgcaaaaactcacaaacaacagtctaaatatttggagctttatactctaaatactggggagccactaaagatttttaaagtagaacaatgaagaattggtgcattacaaaaattagttgacaatcatatttagactttatttgaaagataaggaaaaatgatagaggcaagggaatcaattgaccagctattgtgatatctcaattttgaaaaataattaaaaattagaatgaagggatctatgtaaaaggaagccaccaagagaagtaattaattcataggacatgatgattaatggatgtggatgaggaggaaaaaggaggttgaaagaaagtagtaaaaactggcaagagagtccatgtctgaataagaagataaaatgtcacactgattaatactttaactgaccaaatcaatacagtgagattgtttgtggaagaatattgcaaataatttaggagctttaaaattgtggacttattctgatgcctccacctaaattgtctggtatcaaaacttgctgatggttgcatcatgttccag

SEQ ID NO: 334760 - DNA, 583 bp, Homo sapiens
gataatgacaaatgaaattatgaaggtaattctgagcaattgcraaaactcacaaacaacagtctaaatatttggagctttatactctaaatactggggagccactaaagatttttaaagtagaacaatgaagaattggtgcattacaaaaattagttgacaatcatatttagactttatttgaaagataaggaaaaatgatagaggcaagggaatcaattgaccagctattgtgatatctcaattttgaaaaataattaaaaattagaatgaagggatctatgtaaaaggaagccaccaagagaagtaattaattcataggacatgatgattaatggatgtggatgaggaggaaaaaggaggttgaaagaaagtagtaaaaactggcaagagagtccatgtctgaataagaagataaaatgtcacactgattaatactttaactgaccaaatcaatacagtgagattgtttgtggaagaatattgcaaataatttaggagctttaaaattgtggacttattctgatgcctccacctaaattgtctggtatcaaaacttgctgatggttgcatcatgttccag

SEQ ID NO: 334761 - DNA, 583 bp, Homo sapiens
gataatgacaaatgaaattatgaaggtaattctgagcaattgcaaaaactcacaaacaacagtctaaatatttggagctttatactctaaatactggggagccactaaagatttttaaagtagaacaatgaagaattggtgcattacaaaaattagttgacaatcatatttagactttatttgaaagataaggaaaaatgatagaggcaagggaatcaattgaccagctattgtgatatctcaattttgaaaaataattaaaaattagaatgaagggatctatgtaaaaggaagccaccaagagaagtaattaattcataggacatgatgattaatggatgtggatgaggaggaaaaaggaggttgaaagaaagtagtaaaaactggcaagagagtccatgtctgaataagaagataaaatgtcacactgattaatactttaactgaccaaatcaakacagtgagattgtttgtggaagaatattgcaaataatttaggagctttaaaattgtggacttattctgatgcctccacctaaattgtctggtatcaaaacttgctgatggttgcatcatgttccag

SEQ ID NO: 334762 - DNA, 491 bp, Homo sapiens
aatattcttactgcacccttttctggaatgatttctaacttttatgctataatcatagctaaaactctgagataaataagacattaatcttaatattgtggctgggtattattggtgagttatttcctttattgaccaggaagtgttgttattcrgggtgatggtggtggtggtggtggtggcggtggcagtggtgtgtgcctgtgtcagtgtgtatgtgtgtcgcacgcgcgtgtgtgtgtgagtgtgtacatttatttaggagaaaaagagagtatatcaaatatatgatggccagaaaggcgtattgtttatttggtgatcaatgagaaaaatcgtaggtttttgtttgtttgtttttcaaacacatagtagaagtatgtttgactagcccctttgaaattaggcatggctttggccactgtaatgggagcagaagttacatgtatcaatttttaggtggaattatcaaagccagtattgattaacca

SEQ ID NO: 334763 - DNA, 528 bp, Homo sapiens
tgatgataaaatatacttcaatattccacacaaactgcttgttattttaagaggatcaaacttgtactccagaattggtacgaattttattaacaagctacgtttctctgctaaaatcaccttacatctagtttctgataaaattagcacatatttaaagttagtgcaacaatttaagtccaatrgagcagaaattaagctctgcacaaagtataataaaaggaaaaaacataataagaaggccaaaacagacaggagtatgtagtaactttttaggggtttgaatgaccccactattcagccagctggagatattttggaaccttgttaatggattggaatatttctggcacatattctgacaacaataaaagttgaattaaatgaataatgctgtgtttatgtttttagatttactatacattttacctaataatcagtagttatatgaaccttccaccaattaagtggtgagaacattttgcaaatttgacacccctttattaaatacctttttcaattaaccca

SEQ ID NO: 334764 - DNA, 528 bp, Homo sapiens
tgatgataaaatatacttcaatattccacacaaactgcttgttattttaagaggatcaaacttgtactccagaattggtacgaattttattaacaagctacgtttctctgctaaaatcaccttacatctagtttctgataaaattagcacatatttaaagttagtgcaacaatttaagtccaatggagcagaaattaagctctgcacaaagtataataaaaggaaaaaacataataagaaggccaaaacagacaggagtatgtagtaactttttaggggtttgaatgaccccactattcagccagctggagatattttggaaccttgttaatggattggaatatttctggcacatattctgacaacaataaaagttgaattaaatgmataatgctgtgtttatgtttttagatttactatacattttacctaataatcagtagttatatgaaccttccaccaattaagtggtgagaacattttgcaaatttgacacccctttattaaatacctttttcaattaaccca

SEQ ID NO: 334765 - DNA, 533 bp, Homo sapiens
cctcatgttacattatgctctccattgggttcttatgttataccatccctttaaaatattctctctctctctttctctctctctctctctstgtgtgtgtgtgtgtgtgtgtgtgtgtgtgtgtgtgtctcaaaaatagcattcacgtcagaggactcattgcgaaattcctagaattggacaaagtaattaataatagcaggtacaccaggtagaaggctgactctgctttccatgttataaaccagtaagttgagagaaatgattttttttgatacgctgaagtatagccatttgggacaacttgttctagaacacacaagctcatgtgcttgacatggttaagcaaattatttccaatgtaactcagaattattacatgagtgtttggggagactggcctgtgttgggacacttagaattttggaatctgattcagtattcaatcaaaacaagcttttatgcacttcatttctgttgaattaaatgcaaaatgatcattatttttgaaacccttatttttaatgtacaaa

SEQ ID NO: 334766 - DNA, 501 bp, Homo sapiens
taaaataaacactaaaatttaattaaaaaataaattaaaaaaatgaaaaaatatatcagtcattgactttattgccctgataacgtagcaatggcaacttcacatgttgacttaaaactttgattgtcaacctttggtgtttgcaggatacttaaaaaaactggattatttaatgacactcttgaaggaattaaagtataaaaaagttatagaatattgaaaacatatttccatacttattgaattagttgtttttaatttgaggagaaccaaaaaactctttactgtcctgaccatattctctgatacagtmataatgcaaatttcttacaatttctggcatatagggcatctttctttaacactagcatgcctttacacgaagccttatcacttctttgcagcaacttgttccacaactcactgagtgtgcattgttctgccagagacatcactgtaagagtatgtcgtgtcaaatgtagcaaaaattgtttttatatg

SEQ ID NO: 334767 - DNA, 501 bp, Homo sapiens
taaaataaacactaaaatttaattaaaaaataaattaaaaaaatgaaaaaatatatcagtcattgactttattgccctgataacgtagcaatggcaacttcacatgttgacttaaaactttgattgtcaacctttggtgtttgcaggatacttaaaaaaactggattatttaatgacactcttgaaggaattaaagtataaaaaagttatagaatattgaaaacatatttccatacttattgaattagttgtttttaatttgaggagaaccaaaaaactctttactgtcctgaccatattctctgatacagtaataatgcaaatttcttacaatttctggcatatagggcatctttctttaacactagcatgcctttacaygaagccttatcacttctttgcagcaacttgttccacaactcactgagtgtgcattgttctgccagagacatcactgtaagagtatgtcgtgtcaaatgtagcaaaaattgtttttatatg

SEQ ID NO: 334768 - DNA, 501 bp, Homo sapiens
taaaataaacactaaaatttaattaaaaaataaattaaaaaaatgaaaaaatatatcagtcattgactttattgccctgataacgtagcaatggcaacttcacatgttgacttaaaactttgattgtcaacctttggtgtttgcaggatacttaaaaaaactggattatttaatgacactcttgaaggaattaaagtataaaaaagttatagaatattgaaaacatatttccatacttattgaattagttgtttttaatttgaggagaaccaaaaaactctttactgtcctgaccatattctctgatacagtaataatgcaaatttcttacaatttctggcatatagggcatctttctttaacactagcatgcctttacacgaagccttatcacttctttgcagcaacttgttccwcaactcactgagtgtgcattgttctgccagagacatcactgtaagagtatgtcgtgtcaaatgtagcaaaaattgtttttatatg

SEQ ID NO: 334769 - DNA, 501 bp, Homo sapiens
taaaataaacactaaaatttaattaaaaaataaattaaaaaaatgaaaaaatatatcagtcattgactttattgccctgataacgtagcaatggcaacttcacatgttgacttaaaactttgattgtcaacctttggtgtttgcaggatacttaaaaaaactggattatttaatgacactcttgaaggaattaaagtataaaaaagttatagaatattgaaaacatatttccatacttattgaattagttgtttttaatttgaggagaaccaaaaaactctttactgtcctgaccatattctctgatacagtaataatgcaaatttcttacaatttctggcatatagggcatctttctttaacactagcatgcctttacacgaagccttatcacttctttgcagcaacttgttccacaactcactgagtgtgcattgttctgccagagacatcactgtaagagtatgtcrtgtcaaatgtagcaaaaattgtttttatatg

SEQ ID NO: 334770 - DNA, 483 bp, Homo sapiens
cagggcacagcaaaaacaccacttctgaacaccccaatcccctggaccacatctagaggactacagaaggtaagagggagaattctcaaagttgtagttatccataatcctaccccttcttatcaagaggaggagaaaggcattgaactctctctcatccctgccttttacagatggttctggaatatggacaaaaggaaaggagaaaaatggctaaggtgccagaggaaattcccaaagcagcctgcattccctcataaatcaaatgtataacatggaactcacctgacacttatatcatcttttcagtgctccaatggtcatacccacaaagaaaagggatccaggcaacaagaggatggagggtagattggtcttggacccggagtttargtcaaggtgatgttgaggactttgagacaagagtgtacattttagttattgaattacatcacagaaataatcacaccagcctatattttt

SEQ ID NO: 334771 - DNA, 344 bp, Homo sapiens
agattttgggaaggatagtataatttaacaaacaacagagagtgtgaccattcagactgctttttcctgtcaaccacttgaatgcaaaacctgtttcagagatgaagcaatagaaagtrttggaagcaagacagataggagttggaatcccaaccattgccatgggtgaccactaaacctcagcttcctcatcggcagtatggggataaccatagtagcaaacatttctaaaggtaattgtgagaagtacttttatgactgcacaattaatgctgcttctactaccattacaactgctgctattctattactatcagtgcctctattactatcagagccacaga

SEQ ID NO: 334772 - DNA, 344 bp, Homo sapiens
agattttgggaaggatagtataatttaacaaacaacagagagtgtgaccattcagactgctttttcctgtcaaccacttgaatgcaaaacctgtttcagagatgaagcaatagaaagtgttggaagcaagacagatasgagttggaatcccaaccattgccatgggtgaccactaaacctcagcttcctcatcggcagtatggggataaccatagtagcaaacatttctaaaggtaattgtgagaagtacttttatgactgcacaattaatgctgcttctactaccattacaactgctgctattctattactatcagtgcctctattactatcagagccacaga

SEQ ID NO: 334773 - DNA, 344 bp, Homo sapiens
agattttgggaaggatagtataatttaacaaacaacagagagtgtgaccattcagactgctttttcctgtcaaccacttgaatgcaaaacctgtttcagagatgaagcaatagaaagtgttggaagcaagacagataggagttggaatcccaaccattgccatgggtgaccactaaacctcagcttcctcatcggcagtatggggataaccatagtagcaaacatttctaaaggtaattgtgagaagtacttttatgactgcacaattaatgctgcttctastaccattacaactgctgctattctattactatcagtgcctctattactatcagagccacaga

SEQ ID NO: 334774 - DNA, 344 bp, Homo sapiens
agattttgggaaggatagtataatttaacaaacaacagagagtgtgaccattcagactgctttttcctgtcaaccacttgaatgcaaaacctgtttcagagatgaagcaatagaaagtgttggaagcaagacagataggagttggaatcccaaccattgccatgggtgaccactaaacctcagcttcctcatcggcagtatggggataaccatagtagcaaacatttctaaaggtaattgtgagaagtacttttatgactgcacaattaatgctgcttctactaccaytacaactgctgctattctattactatcagtgcctctattactatcagagccacaga

SEQ ID NO: 334775 - DNA, 554 bp, Homo sapiens
atgcacaatggcagcattgtagagttcttatgactyccaggcacagagtctatgtcattccacactcaaggttaacattgtcatgagaggcaagctaagtgtatacggaacctcagcttggaaaagccccagctctgagctcactctaccttttacccctagttgtttaggtgttcactcaggggtatacgacttgcctccatactctaggatgcctgtatattatcagcacatattactcaaaaagcaactgcttcagccagtcctatagcccctggctggattctcacttatcttgatccaaaaaagtaaactcttagcaattctttgagttaatgttacaagaataattacccatgggcaaaccttagatgtccaggagatgagaggaaagtccacagatccagttattcaccctttccatccatgagattatccagaagcaggcgtgaaaaagcaggacagcatggtttgaagaagaacaaaaaagagttgcaaatagaaggaaaagtatgttttgggaaataaaaccctaaaggaataaaaaagaatgt

SEQ ID NO: 334776 - DNA, 634 bp, Homo sapiens
caacaaatgcttgcctctgaaaaaatactattcacttcttgtattaatgagactttatccaatttaatttcatatattggatgaggttaggcattcattagaacaagtcatgacaggctagcatttgtatttattaatagtatggtagatattgatctttttttcttctgaacaacaggcattctattttctaactattctttcctcgtttcatgtgattttgatgaggctataaatcacaggaccctgctctttcagcttagyctaattttggcacaaagtatgcatttaataactgataacaattattactactattgtaattattactattattgtagttataggtactaattgggatttgttgagagtcccatatttgctctatggaataaaccaaaagttgatcaactctttctgtaaagggccagatagtctatgttttgggctttgaggacattatgttctctgccataaccacttaactctgccattgtaacataaaagtaaccagacagtacatcaaaaaatgaatgtggttttgttccaataaaactttagctgtgaatatggaggtgggtttgatgtaatttgagggccatagtttgccaaaccccagaaaaaagcatacaaa

SEQ ID NO: 334777 - DNA, 564 bp, Homo sapiens
ctttacaggtaattaggtcatgagagtggagcactcattagtggtattagtgcccttataagaagacacaggatagagtgtgcttcctctttatctttttccaccatgtgaggaagccgtggaagaaggtgatcatcagaacctaaccatgctgacaccctgctttcagaatttcagcctccagaactgtaagaaatacatttctgttgtttaagccacccagtaattcgttatagcagcctgaaccaactaagtcagctttcattatttgtttctttatgatttgctgatcttgttttgtgcttcacaaagatccacataaaacrtcgatccccccagtagttcacttgcagttggtcaatttcctgcagcagagctaatcaactcattgcagactctccttgcctttctattctagctgatctaagtttgatctgtaaagtatagtttctatgtcaactttaattttgctatgcactttttccatgtctttaaaactacataaacacatgtaatatttaaacactgtggtctattctaatctatgaaaagcctattattctg

SEQ ID NO: 334778 - DNA, 595 bp, Homo sapiens
gtgttataacacattctttgccaatccttgaaataaatgcttagcaaggtaatcttttagttgtatcaggaggaaaagctatttgctttctgtcatcacagaccaatcacaggtcctrtttcaacttcatttattaatattgagtcaggtatgctgctcagattcctttgtatatgctaaactgtctccacaaattggtgtttaatgtctacaagaaaaaaaaaagagtggctatatttgtagcaaaaggtaaactcattgattttcatctccagaagcaatacaaggatgatttatttccttgagagataatttcttatatgtatagtaatcaaggatagcaacacaaatgaaaatgtaattatgagtactgcataccatattggtttttttcttctatttcttctgtttttgttaattgtcaaagccaagagtatgtcaagctgagaaaatgtcattaatgaggatatagattaaatggtctgtgggtaattaatgatgactgcaatgtctttctcactttctgcataaaacatggggtttattgctttctctctttgaacctgggttagctctgtgactgcttcatcagtaa

SEQ ID NO: 334779 - DNA, 595 bp, Homo sapiens
gtgttataacacattctttgccaatccttgaaataaatgcttagcaaggtaatcttttagttgtatcaggaggaaaagctatttgctttctgtcatcacagaccaatcacaggtcctgtttcaacttcatttattaatattgagtcaggtatgctgctcagattcctttgtatatgcwaaactgtctccacaaattggtgtttaatgtctacaagaaaaaaaaaagagtggctatatttgtagcaaaaggtaaactcattgattttcatctccagaagcaatacaaggatgatttatttccttgagagataatttcttatatgtatagtaatcaaggatagcaacacaaatgaaaatgtaattatgagtactgcataccatattggtttttttcttctatttcttctgtttttgttaattgtcaaagccaagagtatgtcaagctgagaaaatgtcattaatgaggatatagattaaatggtctgtgggtaattaatgatgactgcaatgtctttctcactttctgcataaaacatggggtttattgctttctctctttgaacctgggttagctctgtgactgcttcatcagtaa

SEQ ID NO: 334780 - DNA, 595 bp, Homo sapiens
gtgttataacacattctttgccaatccttgaaataaatgcttagcaaggtaatcttttagttgtatcaggaggaaaagctatttgctttctgtcatcacagaccaatcacaggtcctgtttcaacttcatttattaatattgagtcaggtatgctgctcagattcctttgtatatgctaaactgtctccacaaattggtgtttaatgtctacaagaaaaaaaaaagagtggctatatttgtagcaaaaggtaaactcattgattttcatctccagaagcaatacaaggatsatttatttccttgagagataatttcttatatgtatagtaatcaaggatagcaacacaaatgaaaatgtaattatgagtactgcataccatattggtttttttcttctatttcttctgtttttgttaattgtcaaagccaagagtatgtcaagctgagaaaatgtcattaatgaggatatagattaaatggtctgtgggtaattaatgatgactgcaatgtctttctcactttctgcataaaacatggggtttattgctttctctctttgaacctgggttagctctgtgactgcttcatcagtaa

SEQ ID NO: 334781 - DNA, 595 bp, Homo sapiens
gtgttataacacattctttgccaatccttgaaataaatgcttagcaaggtaatcttttagttgtatcaggaggaaaagctatttgctttctgtcatcacagaccaatcacaggtcctgtttcaacttcatttattaatattgagtcaggtatgctgctcagattcctttgtatatgctaaactgtctccacaaattggtgtttaatgtctacaagaaaaaaaaaagagtggctatatttgtagcaaaaggtaaactcattgattttcatctccagaagcaatacaaggatgatttatttccttgagagataatttcttatatgtatagtaatcaaggatagcaacacaaatgaaaatgtaattatgagtactgcataccatattggtttttttcttctatttcttctgtttttgttaattgtcaaagccaagagtatgtcaagctgagaaaatgtcattaatgaggayatagattaaatggtctgtgggtaattaatgatgactgcaatgtctttctcactttctgcataaaacatggggtttattgctttctctctttgaacctgggttagctctgtgactgcttcatcagtaa

SEQ ID NO: 334782 - DNA, 388 bp, Homo sapiens
gttacttgaaggatctctaatcartggagataggatatgatgaaattggacacgaatgtgttagatagcatattagttgtggatgttacacaaagaagcactctcctcaaataagtttgagacactcagtgataaggaagttacacagtttctttattgcagtacttctccaagacctagttatgctgatgtgaattgttattctgtggtgaagggtagtatttctcaaagttaggcaacaaatcattgaactttaagaaagacagaagtgtattttatgtactattttatcctcaatgcttcccataatatctgacacataagtgatatcaataaacaacatttgactgaatttaaataatccatgagatttggtttctgtgccact

SEQ ID NO: 334783 - DNA, 388 bp, Homo sapiens
gttacttgaaggatctctaatcaatggagataggatatgatgaaattggacaygaatgtgttagatagcatattagttgtggatgttacacaaagaagcactctcctcaaataagtttgagacactcagtgataaggaagttacacagtttctttattgcagtacttctccaagacctagttatgctgatgtgaattgttattctgtggtgaagggtagtatttctcaaagttaggcaacaaatcattgaactttaagaaagacagaagtgtattttatgtactattttatcctcaatgcttcccataatatctgacacataagtgatatcaataaacaacatttgactgaatttaaataatccatgagatttggtttctgtgccact

SEQ ID NO: 334784 - DNA, 388 bp, Homo sapiens
gttacttgaaggatctctaatcaatggagataggatatgatgaaattggacacgaatgtgttagatagcatattagttgtggatgttacacaaagaagcactctcctcaaataagtttgagacactcagtgataaggaagttacacagtttctttattgcagtacttctccaagacctagttatgctgatgtgaattgttattctgtggtgaagggtagtatttctcaaagttaggcaacaaatcattgaactttaagaaagacagaagtgtattttatgtactattttatcytcaatgcttcccataatatctgacacataagtgatatcaataaacaacatttgactgaatttaaataatccatgagatttggtttctgtgccact

SEQ ID NO: 334785 - DNA, 388 bp, Homo sapiens
gttacttgaaggatctctaatcaatggagataggatatgatgaaattggacacgaatgtgttagatagcatattagttgtggatgttacacaaagaagcactctcctcaaataagtttgagacactcagtgataaggaagttacacagtttctttattgcagtacttctccaagacctagttatgctgatgtgaattgttattctgtggtgaagggtagtatttctcaaagttaggcaacaaatcattgaactttaagaaagacagaagtgtattttatgtactattttatcctcaatgcttcccataatatctgacacataagtgatatcaataaacaacatttgaytgaatttaaataatccatgagatttggtttctgtgccact

SEQ ID NO: 334786 - DNA, 558 bp, Homo sapiens
tgtgtgtgttcaaaactgcagaccaggggttagtaaacttgccttctaaggggccagattataaacaggttcagctttgcaggccacattatctctgtcacaactactcaactttggcattataatacaaaagccatcattgtatgtaaaccaatacatgtgactgttctaatccaacttgattttaaaaagcaagcagtggtcaaatttgctacaatttcccattgcagaccattgagaaaattttggcttttgctttaattgagatgaagtgtagggtagttttaaaaaaactgtggcatattctttagatttcttcccattgagaggtgtctctacatcttgmcttcattttggctggacttatgacttcttctacacatgtactatggtagaaatgatgctatgcgacctctaagcctagttaataaaaaagcatacaacttccactgttttctttgtatcctccctctagagaaaaccaactaccatgtaagtatatggctaccttgaggccactgaattggagaaaccacattgaaaaatctcacaagtagg

SEQ ID NO: 334787 - DNA, 558 bp, Homo sapiens
tgtgtgtgttcaaaactgcagaccaggggttagtaaacttgccttctaaggggccagattataaacaggttcagctttgcaggccacattatctctgtcacaactactcaactttggcattataatacaaaagccatcattgtatgtaaaccaatacatgtgactgttctaatccaacttgattttaaaaagcaagcagtggtcaaatttgctacaatttcccattgcagaccattgagaaaattttggcttttgctttaattgagatgaagtgtagggtagttttaaaaaaactgtggcatattctttagatttcttcccattgagaggtgtctctacatcttgccttcattttggctggacttatgacttcttctacacatgtactatggtagaaatgatgctatgcgacctctaagsctagttaataaaaaagcatacaacttccactgttttctttgtatcctccctctagagaaaaccaactaccatgtaagtatatggctaccttgaggccactgaattggagaaaccacattgaaaaatctcacaagtagg

SEQ ID NO: 334788 - DNA, 558 bp, Homo sapiens
tgtgtgtgttcaaaactgcagaccaggggttagtaaacttgccttctaaggggccagattataaacaggttcagctttgcaggccacattatctctgtcacaactactcaactttggcattataatacaaaagccatcattgtatgtaaaccaatacatgtgactgttctaatccaacttgattttaaaaagcaagcagtggtcaaatttgctacaatttcccattgcagaccattgagaaaattttggcttttgctttaattgagatgaagtgtagggtagttttaaaaaaactgtggcatattctttagatttcttcccattgagaggtgtctctacatcttgccttcattttggctggacttatgacttcttctacacatgtactatggtagaaatgatgctatgcgacctctaagcctagttaataaaaaagcatacaacttccacygttttctttgtatcctccctctagagaaaaccaactaccatgtaagtatatggctaccttgaggccactgaattggagaaaccacattgaaaaatctcacaagtagg

SEQ ID NO: 334789 - DNA, 547 bp, Homo sapiens
ttttatatttatataaatgtgtatgtgcatatgtacatacacacacacacacacatatatatrtttgtgtttgttatgtatttatacacacatacatccatacctgccatgagttgaaggtgttccccaaaaagcatgttggaaatttaataaccaatgcaacaacattgggaagtggggcctaacgagaggtgttttggtcagaagagctccatacttataaatggaataatactgtttatgaaagacttcagcctgcatgtcctatcacttgctttctcatgcatgtgcatttttgtccttccaccatgggaagcagcaagaagactgtcaccacatgcaggatctttgacattggacttcccagcctccagaaccttaagatctgttctttataaattactccatctcaggtattctgctatgcaaccccaaacagattaagataaataaatggtactgggaagtgggactgttgctataacaaataccagaagatgtgagaagggctttgaaacagggtaaagagtagagactggaagaattt

SEQ ID NO: 334790 - DNA, 547 bp, Homo sapiens
ttttatatttatataaatgtgtatgtgcatatgtacatacacacacacacacacatatatatatttgtgtttgttatgtatttatacacacatacatccatacctgccatgagttgaaggtgttccccaaaaagcatgttggaaatttaataaccaatgcaacaayattgggaagtggggcctaacgagaggtgttttggtcagaagagctccatacttataaatggaataatactgtttatgaaagacttcagcctgcatgtcctatcacttgctttctcatgcatgtgcatttttgtccttccaccatgggaagcagcaagaagactgtcaccacatgcaggatctttgacattggacttcccagcctccagaaccttaagatctgttctttataaattactccatctcaggtattctgctatgcaaccccaaacagattaagataaataaatggtactgggaagtgggactgttgctataacaaataccagaagatgtgagaagggctttgaaacagggtaaagagtagagactggaagaattt

SEQ ID NO: 334791 - DNA, 547 bp, Homo sapiens
ttttatatttatataaatgtgtatgtgcatatgtacatacacacacacacacacatatatatatttgtgtttgttatgtatttatacacacatacatccatacctgccatgagttgaaggtgttccccaaaaagcatgttggaaatttaataaccaatgcaacaacattgggaagtggggcctaacgagaggtgttttggtcagaagagctccatacttataaatggaataatactgtttatgaaagacttcagcctgcatgtcctatcacttgctttctcatgcatgtgcatttttgtccttccaccatgggaagcagcaagaagactgtcaccasatgcaggatctttgacattggacttcccagcctccagaaccttaagatctgttctttataaattactccatctcaggtattctgctatgcaaccccaaacagattaagataaataaatggtactgggaagtgggactgttgctataacaaataccagaagatgtgagaagggctttgaaacagggtaaagagtagagactggaagaattt

SEQ ID NO: 334792 - DNA, 547 bp, Homo sapiens
ttttatatttatataaatgtgtatgtgcatatgtacatacacacacacacacacatatatatatttgtgtttgttatgtatttatacacacatacatccatacctgccatgagttgaaggtgttccccaaaaagcatgttggaaatttaataaccaatgcaacaacattgggaagtggggcctaacgagaggtgttttggtcagaagagctccatacttataaatggaataatactgtttatgaaagacttcagcctgcatgtcctatcacttgctttctcatgcatgtgcatttttgtccttccaccatgggaagcagcaagaagactgtcaccacatgcaggatctttgacattggacttcccagcctccagaaccttaagatctgttctttataaattactccatctcaggtattctgctatgyaaccccaaacagattaagataaataaatggtactgggaagtgggactgttgctataacaaataccagaagatgtgagaagggctttgaaacagggtaaagagtagagactggaagaattt

SEQ ID NO: 334793 - DNA, 484 bp, Homo sapiens
aaagaaaaggacagtgcctagagacagcaggagtggatgctaggggcaaggygtaatattaaaccgaaactcaatcagccaattacagcctgacgtagtcaccccttaagagattgttttaaaagacatttggatcttttctgacttgagagttatataacctgtgcaataactacaccttgttttgggaagctaaatgagattaaaaaaacagagaaatgtatgaaatgctggtatcttctacaacaatgatcaattttacacagcttcccctagcccttgaattatcagtcttccatcttccaacataatttggaagcatgttattttatgaaaagaaggaacaacaattactcctcaaattatgcttaaatttttatagttttgatagctatatctctccaaaatattcaaaaacctggtaatcacataggtccgttgacttgcttttcttttccttataatgaagaagtttgataacatg

SEQ ID NO: 334794 - DNA, 484 bp, Homo sapiens
aaagaaaaggacagtgcctagagacagcaggagtggatgctaggggcaaggtgtaatattaaaccgaaactcaatcagccaattacagcctgacgtagtcaccccttaagagattgttttaaaagacatttsgatcttttctgacttgagagttatataacctgtgcaataactacaccttgttttgggaagctaaatgagattaaaaaaacagagaaatgtatgaaatgctggtatcttctacaacaatgatcaattttacacagcttcccctagcccttgaattatcagtcttccatcttccaacataatttggaagcatgttattttatgaaaagaaggaacaacaattactcctcaaattatgcttaaatttttatagttttgatagctatatctctccaaaatattcaaaaacctggtaatcacataggtccgttgacttgcttttcttttccttataatgaagaagtttgataacatg

SEQ ID NO: 334795 - DNA, 599 bp, Homo sapiens
atcagacctcctaacatctagtgcttttcaccttcaataagctgccctaggtacccttttggcatttgaccaatctagttcaatccttcatatgcacagaagtatgcaactatatataattaatagaactattttttcaatgtccaagggagaagtaattgttccagaccctccccacttttcttcccacttgcaactcccaaacactgtgctctcagtggccaacaggcaagggacctacttgtcacacccatacatatatgggtatttaggaataatcgtgccttcttgagctaaaaacatagaaaaccaagtttgatttatcgaatgaataatacatcayactctatagatatcttgttttatgcagcacatatatatcagaaaattttacgtatgtacctatatatgttttgtatatatatgtttatatatatatatcatgccttctttcactaaaaacatagaaaagcaagtttgatttaaagaatggataatacagatatcttattttatgcagcacatatatattaggaaattgtatatatgtacatatatctatatatgtgtaaatatatattttacatatatacacaaca

SEQ ID NO: 334796 - DNA, 577 bp, Homo sapiens
aataatcgtgccttcttgagctaaaaacatagaaaaccaagtttgatttatcgaatgaataatacatcatactctatagatatcttgttttatgcagcacatatatatcagaaaattttacgtatgtacctatatatgttttgtatatatatgtttatatatatatatcatgccttctttcactaaaaacatagaaaagcaagtttgatttaaagaatggataatacagatatcttattttatgcagcacatatatattaggaaattgtatatatgtacatatatctatatatgtgtaaatatatattttacatatatacacaacagaaaggaagttagaaaaacaaagataaacttcaactacttcattttctacctagactttcctactcctggaaattttttatataaaattttacttcagttgcattattaatttgaatactccaatgatatttttataaagacaacgcattttttgtaaaktttgctgtgttcttttttgtagcttttttacatttatgttttaatagagtgggctttattaagtcaggatacttctattgtagattaagta

SEQ ID NO: 334797 - DNA, 563 bp, Homo sapiens
cataaacaccttgcagcattggaggggctgaaggaagaccatctgaccagtcaactttgcagactgcttgtgctgagcacacagyggcagcctgacgtcaagtgcactgggaatcacaggaattgtattcatcattctgcattctcgaactgctgcagttagcactgggaacagaaacaacccataagtgctctgctgaaaacaaacaaacaaaacccccctcaagtttatcagtgttaaaacttttggcttcctttacattcctgggacaatggtggaagttacccatctgctacttagaatgttacagaaatgtcacgttcaactgcccaaacacgtgtgccattaaaaatgtggcatatacatccaagtagaataagacctatttgcatgccattctaataaggatgcatgtattacctactctgggtagcagagacttaactgaaatatcagatagagtctttctgcagtggacacttctaacttttataattatgtaaaaagttgttaaataaatctgatttggtttccttttacctttccattccaggcccaagtca

SEQ ID NO: 334798 - DNA, 563 bp, Homo sapiens
cataaacaccttgcagcattggaggggctgaaggaagaccatctgaccagtcaactttgcagactgcttgtgctgagcacacagcggcagcctgacgtcaagtgcactgggaatcacaggaattgtattcatcattctgcattctcgaactsctgcagttagcactgggaacagaaacaacccataagtgctctgctgaaaacaaacaaacaaaacccccctcaagtttatcagtgttaaaacttttggcttcctttacattcctgggacaatggtggaagttacccatctgctacttagaatgttacagaaatgtcacgttcaactgcccaaacacgtgtgccattaaaaatgtggcatatacatccaagtagaataagacctatttgcatgccattctaataaggatgcatgtattacctactctgggtagcagagacttaactgaaatatcagatagagtctttctgcagtggacacttctaacttttataattatgtaaaaagttgttaaataaatctgatttggtttccttttacctttccattccaggcccaagtca

SEQ ID NO: 334799 - DNA, 550 bp, Homo sapiens
ttcactgcagccttgacctccctagctcaagcaatcctcccacttcagcctcccaagtagatgggactagaggtgcatgccaccacacgcaggtaattttttttctattttctgtagagatagggtttagccatgttgcctaggctggtctcaaacttctgggctcaagcaatcctcctgcctcagccttccaaagtactgggattacaggcatgagccactgcacctggctgattcagcattgtttattgatggcctgctacatgccaagcctttggctggtactgagaaaaagtaacccacaatttagaatcatcctataataatggtaattaagtgctgaatctttctctgattcacttgtcacacaatgactcttatgactctgtattakgctgcttatccaagtgtcacaatagtatcatgaacaaggtctcaagaaagaagagtttgaggagaaatccttacaaagacaaagaaaatgcactcacctcgggaaggaaaagcaaataaataaaaagacaaggagaagaacaggctagaagaagaa

SEQ ID NO: 334800 - DNA, 541 bp, Homo sapiens
atttctgcaaattataagcacacctttaaattaaagaatattgctctttctttagactccttaaaaacaagtttgtatcagatgtatagcagtcagttccgcttagctggccctcactgagtgcctgttcacaccaggcactgaggaaacaaggagcttcacctctccctcaaggagctcagagtcgaaggaggagacagacttcccttatatgaattagaacaagcaagagtagaatcaagtgcaaaggaaagaggaagcagaaattgcctgtcccctcaaaaagtaaaggaagactttcagaagaggggacactcaatccaggttttgagggatgaacaggagtttgccgacaggacaaagaagagacggacatttgaaacagaaggaatgggatgtaagaaggcaccaagaaagatgctgctaatgagaattattttawgtgcagagtagtgtatgtaatccttcattaatatattaataaacatatttataaataattttctatgtgtcctaagtactctgggagtaagcaaaggaa

SEQ ID NO: 334801 - DNA, 475 bp, Homo sapiens
gttatagaagcttctactcactttatttttatttatttatttatttatttatttgagacagagtctccctctgtcacttaagctggagtacaatggcgcaatcatagctcactgcagccttgagctcccaggctcaagcaatcctcccacctcagccttcccagtgtcygggactacaggcatgtgccaccacacccagctaatttttgtattttttgtagagacagggttttgccatgttgcacaggctggtctccaactcctgggctcaagcgatttgccctcctcgacctcccaaagtccattataggtatgagccattgcactcggccctccactcactttttaaatgaaataagccattacagatcaagttaaagccccttttaataccactccagacccctggttctctctgttcccagaggcaatgttatctgaattttatgggtattcttctcatcatttcacacac

SEQ ID NO: 334802 - DNA, 669 bp, Homo sapiens
aaataacataagtagagattttagtgatccttgtacataagaattttccaaacatggattttattgctaatgacattatggatataacaggtggaattgagctttgaaccactaagttacaacatgcataccaacagttaagctgaccctcacttgattttaaattattgaaccattttaatgactgtgtcagaagaaatgcaaatgactgctaatttagaaaagctacatttctgtcatctaaaatccatttatagctgggatgatttagaattaatctttccattttatgcttgggtacgggcatgaaggacatgcactaaaatgtaatctaatcttcaggatcttcagaacattacttcagtgctcctttagacattatttttcatttgtgatggtagtttcccagtacggtaaggattgcccacrtttttatgtcctctgtttaggcctcaggcttaggaagaatgaaaccaaacactctggtgattggatataagaaaaactggaggaaagctcccttgacagagattgagaactacgtgggaatcatacagtaagtgatggctttcaagacgtgttcttgtttataaagcactaagcagggcagtacataacttgtactgcacataacactgttgtgtcagattaaattgcctgagaagagta

SEQ ID NO: 334803 - DNA, 575 bp, Homo sapiens
ttctggggtatgctaaacattttctatcaagcttcttcaaaacaaagtcaggagcaaaacaagtgcagaataaatcacctttagtggcacaaggacctgaagccacatagtgatacagaggcactgctcaccacagtatccctgcaatagatatgaagaatttggtccaactattttttacaaccccaagcttttaagagtctacagggtctaaagcaatatggtccaagtttgcagcctgtgcttagttagcttcttcccactccaccttaacctgcaaaaaagcctagaggctgctgttagagacagggtatggccaagagcttcaaaagaaccagcctttaataccttgactcattcccactgctgcccttaacctccttccactttcccttctccttgagcatggccagagagatcacagcctctcrtggctgactacccttctaaccatacttggaacgagagagcctgccaacaactatggagcattcactttacataggggagcttaccaaacagcccagaccagagcattctggatggagccagggtgagttcagtggctgtgactc

SEQ ID NO: 334804 - DNA, 436 bp, Homo sapiens
aactgctgcaaacccttcatcatgtaataaaatcagaaggtcttaattttttctaagggtattgaacttaatcattcatatatttaaatataacacatgtaaagtccctagcacatctgttattattgttatacatggtaacaattcatggcatggttgacyacatcctaattcccttttgatataccactgttctattttaatagccaagatcattaaatgcctaagtgtgatttttttaataggctagggaaacaaaaataactttttattgctttaaaaatactatacttttttaaaaaatgtgttactacctttttaatccattgatttgaaatgctagtagcctctcatcaaactatagctactagtcatgtatggctatttgcttgctgaagtttaacagtagcagacataaatctaaaagttactctta

SEQ ID NO: 334805 - DNA, 591 bp, Homo sapiens
ccttttggtactgcaaaaaaggcatatattcatttgtttgatggtgtcccaagttgcataggctttcttccctttttttctttttattcttctgcctggctaatttttaaaaacacatctttatgtgccttgattcttctgtctgatgaagtctgctgctgaaggtctctatggaatttttcagtacaatcattatgttcttcagctccaaatttctatttggtttttgttttgtttttctttattgaacttgtcattgtgtttatgtattgtttttctgatatcgtttagttgtctgtgttctcttgtagcttactaaacttctttaagataattattttgaagtctttgtcaggaagtttataggtcttcgtttctgagagtcagttattggtactttatttttttcctttggtggtktcatgtttccctgattatttgtgatccttgtggatctgcagtagtgtctgcatttgaataagtgggcaccttttccagtctttatagactgacatctccagtgaaaggccttcaccagtcagcttgtccagagactctgagcagagtagccagcagggtctgcaggcaggc

SEQ ID NO: 334806 - DNA, 555 bp, Homo sapiens
ctggtgatggggcaggtctggaggctaggtccactggtgacaacctggatccctgaaccatgagggctggcctggagcctggggctacagggggtaaactgtctctggaggaaacccagagcctgagttcactggggtgggactgatgctggtgtccacagtggtgggccagcctggtactaggtggacctggagcctgtggccataagagttgtcctggtgctgaggtaggcctagaagctaggtcttcagggactggtctagagcctatggctacaggagccagcctgatgttggggtrgacctggaacctgaggccatgatggctggcctggcactgtagtgggcttggaagctgggtccatgggggctagccttggtcagagtgagccttgtaacacacaatgttagattatatcaccccttgcttagaactctctaataacttcccatctctccctttctctccctttctctctctctctctctctctttctctttcacacacacacacacacaaataacaatcccaagtccttccctcagtctgcttac

SEQ ID NO: 334807 - DNA, 555 bp, Homo sapiens
ctggtgatggggcaggtctggaggctaggtccactggtgacaacctggatccctgaaccatgagggctggcctggagcctggggctacagggggtaaactgtctctggaggaaacccagagcctgagttcactggggtgggactgatgctggtgtccacagtggtgggccagcctggtactaggtggacctggagcctgtggccataagagttgtcctggtgctgaggtaggcctagaagctaggtcttcagggactggtctagagcctatggctacaggagccagcctgatgttggggtggacctggaacctgaggccatgatggctggcctggcactgtagtgggcttggaagctgggtccatgggggctagccttggtcagagtgagccttgtaacacacaatgttagattatatcaccccttgcttagaactctctaataacttcccatctctccctttctctccctttctctctctctctctctctctytctctttcacacacacacacacacaaataacaatcccaagtccttccctcagtctgcttac

SEQ ID NO: 334808 - DNA, 497 bp, Homo sapiens
tactctccttacacgtattttctggagccatagtacatgcattctcccagttggatgccagaagctcccaaatttagcacttttccctggccttccaattttcggatgtcattatccacttcacatcttaatcactaaacctgctcaaatttcaaactaaaatactatggtggggtgtgggtgtgtaggctacaatgttactgaaagagaacctagcattctcacaaaacagyccattaggttacatctgtctataattagctggataataccttgggtccaaaaggtggaatacagtttagagaaatgtcaatggattaggaataggagagtacagaattctaagttctgtccatgaccatttgcggtaggttccagagagaagggctgtgattacttccttaggagaagaaaatcttgcaaaataaaagtgagaaggtgttagggaaaacgctgtctgttctgtttaagaatggttctgactttataacattttt

SEQ ID NO: 334809 - DNA, 566 bp, Homo sapiens
ctgttccttctctggttccttcctctaaatcttagcagtctgtggtctcatcccactctggagcaaagccaattctaacccrtactgtttcttctacttttgcactcccataccatttactttactatgttgcacacatagcacaaagatcttcaaatttattgttctaaggatttgtttatactcttaaaaattattgaggaccccaaagatcttttgctagtataagttatagctatactgcttactgtagtagaaattaaaaacaaaagtatttttaataataatgtattaatttattttaaaataaccccatttcatgttaacttaaaaaaattttaataaagatagttattatattttccaaaacaagaaaagataatgagaagtgttgtgttgtgttatatttttgcaaatctcttttatgtctggcttaatagaagacagctggaatttcagtctatgttccttctattgttatatattgttttgattaaagtatttgaagaaaatctggcctcaaacaatttgcagttgtaacaggtaaattattttaaaagctttct

SEQ ID NO: 334810 - DNA, 550 bp, Homo sapiens
ccttacctatgaaaaataactgaatatttttgattaagttattcaattaaaaaataagatccaactatgtgctgcaaacaagacattcactctatctgtaacgacatacacagactgaaaataaaaagatggaaaatgatgtcccatataaatggaaattaaaaaaagcaggagtagctatacctatgtcagataaatataggcattaagtaaaaaaactgtaaaaagaatsaaagatggtcattatataatgataaaggagtcattttagcaagaggatataataattgtaaatacatatgcactcaaaaccagagcacctaaatatagaaatcaaataatattctatctaaaaggagtgatagactgcaacataagaattgtaggggacttagcattccactttcagcaatggacagatcatccagacagatccatcaaagaaacatgagatttaaaatgcactctagatcaaatgaatctgagatttgcagaacatttccactcaacagctgcagaatacacatccttttcatcagcacatggaact

SEQ ID NO: 334811 - DNA, 489 bp, Homo sapiens
gaggattttgaccagagaagtgacttctttggatascatgtggaatgcagactatgatggagcaagatgtattgacggaaccagttactcctttattgcaatagctcagagagacagaggattggaacagaataacagtagtggaggccacatttggatatagtttaaggtagagccaatagatttgctaatcaattggaagtgtgaagtgagataatgagggtttagtcatgagaaatgagacaaatggagatgttactcatttaggtaggaaagattatggaaaggacaaatttggggaggaaaacgagattgctttggacatattaagtttgaaatgcctataacatatgcaagtagagttattgagtaggcaatttgatatgagttagaattcagagaaagtttagggctagagatacacatttgaaggtcatcagcataaaaatggtatttaaagttatagaactggatgggttattattattt

SEQ ID NO: 334812 - DNA, 605 bp, Homo sapiens
tcatgagaaatgagacaaatggagatgttactcatttaggtaggaaagattatggaaaggacaaatttggggaggaaaacgagattgctttggacatattaagtttgaaatgcctatwacatatgcaagtagagttattgagtaggcaatttgatatgagttagaattcagagaaagtttagggctagagatacacatttgaaggtcatcagcataaaaatggtatttaaagttatagaactggatgggttattattattttagttttaccttaaagtcttttatcctgaaaactttatgaggcttcagaaataccagtccctctgaaaacttgtatgtttttatttaattagaaaggggcctcactgtcttggccaggctggtctcgaactcctgtcttcaggcaatcctcctgcctcagccttccaaagagctgggattacaagcatgagccaccattcccagtctggtcattattattttatatattaaattgtttttgtttgtttcaaaactatatcaataaaatttacttcatctgaaacaaacaaataagttataggattggatgaggttccctaggaaataattgtaaacaggtgaca

SEQ ID NO: 334813 - DNA, 494 bp, Homo sapiens
ggagtctggaatggcttttctcactctattctggatatccctactccaatcttcttcaataatagatgcaggggcttaattctggtgtgccccccaccscttactcccccatgtagccatctgccttgtgatcagcaaagaaacctcttttctttgggcactcttttttcatgtcccctctcccaagtcccttcagtttatatgttttgccaaccctccttttacttcctatccaaattcaatcatttatctctgtctggttgagctgggagggttctggatactgtgaaaggaggagagacagatatgaagctctgaagaagcattcactctctagcatcagggtgattatttaaaaggctagtagaccttttacactgtcaaaattaatgtctgcaagaaaggtttccatatattattacgctaaaaggcacctatctccttctgtcatcctagcttcagaatgtgtgaaacctcagaaaggatttgtggga

SEQ ID NO: 334814 - DNA, 494 bp, Homo sapiens
ggagtctggaatggcttttctcactctattctggatatccctactccaatcttcttcaataatagatgcaggggcttaattctggtgtgccccccaccccttactcccccatgtagccatctgccttgtgatcagcaaagaaacctcttttctttgggcactcttttttcatgtcccctctcccaagtcccttcagtttatatgttttgccaaccctccttttacttcctatccaaattcaatcatttatctctgtctggttgagctgggagggytctggatactgtgaaaggaggagagacagatatgaagctctgaagaagcattcactctctagcatcagggtgattatttaaaaggctagtagaccttttacactgtcaaaattaatgtctgcaagaaaggtttccatatattattacgctaaaaggcacctatctccttctgtcatcctagcttcagaatgtgtgaaacctcagaaaggatttgtggga

SEQ ID NO: 334815 - DNA, 494 bp, Homo sapiens
ggagtctggaatggcttttctcactctattctggatatccctactccaatcttcttcaataatagatgcaggggcttaattctggtgtgccccccaccccttactcccccatgtagccatctgccttgtgatcagcaaagaaacctcttttctttgggcactcttttttcatgtcccctctcccaagtcccttcagtttatatgttttgccaaccctccttttacttcctatccaaattcaatcatttatctctgtctggttgagctgggagggttctggatactgtgaaaggaggagagacagatatgaagctctgaagaagcattcactstctagcatcagggtgattatttaaaaggctagtagaccttttacactgtcaaaattaatgtctgcaagaaaggtttccatatattattacgctaaaaggcacctatctccttctgtcatcctagcttcagaatgtgtgaaacctcagaaaggatttgtggga

SEQ ID NO: 334816 - DNA, 609 bp, Homo sapiens
cagactataattggtgcaatatgaaccagcgtagatgattttcatttaatgagtgccttgtccaaatgactctggaatcatttccaaatctgaattgattcaaattgtgactatttatgaatgatgatgggttaggtggatgtttcatggagccctgtagacatatgcaggagggccaggagaggagcagcagtaggatccttgcacatccagcactcagcagatgaaggctttggtaactggacaatctaatggtcccaggccagcaagcacagagctgtcactcatcccgagtgaagcctgtccctgcttgtgactcatagtaaaatttaatgctgactctgcaatggagaaagtgagactggtttgtctccagctctgcttacacttttcattaatagagggaaagcaagtccagkcctgggtttgtatctgtatgaaacagaatcataaaatagctgggttctacattcagcagggctcagtacaagtatggtaccacagtcttgtgataatcagtgctatcataaaaaattgaaggaacaaatttggccctgtgtaaaacaggtttcttctacagcactaacaaactcttaatgaataaaacag

SEQ ID NO: 334817 - DNA, 570 bp, Homo sapiens
cactcatttatgaacagcatggggaatcttcactacaaggcaatctgctgtatacttcatttatttagcatggtttggactatatacaaatgtaatatacaaaggcaataatttcttattagattttgtctaggtcttgtagtcttatctttttggctgaaataaaaataaatccttagagaaacagaactggggtcacagtatctcttttaaagccattttcrcaataagtatttataaacaatttccagaacaattaataatctgtactaaattgaagtgaattcaggtaatgacttttaaaacaaaagcaagaatagtttcctcagaaaaaaggtagcagggtttttgactattagacattcagtaatgaatatttgagtcaaattttataaggcatttctgtatagctatccaccctttcacctaaaattcataatggagttcaaaattgaaaataatattgcctatctagctatttcaatatcaaatcccataaagaaaaaatgaagggaatgtaaggtaagaattaaatatgtgatagagaaactagtagataatctatgtgaa

SEQ ID NO: 334818 - DNA, 604 bp, Homo sapiens
cgtgcatcaaaccatcaagaaagtgaaaagacaacccacataatggagaacattcctattgacaaaatcacatatctgataagagtctagtatccacaatatatcaagaaytttcacactcagtaataaaaagaaaaattaatttaaaaatgggcaactaataatcatatgaaaaggtgctcaatatcattactcattagagaaatgcaaatcaaaaccataatgagattccactcatatccacatagatggctataatcaataaaacagacaagagcaagtattggcaaggattctgagaaactggaacccgcatacactgcaggtaggagtgtaaaatgatgcagaaaccttgaaaaacagtttgccagtatcacaaaaagttaaatatagagttacaagaaattccacttctacacatataagccaagggaactgagaacatatattcatgcaaaaacttgtatacaaatgttcatagcagtattgttacggatagccaaaaagtggaaacaatcaaagtgctcatcagcatctgtctgaataaacaaaatatggtatatctgtagaatggaatattattcacccatgaaaagcaataaaa

SEQ ID NO: 334819 - DNA, 558 bp, Homo sapiens
atttatgctctggtatttattatgttcttctactaaatttaaacttagtttgctctttttatagttccttgaggtgtaaagttaggttgtatctgaggtctttctttttcttaatgtaggcatttatcactacaaattgccttgttagacttgcttttgctgcatcccataatattggtatgttatgtgtccgttttcacatgtctcaagattttcttttctaatttcaggagactgttagttaattttcacatatttatgaattttccaatttttatcctgttattgacttttagtttyatactactgtggtttgaaaagatacttgacatgataacaatctttttaaatttgttagtgcttgttttatggcctaacatatgatctatcccagacaaagttccatgtgcatttgagaaaaatgtgttttttgctattgttacatgaaatattctgtatacgtctgttatatcatattgttcaagtattgttcaagttcactatttcattagtgatatttggtctggatggtctactcattgtcaaaagtagggtatt

SEQ ID NO: 334820 - DNA, 558 bp, Homo sapiens
atttatgctctggtatttattatgttcttctactaaatttaaacttagtttgctctttttatagttccttgaggtgtaaagttaggttgtatctgaggtctttctttttcttaatgtaggcatttatcactacaaattgccttgttagacttgcttttgctgcatcccataatattggtatgttatgtgtccgttttcacatgtctcaagattttcttttctaatttcaggagactgttagttaattttcacatatttatgaattttccaatttttatcctgttattgacttttagttttatactactgtggtttgaaaagatacttgacatgataacaatctttttaaatttgttagtgcttgttttatggcctaacatatgatctatcccagacaawgttccatgtgcatttgagaaaaatgtgttttttgctattgttacatgaaatattctgtatacgtctgttatatcatattgttcaagtattgttcaagttcactatttcattagtgatatttggtctggatggtctactcattgtcaaaagtagggtatt

SEQ ID NO: 334821 - DNA, 558 bp, Homo sapiens
atttatgctctggtatttattatgttcttctactaaatttaaacttagtttgctctttttatagttccttgaggtgtaaagttaggttgtatctgaggtctttctttttcttaatgtaggcatttatcactacaaattgccttgttagacttgcttttgctgcatcccataatattggtatgttatgtgtccgttttcacatgtctcaagattttcttttctaatttcaggagactgttagttaattttcacatatttatgaattttccaatttttatcctgttattgacttttagttttatactactgtggtttgaaaagatacttgacatgataacaatctttttaaatttgttagtgcttgttttatggcctaacatatgatctatcccagacaaagttccatgtgcatttgagaaaaatgtgttttttgctattgttacatgaaatattctgtataygtctgttatatcatattgttcaagtattgttcaagttcactatttcattagtgatatttggtctggatggtctactcattgtcaaaagtagggtatt

SEQ ID NO: 334822 - DNA, 526 bp, Homo sapiens
agcaaatggtaaatgtaagataaaattgtatttttattaacaaaattcacctggcttacccatacctgttcatgtgctcagayacagaaagaagtacatgtactcagacacatgactctgggactctggagttctttgttccaattgcagcctgttgaggcttgagtaagttagacaatggctgcagagagaatctctgaatctataaaaacacaaggcatgtctgagtggatgaatcgactgcctcctctcaaagatatgaagatatgatgtttttacagcctaagccccattgcacattcacattagccttgggactagtcccatccaagctttgaatttacctagaaggggccaggtataccttttattctgaggtcagagtaatggaggtatgtgagccaacatacacacaaacacacacacctacacacatatacatgtgtgcacacacacatatccaaatttaacataaatccaaagaatcactcttagggagtcttccatggagacttggttggatatt

SEQ ID NO: 334823 - DNA, 614 bp, Homo sapiens
ctactgtataatatgcctttgagtgattattgaataattacttccatagaaacacaaaataattaaatacatctgtgttctattaaaagttcacaagttgtatgcccttcttcctgatattagtaaataatatgatcaataagattgtcttttaaacaggaaaaaaatacctttggacttctaaatgacttataaaaataagttttaaaccaacttttgtaagcaccttggattttcaggcggaaaaaaaccttaaaaccctaatggttattttcattggaaaaaaaaaaaaaatttttaataattttaacccccaattggtaaggatcaaagaaatacagatttcaaaatataatggattactattgagattaaataaatatttacttagtaccatgtgacatactttcgtacaaattgacttattttagctataaaacaactcatgatgactaaatattggttttgaggtgaaagtgcrcctctacaacagccagctatttggttgtttgcaaaacttgattgtttgcaacccttggttccactcatgattgtaattatgtttttacctagaacactgaaagatgcaatttaaggaattgctatttaggacc

SEQ ID NO: 334824 - DNA, 561 bp, Homo sapiens
ttaaaatggagcaaataatatatttagccattaatcacaaagttagcttaagatttkctcagcaagcaccacgggtgtgtcaccttgtaaccaatcattgactaagtggtatttctgtaggagagatagaaagtactatgacattaatgaggcatcattttataggtaggaaatttgattgcattagtgctttttggtttcaactccagagtgtcaacagactcacagattgttaattcccattgcacccctagattaacatcagattgatctagtttttcagtctgtgtattagtccattctcacactgctataaagaactgcttgagactgcgtaatttacaaaggaaagaggcttaactgactcacagttccacagggctggggagatctcaggaagcttacaatcatggtggaaggggaagcaaacccgtccttctttgcatggcagcaggaaggagaagtgccaagcaaagggggaaaagccccttataaaaccatcagatctcaagaggactcactcactatcacaagaatggcatggaggtaaccgcccatatg

SEQ ID NO: 334825 - DNA, 561 bp, Homo sapiens
ttaaaatggagcaaataatatatttagccattaatcacaaagttagcttaagattttctcagcaagcaccacgggtgtgtcaccttgtaaccaatcattgactaagtggtatttctgtaggagagatagaaagtactatgacattaatgaggcatcattttataggtaggaaatttgattgcattagtgctttttggtttcaactccagagtgtcaacagactcacagattgttaattcccattgcacccctagattaacatcagattgatctagtttttcagtctgtgtattagtccattctcacactgctataaagaactgcttgagactgcgtaatttacaaaggaaagaggcttaactgactcacagttccacagggctggggagatctcaggaagcttacaatcatggtggaaggggaagcaaacmcgtccttctttgcatggcagcaggaaggagaagtgccaagcaaagggggaaaagccccttataaaaccatcagatctcaagaggactcactcactatcacaagaatggcatggaggtaaccgcccatatg

SEQ ID NO: 334826 - DNA, 522 bp, Homo sapiens
taaatatttctggctctattgactttctatgactttttgcaggttgctttctcctcgtcagacacattgcacactttgtatattcaaatacatgtcttattctccattttactcccagtaatagatcgtttaattccagaacagaagccatatggttatagagaaagaggcaggtgaggaaacgaaccctcaccgctaagacttcctggaaggaatcagtaagtctcattcccttaagcagggcatagacccaaacatttcctgggccagaatgctgtatctagggcaccgtggtgcttgcagcaagctggagagcatgtgtcccttctaaaggggcagcttgtacacagctccagctgcctgggaatatggctcagtgttaccaagtctccaggcatttcaaggaaagccaagaatctgtattatgaaaaatttctagatttttgaaaatacaaygtgggccaaacaaaataatgcttatgtgcaaatctggcccaaaccaaataatgcttatgtgcaaat

SEQ ID NO: 334827 - DNA, 433 bp, Homo sapiens
tgcattttgccggagtctattactgtaagttatgtaagttcagtgagaaaggctatttatttgttgctgtttgggcatttaaaggttctttgttttatggacaccttattcatcatatagtgatccacagactttattgatagcagaagcagggagaagtgagctctggctttatagaagttatttattatggaatggagttgcttttaaccatgtgcttgcagagtgcacttacattcatagttaatttttaagatgtgccttgaaagaatgaactcattcaactttgagaataatctrtcagaagttaaatgcataaaactaagttaacatatcctttgaaaataaggattttaatttctacatgttaataacaacttaaaatctataagaaaaaaatttattctttttctaaattcaagaaaaatgttgt

SEQ ID NO: 334828 - DNA, 647 bp, Homo sapiens
agctcaagagatgggtggccaccgataatatgaagggaaacagtgtcagagcagtaatgagctagacatggccacgtaatgagataattagagcactaggagagagaactagctgtgagatgttattataaagagtatctgggaggactcttccactagactttttggagaatccacctagtaacwcttagtgaggagaccagagcctaatattaggaaagcagatctataatggtacctaaaagggttggcacagatcatggtgccagggaaatagcacagctgtattgtggaaaaatacttcaaatgcacattgacaagtggagtatcagaaattaggaagttatccccactggttataagcatggtacaagctgcgctttaaatgcagtcttgggaagttgattagactagcttaaactagaagtactatacccctttccctaacctcaagatacaggggcatgtgaactgtaagacaggtcagggaagactaatagcttattttctgagtctatgcatatgttatgtacacagtgatgagcaaatacagctgggaagaacagcagatgatattgggattggaactgggtgtttatcagactgacatagtaatcctcctttcctgtgaaagtgttctttttaag

SEQ ID NO: 334829 - DNA, 542 bp, Homo sapiens
  misc_feature (1)...(542): n = A,T,C or G
tgtaagttcccttcaaaaatagggcctgactctgactttttgtttccagttttcttttagtgggtggaatacacttgatcttacccaaaaggccgaaaagcgataatgggttsaatacaaagtgagatgtatgtattttacactcaagtgcatgcaaaacacaataacttatatagattaatatgtgtatttcaagcaaaggcagagaaatactaagtatttgttattttggtgtaattcaccctttcacacattttgcatagtctttaaataacaaaactaagcattaggcagacattgagtcaaagaaatttgaaccatacagagagtgaatatgnaaaaaaaaaaccagaagggacttaacatatttttatgttaaagaaatttatgaaaatataaatctattttgactatgacttatacatgacaattgttgccatcaagtaggcaactgatgccctttacagtgtttagaacaaaactagtcctttatacaattttcatgaaaatgttaggtttctgtttgatcagcaggtgctgtt

SEQ ID NO: 334830 - DNA, 361 bp, Homo sapiens
taggttttagatattgcagaaggatgaccagcgttgggtttgtgggatgagaaggaagaggcaggggcaggaggtattgcaaaggaaaaataattagcacttggatagagcagtggatttagagagggggaagttattaataccaacctggatttactatcaagtgctcttaacttgccagaagctgggamtcacttcaggtgtttgtttagaggcagctttgttaccctaccccagactcatagaatcacagcttctagagaagagcttcagaatccatttgcagacctcggtcccagggcttctggtggtcccagctgcctttcggagatggtgacagggctgtcaagtggtgggtgtt

SEQ ID NO: 334831 - DNA, 628 bp, Homo sapiens
tttattaataagtcaatagaaataagaaaagagaagcatcatgaacctctttctcctcctagatgctgggtctttagcatagtgtttttccttactacatcgttttggacttggggttaatggctgggatgtttgaggtgctgatggaatctgaaagcatagatgtggcttaaaaatacaatacataaattgtaatctactaagctataaactagattagaaccgtcaatttttgcctttacttctgttaccagaccctcacttgagccagtgtagtttaccattaatccattcatgtgactcactagtttctactctcaggaattaaactgtccacttggaaaacaggttaacttgactctgagtaggacgtatgaaagatttgcaacatgagayactgattatcttgatttaaaaaacacagcctctattttgcatctgtgttgctatcttctattagtctgaattttaatgctctgacttactatggcttcctgtgctagactactgcaagaatccttatctagggctctgaacctagagaattctgcactgatgtcaactaaaacccctgattcccttctcttctgggagaatcttttttcctttttcaacttttattttaggt

SEQ ID NO: 334832 - DNA, 517 bp, Homo sapiens
ccgcgcctggcctaagttgtggtatttttgtactgtaaacagtaacttttctaagtgcagtgaaaggttttgatagttttccatttgtactttagtatcattccctgctgtaattagtgtggctgaccctgttcatgtagaaaattcctacgtggtagggtttgaagaattccaggagagtagtaagctctggaatagtgaagtcttgaagaaaatctaggttcagaccttgccccgtcatgtgcacagggtcatcttgggtaagagagtagatctctaagagtgacttacaaaattagctcactcacaagtcgatattaagacaatatgaaaacatcattccatcaagtcctcccttgaggccccacacacagctgtctaaaattgtccagtcacttgcattaaraaactgaaggctgcactgccgaaactgtctctttcaataaaaaggtttcctgaagaaaaaacagtgagactctttaccatttccgcattgtgagccacggcatctcaggct

SEQ ID NO: 334833 - DNA, 617 bp, Homo sapiens
catgttggtcaggctggtctcgaactcctgaccacaggtgatccacctgtgtcagcctcccaaagtgctgggattacaggcttaagccaccatgccccaccaatagagagattgttttcaacaaatgatgttagaacatctatatgcagagataaataaataaataaataaataaagccccaccttccctagaaccatataaaatatttaacttgaaaaagatctcagacctaaatgtataacctgaaaattatgaaacttctagacaaaaacatggaagaaaaatcttaaatattgtgcccctgggctagtttgtggtggctaacacttgcaatcccaacacmctgggaggccaaggcaggaggatcacttgagtccaggagtttaagagcagcctggagaacatagggagactctgtctgtacaaaatttttaaaaattagccagttgtagtggttcatgcctgcagtatcagctacacaggagactggggtgggaggatcaattgcttgagtctgggaggccgaggctgcaatgagccatgaccatgcaccactgcactccagcctgggtgacaaagagagcccctatctcaaaaaaacaaaatgttaccttag

SEQ ID NO: 334834 - DNA, 617 bp, Homo sapiens
catgttggtcaggctggtctcgaactcctgaccacaggtgatccacctgtgtcagcctcccaaagtgctgggattacaggcttaagccaccatgccccaccaatagagagattgttttcaacaaatgatgttagaacatctatatgcagagataaataaataaataaataaataaagccccaccttccctagaaccatataaaatatttaacttgaaaaagatctcagacctaaatgtataacctgaaaattatgaaacttctagacaaaaacatggaagaaaaatcttaaatattgtgcccctgggctagtttgtggtggctaacacttgcaatcccaacacactkggaggccaaggcaggaggatcacttgagtccaggagtttaagagcagcctggagaacatagggagactctgtctgtacaaaatttttaaaaattagccagttgtagtggttcatgcctgcagtatcagctacacaggagactggggtgggaggatcaattgcttgagtctgggaggccgaggctgcaatgagccatgaccatgcaccactgcactccagcctgggtgacaaagagagcccctatctcaaaaaaacaaaatgttaccttag

SEQ ID NO: 334835 - DNA, 555 bp, Homo sapiens
ggaaaaacaatgaacataatttaaggacattattaatcaaggcagcttaactgctgtaacaagccacttcaaaatctcagtagcttaacaccatagaagtttattgcrcactgataatacagtccaatggagttgacagagttgagagtggaaatattggttgctgctccttaaattcatgaaagggggcagattgtctccttctaatggctctgctatcttcaacttgtggcctccaaggtcactacagaagcaggaaacagaatggacgagggcgccacgagacttttacagatcagctttgaaagtaatggatgtcacttatcctcatatttcattagccagaagccagtcccggagccatatcctaactacaaggatgctggcgaaaatagtttagctgtgttccgagaaaaaaatgtgaaattattttagtagtgcatgatattgtctttgctgcaaaggaataggtgaatgaagaatagtggttaagaaaagttcataatttgaatttaaatacattaattttgaaaattcaatcaccactttctagac

SEQ ID NO: 334836 - DNA, 555 bp, Homo sapiens
ggaaaaacaatgaacataatttaaggacattattaatcaaggcagcttaactgctgtaacaagccacttcaaaatctcagtagcttaacaccatagaagtttattgcacactgataatacagtccaatggagttgacagagttgagagtggaaatrttggttgctgctccttaaattcatgaaagggggcagattgtctccttctaatggctctgctatcttcaacttgtggcctccaaggtcactacagaagcaggaaacagaatggacgagggcgccacgagacttttacagatcagctttgaaagtaatggatgtcacttatcctcatatttcattagccagaagccagtcccggagccatatcctaactacaaggatgctggcgaaaatagtttagctgtgttccgagaaaaaaatgtgaaattattttagtagtgcatgatattgtctttgctgcaaaggaataggtgaatgaagaatagtggttaagaaaagttcataatttgaatttaaatacattaattttgaaaattcaatcaccactttctagac

SEQ ID NO: 334837 - DNA, 555 bp, Homo sapiens
ggaaaaacaatgaacataatttaaggacattattaatcaaggcagcttaactgctgtaacaagccacttcaaaatctcagtagcttaacaccatagaagtttattgcacactgataatacagtccaatggagttgacagagttgagagtggaaatattggttgctgctccttaaattcatgaaagggggcagattgtctccttctaatggctctgctatcttcaacttgtggcctccaaggtcaytacagaagcaggaaacagaatggacgagggcgccacgagacttttacagatcagctttgaaagtaatggatgtcacttatcctcatatttcattagccagaagccagtcccggagccatatcctaactacaaggatgctggcgaaaatagtttagctgtgttccgagaaaaaaatgtgaaattattttagtagtgcatgatattgtctttgctgcaaaggaataggtgaatgaagaatagtggttaagaaaagttcataatttgaatttaaatacattaattttgaaaattcaatcaccactttctagac

SEQ ID NO: 334838 - DNA, 585 bp, Homo sapiens
tatcagactaataaaataagcagtcacaaagctgtttatctaaacaagactgaaagctcttcaaaagttgaactctgaatgattactgcagaagagttgtgactctcatttaagaggtcattgatagttgtcccttgccagggactatattcgcctagtatttaactaggttcacgggccacctgcagtgtgtaactaagtaaaagtactatgtaccaatgaattcaaggtgtgcaatttattactacttcctggtgcatagccacaggccactccaacaccccagtcccttgtagtagtgaacagaggtcttcagtcagagattgtgcaccatctactatgcaaggcagggctcagcctctggttaattcaactcacctatttatgaaattagtttgcttcatcctattgacatcttatgacaattatgcatagtgcactggtttaactgaaatrcatagtgcttttaaagtttaatgacaattgaagactcagaagaaaagagaaacatatttttcataaaggcagtcacgtatacattttcacttttaagcattctgtttgggtcttagaggagacttgaat

SEQ ID NO: 334839 - DNA, 531 bp, Homo sapiens
ctgggattacaggtgtgagcctccatgcccaacagattatttttttaagttctcacagtgttatgaggtgggtactacaaaatccaacttgcgaaggaagcaactgaggcctggaaacactgagtgtctgacccatagttacacaggcagtaaaggcaaagttaggctctgaacccaggtctgggtgaccccaaatccctgcctctgtggagtgtgcttgaggctgtgggtcagaagacctgaattgggatcctggctttgcacagcgtagctccctgactttgggtacgtttagtctctctgggcttctgtatcctcagttgacagcgtcccatcctcctgtgcccgtcagcagcaggagatcattgccccacaatacgggcattctgcttctgtttcttcctgtctcataggctcatgtgatgactgattyaactgggagaaaactctgggaggatcttactgggcgacagaatgcgcaatggtggggaggctcttgcagagagagagaggagacttaaggtgaatcat

SEQ ID NO: 334840 - DNA, 531 bp, Homo sapiens
ctgggattacaggtgtgagcctccatgcccaacagattatttttttaagttctcacagtgttatgaggtgggtactacaaaatccaacttgcgaaggaagcaactgaggcctggaaacactgagtgtctgacccatagttacacaggcagtaaaggcaaagttaggctctgaacccaggtctgggtgaccccaaatccctgcctctgtggagtgtgcttgaggctgtgggtcagaagacctgaattgggatcctggctttgcacagcgtagctccctgactttgggtacgtttagtctctctgggcttctgtatcctcagttgacagcgtcccatcctcctgtgcccgtcagcagcaggagatcattgccccacaatacgggcattctgcttctgtttcttcctgtctcataggctcatgtgatgactgatttaactgggagaaaactctgggaggatcttactgggcgacagaatgsgcaatggtggggaggctcttgcagagagagagaggagacttaaggtgaatcat

SEQ ID NO: 334841 - DNA, 541 bp, Homo sapiens
ctcaccctggccttaaaaataacgtacatgttaaagttctaactcccagtactccaaaatgtgaccttatttgaaagccaggttgttgcagacataattagttgagatgaggtcagtaggatggacmcctaacccaatatgactttggtccttataaatagggaaaatttggacacaaagacacacacacacatggagaagacaccgtcaagaaacacagggagaacatcaggtgaagatgagggcggagattggggtgatgctcccacaagcccaggaacgccagagattgccaccaaaccgccagagctggagggttgatgctcccacaagccaagtaacgccagagattgccaccaaaccaccagagctgggagagaggcatggaacagattgtcccttgcagccctcagaagggacgaatcctcctgctgacaccttgatcttagattcctagcatccaaaaatgaaagaaatacctgttgtctaagcttcccagtctctggtactttgttacaacagccctagccaatgaatacac

SEQ ID NO: 334842 - DNA, 541 bp, Homo sapiens
ctcaccctggccttaaaaataacgtacatgttaaagttctaactcccagtactccaaaatgtgaccttatttgaaagccaggttgttgcagacataattagttgagatgaggtcagtaggatggacacctaacccaatatgactttggtccttataaatagggaaaatttggacacaaagacacacacacacatggagaagacaccgtcaagaaacacagggagaacatcaggtgaagatgagggcggagattggggtgatgctcccacaagcccaggaacgccagagattgccaccaaaccgccagagctggagggktgatgctcccacaagccaagtaacgccagagattgccaccaaaccaccagagctgggagagaggcatggaacagattgtcccttgcagccctcagaagggacgaatcctcctgctgacaccttgatcttagattcctagcatccaaaaatgaaagaaatacctgttgtctaagcttcccagtctctggtactttgttacaacagccctagccaatgaatacac

SEQ ID NO: 334843 - DNA, 568 bp, Homo sapiens
  misc_feature (1)...(568): n = A,T,C or G
aaaaatcatccattttaggtgtacagtttgataaattttgataattatatgtaaccatgtaaccaccactanttaagatatatgatatccagctcttcatggcatggaaagaaaagatacgtaatatttctcttattctaaaagcttccttgtgctcctttttagttgatcccttcttctgaccctcaagcaaccactgatctgatttctgtcactgcagtaaaatcatacagtatgtagtctttgttctttcgtgtttgacttctttcactcaatgtccttgaaattcatttatattctcktatgtactaatattttgttcctttttactgctgagtggtattcctcagtatgaatatgctataattgttcatttgtatatcaatgagtgagcatttaaattatttccagtgtttggctcttatgaataaaactgctttaatcttcatatacacatctttgtgtggatgtatgttgacattcctcttgagtaaatacctaggagtgaagttgcaaggtcatgtggtaagtctatgtttaacttgacaagactgccatgctatttttc

SEQ ID NO: 334844 - DNA, 568 bp, Homo sapiens
  misc_feature (1)...(568): n = A,T,C or G
aaaaatcatccattttaggtgtacagtttgataaattttgataattatatgtaaccatgtaaccaccactanttaagatatatgatatccagctcttcatggcatggaaagaaaagatacgtaatatttctcttattctaaaagcttccttgtgctcctttttagttgatcccttcttctgaccctcaagcaaccactgatctgatttctgtcactgcagtaaaatcatacagtatgtagtctttgttctttcgtgtttgacttctttcactcaatgtccttgaaattcatttatattctcgtatgtactaatattttgttcctttttactgctgagtggtattcctcagtatgaatatgctataattgttcatttgtatatcaatgagtgagcatttaaattatttccagtgtttggctcttatgaataaaactgctttaatcttcatatacacatctttgtgtggakgtatgttgacattcctcttgagtaaatacctaggagtgaagttgcaaggtcatgtggtaagtctatgtttaacttgacaagactgccatgctatttttc

SEQ ID NO: 334845 - DNA, 568 bp, Homo sapiens
  misc_feature (1)...(568): n = A,T,C or G
aaaaatcatccattttaggtgtacagtttgataaattttgataattatatgtaaccatgtaaccaccactanttaagatatatgatatccagctcttcatggcatggaaagaaaagatacgtaatatttctcttattctaaaagcttccttgtgctcctttttagttgatcccttcttctgaccctcaagcaaccactgatctgatttctgtcactgcagtaaaatcatacagtatgtagtctttgttctttcgtgtttgacttctttcactcaatgtccttgaaattcatttatattctcgtatgtactaatattttgttcctttttactgctgagtggtattcctcagtatgaatatgctataattgttcatttgtatatcaatgagtgagcatttaaattatttccagtgtttggctcttatgaataaaactgctttaatcttcatatacacatctttgtgtggatgtatgttgacattyctcttgagtaaatacctaggagtgaagttgcaaggtcatgtggtaagtctatgtttaacttgacaagactgccatgctatttttc

SEQ ID NO: 334846 - DNA, 539 bp, Homo sapiens
cagagattccattcctaggtatctacctaagagaaacaaaaacctatgtccacacaaagacttaaatgcaaatgctcayagcagtactatcacaatataaaaaaaaaccctgaaaataactcaagtgtctatgaacagatgaatgaagaaaatgtggtatatccatataatagaatattattcagcattaaaaaggaatgaagcacatggtattgtctcaaaagatatttaaaaaaccagccagatgcaaaaagattaaatattgtgatttcatttatgtgaaatgtccaagaaaggcaactctattgagacaaaaagtagacttgtgaggttgggtgtgggaatgggagtgactacaaatgggcaggaggaatctttagggtgggatggaaatgttctaaaattacacagtagtgacagttgcataattctgtaaattcactatgtcactgaattgtatccttaaaatagacaaatgttacagtgtctaaatcatacttcaataaagttgtttaaataaacattatatgcatgtatca

SEQ ID NO: 334847 - DNA, 578 bp, Homo sapiens
aagaagccaggcacaaaaggtcacattttttattccacttatatgacatagccagtatagataaatccatagagacagaaagctgattggtggttgttggggtctatgggtagaagggaatagggagtgagtacttaatggatatagggtttactttaggggtgattaaaattttttggaactagaggtggtrgttggacaacactgaaggtactaaatgccactgaattttacactttattaattttatgtttgtgtatttcactttaattccttgaatgggtttattagtagactgaacacagcagaagagtagtgaactcaaagacagtgcaatagaaactattcaattgaagtacatggagaaaaaataatggaaagaagagaaaacaacacgagagttatgtaggagattgtcagccagtataatattagtgtaattaaaatctcagaaggaaaagagcaagagaatgaggcagaaaaaaaaaactattcaaagtgataatggctgataatttctcaaaagtaatgacagacatcaacccacagatccagtaatctcagtaaaccccaagtag

SEQ ID NO: 334848 - DNA, 535 bp, Homo sapiens
tccattcctgggaatacaactagccagaaaatgtttgatgcttaattgagcatgaatagtgctcaattaaccatcaccatcctcttgtgttattggcatagttaggcattagttaagattggttaccacatgaattatgttttctaccacttagacttcaattttgagacatgactatgattctggaatcattttgatatatgtaagcagtatccttctcaactgtgatagatttcatgaatatgaccatgtccaaggtttggagttaaaattattgaattaattccatgttcagtcaaaacttgctctctgacctttgacaggttcccccacttttctccctctgatgtccttgtctacaaaatgaaaagatattgggaccacaatatcttttaattaactttaatgaattataacttacacatcataaaattaactcactttaagtatgcaatccagaaattttagtaagtttatygaattgtgtaaccatcactgtatttagttttagagcatttccatcattgcagtaaga

SEQ ID NO: 334849 - DNA, 560 bp, Homo sapiens
gtgatccagcaattccatttctgagtatatacctacaataattgaaagcaggtattcaaacagatatttgtatacccatgttcgtagcagcattattcacaaaagctaaaacatggaaacaacttaagcatccatcaattgataaacaaaatgtgctatatacatacaatgggatattattccaccttaaaaagaaaattctgacacatgctacaacttagatgaatcttgaagatattatgctaactaaagccagtcacaaaaggacaaatattgtatgattccacttatatactgagagtagtcaaattcatagaaacagaaagtaggatggtggttgccagaggctggtggggatggagaaaacggggagttagtatctaataagtacagagtttcagtttgggaagatgaaaaatttctggagatggatggctgtgatagttgcagaacamtgtgaaagtacttaatgccatagaactacacacttaaaagtggtttaaatggtaaattttatgtatattttaccacaataaaaaaagtttgccctgcaaaagaca

SEQ ID NO: 334850 - DNA, 578 bp, Homo sapiens
attgtgaacaagaaatatttgttaaacataagcattaaacaattggccaaaatatttcagggtaactctgattactatatgccaattggtctagactactggttctcaggagtttgttgctttttccaaaacaaagattgattggttctaaacctaaaactataaaccagaaggggcactttgtatttaatttcccctatattcatcaataacactaacctccaacaagagaagtgaccacatttggatttgaatcaatcaagtaagaatctcaaaatcaatcttgaatactgtgcttctccattagagagcagagttcaaaccttacttgtggactgtctgccaaggacgaaaggagctattggttgtacagcagtygtgccactagatgcctaagtagcaggaataaggggtaattctacaaatgctgttggctgagcggcatgcctcatggaaacaatattgaaactggtgctcccagtctgaggtgtgcctccaccgatgaatgagaaacctaaatagcagaggagggagaagagccaaaagcaaaaggagtggatgctgtcacctcatgtgac

SEQ ID NO: 334851 - DNA, 644 bp, Homo sapiens
tgtttctggtagctgatggagagtaaggagcgagaataaatatttttatgtcagaattgcctatagattttctgcatattaatcaaaagagttattttcaatgcccgattttcatgttgtttgtatagtatgcagtactacaaactctataggaacaactccagtaaaacatatacaaggtacattaaatgaattactgtattctccaagctaccacgatgtagaggcaaacatcaaatataatcaaatcaccaaagactgtttttttccattttacaaaaagattaaatattaaatgaaaatcaattgcttgtttctgcaagaggtattcccctatatgtaatgtcctcatttctctctgagtgtatatgccagatgtttttttttttaggagaaattttcagtgctaatgatttartagattacctctactcctgccagatgcttttacatgacttaagttataaaatgttgctttgattctccccaaatttacatctgtcccatacattgcacatttggagacaccaagtttcacacaaatgtttttgaattctatttctgaaggcaaatctccaactccattgtttctgttacctgatacaatgtgtatcttaaaataagagtataccaacacagaaaac

SEQ ID NO: 334852 - DNA, 622 bp, Homo sapiens
aaattggcaaagataaagattacatcaggaatggaagaaacaagtgggtgcttaagttgattttatattctaaagtgctcacgttattgaaggtttactgtattctgggccaaaaattaaaaatatatagtaaattcatatctggaatttcaaagtaaggcaccgtcatgtcaaatctgwagagaagaatgcaatgggcatatagcccctcttttaactcctctttttgaaaattctattgtctatttacatatcaaaagcactaaaaaggcaaatagttcaggtcaattgctggaatatgttgactttaaatccgatttaagcaattaagtagcagttatagacattaaattttagtgaacaggaaaggtatactaactctttatggctttagcaaatagtttaatatgacctacatttactgaatagacaagaaagagtatcctccaaaagtgttagtcattaaaatgtacataatatactttattttaataaatattcacatttgtgactttttcaagttttttaattctctaaatatctttcatcaacatgtctttattgtttgtaagggttaaatatgattttaaaaatattttataaattctaaatgctagcaata

SEQ ID NO: 334853 - DNA, 601 bp, Homo sapiens
gctaaattggttgtttccccatggctctttattaattaaatgacatataaagactggaattaagcataaaaattagagtctaccctgcctctaagaaatagatctttttctctctaatgaaaatcagtctgggcaaacaactactgmattgtgctagtaatcagctgaatttttctttactcttcataagattcctaaactccaagcaactttagaatctgctactggaattctgtagggtgtcaaaaatgatgataatgattgttatgttagttgtatgaatttctgatttcaaactttatcaagaaaacagtcagataataggaataaagtttcagatacgtaaaccagagggctcgatagtgtgttgcaaaattacatagtataaaggtgttacatctagcaataaaatataaatggtctactttcaaaaataatgttttagatatcaatatatgtattgcataatttatttttgtgaaaaaatagttttatttatacatatataaatattaaatagctgatgtgtttctgtgcagctattcacagttatagtttaaaagaaatcttaaactaacaaacatccttttttaaatgatta

SEQ ID NO: 334854 - DNA, 516 bp, Homo sapiens
acaaatgacgaacataaaatgaaccagggaaatggaaatatctttggatgagatacaaataattgattaccmcatagttgcacactatggctttagagatgatggctaaagtaaatccattacacatatgttgtgatgaataatattaggtgtcaacttgattgaattgagggatacctagatggctggtaaagtattgcttctgtgtgagtctatgagggcattgcctgagattgatagttgagttggcagactgggagaggaagacccaccctcaatgtaggtgggcaccatctaatcggccgccagtgcagctagaacaaggcaagtggaagaaggtgagatacatttacttggtgagtattctggctctctttcttctttccatgccagatgcttgcttccactcctcttgcccttagacatcagattccaggctcttcgatctttggactctgggacttgcaccagtgacttcttgcgggttcttgggcctttggcagcagacaaagggct

SEQ ID NO: 334855 - DNA, 603 bp, Homo sapiens
taatagacagaataaaataaaaattaaaagtgaaataaaacaaatcttaaaactaaaaaatataatgaatgaagtaagaaatttaatagagagcatcatcagcagaattgatcaagcagaaaaatgaatctgtaaactcaaagataggtgatatgaaaatatacagwcatggggaaaaagaaaaaaatgaagaaatcctgcaagatttacaggacagcatgaaaagagcaaatttttgattcattgaagtttaagagggagtagaaaaagactaaggggtagaaagcttatagtaagaaacttttcagccctaaagaaaggcatacatattccagtaaaggaagatcaaaggtgaacatcagatttgatacaattaagagtacaggaagacatattattatgcaactatcaaagatcaaaaacaaagaatcataaaagcaccaagataaaaataagcaaataaggaagttccaatatatctggcagcagactttctttttataggttaggaggagtgggatgatgtattcaaagagctgaagaaaaaataagcaaaaatctgtcagcagaatactgtgcccagtaaaactgttcttcagaaat

SEQ ID NO: 334856 - DNA, 603 bp, Homo sapiens
taatagacagaataaaataaaaattaaaagtgaaataaaacaaatcttaaaactaaaaaatataatgaatgaagtaagaaatttaatagagagcatcatcagcagaattgatcaagcagaaaaatgaatctgtaaactcaaagataggtgatatgaaaatatacagacatggggaaaaagaaaaaaatgaagaaatcctgcaagatttacaggacagcatgaaaagagcaaatttttgattcattgaagtttaagagggagtagaaaaagacwaaggggtagaaagcttatagtaagaaacttttcagccctaaagaaaggcatacatattccagtaaaggaagatcaaaggtgaacatcagatttgatacaattaagagtacaggaagacatattattatgcaactatcaaagatcaaaaacaaagaatcataaaagcaccaagataaaaataagcaaataaggaagttccaatatatctggcagcagactttctttttataggttaggaggagtgggatgatgtattcaaagagctgaagaaaaaataagcaaaaatctgtcagcagaatactgtgcccagtaaaactgttcttcagaaat

SEQ ID NO: 334857 - DNA, 499 bp, Homo sapiens
ggatgctgatgagtaacacaaaaacatttggaagtagaaaactcacggtaaaagtaaatacagtcaaaattagaatatgccaatacygtaatggcagtaggtaaatcattcatacctttagtatgaaagttaaaaagcaaagctattaaaaataataactctatttataaaacaatatgaaatataaaaagatgttaatgttgacatcaaaaattcaacctctcggggacgagaactccagctggtgcagagcccctagagtttgatgtggaagtatctatagtggagcatggccaggggcaccaatcccccaagtttcaccttgctcctctaggagaccttagccttagggaaactactgggcatgaacagagcagggtgatcttgcccatgagacagggtcagtcttatctgagaatgctcctgtgtgttggcctttcctggtgccctaccctggcaatatctgcttgtagtgcagcattgtatggctagccagagt

SEQ ID NO: 334858 - DNA, 499 bp, Homo sapiens
ggatgctgatgagtaacacaaaaacatttggaagtagaaaactcacggtaaaagtaaatacagtcaaaattagaatatgccaatactgtaatggcagtaggtaaatcattcatacctttagtatgaaagttaaaaagcaaagctattaaaaataataactctatttataaaacaatatgaaatataaaamgatgttaatgttgacatcaaaaattcaacctctcggggacgagaactccagctggtgcagagcccctagagtttgatgtggaagtatctatagtggagcatggccaggggcaccaatcccccaagtttcaccttgctcctctaggagaccttagccttagggaaactactgggcatgaacagagcagggtgatcttgcccatgagacagggtcagtcttatctgagaatgctcctgtgtgttggcctttcctggtgccctaccctggcaatatctgcttgtagtgcagcattgtatggctagccagagt

SEQ ID NO: 334859 - DNA, 557 bp, Homo sapiens
tcactactcctattcaacatagtcctggaagtcctagccagagcaattaagcaacagaaagaaacaaaaggcatccaaaaaggaagaatcaatattattaaaatggccgtatggcccaaggcaaaaatagagtcaatgctattmttatcaaaataccaatgacattctttacataattggaaagaaactagtctaaaattcatatggaacccaaaaagagccctagtagccaaggcaatcctatgcaaaaagaacaaagttggagacatcacattatccaactacaaactatactacaagacaataccaaaaacagcatgatacttctacaaagtagacactagataaatgtaacagaatggaacctagaaataatgctgcacacctacaatcgtctcatcttcaacaagatcaacaaaaacaagcaatggggaaaggactccctattcaataaatggtagtaaccatacacagaagattaaactgaaccccttccttataccacatacaaaaatcaactctagatggattaaagatgtaaatgcacaacctaaaac

SEQ ID NO: 334860 - DNA, 588 bp, Homo sapiens
agttaaattgctatcagcttaaaataatcttttatgactataaaatattttttgtaagggtcacrgtaaccataaagaaaaaacctataacagaaacacaaaaaatgaaaagcaaagaataaaacgtgttactaaagaaaataacttatcaacaaagaaagacagtaagagatcaagaaataaaggatatacaaaacaaccaaaaacaattaacaaaatgaaagtagtaagtccttgtatatatagattaaattctccaatcaaaaacatagaggcactgaatggataaaaaaaaagtcaagagtgcataccagctagaagagattctcttcacctgtaaggacacacatagactgcaagtaaagaaattcaaaaagacattctatgtgaatggaacccaaaagagagcagaaacacttatatttatatcagatagaacagccttccaatcaaaaactgtaaaaagagacaaaggtcattatatcatgataacaaggccaattcaacaagaagatataaaagttgcaaatatattcagttggttctttgtatccatgggttctgcgcccacagatttaaataattaca

SEQ ID NO: 334861 - DNA, 588 bp, Homo sapiens
agttaaattgctatcagcttaaaataatcttttatgactataaaatattttttgtaagggtcacagtaaccataaagaaaaaacctataacagaaacacaaaaaatgaaaagcaaagaataaaacgtgttactaaagaaaataacttatcaacaaagaaagacagtaagagatcaagaaataaargatatacaaaacaaccaaaaacaattaacaaaatgaaagtagtaagtccttgtatatatagattaaattctccaatcaaaaacatagaggcactgaatggataaaaaaaaagtcaagagtgcataccagctagaagagattctcttcacctgtaaggacacacatagactgcaagtaaagaaattcaaaaagacattctatgtgaatggaacccaaaagagagcagaaacacttatatttatatcagatagaacagccttccaatcaaaaactgtaaaaagagacaaaggtcattatatcatgataacaaggccaattcaacaagaagatataaaagttgcaaatatattcagttggttctttgtatccatgggttctgcgcccacagatttaaataattaca

SEQ ID NO: 334862 - DNA, 580 bp, Homo sapiens
cttggatgactttaccagtgaaatgaacctatttcttatagtcacttaaagagccagtagagctctccatgtgggtaatactcattgtaacccaagtttagcagttgcagttacctctttacaagggaaaggcaaaagccagaaagagaacatgcatatggtggtaagaacatattcctattcrtgagatttacggagctgaatgaaatagatctgtcagtgaaaaaaaggtcctgctgaaggtagttattttcctggcgctacctttgcaactttaccggggctgtgtttttgacagaatgggccagaagacacacttctttcagataggcagtgaagtttctccattaatatcggtgagcagttgatttagtttctctctttcattgtgaatatttttatgaaggtaagactgcatccagatttgggactgagtagggacaaagcagtcttgtgggtgtctccaaaatactccctggtagacaatacatccaatttgtttccctttggtctttttatgttcaggggctttgaactgggagattgtaagttcctccattacagcattgggtggttaagt

SEQ ID NO: 334863 - DNA, 563 bp, Homo sapiens
aagtttctccattaatatcggtgagcagttgatttagtttctctctttcattgtgaatatttttatgaaggtaagactgcatccagatttgggactgagtagggacaaagcagtcttgtgggtgtctccaaaatactccctggtagacaatacatccaatttgtttccctttggtctttttatgttcaggggctttgaactgggagattgtaagttcctccattacagcatygggtggttaagtagagtagatttaaaatatcttctgatagcggtgagagctttatgaaacagctgtcagtttagcatatttatcaacccagatggttttttttgtttttttgtttttgtttttgtttttgttttgttttcttgtttgtttttgcttcaaaggttttttggagaacatgagtttctattttaagtatggccatctcatttggcaataagaaagcttctaagaggcgttacacctgtttttcatttttaattggtgtccccaatggtgtcataaatcattttgttttccataacataccaaaattatgtgctattcccaaagc

SEQ ID NO: 334864 - DNA, 547 bp, Homo sapiens
tcttgactccctgaaacatctgcctcccaggttcaagtgattctccagcctcagcctcccaagtggctcagattatagctcagccttccgagtagctgggactataggcatgccccaccactcctggctaatttttgtatttttaatagagacagggttttgctatgttgtccaggctggtctcaaactcctgtcttcaggtgatcagcctcccttgacctcctgaggtgctgggattacaggcatgagccatggtrcctggacaaaacacgtgattattattactattgctctaactattataattgttgattattatttcctttactgataaacaagtggcacatacataatagtggcacatacataatactggaagactaacataaaatttagatactaaattttgttccctactctgattatcacatcaaagattctttcaaaaagaaaaaaataacacatttaattgaacaatacttgagaggtgtcaaggttgacctttatcctagattttgaccacaccatgcatgtatgcctttcttcc

SEQ ID NO: 334865 - DNA, 410 bp, Homo sapiens
tatgctgacatggtctggctctgtgtccccactcaaatctcatcttgaattagaatctgaatggtaattccctcatgttgggggagggacctcatgggaggtgattggatcatgggggcacttcctttatgctgttctcaggacagtaagtgagttcagaaatgatggttttgtgaggggcttttcccctctttgctctgcaattctytcattcttctcctttctgctgccacgtaaggaagaatgtgtttgcttcctcttccaccgtgattgtaagttttctgaggcctcccaagccatgctgagccgtgagtcaattaaacctctttcccttataaatcacccattcttaggtctttctttatcagcagcgtgagaatgaactaatacagtaaattggtactagtaga

SEQ ID NO: 334866 - DNA, 625 bp, Homo sapiens
taactcatgagctggaagaggttgctcatttataatagatgaaacctggaaagaattgtggaaatgggttttgaggatgctaaaacaagaaaatcaaaatatattttagaggagctctattttttaaaacctacatttaccagaaattatggattgcttatacaagttttgttgatgttgttactcagtgatacaccctacaaccctaaaagagtagctaatacttaatctgaactcaataggtatatctgaaaaagcgtactagttctagcagctataaaatagatgtggttatttatcctgtgaattaggtgcagtgggtactayagtgttacatgctcaataaggttaggtgcacgtaagagtcacctgaagtgctatttaaaacatactgattcccaaatttccacctccagaaattctacttaaattgtgaagaaaagctccaaaatttttattttgcaaaagtttctcaggtgatacaaaataacaaatcttaagaattataaagaaaataatttgggagcaggtatatcatatgtgcccgcttacctctaactgaatcaagagagcccaaaatatagtcatttctctaggtgttagaaaggattaataagtgaagtat

SEQ ID NO: 334867 - DNA, 496 bp, Homo sapiens
gtgtttcacaagaccaatattctacttatgtgcattatggtgaatgcttttgatgccttaatataatcacataatggacagaaagaaaagatatawctataaaaaatgttaagagatattagatttgtttttgtctagttataagattgaacagtatagggtcaggagcttcatagttagaattacataaaaaatgtagaattacttcaaaatcaaaatgcagcaaaatttataaatgcaaataactgaggtatgctgcatttgtttttaaatagccactttaataccaaacagataaatttttttttgatataacatgtgttcctttgtagaatgtgttaaggaaactacatttgacattgtttatctcagtgagaaaacagactgtttttacaatgaatttgatccaaaaacctagactgggaattagaagtaaagtaagcagggttatcaactaatatatgaccttcctcacttcaattaaagttcctagact

SEQ ID NO: 334868 - DNA, 515 bp, Homo sapiens
agtccattggtgccaccactggtgccccaaaactggccaaccagggatccattttccaagcaaaacttcatcatagcctctgctaataaccaaaccctaaaccaccaaggaaattgcatatactacttatgctgttgacagttgaataaatcatacataggctgcactactgaacacactcagaaggaaagccaaagggccccactcaacgaatattattaatatatcctcatgaaaaaagtcttcctctatgaaagtaaattcaaaaattaaaagaagtgactattacaccagatgtgcagatatcaacatgaagacacaggaggcataaataaagcaargaaatatgacacctccaaatgaacaaaataattctctagcaacagatcctaatctcaaagaaattcatgaaatcccagagtactaaaaaatacaaaaatcagaaaatcacataaggatataaatgagaaatttagcaaagagatagatatcataaaaaaaaagaaccaaacaga

SEQ ID NO: 334869 - DNA, 414 bp, Homo sapiens
ctgtgatcatctttatccaaataaacagtacctgtcatgttacaatcaggagtgtggtggagtggtcagtagcaggaaagaacaatgaaaagtaaagtaaatcaaaatattgtataaacaggtatgctatataaacagcaagaagacagaacttagtgttgcctggtaatggttaagaaaatcttcataaggragttagatttcaggtaagtcttcgaggacagataaggaatcaccaggtgcagaaaaggaaaattgcattgggtgacttggattcaggccataagtggtacattttctgtagaaatttaaaaaacaatgataaaccagttaaaagtcagccttattttaattaaaagcatatgtgagcaattctaagcaatgctaatgataaattacttctctcagagcaaa

SEQ ID NO: 334870 - DNA, 614 bp, Homo sapiens
ctcaggcttgggagaaaacagagttcagggacctgtaggaaggagagaagcctaaaatttggttaagacaatgcctagggtaagaaaatagcagctatgaacatttagtcagtattgtttttgttcttttttttttttttttttttcgtaagctctccagttcagtcaacagagccagaacaccagctgtctttgttggcttgtgttgccataaaggaatacctgagattgggtgatttataaaggttaatgtggctcacagctgtacaaaaaacatggagcctgcatctgcttgacttttgatagggcctcaagcagtttccactcatagaaggmggctaaggaaggcagatgtgtgcagatgcagatcacatggcaagagaggaagcaagagagacacaatggaggaagtgccaggctcttttcaatagccagttatcccaggaactaagaatgagagttcaccactccctcaaaaatgccactaagccgttcatgagagatcagcccctgtgatttcaccagggcctacctctaatagtgaggatcagacttcaacatgagactcagtgggaccaaacaaaccatatccaaatcatagtaccaacttctgt

SEQ ID NO: 334871 - DNA, 588 bp, Homo sapiens
agggacctgtaggaaggagagaagcctaaaatttggttaagacaatgcctagggtaagaaaatagcagctatgaacatttagtcagtattgtttttgttcttttttttttttttttttttcgtaagctctccagttcagtcaacagagccagaacaccagctgtctttgttggcttgtgttgccataaaggaatacctgagattgggtgatttataaaggttaatgtggctcacagctgtacaaaaaacatggagcctgcatctgcttgacttttgatagggcctcaagcagtttccactcatagaaggaggctaaggaaggcagatgtgtgcagatgcagatcacatggcaagagaggaagcaagagagacacaatggaggaagtgccaggctcttttcaayagccagttatcccaggaactaagaatgagagttcaccactccctcaaaaatgccactaagccgttcatgagagatcagcccctgtgatttcaccagggcctacctctaatagtgaggatcagacttcaacatgagactcagtgggaccaaacaaaccatatccaaatcatagtaccaacttctgt

SEQ ID NO: 334872 - DNA, 613 bp, Homo sapiens
cagttcttggctttaataggcctttctcctactttatagctggtaagtctgtgtctgggttcttctggctctcctatgaggcttgaaaacattgacactgatccctgagaagacttgtcaacactcactgaaaaatcaggttgcactctgtgaaatgaatgaaacaaaaggtgaccccttcctctcgtcactcattccatagtacagtaactaatattttggaataatgtttgaatgctaggaaacgtgctaaaggtttcatggtcatgatctcatttaatcctcacaatgaccctaasgattgtctccattttacaaaagatgagaacggagtttagagaagttaagaaatttgcagacttaacaagaagtggagacaggcttctgacttgagtcatttttgctgcaaagcctgtgtcctagctgccaccccatgttgcttccccgatgaaccaactaaaagaccacctgagtatccacttgtacttttccaattttgtcatctaattgtactaatgatcattcatatcttgctctgggaatgaataggagatcacaggacttgccataatacatctttggtctgaaaggaattaaaaagtgtctctacttt

SEQ ID NO: 334873 - DNA, 613 bp, Homo sapiens
gctttctgactgtggtgctcaatgtcctgccaattgtattgcacatcgttcttcaaaatgcagttcagtgtttaatgctaacttaaagtgatttcatatggtgttacttgctcctatgattttcaaagatttatagataatctaatgtactcttattagacaatttaacttaacaaatttaaaggaggaactgtttttgtaaattcttgtagaccattaataccattcacaacatttyatccccagattatttgagactttgggaacatgagattctatgtgggtaaattttctaatttagcttctaatattttatctattgtacaaaagtgaaaatatgtgattcaattaaggggtagcttcaatttatatagccttaataaaattagatttaatgaattaaaaagtggcttacatctcaatttgttacaatatttagcttgttactttaatatggactaagatgttcagagctgtgaatttgtcattaatttccccaacatcccagtgaggaaaagtcagatcatatccatcttactgatggggaaattgggtcatataatgctaaaatgttttgttacgtgtcctacaactgtttagtatcaaatttagg

SEQ ID NO: 334874 - DNA, 613 bp, Homo sapiens
gctttctgactgtggtgctcaatgtcctgccaattgtattgcacatcgttcttcaaaatgcagttcagtgtttaatgctaacttaaagtgatttcatatggtgttacttgctcctatgattttcaaagatttatagataatctaatgtactcttattagacaatttaacttaacaaatttaaaggaggaactgtttttgtaaattcttgtagaccattaataccattcacaacatttcatccccagattatttgagactttgggaacatgagattctatgkgggtaaattttctaatttagcttctaatattttatctattgtacaaaagtgaaaatatgtgattcaattaaggggtagcttcaatttatatagccttaataaaattagatttaatgaattaaaaagtggcttacatctcaatttgttacaatatttagcttgttactttaatatggactaagatgttcagagctgtgaatttgtcattaatttccccaacatcccagtgaggaaaagtcagatcatatccatcttactgatggggaaattgggtcatataatgctaaaatgttttgttacgtgtcctacaactgtttagtatcaaatttagg

SEQ ID NO: 334875 - DNA, 564 bp, Homo sapiens
ttgttggttcagaaattcagaacaaatgtgaaacaagcaatcaatggcctttatggcttatagrtaatagtgataattccttcatatttgttttactttgcattttatgaaatcattctatgccttgtataatttttatcctactggtagataatgagagtatctctattctaacttcacagattattgctagcccaggagtggggaaagtcccacatcctcaactacccagctatcctgcctgcactaagggtcctgtttccacagcttcgatgagagttagcatctgtacatacaaaaaaaaatactatttactccatcaaattgtttcatctgttagcctttgttctttgaggaatgggaatcagtcttttatttctttatttataccagctgttaactgagaacactgtaaatgctcaataacttctccttgatcatttgattcaattgagtctaaggttgatgtagaagcagtcaacagaggctgagtttcccaggaagttatagcctagcctatagctgtcacttccttatctacaagccacttgctttgcccctgct

SEQ ID NO: 334876 - DNA, 564 bp, Homo sapiens
ttgttggttcagaaattcagaacaaatgtgaaacaagcaatcaatggcctttatggcttataggtaatagtgataattccttcatatttgttttactttgcattttatgaaatcattctatgccttgtataatttttatcctactggtagataatgagagtatctctattctaacttcacagattattgctagcccaggagtggggaaagtcccacatcctcaactacccagctatcctgcctgcactaagggtcctgtttccacagcttcgatgasagttagcatctgtacatacaaaaaaaaatactatttactccatcaaattgtttcatctgttagcctttgttctttgaggaatgggaatcagtcttttatttctttatttataccagctgttaactgagaacactgtaaatgctcaataacttctccttgatcatttgattcaattgagtctaaggttgatgtagaagcagtcaacagaggctgagtttcccaggaagttatagcctagcctatagctgtcacttccttatctacaagccacttgctttgcccctgct

SEQ ID NO: 334877 - DNA, 617 bp, Homo sapiens
gtagaagcagtcaacagaggctgagtttcccaggaagttatagcctagcctatagctgtcacttccttatctacaagccacttgctttgcccctgctgtggtttgaatatttcccaaaactcatgtgttgaaacttaaccccattgtgctgatattaagagatggggccttttgggaagggattaagtcctgtgggtggcgcctcttggattagtgctttatgaaagggctaccaggaactagcttagaacctttttgctctttcattcttctgccatgtgagaaygcagtgttcatatcctttttctcttttcatcgctcccaccatgtgatgatactcacatggcaccaaccaggaggaacaggccttgaccaaacatgcaatctgctggagccttgatcttggactgcccagcctccagaaatgtaaaaaaatacatttctattcttcataaattactcaaagatattttgttacagcagcataaatggactaaggtatttccattgtttacctgcatttattaccagagctctttttttaggtttaattaactcttgcccaatatttatcagaaacactgtatctcagatatgaagacacagcctctacattc

SEQ ID NO: 334878 - DNA, 617 bp, Homo sapiens
gtagaagcagtcaacagaggctgagtttcccaggaagttatagcctagcctatagctgtcacttccttatctacaagccacttgctttgcccctgctgtggtttgaatatttcccaaaactcatgtgttgaaacttaaccccattgtgctgatattaagagatggggccttttgggaagggattaagtcctgtgggtggcgcctcttggattagtgctttatgaaagggctaccaggaactagcttagaacctttttgctctttcattcttctgccatgtgagaacgcagtgttcatatcctttttctcttttcatcgctcccaccatgtgatgatactcacatggcaccaaccaggaggaacaggccttgaccaaacatgcaatctgctggagccttgatcttggactgcccagcctccagaaatgtaaaaaaatacatttctattcttcataaattactcaaagatattttgttacagcagcataaatggactaaggyatttccattgtttacctgcatttattaccagagctctttttttaggtttaattaactcttgcccaatatttatcagaaacactgtatctcagatatgaagacacagcctctacattc

SEQ ID NO: 334879 - DNA, 599 bp, Homo sapiens
gtgtgaactttcagtttcagttcagacataaaaagaacatggacattgtcattcccattcttacaataacaaaatgttgggggataaaaagacttttcttagactcatcaaagagctaaggtcacagagaaaattacctcccattatctagagagagaagtacctctagggagacaaaggacctgagtatttgcttacctgaagcaaatgcctctggaatattaaaatagaacttttgatgaattctggaagcaaactgtgagatagcatcaaagtgagaagtttctggggkcctccatatataactaaacttttctttcagaatctcatcaggctgttagggcaggtcaaggagacagtccaaaaagtttcccttggtgctctgacaggaggaggggagagtagccatggtgaaatccactaaattgtttcactctcaggcttaatctccatggaggacatgtcagacagcaacagtaaaattccattccagctgggcttagggagctgtgttctactctatcctattttacctaagaaagcaaaggaacaatctacaggggagaagttctcacaaatgaagactgggaagactggag

SEQ ID NO: 334880 - DNA, 533 bp, Homo sapiens
tttgggcccccaggagctctggccctgccagtctatggtgaaaaccttcctcttaacctacrctcttctgatcaagaactcccaacaaatccttcgagtaacacatctccagtggacaccatccaccttgtatggaaaggaaaaggtgccccatggccttggcccttgcttgtaacagaacatccattattttgtctgccttataatgggggtactctgtgagatttagtttgaaaaaaactgtctgaaggccaccagcctcctgcattatgtgcaggtaccttcatttgtccccaaggccatttctcaggacctttttccacagtcattagttacggcacacagtaataagattgatattcttttgtggctcatggggattatttctagaattctgagctacatctatccatctcatatcttatcaccctcagcccagaggctgtctccctggcagcaagacaggtccttaattgtccacaggctaccatggtttgccccatgtcagagcctttgctacatcagagcttcct

SEQ ID NO: 334881 - DNA, 578 bp, Homo sapiens
agaacaatgagatagtatctgaattcctaactaagggaggtttcctgtggtccatgggtcctatgtggcccagttgcaaaggcagctaatctgggaaactagtgacacacaacaatgagtaacctgtaaaaatcccagtctcagggacctcaaatgttaccatcctggctccactgaaaaggtggaggtataatcctakcatgagaaactttttttttcaaatctagtaggacttacccacatgggactaaaggataggagttggggatggatggcaaggaaaacatattcatcataaaccaaccttatgtacaaggcaacgaaatttggttgataattttagaaataaaaaaatttccttcttagggggacataaaacttcattggaaaaaataggacctgtttcaggtaacagcataaataattcccacaaagataatgttgaacagaaagggatacaaagaatatatacaaaattctaatcatatcaggttcaaatctaatctctggtgttagaggtcaggatagtgattaaagggtgtattgactgcaagaggacatgagagagcctgaaggga

SEQ ID NO: 334882 - DNA, 578 bp, Homo sapiens
agaacaatgagatagtatctgaattcctaactaagggaggtttcctgtggtccatgggtcctatgtggcccagttgcaaaggcagctaatctgggaaactagtgacacacaacaatgagtaacctgtaaaaatcccagtctcagggacctcaaatgttaccatcctggctccactgaaaaggtggaggtataatcctatcatgagaaactttttttttcwaatctagtaggacttacccacatgggactaaaggataggagttggggatggatggcaaggaaaacatattcatcataaaccaaccttatgtacaaggcaacgaaatttggttgataattttagaaataaaaaaatttccttcttagggggacataaaacttcattggaaaaaataggacctgtttcaggtaacagcataaataattcccacaaagataatgttgaacagaaagggatacaaagaatatatacaaaattctaatcatatcaggttcaaatctaatctctggtgttagaggtcaggatagtgattaaagggtgtattgactgcaagaggacatgagagagcctgaaggga

SEQ ID NO: 334883 - DNA, 578 bp, Homo sapiens
agaacaatgagatagtatctgaattcctaactaagggaggtttcctgtggtccatgggtcctatgtggcccagttgcaaaggcagctaatctgggaaactagtgacacacaacaatgagtaacctgtaaaaatcccagtctcagggacctcaaatgttaccatcctggctccactgaaaaggtggaggtataatcctatcatgagaaactttttttttcaaatctagtaggacttacccacatgggactaaaggataggagttggggatggatggcaaggaaaacatattcatcataaaccaaccttatgtacaaggcaacgaaatttggttgataattttagaaataaaaaaatttccttcttagggggacataaaacttcattggaaaaaataggacctgtttcaggtaacagcataaataattcccacaaagataatgttgaacagaaagggatacaaagaatatatacaaaattctaatcrtatcaggttcaaatctaatctctggtgttagaggtcaggatagtgattaaagggtgtattgactgcaagaggacatgagagagcctgaaggga

SEQ ID NO: 334884 - DNA, 614 bp, Homo sapiens
cctgaggtcaactctggtctgaaaatattaaatggaaaattccagaaataaacaattcataaattttaaattgtacagtacacctttctgagtattgtgatgaaagtgacatcctgctctgtcctgcgtgggatgtgaatcatycctttgtccagtgtatccacactgtggacactagccatccttagtcacttggtagccatctcggttatcagataggcagatcacaagaagaagaagaaaggtgagtacagtacaataagatattttgagagaaaggaagagagagaaagagagcgggagggagggagagacatcacattataactttcattacagtattttttatcgttctattttattattagttgttaatctcttactgtgcctaatttataaattaaactttaccataggtatgtatgtataggaaaaaacatatagggtttggtaccatccaagttttcaggcatccactgggtatcttgaaatgtattccctgcagataaggggggtaaaaacgtacctggcacatagtttgaactttctaaatattaatgaaaggaatgaattaactaatatttctgcctcatattatcaccaaaagaaaagtg

SEQ ID NO: 334885 - DNA, 614 bp, Homo sapiens
cctgaggtcaactctggtctgaaaatattaaatggaaaattccagaaataaacaattcataaattttaaattgtacagtacacctttctgagtattgtgatgaaagtgacatcctgctctgtcctgcgtgggatgtgaatcattcctttgtccagtgtatccacactgtggacactagccatccttagtcacttggtagccatctcggttatcagataggcagatcacaagaagaagaagaaaggtgagtacagtacaataagatattttgagagaaaggaagagagagaragagagcgggagggagggagagacatcacattataactttcattacagtattttttatcgttctattttattattagttgttaatctcttactgtgcctaatttataaattaaactttaccataggtatgtatgtataggaaaaaacatatagggtttggtaccatccaagttttcaggcatccactgggtatcttgaaatgtattccctgcagataaggggggtaaaaacgtacctggcacatagtttgaactttctaaatattaatgaaaggaatgaattaactaatatttctgcctcatattatcaccaaaagaaaagtg

SEQ ID NO: 334886 - DNA, 614 bp, Homo sapiens
cctgaggtcaactctggtctgaaaatattaaatggaaaattccagaaataaacaattcataaattttaaattgtacagtacacctttctgagtattgtgatgaaagtgacatcctgctctgtcctgcgtgggatgtgaatcattcctttgtccagtgtatccacactgtggacactagccatccttagtcacttggtagccatctcggttatcagataggcagatcacaagaagaagaagaaaggtgagtacagtacaataagatattttgagagaaaggaagagagagaaagagagcgggagggagggagagacatcacattataactttyattacagtattttttatcgttctattttattattagttgttaatctcttactgtgcctaatttataaattaaactttaccataggtatgtatgtataggaaaaaacatatagggtttggtaccatccaagttttcaggcatccactgggtatcttgaaatgtattccctgcagataaggggggtaaaaacgtacctggcacatagtttgaactttctaaatattaatgaaaggaatgaattaactaatatttctgcctcatattatcaccaaaagaaaagtg

SEQ ID NO: 334887 - DNA, 552 bp, Homo sapiens
agcactgggacatgtagtcatatggcaaaaggcatggatttaggaaagggtaaaggattgagatcattattgcaatctatcacacctgcattttctcatattttggacaataatcccataacacttatgtatttatgcccattaaaataggtgatatgttagattgttacactaatggttcccaaaaaaccatgttgcccagtgtttgggcctgtattggtttcctaaggctgttgtaactaagtaccacaaactaggtagcttcaaacaaaaatgtattctttcttagttctggagctcaraagtctgaaatcaaggtgttggtagggccatgctccctttgaagcctctaggaggaggatccttccttgcctcttccagcttctggtagttccacgtgtttcttggcttgtggcagtataactcctatctctgccaccttcacttgtctgtcttccttctgtgtctgtgagtctttccctgttcttataaagacacttgtcattttgatttcaggacccattttactccagtacagtgtcgtcttaactt

SEQ ID NO: 334888 - DNA, 552 bp, Homo sapiens
agcactgggacatgtagtcatatggcaaaaggcatggatttaggaaagggtaaaggattgagatcattattgcaatctatcacacctgcattttctcatattttggacaataatcccataacacttatgtatttatgcccattaaaataggtgatatgttagattgttacactaatggttcccaaaaaaccatgttgcccagtgtttgggcctgtattggtttcctaaggctgttgtaactaagtaccacaaactaggtagcttcaaacaaaaatgtattctttcttagttctggagctcaaaagtctgaaatcaaggtgttggtagggccatgctccctttgaagcctctaggrggaggatccttccttgcctcttccagcttctggtagttccacgtgtttcttggcttgtggcagtataactcctatctctgccaccttcacttgtctgtcttccttctgtgtctgtgagtctttccctgttcttataaagacacttgtcattttgatttcaggacccattttactccagtacagtgtcgtcttaactt

SEQ ID NO: 334889 - DNA, 600 bp, Homo sapiens
acctgttcatcatcgtaataggtgctcttaattccgaggttcagttgcaatgcagccaatgatgttccttccagattatcagctaacattacagatgaagaaaaatgtgctcattttaatttacttttactattactaataactaaagaatctgaaatggccacatgtatcattttaataagattggattttagtaattgacctgtcaaaaaagaccgtgatttatcccatcaaattcagtgtgagtttattrtttatatttgcagcatgggagtaatttaaaggatgttctagaaatatttcatcctctgatgaagtctgagaaccaaaacagtttaataattctttcttcatttatttaaaaggatttgcttcttgtaatatctagctgtggctgactctgaccatgccaaaaatctgtcattttcctttattgcactgtcctcacctggcatatgttccaactgtggccatttaacatgagtttacttgtttacttgtttaacattcatctctcttggctagattataagcccctgcttataatcttttatcagttttgtttgtgttacttccctggtgcctataatagtgcctgga

SEQ ID NO: 334890 - DNA, 487 bp, Homo sapiens
agttttgtttgtgttacttccctggtgcctataatagtgcctggaatgtggtaagcacttaaaaaacgtttgccaaataagtaaattagttaaaatttatgttatagatccccatatctgtgtaaatgtacctcagagaagaagtgatggcaataccaaggattggctttcaggacattcattgtagaataaggaggtctggacttggacaagtaagtaatcaagccagctccactcttttctatatgtgttgccatcaaagcatttaatctccccaaggctcagttttgacattttcaaaatgggaataacaatagctattgaataagatagctatgaagatgacatgagattaaggatataaatgtactttgcacaaactgctaagmcttacagaagcatcagacttcatcatgcattggatagacatgtctgttgatggaatgagagtttgagctgcactaaccaattacttagttcaacctgt

SEQ ID NO: 334891 - DNA, 544 bp, Homo sapiens
ctacctacaccacctattctccttcctgccacctgcccatgtgaacagggcttgactaatgcttccaccgttcctataactcagctagtagcattcctgattgtcaggccaataggaaaagaaagaactgctcctctgcttttgagatggtgatamaatgtggagctgcagagactgaattaaatcagagactttagggtcacctgaccttttctctccagcactttattgggaatgtgatagaataatttattactgaaaaagcaagataaaacctatggaagaacatactttgttatgggccagatggtttagatttgcgtgtggtaattattctagtttctgacaatccctaataagtctgcctatgttagctactaaattactattggtgaatcgatgcccagcagctctgcctgttgacaaggtcttgaggcacccacaaagggcaagagaacactgtcaacggtcactggtggagatcaagcctgtggttctaaggaagacttttcattttacttactagcatctcagccagaaaacc

SEQ ID NO: 334892 - DNA, 555 bp, Homo sapiens
cacttggcatttgccattacttccaaaaatgaagaccaaaaattcttggtaattaaagtttctgcatatttagattctgttattctattttacaatgtatgtgatttttttttttgaattaacatggcatttgaaaacctattgcaagcaatagaactatcctccccagaaatctragtttcaggggattcacctggggttatggagccctggttaagagctcacaagataatgaaaacagcatgatacaaaaacctacagctaacatcacactgaatgacaagaaattcgaagttttctcactgaaatcagtaacaaggcacggatttttctctcaccattccttttcaacattgtactggaatttctagctaatgcaataatataagaaaaggaaatgaaaggtatacagatagggaaggaaaaataaaactgtctttattcacagatggcatgattgtctatgtaaaaacccaaaaggactgacaaaagactcttagaactaaagtcaaatatggtggtgtgtgtctgtagtcccagctacccaagagggtg

SEQ ID NO: 334893 - DNA, 585 bp, Homo sapiens
cctccccagaaatctgagtttcaggggattcacctggggttatggagccctggttaagagctcacaagataatgaaaacagcatgatacaaaaacctacagctaacatcacactgaatgacaagaaattcgaagttttctcactgaaatcagtaacaaggcacggatttttctctcaccattccttttcaacattgtactggaatttctagctaatgcaataatataagaaaaggaaatgaaaggtatacagatagggaaggaaaaataaaactgtctttattcacagatggcatgattgtctatgtaaaaacccaaaaggactgacaaaagactcttagaactaaagtcaaatatggtggtgtgtgtctgtagtcccagctacccaagagggtgaggtggaaagatcacttgaggccaggagttcaaggctgtagtgcagtatgattgcatctggaaaaagccrctgcacatcagcctgggcaacattgtgaaatcccatatcttaaaaatgaaaaaaaaaaaatcctggaactaataagcaattattgcagagctgcagaatacaaagttaacatacatgcaa

SEQ ID NO: 334894 - DNA, 551 bp, Homo sapiens
ttcatccatgtcgttgcaaatagcagaatttccttctttttaaagactgactagtatcctattgtgtatacataccacactttctttatccattcatccattgatgagcacttaggttgtttccatatcttgagtattgtgagtaacactgcaattaatacgggagtgcttggaatctccatgatgttttccatagtaccaatttacattcccactaacagtgtataagggctctctgctctcttttctgcattcttttgccaatacttatctacagccttcttcacatagctatcctaatacatatgaggtgatgcctcattatgattttgatttgcatttcctgattgattagtgatgttgagcatcttttcatattccttttggctagatgtatgtcttcagaaaaatatctattcagatcctttgcccatttttcgcattgggctatttgttttgtttttgtttgcyattgagttgtgtgagttccttatctacttggacataaccccttatcagttttatggtttgcaaatattttattccaattg

SEQ ID NO: 334895 - DNA, 528 bp, Homo sapiens
tgtgtgtgtttgtaacatcttcatttggcaaactaaaatgatggcaatactctgtttgccctacccaacccccaccaagtttttgaaatgttaccagtaaagtacatgtaatctgaaaatcctactttccttccttcccatattattctgtctaactaaaagcctgttgtrctaataaagaaatctggagagacaatttgggaaagaccctcctttaaaagttagcaggacaaaaacatataaaatgtctcccctccccattcctattctcttctcccacaaagactcagaatcctttcctaaattttgaattttttcctttggagaaactctgggcatgaccgcccctccttcacattcctggaatcagctgcagttttttgtgtgtgggtaggagactatggccttcctgttgaatcagcgaagaggcaattgttaaatggcacccaggctcctgggaggaagaaaagcatgacatatccagagctattccagggatcaggctcagctggtatcaaaaattcaacc

SEQ ID NO: 334896 - DNA, 528 bp, Homo sapiens
tgtgtgtgtttgtaacatcttcatttggcaaactaaaatgatggcaatactctgtttgccctacccaacccccaccaagtttttgaaatgttaccagtaaagtacatgtaatctgaaaatcctactttccttccttcccatattattctgtctaactaaaagcctgttgtactaataaagaaatctggagagacaatttgggaaagaccctcctttaaaagttagcaggacaaaaacatataaaatgtctcccctmcccattcctattctcttctcccacaaagactcagaatcctttcctaaattttgaattttttcctttggagaaactctgggcatgaccgcccctccttcacattcctggaatcagctgcagttttttgtgtgtgggtaggagactatggccttcctgttgaatcagcgaagaggcaattgttaaatggcacccaggctcctgggaggaagaaaagcatgacatatccagagctattccagggatcaggctcagctggtatcaaaaattcaacc

SEQ ID NO: 334897 - DNA, 593 bp, Homo sapiens
caagagcactctctcaatgctaatgaaatgctgtcattgcatcctgaatgatatgggagcagagggcaaggaaagaaaattagaagatgtttttaccttggttcaatatttgccaagtaacagtggaccaatatgtatattttaatttttactttttgaaaacatgttcaaagatgacagattgctaaggacccaaaagaacacattatggataaactagtaaaagtaaatgggaggtgatccactctctgagagtagattattaattgttatccttcctattcaaagatgaccttgtggtgtttatcacaaagtgcaagtgtgaccaatcagaagttcctccacatggtgcttcagaaatgcagtttgtagttttgtagctgttagcactcakcacccaaactacataatgtgttatctctggttctgggacaccagagttttcaatgtctcatttagttatttagcaattgtttattaaataactattatatgccactatatggtcacacaacaattcataagacacagtccttccactaaggatattaatctacttgaaacttattgaatatctactgtatattagttgt

SEQ ID NO: 334898 - DNA, 508 bp, Homo sapiens
aaggggtaattagggttaaatgaggtcatcagggtgggtccctattctggtagaactggtgtccttataagaagagggtcaaacatcagagctctctctttctccatatacacacaaaggggccacgtgagcacacagcttgagggcagccacccccaagctgagtaaagaggcatcaacctgaaacctaccttgctgacaccttgctcttggacttctcagcctccagaactgtcagaagaaaattctgttgcttaagctatctagtctgtggaatattttatagcagctgtagcagactaagacaactaggcaatgtaataggcatttttttttaacatttccataatatgccccaaggtgctattgcttatcttgtttaraactgtgctttaatgtgtttcctcagttgtaacccacactggttctagtttggggttttttcgttttattttatttacagggcccttttgtgtatctcttctagtgcctggcttccctctataaa

SEQ ID NO: 334899 - DNA, 648 bp, Homo sapiens
tccttttctcataggtgggaggtgtgtgtctstggcacgtgtattatggagttattacaaatggctgcttggctgtgcaggtgtgtaactcgcgccttgctcttccaaacacagctaccttatcttttcgcgcctcctcctccctgaagctatcaccttattttattttattttttcaggttaaacagcagcctccttgttggcttcctggatctattcctattaacccagcatctgaagtccttgcaggcaaaaagcctaaccaagcagagacaatagtcccagttcagctcaggccatgtagggctcattttcctacacacattaagtcctgacctaaaccactggggaactgctgaaactctgtagcttactgaagctcatagattggagaaaggattatggaatcatcttttataacatcctctgaacttatctggtatttcagagaacataatttctgcctgacaacaaatgcatgcatgtaaaagagaaaacctcactttgggttctctgttactgaggtcactctgtcccaggtttacatggcaagcattttacattctaaccagatccttaactctcactatcaaagaaaatttatttttaaaaattaatgatccttctttataaattatgtagacaggc

SEQ ID NO: 334900 - DNA, 648 bp, Homo sapiens
tccttttctcataggtgggaggtgtgtgtctgtggcacgtgtattatggagttattacaaatggctgcttggctgtgcagstgtgtaactcgcgccttgctcttccaaacacagctaccttatcttttcgcgcctcctcctccctgaagctatcaccttattttattttattttttcaggttaaacagcagcctccttgttggcttcctggatctattcctattaacccagcatctgaagtccttgcaggcaaaaagcctaaccaagcagagacaatagtcccagttcagctcaggccatgtagggctcattttcctacacacattaagtcctgacctaaaccactggggaactgctgaaactctgtagcttactgaagctcatagattggagaaaggattatggaatcatcttttataacatcctctgaacttatctggtatttcagagaacataatttctgcctgacaacaaatgcatgcatgtaaaagagaaaacctcactttgggttctctgttactgaggtcactctgtcccaggtttacatggcaagcattttacattctaaccagatccttaactctcactatcaaagaaaatttatttttaaaaattaatgatccttctttataaattatgtagacaggc

SEQ ID NO: 334901 - DNA, 648 bp, Homo sapiens
tccttttctcataggtgggaggtgtgtgtctgtggcacgtgtattatggagttattacaaatggctgcttggctgtgcaggtgtgtaactcgcgccttgctcttccaaacacagctaccttatcttttcgygcctcctcctccctgaagctatcaccttattttattttattttttcaggttaaacagcagcctccttgttggcttcctggatctattcctattaacccagcatctgaagtccttgcaggcaaaaagcctaaccaagcagagacaatagtcccagttcagctcaggccatgtagggctcattttcctacacacattaagtcctgacctaaaccactggggaactgctgaaactctgtagcttactgaagctcatagattggagaaaggattatggaatcatcttttataacatcctctgaacttatctggtatttcagagaacataatttctgcctgacaacaaatgcatgcatgtaaaagagaaaacctcactttgggttctctgttactgaggtcactctgtcccaggtttacatggcaagcattttacattctaaccagatccttaactctcactatcaaagaaaatttatttttaaaaattaatgatccttctttataaattatgtagacaggc

SEQ ID NO: 334902 - DNA, 648 bp, Homo sapiens
tccttttctcataggtgggaggtgtgtgtctgtggcacgtgtattatggagttattacaaatggctgcttggctgtgcaggtgtgtaactcgcgccttgctcttccaaacacagctaccttatcttttcgcgcctcctcctccctgaagctatcaccttattttattttattttttcaggttaaacagcagcctccttgttggcttcctggatctattcctattaacccagcatctgaagtccttgcaggcaaaaagcctaaccaagcagagacaatagtcccagttcagctcaggccatgtagggctcattttcctacacacattaagtcctgacctaraccactggggaactgctgaaactctgtagcttactgaagctcatagattggagaaaggattatggaatcatcttttataacatcctctgaacttatctggtatttcagagaacataatttctgcctgacaacaaatgcatgcatgtaaaagagaaaacctcactttgggttctctgttactgaggtcactctgtcccaggtttacatggcaagcattttacattctaaccagatccttaactctcactatcaaagaaaatttatttttaaaaattaatgatccttctttataaattatgtagacaggc

SEQ ID NO: 334903 - DNA, 618 bp, Homo sapiens
taatttttgaagcttcactcaatgtattaaagaagagtaaaaaaatagtcactggtaaaaatcaatccawatctcaattaaccaggaccaatctgaagctttattttcatccacacatctctccttttgtcataaggaactatttagtgaaaaagcctgaagggaggctgtgtgcctacttgagaaaaggtgcataaagtaagtgatttataaatgacagaaggctcaacttttgattttcaaatctggactgtatatttactttagacctcaaaggacatagaattaggtagatactgtagtttcaaccttcatcactgagtttacaaccaaacatgttctcatttctctcattcagtggacattttcagaacacagaaccatacacatgtgcctattaaattgtgccacatttatctcatcatgttagtttttttatgatacttacaaaattcatgcaaagttaagatgtttccttggcttctattcattacacttgtgatcagcgtgccattaatttagtgggatatggttgaggaaaagaccctactgcattccatgagaagcatccctgaagggaaatagcaaaagcagtcattaaacaagttaataaatcca

SEQ ID NO: 334904 - DNA, 618 bp, Homo sapiens
taatttttgaagcttcactcaatgtattaaagaagagtaaaaaaatagtcactggtaaaaatcaatccatatctcaattaaccaggaccaatctgaagctttattttcatccacacatctctccttttrtcataaggaactatttagtgaaaaagcctgaagggaggctgtgtgcctacttgagaaaaggtgcataaagtaagtgatttataaatgacagaaggctcaacttttgattttcaaatctggactgtatatttactttagacctcaaaggacatagaattaggtagatactgtagtttcaaccttcatcactgagtttacaaccaaacatgttctcatttctctcattcagtggacattttcagaacacagaaccatacacatgtgcctattaaattgtgccacatttatctcatcatgttagtttttttatgatacttacaaaattcatgcaaagttaagatgtttccttggcttctattcattacacttgtgatcagcgtgccattaatttagtgggatatggttgaggaaaagaccctactgcattccatgagaagcatccctgaagggaaatagcaaaagcagtcattaaacaagttaataaatcca

SEQ ID NO: 334905 - DNA, 618 bp, Homo sapiens
taatttttgaagcttcactcaatgtattaaagaagagtaaaaaaatagtcactggtaaaaatcaatccatatctcaattaaccaggaccaatctgaagctttattttcatccacacatctctccttttgtcataaggaactatttagtgaaaaagcctgaagggaggctgtstgcctacttgagaaaaggtgcataaagtaagtgatttataaatgacagaaggctcaacttttgattttcaaatctggactgtatatttactttagacctcaaaggacatagaattaggtagatactgtagtttcaaccttcatcactgagtttacaaccaaacatgttctcatttctctcattcagtggacattttcagaacacagaaccatacacatgtgcctattaaattgtgccacatttatctcatcatgttagtttttttatgatacttacaaaattcatgcaaagttaagatgtttccttggcttctattcattacacttgtgatcagcgtgccattaatttagtgggatatggttgaggaaaagaccctactgcattccatgagaagcatccctgaagggaaatagcaaaagcagtcattaaacaagttaataaatcca

SEQ ID NO: 334906 - DNA, 547 bp, Homo sapiens
gtcattaaacaagttaataaatccatctaaccattcacatttcttgttttgtctcgaaggacgccttgagacactgttgagaagctcactaaaatccagaggcactatgctgtttgtttccttgatctgttgctctagaaaccctatgacaaaatgaagtgaggcttttccaaaaaggcttaccctaacaaaactcattctacttcttttaattatgtcttataaaaccttgcctcatactggcatgaaactcactgatgtwtgctttgtacaatcaatattttttttatcactttgaaatatttgaattctccccgttagtgatgccacagagataactgatagaagttagctgattgccttgtagtctccaggatgcaattctcattagggtccctgaactcaattagaacacttagttttgttcttacaagctccaggcttgcactgagcttcagtttcactgtctttatccaatatctgtctcatcctttccagttgaaagacgaattgttttggtagagaagatggatacctcataattttt

SEQ ID NO: 334907 - DNA, 522 bp, Homo sapiens
atcaccattatggtttgaagaatatcaccttagttcctcttattcaagcaacagatactgacagccaaaactatgtgtcaggcactgtgttagatgctmtagtgactcttcaattcataactgaattttgacaagttcatttccatcatattcttaccgtgaggtacttcatagaaatttgatcctttctttcttttattctcatataacaagtatttttaaatatctacagtctttatccttgatccaagaggatatttgctgcaggtatagtgtgactactgctcacttattaatagattgatattcaagatgcttgacatttgctttggcttgcacactggccaatcagatcagaagctgaccttatctgatacagtcatattgctgacagtatatatagtaggtgaatacttgcttactttttaaggagtcttatttttcattgttttttctccacttaaataaatgaatacatgttgagcatttattatgttcaagaacctggctttggtactgagg

SEQ ID NO: 334908 - DNA, 538 bp, Homo sapiens
gaaatcagaggattaaggagttaataaacttgattccataaaatttaggtttacacaaccaaaagaacttaaagccaagatttaatgtgcctactgtgttkcaaatgtgtttacgtttgctcactctcccaactttgttaccggctatgtgtcatgtaataggcatacaaataactctgtactacaacatgagtttttttgtctggtggacaaagcctcatctgaaagataatgggtttcgactagatctgggaggacaaatagatattctcccgcattccaaggctgatcaattcataggagctgcctggaaagctgcaatgaaaaggatcataaagccatgtccagacccagagaagacaaataagtagataagtaatgtcgttcaaggccccaggaataacagcaaacataacatatatttccagaccccaaattatatgatctctaaggccagatgttattcaaagtttgtaacaactggtacaacataagactggctaatcagaacaaacaattgaccaatcagatggacacc

SEQ ID NO: 334909 - DNA, 557 bp, Homo sapiens
  misc_feature (1)...(557): n = A,T,C or G
gactggaggattaacaactcamaagtggagatataaaaatagctcttacatttttcctatgtctgtgttcacagcaatgtgtcacacatcaaacacaaaaaacttttcagatttatcactgngagcagtgtttcttcctgaagatgaaataagtctacgaaagattaggaaaacaacggctgtccaagcctgtctacataatttataaagaaggatcattaatttttaaaaataaattttctttgatagtgagagttaaggatctggttagaatgtaaaatgcttgccatgtaaacctgggacagagtgacctcagtaacagagaacccaaagtgaggttttctcttttacatgcatgcatttgttgtcaggcagaaattatgttctctgaaataccagataagttcagaggatgttataaaagatgattccataatcctttctccaatctatgagcttcagtaagctacagagtttcagcagttccccagtggtctaggtcaggacttaatgtgtgtaggaaaatgagccctacatggcctgagctgaactgggac

SEQ ID NO: 334910 - DNA, 557 bp, Homo sapiens
  misc_feature (1)...(557): n = A,T,C or G
gactggaggattaacaactcacaagtggagatataaaaatagctcttacatttttcctatgtctgtgttcacagcaatgtgtcacacatcaaacasaaaaaacttttcagatttatcactgngagcagtgtttcttcctgaagatgaaataagtctacgaaagattaggaaaacaacggctgtccaagcctgtctacataatttataaagaaggatcattaatttttaaaaataaattttctttgatagtgagagttaaggatctggttagaatgtaaaatgcttgccatgtaaacctgggacagagtgacctcagtaacagagaacccaaagtgaggttttctcttttacatgcatgcatttgttgtcaggcagaaattatgttctctgaaataccagataagttcagaggatgttataaaagatgattccataatcctttctccaatctatgagcttcagtaagctacagagtttcagcagttccccagtggtctaggtcaggacttaatgtgtgtaggaaaatgagccctacatggcctgagctgaactgggac

SEQ ID NO: 334911 - DNA, 557 bp, Homo sapiens
  misc_feature (1)...(557): n = A,T,C or G
gactggaggattaacaactcacaagtggagatataaaaatagctcttacatttttcctatgtctgtgttcacagcaatgtgtcacacatcaaacacaaaaaacttttcagatttatcactgngagcagtgtttcttcctgaagatgaaataagtctacgaargattaggaaaacaacggctgtccaagcctgtctacataatttataaagaaggatcattaatttttaaaaataaattttctttgatagtgagagttaaggatctggttagaatgtaaaatgcttgccatgtaaacctgggacagagtgacctcagtaacagagaacccaaagtgaggttttctcttttacatgcatgcatttgttgtcaggcagaaattatgttctctgaaataccagataagttcagaggatgttataaaagatgattccataatcctttctccaatctatgagcttcagtaagctacagagtttcagcagttccccagtggtctaggtcaggacttaatgtgtgtaggaaaatgagccctacatggcctgagctgaactgggac

SEQ ID NO: 334912 - DNA, 557 bp, Homo sapiens
  misc_feature (1)...(557): n = A,T,C or G
gactggaggattaacaactcacaagtggagatataaaaatagctcttacatttttcctatgtctgtgttcacagcaatgtgtcacacatcaaacacaaaaaacttttcagatttatcactgngagcagtgtttcttcctgaagatgaaataagtctacgaaagattaggaaracaacggctgtccaagcctgtctacataatttataaagaaggatcattaatttttaaaaataaattttctttgatagtgagagttaaggatctggttagaatgtaaaatgcttgccatgtaaacctgggacagagtgacctcagtaacagagaacccaaagtgaggttttctcttttacatgcatgcatttgttgtcaggcagaaattatgttctctgaaataccagataagttcagaggatgttataaaagatgattccataatcctttctccaatctatgagcttcagtaagctacagagtttcagcagttccccagtggtctaggtcaggacttaatgtgtgtaggaaaatgagccctacatggcctgagctgaactgggac

SEQ ID NO: 334913 - DNA, 571 bp, Homo sapiens
gttcaatgataatgatgtatctttccatgttctgttcactgagttgcgattaaggaagcacatgtgctttagggaagataaactttggccagtggtttgacctccttcttgcctccgttcccagatttgctatgtatagctgtgtggccttgaacaggtcactccacctgtctggatttctacctgttgttctctcaggagaatgaacttggggattgtaaaactcttgcaagttgtcgtatccttggtgttttcatctagcaaagctgaggaatttgaacacctggatgaartgtttacatttcccagagtagatagtagctcctgaacagggatatgataaaccatctgaaaagattaatcagcagttgagcataaacatgaacaggtagatgccagaggcaggaagatgacagaggaagtcattggattccactcatattttcttcattgagataatcacatgcgacaaagaaagctttccactgtagcacctctgtatacctgacggctctctcattctagcaactcagagtacaaacgtttacatgcactcaggtgctatgagtat

SEQ ID NO: 334914 - DNA, 610 bp, Homo sapiens
aaacatttaagttcacctttgataaatgtcagatcttctggcctacaaatctgttttaatttccccacctgtctcgtagatttttttttaaatttcaacttttattttagatataggaggtacatgtgcagatttgttacatgagaatagtgagtgatattgaggtttggagtatggatcccattacccagttagtgagcatagtacccaacaggtagttttgggtatataccaacctgtttccctccaccctctagtaggccrcagtttctagtgttccaatatttttgtctatatgtgctcactgttcagctccctcttatcaatgagaacatgcaatttttagttttctgttcctgcattcatttgcttaagattatagcctccagccccatccatgttactgcaaaggacatgattccattattttttatggttgtatattgtttcatggtataaatatcccatattttctttattcagtctaccactgatgggcacttgggttgattccatgtctttgctattgtgaatagcctaggaatgaacatacaacttcaggtgtctttctggtagaatgatttgttttcttttgggtatatacctagta

SEQ ID NO: 334915 - DNA, 569 bp, Homo sapiens
gatgcaagaagccacatagagcaatggaaatggtaaatatgttaataaattcaatgaacatttatagtgtaaaayagtaatagaaatgtctcctaagttcacatatatataattaaaatgaataacacttaacagtacaaaagtctgaaggggatagagataagatgttctgaggatctcacattgttcatggccaaaaatagacaagatattcttgaagaataggaaaaagaagggggaaaatgagaaaaaaaaggaggaatggagagagagaagaaaaaaacagactgggagaacttaatttattgaatcaagacttactctacaggtatagtaattgatatagtgcggcataagttcaaatatagacagatagacaacagagcagaacagggtgtccagaaacagactgatggatataaagcacttgattttatgatgaaagtcatgctgcagggcagtggggaaagaatgatctccttggtaagaatgatggttcaattgatatctacagggaaaaaaaattgaaatgacctcttatttcacaccatatatgaaaatgaattccc

SEQ ID NO: 334916 - DNA, 599 bp, Homo sapiens
tgactttggtagcagctatggcaacactttcagcatttattagcttctggaaaaaaaggatgagacttgagagagcctataacaacatttattctggacctcagtctaatctgaagctacacatctgggaaggtaggaagtcaaaaggcccaattcagcctttcagttgtggcaaagggcagaagcttctttacaaataatatgagcaaaaaagacaatagctagttcaacttgacaccctatttgttagcagttaagtaaaacacagagataaatcatgcccagagtgaagaagaataagcagcaggttacttggcataaatctaattatgcattctaaaaagagtcttactttttattctgtttggaagatgggagcaggaggtgaaggagaagaggacaggaaaatarcgagctatacttctttggggcttttagttctttgtccattttgatctctcttgaagatgcttgtcaaatacattttggaagggcaacagcaaaattatgaagcatttttaaaggaagattggttcttaaatccagcagggatagaagaatacatactttcttgtcaagctatacactcattcttgaga

SEQ ID NO: 334917 - DNA, 601 bp, Homo sapiens
attggactagccctcttgccaataacaactataaattctgaatttgaagccttggaaggcactggagagaacgtaaaatcaggagtacactggakgagacttgctgtgaaagacaatatacaaattagctgagattcacatttatccaacttttcccctaagggcatgccctaagttgcatggaagtaagggatagagctcagaccaaaagcatcagtctgactgcactggggagtcagagattggatcttgagctgccagcacagctaggaattaaatgatggttgggggaggtattccagaaaggagttagtcatgtatgaaggagcacatttctacataaaaattcttcttaaatatttggctgactctaaaactatgaatgccagggtaagcctccaaggagaagtcaatcaaatgcacagctggaagcaaagaattgagcagagatgtcagtaggctaagtgctggggagacagagtttggagttcaagtcctaccaggttagagtgaattagtaaacagctaaggcttcccagtaaaacctctgaagggtcatgccttagaagtaaggaccatatcccagaattaagagctgtgt

SEQ ID NO: 334918 - DNA, 601 bp, Homo sapiens
attggactagccctcttgccaataacaactataaattctgaatttgaagccttggaaggcactggagagaacgtaaaatcaggagtacactggaggagacttgctgtgaaagacaatatacaaattagctgagattcacatttatccaacttttcccctaagggcatgccctaagttgcatggaagtaagggatagagctcagaccaaaagcatcagtctgactgcactggggagtcagagattggatcttgagctgccagcacagctaggaattaaatgatggttgggggaggtattccagaaaggagttagtcatgtatgaaggagcacatttctacataaaaattcttcttaaatatttggctgactctaaamctatgaatgccagggtaagcctccaaggagaagtcaatcaaatgcacagctggaagcaaagaattgagcagagatgtcagtaggctaagtgctggggagacagagtttggagttcaagtcctaccaggttagagtgaattagtaaacagctaaggcttcccagtaaaacctctgaagggtcatgccttagaagtaaggaccatatcccagaattaagagctgtgt

SEQ ID NO: 334919 - DNA, 529 bp, Homo sapiens
aacagttattaataaatagcacatgtctaagttgtcaggcacwtttgtaaaaagacccaattcgaaacaaaattagcaggaagagttgataactagggcataattgtttaaaaatgtgagtttttctcaacttaggaaatagtcaacattttatttttgctgtcatcagctaattgtgatatatgtaaagaatgtcataaattttcccattgggtaactgtgaaacatatcatacatgaaattatattttatggttcctctaacaataccagaaccagagattcatgggctaccaattcgctgcaagccttgctatctgttgactatgtttacttttttgatacctggaagtagattaataaatcctcatatatgctttttcaatcggcacactgaaagaagtcagctgcctggcaggcatgcacaatccatgtggtctgatgtgattattctgtgactcatcctagaactcttacttctgctgccatcagtatggtcccgtccttcctgcagtagtcattacccatag

SEQ ID NO: 334920 - DNA, 621 bp, Homo sapiens
tgactatgtttacttttttgatacctggaagtagattaataaatcctcatatatgctttttcaatcggcacactgaaagaagtcagctgcctggcaggcatgcacaatccatgtggtctgatgtgattattctgtgactcatcctagaactctyacttctgctgccatcagtatggtcccgtccttcctgcagtagtcattacccatagcaatgaatcaaagaatcaacataaactattctgtaagccagactcacagcatttggtgttagacagttcttggctttaataggcctttctcctactttatagctggtaagtctgtgtctgggttcttctggctctcctatgaggcttgaaaacattgacactgatccctgagaagacttgtcaacactcactgaaaaatcaggttgcactctgtgaaatgaatgaaacaaaaggtgaccccttcctctcgtcactcattccatagtacagtaactaatattttggaataatgtttgaatgctaggaaacgtgctaaaggtttcatggtcatgatctcatttaatcctcacaatgaccctaaggattgtctccattttacaaaagatgagaacggagtttagagaagttaaga

SEQ ID NO: 334921 - DNA, 578 bp, Homo sapiens
ctccttgtcatagtttttagagcacctggtgcttctttcttgatgtagcttcctcttgccagaatgtaagctccgggagggcaaagcgtttgcccatttggttaccacccatcctggaacagtgccttgtgtaaattagccactcagtgtttgttgcaagagtgtagacctccccytttgtagtaattcactacatgttcagtattttgcaggaaagcagaagccacatctgtttccttactatagtgtccccagtgccttagccagtgctctgcacctggtaggagcttggccttcatcaaaggcacaatggaacgcagatggaagggacgagagccctatctctgcaggagtttggagcatcatttctaattaggcacagtttgtcttcacagtcctgcctctgtctacctctgactgctctgggcctccctcttcctgcatctccagtcttggaggatgctgcagggccttgatctctgctaagcccttatctgataaggtttagtaactttatcttcacttaagtatcagtgcctgcattctgttaggaactctagaagaccaaaaatactttg

SEQ ID NO: 334922 - DNA, 602 bp, Homo sapiens
tgggggagaatgaaaattgtagtgatcattttctctgagggatttttcccccacacactcagttcttacttattaaacggcttttgtatgtcttaggaataaaaagccattcttcctgggtgtcttcttcctgctagcaatggagctctacctggtctcgtcagcaatcacgtcattaaatctgactggcaacttgcagaggatggtggggccgagagacaacaggtcaagttttcgagggtatgtcctctgaaactcatgcaggagttcaggtagtaagaatttgaaagctatcaaaaacagaagtgggcattctccttcttgctgaatgagctactcattcacgaaagccagtgttgagtcagagatttaataaagacatgcaacaagtagctgaaactttaggaagataacaaagccacttcytgaagaaaccaagcattggcaacaaactgagcaggtggagggaaactgtccagatctcataaagatgctggcagtgtagattaggttacagcttccatttttaaaagatttctcagatttctgtcatattctcactgaacggtttctatcctaatctcaaagggcctaacatgttc

SEQ ID NO: 334923 - DNA, 543 bp, Homo sapiens
aaaagcaacagcaggcttaatataaaaataattttgttcagacagacaagtttttaggaaggactaatatctcatatctaactgaagtaaaccacagtcataaaccacagtacccgaagttcagtgagttttcaaaaatacatcacccaccaaagattaatctccaagatcaacaagcactatttgcaacatatgagagtgagtccrctgacaaatggctcggagaaaggaagcatttgaaggtgaagatcactgacaagtgaggctccatggggattaaaatatgaagaccattttgattcactattttttgtatttccaatgctggaatggaagcaaccagtaaaaatgatgaaggttgcaaatgtgaataaacaaaacacatcacataccgggaggatgggacaaattaagggaacagaacttaattcaaaataactttgacaaaattggagtccagggaaataatttactgattcatgtacctcagcatgtgtaaacagatatgaaataacaagactagagttacaaatagcataacaa

SEQ ID NO: 334924 - DNA, 543 bp, Homo sapiens
aaaagcaacagcaggcttaatataaaaataattttgttcagacagacaagtttttaggaaggactaatatctcatatctaactgaagtaaaccacagtcataaaccacagtacccgaagttcagtgagttttcaaaaatacatcacccaccaaagattaatctccaagatcaacaagcactatttgcaacatatgagagtgagtccgctgacaaatggctcggagaaaggaagcatttgaaggtgaagatcactgacaagtgaggctccatggggattaaaatatgaagaccattttgattcactattttttgtatttccaatgctggaatggaagcaaccagtaaaaatgatgaaggytgcaaatgtgaataaacaaaacacatcacataccgggaggatgggacaaattaagggaacagaacttaattcaaaataactttgacaaaattggagtccagggaaataatttactgattcatgtacctcagcatgtgtaaacagatatgaaataacaagactagagttacaaatagcataacaa

SEQ ID NO: 334925 - DNA, 610 bp, Homo sapiens
ttttcttttgtgtctaacaaactaattcaatattcaattttggaattttgaatctgagacctgttgacagagatcatcaaatgtggtagtaaatgaagaagttgtaatagagaaagaagccaacaaggagaagatgagttgtgaagaagtctaaattgccatgtcacaagtcactgaaattgtgcttgagcctctagcatttcttctacactctgagtcaagcctgagcatattgttcttccttgaaatcaaatgcactytgagagacaggaatactagatctcagagacggtcagtgactttgccaacttttccaaggaattagagtctacattacaactcaacttatctggctagcagttcagccattttttgcccatcactaatttacttctaatcatttactttaaaaattatttacttctaatcatctatccataaaattacttgatactacaaaaactatatatctgttatcaagaagacttctcctaccttcatttcttaacacagcagctatttctagctgttgcctctatgaagtttattttacttttctatggacttagattgttcttaaagtttcttctgctggctctcccctacccct

SEQ ID NO: 334926 - DNA, 610 bp, Homo sapiens
ttttcttttgtgtctaacaaactaattcaatattcaattttggaattttgaatctgagacctgttgacagagatcatcaaatgtggtagtaaatgaagaagttgtaatagagaaagaagccaacaaggagaagatgagttgtgaagaagtctaaattgccatgtcacaagtcactgaaattgtgcttgagcctctagcatttcttctacactctgagtcaagcctgagcatattgttcttccttgaaatcaaatgcactctgagagacaggaatactagrtctcagagacggtcagtgactttgccaacttttccaaggaattagagtctacattacaactcaacttatctggctagcagttcagccattttttgcccatcactaatttacttctaatcatttactttaaaaattatttacttctaatcatctatccataaaattacttgatactacaaaaactatatatctgttatcaagaagacttctcctaccttcatttcttaacacagcagctatttctagctgttgcctctatgaagtttattttacttttctatggacttagattgttcttaaagtttcttctgctggctctcccctacccct

SEQ ID NO: 334927 - DNA, 490 bp, Homo sapiens
gctttgactggactttgtcttttttttttttttttttttttttttaatccaaaggctgtcctttttagagtggcttaaaaaataattgctgtaagtcaggaatggatagagcagattgctttacaaataatggtttcctctccttcctgggtgggactcaggggctcagaggctgcaactaactggggccttgatattctctcttttcttaagtgtctgtcaaattaagggatcaatgaaaagtgtccttcctacacgatgtgcttgggtcctgtcccacaactttcatcaacrctaccataaggtcatagacagacccctgacaggttcccaggcaagaggaaacttcttgtggagtaagggaacatctacccactctcctctttatattcataccaccctgttccataagaatcgtcagtgttcccgctgaaagtttcaggacactctcccttgagtggagctgcactcatatttttattggagattc

SEQ ID NO: 334928 - DNA, 490 bp, Homo sapiens
gctttgactggactttgtcttttttttttttttttttttttttttaatccaaaggctgtcctttttagagtggcttaaaaaataattgctgtaagtcaggaatggatagagcagattgctttacaaataatggtttcctctccttcctgggtgggactcaggggctcagaggctgcaactaactggggccttgatattctctcttttcttaagtgtctgtcaaattaagggatcaatgaaaagtgtccttcctacacgatgtgcttgggtcctgtcccacaactttcatcaacgctaccataaggtcatagacagacccctgacaggttcccaggcaagaggaarcttcttgtggagtaagggaacatctacccactctcctctttatattcataccaccctgttccataagaatcgtcagtgttcccgctgaaagtttcaggacactctcccttgagtggagctgcactcatatttttattggagattc

SEQ ID NO: 334929 - DNA, 396 bp, Homo sapiens
atccatccatccatcttatccatcgatccatccatccattcattcrtcacccatccatctgtcctacctccactcatattttatcatacttatataagcagaatatttaacagcaggtttagttggggaaataaccaaattgaatgaatgttggccataatcctttacacagagttctggagctctttactttgccaagcattcattttatttgttggattatagggaaatgaagtcacaggcaggtgctaagctgcaccagggtactcagacggcttgaggcagtagctaatgaccaatggacagtgaagtgtttggatatttaacatatctaacaagaattatggctggttaaattatttaaactccacatttataaattacacacacataaat

SEQ ID NO: 334930 - DNA, 396 bp, Homo sapiens
atccatccatccatcttatccatcgatccatccatccattcattcgtcacccatccatctgtcctacctccactcatattttatcatacttatataagcagaatatttaacagcaggtttagttggggaaataaccaawttgaatgaatgttggccataatcctttacacagagttctggagctctttactttgccaagcattcattttatttgttggattatagggaaatgaagtcacaggcaggtgctaagctgcaccagggtactcagacggcttgaggcagtagctaatgaccaatggacagtgaagtgtttggatatttaacatatctaacaagaattatggctggttaaattatttaaactccacatttataaattacacacacataaat

SEQ ID NO: 334931 - DNA, 396 bp, Homo sapiens
atccatccatccatcttatccatcgatccatccatccattcattcgtcacccatccatctgtcctacctccactcatattttatcatacttatataagcagaatatttaacagcaggtttagttggggaaataaccaaattgaatgaatgttggccataatcctttacacagagttctggagctctttactttgccaagcattcattttatttgttggattatagggaaatgaagtcacaggcaggtgctaagctgcaccagggtactcagacrgcttgaggcagtagctaatgaccaatggacagtgaagtgtttggatatttaacatatctaacaagaattatggctggttaaattatttaaactccacatttataaattacacacacataaat

SEQ ID NO: 334932 - DNA, 484 bp, Homo sapiens
ttatagcaggctaataaggatttaagccatgtttctgtgcccactcaatgcttctgccaaagtcagaaaggatatgcaaaattggaaatagccttgctagatttctggcattatggataattaaatttttatggggttatttacattttacaattaagaaacasaaaagaactgcccacgactgaaaaaaaaaaaaaagtccccgtactctattaaaccctatttttccactatagcaaaaatcatgtgaccaatgtgtttaaaaaaaaaagtcacaaaagataatggcagttacctggcattttgaaaattaaaggacagattgatttttatttttgtttctgtgtttttacttttcaaatgaaagttgtgtgctttaggtgataagattcaattatttagctgaataaaaaacataatctctacattcctgtgttcaaataaaatctgcagtcacactttttaaaggattgagataataatt

SEQ ID NO: 334933 - DNA, 499 bp, Homo sapiens
attatcatagacatcttaagtgaagaaggcaagtagtaaatctgtgtgtatagtttgttataatttatgaaaaaagggagaagacaaatatatctatagatacacattaatatatagrgatatataagtataattcacatattaatgtattatgtatacacctacaaatttacgcagaggtacatatttgtgtctatctgttatcttcttggatttgtgtagaatacctctgtaagaagctagtcacagtgcttgcctctgcaaaagaaattgggtgtctggagaagagtaataggagggggtcttaaaaattgtatatcctttgcacatcttgaattttcaacatcaatgcattgttacctattcaaaaataaatacgtccaactttttataagtccatttgagccctacatatgtcaggacacaaaggagttactcattggcagagtaactgatgtgctgagaatgaagcaccctaaatgtttacttcccttaaaat

SEQ ID NO: 334934 - DNA, 499 bp, Homo sapiens
attatcatagacatcttaagtgaagaaggcaagtagtaaatctgtgtgtatagtttgttataatttatgaaaaaagggagaagacaaatatatctatagatacacattaatatatagagatatataagtataattmacatattaatgtattatgtatacacctacaaatttacgcagaggtacatatttgtgtctatctgttatcttcttggatttgtgtagaatacctctgtaagaagctagtcacagtgcttgcctctgcaaaagaaattgggtgtctggagaagagtaataggagggggtcttaaaaattgtatatcctttgcacatcttgaattttcaacatcaatgcattgttacctattcaaaaataaatacgtccaactttttataagtccatttgagccctacatatgtcaggacacaaaggagttactcattggcagagtaactgatgtgctgagaatgaagcaccctaaatgtttacttcccttaaaat

SEQ ID NO: 334935 - DNA, 624 bp, Homo sapiens
tccttccatggccacccaatttgaattagcacatctgccccactccacttatgatcaaattacctcttatcttattcatgaccctcatcactacctaaaatgatgttataattgttattcattatctcacctgttaacagtgatgtcttttttctctcccaagatcttctccttgacaactccacagcacctccagagaggtttgctcggttggagtgttaccaacaaagtcgttcccccaccaaaaatggggtatttccctgttcgatcccatgaagccaataggcaaaaccaaaagtgaatgtctagcagtgcaggctttatttgatggccataggattgagaagcagaagcttggttcaaaaatcaaattctcagcccatgaaagccaggaagctggaaatacasggcatctttaatgaaggggttgagcattaaaagaaaggggaggaatcttcatgtcttttctgagagttggtagagaactcctataaactggagtgctgcctgcctttttgtctttttatgggggcttccagtcattctcatggtgattgtcacctgtcatggtgctggttgcagtgttacatatcagagagatcagactataatgaagttagaggt

SEQ ID NO: 334936 - DNA, 624 bp, Homo sapiens
tccttccatggccacccaatttgaattagcacatctgccccactccacttatgatcaaattacctcttatcttattcatgaccctcatcactacctaaaatgatgttataattgttattcattatctcacctgttaacagtgatgtcttttttctctcccaagatcttctccttgacaactccacagcacctccagagaggtttgctcggttggagtgttaccaacaaagtcgttcccccaccaaaaatggggtatttccctgttcgatcccatgaagccaataggcaaaaccaaaagtgaatgtctagcagtgcaggctttatttgatggccataggattgagaagcagaagcttggttcaaaaatcaaattctcagcccatgaaagccaggaagctggaaatacacggcatctttaatgaaggggttgagcattaaaagaaaggggaggaatcttcatgtcttttctgagagttggtagagaactcctakaaactggagtgctgcctgcctttttgtctttttatgggggcttccagtcattctcatggtgattgtcacctgtcatggtgctggttgcagtgttacatatcagagagatcagactataatgaagttagaggt

SEQ ID NO: 334937 - DNA, 624 bp, Homo sapiens
tccttccatggccacccaatttgaattagcacatctgccccactccacttatgatcaaattacctcttatcttattcatgaccctcatcactacctaaaatgatgttataattgttattcattatctcacctgttaacagtgatgtcttttttctctcccaagatcttctccttgacaactccacagcacctccagagaggtttgctcggttggagtgttaccaacaaagtcgttcccccaccaaaaatggggtatttccctgttcgatcccatgaagccaataggcaaaaccaaaagtgaatgtctagcagtgcaggctttatttgatggccataggattgagaagcagaagcttggttcaaaaatcaaattctcagcccatgaaagccaggaagctggaaatacacggcatctttaatgaaggggttgagcattaaaagaaaggggaggaatcttcatgtcttttctgagagttggtagagaactcctataaactggagtgctgcctgcctttttgtctttttatgggggcttccagtcattctcatgrtgattgtcacctgtcatggtgctggttgcagtgttacatatcagagagatcagactataatgaagttagaggt

SEQ ID NO: 334938 - DNA, 624 bp, Homo sapiens
tccttccatggccacccaatttgaattagcacatctgccccactccacttatgatcaaattacctcttatcttattcatgaccctcatcactacctaaaatgatgttataattgttattcattatctcacctgttaacagtgatgtcttttttctctcccaagatcttctccttgacaactccacagcacctccagagaggtttgctcggttggagtgttaccaacaaagtcgttcccccaccaaaaatggggtatttccctgttcgatcccatgaagccaataggcaaaaccaaaagtgaatgtctagcagtgcaggctttatttgatggccataggattgagaagcagaagcttggttcaaaaatcaaattctcagcccatgaaagccaggaagctggaaatacacggcatctttaatgaaggggttgagcattaaaagaaaggggaggaatcttcatgtcttttctgagagttggtagagaactcctataaactggagtgctgcctgcctttttgtctttttatgggggcttccagtcattctcatggtgwttgtcacctgtcatggtgctggttgcagtgttacatatcagagagatcagactataatgaagttagaggt

SEQ ID NO: 334939 - DNA, 521 bp, Homo sapiens
aaagaacatcttatagataaaactttagttttttttttctctttttattttactttattttttagagatgggggtctcactatgttgaccaggctggtctcgaactcctggcctcaagctatgctcccatcttggcctcccaaagtactaggattacaggtgcgagccaccgcgccctgttaaactttagtttgtaacttggttccttgtctagtgactttgtttacaaggagaaagtatgatgatgtgtttrtgtatgtatgagaaatatatgctctttctccttcagcctcaggaaccaggcggctgtggctttgcatacttttctgagccagttcttggttagccataggaaatgagattaatgtcagggatctaggagagggcagaagagacaagtctgagtgtgatatttgtggtatccatcccttagttctgcagtccaaagccccagataattttttggctcttttccatcacaattacttagtgattttaagacatattcctgcccttgataa

SEQ ID NO: 334940 - DNA, 533 bp, Homo sapiens
catagccttccaaacaacagatgttacaaagagaaaactgagaattaccagcatagccctttcacctaaagattgagctttgggtggctaccgagaaacatggagaaatgacaccaggttggtttaggcagcaggctgtcatgtttggarcccatggagcaggcctatggggttcattggaagtccaggctcaagccacttcaaactgctccaagcagcccagaaccagtgggttaaactataaatacatgcatatatgcacaaatatttgtttctctttaatcttcactttgtagctgagaaaaccaaagctcagaagtcaaggttactaagtcagggctacctgactttggtgtttacgctttctctgctacacccaatgcctctcaaataaaattaattctcctcacagaatgaaaacatattccatataccttttaaaagcttattataaaactgataatttttttaccactgtaacacaaaactgagttttccactccttagattaacttttaaaaatacctcattgc

SEQ ID NO: 334941 - DNA, 580 bp, Homo sapiens
gattcaatttcctattgttgggccaagtttggtactagcatgatgctacaatgaacattcccatagcaatacctttgtctgcttttataatctcctagaattagaattgctggattaagagtattcatgtgcttaacacttttygtactcatttgtcttagtccattgaggttgctataacaaaataccatagactaagtgacttataaagaataaaaaattgtccctctcagttctggagtctggaaaatccaaaataaaggtgctggcagattcggtgtatcatgaaggcctatttctttgttcctagacaatgtcttctcgctgtgtcctcacatgatgaaaagtaagaatgctggtctcttcggactgttttaagagcactaatccgattcatgggtgctccgccctcacaacctaatcatctcccacaggccttacccaaaaccatcacagtgggaatcaggtttcaacatatgaattttggagcatggtgacacatgcctgtaatcccagctactccacaaactgaggtgtgagaaatgcttgggcccaggagtttgagtccagcctggacaac

SEQ ID NO: 334942 - DNA, 553 bp, Homo sapiens
gtaaaatattttgctcaacatwgggtagtaggcagtggatgctggacttgaaccgaggcagtgggactctgaaagtcacattctttctatgctaccttgatcatgaaggaggttgctatagaagaatcacttgggaccagcaaagaagagttttgggaactcaacctgaggtgctgagtggcccagtttctcaataaatgcctttgatatgatgcaagagactaagtaggaacaactaatgaccaactgggctgtccctacggtctgagagatttagataaaattgtccctacctggtcgggataagtcagtgatccggaatagatgctaacttagcttatcagtccataaaatgtagggtgtgaccactgagtgcagagtctgggactaggagataatggggaatccaagaggatgagaaggccacaaatgcctgctcttatgtagttttcaatctatcagtgtaatagaatttaggaccaaaaggaaaaaataggaacataataagaatcatcacacagaggacagcaaattagtgcagtttatgcagagc

SEQ ID NO: 334943 - DNA, 553 bp, Homo sapiens
gtaaaatattttgctcaacatagggtagtaggcagtggatgctggacttgaaccgaggcagtgggactctgaaagtcacattctttctatgctaccttgatcatgaaggaggttgctatagaagaatcacttgggaccagcaaagaagagttttgggaactcaacctgaggtgctgagtggcccagtttctcaataaatgcctttgatatgatgcaagagactaagtaggaacaactaatgaccaactgggctgtccctacggtctgagagatttagataaaattgtccctacctggtcgggataagtcagtgatcyggaatagatgctaacttagcttatcagtccataaaatgtagggtgtgaccactgagtgcagagtctgggactaggagataatggggaatccaagaggatgagaaggccacaaatgcctgctcttatgtagttttcaatctatcagtgtaatagaatttaggaccaaaaggaaaaaataggaacataataagaatcatcacacagaggacagcaaattagtgcagtttatgcagagc

SEQ ID NO: 334944 - DNA, 595 bp, Homo sapiens
ggttggttccaagtctttgctattgtaaatagtgctgcaataaacatatgtgtggatgtgcctttatagtagaatgatttataatcctttgggtatatgcccagtaatgggattgctgggtcaaatggtattgctggttctagatccttggggaatcascacactcttttttttctggtgctctatttcagagaaatttgacttgagtattacttatcctttccctttttgcttcctttttagtatttgggatctctttgttttgttcatatccatgtagcctgtgtcctaggacctcagcttctctcctatggaaacatttctcttttctccaggaagagcagttggacttctttgcttgccttcattcttagagcccataggtgcccactgaggctaggactaggattagaaagcctccaagcagccttctggaatttatccaatttctggcaccagctctgtctgggatgctaggtaattattatcatggatcagcaaatctcagaaaacctgaacttttcactcaagaacaaggttgctcattgtcaccccattagaataatgaaattaagggaactctgacccctgaggt

SEQ ID NO: 334945 - DNA, 595 bp, Homo sapiens
ggttggttccaagtctttgctattgtaaatagtgctgcaataaacatatgtgtggatgtgcctttatagtagaatgatttataatcctttgggtatatgcccagtaatgggattgctgggtcaaatggtattgctggttctagatccttggggaatcaccacactcttttttttctggtgctctatttcagagaaatttgacttgagtattacttatcctttccctttttgcttcctttttagtatttgggatctctttgttttgttcatatccatgtagyctgtgtcctaggacctcagcttctctcctatggaaacatttctcttttctccaggaagagcagttggacttctttgcttgccttcattcttagagcccataggtgcccactgaggctaggactaggattagaaagcctccaagcagccttctggaatttatccaatttctggcaccagctctgtctgggatgctaggtaattattatcatggatcagcaaatctcagaaaacctgaacttttcactcaagaacaaggttgctcattgtcaccccattagaataatgaaattaagggaactctgacccctgaggt

SEQ ID NO: 334946 - DNA, 554 bp, Homo sapiens
cctttccctttttgcttcctttttagtatttgggatctctttgttttgttcatatccatgtagcctgtgtcctaggacctcagcttctctcctatggaaacatttctcttttctccaggaagagcagttggacttctttgcttgcyttcattcttagagcccataggtgcccactgaggctaggactaggattagaaagcctccaagcagccttctggaatttatccaatttctggcaccagctctgtctgggatgctaggtaattattatcatggatcagcaaatctcagaaaacctgaacttttcactcaagaacaaggttgctcattgtcaccccattagaataatgaaattaagggaactctgacccctgaggttcagcacaaatctatataagcatttcttcattgggcatgtgagaggttgaaatttaaggaggctggtgggagaagaaaagaagttttccccagaattaatctcctttaagaacaaggaaacaatattttactgtcctgaactgccaaaactcatttttatggaatcgaatccatga

SEQ ID NO: 334947 - DNA, 516 bp, Homo sapiens
gtctgaagcctggagaagttagaattggacatatatatttggatattggtatataaatggtgattgaagacatagttgtggatgaaataatttaagatgggctaataaagtgagcagattttaaaattatgaagaacggattgagtcagcaaaggagactaaaaagaaatgcttagaaagttaggtggaaaacttgaaaagtaaaatgatatctagaaaggagggagaaggaagatcaamtatttgcactgtgattttaataagagctatcccagaggctcggtagaggcagaggctagaccaggtgaaataaagaatgagggagaggtgaggaatcaaaggccacaagagaagtccgctcttgagaagtttctctataaagggaagtagggcaacgtggtagtggttggaaggtgaggcaaggtgaagacctttctttctataagaatgaaacttaataagaaattaagaaattgctattttcttatactttcttgttatcttatctataactta

SEQ ID NO: 334948 - DNA, 542 bp, Homo sapiens
atttctttgatgtgagagaggctatgtgaggaccacttggaaaggctgatacgtgtttcctggagtttgagggcccagaaagcaggtcttgaaaactcgcctgaggaatcaaaacatacagctaaactacacgtatttccatgttcatgtacttacttgtaaatctgcaaggaaatatcttacactaacaaacaatagttactttggcatgggcttgttattggagcaaggagggtgtcagctttatttgagcagtttaaagacatactatattgcttcatcaatgagtgagttacatactgaaaactcacttttttcatttatctatgtctgaagagaatataamagctaggcccacaaattcattaacagacactacttttgttaacaaagtgtttcccaaaagttttaggacataattcacttctataaaaaggctttatttttgatctcataccattttcatgaaattttttaaactcttacatgtttatatcatgctcattataaaaattaaataatatagaattcaaataatatag

SEQ ID NO: 334949 - DNA, 610 bp, Homo sapiens
atattgatcttggcaataattttttgtatatagtgccagagctcaggcaacaaaggcaaagataatcaagtgggagatcaaactaaaaagcttctgcacagcaaagaaaacaatcaataaaataaaaaggtggcctatagactggaagaaaatattttcaaaccacatactgataagtggttaatatcaaaaatatatgaagaactcaattcaatagcaactgcccccaacccaaacacacacacaaaaaactaaattaaaaatgggcaaataatctgagcagacatttttgtaaagaagacataaaaatgaccaacaggtatatgaaaatgtgctcaacataactatcatcagggaaatgcaaataaaacccataatgaaatatctcacacctgttaggatggctattacaaaaaagacaagagataagtgttggtgasagcatggagaaaaggaaattcttgtgcgctgctgctgtgaatgtaaattggtacagccatatggaaaacaatatggaggtttcacaaaaatttaaaaatggaattactatatgaccacatgcatatccctctgctgggtgtataataaaaggaaatgaaatcagcacctc

SEQ ID NO: 334950 - DNA, 513 bp, Homo sapiens
gcatggaggcagaaacacaactcaggctggtgcattgagaaggtgagagtgactccttaaagctgcccctggcattcgcaataattgctaccagaccacattttttttctttgcttttcactccctccttcaattcctagcgtgctaacagcacactttagttctgagttattaraaattacatctttcttatattgattcttgacagttgccagctgacctctaattgtttccaggtctgaggtttcaaatttactgatttcctttttgatattttaatctttctcctgtaccctgctcattccctcgcctcccctgctggtttgccttgtcttcagaatttctcaaagcagctgtgaggaccctagctccatttcttgttaattatttctttacattgcaaaggaaaatggccaaccacatagatgggcattgctgttgctacatttctctgacttgctttgaacaactgctgtttacagcagagcaacaggcccacaaactccctctagg

SEQ ID NO: 334951 - DNA, 643 bp, Homo sapiens
cgcttgccaataccatgcagtcttgattagtgtagcttcaagggtaagtcttggtgtcaggttgtgtcatttctccaactttgttcttctccttcaatattgtggtggctgttctgggccctttgccttcccatgtaaactttagaatcagtttgttgatatccacaaagtaacttgctaggattttgattaataattcattaaatctctttatcatggctgaaagaactgacattttgataatattgagttttcctgtccatgaacatgggctatctttttatttgtttaattcttctttaattttattcatcagaattttgtaattttccttatatcaatcttgtatatattttgttatctaagtatttcatttttggggatgctatagtaaataatattgtgtttttaacttcaaattatacttttttattgctgatataaaggaaagttattaacttttatattttaaccttttatcatgcaatcttactatactcacttattagttccaggaggtttttttttaattctttcagattttctatayagacaattatattttttgaatagacaattatatcaccttggagcaaagacagttttatttcttccttccaaatttgtgtactttttatttcac

SEQ ID NO: 334952 - DNA, 668 bp, Homo sapiens
atatatgacaccaaaagcatgagcaacaaaagaaaaaatagggaaattgaacttcatcaaaattaaaaacctttgtgcatcaaaggaatattatcaagaaagtgaaaagacaatctacagaatgggagaaaatattttcatatcatatataccataaggttctagtattcagaatatatgaagaactcttacaactcaaaaacaagacaacccaatttttaaaaatgggtgaaggagataaatagacatatcttgaaataaaatatacaaatggctaacaagaattagtcattagggaaatgctrttcaaaaccacaatgagataccacttcacagtcagtaagataccaataatagtaataataatactaaaacagaaaataacaagtgggggtgaggatgttgagaaattaaacccgtcatacattgctgctggaaaatgttaaatggttcagccattatgaaaaacattctggtggttcctcgaaaagttaaacatagaattaccatatagtcccacaattttactcctagatatatatctacaaataactgaaaacaggtattcaaacaaattgttgtacataactgtttataacagcactattcacaagagacaacaggtagaaacaacccaaatatccatcaagggatgaaatcagaaatga

SEQ ID NO: 334953 - DNA, 668 bp, Homo sapiens
atatatgacaccaaaagcatgagcaacaaaagaaaaaatagggaaattgaacttcatcaaaattaaaaacctttgtgcatcaaaggaatattatcaagaaagtgaaaagacaatctacagaatgggagaaaatattttcatatcatatataccataaggttctagtattcagaatatatgaagaactcttacaactcaaaaacaagacaacccaatttttaaaaatgggtgaaggagataaatagacatatcttgaaataaaatatacaaatggctaacaagaattagtcattagggaaatgctattcaaaaccacaatgagataccacttcacagtcagtaagataccaataatagtaataataatactaaaacagaaaataacaagtgggggtgaggatgttgagaaattaaacccgtcatacattgctgctggaaaatgttaaatggttcrgccattatgaaaaacattctggtggttcctcgaaaagttaaacatagaattaccatatagtcccacaattttactcctagatatatatctacaaataactgaaaacaggtattcaaacaaattgttgtacataactgtttataacagcactattcacaagagacaacaggtagaaacaacccaaatatccatcaagggatgaaatcagaaatga

SEQ ID NO: 334954 - DNA, 583 bp, Homo sapiens
aatagtaataataatactaaaacagaaaataacaagtgggggtgaggatgttgagaaattaaacccgtcatacattgctgctggaaaatgttaaatggttcagccattatgaaaaacattctggtggttcctcgaaaagttaaacatagaattaccatatagtcccacaattttactcctagatatatatctacaaataactgaaaacaggtattcaaacaaattgttgtacataamtgtttataacagcactattcacaagagacaacaggtagaaacaacccaaatatccatcaagggatgaaatcagaaatgaaataaggtatatacgcgcactggaatattattcatctataaaaaatgaagtactgatatatgttaaaatatggatgaacctcaaaagcattatgctatggaagaagccagacataaagagtcaaatgttgtatggttccaatttacatgcacaccttgttttattacacgtctttttattgtgcttctcagacaatgcattttttacaaattgaaagtttgtggcaaccctgagtcaagtctattggtgccatatttctaacagtat

SEQ ID NO: 334955 - DNA, 586 bp, Homo sapiens
tttacaaattgagtggatttgactttcctattttcatttattcactacaaatccagaaaaatcaaataagcatttgcagcaatctatcgtgggataattatagcacagatctgtccaggaatcagagggtacaccctctggggaaagcagttcagcatactgcgtcatccatcaaacctcctttcagtaaatactcatctctcaaaacccctttcagattgttgatgaaatattttaagattctagttaacttggatcaccctgaattatagatggttagggctctgaatcactaggtttattcctcttcaatcatataagacatctcaactactttggcataaaaatgagatttatttttccccaaaaatggccaccaatcaacatgttagtcatattaacttttatgtaatttcagctgataragcagcttcattccggcattaaaggcttggttccatccattgtaattttatagcactcctcctggcctgagggcagttcagacatttggctccagcagtttagaggcggtgaaacagaggagtggctattttcttatgcttaccctacttctttagggtga

SEQ ID NO: 334956 - DNA, 543 bp, Homo sapiens
tgctcttccaccctcagcctctggtaaaattgtactgatacattcacaatatcttaaatgctccatatattttcatgactccctggtctttcattggcacctcccagtgtttgtaatgccttctttgactggtgaatgactgaacttcagaactaagactttagatttycttgcgatatcttgttcataactactcacccatatatcccacttcactaacttttgagcttctgtcacatcaaaaactgattttcctgctgccaaggagtttttgtttctagcagaacaattaagcccaaaataaatacaaagccccagcttttactggtacacactgagatgagataaagataacataatgtacatgttggcataaaataactgatttttcttttctttggaaatatttttctctattctgagatcgtgcccttaatatttttattgctaaaggtattttcttgctgctaattccagaaagcatgtagattatggcagttcaacaatcagaaaattacaaatatattctaaaaatcataccgt

SEQ ID NO: 334957 - DNA, 564 bp, Homo sapiens
aagtaagctttctaaaataatcataaaataatttttaataaatgatttaaaattcagatatatatatatacattttagaggaaaatatattagcaatatgtcttacagcatataccagaataaattgcaaatagaattaaagagttaagtagaaaatgatgaactgagtccacacaaaagtgttaatagagctcactgccaccaccaccaccaccaccacaaccaggataacgagacttaaaagttatagacaagataaatgtttatataacaaaatgtgctagattgtaaaaatggccacagttttttgyagttcttctcatcaacaagtggagtctatttctccactacttgaatctggacttactttgaaactttctttgatcagtagaatgccatggaagtcatattgtgcaagttctaagcttgggcctcatgatgccttaaatgcatgcttcttctttttctcttgaaacctctgttactgttgccatatgagcaagtacagacttggcctgctggatggtaggacatcacgtagggcagagacaagccattccagct

SEQ ID NO: 334958 - DNA, 682 bp, Homo sapiens
cttcatgaccgagaacccaaaagcaaatgcaacaaaaacaataataaataggtgggacttaattaagctaaaaagtttctgcacagcaaaagaaacaatcagcaaagtaaacacacaactcacagagcaagagaaaatcttcacaatctatatatctgacaaaggactaatatccagaatctacagggaactccaacaaataagcaagaaaaaaaaacaaacaatcccaccaaaaaaaatgggctaaggayatgaagagacaattctcaaaagatgatatacaaatggccaacaaacatataaaaaatgctcaacatcactaattatcagggaaatgcaaatgaaaaccacaatgccataccaccttactcctgcaagaatggtggccataatcaaaaaataaaaaaatagtagacgttggtggggatgtggtgaacattacactgctggtgggaatgtagactagtgcaaacactatggaaatcagtgtggagattccttaaagaactaaaaatagaactattgtttgatccagcagtctcactactggctatctacccagaggaaaataagtcattatatgaaaaatatacttgcacatgtatatttatagcagcacaatcacaactgcaaaaatgtggaaccagcccaaatgcccatcaatcaatgagtggataaagaa

SEQ ID NO: 334959 - DNA, 539 bp, Homo sapiens
tttgaactacattgtgatagatatgacatattaaaccttgtagcatgcagckaatatgctacttaatgtgtgatttataactctaaatgaagataaatgaacaaattcaggaaatcaatgatttaaacttccatctcgagaaatgagtaaaaagcccatcaaatcaaacttaaggagattaagtgaaataagcaataaaggtaagagcacatatcaataagattaagaaaactcacaaacatacaatagaaaaaaataatcaaaaccaaaaagttaggtccgtaagaaaattataaaattgataaatccctagcaaaattgattgggaactaaaagtaaattatcaatatcaggattgaaaaggagaacattactacagatcctatagatcaaattataataagaaggtattattaaaaacttcacatgaacatacttggtaatttagataaaaatattacttatcccaactgacaaaagaaactttggtacaagatttatttaaataataaaatttactattaaaatgacagatcaac

SEQ ID NO: 334960 - DNA, 539 bp, Homo sapiens
tttgaactacattgtgatagatatgacatattaaaccttgtagcatgcagcgaatatgctacttaatgtgtgatttataactctaaatgaagataaatgaacaaattcaggaaatcaatgatttaaacttccatctcgagaaatgagtaaaaagcccatcaaatcaaacttaaggagattaagtgaaataagcaataaaggtaagagcacatatcaataagattaagraaactcacaaacatacaatagaaaaaaataatcaaaaccaaaaagttaggtccgtaagaaaattataaaattgataaatccctagcaaaattgattgggaactaaaagtaaattatcaatatcaggattgaaaaggagaacattactacagatcctatagatcaaattataataagaaggtattattaaaaacttcacatgaacatacttggtaatttagataaaaatattacttatcccaactgacaaaagaaactttggtacaagatttatttaaataataaaatttactattaaaatgacagatcaac

SEQ ID NO: 334961 - DNA, 551 bp, Homo sapiens
ttttattactgcatgcatacagcatatgtgccgaattatatatttgattcattttgagcacgttgatgagaatgttgatgtttaacataatgaataatttctaatatttaattaggacccacatcctgattcagactccaggtttgtagcatcaatggtgacttactgcttggattttcagaagcataaaaatcacaatccattttaacagacccaggggaatctaaacattttccakaatttgacacatagtagggatatcagttactggattcatgtacttatcaacaaagctgttggtggaagttgcattgcttttaggtgtatgggaggctcttaaatagtgctactttttcaaagtaaatccttgttcattctttgaacttgtgattccaatccaacaaagactataatttacttctggaattgatgaaaattctgttttcatcaatacttctataatcctttaaaatttttattgcatgatggttgccttcttcaaaaggtatctatccagtttgaacacagacagctgcacttctgaaattatc

SEQ ID NO: 334962 - DNA, 581 bp, Homo sapiens
atggggtgagatgggatggaatggatgtgtgcgcatgtgcatgcacgcgcattcatggtttcagtatctcaagcaattaggattgtgaataaaaacaaattttctcaggagacacacaagaaactggcagaaactaatgaaggcagtaggaagaaggagtggtggtctcactattattcatgattagctgcataccagctttggcatagccactcttcaccatccctaycttgtctttccagcctccattctcaattgcatttcaatgtcaccctcaagcatccaggctacaggaaagaagtcctctccagtggattctttcacagtcaaagtaactcctgctggaaatgaaattctctcaaaaggcatacacatgaaccaaataggggtggctctttgttccccttctgaaacatagcaagtgctgatttccatctccatctcccatttaaaagtagatgtaattaaaattttcttcctgctcttccatacacaggcaccactctttgagagctgcttgcacaaaacctagaaatgaacatcagtccctgtttacacagcaaaaagcttatgaaccaaga

SEQ ID NO: 334963 - DNA, 581 bp, Homo sapiens
atggggtgagatgggatggaatggatgtgtgcgcatgtgcatgcacgcgcattcatggtttcagtatctcaagcaattaggattgtgaataaaaacaaattttctcaggagacacacaagaaactggcagaaactaatgaaggcagtaggaagaaggagtggtggtctcactattattcatgattagctgcataccagctttggcatagccactcttcaccatccctatcttgtctttccagcctccattctcaattgcatttcaatgtcaccctcaagcatccaggctacaggaaagaagtcctctccagtggattctttcacagtcaaagtaactcctgctggaaatgaaattctctcaaaaggcatacacatgaaccaaataggggtggctctttgttccccttctgaaacatagcaagtgctgatttccatctccatctcccatttaaaagtagatgtaattaaarttttcttcctgctcttccatacacaggcaccactctttgagagctgcttgcacaaaacctagaaatgaacatcagtccctgtttacacagcaaaaagcttatgaaccaaga

SEQ ID NO: 334964 - DNA, 626 bp, Homo sapiens
gggctggggaaccacagccagtgacagggagtgaacagacatggggatacagcctggccccttttcctcaaggtggggcaactctgtggtgcygtttgtgatccggagcccctcgtgagaccaagctgagactggactccagttgaactcacttccttggctggcttcttgaccctctcttagcctgctcacctcactctctgtctcctgagaacatcttgtccaacatttatcttctcaagattccccattttggggctctgtttctagcaaacttgatataagatactgtctgttttgggttaaattgtgtcccccaaaaagatatgttcaagtgccaacccctggtagtcatgcatgtgaacttatttggaaatagggtcttttaaaatgtaatcaagttaaaatgaggccatattggcttgggatagttcctaatccaacaacttgtgtccttgtaggaggacagacacagatagacacacacagagggaagactatcatgtttcaatgggagctgagattagagttgccataaatgagaccatcagggattgccagcaaccacaagaagctagggagaagcaaggatggattcttccctagaaccttcagagagagcatgg

SEQ ID NO: 334965 - DNA, 626 bp, Homo sapiens
gggctggggaaccacagccagtgacagggagtgaacagacatggggatacagcctggccccttttcctcaaggtggggcaactctgtggtgctgtttgtgatccggagcccctcgtgagaccaagctgagactggactccagttgaactcacttccttggctggcttcttgaccctctsttagcctgctcacctcactctctgtctcctgagaacatcttgtccaacatttatcttctcaagattccccattttggggctctgtttctagcaaacttgatataagatactgtctgttttgggttaaattgtgtcccccaaaaagatatgttcaagtgccaacccctggtagtcatgcatgtgaacttatttggaaatagggtcttttaaaatgtaatcaagttaaaatgaggccatattggcttgggatagttcctaatccaacaacttgtgtccttgtaggaggacagacacagatagacacacacagagggaagactatcatgtttcaatgggagctgagattagagttgccataaatgagaccatcagggattgccagcaaccacaagaagctagggagaagcaaggatggattcttccctagaaccttcagagagagcatgg

SEQ ID NO: 334966 - DNA, 520 bp, Homo sapiens
gaaaacactaattagctgcacttcagctagtctggagactataagttaataacatcttaagaattaggaaagacggctttggtggtgactgcatagctctgggacattcctgaatccccatattaaaaaaacagagcatgtagatagcaaaacaaaattcmtggatatcattttaaaaactaggtgataaggtatctccacaaaccaaatgtaaatgaaaagtgacaaatcaccatagccacaagtttgtgtgttccatcagtgctggagaaagcagaaggacctatgagtgagggaatgcatagcccaagttatttcctggggatcatagtcagctgatttgagaaagttgatagatctgagcaaacttttgactttatagtagtttgtgagtgcatgggactccctgtaaggcctaaagtggctgaaacagtatacctccatgaaatctcacaactgacccaccaggacatcataccaaagaaacttctgggagaagtatagaggcagcagagccagg

SEQ ID NO: 334967 - DNA, 520 bp, Homo sapiens
gaaaacactaattagctgcacttcagctagtctggagactataagttaataacatcttaagaattaggaaagacggctttggtggtgactgcatagctctgggacattcctgaatccccatattaaaaaaacagagcatgtagatagcaaaacaaaattcctggatatcattttaaaaactaggtgataaggtatctccacaaaccaaatgtaaatgaaaagtgacaaatcaccatagccacaagtttgtgtgttccatcagtgctggagaaagcagaaggacctatgagtgagggaatgcatagcccaagttatttcctggggatcatagtcagctgatttgagaaagttgatagatctgagcaaacttttgactttatagtagtttgtgagtgcatgggactcccygtaaggcctaaagtggctgaaacagtatacctccatgaaatctcacaactgacccaccaggacatcataccaaagaaacttctgggagaagtatagaggcagcagagccagg

SEQ ID NO: 334968 - DNA, 574 bp, Homo sapiens
tggctgacaatatcaaattctgcaggcacatctgaaaagatgcacaagtagctgctggatttggcatttttcagatgactggtaaccttggtaaggttagtttcagtaaagtggcgaggaaagagtctgagtgtgttgaggagggcttgggaaatgaagatgttgggaggttagtatggcctgttattctgaaaggtgcttggctgtgacactgaccagaatgacaggtttttttttcttcttttttttcatttaagaaaataaacaaaaaataggagatggaaatggctgtgaaaatggaactgagtcagctccctgtggtcttgctagtatttgctctttaagtcccaggacatactgyagcttcagaaggatgagccagttggactaagccaccacgagaataatttttttttctttgtcaagggcgactgtcctgatcattttcctacatttatacctgaatcccatctcctgccccctcgctgaaccttctccccgttgacttggttaatgcttgtgcctttactaatcccataacactactgttgacaacattacagtcctctggctc

SEQ ID NO: 334969 - DNA, 473 bp, Homo sapiens
tacaatcccactttcaaggaatttacccttcagtaacagattagcaaacaaataagcaatcacaatctagaatgaagaatattggtctgaaggctatgctctcttccctccaacacattgagaaacatgaaatctggaaacatgctgatggttccttaggctgggctccaaggaattctccctgtaaaagtctctgggccatagagccagctctgcttactctgcatgatatggccccagragaggaaggagtgggcatggaggtagcagtgtggtgcctggaaatgtcagcaggagacgacttggaagtggctgcttggccacgtgtgcatgtgtgtgtgtgtgcatgtgcacactcaaggggtgtgcgtgtgtgtgtgcatgtgcacacactaaggggcttccagatggctcagcccttctagtgaactgcttgccaaggtatgagtgacctcttctgtagggcactggag

SEQ ID NO: 334970 - DNA, 444 bp, Homo sapiens
atcctgcccacggcttcactttctgctcattcattaatcctgaagcatttatttccagcctggatacctttcttgagcttcaaatttgacctgaatagatcaaagtcaacamaaaacaaatcttgcatctctccataaaaatatcttgctgtttctcctttatgctttattgaggttcccggcagcccctcccctcaaatcagaaatttgggacttatgcccagccctctgacactttgtctgccttaattttcttcaaaactggctttaactatccattcttatttttactgcctcaattcaaatcctcagccctcaaccagaccctggtaagagtttgccaattggtcttcctgataccaggtctatacccacccaatttatcctctataatcagacagagatgatgcaatacatgaaattccctgaaaaatatttcaagaa

SEQ ID NO: 334971 - DNA, 536 bp, Homo sapiens
catgttatgctaatagagacattaataaatcacagcatcctttcccactgaacccaaacatacacttcacagttcaatgctctaagtagccattggcaatcaagagttgacatcacagaaaaaatctatccatcatcttagtttttcaatcagtatagtgtaggtgatgcttcagtaataaataactccaaattctcagtagctgaaaacaacagagattcatcttttgtttagattacacatcctttaacagctggctagggactttgytccacatcatgatcatgctcacttcaaggccctagctaatggagtacacttatctggaacactgccaatcagagaggcaaaggagatgtgtggaaacacaaactagctctgaaggccccatacttctgctcacctcccatcgatcaaaggaaatcatacagcacagccatacctaacatctagtggacagggagatacaatcccatcattggcctggaaggaaacagcccgaacactagaccagccctgatgactgtcacactggt

SEQ ID NO: 334972 - DNA, 577 bp, Homo sapiens
gataaactgttgattcctttggttatttatgagttataacatgcatataaatgaacatgttgtattagttggtaaaaattttaaactttatctatgtaaaacatacatttcattctacaggcagctgactggggttaaaaatgagggtctggaatgctattagaatttgtgatcctgaaggcatatatgccctccaaagggtgctccttagaatcacaggatctagcattgcagcgttaatcaaacccatttcctttcctttcataagcgaggaaatagaggcccagaatggaaaagcaacccttgaaccaattactcagcatgagatgacagaggcagaattagaatcaggatccatgtacctcaagccagtgctccttctctctgccgtgctccataggatcagaggatcagaggatcagagccttccacgccagggagtttgactctttgtcgctgtgtaagtyatgctataataaataatctgcagtgacctactcttctctataattccacatggtgattataagccattctatgttatactgtagttgcagcatggtagcttcttattata

SEQ ID NO: 334973 - DNA, 553 bp, Homo sapiens
cataaagacaacaaatatgtcagaattcacaaaattttaagggctcctggctatcctggttgggagccccaagcctagcttggctctggagcctggctcatgggaccacctccctgactggtgcacagccacacctgagggagtgggagggccagccaggacctaaggcgggagcctgattaggaaagactccacgctgtaggacaagggttcccagtgttattaggtagaggacctcttttcagttgcacaggctctggagctagattgctgggttaaaattcctgctctgckattgaccagttgtggggcctcagacaagtcattttacctctttgtacttcagcgtcctcctcagttatgaatccaagtagtaataatttctatttcatagaaatattgtagggactaaatgagttaatccaggtaaaatccttagaggggtatcaggcatacagtaatctcttaataaatgtcagctctttttattgtcattatttgtttacatgtctatggtaggcagaataatgccccacaaagatgtacacaccct

SEQ ID NO: 334974 - DNA, 569 bp, Homo sapiens
gcacaacctgatccccattaccagcaccacagaggggctgcctcgagacccagtggtctataatggatgccatttcacttacggagagtacaacaccctctgcctccatgtcccagagacagagaagccactccacagtcaactctctccccttctgcctgaacctattttccagctccaccaattccacagttgtgtggtcccacatggtggtgcactgcggtcttccaggcagaggcaaatcttgcaggrctaccagctatgggcacactgggtcggcttttatcttagtggtgaccatcagatgcacagaggggatgggaacctctaaaagctcatcccagtcttcactctcctccccactagagctctccatagggtctcaggacttagggtctcaggaggatttagtcatgataactcagacccattgatatggcggctggtgaccgttcaaatgggctacccgacaatccagggtctccatcttgtcatcctgtgcctgcaggcaggacagtaagctctccagtgtttcagcctgagctaacctggcatctctttctaattgc

SEQ ID NO: 334975 - DNA, 569 bp, Homo sapiens
gcacaacctgatccccattaccagcaccacagaggggctgcctcgagacccagtggtctataatggatgccatttcacttacggagagtacaacaccctctgcctccatgtcccagagacagagaagccactccacagtcaactctctccccttctgcctgaacctattttccagctccaccaattccacagttgtgtggtcccacatggtggtgcactgcggtcttccaggcagaggcaaatcttgcagggctaccagctatgggcacactgggtcggcttttatcttrgtggtgaccatcagatgcacagaggggatgggaacctctaaaagctcatcccagtcttcactctcctccccactagagctctccatagggtctcaggacttagggtctcaggaggatttagtcatgataactcagacccattgatatggcggctggtgaccgttcaaatgggctacccgacaatccagggtctccatcttgtcatcctgtgcctgcaggcaggacagtaagctctccagtgtttcagcctgagctaacctggcatctctttctaattgc

SEQ ID NO: 334976 - DNA, 589 bp, Homo sapiens
tcagcttgatgatttcggtttgtttgctgcttcttcttcctttttttttttttttattaaactttattctatctctctgttgaagttgacagttttttcatgcattgttcttaccttggtgaacatctttacaactgtccttttgaattccctgtcaagtaaatcacctgtcttcattccattgagtcagtttctggagatttatcttgttcttttattcagaagatgttttcttcattttcctgttttttcattttccttcactctctgtgttggtctctgcacattagatttaaaaaactaccttccctaatcttgttatactgctcccttttgggagctgctcctgcccaatttgcctgaccagacattccaggtgcctctaaactgtttgtgcatgtccccaacctgctatttttgttcttagtggtccaagaaattcaagtgtcatgtgggcgtggtggcacacacctgtagtcctagctatttgcggggctgaggcgggaggatcaactgagccygggaggttgaggttgcagtgggccatgatcatgatcatgccacagcattccagcttgggtgacagcat

SEQ ID NO: 334977 - DNA, 546 bp, Homo sapiens
tagtctttattatggaatagttgagcaaaagccatatctcacagtcatttactttcctattttagtcattggatccatttttagggtgtaattggtgtttttgtatgttactgttctttyacatgaaattcaattaagcataaatcaggttcttgtgtccacttaacaagagcaaactttgggagcctgcattgcatgcaagccagttctatctaatacacatcttcatactccagggctaaagttgtagcgcttgtaatataatggcaacagtttaaagtaagagtaattatgacttgttccctggattgacaatatttcatgttcctatttagaaagtataaaatactggccttattaaacaccatcttatgttttactacttgaagtgtaagtggaaaacagtgcttgagtgcttttttagaaccacttatgattagatttatttttttctcctgtagccaaatcagtaagcagttttaccaatatacttttctacttatttctattgtttctgttcagctgtttaatattagaagagaaccc

SEQ ID NO: 334978 - DNA, 448 bp, Homo sapiens
aactgcagatattaccaaaaaggttatttttcttagtaactgttttcttttgctgatttattaaaaaaaaaacamaaaacaaaacaaaaaaataaactaaacagattcatgggatcctagcatattaaaattataaacagaagacacattggcaatcagcaagacagtcttccatgcaatatagtaatttgttctgtagtatttgtgattgatacttattttgttcttggatatctctgatgttgagtgattctagttttttacagttttaaaaaattttaagtcaaaatgtaacattttgtaatccatgtctttctgcttttagagtaacaaataatctactcctgcttctacctaacagtccttcaaatatctactttcattttgtcttctttatatcatgtataccaagatctaggctattcacagtattcactgttactgtcta

SEQ ID NO: 334979 - DNA, 504 bp, Homo sapiens
aaaaaaaactatcagaaaagacaaagaaggtcactacataatgacaaataggtcaattcagcaagaggatataacaattttaaatacatatgtgcccaacactggagcacccagatacataaaagaaatattagagctaaagacagagataagccctgatacaactggaaacttcaataccccactttcagcattggagagatcttccaggccaaaaatcaacaaagaaatatcagagttaatctgccctgtagaccaaatggatctaatagatatttacacaacattttatccaaaatctasagaatacacatattttttcctcagcacatggatcattctcaaggatacaccatattttaggtcacaaagtaagtctgaaaacagtcaaaaatatgaaataatatcaagcatcttctctgaccaaaatggaataaaactagaaattaataaaaagaggaattttgaaacaatacaaatacatggaaatgaaacaaaatgctt

SEQ ID NO: 334980 - DNA, 575 bp, Homo sapiens
taacagtggggatggaaagaaatgagaaatttaaaagacattaaagggtacagaagaaaagattagtgtttgatttggatatgaagggtatgggagagggaaacaatatgtatagtgcctatgtttctgactttggcaattgagtgggatgttgtggctatggaaaagagggagaaatgtttgaaaaagaggagtcttgggaagtctttacttcccacctggtagcttgtctagttactcttcctagtaccctagtcaggtatctcagatgaataacttacctcctgaagtcagcctactgcaagtttctgatatctcatctgtctctttgygggctagaagtctaccctagaaacaagtccattgtaaccacctccattggctggagatatgttagatatggacataattccttggtcacagttataacacactaggacattatgtataaattcctacctagatcctgctctgcaatgctcagtctgacaaacataccctgggttttgacaattatattatgctttgaggtctctctgatttttggcaccactttgagctatgtcttcactcag

SEQ ID NO: 334981 - DNA, 420 bp, Homo sapiens
ttactggtttcttatgtatccttcaagagatattacatccaaagattggacacaaagtccattgcatgttactagaaactatttgtttggtcctatccagtctttgtatagatttaaactcatctacatggtctgcttgatcaytttttctgtgaatttaattgtaagtaattaaagtgatctatctcatagttgtttttaggtcttcaactgttaaatggagtccctacacatgagactgtgaaataaatttctgaggtgtactgtgaaataaatttctcatgtgtgcctttaatttttttcttaaagtgttttgtcttacattatggaatgttataagtatatagaattaagaaaataacaaaacagacatccaggtagccatcacagattatagatttttaaattttagcagatccc

SEQ ID NO: 334982 - DNA, 607 bp, Homo sapiens
attatagatttttaaattttagcagatccctcttataaatgaatgaatgaatgaatgttacggaggtagctaaagttccactctcctggcacttccttttctgtctcacatcatgagaaactacagtagtattttgagtttggggcatttttctatgcatatatttttttctacatatgtataggtccagaatatgtatgcatttatacacacacacacacacacacacacacacacacwcacacacgttattgatatgtgctcagacttttacattatcctactctatgtaccattttgaaactttgttaactttttttattaacattttttgaaatttatccatactgatacactaaaatcagttaatttattttaattgctatatatttcagtgtgtaaataaacagttttttatccccaagtgaagaatagttaggttgatgtcacttttttgttgtcaacagtattccagtaaatatttctttaatgtcttctcatatacatgtgcaagtttctttttaagacacctagaagtgaaatttctgtgttctctactatgtgcatgtacacacacacaacttattaaattatctcttcaacatgg

SEQ ID NO: 334983 - DNA, 525 bp, Homo sapiens
accgtcagttactttaatagcaaaatggaagtgatactasccattttgcaaagttgttgtggcatttcaaaggagatattatatataaaattacctagcagagcactagcatatagaactgctcaataaatgaagctcctgttattattatttcaggtatattttctcatgtcattcaacccaagaactcctaatctagattccataaccccgttgcaactgcatgcaaaatttacgtatgtatgcacaagtgcatctttctgggagaaggtacataactttcatcaaattctaaaaacagtaaaaacagtcacttcaacataatccataaaggtgatatccagcatagaacacaatattccaggagttgacttaaacagtgggtaaggttgaagccattagcccccgtaaagcagctcccttccacactcataggagacatcacaaatcaatcactaaattatgttccactgagacctgaagcaaactaataatgcccctcaaaagatagttctagatagacac

SEQ ID NO: 334984 - DNA, 585 bp, Homo sapiens
aaggacaggactggtctgttctgtttatcagagtgtttcccaagcgcttgccacagtgcttggcccatagcaggtgctcaataaatatgcattgaatgaatatccataggccatcttttccattctcttgctatcagaagaaagggtctactgctgctctgctaatcactcagattgtctgtctctttctgtgtatagaaacaaacaacaacaacaacaacaacaacagttctgtmtatgtactctccctccttggggaaaaagagctttagtgccatagctctaaaaatctttccccacagaagggttttaaacttccttttcgtaaaggcttggctgtgaagggaagaccaagaatcagcacaaattcattgggagatacatagttaatctctgcgggtgcatcaccttctaggttaggcagtctctgacccatttgttattcaaccaggaatttccatggttgaagacttccattataaagtctttagaaagtcccaaacatttctaatccgtgggttccacactatctaccaaaatcaaatcccctgaatttagataggaattacaatagaaaccactacc

SEQ ID NO: 334985 - DNA, 585 bp, Homo sapiens
aaggacaggactggtctgttctgtttatcagagtgtttcccaagcgcttgccacagtgcttggcccatagcaggtgctcaataaatatgcattgaatgaatatccataggccatcttttccattctcttgctatcagaagaaagggtctactgctgctctgctaatcactcagattgtctgtctctttctgtgtatagaaacaaacaacaacaacaacaacaacaacagttctgtatatgtactctccctccttggggaaaaagagctttagtgccatagctctaaaaatctttccccacagaagggttttaaacttccttttcgtaaaggcttggctgtgaagggaagaccaagaatcagcacaaattcattgggagatacatagttaatctctgcgggtgcatcaccttctaggttaggcagtctctgacccatttgttattcaaccaggaatttccatggttgaagacttccattataaagtctttagaaagtcccaaacatttctaatccstgggttccacactatctaccaaaatcaaatcccctgaatttagataggaattacaatagaaaccactacc

SEQ ID NO: 334986 - DNA, 590 bp, Homo sapiens
atttgtgtcattgtctggcaagtgcctttgaagattttctttcattgttttctgtactttttcacagactctcatatttggaggatgagttaaatattacctagaaaatcacttctctgatccttcatctccttggcaggatctgtgtcaaatgtcttgattttcacagtagtgatcgcgctttctcccaggctggctgacctgtgctgtctttggtaagttattctgttgagttgtggtgctgcratctttctatccattactttcatctgtggcttctcctttaaccttttggggtcatacagcacaaaatctaatttcgacacgtggcagcctttcacatatttcaaaaatgacccttctgtattccaccaatcagacaggacatggttcagttacatggtttttctcctaaccatctccagtctagcaatttctttactgtggagtgggatgcaaaaaggaaagtcacatttttaggtaggttctgtctgacaagtgtggaaccattactgacctagttggaggtcaaggaagtgtcagaacttcctgtgtgcttgatttgaccaagtgtagcatcttagtctccc

SEQ ID NO: 334987 - DNA, 518 bp, Homo sapiens
cactgagcagcgctgatgacagagatgttctgtgttggtaccacagtcagccgaaagtctctcgtgaaagttttccctcttaaatgttkgtggtggtagttcaaaatggaattggtccacaaaggtattgcacaatagaagatgcagtatcttaaccattgctatcatttgttgatgaccagaagttcaatcacagaaattgataccaatacctgttattactcacaacaatgcgtcatcctttattaggctcctagtgccttttggccattttacactaagacaaaaccactaactgctttaaaaggcgttggtcacaacttttatgatttgagattaatcaaaggcaccgaatgtcagagtctcctacagaactcagccaacttttagggcaaggctctgtacttctccatctttagaaggaaagcagggaaaaccgtggaaatcatgctactttcattctcttcttggaggactatcccctgggtaaaaattcaaggttcttctaattaatacat

SEQ ID NO: 334988 - DNA, 518 bp, Homo sapiens
cactgagcagcgctgatgacagagatgttctgtgttggtaccacagtcagccgaaagtctctcgtgaaagttttccctcttaaatgtttgtggtggtagttcaaaatkgaattggtccacaaaggtattgcacaatagaagatgcagtatcttaaccattgctatcatttgttgatgaccagaagttcaatcacagaaattgataccaatacctgttattactcacaacaatgcgtcatcctttattaggctcctagtgccttttggccattttacactaagacaaaaccactaactgctttaaaaggcgttggtcacaacttttatgatttgagattaatcaaaggcaccgaatgtcagagtctcctacagaactcagccaacttttagggcaaggctctgtacttctccatctttagaaggaaagcagggaaaaccgtggaaatcatgctactttcattctcttcttggaggactatcccctgggtaaaaattcaaggttcttctaattaatacat

SEQ ID NO: 334989 - DNA, 604 bp, Homo sapiens
tactcttcatgacctcatctattcattcatgcaacagatatttactaaatgtttacgttgcaatggacatagtagaatgaatcatcaaaagcttgttattatatattaggttgattttttccaggagaggagtttaggaagacattcagtctccttggtaaacttgtacatgcctttactgtcagccttacttaaccctttacgctatataatatgctttctctcttaattttctcamgagtttgcaagccccttgaggggtaaagatggtatctcaactcttcgcagttctattttatgcaaatagaggcagtggtggctaattgatgattccatcatccagaatatcttatgcctctagcttctgagtgacggagactctgttttttaacagatgatctgaaatgagtttgctgtaggttctttgctgtcttggtcacccctggacatgattggtattctgcatgactatcattggtagtggtagcatggtatcgtaaaggcaaggatgtaaagagaaacaaactcgggcttcagggtgaaaacctttggctctcctacttggaaaatggacttgacctgaaaaatgagaattaaagtctac

SEQ ID NO: 334990 - DNA, 604 bp, Homo sapiens
tactcttcatgacctcatctattcattcatgcaacagatatttactaaatgtttacgttgcaatggacatagtagaatgaatcatcaaaagcttgttattatatattaggttgattttttccaggagaggagtttaggaagacattcagtctccttggtaaacttgtacatgcctttactgtcagccttacttaaccctttacgctatataatatgctttctctcttaattttctcacgagtttgcaagccccttgaggggtaaagatggtatctcaactcttcgcagttctattttatgcaaatagaggcagtggtggctaattgatgattccatcatccagaatatcttatgcctctagcttctgastgacggagactctgttttttaacagatgatctgaaatgagtttgctgtaggttctttgctgtcttggtcacccctggacatgattggtattctgcatgactatcattggtagtggtagcatggtatcgtaaaggcaaggatgtaaagagaaacaaactcgggcttcagggtgaaaacctttggctctcctacttggaaaatggacttgacctgaaaaatgagaattaaagtctac

SEQ ID NO: 334991 - DNA, 557 bp, Homo sapiens
ttggactgtgcagatcagaaggggtgggaatgctgttcttacaggcttaggttttctctctttattcctccatccttgagcccctggaggttcaaaaaagcaaagataccagttattaggaaaaataaagacattctgtgtttgtaagtggctgagttgaatctgtccaaaccagcttayacttgtgcaaactctgtgtctggcttgcacagggttgacattcagcaaatagttccattccccatatttctcctctctctctccgtaatgataaatatgaatacatacatatctatatataaaacctgtgacataaaatatatagaagcaacttggatattaaagtgtgagtttgtatgtgcacctatccccatccatccatatgctagcagtacctacatcccttggaagtaactggataattggagacatgggtgggatgttgaaggggcatttctggtcatcttaatgactgggagtgctattggatgtatcaaggacgctaaacattcatcagactgtcaggcagtcccttatcctcaccaatagagaatttt

SEQ ID NO: 334992 - DNA, 527 bp, Homo sapiens
tttgagggcacacagaaagctaatgacacctccgaggaatagccttctcaggttttagatgccacagatgctaaagccaggatataaaacctttcttatagggcctttaagaatcctcagtgtgcttttattagcaagctgagtgtgtatatagagatgttaatggtctgtggagcaagctcagcttgtttttgcaaactacagaactataaaagttatcagaaaggacacattcttgcctattgctttgttcctttgtttcttatttatttccttctctgtggaatgttagggcactgatcatgtgctgggtccygtggatacaaaggggaatcctctgtggattcttctctctggaagcttgccctccaatgtaggagaaatgtacacgttcatatccacagtgcaaagtatagaaggcaatgacaatgcaaataaagcctaaattaaatggaaatttcgccacagaagaaattacttctagctgataggatcaaagaaagctacatagacaaaagagtggaaat

SEQ ID NO: 334993 - DNA, 551 bp, Homo sapiens
tccaaagaatgggatgaaaggaggattccctgcaccgtcgttttggtttgtcctcttctttcacggggaaagaggagctgaaatgtgcttaattgtttgctgcatttcctgtgcacatgtacttatccctcacatcacccgagaccaagtgaagagggagtgtttagaaaaaagagagggaggctgatacccgttgaaagtaaaatgctggcatcttaattttaagagaacacagaaagccaaatgctttcagaaaagggtcccttcacggagtaatttgcctggtatggcatcccagtttgttgtataatttcagccccgttactatggtaacctgctttagtgtcgcrgcgattgttaatcaggatttgtcgttattcccctttcatcacgaggctctatatccttatggattaaatcgcagttctcatcgacaatggcatagatcaaacattattgccagacataaaaccccgggtcgctccctgtcattttccccgttaccagaagcagcaaatgcaagctgaagtctaacttttgcaaggaaatca

SEQ ID NO: 334994 - DNA, 357 bp, Homo sapiens
aaatgttaaaggtataggaggaaagtcagttgcaagtctttagccttcccatccatgtgccaaaaataaaagtaaaaatgacagtgctctcaaaagacctacagctggcatcattcttcatggtgaaaaactgactgctttcccctcggatcaagagctaggggaagatatccactctcaccacgcctatgcaacatcatgctggagagcctagctagcacaataagaaaaggaagtaaaattcattgagatagcaaaggaagaaatmagctatcattattcgcagaagacatgatcatctatgtcttagccaacttgggctgattggacagagtaccataaaaatggatggctcat

SEQ ID NO: 334995 - DNA, 492 bp, Homo sapiens
ttgcatcaccaaagacaaagggaggaatgatgggaactgatattatgcagataaattgttaattatataaatacacaatagatgctcagtctcaaaagagagactagctttgattcgtgcaaatggcaaacttgcgaaaacaatgccgagcactgaccaggcttcagtgagacaagctttctcctacactgctcatggcacatgaaacgctacaatctaattggaaagcagtctgacaataggtaccaagaatgccaaaagccaacctgggcaacatagcgagactcccattgctacaaaaaataaataaataagttagccaggcatggtggtgtgcacytgtggtcccagctactagggaggctgagccaggagaaacatttgagcccagtagttagaagctgcattgagctatgactgtcccattgcactccagcctgggtgacagaggagaccctgccacaactaccacaaccaaccaagaatgtcaaa

SEQ ID NO: 334996 - DNA, 674 bp, Homo sapiens
tgacccacagaagcagcaaagttatttccttcctccccagcatctgtccatgctggttttgccacattaaaatctcagtgttgtacagagtccccaggtattgtggatgtaattaaggcatraggcccaccgaggaacttgctcatcctatcacccaagtcatactgtcactctggagcccaacgtgtgcctccaaaacatcattaaatgtttctacaagcagttctacaccacagcacgaagagaaggtggcacacgtttctagagaagctccacagtatacagcacatctctcttccttgtgaacatgtcagcggccttaagcatgtaccacactgtcccttgaaggcacatcgtatgcctggaggttgcaaggggcactgtcagctgtcagagagcagctgagcggggagtggtccagtggctcccccaccccgcaccctctcctctctgacagtgataaatgatcggaggtaatggtcagctgagcctgatgggcccacacctccccttccaatctgttccagaccaacaccaacctttcacccttgaacactgctgtcagctttacaaagcaggcctgctgcagggtaaggtcagggctattggctttctggctgctattcgttcgtgaaaacgaattctggctttatttcttgatggaagctccccat

SEQ ID NO: 334997 - DNA, 636 bp, Homo sapiens
ttaattttttgttgctcttgaaaacaaatagtagacatgttgggaacaggcccccccaaaatctggccataaactggccccaaaactggccataaacaaaatctctgtagcactgtgacacgtacatgatggccatgacgcccatgctggaaggttgtgggtttacaggaatgagggcaaggaacacccggcccacccagggcagaaaaccacttaaaggcattcttaaaccccaaacaacagtatgagcgatctgggccttaaggacatgctcctgctgcagataactagccaaacccatccctttatttcggcccatcgctttgtttcctgtaaggaatacttttagttaatctataatctatagaaacaatgcttaccactggcttgctgtcaataaatatgtgggtaaatctctgttcgaggctgtcagctctgaaggccgtgagacccctgatttcccactccacatctctatatttctgtgtatgtgtctttaattcctctagtgccgctgggttagggtctccctgaccgagctggtcttggcaagtggtgccyatacgtgggggctcaaacccaggttgaagggtcgcagaagcaatggaactaagctggagggcacccgagtactct

SEQ ID NO: 334998 - DNA, 547 bp, Homo sapiens
cgccaacctacacacctgatgcccctccctccctgtgcccctccacgttccctgtgcctgcttcatttgctttcctttgcatgcaccacaacctcatgtgctgcctctgctactcagttatcttgatgttgtccattcctgtgtcgcaggcaggatccccgaggacactgattctgtctcttgtgtgtaaacgacacctggagagcctagagctgctcctggcacagtcagagctccccagcactgtgtgatgaatgaatgaataaaagggaacttgggtgtcaccagacctgcatacttctcgggtacagaggaggcaatggcggctctgggtagacggactcgccagggcatcccaaggctgagcaccaggactgaagcccagtactcctgcctcagagcaggttccactgcacctctggccrctgttttactgtcaccgctcaaattcagcctctggttgtgatcatgttttctatgtgcccggcacatagtgagcacttaatagtcattccatgactagataaataaaaagtgaacctataaa

SEQ ID NO: 334999 - DNA, 445 bp, Homo sapiens
agggagggaacatggggaatccaacaccagctctaaccatttctgtctagcattggctcatgtcatatgttgttgtgggagcaaatcaataggatctgctctcctctctgtaggtgtgaagggattctgtgggcttgctctgttctcagcattgctgtggtcctgggcacctgggktgggcacagggtctttgctgaactttgcagcccggtatagtggaccaaatagatcagaacctctgaggagggaccccacatctggagtctgaagagctccccaggtgattctaatgtggagccaggtggaaaaccactgggccagcggaagcaggagtgacaggttcccattcctctccactcccatggtgtccaaagcttgccgatgctggtgccgatgctggttgcactcaggtctccaaggacattagttcaccctttgttacagt

SEQ ID NO: 335000 - DNA, 579 bp, Homo sapiens
ggaagcagcaggggagaggcaagagggctgccgaggctggctggggcgtgctgtctcaatggtggaggaagtggtggggaacgaaggcctccctaagggctccacgccggattctagtttgccggctaatcattgttaaatacatgcacatatttgctcagagcttgactgtgttacttctaatcaattccttttttcctttaagatctggaaatcccattggctaacacagcatgaggtcagcacagccaggtccaggcctgcaccgcagttgtggccacaccacagctgccaagctgacgcagggatgccaccacacagccagggatggagcccacttccccagtgtcggcccaggatrccaggcatctgcagagccttcatctgggccgaggctcccacaggaatgccaacaacacatcctcaggctcctccctttgaagcacatgagagaacggacacaccaacccccactggaagcaggtcagaaaataatgtagtggaataatggataatgatgttgatacattcctacaactttggaaacatgtttattatcacaaaaaatagaaacctagt

SEQ ID NO: 335001 - DNA, 579 bp, Homo sapiens
ggaagcagcaggggagaggcaagagggctgccgaggctggctggggcgtgctgtctcaatggtggaggaagtggtggggaacgaaggcctccctaagggctccacgccggattctagtttgccggctaatcattgttaaatacatgcacatatttgctcagagcttgactgtgttacttctaatcaattccttttttcctttaagatctggaaatcccattggctaacacagcatgaggtcagcacagccaggtccaggcctgcaccgcagttgtggccacaccacagctgccaagctgacgcagggatgccaccacacagccagggatggagcccacttccccagtgtcggcccaggatgccaggcatctgcagagccttcatctgggccgaggctcccacaggaatgccaacaacacatcctcaggctcctccctttgaagcacatgagagaacggacacaccaacccccactggaagcaggtcagaaaataatgtagtggaataatggataaygatgttgatacattcctacaactttggaaacatgtttattatcacaaaaaatagaaacctagt

SEQ ID NO: 335002 - DNA, 535 bp, Homo sapiens
gccagggtctgtgtttcttgacctcttctttccttcctttgtttccggtaaaagctgaagcccaactccagagtcaaaaccacttcccagagatgaggaggatagggtggtcgtggggtctgagtctggccatgcagaaagccctggcatggttaccggagcacagtgttggctgagacagggattcagaagaaggagggactgagggggccaggggaggttctggttgggttttgaacaggttgggttcatagttgccctgtggggttrggctgaaggcatctggaggcatcgtatagagctaagagtgatccggtgcctctgagtgtaagtctcagtaaagcaatgccagcctgcctttgcaaataggcatcgaggcttcaaaatccccttaaaaccaacttattttaactagaaattggtatgatagttatctgagtgggtcatttgtatagaaggttaaatagtgggtaaaagccagagcagaaaacatcctttagcaaatccacctgtctgtgctactcgtgccggggaa

SEQ ID NO: 335003 - DNA, 535 bp, Homo sapiens
gccagggtctgtgtttcttgacctcttctttccttcctttgtttccggtaaaagctgaagcccaactccagagtcaaaaccacttcccagagatgaggaggatagggtggtcgtggggtctgagtctggccatgcagaaagccctggcatggttaccggagcacagtgttggctgagacagggattcagaagaaggagggactgagggggccaggggaggttctggttgggttttgaacaggttgggttcatagttgccctgtggggttaggctgaaggcatctggaggcatcgtmtagagctaagagtgatccggtgcctctgagtgtaagtctcagtaaagcaatgccagcctgcctttgcaaataggcatcgaggcttcaaaatccccttaaaaccaacttattttaactagaaattggtatgatagttatctgagtgggtcatttgtatagaaggttaaatagtgggtaaaagccagagcagaaaacatcctttagcaaatccacctgtctgtgctactcgtgccggggaa

SEQ ID NO: 335004 - DNA, 535 bp, Homo sapiens
gccagggtctgtgtttcttgacctcttctttccttcctttgtttccggtaaaagctgaagcccaactccagagtcaaaaccacttcccagagatgaggaggatagggtggtcgtggggtctgagtctggccatgcagaaagccctggcatggttaccggagcacagtgttggctgagacagggattcagaagaaggagggactgagggggccaggggaggttctggttgggttttgaacaggttgggttcatagttgccctgtggggttaggctgaaggcatctggaggcatcgtatagagctaagagtgatccggtgcctctgagtgtaagtctcagtaaagcaatgccagcctgcctttgcaaataggcatcgargcttcaaaatccccttaaaaccaacttattttaactagaaattggtatgatagttatctgagtgggtcatttgtatagaaggttaaatagtgggtaaaagccagagcagaaaacatcctttagcaaatccacctgtctgtgctactcgtgccggggaa

SEQ ID NO: 335005 - DNA, 512 bp, Homo sapiens
atgtcagaacatgaacagtgctgcaccagggcatgctatagccaaggctgatgcggacggtgtggattttattgctgtgctgaaaaggtccctgtgctcgtggatgctggccaccccttccactacatacatattaatcataattatcttaaagtcctcgtgtgaggttttcatcatttgggccatctctgtatctgattctattgatttacttgtctcttgattgtgggttattattactattttgctttttttgtgcgcatgatcttttttattcaatactgaacattatttggagaccagggatgatggaggtatatagtaattacccccggaaatgggcatgcctcttatgctgtgaagccattaatgtggagggttgatacaatttggacaaaagatgagctgaatttgagrtttgttgttgtcatggctcttgctgtctacaggctttcagttcctcctttcaccttgtgtgcagggtggggtatggctggcgtgttggaaagtct

SEQ ID NO: 335006 - DNA, 507 bp, Homo sapiens
ttcacacccctttactttggggatgcggggacaagcaccagcaagggcccctgggcttggctcccccarctctgagggagccttcgcctgctcctccacctgaccctgcctgtccagctgctgggccgcaccaagaggcaggaaactcccctctctcccagagctcagagacttgtaacttctcatgagtctcttttcaattttttaaccactttagtgaggtctgattgacatacaaaaagctgtgcatatttaatgtgtacaacttgatgggttcagaggtaggtacacacctgtgaaaccatcctcccagtctatgctgttagcatatccatcacctccagaggctcctttttatttattattgtagatgataatttcacatcagatctcacctaggagcaaatgtttatgtgcacaacacagcactgctagcagtaggcactgtgctgcacggtcgggctccaggacttactcatcttgctacctgacccttggtacacactg

SEQ ID NO: 335007 - DNA, 507 bp, Homo sapiens
ttcacacccctttactttggggatgcggggacaagcaccagcaagggcccctgggcttggctcccccagctctgagggagccttcgcctgctcctccacctgaccctgcctgtccagctgctgggccgcaccaagaggcaggaaactcccctctctcccagagctcagagacttgtaacttctcatgagtctcttttcaattttttaaccactttagtgaggtctgattgacatacaaaaagctgtgcatatttaatgtgtacaacttgatgggttcagaggtaggtacacacctgtgaaaccatcctcccagtctatgctgtwagcatatccatcacctccagaggctcctttttatttattattgtagatgataatttcacatcagatctcacctaggagcaaatgtttatgtgcacaacacagcactgctagcagtaggcactgtgctgcacggtcgggctccaggacttactcatcttgctacctgacccttggtacacactg

SEQ ID NO: 335008 - DNA, 507 bp, Homo sapiens
ttcacacccctttactttggggatgcggggacaagcaccagcaagggcccctgggcttggctcccccagctctgagggagccttcgcctgctcctccacctgaccctgcctgtccagctgctgggccgcaccaagaggcaggaaactcccctctctcccagagctcagagacttgtaacttctcatgagtctcttttcaattttttaaccactttagtgaggtctgattgacatacaaaaagctgtgcatatttaatgtgtacaacttgatgggttcagaggtaggtacacacctgtgaaaccatcctcccagtctatgctgttagcatatccatcacctccagaggctcctttttatttattattgtagatgataatttcacatcagatctcacctaggagcaaatgtttatgtgyacaacacagcactgctagcagtaggcactgtgctgcacggtcgggctccaggacttactcatcttgctacctgacccttggtacacactg

SEQ ID NO: 335009 - DNA, 632 bp, Homo sapiens
aggccatgttcacaggtatgggggttaggatgtggacacgtcttttggggtccaccatttagcccaccgccctctgcttctacatcttcccttgaattgttctaattccaaactgagaggttgaattgtagcctggctgagaggtatccccaagcatgacatgtcctggggagggggcatcacggttgggctggctctgagcttcgtttgccttcagtaccccctgtgggggttgggggatggctgcatgccctggctgtctccctgagtctggttccaggtcaaagaagcccctggccacccttccattgagccctgccgataggctgtggcccaggctgctctttggagttctccctgactaggttcaccctcagggatccttttctaaggccagggacagaygcaaacaggcaacaactgttatggggactttttctctctttctgaatgtgacattagaaaaaatgtcacatttagaagaaagttaaactataccctgagttggaaggagaggggtgacattcccgtctgtgtctccagggttggaaatgatggattagcactgcattgaagcggagagaggctctctcagctctgtagacagaaggaccaggtcctctgtgtgcaaa

SEQ ID NO: 335010 - DNA, 474 bp, Homo sapiens
agccaagtcatgctgacactctgcttgcaggcctgcttgtgggtggggcgatggctgragctggcagaagagcatggcccaggcctgaggtcgactctgtgaggtgggggggacctgggcagaggcagggttccgcagaagccccagtagcctgggcctgcttcaggcaagagctcactggcacacatgtgtttttgagtgtgggtgcacctccataaaaatgctggctttctctggaaagcatcttattttcttggtaaacactcatgtatttggggaccaaaatatctgatttatagacactgtatatatagataaaaagtgaaaaactgtgtttgtggagtgggaggggaagggagaaagacagagcgaggggcaggaggttttccaacaacacttaaaagaagtcaaggtggggactctgcagaggggagatggattttgtttactctctacctatttcttctttctctt

SEQ ID NO: 335011 - DNA, 624 bp, Homo sapiens
tcaaaggttgaactaatttacactcccaccaacaatgtataggctctgcaacttagccagaatcggctattttttttttgccattttatgatagccattctgactggtgtgagatagtatctcattatggtttygatgtgcatttctctgatgatcaataatattaaactttttcatatgcttgttggcggcatgcatgtcttcttttgaaaagtgtctgtttatgtcctttgcccacttttaatggcattggttgatttttgcttgttaatttgtttaagttctttatagatgcaggatattagacctttgtcaagtgcatagtttgcaaatattttctcccattctgtagagtgtctgtttactctgttgatactttcttttgctgtgcagacgctcttaagcttaattagatctaaatttttaatttttgctttttttgcaattgcttgtggcatcctcatgataaaatctttcccagttcttatgtttagaatggtattgcctaggttgtcttccaaggtttttataattttgggttgtacatttaagtctttaattcatcctgagttgatttttgtgtatgatgtaagggaggggtcaagttttaatcttctgtatatg

SEQ ID NO: 335012 - DNA, 404 bp, Homo sapiens
acgatgcatggatttccactggtttgcactaaaataaacttgtcctaacttctgataacctttctgaactagatctagtttgaggcactaagaaggatgagacatccwctgaaaaggactcccgtcagagcaacatgaattccacgaaaattgcagcaagaggaaacatcaaatttatggtgaagcttgggtggaagattgaagaaatcattgacgttttaagaaaagcttgtaaggacactaccccaaagaaatgaactctttacgaatgtatagcttgtttcaagaagaggtgagaagatgtggaagatgaatcctgcagtggctgcgaaaaccactgtgcccagatcagctgcagttacgacgagagctatcagtggaaattttaaacaggagggatcacg

SEQ ID NO: 335013 - DNA, 404 bp, Homo sapiens
acgatgcatggatttccactggtttgcactaaaataaacttgtcctaacttctgataacctttctgaactagatctagtttgaggcactaagaaggatgagacatccactgaaaaggactcccgtcagagcaacatgaattccacgaaaattgcagcaagaggaaacatcaaatttatggtgaagcttgggtggaagattgaagaaatcattgacgttttaagaaaagcttgtaaggacactaccccraagaaatgaactctttacgaatgtatagcttgtttcaagaagaggtgagaagatgtggaagatgaatcctgcagtggctgcgaaaaccactgtgcccagatcagctgcagttacgacgagagctatcagtggaaattttaaacaggagggatcacg

SEQ ID NO: 335014 - DNA, 551 bp, Homo sapiens
gcggggtttaaagctgttttgtgttcacaatacttcctccacaaagtattcacacaccatctccagctgctgctattctctctgctacttctgcactttttccatggctccattactgccccttgactggatgatttatgtgtttaatattcaggctgtctgtcttactagcatggaagttctttgaggtgtttcttttctgtgtaatctcacaggcattatwtatagatgcttaaaaaatcttgttgagtgaattaatgaattaatgagtgggtggatggatgatggtaccagtcaggctaaaatacataactgcccatgagaagttactgtttggcacttgtattggtcaggattctcgagagacacaaaaccaataagatatacatatacagtaatgtgctatataatgatgtttcagtcaaggagggagctcatttatgatggtggtctcataagattataacggagctgaaaatttcctatcgccacgtggtgttgtagctgtcataatgcaatacattacttacatgttcatgatgacactgatg

SEQ ID NO: 335015 - DNA, 585 bp, Homo sapiens
tagtcattctgtgtccgccatttaggatgtatattttcgctctcagaagcttttcagaaataagctagagaaaagaagatccaagttacttacagacatgtgtaactaaaccaaaatcagagtgttcacaaaaactttaacccatgtatgcagaccaaacaaaacattaaactaggtgtccagaaccaatgtgaattcaccagaaaagtcatgcctgagaaacaatataaattctgtaaaaactagagtactcttatctttacaccagaaagcgtttgcaaaacaaacaaacmaacccccaaaacttccatagttttaagagggatgcaagttcctttatttaaggctgccttagtaccaaaccaaatcctgaagaaagtcaaaaagcctctaccaaaaagagactcagcctaagagaagattcaccaggtcagaaaagacaaggcatgcacgtggcgagctcagagatctcaagtgaatactgcacaccagttccaagaatcgcagattccttctaaaagtgctcttgcttcaggtcctgcttctggacacatttatgtcaacctaaataacaaacagagagat

SEQ ID NO: 335016 - DNA, 597 bp, Homo sapiens
gtgaaccccatccaattatttgaaggccttaagcacaaaaagtgaggtttattggagaagaaggaattctgtctcaatattgtaaaatagaagtactgcctgagtctcaagccttctcttgtcctgcatattttagactcaagcttgcaacaacaactcttgcttgactttctagtttgctggactgctttatcaattttggacttgcccccctccataatcatgtgagccaattcatgaaaacaaatctctctcgctctttctctctctctctmtatatatattcagtcatgcattgcttaataatggggatgtgttatgggaaatgtgtcattaggtgatttcattgttgtgtgaacatcatagaatgtacatacacaaacctaaatagtatagccttctacacacctggcatatcaggtagaccctattgctcttaggccacaaaactatatagcatgttactgtgttgaatactgaatactgtaggcaattgtaatataatggttaagtattattatatcaaaatatagaacaggtacagtaaaaatatgacatacaagattaaaaatagtactcccatataagacacttacc

SEQ ID NO: 335017 - DNA, 503 bp, Homo sapiens
agcatgttactgtgttgaatactgaatactgtaggcaattgtaatataatggttaagtattattatatcaaaatatagaacaggtacagtaaaaatatgacatacaagattaaaaatagtactcccatataagacacttaccatgaatggagcttgcagggctggaaggtgttctgggtaagtcagtgagtggkgagtcaatgtgaaagctgaggacattaccttacactactgtggactttataaacactgtgcacttagggaacactaaatttacaaaaccttcctttcttcaataataaattaaccttagcttactataactttttatgtgtaaactttttaattgtttttaagtttttgatgcttttgtaataacacttacttagcttaaaacacacattataaagctgtagagaaattatttatttgtttatgtgcttattctacaagttttttcctgtttttaaatttttgttactttttgaacttttctgttaaaa

SEQ ID NO: 335018 - DNA, 550 bp, Homo sapiens
accccaacccccgactcccggtmccccggaatccctgccgcggcccctcgggcctgtccacatccctctgcccctcccagacctctgtccttccaccaatcgcctcccgcagccccgagccgccactcccagtcccccgagtccctgccgcgcgccctcgcgcctgtccacatccctctgcccatccgagacctctgtccttacaccactagccaccccacgtgggacttccatggcttctgagtacaaggccagccccccggcccaccagctttcggaatgcctgcttacctctttttctgtagaggcaccacagggaggtgggtgaagcacttcggctctggagttacagatctgggttcaaggccaaattccaccacttactaggtttgtaatattggacagataacgtctttgcgcttctaccttttggtctttaaagtgtgatcaaaagagacttagactcccacatagtaataataataataatggcaaacttaacaccccactgtcaacattagacacaccaacgagacagaaagttaaaaaa

SEQ ID NO: 335019 - DNA, 550 bp, Homo sapiens
accccaacccccgactcccggtaccccggaatccctgccgcggcccctcgggcctgtccacatccctctgcccctcccagacctctgtccttccaccaatcgcctcccgcagccccgagccgccactcccagtcccccgagtccctgccgcgcgccctcgcgcctgtccacatccctctgcccatccgagacctctgtccttacaccactagccaccccacgtgggacttccatggcttctgagtacaaggccagccccccggcccaccagctttcggaatgcctgcttacctctttttctgtagaggcaccacagggaggtgggtgaagcacttcggctctggagttacagatctgggttcaaggccaaattccaccacttactaggtttgtaatattggacagataacgtctttgcgcttctaccttttggtctttaaagtgtgatcaaaagagacttagactcccacatartaataataataataatggcaaacttaacaccccactgtcaacattagacacaccaacgagacagaaagttaaaaaa

SEQ ID NO: 335020 - DNA, 325 bp, Homo sapiens
ctttcactcagtgtaccatcctctaggctcattcgtgttgccaatgagatgatttctttcttttttaaggctgaattgtgttctattgggyatatgtaccgcttttctttttatgtttaattttttttggttttttgagacagagtttcgctcgcgtcgcccaggctggagtgcagtggcgtgatttcgagtcactacaacctctgcctcccaggttgaagtgattctcctgcctcacctgagattagaggcatgtaccggcatgtccggctaattttgtgtttctagtagagatggggtttcaccatgttggccaggctggtct

SEQ ID NO: 335021 - DNA, 325 bp, Homo sapiens
ctttcactcagtgtaccatcctctaggctcattcgtgttgccaatgagatgatttctttcttttttaaggctgaattgtgttctattgggcatatgtaccgcytttctttttatgtttaattttttttggttttttgagacagagtttcgctcgcgtcgcccaggctggagtgcagtggcgtgatttcgagtcactacaacctctgcctcccaggttgaagtgattctcctgcctcacctgagattagaggcatgtaccggcatgtccggctaattttgtgtttctagtagagatggggtttcaccatgttggccaggctggtct

SEQ ID NO: 335022 - DNA, 536 bp, Homo sapiens
attcagatcactgattcatattttacacagccagtgattatattttaaaactagagatgctggtaggatgatggccaagctcagaatgcagtgagtttcagcctacttgtgctccccactctckatgaaatggctggcaagcagctcaagtctgatttgtgtgctggaccacagaacagatgacactcctatcctgttatgtttgctttagaagcattttaaaatgctctttggatgaataatattaaaatctcccaaaccaaatgaaggcattacataaaacaaataataaattaataccataaagacatttctggccaattactttcccacatagtaattttaaaaacatgcatatttcacaactagggagccaatttggatttgagaatgtagctgttagaatgacctagttattatatttctatgtgctttatttggggaccgttttgataagcccataggtagtaaaaatacttctttaaaaagaaacaaaaactgttgttttctatctgctgtcatgtgtctagaaagca

SEQ ID NO: 335023 - DNA, 506 bp, Homo sapiens
agtgttaaataatgtcagatacctcacttaacacacagtaatatacattttatgagtatcattatttaatcatttattcacatattccaacagaccacaggtatagctattgattttcttcttcagtcccagcgttcagtaaatttattcatttgataaatactcagctagtcccaggcaccttggtaagacaaatatttactctggtgactctgccaatgatcaaaatattttcagaacttttttttatttgttttttggggtcagaagtgtgtcaattatataacaccttacattcatggagccagtgcacaaacattgtcacattgtctaatctagtccttatactaatcaggggattatcacaattcatatwccaggagcacactgctaactgtatcccgctcaatatatacttgaaagaatgacttctaaacacatttgacagccgaaaatggagactggagggaagtgagtgactctgttcacaaagtcaacatccaaga

SEQ ID NO: 335024 - DNA, 322 bp, Homo sapiens
accagtgtggccaacatggtgaaaccccatctctactagaaacacaaaattagccggacatgccggtacatgcctctaatctcaggtgaggcaggagaatcacttcaacctgggaggcagaggttgtagtgactcgaaatcacgccactgcactmgagcctgggcgacgcgagcgaaactctgtctcaaaaaaccaaaaaaattaaacataaaaagaaaggcggtacatatacccaatagaacacaattcagccttaaaaaagaaagaaatcatctcattggcaacacgaatgagcctagaggatggtacactgagtgaaag

SEQ ID NO: 335025 - DNA, 322 bp, Homo sapiens
accagtgtggccaacatggtgaaaccccatctctactagaaacacaaaattagccggacatgccggtacatgcctctaatctcaggtgaggcaggagaatcacttcaacctgggaggcagaggttgtagtgactcgaaatcacgccactgcactasagcctgggcgacgcgagcgaaactctgtctcaaaaaaccaaaaaaattaaacataaaaagaaaggcggtacatatacccaatagaacacaattcagccttaaaaaagaaagaaatcatctcattggcaacacgaatgagcctagaggatggtacactgagtgaaag

SEQ ID NO: 335026 - DNA, 548 bp, Homo sapiens
aaccccaacccccgactcccggtcccccggaatccctgccgcggcccctcgggcctgtccacatccctctgcccctcccagacctctgtccttccaccaatcgcctcccgcagcccgagccgccactcccagtcccccgagtccctgccgcgcgccctcgcgcctgtccacatccctctgcccatccgagacctctgtccttacaccactagccaccccacgtgggacttccatggcttctgagtacaaggccagccccccggcccaccagctttcggaatgcctgcttacctctttttctgtagaggcaccacagggaggtgggtgaagcacttcggctctggagttacagatctgggttcaaggccaaattccaccacttactaggtttgtaatattggacagataacgtctttgcgcttctaccttttggtctttaaagtgtgatcaaaagagacttagactcccacatagtmataataataataatggcaaacttaacaccccactgtcaacattagacacaccaacgagacagaaagttaaaa

SEQ ID NO: 335027 - DNA, 226 bp, Homo sapiens
gagtttcctttctcctcactcttctcctccttgagggagctgctgtgccggacagacctgcccccgtgtctagacactggtagactcgtttaagttcctcacaggcaatcctccatggggtcaaagtggaaggacttatttcttcagggctcagtartccacatcctggcgcgcaccttcaccagcccagggcggggtagaggagggtgaaagggcgtggctcaga

SEQ ID NO: 335028 - DNA, 597 bp, Homo sapiens
gcggcttaacttgcccaaaataataatgattgtaatgagcactggctgttggtttcttatgtacttggtactttgcacgtattaacgcagtcagtcctcctaacagttgtgagagagatagcattcttatccccattttacagatgaggaacctgaakcccaggtgataagtagtttatccaaggtatcatagctagaagtcgggtgcaggcagtctggctccagagcccctgctctgtccgctgacctagctgacttcccaagagtcaaagtggattcttccccaagaccaaccaattacaatgactgaatcagtcagtcaacttcgaactgggctccaagagagaacgaaccatcatgcctctctaaatcctcatttctagtttgaatcttcaaggagagatagacactaagtagctagttttgctggaatggctgattttatcaatgttttcggtgtgtgagtgtgtgtgtgtgtatatgtatagaactaaattaaactgataatttgaatgcttacacttccattagttcaatttgtgtatgtgagccctcacacacatacatacacacacacaaactgttccagaacagtga

SEQ ID NO: 335029 - DNA, 601 bp, Homo sapiens
tatacccacaaactaagaaagtggccaacgaggcggccccggaggcragccgccatttgggagaggagcacagcccggccggtgctcccgaaggcggcaagatgttgcgagccacagctccctgctggttcccacctggatacccacaaactaaaaaagtggccgaggaggcggccctctaggctccagaattcccactgccctctcatcagcctgcccagagcttcgggctctgggtgccccagatgcacaagcaggcctcagcatttgtggacatccaggcggagccccagaacaggggtccggcggtgcccccagcgtggcccaagatggtgacggagtcgtgctacttccctgcgcagaggggatcggcctgccgcttgccagccgccccaaggctgacagagaggccctcgggagtccgcatctcagcccccaggaagaggaagacgatcgcccactcttccagcccttgcttggtcacaggttacacagatgccaagagaacccgggtggccagcagcagccaacgctcccgtggctccaaggtcggcagacagccagggaagacgcgcaacaggtcagggatggcatgcaagac

SEQ ID NO: 335030 - DNA, 601 bp, Homo sapiens
tatacccacaaactaagaaagtggccaacgaggcggccccggaggcgagccgccatttgggagmggagcacagcccggccggtgctcccgaaggcggcaagatgttgcgagccacagctccctgctggttcccacctggatacccacaaactaaaaaagtggccgaggaggcggccctctaggctccagaattcccactgccctctcatcagcctgcccagagcttcgggctctgggtgccccagatgcacaagcaggcctcagcatttgtggacatccaggcggagccccagaacaggggtccggcggtgcccccagcgtggcccaagatggtgacggagtcgtgctacttccctgcgcagaggggatcggcctgccgcttgccagccgccccaaggctgacagagaggccctcgggagtccgcatctcagcccccaggaagaggaagacgatcgcccactcttccagcccttgcttggtcacaggttacacagatgccaagagaacccgggtggccagcagcagccaacgctcccgtggctccaaggtcggcagacagccagggaagacgcgcaacaggtcagggatggcatgcaagac

SEQ ID NO: 335031 - DNA, 601 bp, Homo sapiens
tatacccacaaactaagaaagtggccaacgaggcggccccggaggcgagccgccatttgggagaggagcasagcccggccggtgctcccgaaggcggcaagatgttgcgagccacagctccctgctggttcccacctggatacccacaaactaaaaaagtggccgaggaggcggccctctaggctccagaattcccactgccctctcatcagcctgcccagagcttcgggctctgggtgccccagatgcacaagcaggcctcagcatttgtggacatccaggcggagccccagaacaggggtccggcggtgcccccagcgtggcccaagatggtgacggagtcgtgctacttccctgcgcagaggggatcggcctgccgcttgccagccgccccaaggctgacagagaggccctcgggagtccgcatctcagcccccaggaagaggaagacgatcgcccactcttccagcccttgcttggtcacaggttacacagatgccaagagaacccgggtggccagcagcagccaacgctcccgtggctccaaggtcggcagacagccagggaagacgcgcaacaggtcagggatggcatgcaagac

SEQ ID NO: 335032 - DNA, 424 bp, Homo sapiens
aattcagtagcttttgccttccaagattcatttacacaatgttgaatgctttaaatgaatgagcatgaagagwgctggcctggaaagtgatgagatggatggtagggactcctcggagtagaggagtagagttttactattatgactaggaggcaaataaaaagaagctgaacgtgatccataataaaagaagcacacactcacagagctccataccaactacattaaaatggaaatcatgatatttggaaatacaacttaattggaaatcattaagtaatctcatcaacctttttacagtgggtggcagggctatggagggaaaacagcaatggttctggcacctacttaacttgattccattaaattcacccaacaggcctccagagaacatattactgctttgatattacaaagggaaaaa

SEQ ID NO: 335033 - DNA, 424 bp, Homo sapiens
aattcagtagcttttgccttccaagattcatttacacaatgttgaatgctttaaatgaatgagcatgaagagagctggsctggaaagtgatgagatggatggtagggactcctcggagtagaggagtagagttttactattatgactaggaggcaaataaaaagaagctgaacgtgatccataataaaagaagcacacactcacagagctccataccaactacattaaaatggaaatcatgatatttggaaatacaacttaattggaaatcattaagtaatctcatcaacctttttacagtgggtggcagggctatggagggaaaacagcaatggttctggcacctacttaacttgattccattaaattcacccaacaggcctccagagaacatattactgctttgatattacaaagggaaaaa

SEQ ID NO: 335034 - DNA, 424 bp, Homo sapiens
aattcagtagcttttgccttccaagattcatttacacaatgttgaatgctttaaatgaatgagcatgaagagagctggcctggaaagtgatgagatggrtggtagggactcctcggagtagaggagtagagttttactattatgactaggaggcaaataaaaagaagctgaacgtgatccataataaaagaagcacacactcacagagctccataccaactacattaaaatggaaatcatgatatttggaaatacaacttaattggaaatcattaagtaatctcatcaacctttttacagtgggtggcagggctatggagggaaaacagcaatggttctggcacctacttaacttgattccattaaattcacccaacaggcctccagagaacatattactgctttgatattacaaagggaaaaa

SEQ ID NO: 335035 - DNA, 611 bp, Homo sapiens
gctggcctggaaagtgatgagatggatggtagggactcctcggagtagaggagtagagttttactattatgactaggaggcaaataaaaagaagctgaacgtgatccataataaaagaagcacacactcacagagctccataccaactacattaaaatggaaatcatgatatttggaaatacaacttaattggaaatcattaagtaatctcatcaacctttttacagtgggtggcagggctatggagggaaaacagcaatggttctggcacctacttaacttgattccattaaattcacccaacaggcctccagagaasatattactgctttgatattacaaagggaaaaacagctatggcgtctctgaaaagcacaacgtgctaggactggaatgactttaaaaccacacataaatttctgagagatttttgccataaggtaccatccaccttactgtaaaccacatcctaaaattgtctgcagtgcaaatggattatgtgcatccaacaggaaacagcataggttgagaagctgttacttaatagcttcattgtcaccacgagtgtaaagtgtggggtctcatcacttttgcacccacgttttgcctgt

SEQ ID NO: 335036 - DNA, 335 bp, Homo sapiens
ggctcagggtcccttacgcagcctgttggggaaaccagtgggtattgaagacctgcctctggtgtgccaggacgttgtgcctgccggccactctgacttgcgatcttccgcctcagtgtatggcttcctacacctgggtaattaacatkgccagcatgataaggaggtcctttcatcactattgccactagtccttccgactcctgtgccctgtttctcctttattggaacccaagaacgagtaaacatagcattttcaaacatcccgcccccttccctggtaacaccaatattccaccatcctaattccctcacaagcattcagtctctccacc

SEQ ID NO: 335037 - DNA, 607 bp, Homo sapiens
tttttccacatacttataaaccatcccacgtatagaatccatttttactgacacaaatttagtaccaataaacgactcttcttctcaatttgttttatttaacaataagtcttgaacgtcattcccagttaacattttgaagagtttcctctctttcgttctgttttagctgcaaagtattcttccgtaaggatgaacgtactataatttattagccagccacttagtgatgtacaattaagcagttttaaatctttgaytcttgaaaatattgtttctcacacataaatatttctataaaataaattagttgaattagaattgttggagttcaagaccagcctggccaacatggtgaaaccccatctctactagaaacacaaaattagccggacatgccggtacatgcctctaatctcaggtgaggcaggagaatcacttcaacctgggaggcagaggttgtagtgactcgaaatcacgccactgcactccagcctgggcgacgcgagcgaaactctgtctcaaaaaaccaaaaaaaattaaacataaaaagaaaagcggtacatatacccaatagaacacaattcagccttaaaaaagaaagaaa

SEQ ID NO: 335038 - DNA, 607 bp, Homo sapiens
tttttccacatacttataaaccatcccacgtatagaatccatttttactgacacaaatttagtaccaataaacgactcttcttctcaatttgttttatttaacaataagtcttgaacgtcattcccagttaacattttgaagagtttcctctctttcgttctgttttagctgcaaagtattcttccgtaaggatgaacgtactataatttattagccagccacttagtgatgtacaattaagcagttttaaatctttgactcttgraaatattgtttctcacacataaatatttctataaaataaattagttgaattagaattgttggagttcaagaccagcctggccaacatggtgaaaccccatctctactagaaacacaaaattagccggacatgccggtacatgcctctaatctcaggtgaggcaggagaatcacttcaacctgggaggcagaggttgtagtgactcgaaatcacgccactgcactccagcctgggcgacgcgagcgaaactctgtctcaaaaaaccaaaaaaaattaaacataaaaagaaaagcggtacatatacccaatagaacacaattcagccttaaaaaagaaagaaa

SEQ ID NO: 335039 - DNA, 214 bp, Homo sapiens
ccttttaccctcctctaccccgccctgggctggtgaargtgcgcgccacgatgtggactactgagccctgaagaaataaatccttccactctgaccccatggaggattgcctgtgaggaacttaaacgagtctaccagtgtctagacacgggggcaggtctgtccggcacagcagctccctcaaggaggagaagagtgaggagaaaggaaactc

SEQ ID NO: 335040 - DNA, 607 bp, Homo sapiens
cccctggatacccagaagctaagaaggtggccaaggaggcggccccggaggcaagccgccatttgggagcggagcagagcccggccggtgctcccgaaggcagcaagatgttgcgagccacagctccctgctggttcccacctggatacccagaagctaagaaggtggycgaggaggcggccctcgaggctccagaattcccactgccctctcatcagcctgcccagagcttcgggctctgggtgccccagatgcacaagcaggcctcagcatttgtggacatccaggcggagccccagaacaggggtccggcggtgcccccagcgtggcccaagatggtgacggagtcgtgctacttccctgcgcagaggggatcggcctgccgcttgccagccgccccaaggctgacagagaggccctcgggagtccgcatctcagcccccaggaagaggaagacgatcgcccactcttccagcccttgcttggtcacaggttacacagatgccaagagaacccgggtggccagcagcagccaacgctcccgtggctccaaggtcggcagacagccagggaagacgcgcaacaggtcagggatggcatgcaagac

SEQ ID NO: 335041 - DNA, 333 bp, Homo sapiens
tggagagactgaatgcttgtgagggaattaggatggtggaatattggtgttaccaggaaagggggcgggatgtttgaaaatgctatgtttactcgttcttgggttccaataaaggagaaacagggcacaggagtcggaaggactagtggcaatagtgatgaaaggacctccttatcatgctggcaatgttaattacccaggtgtaggaagccatacactgaggcggaagatcgcaagtcagagtggccggcaggcacaacstcctggcacaccagaggcaggtcttcaatacccactggtttccccaacaggctgcgtaagggaccctgagcc

SEQ ID NO: 335042 - DNA, 607 bp, Homo sapiens
tacgcccgagcggaagaagcgggctctgagccacgccctttcaccctcctctaccccgccctgggctggtgaaggtgcgcgccaggatgtggactactgagccctgaagaaataagtccttccactttgaccccatggaggattgcctgtgaggaacttaaacgagtctaccagtgtctagacacgggggcaggtctgtccggcacagcagctccctcaaggargagaagagtgaggagaaaggaaactcaagtctcaccattctgtcctgggagagaagaggaggatctcatctctcatctgtccaaacaaggcaaggagactttctctcatctttccaagcaaggcaaggagactttttatcattaggaaacaaaaagaatttagaaggaatgaaagcagcccgtaaggtgaattcctaaggactgcccattgaaactgacaaaattgcccttgtttgatgagaggaatgagcagagcattgatgtggtgaacaaggatctagtgagactttcccagcatgtttctaccaaagctttatctaagcttctcagaacactctcctaataagcagatgtttggcctttcagaaagtcaacaagcaaaa

SEQ ID NO: 335043 - DNA, 634 bp, Homo sapiens
tgataaatccccctgaagggcaaattatgaatctcagcattggaagttcttactcactttgccacaatttgtataaaatgtaaaacattaatcagacaagtaataaatgtttccaattagtttagtcatatcaagttcaaaaataaaggcgccgggaatagtggtgcacacctgcaatcccagcacttttggaggccgaggccggtgaatggctcgagctcaggagctcgagaccagcctgggcaataygacaaaaccctgtctctactaaaaatacaaaaattagtcaggtatggtagtgtgcgcgtatagtcccaagtactcaggaggctgaggtgggaagataacttgagcctgagaggttaaggctgcagtgagccaagatcacgccactgcatttcagcttgggtgacagagactctgtctttaaataaataaataaaataaaaacataaagagaaagagatcacaaaactattaatggatttcttaatggttaatgtaaaaataatgaaaaaacaaactttacccaaatctcaaaacatctaagacagtcaaaaaccccaaaacctcacaaaattttctatttttagttatttaatttataattacttaatttttttgctagaaaatt

SEQ ID NO: 335044 - DNA, 634 bp, Homo sapiens
tgataaatccccctgaagggcaaattatgaatctcagcattggaagttcttactcactttgccacaatttgtataaaatgtaaaacattaatcagacaagtaataaatgtttccaattagtttagtcatatcaagttcaaaaataaaggcgccgggaatagtggtgcacacctgcaatcccagcacttttggaggccgaggccggtgaatggctcgagctcaggagctcgagaccagcctgggcaatatgacaaaaccctgtctctactaaaaatacaaaaattagtcaggtatggtagygtgcgcgtatagtcccaagtactcaggaggctgaggtgggaagataacttgagcctgagaggttaaggctgcagtgagccaagatcacgccactgcatttcagcttgggtgacagagactctgtctttaaataaataaataaaataaaaacataaagagaaagagatcacaaaactattaatggatttcttaatggttaatgtaaaaataatgaaaaaacaaactttacccaaatctcaaaacatctaagacagtcaaaaaccccaaaacctcacaaaattttctatttttagttatttaatttataattacttaatttttttgctagaaaatt

SEQ ID NO: 335045 - DNA, 512 bp, Homo sapiens
cccggcatataagcctatcactatcatcaattttcaaaaacatactgggagaaaaatatgacaagtattattttatagatgaggaggggtgagttcaaagttaaagtaacatgtacaaaatgctatcactggttagaattatgactgaggttagaaaaactgctgcttacgaatcttagtccaataatttatattatgtacttctggacaggcccacctcctacttcctcaaaactggtatctgttgttgctctgacattatcccaagcacaatctcagtattcgaaaaatttcaaataccatgaataatgtaacttcccacttacatcaataaatratgacaagtagcaaacaccaaagctgcaatgagatctggaggctgcttggttaattagacaaaatcagctatatattacttatatttgcataaatacaattcatacaattcaaatttgtgcatcaggagaatttccatgacatgtcatggaatgtcaggtttgtgtataaataat

SEQ ID NO: 335046 - DNA, 564 bp, Homo sapiens
catccctgtgtccagtgtacatatgctgcaaaagccacctgcctgttagtcactkagcagagtctcggttatcagagcaactgtggaggtttcccagtccctgtgttcaagtaacccttattttacttaatagtggtcccaaagcacaagagtagtgacactggcatattgttataattattctatcttattattggttattgttgttaatctcttactgtgcctaatttataaattaaatgttatcacaggtatgaatatacacaggaaaaaaacatagtatatatagcattccatactatctgcagtttcaggcatttctggggggtcttagaatgtattcccccgaagatatggggggactaccatacaaaatggagttctaagccacctctttgagaattagttatctttccctggttgtttcccacgcacatatgaggtagacatgttaataaacttgtttgtttttctcttgttaatttgtcttttgtaacactggtctgtcctagttaagaactcagcaggtagaggaaaaataatgtttttctcatctacaggtga

SEQ ID NO: 335047 - DNA, 553 bp, Homo sapiens
caaatttattgctgacatctctggaggctgggaagtccaagatcaaggcaccacagattcaatgcctgtgagagctttgtcctgatagatagtgccttcctagtgtcctcacatggcagaagagacaaaaaaaaagctctctagggcctcatttataaggccactaatcccaattatgagrgctctgttcctataaactaatcactttccagatgccccatgtcccaacaccactgcactagggattaaatttcaacttatgggttttaggggatattttcaggccataccatttaatccccgcccctctccctaagattcatgtccttcttacatgaaaaatgcattaattctatcgcaatagccccaaaagtcttaattcataccaataacaaacgcttaaagtccaatagtttcatctaaataccatctaaattgaatgtctgtgaaactcaagttggtacccatctggaggcaaattcccttctaactctgagtctgtaaaataaaacaagtgatgtgtttccaaaatacaatggagggacaggcataa

SEQ ID NO: 335048 - DNA, 553 bp, Homo sapiens
caaatttattgctgacatctctggaggctgggaagtccaagatcaaggcaccacagattcaatgcctgtgagagctttgtcctgatagatagtgccttcctagtgtcctcacatggcagaagagacaaaaaaaaagctctctagggcctcatttataaggccactaatcccaattatgagggctctgttcctataaactaatcactttccagatgccccatgtcccaacaccactgcactagggattaaatttcaacttatgggttttaggggatattttcaggccataccatttmatccccgcccctctccctaagattcatgtccttcttacatgaaaaatgcattaattctatcgcaatagccccaaaagtcttaattcataccaataacaaacgcttaaagtccaatagtttcatctaaataccatctaaattgaatgtctgtgaaactcaagttggtacccatctggaggcaaattcccttctaactctgagtctgtaaaataaaacaagtgatgtgtttccaaaatacaatggagggacaggcataa

SEQ ID NO: 335049 - DNA, 566 bp, Homo sapiens
tgcatgttgggtacatatttactgaaggatgaatgcatgcattgactgcagtgtatgctttgactgttatggtgaacagaaagacaaaaacctcattcacaaggaattttcccttcagcaggaaaacactgagtagaggttttgtcataagtttcagtaggttaattcagctcagccagctgtttctccctactcttaggattagtagttactgtttcgtttatcatcccctttgtctaatgttcttgtttctgaggtctcatttttttactcttgtctactccataatatctttaaaaaatattacatagttacatttaaaaggraaatctctcaatgaagacaaagtatacaatagggttaccttttagggttctttctttcaccctctctgcactgttgtcaaggcttcttgacaacatcttgtaacatctagtataatttaaatctccatttacagagccaatccttggtctcagggcactcatccaccttcaagcgccatcaggacttactgggcctatgtttaatcttgggatgtttgtctgtccttccttccccattat

SEQ ID NO: 335050 - DNA, 566 bp, Homo sapiens
tgcatgttgggtacatatttactgaaggatgaatgcatgcattgactgcagtgtatgctttgactgttatggtgaacagaaagacaaaaacctcattcacaaggaattttcccttcagcaggaaaacactgagtagaggttttgtcataagtttcagtaggttaattcagctcagccagctgtttctccctactcttaggattagtagttactgtttcgtttatcatcccctttgtctaatgttcttgtttctgaggtctcatttttttactcttgtctactccataatatctttaaaaaatattacatagttacatttaaaagggaaatctctcaatgaagacaaagtatacaatagggttaccttttagggttctttctttcaccctctctgcactgttgtcaaggcttcttgacaacatcttgtaacatctagtataatttaaatctccatttacagagccaatccttggtctcagggmactcatccaccttcaagcgccatcaggacttactgggcctatgtttaatcttgggatgtttgtctgtccttccttccccattat

SEQ ID NO: 335051 - DNA, 560 bp, Homo sapiens
aagttaatagatattaaagctctctaagctgcctgtcactcacgtacaattgcagggtgtatcatagttagatgatgttgtagtaacttgtagtaacaagtgttactacaacttgttgtagtaaaactttttaatatatttattctcataccatcattacctaagctttcatagcaccatgactgataccattttttgttttttctaggatttttaattttttwaaataatcacttgttcttatctccataaggaccttcaagaaatggctgacagaagagaaagatcccctaaaatggtaattatgcccttttgtccttaacctgtgaaagtatttcattataatctgttttactcactaataaactcaataataaaatgagtatagaagaaaaatgcccttggtttgggtggttgcatgccatctggagaatgcaatgtagaggactaatgtttttgtgaaatttgtacaaagtggctataatgatatttccttttctttatgttctatgcatatttgattattaaaatcactctcaaatcatctaataagttggttg

SEQ ID NO: 335052 - DNA, 571 bp, Homo sapiens
ggactaatgtttttgtgaaatttgtacaaagtggctataatgatatttccttttctttatgttctatgcatatttgattattaaaatcactctcaaatcatctaataagttggttgttacaagtggcaccaattcaaaatcctaggcatcacttgaagtagcactgaacaagtcctagcaatgatacagtgggctatgcataaaaggaagttagatgacctagctacatgacctaggttccctggtgtctratatagtctgcgccatgcatacattcaactcatgctatgggacaactttttaaaacctaaaggagaatatgagcaagggtgcaggcagggattacaatgtgctactgctcagggaagaagatttttatcaatgttaacatatcttgggggagcacaaagccccattgctttccaaatatctcttcctcctttttgctgatgacttaaattccaacattaagagcttcatcgactctttaatcttgactgaacatgatttggaattttaattttgttttgaatagctcccaacacaattccaatggcattcaatttcaaac

SEQ ID NO: 335053 - DNA, 429 bp, Homo sapiens
atgtagaagcccaagacaccttagaatcatcacatctcagtctattccctctcttgaaaattcctccacttcccttcttggtttaatcctcattattctgtttttttttttttttttttttttaattatkggggatacatggtagttgcacttatttatggaatgcatgaaatattttgagataagctaacaatgcataatggtcaacttagggtaattggaatattcattacttcaagcatttaccatttctttgtgttaggaacatttcaattctactcttttagttattttgagatatacaataaattacttttaaccatagtcgctctgttttgctgccaaacactagatcttattccttctatctaattgtatgtttgtacccattaactataccctctttatccaccctccctacttcccttc

SEQ ID NO: 335054 - DNA, 429 bp, Homo sapiens
atgtagaagcccaagacaccttagaatcatcacatctcagtctattccctctcttgaaaattcctccacttcccttcttggtttaatcctcattattctgtttttttttttttttttttttttaattatggkggatacatggtagttgcacttatttatggaatgcatgaaatattttgagataagctaacaatgcataatggtcaacttagggtaattggaatattcattacttcaagcatttaccatttctttgtgttaggaacatttcaattctactcttttagttattttgagatatacaataaattacttttaaccatagtcgctctgttttgctgccaaacactagatcttattccttctatctaattgtatgtttgtacccattaactataccctctttatccaccctccctacttcccttc

SEQ ID NO: 335055 - DNA, 429 bp, Homo sapiens
atgtagaagcccaagacaccttagaatcatcacatctcagtctattccctctcttgaaaattcctccacttcccttcttggtttaatcctcattattctgtttttttttttttttttttttttaattatgggggatacatggtagttgcacttatttatggaatgcatgaratattttgagataagctaacaatgcataatggtcaacttagggtaattggaatattcattacttcaagcatttaccatttctttgtgttaggaacatttcaattctactcttttagttattttgagatatacaataaattacttttaaccatagtcgctctgttttgctgccaaacactagatcttattccttctatctaattgtatgtttgtacccattaactataccctctttatccaccctccctacttcccttc

SEQ ID NO: 335056 - DNA, 526 bp, Homo sapiens
ctgaggacaaatgccaaagcctagtgcaccactggagtcagtttaagtwcatactgccaagtatgctcatcctggattacttcttttcttcttttatttaagagaaaaatcagtgacatcttatgtaagctgttgttttctgggactgttttacttgcagccaaatgtaacactaactgatacccatcctaagagaaataaagatacctaaacattagcaagtcttctggcttcaggagatagcaaaagagaaatctcatatgcctataaaataagcctttcaaatgggcaagtaattttaaggaaagattagctacagatatattccataaaataaaaaagtccaaaaaataaaaataatatagtcataaaactatcagccaaaacaaatttgaaacatgaaacattttcatttctatttaagatcattgattccatctttcagtgtagcataaattatgcattatgaaaattacctcataagtaaatataaaactagttaagaaaaaacaaatttaaaaaatca

SEQ ID NO: 335057 - DNA, 526 bp, Homo sapiens
ctgaggacaaatgccaaagcctagtgcaccactggagtcagtttaagtacatactgccaagtatgctcatcctggattacttcttttcttcttttatttaagagaaaaatcagtgacatcttatgtaagctgttgttttctgggactgttttacttgcagccaaatgtaacactaactgatacccatcytaagagaaataaagatacctaaacattagcaagtcttctggcttcaggagatagcaaaagagaaatctcatatgcctataaaataagcctttcaaatgggcaagtaattttaaggaaagattagctacagatatattccataaaataaaaaagtccaaaaaataaaaataatatagtcataaaactatcagccaaaacaaatttgaaacatgaaacattttcatttctatttaagatcattgattccatctttcagtgtagcataaattatgcattatgaaaattacctcataagtaaatataaaactagttaagaaaaaacaaatttaaaaaatca

SEQ ID NO: 335058 - DNA, 534 bp, Homo sapiens
tttttaattctatttaccttttcagtaagagtttgcaccatattgttgaggtttctkccttaaatattcagagaacttgaagtatgaagtcacaaggatctggcgaatactttgtggaagagttttaaattatagattctatctctttaatgtatgtaagactattcatatagtccttttcttcttgaattagctgtgatgagctgtttttccaaaagtttgctatctgaagtttggcatttataagcaaaagttgtctatcaaatacttgtaaggaccgaggggaaaacttcccccttgccctctgaaggtttgttgaaaactcaactcacaaaaaacagattaattggagaaaagccatacacatttattaatgtatacacaggagaatcacagtgattactcaactactcaagcccacactggagtgcagaagcttacatacatcctgaggttacagaaataatgggggctcagagcatggcccaaaacaggttatgatggtaaatcaggttatggcgacaagattgatta

SEQ ID NO: 335059 - DNA, 534 bp, Homo sapiens
tttttaattctatttaccttttcagtaagagtttgcaccatattgttgaggtttctgccttaaatattcagagaacttgaagtatgaagtcwcaaggatctggcgaatactttgtggaagagttttaaattatagattctatctctttaatgtatgtaagactattcatatagtccttttcttcttgaattagctgtgatgagctgtttttccaaaagtttgctatctgaagtttggcatttataagcaaaagttgtctatcaaatacttgtaaggaccgaggggaaaacttcccccttgccctctgaaggtttgttgaaaactcaactcacaaaaaacagattaattggagaaaagccatacacatttattaatgtatacacaggagaatcacagtgattactcaactactcaagcccacactggagtgcagaagcttacatacatcctgaggttacagaaataatgggggctcagagcatggcccaaaacaggttatgatggtaaatcaggttatggcgacaagattgatta

SEQ ID NO: 335060 - DNA, 595 bp, Homo sapiens
tgtttgtttttttgtttgtttttgtttttttccatgtgtgtatgttttctcctcagaaagtatttgttttgttcacttatgtgacagtgttttagcaaaagacagagatacttctaacactcaatgcatcttcctcacccccaaaacatattttgctattcaggtttctgatactttaaattctgattttgtggcttatacagataagaacattgttctagtaaaatcaaaatgcttatcttcatctcccaggaaaactttcagttttcccgtctatagtcatttcaagtttattgttttttaatcaactatttttcaataactctatctctatttctaattttataatatacaaatttctatcatactacaatttaaggmttccctttgtcttaattacttttgggctattgcctaataagggcttaaagcggtatttctctctctctacctttcttcctccctccacacccacatttcttttctcacctctcacaacttggcaattgtgttccccaacccaacagagcctggaggctaactctctggagaggttaaaccaaaataagagattttggggcatcagacaaacaag

SEQ ID NO: 335061 - DNA, 595 bp, Homo sapiens
tgtttgtttttttgtttgtttttgtttttttccatgtgtgtatgttttctcctcagaaagtatttgttttgttcacttatgtgacagtgttttagcaaaagacagagatacttctaacactcaatgcatcttcctcacccccaaaacatattttgctattcaggtttctgatactttaaattctgattttgtggcttatacagataagaacattgttctagtaaaatcaaaatgcttatcttcatctcccaggaaaactttcagttttcccgtctatagtcatttcaagtttattgttttttaatcaactatttttcaataactctatctctatttctaattttataatatacaaatttctatcatactacaatttaaggattccctttgtcttaattacttttgggctattgcctaataagggcttaaagcrgtatttctctctctctacctttcttcctccctccacacccacatttcttttctcacctctcacaacttggcaattgtgttccccaacccaacagagcctggaggctaactctctggagaggttaaaccaaaataagagattttggggcatcagacaaacaag

SEQ ID NO: 335062 - DNA, 518 bp, Homo sapiens
taaggaaaagtctatactgaataacgagccctgtagacatctttttggtgtcaattattctgcctatcacaattatattttggactttgaaatctctattaatggaaagtccagataagaatatttgttaatattgtttattatcaagactgaaatgatacctgataaaactacactctacttgaaaaattagttacctgattttatgccagacttcttgagtcaaaaaaatctgggacacccagtacaaatatttaacagtatttcaaggcattctctacactggggatccatggaaatgatagaagtatttgttgaggcagactgagcatgattcaagataagaaatatgccctagcaatatatttaagaagtgtgccatatgtatgagatgtaatatgggtctcgtagcatagatatcatactctcaaatatggactcttgaarcccactggctgaattcaaattcttgctccatttatttctcatgtaaccttgaaccagtcatccaatttctg

SEQ ID NO: 335063 - DNA, 597 bp, Homo sapiens
aggcccctggctggggctataaagagtggctgggctcaagtgtgagcctggatagcagaggatgcacattctttgtatgtttgctcattggagcatttgtttccaaagaaaatggtgaatattataagaaggagaaataataagttaccattatttgctttttggagaattactatgctgatatattaatgatactaaaattgggcataattttgagagctgaatcttggtttgtttgggagactgtagatagatttttcagccattgtcaaaayttatgagcacatttatgtttgtcataagcaggaatgaaggggtggattgtagctttgcagcgtttttctttgtcattgcatcctttacttctggaagcccgagactcaggacttcctggcactcaggatcctcccacatcctcctcaggctctcaaggtcccagatgatctccttttggttacatcttttttgttttccaagctctacccagggtcataccctcagccagcagtcacaaaagataagatccaatcccattgccttgaaatataagtgatcggtaacctcaacaatatgccctcaaaccctccacacacacac

SEQ ID NO: 335064 - DNA, 585 bp, Homo sapiens
atggactgcagaatggatgctgtgttaggaagcatgacaacaatattaatatccttatacaactttgacctcttgagtgaccaagtatgttgaaaatgagcagtaatactttaaaaatctttttatatgagtagtaggtctcaacagagagcttaaaatcttcagtgaactatcctgtaaacaggtgtgtggtcatctacacttcattgtttcattcatagagcacaggtagtgtaattttagcataattcttttttgtttgtttttattttttttgagatggtgtttygctctcatggcccaggctggagtacagtggcatgatttcggctcatcgcaacttccgcctcccgggttcaagcgaattctcctgcctcagcctctcgaatagctggaataacagacatgcaccaccacgcccagctacttttgtgtttttagtagagacggggtttctccatgttggtcaggctcgtctcaaactcccgacctcaggctggagttgaactcctgacctcaggtgatccccctgcctcagcctctcaaagtgctgagaatacaggcgtgagctaccatgcctggcca

SEQ ID NO: 335065 - DNA, 585 bp, Homo sapiens
atggactgcagaatggatgctgtgttaggaagcatgacaacaatattaatatccttatacaactttgacctcttgagtgaccaagtatgttgaaaatgagcagtaatactttaaaaatctttttatatgagtagtaggtctcaacagagagcttaaaatcttcagtgaactatcctgtaaacaggtgtgtggtcatctacacttcattgtttcattcatagagcacaggtagtgtaattttagcataattcttttttgtttgtttttattttttttgagatggtgttttgctctcatggcccaggctggagtacagtggcatgatttcggctcatcgcaacttccgcctcccgggttcaagcgaattctcctgcctcagcctcycgaatagctggaataacagacatgcaccaccacgcccagctacttttgtgtttttagtagagacggggtttctccatgttggtcaggctcgtctcaaactcccgacctcaggctggagttgaactcctgacctcaggtgatccccctgcctcagcctctcaaagtgctgagaatacaggcgtgagctaccatgcctggcca

SEQ ID NO: 335066 - DNA, 595 bp, Homo sapiens
gctgtacccaaaggtcatggtggggaacctagtaattctcattttagcatttaagtctaactggcatatgttcctggcaatcttattgcataaattaagttttaaataaatgaagtaggaaacattctcaaaaaatgaggacattcaaatttagaactttaaaactgagcatcattttttgacccctaaacaaattgcctttctgtttatagagtatgcttccatgtatctgcttataaattgaagaataaatgcctggaaaatcattccaggttcttcaatagaggtggaggaagaaagagaagcacatctttggaagagtcaacggggkataaatgcagtgtgagaattttgagtgaatgtaataaactgttggtagtctatggaattcaagcacagagcaatgtcaatataattgctgtgcttgcaaggcaagacatgctaaaggcaataggagtccatgtaagaaatacctggccctttgagtcgatgcgattagaggactggctcccagacttctgttgcctctttccagggaggtgacagatataccttataggttatcaatcaataatactattaaatgcaaatattt

SEQ ID NO: 335067 - DNA, 287 bp, Homo sapiens
tgcactttgtgatgccttttcaaattttacaagaaagataatgtgtgtaacattcttccaaaattgactaattcaagtataattcagaacaatttactaatgtgcagtgatttataaagagacttcgttttgcttaagaatttcagaagagaatgcatgagagagaatggctgaattgaaatggctcttacatgttatgcaaaggatgggctgtcgtatgaagagtgctaagactaaagcatccacaattttcayacactgatcttccagagtaacattgttctgtc

SEQ ID NO: 335068 - DNA, 567 bp, Homo sapiens
tggtatactgttaattttggataaagatttaatgttcctgttgttgttgctgttgtcayataccaggcgttgtttaagctcttgaaaggacaaaaggcagtgagtacctacacttaagaattacataagatagagaaatagaaacacagacatagaagtatataaataacagcataatgttttagtactgacatagagaatattttaaaaggttgtgggagctactaatttcttaacaaaccataacaattaactgtcacccacctggaataaaatctcaattctttccccacattctttctttgtgacctttgataagttgataatctttctgtgcttccattttccttctgtaaaatggggataatagtgccttcctcgtatggttgttttaagtcttaaatgagctaatacatgaaaacaggcttttacctggaatgcaagccttaagcatggatcaaaaaacaaaataataaactcaatgttcattacattccagatattatttttattgggaatagaaaataatctctctctctctctcacacacacacacacacacacaca

SEQ ID NO: 335069 - DNA, 645 bp, Homo sapiens
tagtactgacatagagaatattttaaaaggttgtgggagctactaatttcttaacaaaccataacaattaactgtcacccacctggaataaaatctcaattctttccccacattctttctttgtgacctttgataagttgataatctttctgtgcttccattttccttctgtaaaatggggataatagtgccttcctcgtatggttgttttaagtcttaaatgagctaatacatgaaaacaggcttttacctggaatgcaagccttaagcatggatcaaaaaacaaaataataaactcaatgttcattacattccagatattatttttattgggaatagaaaataatctctctctctctctcwcacacacacacacacacacacacaccttcacttaaacttttcaagtaatcattcaattgttctttgtgttttacagttaaacttcttgaatgggtctttacatcatctttcccagttcttcctttaaccctctagtcctaatttttcattttatgtccgtgggcacagtatttaatcaaagtagttggatctttttgaattctggtagtcatacagtgcaaagatcccaggcatgtgtaagcaacggtgattgaagactgatgaaaggatgcctgctgttgg

SEQ ID NO: 335070 - DNA, 498 bp, Homo sapiens
gaaaacatattgaataatgagagattttgaagtaaggaaacccttagcatgggcttaaatattgtccaggaaggaatgaacttacaactgaatttattcttaagtaactgatagggacaaaataaagtgttttaaaaatagcatatataatattaaaatatctgaatcaatcaaattaaagttgcatagctcgatgagygaggtgtgtatgtgtgcctgcatggtgctaagttttctggggcagtttacactaacagtcaccatgagtagtgccaggtttccctagatgagatgtcgaactcgtagatacaaatctgtggctgcaatagtcaaagctcactgcatatccactgtgacatgttaaaacagcactttaaattctggcatattctgaaaagaaaattatggtgagatggtgctactgccaattatctgaatacaactgacagtcaaagcaaccaagtatgaagtcaagtttgtgattccccttagattgcc

SEQ ID NO: 335071 - DNA, 498 bp, Homo sapiens
gaaaacatattgaataatgagagattttgaagtaaggaaacccttagcatgggcttaaatattgtccaggaaggaatgaacttacaactgaatttattcttaagtaactgatagggacaaaataaagtgttttaaaaatagcatatataatattaaaatatctgaatcaatcaaattaaagttgcatagctcgatgagtgaggtgtgtatgtgtgcctgcatggtgctaagttttctggggcagtttacactaacagtcaccatgagtagtgccaggtttccctagatgagatgtcgaactcgtagatacaaatctgtggctgcaatagtcaaagctcactgcatatccactgtgacatgttaaaacagcactttaaattctggcatattctgaaaagaaaattayggtgagatggtgctactgccaattatctgaatacaactgacagtcaaagcaaccaagtatgaagtcaagtttgtgattccccttagattgcc

SEQ ID NO: 335072 - DNA, 595 bp, Homo sapiens
cctgtgtctggcgacatccaccacacgtgcactgtctttctcttcagcctgcttcatttcccttcttggcattaatccttgcccarcatgttgttcattttcctttattatctctctcccctccctggaatttggcttcataagcataggagaggcttatgggctccctaagtacttttaccattgtgtctactattgtatccacttacctagaaagaacctctaatgtccttaaatataatcgggggattacctacaccattatttcaaaacctttctttagcagatgaggctgtggtctaaacaagtaaagtgatttttctgttgtcacaaaacaagtcatgtttggaagaactcgaatcctttttcctttgctatcctgttcctagactcaaatcctgggaccatgtgtctgtggtctctttgcatcaggggtgagaggcagctctcctatacttaggtattcaattttttcttctttttttgagaccgactctcgctctgtcacccaactacagtcttggctcactgcaacctctgactcccgggttcgagtgattctcctgcttcagcctcctgagtagctgggattaca

SEQ ID NO: 335073 - DNA, 532 bp, Homo sapiens
taaagtgatttttctgttgtcacaaaacaagtcatgtttggaagaactcgaatcctttttcctttgctatcctgttcctagactcaaatcctgggaccatgtgtctgtggtctctttgcatcaggggtgagaggcagctctcctatacttaggtattcaattttttcttctttttttgagaccgactctcgctctgtcacccaactacagtcttggctcactgcaacctctgactcccgggttcgagtgattctcctgcttcagcctcctgagtagctgggatyacaggtgcatgcaccatgcccggctagtttttgtatttttagtagagaccatgttggtcagctggtcttgaactcctgaccttgtgatccgcccgcctcggcctcccaaagtgctgagattacaggtgtgagctactgcgcccggcctcaggcattcaatttttaagaaacgaaacaggatgacatatactttctttgctatggatcattccctagggcctctactttcttcattctccattttatcc

SEQ ID NO: 335074 - DNA, 566 bp, Homo sapiens
tatgacagtaataagctactgttagccacttaatgcctggatgcagaaatttagtctctatcttcaagaagccttcgctccttgcctcagctagggtttgctctagtagcgctcaccaagcccccgagctctcttatccagcccgctgcagcattacaggctattttgaagtggtgatagatcctaaactccccaagaactccaaacatagcttacatgtctcttatattccccagagtgctcaagaaaatatgaagcacatggtttagtcaatrtttggtgacttgataatttcgggaagaaatcaacattgtttttgaaaaaggacacgttctcatgtttaggcatgaccaggtgaggttaaggtaattaccactggcaagaggtttcttaatgaaaatgtcaagtggcctggagaccactatacttcacactcagcatctctcaagtggcattcctcacccacaattaacacttgtattttggatacttctttaacatccgtaaaaatcctaaaatattttctttatatagagcactcaaaaacacctgcagtgagttgcaac

SEQ ID NO: 335075 - DNA, 636 bp, Homo sapiens
agtgacaaagctcccaccaaaattcacatcctccaactcataattcacattctctcttcaaaagccaaaacaagcctgtctctatacacatctataaatgtgtgtgcctagacaagtttcarttgattgcaaagtttagtcagtaactaatttctcacagagcggtttagcaaggagtccagaaaggtaggagaattatctattttctttatgtggatttacctacaatcccaccaacgaaatctaagggaattttaaaacatgtggcttaagaacactgaagcaggtagactcaaaactgaactctcatttaatttgggtattcctacttataatgatttgtttctcctgtaactcaggtttaaagccaaataaaatgggaaagatatttatccagagtacacagccaatttgatagctattgcatggaaagttgttgacaccacagtaaaattccagccagcacattcattttttaaaagattttattttaaagtaagcataaaccttccacttacttgaccaaatagaccaccctcttaagtaatgtgttcccgcctctaccataaaccttctcagcacccagccaggtctcgggctcatgcacacttggcgtgctcatgatatggaatgtct

SEQ ID NO: 335076 - DNA, 389 bp, Homo sapiens
cttccacttacttgaccaaatagaccaccctcttaagtaatgtgttcccgcctctaccataaaccttctcagcacccagccaggtctcgggctcatgcacacttggcgtgctcatgatatggaatgtcttataacagttcccacattgccacgtrtcagcaggctctacttacatttttcagtaactgtgtatatgacttcttttctcactctgaaatattcaagggcagaaaccaagtcttaattccaaggcttggttttcttatctgtaaaatggagataatatcagtctcttagagttgtggaaagggttatgtgcttggattgaagaacatttctcacagttcctagtctactttccatttcagtaaaaggcaccatttactcat

SEQ ID NO: 335077 - DNA, 573 bp, Homo sapiens
tctcctacatggagcataaatctttggagaatgaaaactgagccagcttctgctttaccagccactgtctgactaaggattgggaatccaagaccgtgatcccatttttcttcatctcagtagggacaagggctacccattgccacacagacagccctccagtgatcagcaatggaagatgaacagggggctctagaggcagaaaaaggtgaacccagtgcttttgaagatgctagaaaaataggacaaatgttaacaaaatagaaaactctcctttaaactctttaaaaaacaactcctggaaaatctatastttcatatctacaaagagtatggaacacacacaatgccgctgaagagtctgaccttttctcagcactaaaaaggtgacatctcactcttctaaattctcatagcattttgtgtctgcctctcaatgacacagatccttgtctccctgaattaaggtttgtacttttacaatgggctctttccccatatctactctgtaagctctgtgaagaaaaaatctgggcccagctcacttttggatcctcctaaaacatgagcaca

SEQ ID NO: 335078 - DNA, 486 bp, Homo sapiens
cagcttctctcactgggctatggagtcattctgtgaattgtgcatgaattttaataaaacctgtgtctgtcttttgtgagaaataaaaaactatttcttttgcttgacactttcttgtgggaggcaagtctggtaggcaaaatctcattcaatatccccttagactgctctgagaaccctaggagcttagggacccctgttccttttgcttgaaagtaaaaatgacttaacatctaggcacacagagagctaagaagaactttgtcaaatgaggcagcccgacggtggctcayggactgtaatcctgaaagctcaggtcactaccaccttgtctatggagaaagcccttagcaggcatatggaatgttttctcttcttacatctcccggaggcccttagcaggtcttttgcaatttatatttgatcacatttaggaccagcgtcaatgggtcataaaaccagagcaagccaaagctgggaggtcat

SEQ ID NO: 335079 - DNA, 486 bp, Homo sapiens
cagcttctctcactgggctatggagtcattctgtgaattgtgcatgaattttaataaaacctgtgtctgtcttttgtgagaaataaaaaactatttcttttgcttgacactttcttgtgggaggcaagtctggtaggcaaaatctcattcaatatccccttagactgctctgagaaccctaggagcttagggacccctgttccttttgcttgaaagtaaaaatgacttaacatctaggcacacagagagctaagaagaactttgtcaaatgaggcagcccgacggtggctcatggactgtaatcctgaaagctcaggtcactaccaccttgtctatggagaaagcycttagcaggcatatggaatgttttctcttcttacatctcccggaggcccttagcaggtcttttgcaatttatatttgatcacatttaggaccagcgtcaatgggtcataaaaccagagcaagccaaagctgggaggtcat

SEQ ID NO: 335080 - DNA, 545 bp, Homo sapiens
aggtgtgagggtggaaaaactacctatgaggtaccatattcactgtttgggacgtagattcgtgagaagcccaaacttcaccactatgcaatacacccatgtaacagaggaataaagcctagaataatttttttaagtgtgagttttatttttctgtctctgtattcccaggaaccagtcaaaatctgttcccaaagatgtgtcaacaaataatttgacagcatctcttttctsccaaactagagcaattcaatagccttttattgtttttcctactttcacctaattgtttcccttagtatagcctttttttaatccacaaagcaaacaaaatgattttataaagtgcaaagcagaatatgtcaaaacctatatatttcttagaatatactaatataaaatttaagctcgttaccattatctacaagtgatagactttccacctgatattacctttttttcttggagtcttcccaccttcccccatcacttgtgatgatctaatcagggaggtcgccttttgcagatagaacacactaccctta

SEQ ID NO: 335081 - DNA, 502 bp, Homo sapiens
acatgcagctagcatattagattagaaacccatcctactccagtatgacctcatcttaactaattacatytgcaaggaacttatttccaaatgtcacattttgaggtggttttatggggtagaacttcaacataccttttttttttttttttttttttttttttggtggatagagttccatgacaccctagaataggcagtttctctggcaatatttttaaacaagaatgctcaagctttcaacattattaaggcgagttcctgagaaacaataatagattgttcactgttctgggagactgaatctacagcagacctgaaactaattcctatcagccatgattctgttatcatttttttccctctaaacaattgcttctaattatgcccctttgatgtttacacctctcaaatagcttgaaactgagattatttccatttctcacactttcaacattgttaacattagctgaacaaaatttagtccttttaggcctttttg

SEQ ID NO: 335082 - DNA, 502 bp, Homo sapiens
acatgcagctagcatattagattagaaacccatcctactccagtatgacctcatcttaactaattacatttgcaaggaacttatttccaaatgtcacattttgaggtggttttatggggtagaacttcaacataccttttttttttttttttttttttttttttggtggatagagttccatgacaccctagaataggcagtttctctggcaatatttttaaacaaraatgctcaagctttcaacattattaaggcgagttcctgagaaacaataatagattgttcactgttctgggagactgaatctacagcagacctgaaactaattcctatcagccatgattctgttatcatttttttccctctaaacaattgcttctaattatgcccctttgatgtttacacctctcaaatagcttgaaactgagattatttccatttctcacactttcaacattgttaacattagctgaacaaaatttagtccttttaggcctttttg

SEQ ID NO: 335083 - DNA, 578 bp, Homo sapiens
gttaaaacaataggggcttcttcatattaaggagcgctcgggtcccccagccctcctacatcctaaggactttggctccttagttgtccctctttctcctgcagcaacatcctttctccagtctttcttgaatctcttccagcagcacacaatcgagcactaatgtttccccattcccccagtgaaaagcaaataaaacactcctgctagacattagcccccgtccagctactgcccaatttctctcaattttcttacacagtcatattggctctgggtcctgttcttcattcccagcactatcaacacacccacttttggcttcccccacatcgctgctgaaatcrtctcactaatgacttccgtattaaagaagttcttccctatgtccatcttattcaacatctcagcatttggtctcctcttgaaatatgcatttttcttgctgcttctgacaaaagcctcttctggtttccctgcgaactcactacactgtccttatgaggcgcttctgtgggctcctcctgctctgtctcccagtgtgaggtttcttggatttcagtcctggttttcagtcc

SEQ ID NO: 335084 - DNA, 658 bp, Homo sapiens
aaacagtgtttgttatttctaggtgtgagggtagtttgaacagcacccacagtattgggaacattccctcatcagcacgttgactctctatgctgcttgcttgattgtcttggagaacataatgaccctttcagtcattccctttgggttaattccctctgtggaaaaggggtattcttgcacttgcctgccactcctgtagccacaatttagagagggctttgttcccttcacctttcctctatccagggaaaatatcagacctgttgccttccaaaatggaaacaaaatcacctgtttcaaagcaagctgccttaagatgtggtctgtaaagatactacaattaagtgatargctttcccttttctttaccctagaaacagaaacagactgtgtttcagcataatgcaggtgaccaaggcatatcctccatataggaacagagcaactaaaaagaaaactatagcctcattaacttgtctgaggtagtgatttgttaagtgaaaagcagtgggtggtgtagtttttaaaaaggtgggccatattaccatttcttcagtgcttcctggggaaaaggatactatcattatgtatattctctaggccaggtttcacctaggctagagaaagaacaatctaatgtaattctgtctcatta

SEQ ID NO: 335085 - DNA, 547 bp, Homo sapiens
ggacctccgcagatcttctcaaatccttaaacttctttgttgctagtgataattaactgagagatgatattaatattttagatatatatcctttgacagtcagcttcctttcacgactatagttaatagatttaatcccttaagtaagtgtcactggaagcccaagtaatactagctgaaacaaaagagagggtggtttttctcttacgtaagagaagtacagagatacmcagttcatggctcgcatggcagttccctgcttacaaggatcccaaactccatcctccagggcacctcatggttgccatgtggcccccgcagccccagctatcacatccgcagccacgttgcaagaatgaagactggccaaaggcaaaaaaaaaaaaaacaacactgtactaactgggtcaattgtctttaaagcttttttttaggagctgttattcagtgacatgtgcttcatttagttgcaaaaaaggatggttaaataattttttagaggggtacattgtcatcgttttgttggggggttttttttttttttttt

SEQ ID NO: 335086 - DNA, 547 bp, Homo sapiens
ggacctccgcagatcttctcaaatccttaaacttctttgttgctagtgataattaactgagagatgatattaatattttagatatatatcctttgacagtcagcttcctttcacgactatagttaatagatttaatcccttaagtaagtgtcactggaagcccaagtaatactagctgaaacaaaagagagggtggtttttctcttacgtaagagaagtacagagatacacagttcatggctcgcatggcagttccctgcttacaaggatcccaaactccatcctccagggcacctcatggttgccatgtggcccccgcagccccagctatcacatccgcagccacgttgcaagaatgaagactggccaaaggcaaaaaaaaaaaaaacaacactgtactaactgggtcaattgtctttaaagcttttttttaggagctgttattcagtgacatgtgcttcatttagttgcaaraaaggatggttaaataattttttagaggggtacattgtcatcgttttgttggggggttttttttttttttttt

SEQ ID NO: 335087 - DNA, 547 bp, Homo sapiens
ggacctccgcagatcttctcaaatccttaaacttctttgttgctagtgataattaactgagagatgatattaatattttagatatatatcctttgacagtcagcttcctttcacgactatagttaatagatttaatcccttaagtaagtgtcactggaagcccaagtaatactagctgaaacaaaagagagggtggtttttctcttacgtaagagaagtacagagatacacagttcatggctcgcatggcagttccctgcttacaaggatcccaaactccatcctccagggcacctcatggttgccatgtggcccccgcagccccagctatcacatccgcagccacgttgcaagaatgaagactggccaaaggcaaaaaaaaaaaaaacaacactgtactaactgggtcaattgtctttaaagcttttttttaggagctgttattcagtgacatgtgcttcatttagttgcaaaaraggatggttaaataattttttagaggggtacattgtcatcgttttgttggggggttttttttttttttttt

SEQ ID NO: 335088 - DNA, 531 bp, Homo sapiens
ggattactggtgcccaccaatacgcctggctaatttttgtattttaagtrgagacagggttttgccatgttggccgggttggtttcgaactcctgacctcaggtgatccatctgcctcagtctcccaaagtgctgggattacaggtgtgagccacggcgcctggcttttttttttttttttttttttttttttgagatgagtcttgctatgttgcccacgctggccttgaacttttgggctcaagtgatccttccaaggagctaggattacaggtgaacaccactgtgcctggctcagacagtcttggttactgtagttttatagtaagttttcaaattgaaaagagtgagtcctccaactttagacttctttttagattgttatggctattcgtgttgccttgcaaatccatatgaattttaggatcagcttgtttatttctgcaaaaaaggctgttggaattttgataggtattttattgacactatagatcaactttgggagtattgctatcttaacagtattaagtc

SEQ ID NO: 335089 - DNA, 531 bp, Homo sapiens
ggattactggtgcccaccaatacgcctggctaatttttgtattttaagtagagacagggttttgccatgttggccgggttggtttcgaactcctgacctcaggtgatccatctgcctcagtctcccaaagtgctgggattacaggtgtgagccacggcgcctggcttttttttttttttttttttttttttttgagatgagtcttgctatgttgcccacgctggccttgaacttttgggctcaagtgatccttccaaggagctaggattacaggtgaacaccactgtgcctggctcagacagtcttgrttactgtagttttatagtaagttttcaaattgaaaagagtgagtcctccaactttagacttctttttagattgttatggctattcgtgttgccttgcaaatccatatgaattttaggatcagcttgtttatttctgcaaaaaaggctgttggaattttgataggtattttattgacactatagatcaactttgggagtattgctatcttaacagtattaagtc

SEQ ID NO: 335090 - DNA, 539 bp, Homo sapiens
cataggcaccttctccttgagttttcgtagttattctccttgtgtatccccttaaacattcttattacatttttattgtttcttccattaatttggcttttgtaaaagttrcctatctctccattctggtttccctcctttgaattgctaagtcccttaaatgtctacaaagtttctttgctttgttaggtcagggagtatgtattctcaagcacctgcataggcatggtgggtaaagtctgtgaggccatggtggatattgccagtaacccatgggagctggtctaaaaaattctgagacagcatctgggcctagagagggaaccaccagaaaaagcagtcagcatctgagatgatgcccggagagaagcagatagaccatctgcaaggaagagaaggcttggtttcttaaagggtgacctactgttttctgttcttgtccttgggttctcacaaaacctttgcatatcctcttatgacatcagtatacattctcctctccccgcctactcctattatacatctacccttcacctctt

SEQ ID NO: 335091 - DNA, 539 bp, Homo sapiens
cataggcaccttctccttgagttttcgtagttattctccttgtgtatccccttaaacattcttattacatttttattgtttcttccattaatttggcttttgtaaaagttgcctatctctccattctggtttccctcctttgaattgctaagtcccttaaatgtctacaaagtttctttgctttgttaggtcagggagtatgtattctcaagcacctgcataggcatggtgggtaaagtctgtgaggccatggtggatattgccagtaacccatgggagctggtctaaaaaattctgagacagcatctgggcctagagagggaaccaccagaaaaagcagtcagcatctgagatgatgcccggagagaagcagatagaccatctgcaaggaagagaaggcttggtttcttaaagggtgacctactgttttctgttcttgtccttggkttctcacaaaacctttgcatatcctcttatgacatcagtatacattctcctctccccgcctactcctattatacatctacccttcacctctt

SEQ ID NO: 335092 - DNA, 616 bp, Homo sapiens
gcagctaattttgcacttttaatgtgatacaagctttggtttagggttaatttgtatcaataattatgaataatgtacttatcaaacataaattccttttttgagtgtatatatttcctggatatttatggccatgttctctttaataattcctatatttatcattctaatttacttctattgcctagtccaaggatcattctgcctagtactgattctgcctagtactgatgcattcttttgagaaggaataaagttactgcattattttaatgtaagcttgctttttgatggggcatgcacactgcctcctcaccctcttatacctgaaactttccatatttttgttaattcccctrtccttgaagacatttggattttaagtttggggccttgggctcagtatatcgttgtaatttatttgtttgcaaataattttcttaaatattcataatgaatgacattgtgcattagaggcagataccatgaattgtaatttagatctgttatttaccaccattgctggtcgtgcttggaaaactactttgaattattctcctatccacttaaaatttattttcaagtcctgtgattctaaaatgcttttattcagatt

SEQ ID NO: 335093 - DNA, 554 bp, Homo sapiens
tcttcctatttgttaacatatctatgagactgtacactctgaggatctcatccttgactccttgactgattgacctttctatccttgttggtccctctgctggtgtgctacatatatattgtatacctgtgcttagtaaatatttcttacatgaatcacaattcaacttgtattaatcatttatgtcttgtattcaattgacagcttctggagaacagggatcatatgtatttatttttgtatcttctgtgttacagcatgatactaaacattgaagagttgtttggtaattattttaaaatttttattcataaaagtcgtgttaagatgttttatttaggattgcattttgcttcatttggtggaaatccaatkaaagtaacataaccaaacaggaaggtttttgtgtttttttcctttcaaataacaagaagcctagaggtagtcagtctaggggtggtatagtggtactaggttctcatcagtgtccccagtttttctgtccttaacatgtagcttttgtccttgagatcacatgaggcttttccacctcc

SEQ ID NO: 335094 - DNA, 549 bp, Homo sapiens
ctaccttaaaacgttgtaaggtttagatgaaagaaatatacatgaaagtactttgtaacgtacagtacctacagacattagtgattatgtttgtggggcaaaaaaagtaggcaggatggaagaaaggaaagcaaggttgctcttaaattcattccagcagtatggctggaaatgaataatcttcaaatcctgagcagttgcaagataaggaaaggattaccattctgggggcacagcaatgacagggccctttaactggccacagtgawtgccagttccaaccatttcaggtaatattgtctacagtgtgctgagtgccatgttagttactagggatacacaccatgacaagaaacagtccttcgccctcaagaaattctctatctggctgtggacaacacggctgtgtgtctctagcaggggtgagccaggatatggcaggctgggtggagcatggttggagcagaaaaggagctggttattgtgacagggtctggcatgttttttccatcattaaatggagtgatttaaaaataatacaccatattt

SEQ ID NO: 335095 - DNA, 618 bp, Homo sapiens
acatatggttggtgactcccacagcgtgttcctcaccttccccagtgcctttgggaaatgtgagtgttctctgtaaaagttctggcatggtgaaagatcgtaactctaggaagctgaataacttaccatttggcactaatatccctgatttcttctgtttaacttttttgctctcatctctatgttgaaaaatgcaatagatgttaaaatcagtaataatgttcaataactagtacagctgttcccttgttccacctcaattttatttatagaaaagccattattccactattctatatcaataacaattttcatttgtttttctacgtgtataatatgaattatattaaataacaaattttccagtttycataataataattctaatgactatataacagtctgttgagttgatgcactgtaatttatactgggtattttgtttccagttttttgctattataaatatccttccaagaatttatttaggcatctaatttacttaaatttcttcatatgcaaatagtatgtttatgtcctctgaccatttatctcttgaggttttaatatttttgaagatttggataagtccttaatttgttatgtatactaacttct

SEQ ID NO: 335096 - DNA, 594 bp, Homo sapiens
tgtgcaaggtcacacagctagtgaagagcagagctgaaaagtgaaccccagagagtctggctccaaagagtcttgctcttaaccactaccactatgttctactgcatgtcagcgggaagagcaagtgccaccctgaggcagcatttgtgtgtttgtttgccaagatcaagaaatagcaaggagaggccagcatggctggagtacagggagcaaggtggatgggcataaaagatcagatcagagagagaggatggtacggcggaragcagggggcagtttacatggggccttgaactgctgcatggcaaggactttgggttttattctgagtgaaagggggttagggtggctgttgtgcaaagaaaagactgttgggggcacaggggaaagcagggagctgagtcttacagctactgcaatagtctcagaagagagtgatgatgactcaggctgaggaggggatcactggagtgggggcatgagaaattgatatctagattccagatatattttgcaagtagaacagaatttagtaatggctgagagatggaagagaaagaaacaaaattcatggattataccaagcttgtgact

SEQ ID NO: 335097 - DNA, 594 bp, Homo sapiens
tgtgcaaggtcacacagctagtgaagagcagagctgaaaagtgaaccccagagagtctggctccaaagagtcttgctcttaaccactaccactatgttctactgcatgtcagcgggaagagcaagtgccaccctgaggcagcatttgtgtgtttgtttgccaagatcaagaaatagcaaggagaggccagcatggctggagtacagggagcaaggtggatgggcataaaagatcagatcagagagagaggatggtacggcggaaagcagggggcagtttacatggggccttgaactgctgcatggcaaggactttgggttttattctgagtgaaagggggttagggtggctgttgtgcaragaaaagactgttgggggcacaggggaaagcagggagctgagtcttacagctactgcaatagtctcagaagagagtgatgatgactcaggctgaggaggggatcactggagtgggggcatgagaaattgatatctagattccagatatattttgcaagtagaacagaatttagtaatggctgagagatggaagagaaagaaacaaaattcatggattataccaagcttgtgact

SEQ ID NO: 335098 - DNA, 622 bp, Homo sapiens
attactacgtatcatagatgtcaggatccatcaattctctcttctattgataacatatgcaatttcttctattcatctaaatataaaactttgtttgttagtctttttgataagttatttttaacccgtcttaaaatatcttaattctggaagaawaaaacagtttgccttctctgagtctttctttgccatgctaacttaaattgttcagtttcaccaagaaatgtctaaagccttcttttcatcatttcatttgtgccctccatggatgttatcaatggtctctttgattgccatgcatgtgcatataactcctagacataagaatgtactatagagcttttccttgaactacagacctatattcatgacttcttagacatatttaccttgctattacagtgcaccaaacatcacttgttccaagccatcctacacatctccattccattctcaaagaacaatgcaagtattcagctagttacacaaactagaaatactggctatgtctttaaattctccttttaaccttccttatacaattattaaattctctcctatctatttcttaaatatctctttcttggaatcctacccaccgaaattgacctaggaatcaaca

SEQ ID NO: 335099 - DNA, 622 bp, Homo sapiens
attactacgtatcatagatgtcaggatccatcaattctctcttctattgataacatatgcaatttcttctattcatctaaatataaaactttgtttgttagtctttttgataagttatttttaacccgtcttaaaatatcttaattctggaagaataaaacagtttgccttctctgagtctttctttgccatgctaacttaaattgttcagtttcaccaagaaatgtctaaagccttcttttcatcatttcatttgtgccctccatggatkttatcaatggtctctttgattgccatgcatgtgcatataactcctagacataagaatgtactatagagcttttccttgaactacagacctatattcatgacttcttagacatatttaccttgctattacagtgcaccaaacatcacttgttccaagccatcctacacatctccattccattctcaaagaacaatgcaagtattcagctagttacacaaactagaaatactggctatgtctttaaattctccttttaaccttccttatacaattattaaattctctcctatctatttcttaaatatctctttcttggaatcctacccaccgaaattgacctaggaatcaaca

SEQ ID NO: 335100 - DNA, 560 bp, Homo sapiens
tgtgtataactttggatcgctcaaaacttaactactaatatcctactgttgaccagaagccttactgataacacaattattctattaacacataaacagtctaatatcttcatatattttaggcatttaatacataccaattttttctcaaaatgttcaagatctctaggctacataagtcatctgtgagtattttcagattgtcacaaatttccaaaaagagtaatatatttatagaaaawaatccatatataagtggactcactcagttaaaactcatggtttttaaggatcaactgtgtaacactataagcaatttttgcaagtgaaaagaaaaccttcgtaattagtaagcttaaactgcagtaaaacgcaaatgtatcatttccactatttttagtcaactcttacataaattatttgtttatgtttgtttattccaatacggatgagaaagtaggattgtttggacactggaacatattaacagataataaaaatttgtaaaatttttaaaaattagtttggaggtggagggagctttggaaataaaaattaag

SEQ ID NO: 335101 - DNA, 560 bp, Homo sapiens
tgtgtataactttggatcgctcaaaacttaactactaatatcctactgttgaccagaagccttactgataacacaattattctattaacacataaacagtctaatatcttcatatattttaggcatttaatacataccaattttttctcaaaatgttcaagatctctaggctacataagtcatctgtgagtattttcagattgtcacaaatttccaaaaagagtaatatatttatagaaaaaaatccatatataagtggactcactcagttaaaactcatggtttttaaggatcaactgtgtaacactataagcaatttttgcaagtgaaaagaaaaccttcgtaattagtaagcttaaactgcagtaaaacgcaaatgtatcatttccactatttttagtcaactcttacataaattatttgtttatgtttgtttattccaatacggatgagaaagtaggattgtytggacactggaacatattaacagataataaaaatttgtaaaatttttaaaaattagtttggaggtggagggagctttggaaataaaaattaag

SEQ ID NO: 335102 - DNA, 575 bp, Homo sapiens
aatatagaaaggaaaatgtgtctgtattatggaaagatgtattagactgagacttgttcgcaattttctagactttgtgaatagttactgtttgttttttaaatgattataacatatgctattacttttgagtgacccctttcacatatctcaaagtgtccttcataaaattccaaaatgtcagggttaaactagtgattcaacggtagagaaaaatcccagcaaaaatgaataacaatggtatatccctggcttttttcactttaataagtttgaagggatctataatggcctagaaaacctgtatcctactaaaattctacataattttatcaatctaggcttaaacaaaaggaaagcagttcatttcattataagcccaagataattgcattattacattttttaattctaaaagtccctccttctccatgataagccatcaagatcacaattaagaataggcttattgaaagaaaataatgctaaacctggggtcacttttttatattaccaggagataccatttcttgtataataayataaatattaaaaatatgtaagataaagaggaa

SEQ ID NO: 335103 - DNA, 446 bp, Homo sapiens
tttataagtgagcctataaataacacctttccaaggcagaaatcatcacaaagtttgcaaatcaatgcaggtaggaaaggtaatctccaaattcctcaactattgaacgtatttttgacaagaataatataattgggaaaagttgacttgaaagaagaacacccactaataatagatttctacttgtatggcatttgctcacttttaagtaaaaactgtctaaatttggaaaagcattctcatacattggatttcatttgtgttttgtcatgtattatataattgtgtatataaatacacacacacagagaaaattgttaatatcatatgactgaactagtaaagtctagtcttgaccaattggatacctataactccgtgagactttcatgcttaataataatcagtaattgtttaagtcacttasgcttagcaaaaaaaaaatc

SEQ ID NO: 335104 - DNA, 566 bp, Homo sapiens
ttattttgtcattatttatatcagctaatcagatgctgatctgacacataacagaacattctatacatgcatgctgaatgaagcrtgaatgatttgaatgtactgaattgtggaaaagaataattgatttgacttatttttattacccataggattatctccattagaccctattttttctatttcccaagacgctatatttttaggacatttttctgagatttggtctatctccttaactctacagaaaaattgatgtgtcacagattaaaagaatttaaatgatgtttgcaggttagtagccatggaactatataagggcttaagaaaaaacagtagaatatatgactaaaggtagatggagaaaatattgcagaagagatgtcagagatattttatttatcagtttaaaattcagttaaatgttatagttgatatctcagtcactcacttggatcataccaattatgaatctttagttatcctttgcaaaaataaaagtagtagagttggtccataagtgcaagataaaattttagccttgtgttactggggatctgcatgag

SEQ ID NO: 335105 - DNA, 593 bp, Homo sapiens
agagaccatatagatgatggtgtttttggtaaagacttacttatccctcaagtcacatttcaaatgtcatctcttatgttggactttctctgagaatcctgggcagaaataatccctttcccatacatattttcctagcatattttatattgctttatatttaattcattctataatatttaactctttattttttattcaaattgttgggcttgttgatggcaagtccagcaagtctacatatttctagtcacatttccttgcctataayttattaatccatttatcaaatatttattgagcacatacttactatcatgtattattctttgtgcttagggtaaatctgtagaaagcaaagtcactgcccttcatatggcttacagttttagcaatcagtactcattaaaaatattattgaattaaatggaatttaggctttaaacctgtggtagtagccactaaacaatggattaaacttaagaaagtgatatttaacagatacaaacataaatttatccaatttggttttaaaaaactttctttacagagttttaggctaggaaaaaacctagtgggatgtaatttacatt

SEQ ID NO: 335106 - DNA, 572 bp, Homo sapiens
gagtctcataattcctggttaatgctggcgtattgttgtcacctgccaagtgactgttaggcaataagactagaaaatatggtaccgaatgaaaggagaaatatcttatttgctgtaacaatctaatttatattaaggtaaggattttggtggctaaggaaagaacatttagctgttatttgtgtaattgtcacatattattgtgcagatttaatctcattgttaacagaatatagagtgtgaattatttgttattaaatgttactgggctttggtgtcagtgtggtataccagaaattacctctggtctgtggttataaaatctaggtcagaagctcagtttcgccacatttttgctgtgccctagatgccattttcattctctgaacttttatagcttcrtgattaaaattgagttaattactattgtgtttcagaggcttgtgaatgattaagtgaaagactgtgtaaacagtaaaacactataaaaagataaagctttattatgggaaataatgggaattatataaaaaggttgataattgttatatggtaaacagagaatttctgtt

SEQ ID NO: 335107 - DNA, 585 bp, Homo sapiens
tatgtttcggtgagaaaatgtgtgaattgggcttatggtcaaatttacgtaggcaagtctttaagttttaaatatcagtacaccttcatagcaccacattggtgtatatacaaatcaaacaggaatgcaaaagaattcctgataaacaatttgggcaactgtaaagattagaagtgaaggagtgaaacgtaatggatgagggctagaagtagaaggcatgatggaaatgaaaatcctcagtattaaccacactgagaaacaaatgcacctcccagaatcaggcaagagacagttttgttatgataattactataatatgttatgtttgcagttgaaatcatcttcaaggctattaatatataaacaattagaaaaaggtgtctgcattcttaaacccattcaaactgttagygaaaggttcaaacaatgttgcttgaaagtacagtaatttagagcagaataggggttgataaaaataagaccaaaaaattataaaacaagaaagtaagatatttatagaaaattattattcaaattaattgtcattcatgtcaaactccgtccccatcttcaattcagcttcta

SEQ ID NO: 335108 - DNA, 595 bp, Homo sapiens
agttttgttatgataattactataatatgttatgtttgcagttgaaatcatcttcaaggctattaatatataaacaattagaaaaaggtgtctgcattcttaaacccattcaaactgttagtgaaaggttcaaacaatgttgcttgaaagtacagtaatttagagcagaataggggttgataaaaataagaccaaaaaattataaaacaagaaagtaagatatttatagaaaattattattcaaattaattgtcattcatgtcaaactccgtccccatcttcaattcagcttctacaaatcttacccttcattcattaatttagaagtaagcatctgtgtgggatgggaacyggccatacaacagtgagttaaagagatattattactctagagctactagacagttttctctgaatgtggttcctggattacctaagtcatagtaattcttgttacataacagaattcttgttaagtgtgtttctgcagacttcatattgcacattgaattaggattttttaggagtgaaaagcttagcatttcaggcatcctctcttcctaatcactaacaaccaccatagaaatgtcctggc

SEQ ID NO: 335109 - DNA, 565 bp, Homo sapiens
agatatttattaattacagaggaataatrataataataaaaataatttctggtgcagaaatatgggaaacactgcctgaaccaatgaattagctgatcaataagattagaaaaagtattgtgaaatatctcctgatatgatgcactgaggacacaacattgcttttgtgttattcctgacagatatgtataacctatttctatttagaaggacacactacaaaccataaaagaacattatacaaaataagaagcttatagttttcaaaaatgtcaagatcaacaaatataaagaaaagctagggaaggttccagattctcaaaaaaatgtataaatgcaatgcaagtattttcacagttagaaggcatttttttccctaaatgcttttctgaaactacaacctgacaatctagctcctgcgagatcacataaagaaatctttttgtatttaataaataacaaatgaaatatttaattacagtagaaatagaatagcaaatacagcattatcttagttccccagataaatcaaaatagataagataaaataagatagatttgcaca

SEQ ID NO: 335110 - DNA, 565 bp, Homo sapiens
agatatttattaattacagaggaataataataataataaaaataatttctggtgcagaaatatgggaaacactgcctgaaccaatgaattagctgatcaataagattagaaaaartattgtgaaatatctcctgatatgatgcactgaggacacaacattgcttttgtgttattcctgacagatatgtataacctatttctatttagaaggacacactacaaaccataaaagaacattatacaaaataagaagcttatagttttcaaaaatgtcaagatcaacaaatataaagaaaagctagggaaggttccagattctcaaaaaaatgtataaatgcaatgcaagtattttcacagttagaaggcatttttttccctaaatgcttttctgaaactacaacctgacaatctagctcctgcgagatcacataaagaaatctttttgtatttaataaataacaaatgaaatatttaattacagtagaaatagaatagcaaatacagcattatcttagttccccagataaatcaaaatagataagataaaataagatagatttgcaca

SEQ ID NO: 335111 - DNA, 482 bp, Homo sapiens
ataagtgaagtgtgaagtgattaactttgaaatttagcagtctgatagattaaagttgaatatcattaaactagcacaaatactaaatattaatgatagaaaaaaagtgactaaaaagctcaaagaggaragaaggaaaatacaaaaaaaaaaaaaaaatcccagccaattaagccaaagtaatatgagaaaggagtaacagagaaacaaaaaggagaaatgataaatgaaagacacataccaagatggttgacttaagccaaaagatatcaaaattacacgaaatataattagaaaaaataattcaatgaaaacaagaggttttcagactgaatgtcaatcaagaaataactgtatgttgtatataaaagatgcacgaagtgtaggtgtgcatatcaaaacaagcataggttgaaatgaataaatatggaaaaaaatacaccatacaaactttctgcttaaaaacttgtgcagttatatta

SEQ ID NO: 335112 - DNA, 482 bp, Homo sapiens
ataagtgaagtgtgaagtgattaactttgaaatttagcagtctgatagattaaagttgaatatcattaaactagcacaaatactaaatattaatgatagaaaaaaagtgactaaaaagctcaaagaggagagaaggaaaatacaaaaaaaaaaaaaaaatcccagccaattaagccaaagtaatatgagaaaggagtaacagagaaacaaaaaggagaaatgataaatgaaagacacataccaagatggttgacttaagccaaaagatatcaaaattacacgaaatataattagaaaaaataattcaatgaaaacaagaggttttcagactgaatgtcaatcaagaaataactgtatgttgtatataaaagatgcacgaagtgtaggtgtgcatatcaaaacaagcataggttgaaatgaataaatatggaaaaaaatacaccatacaaactttctgcktaaaaacttgtgcagttatatta

SEQ ID NO: 335113 - DNA, 562 bp, Homo sapiens
gcttgaagaatactgtatcttgacgcaagaaagataaaaatggcacagagtaacagaagagtccttattttttagattctatgctataatttgggccttgataggattttctttttttctttcttgatttttgaaactgccattacctcattctatgaaatagaacgagtgttcccagctttggtatttttatgattcttatttttatgatcatggtttatacataattgtactaggttaaaaaaatctcctagcactggaaaaattttagtagttcaaaaactgatatgtgttattggcgaaaacaacctctcagtaatattaacatttgccatatcaaacaaacaatggacctaatggtggacttttgaagcagtgatatggagccactaatttgttatatatttttaaaagagtagtttaacttcaaacaagttttagaaaattataaaatataggttgaaattttgagtatktttcatgtttggggatcgctaattgcatcatttgaaagaatattgccaaaatggacaacttgtagactatgggcagaaagaaaata

SEQ ID NO: 335114 - DNA, 562 bp, Homo sapiens
gcttgaagaatactgtatcttgacgcaagaaagataaaaatggcacagagtaacagaagagtccttattttttagattctatgctataatttgggccttgataggattttctttttttctttcttgatttttgaaactgccattacctcattctatgaaatagaacgagtgttcccagctttggtatttttatgattcttatttttatgatcatggtttatacataattgtactaggttaaaaaaatctcctagcactggaaaaattttagtagttcaaaaactgatatgtgttattggcgaaaacaacctctcagtaatattaacatttgccatatcaaacaaacaatggacctaatggtggacttttgaagcagtgatatggagccactaatttgttatatatttttaaaagagtagtttaacttcaaacaagttttagaaaattataaaatataggttgaaattttgagtatgtttcatgtttrgggatcgctaattgcatcatttgaaagaatattgccaaaatggacaacttgtagactatgggcagaaagaaaata

SEQ ID NO: 335115 - DNA, 443 bp, Homo sapiens
ggtacacaatatgaaactttatcaaaagtcacatgagccatcaatgctttaacatgatwtatagaatgcattaatctcttggatgaatcaatatcttttttctccacaagcataataacaaacacttcttacatataattaattattcaacattaaaaggtagaaaagtagactaaattacaaaggcactattcaaagtgacatgtctcttagccagaatggaaacaagaaacactattgctgagaaacatgtaaaccagcagaaatgggccattggcaagattatttgtcaacaggcactattaaatgacacctcatattgatgctatacaacaaggaagaacaaaagcaatcacatttgtaaaccaggatatatatttttaacacttggatgaaactgctcatatccagaacatgaattcacacttgacttaactgtagtg

SEQ ID NO: 335116 - DNA, 467 bp, Homo sapiens
ggccctctttctttgccactttttggttatttaattcattatttcataaaatatgcagaaaatatttacaatttcaaggtatgtttcttaaattgcagagaaaacttggagttatcttgacattatttgcagtgcaattaaaacagtttttatatccagaataatattaagtgatgawcaatgaacaaaactggaagtgtttttgcttcagagatctgtgtgttaggaaatgcaagcagagagaggctggtctgtggtcactgcccatagattctacttggtccctgctcatctcaaagggctggactctctcttctgtaatgaagatattaactttttattgttgcagttttggacattgagagtcttacttctctatcctgtaacataattattttaaagtcacaaacatcatagtgtcttagaaggatgatgtaacattttgaaaacaatgtacactttagccc

SEQ ID NO: 335117 - DNA, 467 bp, Homo sapiens
ggccctctttctttgccactttttggttatttaattcattatttcataaaatatgcagaaaatatttacaatttcaaggtatgtttcttaaattgcagagaaaacttggagttatcttgacattatttgcagtgcaattaaaacagtttttatatccagaataatattaagtgatgaacaatgaacwaaactggaagtgtttttgcttcagagatctgtgtgttaggaaatgcaagcagagagaggctggtctgtggtcactgcccatagattctacttggtccctgctcatctcaaagggctggactctctcttctgtaatgaagatattaactttttattgttgcagttttggacattgagagtcttacttctctatcctgtaacataattattttaaagtcacaaacatcatagtgtcttagaaggatgatgtaacattttgaaaacaatgtacactttagccc

SEQ ID NO: 335118 - DNA, 591 bp, Homo sapiens
tgatatatgtggccgtctcttctccaaaacattctggacatcttgagtgccatcaagattgcatatgagatttgaaaaagtataaaaccctaaaggaaaattgtgttgacataatcagaagaggggtgaggatacaggcaaggtgtctgctatcattaagctcagaaatcaatagttcatttttattcttttttttttttttttgagacaggtcctcagtctatcgcccaggctggagtgcaatggcacaatcatggctcactgcaacttccgccttctgggctcaggtgatcctcccatttcagcctccccagcaactaggactacaggcagatascaccacgcccagctaattgtttgtagagatggggctttgccatgttgcctaggctggtctctaagtcctgaactcaagcaatccacccaccttggcctcccaaaatgctgggattacaggcatgagccacagtgcccggcctcaataatttattttgaagtttacttatcattaaattcctaagagacaagcactattattcctatattagaagtaaatatgtccccagccacacagttagcaaatatggttcc

SEQ ID NO: 335119 - DNA, 533 bp, Homo sapiens
aaggtgtctgctatcattaagctcagaaatcaatagttcatttttattcttttttttttttttttgagacaggtcctcagtctatcgcccaggctggagtgcaatggcacaatcatggctcactgcaacttccgccttctgggctcaggtgatcctcccatttcagcctccccagcaactaggactacaggcagataccaccacgcccagctaattgtttgtagagatggggctttgccatgttgcctaggctggtctctaagtcctgaactcaagcaatccacccaccttggcctcccaaaatgctgggattacaggcatgagccacagtgcccggcctcaataatttattttgaagtttacttatcattaaattcctaagagacaagcactattattcctayattagaagtaaatatgtccccagccacacagttagcaaatatggttccaggaatttagtgaggtctatatcaaacctgtacgatccttacagcaatacacacacacacacacaaatgcacatatcgaca

SEQ ID NO: 335120 - DNA, 454 bp, Homo sapiens
agatggggctttgccatgttgcctaggctggtctctaagtcctgaactcaagcaatccacccaccttggcctcccaaaatgctgggattacaggcatgagccacagtgcccggcctcaataatttattttgaagtttacttatcattaaattcctaagagacaagcactattattcctatattagaagtaaatatgtccccagccacacagttagcaaatatggttccaggaatttagtgaggtctatatcaaacctgtackatccttacagcaatacacacacacacacacaaatgcacatatcgacaaactttatagtagattaaaatttctattcaaattattcatctatttcaattgatgaaattttcccatgtttttgtattacattatcttttgccactttgggagtactgatgatatatttgtgttaatctagctcactcacctgca

SEQ ID NO: 335121 - DNA, 544 bp, Homo sapiens
agaccttgctccttgggaggctgagatgggaggatcacttgagcctgagaggttgaggctgtagtgagccatgsttgcaccactgtactccagcctgggctacagagtagactttgtttaaataaataaatatatctacaaggggaagctgcagagtgtataatttagaaatggtaaatatttgaatgatagaaacttttgttgcccatgttttttcaaaacagatagagtcctaggttataactagatccctaaattatttgtagttttctatgaggcaaatactggttggagaccagtttagcatattaaataaattctcaactttaattttttttattctaacgctaggatctttgagactattgataatagaagcaagtgttttagtcattgactttagccctgtggggaattacatgaattcatttagactgatgtctgtcaagttcaaggccttttagcttttaagaatctagacatttgtcttttcatgaatattcaaacattatctcagttattaacttagagatttgacaaagag

SEQ ID NO: 335122 - DNA, 544 bp, Homo sapiens
agaccttgctccttgggaggctgagatgggaggatcacttgagcctgagaggttgaggctgtagtgagccatgcttgcaccactgtactccagcctgggctacagagtagactttgtttaaataaataaatatatctacaaggggaagctgcagagtgtataatttagaaatggtaaatatttgaatgatagaaacttttgttgcccatgttttttcaaaacagatagagtcctaggttataactagatccctaaattatttgtagttttctatgaggcaaatactggttggagaccagtttagcatattaaataaattctcaactttaattttttttattctaacgctaggatctttgagactattgataatagaagcaagtgttttagtcattgactttagccctgtggggaattacatgaattcatttagactgatgtctgtcaagttcaaggcyttttagcttttaagaatctagacatttgtcttttcatgaatattcaaacattatctcagttattaacttagagatttgacaaagag

SEQ ID NO: 335123 - DNA, 560 bp, Homo sapiens
ttcatctcctctaagtttggaatggctgtgccctmtcgtgggtatatgtttatctaccacactagtacgtaagcatttcaagtgctccatatccccaccaacactctacaagcacagtctttttagttttaggcatttaagtagatatgtagagctatctagttgtgatgttaacttctgcttatctaataactaatgatcttgagtcattttcatgtgccttttttcggtccacataatttttttttggtaatatatctgagggcatttgtagggctcatgtaatttgtttctgtccctcagaaatcagtgtctttcactgtcttgtgtctaatgttgtaagagtgattttattttttttctggctttgcaactgcagagaataaatctagtctctgttattccattttgaccagaagtagaaattcccatatatacaattaaatgtttagccctcttccaatgaatccatgtggattttacctacataacagtcatttatacctaagcatttcagtactttatctttcttccttacatattttagtcttgtcattcaa

SEQ ID NO: 335124 - DNA, 524 bp, Homo sapiens
tgaccttctaacatcactttgtagtcagagtcccttggcgctcaattctgtgtctgaactgagctgcaatcaatttatcactgagcagaggaaatagaaatggaggagaatgaagagtgtgttaaaatacctaatgcatgcggggctcaaaacctagatgacaggttgatggatgcagcaaaccaccatggcacatgtatacttatgtaacaaacctgcatgtcctgcacatgtatcccagaacttaaagtaaaattaaaaaaagatggatgcatatatatggttgactgttgtctatgtagatttctttagaaactaaactataaatacatagtgggtagtgggttgaacttaacagtgatttataactagtagtaattaatgtctggttatcagagatcattaatggcatgggataaaaatatcygttaacattatttatgttctatgatctcagaattatcattgctatacttaatgtattcattattaccataccaatttatcaagagctacaaattaat

SEQ ID NO: 335125 - DNA, 589 bp, Homo sapiens
ggcttattcctacatttttatttttatttacttactgttattatttaaatttcaacttttaatttggatgcagggagtacatgtactggtttgttaatgagaatattgtgtgatgctggagtttggggtacggatcccatcatccaggtggtgagcatagtrcctgataagtactttttaaacctgtgatcccttccctccctcctccttctggtagttcacactgtctgctcttcccatgtttatgtctatgtgtgctcaatgtttagctctcacttataaatgagaacatgcactaacccctagactttagcagacacccagaacactctgatagtaacttattcttcctctttccaatcagcatccacttgtaattacctgttcagtggcggtgatacctgacagcaagattcatgatggcagagacagtatttaattctgacagatagctttgacacatagtagaagctcagtagatattttgggaataaagaaagaaagaaattccatgttaaggagtttgtcatttaaactacataaaagctttggaggttttaatcagaagagtggaagatgttatttggga

SEQ ID NO: 335126 - DNA, 589 bp, Homo sapiens
ggcttattcctacatttttatttttatttacttactgttattatttaaatttcaacttttaatttggatgcagggagtacatgtactggtttgttaatgagaatattgtgtgatgctggagtttggggtacggatcccatcatccaggtggtgagcatagtacctgataagtactttttaaacctgtgatcccttccctccctcctccttctggtagttcacactgtctgctcttcccatgtttatgtctatgtgtgctcaatgtttagctctcacttataaatgagaacatgcactaacccctagactttagcagacacccagaacactctgatagtaacttattcttcctctttccaatcagcatccacttgtaattacctgttcagtggcggtgatacctgacagcaagattcatgatggcagagacagtatttaattctgacagatagctttgacayatagtagaagctcagtagatattttgggaataaagaaagaaagaaattccatgttaaggagtttgtcatttaaactacataaaagctttggaggttttaatcagaagagtggaagatgttatttggga

SEQ ID NO: 335127 - DNA, 414 bp, Homo sapiens
tcttacttctaactctacagggactaaaaacctgattgtaacaagttttactctaytggtaatagcactgtggaagatattcactgtgctctatattgtgaaagacttgctaaataagattaaaaaaaaacaaatgcacaaatcttaaggttaaaaatcaataaatttgattatatcaaaaattaaagtcttctgtttaaaaggatagtaaaaacaaggttaaaagatcactggccttttggaaggtgatgtgtacatgtcaaagtaaaggatctaagccagtttcgcttagtgttttatatcacaggcattgtagttacacacgtaaggattgaaacacagctctgctgcttgctgtctgtatttggaaagaatgatcacttcatattgccacaacttagtttttacatctgt

SEQ ID NO: 335128 - DNA, 414 bp, Homo sapiens
tcttacttctaactctacagggactaaaaacctgattgtaacaagttttactctattggtaatagcactgtggaagatattcactgtgctctatattgtgaaagacttgytaaataagattaaaaaaaaacaaatgcacaaatcttaaggttaaaaatcaataaatttgattatatcaaaaattaaagtcttctgtttaaaaggatagtaaaaacaaggttaaaagatcactggccttttggaaggtgatgtgtacatgtcaaagtaaaggatctaagccagtttcgcttagtgttttatatcacaggcattgtagttacacacgtaaggattgaaacacagctctgctgcttgctgtctgtatttggaaagaatgatcacttcatattgccacaacttagtttttacatctgt

SEQ ID NO: 335129 - DNA, 604 bp, Homo sapiens
tgtaaagcactttctctctctgtgtatgtgtatgtgtgtgtttggaattcctgaaattttaaatatttgctatcagtccatggtaagcgtgatcttgaaatcctcattaamatatttctatttttgcttcttaaattatgtcattattgattaaatgtaatcattaaaatgtttgtttctttgtggtctttggcttattatttaatgtgtaacaactcatatatacatcaacagtgctttagacttatacttttagatacaattttattttatatataactattatactttattttttttcacttactggggcacaattgacaaaagttatacatatttaaagtgtaaaacttgatgtcttgatatatatatatattatatatatacattgtgaaatgatcaaatgggatgatatttatcaaagaatacaaagtttcacttttgcaaaatgaatcctttattgagataaattaatacaatattgattaccaatatatgtttagcttcttgaatttaatgacagaaagcaactactaaggattgaataattcttggaggggtttgctcgttggttttgtcaaaatactgataaataaagcagagc

SEQ ID NO: 335130 - DNA, 549 bp, Homo sapiens
ctgagagctactaggagtggtgaacttcggttctacaatcccactgagctaaacccaaccaccaacctgaatgcacttggaagcagattcttcctctgagcttccactaaggaactcaggccttgacaccttgatttcagtcaggttggtgagactgtaagctgaggatgcactcaagctagcagagttcttctaacctacagaagctgtgaggtagtaaatatgtgctggyttaaaccttaaacttaaacccatgtgagaagttcttataacagtgaaaggaaatgaataaccttgctttaggaagcaggcattgccatttaccagggtttaggaaagcacttggctagtagcatggatcagatgctgcgactaggaaggtggttaggagttgcagcagaaaacagaagattatagtgcacttattttcatcactcaactggatgcattgcctctgaattttttggtgacattacaactacaaagctaaaaataaaatcaactcaaaacttgcagtattatgtgaaagagtgccctatgtttttgatt

SEQ ID NO: 335131 - DNA, 615 bp, Homo sapiens
taaatttctggcacaagttataatttaacttttttcagtgtgaattatctagtggatcctaagccatatgtttattcagtgtagggaaaaggtgtgttcttcaactattgtgaattatttaactgtcttaagtcatttttagggttactattatatatgtatctccctctaatttataatacaaagggtgaaatatgagaattattatagttttaattattaagaacttcctagatgtcagtcactatgcttaacattctttttttaaaaacaaaacaaagcaraaacttttatttaggtttggaggtacatgtgaaggtttgttacatgggtagaacattatttacatagtaattcattcaatattcacatctgcccttaatcctactaacagacgaggaaactgaggtaaagaaaggctaagaactttgcctgaagtggcctggccaactctctggcagatccaggattataaaagctggcaggctggtctaaagcccacatccccactccctataacgagatccaggctccaggataggaattgttgccctgtgtgctagggtcttcaagagctgatgcaaaggggaacttgaggaaagaagggactatgca

SEQ ID NO: 335132 - DNA, 615 bp, Homo sapiens
taaatttctggcacaagttataatttaacttttttcagtgtgaattatctagtggatcctaagccatatgtttattcagtgtagggaaaaggtgtgttcttcaactattgtgaattatttaactgtcttaagtcatttttagggttactattatatatgtatctccctctaatttataatacaaagggtgaaatatgagaattattatagttttaattattaagaacttcctagatgtcagtcactatgcttaacattctttttttaaaaacaaaacaaagcagaaacttttatttaggtttggaggtacatgtgaaggtttgttrcatgggtagaacattatttacatagtaattcattcaatattcacatctgcccttaatcctactaacagacgaggaaactgaggtaaagaaaggctaagaactttgcctgaagtggcctggccaactctctggcagatccaggattataaaagctggcaggctggtctaaagcccacatccccactccctataacgagatccaggctccaggataggaattgttgccctgtgtgctagggtcttcaagagctgatgcaaaggggaacttgaggaaagaagggactatgca

SEQ ID NO: 335133 - DNA, 615 bp, Homo sapiens
taaatttctggcacaagttataatttaacttttttcagtgtgaattatctagtggatcctaagccatatgtttattcagtgtagggaaaaggtgtgttcttcaactattgtgaattatttaactgtcttaagtcatttttagggttactattatatatgtatctccctctaatttataatacaaagggtgaaatatgagaattattatagttttaattattaagaacttcctagatgtcagtcactatgcttaacattctttttttaaaaacaaaacaaagcagaaacttttatttaggtttggaggtacatgtgaaggtttgttacatgggtagaacattatttacatagtaattcattcaatattcacatctgcccttaatcctactaacagacgaggaaactgaggtaaagaaaggctaagaactttgcctgaagtggcctggccaactctctggcagatccaggattataaaagctggcaggctggtctaaagcccacatccccactccctataaygagatccaggctccaggataggaattgttgccctgtgtgctagggtcttcaagagctgatgcaaaggggaacttgaggaaagaagggactatgca

SEQ ID NO: 335134 - DNA, 592 bp, Homo sapiens
aagtgtctctgcaggcacgtgcacactcacggacacacacacacacacacatgcatggacacctttgagaataactattacaacctgaacagaaaaatgttactctctactgtgaaaacctttgaccaagaaaaaaacaaactatgatcctataaaatggtaaataagtacataaacaaaataaacgcaaccaaagacaagtatttgtgctctatttgggggcagaataggaatcacctaggtctattgtactcacagatacccttgcaaatgtgaacctgagattagcctaaacaataacaaaaaaaaaatctctattaataagcagacaaaacttacctttactgcctgggttcctaaatccttttcaaagyatttgttttgactttgaagtaactatttaaagattttttttttttcaaatgagcacaaaaagtgagaggcatagaatccttagctgaatctagctcatgataaggcaaaaaataagctgaggaggaggtgcaattatgtaaatcctgtgtcattatgtcagcatcatgtattaatatgtaagaaatatcaatcagactctcataaactacatagacca

SEQ ID NO: 335135 - DNA, 592 bp, Homo sapiens
aagtgtctctgcaggcacgtgcacactcacggacacacacacacacacacatgcatggacacctttgagaataactattacaacctgaacagaaaaatgttactctctactgtgaaaacctttgaccaagaaaaaaacaaactatgatcctataaaatggtaaataagtacataaacaaaataaacgcaaccaaagacaagtatttgtgctctatttgggggcagaataggaatcacctaggtctattgtactcacagatacccttgcaaatgtgaacctgagattagcctaaacaataacaaaaaaaaaatctctattaataagcagacaaaacttacctttactgcctgggttcctaaatccttttcaaagtatttgttttgacttygaagtaactatttaaagattttttttttttcaaatgagcacaaaaagtgagaggcatagaatccttagctgaatctagctcatgataaggcaaaaaataagctgaggaggaggtgcaattatgtaaatcctgtgtcattatgtcagcatcatgtattaatatgtaagaaatatcaatcagactctcataaactacatagacca

SEQ ID NO: 335136 - DNA, 592 bp, Homo sapiens
aagtgtctctgcaggcacgtgcacactcacggacacacacacacacacacatgcatggacacctttgagaataactattacaacctgaacagaaaaatgttactctctactgtgaaaacctttgaccaagaaaaaaacaaactatgatcctataaaatggtaaataagtacataaacaaaataaacgcaaccaaagacaagtatttgtgctctatttgggggcagaataggaatcacctaggtctattgtactcacagatacccttgcaaatgtgaacctgagattagcctaaacaataacaaaaaaaaaatctctattaataagcagacaaaacttacctttactgcctgggttcctaaatccttttcaaagtatttgttttgactttgaagtaactatttaaagattttttttttttcaaatgagcacaaaaagkgagaggcatagaatccttagctgaatctagctcatgataaggcaaaaaataagctgaggaggaggtgcaattatgtaaatcctgtgtcattatgtcagcatcatgtattaatatgtaagaaatatcaatcagactctcataaactacatagacca

SEQ ID NO: 335137 - DNA, 621 bp, Homo sapiens
gcacaacaatgttagcctgaaggactttcatgatggatcggcccctgggcatggcccggagcttcccgatggtccagccaattgtggctgtttattccaggaagcatctattgctatgttcatgctcattttagagcctatggaaagtacatctttgctgagaattcaactcttttgaagttatttcaaagtgaatggaacatttacttggctgactcttgatcctccttctttggccttttcagcatgctcaccaaatatatttaattgcttcccacagtctatggatttaaccgaaaattctaggcatgagtcccartctgactccatactatctcccaggcctcgttttcccacatctcacagtgtagtctatggtccaagcatgctggactagttctcactgcctgagcatagcaagcatttccatgcttcccaacacacccactcacagacatccaattcagctcgatgcaaattcccttttcctgaagtcttacaactgtcttgtttattttctgtagtttcttgtttcaatttctatgacagaattcatttaattctgctttatattgaaaatctagttatttttatatccaactttaatttataaactccttt

SEQ ID NO: 335138 - DNA, 623 bp, Homo sapiens
agaaaacgtctataaccaaggcaaaagtatcaccactcaaagtgaggtatyggtttttctgaattaagataaaaacagaatttgagaggaatggcttagaaactgttatagtcagctcaccaaataatttcatgtctgttgaacccaaatacaataatgaaaataatgggaactgattttttcatctaagaaatttatttttattgcattttacaaaactagcatccagtgacaatagtatagtgtgttcttaaaaaacaaatgtgtgcacaaaaacacaaccaacaacaaaaaaccccttagcctttcatcacaggtccattgagaagcactgggcccatgaataaaaaccctacatgaaaactcttttgaatgcttctaggcaaaagtccatctaacacttcttccctgtcataacattagagatgactggaagaaactcaccacaatgaaggcagagagcaatctgagagctcatccttaagacttgcacaaatgttttgtacctggcattttggagaaggtatgcatgtacgtgtcgcagacaccaatagcataaggtgtttgcaaactatttcttggagttgtctgcactacactgctttgtccattagaaaatacca

SEQ ID NO: 335139 - DNA, 623 bp, Homo sapiens
agaaaacgtctataaccaaggcaaaagtatcaccactcaaagtgaggtattggtttttctgaattaagataaaaacagaatttgagaggaatggcttagaaactgttayagtcagctcaccaaataatttcatgtctgttgaacccaaatacaataatgaaaataatgggaactgattttttcatctaagaaatttatttttattgcattttacaaaactagcatccagtgacaatagtatagtgtgttcttaaaaaacaaatgtgtgcacaaaaacacaaccaacaacaaaaaaccccttagcctttcatcacaggtccattgagaagcactgggcccatgaataaaaaccctacatgaaaactcttttgaatgcttctaggcaaaagtccatctaacacttcttccctgtcataacattagagatgactggaagaaactcaccacaatgaaggcagagagcaatctgagagctcatccttaagacttgcacaaatgttttgtacctggcattttggagaaggtatgcatgtacgtgtcgcagacaccaatagcataaggtgtttgcaaactatttcttggagttgtctgcactacactgctttgtccattagaaaatacca

SEQ ID NO: 335140 - DNA, 493 bp, Homo sapiens
aaactcatttagcccctgaaaaatacagaccaaaattgctaaatggctgataacacttctcaaagagatacaatcaagctctgacaaatgtgaatctagaatttagcttttctaaggagacactgcaacaaaccaacaaaggtggcacttgtaatggccatattcttatatactctttaaaatttaaaaattacataatagttataatttggtgagtagtaattatactctggtggtgggtgggaggagagcatgcattcctactagacttttcatttcataaatggcagggagtaaggaggaagcatgttaccctatgcagtgatgaatttgtcatgcaaatacaagtatgctttccacttaaccagatgcttctgcttggatggataaaacataaatatatccatttgagtggataaatttgcttygcgtttggagagttttacttttcacctgtaggctagtcccactgcggagatcatataataaatct

SEQ ID NO: 335141 - DNA, 578 bp, Homo sapiens
catatgagacaggatttacattttgatagttactggagtgcctaatgcaaatacatgcttatattcatcaaaaagccatacaatatgttatatctattggaatacgcgtgagtacaagacaacctgcaatatagattgtcaatatggttgcatataaaatgctatgtctcttttactgacttcattaatctcagaattaaaatggcatggaaacacaataacctataataatagcaatayataatgataatacatggtaatattcaagtcatgattcacagtttaaaagcttcatttactttctcgctcttattcaatcatcagagaagcttgggataaagcatcagctacttttcctttttgctggctaatacaaaaacacagaagacaaggtgacatctccgaggccattccacaaacagcagtgctgggaagggaaccagtcttccagagaatgcgtgagagtaatgcatatgcaacaaattataaaataaggagactggcctcttaagggatattatataaatggatagaggaagagaagtatgtgagagacaaatgcagaataaaaaggtata

SEQ ID NO: 335142 - DNA, 578 bp, Homo sapiens
catatgagacaggatttacattttgatagttactggagtgcctaatgcaaatacatgcttatattcatcaaaaagccatacaatatgttatatctattggaatacgcgtgagtacaagacaacctgcaatatagattgtcaatatggttgcatataaaatgctatgtctcttttactgacttcattaatctcagaattaaaatggcatggaaacacaataacctataataatagcaatatataatgataatacatggtaatattcaagtcatgattcacagtttaaaagcttcatttactttctcgctcttattcaatcatcagaraagcttgggataaagcatcagctacttttcctttttgctggctaatacaaaaacacagaagacaaggtgacatctccgaggccattccacaaacagcagtgctgggaagggaaccagtcttccagagaatgcgtgagagtaatgcatatgcaacaaattataaaataaggagactggcctcttaagggatattatataaatggatagaggaagagaagtatgtgagagacaaatgcagaataaaaaggtata

SEQ ID NO: 335143 - DNA, 594 bp, Homo sapiens
acttttttccaatgaaaatattataaaaagtgaaatattttctatgaaaggcttcaacagaatgacaacaagggagtgggtaatagaataatttaaacaggataaaaatatcaatgcaatcaatgaaaatattcttaaatcctttcattttacttattcacttatttattttagagacaggggtctcactatgttgtccaggctggagtgcagtggttatttacaagtgcaattgtagctcactgcagtctagaactcctggtctcaagtgatcctcctgtttcagcctcccaagttgctagaactacaggcatttgtcaccccacctggctccatcattcattttagtagtaaattatgatatatagtaatgtctttcggtcactytccatatctccaactttatgaaagcatgtctctctttctttccattaaattaaatgattcaagcagaaaccaaattgtcctaagtagctaatctatgccagtaattgtactgtggttgattgttcatgagggcaagagatttaaggtttcactaagagatggaatgctataacaaaactcaaactcatgtttgccccaattaatata

SEQ ID NO: 335144 - DNA, 622 bp, Homo sapiens
attactacgtatcatagatgtcasgatccatcaattctctcttctattgataacatatgcaatttcttctattcatctaaatataaaactttgtttgttagtctttttgataagttatttttaacccgtcttaaaatatcttaattctggaagaataaaacagtttgccttctctgagtctttctttgccatgctaacttaaattgttcagtttcaccaagaaatgtctaaagccttcttttcatcatttcatttgtgccctccatggatgttatcaatggtctctttgattgccatgcatgtgcatataactcctagacataagaatgtactatagagcttttccttgaactacagacctatattcatgacttcttagacatatttaccttgctattacagtgcaccaaacatcacttgttccaagccatcctacacatctccattccattctcaaagaacaatgcaagtattcagctagttacacaaactagaaatactggctatgtctttaaattctccttttaaccttccttatacaattattaaattctctcctatctatttcttaaatatctctttcttggaatcctacccaccgaaattgacctaggaatcaaca

SEQ ID NO: 335145 - DNA, 598 bp, Homo sapiens
ggagatgactatgatgattaattttacctgtcaacttgtactgaaacaaatggtgcaaacattattctatgtctgtgaaggtgttcctgggtgagatgagcttttcaattcrtcgattgagtaaagcagtttgctttctctatgtgagtaggcatcattcaatcaagtgatgtattaaggttctcttagagggacagaactaataggatatatatataaaggggagtttattatgtattaacttgcatgatcacaaggtccaacaataggccatctgcctgctgaggagaaaggacagccagtccgagtcccaaaactgaagaacttggagtccagtgtttgagggcaggaagcatccagcatgggagaaagatgtaggctgcgaggctaagcccatctctccttttcatgtttttctgcctgcttcatatttgctagaagttaattagattgtacccaccagattaagtaagggtggatctgccttctgcagtccactgactcaaatgttaatctcttttggcaacacccacacagacaaacccaggattaatactttgtatcccccgatccaatcaagttgacactcagtaataaa

SEQ ID NO: 335146 - DNA, 607 bp, Homo sapiens
tgtattgacagtctattttgtgttaggtactggggatacacaggcatgttttcctggacatcatgggagatgactatgatgattaattttacctgtcaacttgtactgaaacaaatggtgcaaacattattctatgtctgtgaaggtgttcctgggtgagatgagcttttcaattcatcrattgagtaaagcagtttgctttctctatgtgagtaggcatcattcaatcaagtgatgtattaaggttctcttagagggacagaactaataggatatatatataaaggggagtttattatgtattaacttgcatgatcacaaggtccaacaataggccatctgcctgctgaggagaaaggacagccagtccgagtcccaaaactgaagaacttggagtccagtgtttgagggcaggaagcatccagcatgggagaaagatgtaggctgcgaggctaagcccatctctccttttcatgtttttctgcctgcttcatatttgctagaagttaattagattgtacccaccagattaagtaagggtggatctgccttctgcagtccactgactcaaatgttaatctcttttggcaacacccacacagacaaa

SEQ ID NO: 335147 - DNA, 598 bp, Homo sapiens
ggagatgactatgatgattaattttacctgtcaacttgtactgaaacaaatggtgcaaacattattctatgtctgtgaaggtgttcctgggtgagatgagcttttcaattcatcgattgagtaaagcagkttgctttctctatgtgagtaggcatcattcaatcaagtgatgtattaaggttctcttagagggacagaactaataggatatatatataaaggggagtttattatgtattaacttgcatgatcacaaggtccaacaataggccatctgcctgctgaggagaaaggacagccagtccgagtcccaaaactgaagaacttggagtccagtgtttgagggcaggaagcatccagcatgggagaaagatgtaggctgcgaggctaagcccatctctccttttcatgtttttctgcctgcttcatatttgctagaagttaattagattgtacccaccagattaagtaagggtggatctgccttctgcagtccactgactcaaatgttaatctcttttggcaacacccacacagacaaacccaggattaatactttgtatcccccgatccaatcaagttgacactcagtaataaa

SEQ ID NO: 335148 - DNA, 607 bp, Homo sapiens
tgtattgacagtctattttgtgttaggtactggggatacacaggcatgttttcctggacatcatgggagatgactatgatgattaattttacctgtcaacttgtactgaaacaaatggtgcaaacattattctatgtctgtgaaggtgttcctgggtgagatgagcttttcaattcatcgattgagtaaagcagtttgctttctctatgtgagtaggcatcattcaatcaagtgatgtattarggttctcttagagggacagaactaataggatatatatataaaggggagtttattatgtattaacttgcatgatcacaaggtccaacaataggccatctgcctgctgaggagaaaggacagccagtccgagtcccaaaactgaagaacttggagtccagtgtttgagggcaggaagcatccagcatgggagaaagatgtaggctgcgaggctaagcccatctctccttttcatgtttttctgcctgcttcatatttgctagaagttaattagattgtacccaccagattaagtaagggtggatctgccttctgcagtccactgactcaaatgttaatctcttttggcaacacccacacagacaaa

SEQ ID NO: 335149 - DNA, 512 bp, Homo sapiens
agtcacagctactgtggggcagagttggaattcaggcttaggcctctgtgatttcagaatatgagccctttaccactacatagtgataacaataacatagcaacaacttcagggtagagatattagtgtctagatatactattaaaatctccatgcatggctgaattccaaacacttcttggccataaacatgtgatatcttcttggctgtctgccaatgaacccttttttccatcagcactcactctccgtttggaggaaatcttatctttgccctaacaacacccagcacagctaagatatgtgcccatgactcacctacttaaactcttgcctaggccagacagggaggcttacacctgtaatcccagcactttgggaggccaaggcgggaggttcacttgaggccagcgattcgagaccagcctgggcaacatggccagatgtcatctctacaaaaaattaaaatattakcacggcgtagtggcatggaggtgggaggatcacttaag

SEQ ID NO: 335150 - DNA, 512 bp, Homo sapiens
agtcacagctactgtggggcagagttggaattcaggcttaggcctctgtgatttcagaatatgagccctttaccactacatagtgataacaataacatagcaacaacttcagggtagagatattagtgtctagatatactattaaaatctccatgcatggctgaattccaaacacttcttggccataaacatgtgatatcttcttggctgtctgccaatgaacccttttttccatcagcactcactctccgtttggaggaaatcttatctttgccctaacaacacccagcacagctaagatatgtgcccatgactcacctacttaaactcttgcctaggccagacagggaggcttacacctgtaatcccagcactttgggaggccaaggcgggaggttcacttgaggccagcgattcgagaccagcctgggcaacatggccagatgtcatctctacaaaaaattaaaatattatcacggcrtagtggcatggaggtgggaggatcacttaag

SEQ ID NO: 335151 - DNA, 613 bp, Homo sapiens
agactcaactgcacgaatttctccctaactgcaaatgctagaattttaacacagatcaatccattttcaggatcgcctgccataaaattactgattgatccctttggttgaactctgttaactgatttctcctttctctgtttaggtagatttatagacctagcaaacatcacataaagtcagtaatgttgaaatgttatttaatgaggcttcatagccagtgttacaaactaatgatgtaaaaattttaaaagcaggtttggggaataaaactgacttcaacattttatcctttaaaaaactgtaaatcctttacaataatgggaatttgttcaaaatacgttaaaaaatyaaacttaagacagtgcatcaaaaacttaaaggaaaagtcttcttttagaatcaagtaggcatactgccatttattatattttcataattctgtaacattcatccatggtcaaagcacagtcaaaattttaaaaattttaaataagcaagcattataaattcatattttattttaattttaaggtaattcttcctaaaaatatttcattttcacttcttgaaaacagttgcttttgttgcattgatgaatgagttggttgat

SEQ ID NO: 335152 - DNA, 568 bp, Homo sapiens
ttatgtctttaaaccaaaacttaattagactcagttactgcaacctgcagtcttagaagttcctagaaataatgtaattgcccagcctggtgcttcttgcccactgcacagataaagccaatgcactgagacagcggtgttgtggcagagaaagtgtttaattattgcaaggcagccaagcgagaggatgggaaatatttcttaaattcacctccttgagagctcagaggctatggttttttaggaaatttggcaggtgtcagtttctcgtgggggatgtcacaggactgattgagtcatgggtctggatgggtcatggtggtgtcggtgagtctgcaccaatgcaaaggtctgaaatacatctcaaagatcaatcataggtttgayaatagtgacattatttataggagaaattggggaagttactaatcctgtgatccctggctatgtgattctcaagcagtaagcaattatagaaaggcaagctatggaataatggctggtttttgtttaactgtgcctacatcttagcagaattcaggcccctcccataatcctaaccttgtag

SEQ ID NO: 335153 - DNA, 515 bp, Homo sapiens
accaccagtatcagccagctctcagaagtccagattccagtgccatgaagcccaactctgagctcagagtcaccaggaccaagcagcatccccttctccgaggtctgggcttcaagcttgccttaatttctttcttctctttctttctttcctctttctctgtttctccttctctgtttctctgtttctctctttctttctttgacagagtctttctgctgttgcccaggatggagtgcagtggcacaatcatagctcactgcagcctccaactcctgggctcaggcaatcctatgtcctcagcctcctgagtatcttgaactacaggtacatgcaaccatgactagcttttttgttgttgttgtttttccccatagagacagggtgttgctatgttacccaggatggtctcgaccttctgggctcaagcaawcctcccacctcagccttctgagtacctggaactacaccccgctccaatcttcactttagtccccaaagacgagggccctctg

SEQ ID NO: 335154 - DNA, 576 bp, Homo sapiens
gttcacaccactgcactcaagcctgggcaacattgtaagaccctgtctcaaaaaaataaaagtacaaaaatacaaaagacagctcaattttaaaatgggcaaaggatctaagtagtcgtttcatcaaagaagctacataaatggccaatacacacataaaaaaggtgttcagcattattggtcatcaaggaaaagcaaatccaaagccagaacgagatatcaattcatacctactagaacagctatagtcaraaataagggaaataacattattgatgaggatttggagaaacttcaagtttccaatttggacaaattggaaatctcatacattgttgctaagaatttaaaatagtgttgccactgtggaaaatagtcttgcagctcctcaaaaagttaaacacagaattatcatatgacctagcaattctgctcccaggtatatactcaaaagaaatgaaaacagatgttccaacaaatgaattcattgcccatgaatgtttatagaggcactatttacaatagccaaagctgaaaacaacaaaaatgtctatcgatagaggaatatagtagtga

SEQ ID NO: 335155 - DNA, 517 bp, Homo sapiens
aataatagctctgttttaacacctgtcaaacttggaggtacctccctttccaggaatygaatgcaatgtcaaaccatgttcaagtactgtctgtgagtgtaactgcaaggtagacgctgccttcatcaaagggatcttatgccccagaaacaactttgctacgtaagtgatggaggcttgcagagtggaggtgcccacaaccttactgcatttatttgtgcagccatatcgaaaacatttccagcaacagaaaaagggggaaggaagcactctgatactttttttcttattcttcggaggggacacattattggcccaagagggaaatccttttacaacctacttttacattaactgggatcataatttatttatgaaaacatcatataaaaagagcaagcaagcaggattcctaaacaaagggggctcaaaccaatatatgtgtagaagttattcattgtccccagggcaggcatacgttttcgtgtgtgtttcatgaaagacactgtcaccccag

SEQ ID NO: 335156 - DNA, 597 bp, Homo sapiens
aagggaatcctgggagtgataataagataactcactaagtatcaccgggagtgatacaaagagtaacttaaggatatcttaaggttagtagctatagtagactagagagaaatccatccaagttcaaaggaaaaagcatgaggacaagtagggatgtttcaagaagaaagaaaaatggatagattatctgttgtgtttcaatgtactgagaaataatttccaattctgatgaaaacttcaaagatgaccaatacatagaaaattaagtgaatgaaaaacatgtgacaaataatgagactgcagttgtacaagaaaagttatacaggaaaaaataatcatagcacaatatatgttttagttataaaaatatttactggcttataataatttgaatacctccaaraattgggatataacacttttgggagaatgagagaagaaacaatatgtatgtgtgtgagtgtgtggttatataaaagaattaaagcattacatttatgaaagttagtcaacagttaatgccctaatgctaaggtctaacctaaacaagaaaatccagaaatagtagtttacactggtaatagagcaagaagattt

SEQ ID NO: 335157 - DNA, 581 bp, Homo sapiens
gatacatctgggttatttgaagtcactaagtgtgtgacatttgccacagcagccaacagaaatctgttgaggtacagtgaagaagagatattttaaattytgtggtactttttacatgaatacatttgttttaaatatgtaacagttttaaaacttcagtaaagtaagaatttatggatattttcttgatgcgattaaaaatatttaattaaaaccatcatcctccttctggcttctcttccatcatgtacatttacacatgaattctggtggcttatgtagtccatgaaatgggagaaaggaccctgattcccagttcattttgatgttcccctaagcttatactgacatatctgttgtggtttaaagttgtggttgcaaagtttttgacattcctactactaagggggttatgagcccttcccttttatctgggctggcttgtgactgagttgaccagtaaatagtacctgtgaccgtagaggacttctgttgtaggttataaaagaccatggtgctctgtctcattcactcttggagtcctgagccaccatctacaatgtctggctgcactgagatca

SEQ ID NO: 335158 - DNA, 581 bp, Homo sapiens
gatacatctgggttatttgaagtcactaagtgtgtgacatttgccacagcagccaacagaaatctgttgaggtacagtgaagaagagatattttaaattttgtggtactttttacatgaatacatttgttttaaatatgtaacagttttaaaacttcagtaaagtaagaatttatggatattttcttgatgcgattaaaaatatttaattaaaaccatcatcctccttctggcttctcttccatcakgtacatttacacatgaattctggtggcttatgtagtccatgaaatgggagaaaggaccctgattcccagttcattttgatgttcccctaagcttatactgacatatctgttgtggtttaaagttgtggttgcaaagtttttgacattcctactactaagggggttatgagcccttcccttttatctgggctggcttgtgactgagttgaccagtaaatagtacctgtgaccgtagaggacttctgttgtaggttataaaagaccatggtgctctgtctcattcactcttggagtcctgagccaccatctacaatgtctggctgcactgagatca

SEQ ID NO: 335159 - DNA, 581 bp, Homo sapiens
gatacatctgggttatttgaagtcactaagtgtgtgacatttgccacagcagccaacagaaatctgttgaggtacagtgaagaagagatattttaaattttgtggtactttttacatgaatacatttgttttaaatatgtaacagttttaaaacttcagtaaagtaagaatttatggatattttcttgatgcgattaaaaatatttaattaaaaccatcatcctccttctggcttctcttccatcatgtacatttacacatgaattctggtggcttatgtagtccatgaaatgggagaaaggaccctgattcccagttcattttgatgttcccctaagcttatactgacatakctgttgtggtttaaagttgtggttgcaaagtttttgacattcctactactaagggggttatgagcccttcccttttatctgggctggcttgtgactgagttgaccagtaaatagtacctgtgaccgtagaggacttctgttgtaggttataaaagaccatggtgctctgtctcattcactcttggagtcctgagccaccatctacaatgtctggctgcactgagatca

SEQ ID NO: 335160 - DNA, 581 bp, Homo sapiens
gatacatctgggttatttgaagtcactaagtgtgtgacatttgccacagcagccaacagaaatctgttgaggtacagtgaagaagagatattttaaattttgtggtactttttacatgaatacatttgttttaaatatgtaacagttttaaaacttcagtaaagtaagaatttatggatattttcttgatgcgattaaaaatatttaattaaaaccatcatcctccttctggcttctcttccatcatgtacatttacacatgaattctggtggcttatgtagtccatgaaatgggagaaaggaccctgattcccagttcattttgatgttcccctaagcttatactgacatatctgtkgtggtttaaagttgtggttgcaaagtttttgacattcctactactaagggggttatgagcccttcccttttatctgggctggcttgtgactgagttgaccagtaaatagtacctgtgaccgtagaggacttctgttgtaggttataaaagaccatggtgctctgtctcattcactcttggagtcctgagccaccatctacaatgtctggctgcactgagatca

SEQ ID NO: 335161 - DNA, 564 bp, Homo sapiens
ggataccctttgtcttcataagcctatgtcctgcttttaggtgaatacggggagcatagggagctttgctacatggrcttctttttaattgcctttagctcaacaatctttcatattttggggtgttatattccggtctcccacattgtcaataattattttaaagtagttgtcctacgatttgcaattcagacacattctttttttgttttgttttgatttgtgggttttttttttttttttttgagacagagtctctctctgtcgcccaggctggagtgcagtgacgtgatctcggctcactgcaacctccgcctcccaggtgcaagcgattctcctgcctcagcctcctgaatagttgggactacaggcatgcgccaccacgccaggctaatttttttgtatttttagtagagacggggtttcactgtgttagccaggatggtctcaatctcctgacctcgtgatctgcccaccttgacctcccaaagtgctgggattacaggcatgagccaccgcacccagcctcagacacattcttgagaatgaaattagtcagtcata

SEQ ID NO: 335162 - DNA, 564 bp, Homo sapiens
ggataccctttgtcttcataagcctatgtcctgcttttaggtgaatacggggagcatagggagctttgctacatgggcttctttttaattgcctttagctcaacaatctttcatattttggggtgttatattccggtctcccacattgtcaataattattttaaagtagttgtcctacgatttgcaattcagacacattctttttttgttttgttttgatttgtgggttttttttttttttttttgagacagagtctctctctgtcgcccaggctggagtgcagtgacgtgatctcggctcactgcaacctccrcctcccaggtgcaagcgattctcctgcctcagcctcctgaatagttgggactacaggcatgcgccaccacgccaggctaatttttttgtatttttagtagagacggggtttcactgtgttagccaggatggtctcaatctcctgacctcgtgatctgcccaccttgacctcccaaagtgctgggattacaggcatgagccaccgcacccagcctcagacacattcttgagaatgaaattagtcagtcata

SEQ ID NO: 335163 - DNA, 586 bp, Homo sapiens
acaggcatgagccaccgcacccagcctcagacacattcttgagaatgaaattagtcagtcatagattatgaagtactttaaatcygatgaaagtcagatttatttcattaagagaggaaagaagaactattgaaaggagcagatattgaaaatggagcaatgtggtgttatttcactttgtgagcaacccagaacaaacatataggatgtaaatagtgatacataggccaatcaatgattactgaggcacttagattaatagtataatttatgtagaagtaactttactctcttcaattaacagcatccgtatctaagaagtatgacatttgtgctaggtcaggtaaaagtgctggtcatttcagtgttttgtacaataataaacataccttagacattggtatatataaatttcccatcctgagtcacattttagtagtggctcaccaaatgacttaagatcaaaagtcactctctttgaactaagtactgtacaagaggtttcagtgtgtgtgactttcccctgccaggacccattttattgtcagagttggctcagagttttggctgaggttgggaataatag

SEQ ID NO: 335164 - DNA, 544 bp, Homo sapiens
aatgtggtgttatttcactttgtgagcaacccagaacaaacatataggatgtaaatagtgatacataggccaatcaatgattactgaggcacttagattaatagtataatttatgtagaagtaactttactctcttcaattaacagcatccgtatctaagaagtatgacatttgtgctaggtcaggtraaagtgctggtcatttcagtgttttgtacaataataaacataccttagacattggtatatataaatttcccatcctgagtcacattttagtagtggctcaccaaatgacttaagatcaaaagtcactctctttgaactaagtactgtacaagaggtttcagtgtgtgtgactttcccctgccaggacccattttattgtcagagttggctcagagttttggctgaggttgggaataataggtgctaagtacctttatattaagtgcttggctatctttgccagactttgcagaaggcttgctcaacaacctgttctgcctgaattggcccacccgcctagcttcccatagaaaaca

SEQ ID NO: 335165 - DNA, 544 bp, Homo sapiens
aatgtggtgttatttcactttgtgagcaacccagaacaaacatataggatgtaaatagtgatacataggccaatcaatgattactgaggcacttagattaatagtataatttatgtagaagtaactttactctcttcaattaacagcatccgtatctaagaagtatgacatttgtgctaggtcaggtaaaagtgctggtcatttcagtgttttgtacaataataaacataccttagacattggtatatataaatttcccatcctgagtcacattttagtagtggctcaccaaatgacttaagatcamaagtcactctctttgaactaagtactgtacaagaggtttcagtgtgtgtgactttcccctgccaggacccattttattgtcagagttggctcagagttttggctgaggttgggaataataggtgctaagtacctttatattaagtgcttggctatctttgccagactttgcagaaggcttgctcaacaacctgttctgcctgaattggcccacccgcctagcttcccatagaaaaca

SEQ ID NO: 335166 - DNA, 607 bp, Homo sapiens
ccttgtttttcaaattatttaattttttgattgatttattgaacaattcagtctgttcacatgaatttgtaattcttgacttaacatgtctatatcaaggtataaatgctagttgagtttttttcagggtcatgaaggcaaagtttgttattacttgggataattaaccatacacacttaaactttctaagaagtaaaaaattattgggtattgttataaattttggttaaaagccaaataagaaatggaaaaaattaataaaagtaatccttgaattttaataattaatttttaattcatkttcatcaaattaatatatattttaaatcagcatttcccaaatccatttcagcagaatatcagcgtattttttttttaaaagtaagtctttactcaagtaactttgacattgttgattaatttcattaggattattcactgtaactgatattggggtctttaatatgcttatgttttgtgaacctccaagaaaatggaatataaagcaatattttttgcatttggctacaggatcacttctcaaaagaagccatatatcatgaatgtttcatacactgttaataataaaacaggctgggtgtggtg

SEQ ID NO: 335167 - DNA, 607 bp, Homo sapiens
ccttgtttttcaaattatttaattttttgattgatttattgaacaattcagtctgttcacatgaatttgtaattcttgacttaacatgtctatatcaaggtataaatgctagttgagtttttttcagggtcatgaaggcaaagtttgttattacttgggataattaaccatacacacttaaactttctaagaagtaaaaaattattgggtattgttataaattttggttaaaagccaaataagaaatggaaaaaattaataaaagtaatccttgaattttaataattaatttttaattcatgttcatcaaattaatatatattttaaatcagcatttcccaaatccatttcagcagaatatcagcgtattttttttttwaaagtaagtctttactcaagtaactttgacattgttgattaatttcattaggattattcactgtaactgatattggggtctttaatatgcttatgttttgtgaacctccaagaaaatggaatataaagcaatattttttgcatttggctacaggatcacttctcaaaagaagccatatatcatgaatgtttcatacactgttaataataaaacaggctgggtgtggtg

SEQ ID NO: 335168 - DNA, 607 bp, Homo sapiens
ccttgtttttcaaattatttaattttttgattgatttattgaacaattcagtctgttcacatgaatttgtaattcttgacttaacatgtctatatcaaggtataaatgctagttgagtttttttcagggtcatgaaggcaaagtttgttattacttgggataattaaccatacacacttaaactttctaagaagtaaaaaattattgggtattgttataaattttggttaaaagccaaataagaaatggaaaaaattaataaaagtaatccttgaattttaataattaatttttaattcatgttcatcaaattaatatatattttaaatcagcatttcccaaatccatttcagcagaatatcagcgtattttttttttaaaagtaagtctttactcaagtaactttgacattgttgattaatttcattaggattattcactgtaactgatattggggtctttaatatgcttatgttttgtgaamctccaagaaaatggaatataaagcaatattttttgcatttggctacaggatcacttctcaaaagaagccatatatcatgaatgtttcatacactgttaataataaaacaggctgggtgtggtg

SEQ ID NO: 335169 - DNA, 493 bp, Homo sapiens
tttttacttttttttttgagcttacatctcaattttttctatgcaatatgttaaagatacatatattctcacacagacacacacacagacacaggaactattaaggtagaaagactatataagaaaaatattgtctctcaagactaaatactatacttagccccaagataaatataattatataaataagtaacaaaacagaccmagcattcatttataaagtcagagaaaacagctccaggacaataagattcatgggtcttccaccatattcacatttttcatattcctgatacatgctgtagttctctgagttgacacatggaaatgagcaaaagcttttagtggatgttgtctaggaacccctccagaaacgatctcccactatatgggggtgcatttttaattgattttctatttgtaggctattttataagttatggcttagaaattaattgtagagaactattagtatgtgaatatttgtccatag

SEQ ID NO: 335170 - DNA, 593 bp, Homo sapiens
acatagaactatttagatttccttctttttttcagctatggtaatacatttttgcaaaaggtatccattttatttaaattatcaaattatcaacatgaagtagttgtaatatacataattttgcagtatagaagagtcaccttttccatatgaatctatgatcatactacttctctgcctaaatattttaatgatatttttggcttttagttaaagttcatcatgtctaataccaccccaattatgttattaatctctgtggtacaactctttactctctgctcactgctttctaatcaraatgagcttgtctgtttcttaaacatcacttctttatctcaccatagggccatggaacaggtttgttctctacaggacttttctttctcattcagtctcttaaagtagtcaagagtcatagttacctttcaggactcatctcaaatatcagttcctcacagaaacatttcttgacaaccttgctcttcacccttccacctctgaatcagaaaatgtggagatgttgcctagaatttgcgtttttaatagtttctcaggtatttcttttatatatttgaagtctgaagatttct

SEQ ID NO: 335171 - DNA, 593 bp, Homo sapiens
acatagaactatttagatttccttctttttttcagctatggtaatacatttttgcaaaaggtatccattttatttaaattatcaaattatcaacatgaagtagttgtaatatacataattttgcagtatagaagagtcaccttttccatatgaatctatgatcatactacttctctgcctaaatattttaatgatatttttggcttttagttaaagttcatcatgtctaataccaccccaattatgttattaatctctgtggtacaactctttactctctgctcactgctttctaatcaaaatgagcttgtctgtttcttaaacatcacttctttatctcaccatagggccatggaacaggtttgttctctacaggacttttctttctcattcagtctcttaaagtagtcaagagtcatagttacctttcaggactcatctcaaatatcagttcctcacagaaacatttcttgacaaccttgctcttcacccttccacctctgaatcagaaaatgtggagatgttgcctagmatttgcgtttttaatagtttctcaggtatttcttttatatatttgaagtctgaagatttct

SEQ ID NO: 335172 - DNA, 534 bp, Homo sapiens
ctactcacccactgaatatcatgtttttcaagtttatgtgtgtggtgtttttttttttttttcctgaaaaaaggtatcttctactgtttgactttttccctacgattctttgttaaaatgctgtgttttagatgctattaatttgtcctctctcttaatgcccttggattttcctcttaattgtctgcaccattgctgttacccaagatgcctggctggagtagataaaaataagccgaagtccaaaaattggaatagaatggaaggaatggatcaaaggaaatcaggagtttttgtgcagtcagatatgggtcttatagatgagagcggtctaraaaagcagttctgggctcagattgcgtgactgtgctttgccggcatattcctaactatatcacatattctccactatacagtaagtagatgataataataagtgggtatgataataaatagatgatgtaaatggatgatataaccacagtgaaaatcctggaaaaagaaaagttaggttgctgtagaaaatccacgttt

SEQ ID NO: 335173 - DNA, 534 bp, Homo sapiens
ctactcacccactgaatatcatgtttttcaagtttatgtgtgtggtgtttttttttttttttcctgaaaaaaggtatcttctactgtttgactttttccctacgattctttgttaaaatgctgtgttttagatgctattaatttgtcctctctcttaatgcccttggattttcctcttaattgtctgcaccattgctgttacccaagatgcctggctggagtagataaaaataagccgaagtccaaaaattggaatagaatggaaggaatggatcaaaggaaatcaggagtttttgtgcagtcagatatgggtcttatagatgagagcggtctagaaaagcagttctgggctcarattgcgtgactgtgctttgccggcatattcctaactatatcacatattctccactatacagtaagtagatgataataataagtgggtatgataataaatagatgatgtaaatggatgatataaccacagtgaaaatcctggaaaaagaaaagttaggttgctgtagaaaatccacgttt

SEQ ID NO: 335174 - DNA, 598 bp, Homo sapiens
agaaggaggagagagacatcgggagcagagaaaaagcaatcaaaatgtttgagagctatttaaaaggtagaatttacatttgtgatgataaattagagatgagaagatgactcctacttttcaggcttaatcaacctggcaggtggactatatctccacttgcttctattatgggttctttttcttttttccttccatcttttctttcctttccttttctctcttttcctttttttttttttctttttgagacagggtctcactttttcacctaggctggagtgcagtggtgcgatcatagcccattgcagcctcaacctcttgggctcaagcaattctcctacctcagyctcgtaagtatcttgggttacagggacatgctaccatgactggctaatttttgtagtttttgtagagccagggtttctccatgttgcccaggctggtctcaaactcctaggctcaagccatcctcccgccttggcctcccaaagtgctgggattacaggcgtgagccactgcatccagctcttctcttttctttactttttaaaaactgtctcttattttcttttcaataccttaaaataaaaaagtt

SEQ ID NO: 335175 - DNA, 479 bp, Homo sapiens
attcaccacagaataaggaaatagtgatattttaaaggaagcattttcaattgctagtttggacacatacatagtccaaggaaaacaaatatatacagcatccctggttagaatgcacttgtttacaaattttaatcaggtgggagacataatacccgaagaaatctaagagggggaaccacataaataaataaagawtatctcatgaataagtatattttgtacattttgttgttgcttattttgacatccttgactctacttctgtctattcctctggtatgtcccattttcaaggtacaatttgggttttagaggcccaagatatcattattactcttctcaatagaatgtccctttctcctcatatgcaacattggacacacatttaattgtatttttattataaaagcaactctacttataggaaacataaaagcctagaaaaagcgtgaggaagaatataattcgtagttgtg

SEQ ID NO: 335176 - DNA, 593 bp, Homo sapiens
acaagttaaagtcccatgataggccgtctgcaagttgaggagcaaagaaggcagtggtggatcagaccaagtcccaaaagttcaaaagtaggaaagtcaacagtgcagccttcagtctgtggcgaaaggcccgagaggcctagtaaaccactggtgtaagtaagtccaagaatctgaaagctgaagaacttggagtctgatgttcaagggcaggaagcatccagcatgggagaaagatggaggctagaagactcagcaagcctaatccttccacgttcctctgcctgcttttatcctagccatactggcagctgattagatggtggccactcagattgagggtgggtctgcctctgccagtccactgactcaaatgttaatctcctttggcaacatccaggaacgatactttgcattcttcaatctaatcaagttgatcctcaatattaccatcacacttaataactttatatcatatttgggggagatgctgggaagtcacatgacagtcggttattcttttcttcatgctgcyctcctgagttctctgatcgctgacatcctaatatccaggtcatgtccatgccccacag

SEQ ID NO: 335177 - DNA, 479 bp, Homo sapiens
attcaccacagaataaggaaatagtgatattttaaaggaagcattttcaattgctagtttggacacatacatagtccaaggaaaacaaatatatacagcatccctggttagaatgcacttgtttacaaattttaatcaggtgggagacataatacccgaagaaatctaagagggggaaccacataaataaataaagattatctcatgaataagtatattttgtacattttgttgttgcttattttgacatccttgactctacttctgtctattcctctggtatgtcccattttcaaggtacaatttgggttttagaggcccaagatatcattattactcttctcaatagaatgtccctttctcytcatatgcaacattggacacacatttaattgtatttttattataaaagcaactctacttataggaaacataaaagcctagaaaaagcgtgaggaagaatataattcgtagttgtg

SEQ ID NO: 335178 - DNA, 560 bp, Homo sapiens
ggaagctggaatgagaacatccaatatgaatttcatgtaagttacagaggaaaggagagaaagaatcgtgaagaagcaatagtcaaagtgaatgaagctggttatattcccaaactgatagacataaatccactaatataagaagtacagcaaatgttagatggataaattatcaatacaaaaccacagataagtaaaactgcagatatgaaagacaaagagaatgacaaacagattggtggcagtcattttaagagccacaagaaaagcttgaagccaggggaccaattttttcagcacactgatagaaggaatcaaaataactgtcaacctaataagtgtgtatatagtaaaacaatttcaaagatcaagtcaaaatagagaaaatgaaatcagaaggtttcttgatcaatttactttcactaaatgaacttccaaaagatatacttcaggcagaaggaaaataatcccagaagaaatgcccgaggtgcttttagaayggagaacaattggtaaattcatgcgcaaatttaaataaatatttgttgtgggtgagcgat

SEQ ID NO: 335179 - DNA, 560 bp, Homo sapiens
ggaagctggaatgagaacatccaatatgaatttcatgtaagttacagaggaaaggagagaaagaatcgtgaagaagcaatagtcaaagtgaatgaagctggttatattcccaaactgatagacataaatccactaatataagaagtacagcaaatgttagatggataaattatcaatacaaaaccacagataagtaaaactgcagatatgaaagacaaagagaatgacaaacagattggtggcagtcattttaagagccacaagaaaagcttgaagccaggggaccaattttttcagcacactgatagaaggaatcaaaataactgtcaacctaataagtgtgtatatagtaaaacaatttcaaagatcaagtcaaaatagagaaaatgaaatcagaaggtttcttgatcaatttactttcactaaatgaacttccaaaagatatacttcaggcagaaggaaaataatcccagaagaaatgcccgaggtgcttttagaacggagaacaattggtaaattcatgcgcaaatttaaatamatatttgttgtgggtgagcgat

SEQ ID NO: 335180 - DNA, 458 bp, Homo sapiens
ctctctgtcaccagagcaccagcagatattgtgctttcccctgcacctgccccatacagactgtagccagttagatgccaggatgtgtatgcctgttgttccttaagatcctctttctcacaatattctccacgtgacaggcaaattgataggcataatctcagcccaggtcatggggctaactctagggatttgttctgctggaagtagaggcctccwgacttccaccacctggggccttgctccttgcttgttgtgtgtttaatttcaagttgttgaatatacccattacgtccagcttccaagtttgaagtctgcagtctcaattctactctgactctttccctgtatagaagttaatgttgcttcccttctaaggtagcttcactaatattgagtccatacgtaggtcattgtaaaagtttaatttagcaatcaatatgcagggtattttctcc

SEQ ID NO: 335181 - DNA, 574 bp, Homo sapiens
tcagtcatcactgtcatatccacagataatagagtgttggaaagaagctgagaaacaacctgggttctattcaaattcagttcttagtgttgtgtgaccttctctaagcctgggtgtcctcagttttaaactgggataatattgttttgcccaaaatatctcatttcattgtaaagagtgaaatgagataatttatgcaaggtttctttccatttcttttcattccaaaaaatttataggtagtaatggtctacctgtgtgagcaaaatacaaaaaaaaaaggaagaagttaataagttaataataaccatttatttgctaagaaatatataaatgtgagrtatgaggtattatcagcaacgtttttatttaaaaatatatagaaaagatatatatttatttttcattgtttgaaagttaagacaaatggatgaaaaaaacagtgctatgataaatatgaaacaattaggagagcagaaaattaatgttgaggtattcccctgcattggggatctttctcccaatccaactatccatttttgtgtgtgagggagttgacattcttataaaaccc

SEQ ID NO: 335182 - DNA, 574 bp, Homo sapiens
tcagtcatcactgtcatatccacagataatagagtgttggaaagaagctgagaaacaacctgggttctattcaaattcagttcttagtgttgtgtgaccttctctaagcctgggtgtcctcagttttaaactgggataatattgttttgcccaaaatatctcatttcattgtaaagagtgaaatgagataatttatgcaaggtttctttccatttcttttcattccaaaaaatttataggtagtaatggtctacctgtgtgagcaaaatacaaaaaaaaaaggaagaagttaataagttaataataaccatttatttgctaagaaatatataaatgtgaggtatgaggtattatcagcaacgtttttwtttaaaaatatatagaaaagatatatatttatttttcattgtttgaaagttaagacaaatggatgaaaaaaacagtgctatgataaatatgaaacaattaggagagcagaaaattaatgttgaggtattcccctgcattggggatctttctcccaatccaactatccatttttgtgtgtgagggagttgacattcttataaaaccc

SEQ ID NO: 335183 - DNA, 396 bp, Homo sapiens
agttaataataaccatttatttgctaagaaatatataaatgtgaggtatgaggtattatcagcaacgtttttatttaaaaatatatagaaaagatatatatttatttttcattgtttgaaagttaagacaaatggatgaaaaaaacagtgctatgataaatatgaaacaattaggagagcagaaaattaatgttgaggtattcccctgcattggggatctttctcccaatccaactatccatttttgtgtgtgagggagttgacattcttataaaaccccaactgtagaacgaagtgactggcctaacaatggmtctttcaccgaacgtgacccatcagaactaattcctaaagcttttaaacttagaaccatctgtaaaatgtgctgctggtcag

SEQ ID NO: 335184 - DNA, 526 bp, Homo sapiens
tgaaattctgccactggtttgcagtgaatatctatggtggtgtagctgccatgcttcaaataaaatctgtcagtgaattcatcacgttatctgatagtgtgctctgctttagaaaaaagaaacagttttcgaaaaatacatcagcgttctctcagtttataytgaagagagtcaatgtcaatttgtaaattttttttaccttttttcttattttttcttagctctttaattgtctgttctttttttatagtagaccaaatgcattgattttttttccttaaatgtaaaagagcatcatcgttataactttctatgtgaacatttataattatgaaatagttatttttcatagcatttcttatagctatacaatttagaataaaacctaaattctcaacaattatggagtattggtaaaataaattaaggaacatacatataacagagtgctatgtgcttattaacattcatttacataagaatatctaacagcatgatgtttaatcataaaaaggggaaaacattt

SEQ ID NO: 335185 - DNA, 526 bp, Homo sapiens
tgaaattctgccactggtttgcagtgaatatctatggtggtgtagctgccatgcttcaaataaaatctgtcagtgaattcatcacgttatctgatagtgtgctctgctttagaaaaaagaaacagttttcgaaaaatacatcagcgttctctcagtttatactgaagagagtcaatgtcaatttgtaaattttttttaccttttttcttattttttcttagctctttaattgtctgttctttttttatagtagaccaaatgcattgattttttttccttaaatgtaaaagagcatcatcrttataactttctatgtgaacatttataattatgaaatagttatttttcatagcatttcttatagctatacaatttagaataaaacctaaattctcaacaattatggagtattggtaaaataaattaaggaacatacatataacagagtgctatgtgcttattaacattcatttacataagaatatctaacagcatgatgtttaatcataaaaaggggaaaacattt

SEQ ID NO: 335186 - DNA, 526 bp, Homo sapiens
tgaaattctgccactggtttgcagtgaatatctatggtggtgtagctgccatgcttcaaataaaatctgtcagtgaattcatcacgttatctgatagtgtgctctgctttagaaaaaagaaacagttttcgaaaaatacatcagcgttctctcagtttatactgaagagagtcaatgtcaatttgtaaattttttttaccttttttcttattttttcttagctctttaattgtctgttctttttttatagtagaccaaatgcattgattttttttccttaaatgtaaaagagcatcatcgttataactttctatgtgaacatttataattatgaaatagttatttttcatagcatttcttatagctrtacaatttagaataaaacctaaattctcaacaattatggagtattggtaaaataaattaaggaacatacatataacagagtgctatgtgcttattaacattcatttacataagaatatctaacagcatgatgtttaatcataaaaaggggaaaacattt

SEQ ID NO: 335187 - DNA, 597 bp, Homo sapiens
actgtattaaatataaaaaacactccaccctaaagctaattttaycagagtctctaaatagtcagaaaagggagaagctaacacgtgggttagctcatccctaatccaccaaaagcatattatcagattcccccaagggagaattaaggagaaaagtcataaggaacaaaaaagagaagttacctacagataaaagtgacatttcataaaaagaaaaattgatcatagacacttgtgccagaacaatatagtcttataaaatgcaacacctgacagaattccgtaaggaaataaataaatcaaaatacatttggagattttaacttacagttttcagaaattgttggatcacataggaagaaaaagtaaagttatagaatatttgaaaaagttgattagtagcctcaaaaagatatacacatatagacttttgtacggaaaatggattagacataattttcaaaccacgtaaaacataagtaaaaattggccatactttggtccacaaagtcaccctcaataaatgtcaaagaatcaatacaaacaagacatccaaaaggccctgatgactcaaaatccagaaaccataaaagaaaa

SEQ ID NO: 335188 - DNA, 597 bp, Homo sapiens
actgtattaaatataaaaaacactccaccctaaagctaattttaccagagtctctaaatagtcagaaaagggagaagctaacacgtgggttagctcatccctaatccaccaaaagcatattatcagaytcccccaagggagaattaaggagaaaagtcataaggaacaaaaaagagaagttacctacagataaaagtgacatttcataaaaagaaaaattgatcatagacacttgtgccagaacaatatagtcttataaaatgcaacacctgacagaattccgtaaggaaataaataaatcaaaatacatttggagattttaacttacagttttcagaaattgttggatcacataggaagaaaaagtaaagttatagaatatttgaaaaagttgattagtagcctcaaaaagatatacacatatagacttttgtacggaaaatggattagacataattttcaaaccacgtaaaacataagtaaaaattggccatactttggtccacaaagtcaccctcaataaatgtcaaagaatcaatacaaacaagacatccaaaaggccctgatgactcaaaatccagaaaccataaaagaaaa

SEQ ID NO: 335189 - DNA, 597 bp, Homo sapiens
actgtattaaatataaaaaacactccaccctaaagctaattttaccagagtctctaaatagtcagaaaagggagaagctaacacgtgggttagctcatccctaatccaccaaaagcatattatcagattcccccaagggagaattaargagaaaagtcataaggaacaaaaaagagaagttacctacagataaaagtgacatttcataaaaagaaaaattgatcatagacacttgtgccagaacaatatagtcttataaaatgcaacacctgacagaattccgtaaggaaataaataaatcaaaatacatttggagattttaacttacagttttcagaaattgttggatcacataggaagaaaaagtaaagttatagaatatttgaaaaagttgattagtagcctcaaaaagatatacacatatagacttttgtacggaaaatggattagacataattttcaaaccacgtaaaacataagtaaaaattggccatactttggtccacaaagtcaccctcaataaatgtcaaagaatcaatacaaacaagacatccaaaaggccctgatgactcaaaatccagaaaccataaaagaaaa

SEQ ID NO: 335190 - DNA, 597 bp, Homo sapiens
actgtattaaatataaaaaacactccaccctaaagctaattttaccagagtctctaaatagtcagaaaagggagaagctaacacgtgggttagctcatccctaatccaccaaaagcatattatcagattcccccaagggagaattaaggagaaaagtcataaggaacaaaaaagagaagttacctacagataaaagtgacatttcataaaaagaaaaattgatcatagacacttgtgccagaacaatatagtcttataaaatgcaacacctgacagaattccgtaaggaaataaataaatcaaaatacatttggagattttaacttacagttttcagaaattgttggatcacataggaagaaaaagtaaagttatagaatatttgaaaaagttgattagtagcctcaaaaagatatacacatatagacttttgtacggaaaatggattagacataattttcaaaccaygtaaaacataagtaaaaattggccatactttggtccacaaagtcaccctcaataaatgtcaaagaatcaatacaaacaagacatccaaaaggccctgatgactcaaaatccagaaaccataaaagaaaa

SEQ ID NO: 335191 - DNA, 430 bp, Homo sapiens
  misc_feature (1)...(430): n = A,T,C or G
nnnnnnnnnnnnnnnnnnnnnnnnagttctgaaggaaaatccattttcttaccttttccagcttctagatgctcctgcattccttggtccaaggttttcttcatccatcttcagagccagcaatggtggagagaggcctcctcacatttcttcacctcctcttctgcytcctcttctagttttaaagtattacactgggctcataaggatagtttttctattttaaagtcagctgacaagcaccttaattctatctgtaactttaatcttcctttgccatacaacaaaatataatagtcatggcttctgggaataaggacgtgggcatctttcaccatctttacttctataattctacctgtaaacttaattttctttgtcatgtaacatatttatggattcaaggaagaaggaagtgagtatctttgac

SEQ ID NO: 335192 - DNA, 504 bp, Homo sapiens
gatctttagaaagctatttaccttaagaagaacactttaaaatgttaataggttacatttagtgagaatcaaattacaaatgtttatttcacatcgataatttcaagggaaatgaagatacagatttgaatacaactgcaaagcatggaaagtttttgtaaaatccaatgtattttaacatctttttcatgtaacaaagtaaaacttaatgcatttaaaatttactaagagaaatgcattgctcttggaataaatcattttaatccatttttatatttgtatttggagagagtattaagcaatgaaatctaccttaggtttggaggattgatttccctaaatgaatatcttgactctcttttactgcacmaagaagggggatgatggaaattggtatagagttccacatgagccacatttgcaaaagtaatccttaataacatagtcagccatgtctatttcccagagtagatttcagaattcttttttcagttttttaaaaat

SEQ ID NO: 335193 - DNA, 489 bp, Homo sapiens
ttagtagttttaactaaaggatattatcaggatttccttaagagtgcatgtgttttcctttaatgatttcttatttagaaatatattgtactttcacactttgatgagctttaaggattcttttaatggtggatacaacacagtgacactcagaagaaagcaactctgttactttcatcctcatgagagagtcacacagggaacagcaccagsaaacagggaacagcaaactggagctactgtgggggctgctgatgtatggcaggtagtatggggttccctaggtttctctgcatctttgtggactggctaatttgaataatttccagggctctgagcttcagggcataggcactctctctagctgtgtagtaactgggaccagggaaattagggcaggtgcttggtggcccagaatgtgagaactggataggggagtgagtggagtgtgggatttaatcagctgcccaggaaggggaactgacagtc

SEQ ID NO: 335194 - DNA, 620 bp, Homo sapiens
  misc_feature (1)...(620): n = A,T,C or G
gatttcttatttagaaatatattgtactttcacactttgatgagctttaaggattcttttaatggtggatacaacacagtgacactcagaagaaagcaactctgttactttcatcctcatgagagagtcacacagggaacagcaccagcaaacagggaacagcaaactggagctactgtgggggctgctgatgtatggcaggtagtatggggtyccctaggtttctctgcatctttgtggactggctaatttgaataatttccagggctctgagcttcagggcataggcactctctctagctgtgtagtaactgggaccagggaaattagggcaggtgcttggtggcccagaatgtgagaactggataggggagtgagtggagtgtgggatttaatcagctgcccaggaaggggaactgacagtcactagtcagggtctcaaactggggtcaanacaaaattaaagagaagaataaaaaaaaaactatattacacttgtcttagtattcacacagacactaacacatacacaacccccccaatgtatctataactctatctacatgtaaagatttgttaattaatctccaattgatcttttctttcttttctgtcacctt

SEQ ID NO: 335195 - DNA, 586 bp, Homo sapiens
  misc_feature (1)...(586): n = A,T,C or G
ctctgttactttcatcctcatgagagagtcacacagggaacagcaccagcaaacagggaacagcaaactggagctactgtgggggctgctgatgtatggcaggtagtatggggttccctaggtttctctgcatctttgtggactggctaatttgaataatttccagggctctgagcttcagggcataggcactctctctagctgtgtagtaactgggaccagggaaattagggcaggtgcttggtggcccagaatgtgagaactggataggggagtgagtggagtgtgggatttaatcagctgcccaggaaggggaactgacagtcactagtcagggtctcaaactggggtcaanacaaaattaaagagaagaataaaaaaaamactatattacacttgtcttagtattcacacagacactaacacatacacaacccccccaatgtatctataactctatctacatgtaaagatttgttaattaatctccaattgatcttttctttcttttctgtcacctttaggttgctattccagtttgcttagttaagacacttcactactttttcttttagagagaatactt

SEQ ID NO: 335196 - DNA, 599 bp, Homo sapiens
tattacatcttataattatgtctctcctgctgaggtatcccaaaaggtgcaattaaaagacaactatacagaaaataatgccttaatttagtatttaaatagaattacaatgattttgactatccagagagtagatctgtttctcagttcaccctcatagtcatcttcccagtgaatgatcccttttttgaaataaattatcattattaagagacaccctgcasgtagaacgacatggtctctagctgcatccagaactcagagaacctcaaactttatgtcagagacatgagaggactcttacttttccttactcctttttctttagaataaatttccacctttggaagtattaggatgagatctaagtcttagaatacatttaattatgcttgatatttcagttttttttactggtactatgataaactatcaaaaatttagtcctaaaagcaacacaggtgattatcttacaagtttatacaacacaagttcccaacagatctcactgggctaaaggtgttgaagagctgtattgcttttggtggatccagcataaaactcttttccttctcttttccggctttcagagaccgttc

SEQ ID NO: 335197 - DNA, 526 bp, Homo sapiens
gctggccatttgtatgtcttcttttgggaaatgtctgttcagrtcatttgctcactttttaaatcagattgattggttttttgctgttggttttctgctagtagtttgagttccttgtgtattctgaatattaattccctgtcagaagagtagtttgcaaatattgtctccaattctataggttgtcttttcactcttgattgttacctttgctgtgcagaaggtctttagtttgatataatctcatttgtttattttgcttttgttgcctgtgcttttgaggtctcattcataaaatcttttcccagaccattgtcttgaagtgtttcccctatttttttctcctagtagttttatattcagatcttacatttaggtctttgcttcattttgagttgatttttgtatagggtcattcatctgcatatggatatccagtttttccagtaccgtttgttgaagagactatcctttcccaatgcttttggcacctttgtcaaaaatcagttggctgtaaatatgtgga

SEQ ID NO: 335198 - DNA, 586 bp, Homo sapiens
gatgttgttgttgttgttgctgctgctgccactgccatgactactgctggtgccacattattgttatttaaagtaattaatttaattttactttctcgctrtggtaggtattaaattattattgtctaaagcttctttcaacttggatacatttgaaaatatggtagatgagagcttttcataatatgtatcatttaatgttattattgatgttgtgttagaatgtaattgtcaccggaaactgtggctaaatgtcttaatcagcatcttatctttcagttgtttattgctaactgtgaggaaacttttgtctgttctgtcattattcacagtgaaaacagtctgaaaacagaataggcatttttaatcagtattggaacccctggagatgcttctattgatctccttatatttacatgttctatatcattataatgcctttgtgtagtttctatttgaaataaaatagttttgaactacatgttcagaactgcaatttctgtttaactgacatatagattgacaaaatgattatgtaacaaaagcataaagaggcagttctatctttagaaatgcataataagaa

SEQ ID NO: 335199 - DNA, 573 bp, Homo sapiens
atcaccctgcatcagaaacaatatgaaactatcatgataagtaggattttaagcttcagaratttcacagaattgagatcagcaattggagctaaggtttctacacccaagaggccctaaatgatgcctaagcaaaggaagcaaggagcgggaatccttctgtagagaatatactttattttcttaaattgctcatgtattaggcattttaaaaaatccctccagtttatgagccatctgggcctgccactaattaaagttgaaagtaaacatttcatccactacaggtggggaatataaattggcatgacatccttgggaatccgttttgcagtatatatcaagagctttttaaatatccatttggaaggtttttttgaaagttaaaatgtttttaatggtcatatattctcactcaataatcccacctgttactattttttttgcaaaaaagatgtgtataagtatatacatgtatttttattactgcatttcttatacagattgaacatcccaaatctgaaatcccaaatttgaaatgccccaaaatccaaaacttttgagtgcagatat

SEQ ID NO: 335200 - DNA, 573 bp, Homo sapiens
atcaccctgcatcagaaacaatatgaaactatcatgataagtaggattttaagcttcagagatttcacagaattgagatcagcaattggagctaaggtttctacacccaagaggccctaaatgatgcctaagcaaaggaagcaaggagcgggaatccttctgtagagaatatactttattttcttaaattgctcatgtattaggcattttaaaaamtccctccagtttatgagccatctgggcctgccactaattaaagttgaaagtaaacatttcatccactacaggtggggaatataaattggcatgacatccttgggaatccgttttgcagtatatatcaagagctttttaaatatccatttggaaggtttttttgaaagttaaaatgtttttaatggtcatatattctcactcaataatcccacctgttactattttttttgcaaaaaagatgtgtataagtatatacatgtatttttattactgcatttcttatacagattgaacatcccaaatctgaaatcccaaatttgaaatgccccaaaatccaaaacttttgagtgcagatat

SEQ ID NO: 335201 - DNA, 611 bp, Homo sapiens
taggcaagaagctttcataggaaatttcttcaaaaaagggttcagatttatgggaatattagaactacattttatttaacaattaaaataacaatcataaactatgctttgagaaacaccatataataataggcaaattatttcattatattacttttttagagtctcactgtgttgcctaggctggagtggagtggcatgatcttgattcaccrcaacctccgcctcccaggttcaaggtgatctaaagacatccacccacctcggcctccgaaagtgatgggattacaggtgtgagccaccatgccaggctgcattatattctttttatataaattttaaaaaatcttttttacagtatttatcaagcaaataagactaagtggaatgaagaaaataccaatgctaaaaatgacaattatacttgtttgtcaattttatttcttgttttcattaaaaatataagattttaaaattatgaacattaatttatatttccttaaaaattacaatttttggccaggcacagtggcttacatctgtaatcctagcactttgaaaggccaaggcaggtggatcacctgaggtcaggaatttgagatcagcatagc

SEQ ID NO: 335202 - DNA, 580 bp, Homo sapiens
atagtattaactgccttatcactacttcctccttgggtaaaatttactagtttgtcagccaaattaatttatattgctctaacattaagaaatgcaaaatgttcagcttctaagtagatgtttaaaatatacccttaaagatgttctcttagcaactgaataatggaattttagtgatgtgtatttgtttttagtaaagcaaagaaaattatggggagtaatgcctactttcctatatagatatgcctctaacaactcaccagccacagggcacctattatgaaatgctttctagaaagtgacgattttgctctatttttatttttgcttactagattgagagctccttgtaraactgtatgtttagcattcacaatgactccatataaagcacgcatttagaaatgtttcttaaattctcttaccaggtctcccttataagttactatagagcttatagtacaactgatgccaaagtatgacatgtggtccctaaatagccagaaaataagtggctcatagtatggaacctagaactttaacagcatcagttctaactaggccaacctactataggtaa

SEQ ID NO: 335203 - DNA, 583 bp, Homo sapiens
cagggcaaaaacattttcaataaaggatatggttaacaaaaaacttgctcacaaagaaaggatactatatgtacttcaattatttttttctgagctccaattcaggagagtaattgcaagagtaccaaaacatctgaaatcaaggttrgctctgggagatatgagaactgtgattgtcatacccaaagggcccattgtgttcaatgggaagaacttagggcttctttttgttttcaatcatgaagctaagagggaaggtattctatcttttatgaccatgttcagccttgatgctacttgacaatgactttaaccaaaaggctaacaagatgatcttccttcccacccctttattaaagatacttaaatgttaagccttttctgaaataaacaaaagaagaaactgttttccataggaattttgattacttaaacagttaacagttaggctagatttagaaacttctgtcatcatagtctgcacatagcacacacagttgtaatgttgtgccctaagggacatattactgttaacagcccatccagtcatttgattatcactgtatggtaaatggctttctgg

SEQ ID NO: 335204 - DNA, 567 bp, Homo sapiens
gcatctgcttggcttctggggaggcctcagggagcttttacttatggcagaaggcaaagcaggagcaggtatgtcacacagccagcccatgaataaggttgggggaggtgctgcacacttttaaacaaccagatctcttgtgaactcaggtactctcrtgaggacagcaccaacgggatggtgttaacccattcaggaggaatccactctcatgatccaatcacctcccaccaggccccacctccaacattggggattacatttcaacatgagatctggggggacaaatatccaaactatatcaaatatcaaatgcaaaggtcttgaggtagtttgacatgtttaaagaactacaaaaacactaatatgactggtatatagtcagcaggggaagagtggtagaaaatgaggttagacagctagttagggccaaaaaggaaggtcttcataaggaatggtaaagagtttggatcttactctaagtgtaattggaaatgattggagagttttgaccaggggagtgacatggtctaatttatgtattgaaggctactagagaatagactg

SEQ ID NO: 335205 - DNA, 567 bp, Homo sapiens
gcatctgcttggcttctggggaggcctcagggagcttttacttatggcagaaggcaaagcaggagcaggtatgtcacacagccagcccatgaataaggttgggggaggtgctgcacacttttaaacaaccagatctcttgtgaactcaggtactctcgtgaggacagcaccaacgggatggygttaacccattcaggaggaatccactctcatgatccaatcacctcccaccaggccccacctccaacattggggattacatttcaacatgagatctggggggacaaatatccaaactatatcaaatatcaaatgcaaaggtcttgaggtagtttgacatgtttaaagaactacaaaaacactaatatgactggtatatagtcagcaggggaagagtggtagaaaatgaggttagacagctagttagggccaaaaaggaaggtcttcataaggaatggtaaagagtttggatcttactctaagtgtaattggaaatgattggagagttttgaccaggggagtgacatggtctaatttatgtattgaaggctactagagaatagactg

SEQ ID NO: 335206 - DNA, 295 bp, Homo sapiens
  misc_feature (1)...(295): n = A,T,C or G
nnnnnnnnnnnnnnnaagcaagtgatggtgaagcacccaaaaactagcaggaggctggaagctatctctctgcttttagagtygggggacaaagggggaacataatgtcactggaaaccactgaaaatgagaccgtggaggatcaggcaccctgccagagctgtagttgcagagggatgcagctagtattggaatatagtgtcaaagcaagaaggatagaaagagatgaggccatcccaatctcactccctcctttgtctctcccatcctcccttctgctttagagcttcccatt

SEQ ID NO: 335207 - DNA, 421 bp, Homo sapiens
aaccactctccaaaccccacaggggccactgcttgtccttcaggtggagtcagagcacggacttgcctgacctagctccccctgactttgcccctccacccactctggtagcttaacacaagggacagaaacttgtgggaaccctatggcccttcctatcgcccaagatactagagtacgtcccttgagtatcataaggcaagcacaaaggaagtgaaataatggactttggagactcagaagggggatggtgtgtggggcaagggataaaaaactacatattgagtacagtgaacactactcgggtaaacaggtaaactaaaatctcagacttcmccattaatacaattcatctatgtaatcaaaaactacttgtatcccaaaagctattgaaataaaaaaagaaaaaagttgaactcac

SEQ ID NO: 335208 - DNA, 615 bp, Homo sapiens
aacaaaaaggatttaatgacaaaaagggcacttgttctgtagaaattcattcttataaccgtctgtgatgatgaaagacattcttttgttaatcttccatcatagatggcactatttatacatcattgtgaatttgcatatactattttatcatgtttaagataaagctgtggaataaagagccaaaagtaattaacttccagtgtcattttattggggggggggtgataattgtatgcatatagtatttatataaaccagaaaacaaagacaaataagtaactatatgttaatataatttgtttcaggcaccagtaactttgaatcactggaaaattttacaactgggcataaactgcaagtagtaatgacaataaaagatttatacttaaaaactaatcccaattgaaaacaaatgagaaggtaggaacacaaggtgaaccttgtcaatgagattattaaaaagtaaccaaaccatgataaagcagcatataatcttatayaaacactggttatgagaataattacagattagtaataggaagtatctattctaaaatatgtttaagagaaaattgcaggcattttgttcccactggtatataaggagtatcc

SEQ ID NO: 335209 - DNA, 623 bp, Homo sapiens
cagtttgtctagctagctagttatagcacgtatcctccacatatcaaattgtcaatactggtaaacttaggtgtgatagtagcacaagaggctagcgagagaggagaatgaatatcaggatgaacttttacttttgattttaaattgatttgtatttatatatttatccaagamacatgtattatttctatttttaagtgaaaaaagcctacacatatgacatataacattcaagacttgtgacttatacatgtcaaagcaattctatagggcatactctacctgtgaatctaatatattggaaatttcatgtgcaccaacatttacttcatccaactgcaagcaaaacaagtttctggcaacctggacaaaatctaaaatggaacacatttaagtaagaacatggcatttaaccccttctaaatcttactttattctatatgaagttgctaaggtttcaaatttaacccacataaattatcttaaaatagtattgactgaagtgataggtaaatgtaatttcaaataagaagagacaaattggtctgaacttacttcagttaactttgctaaaattaataattcagctaagataataataaagcaaatatatatcatggacc

SEQ ID NO: 335210 - DNA, 623 bp, Homo sapiens
cagtttgtctagctagctagttatagcacgtatcctccacatatcaaattgtcaatactggtaaacttaggtgtgatagtagcacaagaggctagcgagagaggagaatgaatatcaggatgaacttttacttttgattttaaattgatttgtatttatatatttatccaagacacatgtattatttctatttttaagtgaaaaaagcctacacatatgacatataacattcaagacttgtgacttatacatgtcaaagcaattctatagggcatactctacctgtgaatctaatatattggaaatttcatgtgcaccaacatttacttcatccaactgcaagcaaaacaagtttctggcaacctggacaaaatctaaaatggaacacatttaagtaagaacatggcatttaaccccttctaaatcttactttattctatatgaagttgctaaggtttcaaatttaacccacataaattatcttaaaatagtattgactgaagtgataggtaaatgtaakttcaaataagaagagacaaattggtctgaacttacttcagttaactttgctaaaattaataattcagctaagataataataaagcaaatatatatcatggacc

SEQ ID NO: 335211 - DNA, 459 bp, Homo sapiens
taccaaatttatgacattgtcctagaaccaaaaatcaaactatttcttagtttatatgatttggcacatgtaaaatggcaaaagaatcctactacatcagatttacaagtgacactctaaaacatgaattatatttggttaacatcttgcctttgagagcagaactgaagttgataggaattaggttcaacataaaatcttctaatttttggcttgttaggggcaggcttacacaaatagtaaactaaaaagctttctctgccacttacttctctctttcatcaggctcttccccttaagggaaaagttctttctcgttttggtatccattagtgattaaaaattcagagactgttaattgtattccaatgtccattctctcctygctccttagtaaccgaaccaaccacaattttcggctgaaaacactgccatgcagctaaaagacatttcccagcc

SEQ ID NO: 335212 - DNA, 621 bp, Homo sapiens
gtttgcctccctgcctctgctctagttcttttctaattcattctctactgcagccaaagaactttctaaatgacaaatcatacgctgttactcacttgctaaacattcaatgaaatactttgtttttttagctgcctcaacaatacctgctttttaaaatttttatttatttatttatttatttatgtatttgagacagagtcctgctctgtcacctaggctgcagtgcagctgcacaatctcagatcactgtaacctctgtcccctggggttcaaggaattctcgtgcctcagcctcccaagtagmtagggctaaaggtgcgcaccaccacatctggctaatttttgtattattagtagagatagggtttcaccatgttggccaggctggtctggaactcttgggcttaagtgatccacccaccttggcctcccaaagtgttgggattacaggcgtgtgccactgcaccccaccaacaatatcttcttctttcccataatcctttcccatgagaagttaactcttattaattctaaaaaaccaaatatcccttaagaatcctccaatctgtgcccatggtcttatctcttattaaatcaaattataaatgcttgtttatt

SEQ ID NO: 335213 - DNA, 591 bp, Homo sapiens
atttcagttccttttaaaagaacattgctcttttaaataataatgcacaaataatggataataatgcacaaattgagacgttgggaatctagtttrctttttgtgttcttcaaagagttaggcaaaagtattatttgattgttttaattttgactattggcagtgcaaacaggagttagggaaaagaagcaacaccacagtgcttaaaagcataggctctggcatccaaatgcttacattcaaatcatgactgcactatcagcagtgtgacaatggacaagttatttaaacttctttatccctcagtttcgtctctgcaaaatgaggttaataacaatatctatctcaaattgttgtgatgtacaatgaattaataatatttataaactacctagaagaatgtcagaaatagtagaaagcactatgtaaacatctgataaacatagttgattgttagggcaacaattctttatgcctttggaagctgctatcagtttcatgtaatcatctattggataaaacagcattgctgtcctttgatttttggaactttctgtataacgggaccagggagctaagagatggatagcc

SEQ ID NO: 335214 - DNA, 536 bp, Homo sapiens
acttggggctgaggcaggagaattgcttaagcctgggaggacgagactgcagtgacctgtgatcacaccacggcactccagcataggtgaaagagtgagaccctatcttaaaataataacaataacaataataataataataataatataattcttgcttttttttttcagctgctactaaatatgaacctggatcctatatagcttctcctctaggatttacacacaaggaaaatctgaatcaagatccagttttggaagtaacaaaagartatgcacagattttaagaagaaaatacatactctgaaagataaggcaattttatttgggctattcacatgatattttgtttcccattaaatatatgatgtgaacatttttactaaagggaaatattctatattatacatgtctgatgaaaatttatgtagtattttaaataatgtttcttggcctcttcagctaacttttaagtggattttgcaaatgaaaaccagtattactgagttttacatactcgaactgcccaaatgtt

SEQ ID NO: 335215 - DNA, 536 bp, Homo sapiens
acttggggctgaggcaggagaattgcttaagcctgggaggacgagactgcagtgacctgtgatcacaccacggcactccagcataggtgaaagagtgagaccctatcttaaaataataacaataacaataataataataataataatataattcttgcttttttttttcagctgctactaaatatgaacctggatcctatatagcttctcctctaggatttacacacaaggaaaatctgaatcaagatccagttttggaagtaacaaaagagtatgcacagattttaagaagaaaatacatactctgaaagataaggcaattttatttgggctattcacatgatattttgtttcccattaaatatatgatgtgaacatttttactaaagggaaatattctatattatacatgtctgatgaaaatttatrtagtattttaaataatgtttcttggcctcttcagctaacttttaagtggattttgcaaatgaaaaccagtattactgagttttacatactcgaactgcccaaatgtt

SEQ ID NO: 335216 - DNA, 653 bp, Homo sapiens
ggaaattaattccgaaaggaacactcaaaagcatgcaaatacatggtaattaaataacctactcctgaatgattgttgggtcaacaatgatatcaagagggaaatttaaaaattctttgaactgaacgataatagtgacacarcctatcaaaaactctgggatacagcaaaagtggaggtaagaagaaaattcatagcattaaatgcctatatcaaaaagtctgaaagagcacaaataaacaatctaaggtcacacctcacagaattggagaaactagaacagtccaaatccaaacccagcagaagaaaagaaataacaaaatcagaacaaaactaaatgaaattgaaacaaaaaaatacaacagataaatgaaacaaaaagctggttctttgaaaagataaataaaattgataagcattagcaagattaatcaagaaaagaagagagaagatccaaataagctctattagaaatgaaatgggagatattaccgctgataccaccacagaaatacaaaagattattcaagactactatgaacatcttcacatccataaactagaaaacctacaggagatcgataaattcctggaaatatactaccctcctggattaaattaggaagatatagaaactctgaacagaccaatca

SEQ ID NO: 335217 - DNA, 653 bp, Homo sapiens
ggaaattaattccgaaaggaacactcaaaagcatgcaaatacatggtaattaaataacctactcctgaatgattgttgggtcaacaatgatatcaagagggaaatttaaaaattctttgaactgaacgataatagtgacacagcctatcaaaaactctgggatacagcaaaagtggagstaagaagaaaattcatagcattaaatgcctatatcaaaaagtctgaaagagcacaaataaacaatctaaggtcacacctcacagaattggagaaactagaacagtccaaatccaaacccagcagaagaaaagaaataacaaaatcagaacaaaactaaatgaaattgaaacaaaaaaatacaacagataaatgaaacaaaaagctggttctttgaaaagataaataaaattgataagcattagcaagattaatcaagaaaagaagagagaagatccaaataagctctattagaaatgaaatgggagatattaccgctgataccaccacagaaatacaaaagattattcaagactactatgaacatcttcacatccataaactagaaaacctacaggagatcgataaattcctggaaatatactaccctcctggattaaattaggaagatatagaaactctgaacagaccaatca

SEQ ID NO: 335218 - DNA, 551 bp, Homo sapiens
tactctctcagaccacagtggaataaaattggaaattaattccgaaaggaacactcaaaagcatgcaaatacatggtaattaaataacctactcctgaatgattgttgggtcaacaatgatatcaagagggaaatttaaaaattctttgaactgaacgataatagtgacacagcctatcaaaaactctgggatacagcaaaagtggaggtaagaagaaaattcatagcattaaatgcctatatcaaaaagtctgaaagagcacaaataaacaatctaaggtcacacctcacagaattggagaaactagaacagtccaaatccaaacccagcagaagaaaagaaataacaaaatcagaacaaaactaaatgaaattgaaacaaaaaaatacaacagataaatgaaacaaaaagctggttctttgaaaagataaataaaattgataagcattagcaagattaatcaagaaaagaagagagaagatccaaataagctctattagaaatgaaatgggagatattaccrctgataccaccacagaaatacaaaaga

SEQ ID NO: 335219 - DNA, 610 bp, Homo sapiens
atcaccatgatatggtttggctctgtgtccccacccaaatctcatcttttagctcccataattcccacatgttgtgagaaggacccagtaggagatgattgaatcatgagggcrggtcttttccatgctgttctcatgacagtgagtgagtgtcacaagatctgatggttttaaaaacaggactttctctacacaagctctttctttttgcctgctgccatccacgtaggatgtgacttgctcttccttgactccaccatgactttgaggcctccccaaatatgtggaactgtaagtcaaataaacctctttcttttgtaaattgcccagtctcaggtatgtctttatcagcagtgtgaaaatggactaatacacaccctaatactgaaacagactaatagacaccctaataccaaaagcaaggaaggacataatgagaaaagaaagctacagaccaacatccctgatgaacagagatgcagtaatcctcaaaaaaatactagctagctgaatctaacaacatatcaaaaagataatccatcatgatcaagtgggtttcataccagggatgcagggatggtttaacatctgcaggtcaataaatgcgata

SEQ ID NO: 335220 - DNA, 610 bp, Homo sapiens
atcaccatgatatggtttggctctgtgtccccacccaaatctcatcttttagctcccataattcccacatgttgtgagaaggacccagtaggagatgattgaatcatgagggcgggtcttttccatgctgttctcatgacagtgagtgagtgtcacaagatctgatggttttaaaaacaggactttctctacacaagctctttctttttgcctgctgccatccacgtaggatgtgacttgctcttccttgactccaccatgactttgaggcctccccaaatatgtggaactgtaagtcaaataaacctctttcttttgtaaattgcccmgtctcaggtatgtctttatcagcagtgtgaaaatggactaatacacaccctaatactgaaacagactaatagacaccctaataccaaaagcaaggaaggacataatgagaaaagaaagctacagaccaacatccctgatgaacagagatgcagtaatcctcaaaaaaatactagctagctgaatctaacaacatatcaaaaagataatccatcatgatcaagtgggtttcataccagggatgcagggatggtttaacatctgcaggtcaataaatgcgata

SEQ ID NO: 335221 - DNA, 610 bp, Homo sapiens
atcaccatgatatggtttggctctgtgtccccacccaaatctcatcttttagctcccataattcccacatgttgtgagaaggacccagtaggagatgattgaatcatgagggcgggtcttttccatgctgttctcatgacagtgagtgagtgtcacaagatctgatggttttaaaaacaggactttctctacacaagctctttctttttgcctgctgccatccacgtaggatgtgacttgctcttccttgactccaccatgactttgaggcctccccaaatatgtggaactgtaagtcaaataaacctctttcttttgtaaattgcccagtctcaggtatgtctttatcagcagtgtgaaaatggactaatacacaccctaatactgaaacagactaatagacaccctaataccaaaagcaaggaaggacataatgagaaaagaaagctacagaccaacatccctgatgarcagagatgcagtaatcctcaaaaaaatactagctagctgaatctaacaacatatcaaaaagataatccatcatgatcaagtgggtttcataccagggatgcagggatggtttaacatctgcaggtcaataaatgcgata

SEQ ID NO: 335222 - DNA, 414 bp, Homo sapiens
tgactccaccatgactttgaggcctccccaaatatgtggaactgtaagtcaaataaacctctttcttttgtaaattgcccagtctcaggtatgtctttatcagcagtgtgaaaatggactaatacacaccctaatactgaaacagactaatagacaccctaataccaaaagcaaggaaggacataatgagaaaagaaagctacagaccaacatccctgatgaacagagatgcagtaatcctcaaaaaaatactagctagctgaatctaacaacatatcaaaaagataatccatcatgatcaagtgggtttcataccagggatgcagggatggtttaacatctrcaggtcaataaatgcgatacactacataaacagaattaaaaaacaaaagtcacatgatcatctcaatagat

SEQ ID NO: 335223 - DNA, 414 bp, Homo sapiens
tgactccaccatgactttgaggcctccccaaatatgtggaactgtaagtcaaataaacctctttcttttgtaaattgcccagtctcaggtatgtctttatcagcagtgtgaaaatggactaatacacaccctaatactgaaacagactaatagacaccctaataccaaaagcaaggaaggacataatgagaaaagaaagctacagaccaacatccctgatgaacagagatgcagtaatcctcaaaaaaatactagctagctgaatctaacaacatatcaaaaagataatccatcatgatcaagtgggtttcataccagggatgcagggatggtttaacatctgcargtcaataaatgcgatacactacataaacagaattaaaaaacaaaagtcacatgatcatctcaatagat

SEQ ID NO: 335224 - DNA, 549 bp, Homo sapiens
aatctacaaatttaatccaattcccatcaaaataccaccatcattctttacaaaatgatgaaaaataatcccaaaattcatatggaaccaaaaaagagcctacatagccaaaggaagactaaccaaaaagaayaaatctggtgacatcacattacctaacttcaaactattctgtaacaccatagtcactaaaacagcatgatactggtataaaaataggcacatagaccaatggaacagaatagagaacccagaattaaagccaaatacttacagccagctgatcttcaacaaagtgaggaaaggacaccctattcaacaaatagtgctggggtaattggctagccacatttaggagaatgaaactggatccttatctctcaccttatacaaaaatcaactcaagatggatcaagaacttaagacctgaagccttaaaaattctagaagataacattggaaaaacccttctagacattggcttaggcaaagacttcatgaccaagaagctcaaaacaaatgcaacaaaaacaaaagataaatagatgg

SEQ ID NO: 335225 - DNA, 549 bp, Homo sapiens
aatctacaaatttaatccaattcccatcaaaataccaccatcattctttacaaaatgatgaaaaataatcccaaaattcatatggaaccaaaaaagagcctacatagccaaaggaagactaaccaaaaagaacaaatctggtgacatcacattacctaactycaaactattctgtaacaccatagtcactaaaacagcatgatactggtataaaaataggcacatagaccaatggaacagaatagagaacccagaattaaagccaaatacttacagccagctgatcttcaacaaagtgaggaaaggacaccctattcaacaaatagtgctggggtaattggctagccacatttaggagaatgaaactggatccttatctctcaccttatacaaaaatcaactcaagatggatcaagaacttaagacctgaagccttaaaaattctagaagataacattggaaaaacccttctagacattggcttaggcaaagacttcatgaccaagaagctcaaaacaaatgcaacaaaaacaaaagataaatagatgg

SEQ ID NO: 335226 - DNA, 549 bp, Homo sapiens
aatctacaaatttaatccaattcccatcaaaataccaccatcattctttacaaaatgatgaaaaataatcccaaaattcatatggaaccaaaaaagagcctacatagccaaaggaagactaaccaaaaagaacaaatctggtgacatcacattacctaacttcaaactattctgtaacaccatagtcactaaaacagcatgatactggtataaaaataggcacatagaccaatggaacagaatagagaacccagaattaaagccaaatacttacagccagctgatcttcaacaaagtgaggaaaggacaccctattcaacaaatagtgctgggrtaattggctagccacatttaggagaatgaaactggatccttatctctcaccttatacaaaaatcaactcaagatggatcaagaacttaagacctgaagccttaaaaattctagaagataacattggaaaaacccttctagacattggcttaggcaaagacttcatgaccaagaagctcaaaacaaatgcaacaaaaacaaaagataaatagatgg

SEQ ID NO: 335227 - DNA, 346 bp, Homo sapiens
atttctatattagaatatactgaaaaccatgagttcttcctggtgattctaattccagttgaatcacacatggctcattttagkttttttttccctttcagtactcttgacctttgaacaatgtggaagttagaggggctgaaccccacacagccgaaaatttgcctaaattttgacttccctgtaatgtaactgctgactgacctgattaactactgttgaccagaaaccttacccataacaaagttgattaatatatatgctgtatattctatgtattatacactatattcttataaaagtaagctagaattgccttatctattccagctgtgtgggggtgtga

SEQ ID NO: 335228 - DNA, 563 bp, Homo sapiens
tatccactgaactatttcttggctatctcctgtatgctggtcagtttcactcacattgtctcatttaatctttgacaaactaaataaaagtgtgaagtaaatattttcccctcccttttttttaaagattagaaaacagaggctcaaaaggacccacatactcagagtcaccctgtcaatgacagaggtggagtttgaacacaggctgtttaatgccaaagcccaatactggcttctggaagcttctagaaggaggggctggaacttcrcattgaagacgttgaggggcagtgttgcaggaaaatgggagagggaaacataccaggcaaagggaactgcttgggcatggcttcggcagagaacgaggtgcagagatttgagaacaggatgatttcttggaacacagagcttggttcagtagaaagagcccaggaaagccaggatgtggccagttgaaagggaggggctttgagccattttgcatttgtggtgagccattttgcattttactctattggcatcaaggagacaagtaatgagaactctgacttgggaaaaatgtt

SEQ ID NO: 335229 - DNA, 563 bp, Homo sapiens
tatccactgaactatttcttggctatctcctgtatgctggtcagtttcactcacattgtctcatttaatctttgacaaactaaataaaagtgtgaagtaaatattttcccctcccttttttttaaagattagaaaacagaggctcaaaaggacccacatactcagagtcaccctgtcaatgacagaggtggagtttgaacacaggctgtttaatgccaaagcccaatactggcttctggaagcttctagaaggaggggctggaacttcgcattgaagacgttgaggggcagtgttgcaggaaaatgrgagagggaaacataccaggcaaagggaactgcttgggcatggcttcggcagagaacgaggtgcagagatttgagaacaggatgatttcttggaacacagagcttggttcagtagaaagagcccaggaaagccaggatgtggccagttgaaagggaggggctttgagccattttgcatttgtggtgagccattttgcattttactctattggcatcaaggagacaagtaatgagaactctgacttgggaaaaatgtt

SEQ ID NO: 335230 - DNA, 563 bp, Homo sapiens
tatccactgaactatttcttggctatctcctgtatgctggtcagtttcactcacattgtctcatttaatctttgacaaactaaataaaagtgtgaagtaaatattttcccctcccttttttttaaagattagaaaacagaggctcaaaaggacccacatactcagagtcaccctgtcaatgacagaggtggagtttgaacacaggctgtttaatgccaaagcccaatactggcttctggaagcttctagaaggaggggctggaacttcgcattgaagacgttgaggggcagtgttgcaggaaaatgggagagggaaacataccaggcaaagggaactgcttgggcatggcttcggcagagaacgaggtrcagagatttgagaacaggatgatttcttggaacacagagcttggttcagtagaaagagcccaggaaagccaggatgtggccagttgaaagggaggggctttgagccattttgcatttgtggtgagccattttgcattttactctattggcatcaaggagacaagtaatgagaactctgacttgggaaaaatgtt

SEQ ID NO: 335231 - DNA, 563 bp, Homo sapiens
tatccactgaactatttcttggctatctcctgtatgctggtcagtttcactcacattgtctcatttaatctttgacaaactaaataaaagtgtgaagtaaatattttcccctcccttttttttaaagattagaaaacagaggctcaaaaggacccacatactcagagtcaccctgtcaatgacagaggtggagtttgaacacaggctgtttaatgccaaagcccaatactggcttctggaagcttctagaaggaggggctggaacttcgcattgaagacgttgaggggcagtgttgcaggaaaatgggagagggaaacataccaggcaaagggaactgcttgggcatggcttcggcagagaacgaggtgcagagatttgagracaggatgatttcttggaacacagagcttggttcagtagaaagagcccaggaaagccaggatgtggccagttgaaagggaggggctttgagccattttgcatttgtggtgagccattttgcattttactctattggcatcaaggagacaagtaatgagaactctgacttgggaaaaatgtt

SEQ ID NO: 335232 - DNA, 379 bp, Homo sapiens
cttctgtgccagtggacacttgttggaggccagcacatgcctgattaagtgcgaaagaagagaacaaatgtaaagagcatgtgaaatcggggccgggcgcagtgcctcacgcctgtaatcacagcactttgggacgccaaggtgggtggatcacttgagcccaggagttgaagaccagcctgagcaacagagcgagatctcatctctacttaaaaaacaaaaagatatatatatatatttaattagctagacatcatgatgcatgtctayagtcccagctgctctgggggatgagatgggaggatcccttgagcccaggaagtcgaggctgcagtgagctatgatcgtaccactgcactccagcctgggtgaaagaaaa

SEQ ID NO: 335233 - DNA, 555 bp, Homo sapiens
gcttaggagttccacacagtagcatgctatgattatgtctgtgaatagccactgcagtccagtctgggtgacagaaacagacccgcatctcttaaaaaaaaaaaatgtggccagacatggtggttcacacctgtaatcccagcactttgggaggctgaggagggtggatcatgaggtcgggagttcaagaccaacctggccaacatagtgaaaccccgtctctactaaaaatacaaaaattagccaggcatggtggcaggcacctgtaatcccatctatttgggaggctgaggtaggagaatcacttgaacccaggaggcggaggttgcagtgagccattgcactccagccagggcaacaatgcaagactctgtctcaaaaaaaaaaaaaaaaatgcaatcaacaccggtggagaggaggtactggcatcaacctgagcctttctcttttaaaaaaattatttatttatttatttatttaatttattttacagacagggtcacactatgttgygcaggctggtctcaaactcctgggctcaagcgatcctccaac

SEQ ID NO: 335234 - DNA, 518 bp, Homo sapiens
ctgtgacaagcaggacctgttagtagctgggaaaagacaaaggtcttacaccagttccacagtctgtgagcccctacctctcagacatgctgatctgcagagaatagtgacctcagatcatcactgagcacttcacctgtgtaagatgctcccaggtgccatagagcatctgagacctgaatccatgccatctcggcccccagggagtttgtcagtcagtaggactgtgagacacacacagtcaaggcatctgagtagatgctaagcaaaataaaagctcagcgctggaacagatcccttccagctaagatgggccaagaagtctctgaaggcgggtgagctatgagttgagttgtaaagggcaaatctgtttccaagatgagaggggaatggaggygacagcaggtgtggctgctgccaggtcacttcacaggcttttccccattgtattgacctcgggctttttttttctcaccattgtctgttcttacaaggtcttctgtgaaaaattcaaccta

SEQ ID NO: 335235 - DNA, 378 bp, Homo sapiens
cttttgtgccacaggacactcgttggaggccaccacatgcctgattaagtgcgaaagaaaagaacamatgtgaagagcatgtgaaatctgggccgcgcgcacagcctcacacctgtgatcacacaactctgggacacccaggtgggtggatcactctagcccacgagatgaagaccaccctgtgcaacacagcgagatctcatctctacttataaaacaaaaagatatatatatatatttaattagctagacatcatgatgcatgtgtacactcccacctgctctgggggatgagatgggaggatcccttgagcccacgaagtcgaggctgcattgagctatgatcgtaccactgcactccaccctgggtgaaagaaa

SEQ ID NO: 335236 - DNA, 378 bp, Homo sapiens
cttttgtgccacaggacactcgttggaggccaccacatgcctgattaagtgcgaaagaaaagaacacatgtraagagcatgtgaaatctgggccgcgcgcacagcctcacacctgtgatcacacaactctgggacacccaggtgggtggatcactctagcccacgagatgaagaccaccctgtgcaacacagcgagatctcatctctacttataaaacaaaaagatatatatatatatttaattagctagacatcatgatgcatgtgtacactcccacctgctctgggggatgagatgggaggatcccttgagcccacgaagtcgaggctgcattgagctatgatcgtaccactgcactccaccctgggtgaaagaaa

SEQ ID NO: 335237 - DNA, 344 bp, Homo sapiens
acctgcctgtgccccacttccctcctctgaatggcagggcagtaacaccacccgacagtgttctggagaggactggragcaatgctgtgtgctgagtccctggctggcagcattctggagaggactgggtggaatgccatgtgctgagcccctggctggcagcgttctgagaggacggggtgcgatgccatgtgctgagcctctggcccatgtcggccttgacagtgcagctctttgcatggaacaaatcaatccctctgctgagtcagaacttactctctgttcctggttgtgcccagagaccggggactttccctcttcttcctacctggaagtcaaagcag

SEQ ID NO: 335238 - DNA, 344 bp, Homo sapiens
acctgcctgtgccccacttccctcctctgaatggcagggcagtaacaccacccgacagtgttctggagaggactggawgcaatgctgtgtgctgagtccctggctggcagcattctggagaggactgggtggaatgccatgtgctgagcccctggctggcagcgttctgagaggacggggtgcgatgccatgtgctgagcctctggcccatgtcggccttgacagtgcagctctttgcatggaacaaatcaatccctctgctgagtcagaacttactctctgttcctggttgtgcccagagaccggggactttccctcttcttcctacctggaagtcaaagcag

SEQ ID NO: 335239 - DNA, 579 bp, Homo sapiens
tgcattctgtttccagtgctactacactcctactttctcaaaagtctgctctattaatatcagctcagtgcagtttactatgaatagtttatgtctgtgatgcaaagcattaattgttctctttttacaaacatacatttttttcataaggaagactggggraaaacccagaaacatacagagaaaaggaaagcatcatcaaatatatgttaaaaattaagatgatgtttactactagtcatcctacaacaatttaaagttttcctcaatttatattcatttgattttacagcaaagataagcatacatgatttttatttccattaaaaacttaactactaataattaccctcaacaaaggagtactgagttagaaaaataatagaatatgaactaaaatgttttaaaagcagatgtaatagagatgaaaatttgtcttaattatatttggtcacttctgttgcttagtgggagaagccatggctgccacccagtggcaacataagtctttaaatgattttaagatttaaataatatttaaaacattgataaaaaaattcacaagttacacaacttcaa

SEQ ID NO: 335240 - DNA, 588 bp, Homo sapiens
gttctaaatacctgagtcatcacctaaatttctcatttgtaatatttggctccccatgtactcacaagcagagaaacacacacttctgtgtgtatatcctggcataagtgcatacacacacaaacacatatataaatctctttttgaccctatcatgttcatagtttgaaaagtttgttagaagaaccagcctggtaataattcactgcacctcatgtataataagcagaaatgcaccggcctttatgatgaattgccagggtaacacagggacatcttgtttgcatttcaatgcaccaagtgtcagattcttatttcattacttgccagtacattagtggatggtttttaatttctttttttttccccctttagcaaagctccatggagacctctcgctcttgccacttgcattgggagcaaggttgcattatttttaaatgctatagtatctggatctcactcgaaatattgctgaattaacaaaataaatartagcatactaccagcagttctatctggcttttaaaaaagacaccaaatttatcttgcttttattaaattctataaaaggaagattgggagatt

SEQ ID NO: 335241 - DNA, 530 bp, Homo sapiens
catttctgctttggttgcctgggtgtatttagaaccatagcacacagtgttataattttcgcttcaaccatcaattacaatttagataatacaagaggagaagaaaagtctgctgttatttcccatgtcctttcttctttcctgctgttccaaggttccttaaaaaactcatttyctttctcttcagaaaatcttctttagcccttttttagtataggtctgctgatgacaaattcttttactttctttcatctgggtgtcttgatttttccttcattccggaaggatatttttgctgagtatagaattctatactaaagtgtataggttgacagtttaaaagaacctggtactcctagttatttttcttgatcctctccctcctcccagcctccatcctctgtgaggccccagtgtgtcttgttcccctctatgtgtctatgtgtcttcatcatttagctcccacatataagtgagaacatgcggtatttggttttctattcctgcgttagtttgatgaggataatggc

SEQ ID NO: 335242 - DNA, 487 bp, Homo sapiens
gcaactgatgagactgattaagtctcattagtctcatcaattttgctggccaggagaaatggaaatgcaggaagcacaggagtaaggagcttaatgaaaggggttctgataatcagcctgtattcttcccagggtaaggcaggaagtgagacctgtagagggttaataagctggagaagccagagggatcaaggccctcttggtcttcttcaaaatgcaaatatccatgaaaggggcaactgaagaarcccctaatgtttttaaacttgagtccactaggactttttttctgcaggcttggagagtctggagccattgtgaagcctctggtaaggaaggggaagggagagagagtgtgatggtgatggctcttcctccctgctgagtccattgagctgtttgtttatttatttatttatttctggatttaatgaaagtgttctctgttaccttgaaatgaaccagaaattgtctgggaggcagctat

SEQ ID NO: 335243 - DNA, 419 bp, Homo sapiens
aaggatggtgggttccgaagcatcaggatgaggctgctcttgtttagagatgcgttttggtcctggtgtagctggtttcttgctgtgtgaccttggacagttcactgtcacttttctcacccttattttctgtcccagtgaacaaggagcttggaccagatkgttgtggaggggcactgggctctgactgtctgtggggacaggggtctctttacctgtccatgctgcaggccttccttactccccacagccctggtctgctgtgggcccagcaccagcccttctcatcctgcccagaaaaatggacacttctccataagagctgatgtagtggggaccagctcaacattctggagagtcacagtgccagaggaagcggagcagagggactggcagtgtggcttccagactcaaactac

SEQ ID NO: 335244 - DNA, 595 bp, Homo sapiens
cagctcaacattctggagagtcacagtgccagaggaagcggagcagagggactggcagtgtggcttccagactcaaactacccatgttctgactcgatcacttaaaagttatgtgaccttggacaaattccttggcctctctgagctttgattcctcacctggaaaatggagcaaataacaacatttcccacattaggatagggagaggattaaatgagacaagcgtgcaatgttcttagtgctgtggcgggggtacagtcagcactcagtgattccagccgactggaactgactgtaatccagccttgctgcttggccacttgctctgctttcagacagggtgatctgtgggttctgaggcttgtgggctacactagatgggctgcttccatgccagactaatacagttcccgaaacatccaggttacctccyggggtgtagactccccatctgccccagtgagctgtgcccaggcccctcttcttgcccctcttacctgaattggctgttggagcttccaggcttgggaagctcaagccaggctgggttggtggtgtagccataggagagagcaggagcttgtgagcagcacc

SEQ ID NO: 335245 - DNA, 648 bp, Homo sapiens
cctggcctgtaaaagacatccagtaaatacatgttcccttcctaaccgataagaagaatgctggatttatggtatatttgtattgtatcaacctggttgaactggaactacagttcccaaaatgcctcttcctgcataattctgagttagcatggaacaccaaagacagtttgctggagagagattccatcaagctgtctttggaaggaaagcagcactatgttgtctatacataatgaacaagtaaatataaataaacagattgtggtttgaaaggatgtgatctgatagaaatcaaatggggaaagggaagcactaaatagctagctggcttccttagacaggatgacctaggaagtcctctctgaggaagtagcatttaacccctcatcctgatgcctcaaggataagctgacagccaagctaacagctggaagcagaactacccaggcagaaagaacwgccaatgtaaaggcttcaagtatgccctgggcatctggagtaaaatagaggaaggaaagaaggaatggtggagattcagatatgcatgaccttaataggctatggttttttaaaaaatgtggggattttattttaagtgtaacaaccccactgaggagtcgggggtataagtggtgggatgttata

SEQ ID NO: 335246 - DNA, 602 bp, Homo sapiens
caatcactgttagggggtctcttgcatacttgtgtcaattttaaccacccatcagagaatccaacaactataatagtaatacrtacatatatgacactttataatttacaaaagaatcttaccgactttacgaacattctttcagcattataagagtaggtatgattatcactatttcacaggtgaggaaactgaggctcatagaaaattaatgacttgcccatgatcacaaagctagtaagtggtagagccaagatttgtacccagatctctggtgttgcgtctgtgttcattccagcagatcctgtgtattattcagggcatagtgatattattctcagtcattcacttttgcccatgacctttccccacttctcaggcaatagctagggcagtctgggcttactgaattggaaaggaaaggcataaaaaataaagaacaaaaatgagtttctggcttttaggttttgaaatttctggcagagaacatagcataaaaatctcaaaatcctcgtttctgagtacaaaaagccaggcttctacaaacaatagaatttagaagacatgcctgagaaaagagaaagttaattttgccacccaag

SEQ ID NO: 335247 - DNA, 554 bp, Homo sapiens
ggagctaaataatgtgcacacatggacatacagagaggaataatagacactggagactcagaaagatgggataatgaaagagaggtaagggatgagaaactgggcacaatgtacactattcggctggtggttacactaaaagcccagacttcgccactacacaatataacyaagtaacaaaattgcacacttgttctcctaaatctataaaatatagactgcacttgtagccctaaatctataaaatataaaaataaaaaacaaaaaatccctgttaaaaaaacaaaagacagatgccccaaagtttacccctctaaggatgagcatgaaagagaatgtgccaagaccaatacattacctgctgccacatcattttccttggtcatcaccttcttcacaatgaagccccataaagcaataattttctgagtgactcaagaattccattttatattggataaaatcaatacacagaagaagcacaattcatggaatgcagtcacagagcattcctattttgtctttctgtattcttttaaaatttactcagtaaa

SEQ ID NO: 335248 - DNA, 605 bp, Homo sapiens
agaaaaatattatctcaccccaaaaagacccatgaatttggaaatttataaaagatggttttaaataactcatgaaacaaagaatgagtcgcaacaaaatataaaacatttaagaattgaacaacagaaaagctacatatcaaaattcatgaaatatacctaaagagatacttatattcgaaaatttctggtcttgaaagctgtcttggtccacttgtgctgctacaacaaaatacctgagactgggtaatttataaagaagacaaggccccggtaggtttgatgtctgatgagagctccatctccacttccaagatgacaccttgtttctacatcctctgcaggagatgaacactgtgtcttcacatggtggaagagatggaaagcatgaaaaaaagggcaaactcactccatcaagcccttttacaaaggcacctaatcccattcaygagggcagagcctttatgattcagtcacctcctaaaggccaatattgtcgcattggggattaagtttcaaaatgaattttggaggagatgcatatattcaaaccatagcaaaagcatattttataaaggaagaaaattgtaaggtaaattgaggtt

SEQ ID NO: 335249 - DNA, 613 bp, Homo sapiens
tagtcatcaggtaaaatcataatgagataccactttaaattcaccagaaaggctaaaattaaagactaacaataccaygcgttggcaaggatgtggagcaactggaattctcatatatttctaatgaaagtgaaaaatagtaaaccactttgcaaggctctttggcactttcttataaaattaaacacccatatttcattggccagaattatgtcctatgtcacaattatataactaatattattagcatagtaggaaaatgtaaattgaaacaacaaaccaccaaatcatcaaactgtcactaggacacatgggggcaaggctgttttatgaggaaagcacagcacatgtgaaatgtctaacactatgagaatatatttatacctccatttgtatttctttctgagggaagcagcaacaattttaaatgcaaatgatgcgtcctgggaaatactaccctaaaatatggcaccttggcattctaagtattttaagctgaaagaaaatgagaaaactgcagaagcagaaaggaccctctggcttccttctgtcacctctctcttaaagacgtttatgtgacaggtgtctggccttatacctgttacacagagag

SEQ ID NO: 335250 - DNA, 595 bp, Homo sapiens
cccttttgtccaatcatacttctacactacgatctactctttagcaaacaaacataaaaagacasttttccccatttctttgggtcttcgtttctgaagcctttcacatcacgtaaaactcatgctaaataagtttgttattcttgtctcttgttaacctgtcttttgtttcagggatactagccatgaacctggtgatggatgacaaaaagtattactttttctccactacccaagtaaacatcaaatctggacttttaaaaaaatgtatttttctctgcatccctagcacaagaacacatgaaagtccagtggttcagccaatggaggctccccagtcccagacatttctaggattttgggggtctgtctttcccctggggtgttgttaccttttcctacattaataaatgagttccaagccagtcatccgtttatattgtggtattaaataactccattggttgtacctgaatccgacggaactagcaactggaattacatcctgcctttctcttgcaaaagtctcctttcctggcctagttccagaaacatctgactttaggaggacccttttgccatgtgttgtgtgcca

SEQ ID NO: 335251 - DNA, 595 bp, Homo sapiens
cccttttgtccaatcatacttctacactacgatctactctttagcaaacaaacataaaaagacacttttccccatttctttgggtcttcgtttctgaagcctttcayatcacgtaaaactcatgctaaataagtttgttattcttgtctcttgttaacctgtcttttgtttcagggatactagccatgaacctggtgatggatgacaaaaagtattactttttctccactacccaagtaaacatcaaatctggacttttaaaaaaatgtatttttctctgcatccctagcacaagaacacatgaaagtccagtggttcagccaatggaggctccccagtcccagacatttctaggattttgggggtctgtctttcccctggggtgttgttaccttttcctacattaataaatgagttccaagccagtcatccgtttatattgtggtattaaataactccattggttgtacctgaatccgacggaactagcaactggaattacatcctgcctttctcttgcaaaagtctcctttcctggcctagttccagaaacatctgactttaggaggacccttttgccatgtgttgtgtgcca

SEQ ID NO: 335252 - DNA, 595 bp, Homo sapiens
cccttttgtccaatcatacttctacactacgatctactctttagcaaacaaacataaaaagacacttttccccatttctttgggtcttcgtttctgaagcctttcacatcacgtaaaactcatgctaaataagtttgttattcttgtctcttgttaacctgtcttttgtttcagggatactagccatgaacctggtgatggatgacaaaaagtattactttttctccactacccaagtaaacatcaaatctggacttttaaaaaaatgtatttttctctgcatccctagcacaagaacacatgaaagtccagtggttcagccaatggaggctccccagtcccagacatttctaggattytgggggtctgtctttcccctggggtgttgttaccttttcctacattaataaatgagttccaagccagtcatccgtttatattgtggtattaaataactccattggttgtacctgaatccgacggaactagcaactggaattacatcctgcctttctcttgcaaaagtctcctttcctggcctagttccagaaacatctgactttaggaggacccttttgccatgtgttgtgtgcca

SEQ ID NO: 335253 - DNA, 630 bp, Homo sapiens
tcttttctctcaagttctgtgatctcagagccctgagttaatgaaaaaaagagattccttgaggcaaggccccattttctctctttgctgatgattttcagacaggttggtttcacttatttatcacgaactgcagtgtggtatatctgtgggaaagtgtaccttgcagatgtgatagtagcaacattcgttaaaacaatggttcaatttgttaaaacaattgaactatgttcagttttgcttcgtacaaatgaggctcaaatacttcgtaaattggtggagattggtcttgcaagaatcagagagtaaatgcttttagatgggttttgtcttttcttttctttttctttctttctttcttttttttttttgagagtcttgcactgttgcccaggctggagtggagtggcatgatctcggctcactgcaacctctgcctcctgggttcaagcgattctcctgcctcagcctcccaagtagctgggattacaggtgcccacmaccatgcccagctaattggattttgtcttttctttcaccttttgtgtattgtaaggctttttatattttgtcttacaagcactttgcagccattttaattcttagtacaagacacaaaagttatgaagt

SEQ ID NO: 335254 - DNA, 597 bp, Homo sapiens
ccaccaggaaataaggagtctagagaagaaggaaaaatatacagttattatctggacatgaatacatatttaaacttgaataaaaattagtttggaagccaatatatatttaatttgttttcattacttttttcatctttcaaaataactttggaacttcatataattgttggtatgcaatgatttgggggaaggaggtcataggatcatgagaaaattgacctgtatgcacctatgttatggtatagcagaataggtcctaaagtggaaagggttaaatctgatcatgccacctaccagcttgagtcatttaatccctctggcctcagaatctaattggggatagtcatcttgcagtgttgttggtaagarttaaatgcaagataaaatatttggcacatgggaggtgctgacaatggtagctggtttatcaggagtctgcttcatggctacgtggatcagcactccaagatcttcacgctttcaggcaatgcagatgccatcatttcagatcctctgtcagatttctctgcctgagtctacagtcaacctattttaggtaaagaaaaatcctggtggaaattagttgaccatgag

SEQ ID NO: 335255 - DNA, 578 bp, Homo sapiens
catagtcgtttattatcattaccaagtattgtgtactatacagaattacatgtgctagacgtttatacaactggcagcatagtcgacttatttacaacaggaacaccacaaacacgtgagtaatgcattgtgctactacaatagctacaacatcatcacaacagcgacaatgtcactaggcagcaggaatttttcagctctattataatcttatggggccacatggtatatgcagtccattgttgaccaaaatgtcgttgtggggcacacgactgtrgagagaaataaaagaaaaaaaaaaaaacattagaagcctaaataagctcctgtagtggaaggaagtaaagcaggattgtttctgcccggctgtggagagggaaggacacccacctccaccctgagacagcagcgggctcctttacctgtggagccaagtcctgcatggaattggttatacgagtggaaagagcagcctataatgtggattaacacagtaactcactcacccacctattgtctgaaagtgaagggttatacagttgggagcaaaacaaaacagaggttcacccatcagtgga

SEQ ID NO: 335256 - DNA, 565 bp, Homo sapiens
agattttttagtattcttgtcttatgctaagtcttcaaaatccaatgtattttatgcttacagcacagctcagtttgggctggccacacttccagtggctagtgtataggtagaaaattctcagccatatgcttaagggagtcacaaagagtgatacaagaacatccattacagcattgcttgttagcagtgaaaaactgtaaacaatctaaatgtccatcaaaaggtgaatagataatttaattttactaaattaaataacaaaatacaaagcagcaactgaaatgaataaattggatctaaatacatcactgatctatccctcaaaatcataatgtcgaatgaccaaagcaatctgcagaattatattaatacagtgtaccatttaggtaaagtttttaaaatacctcaaaaaagctatacattgcttattgaaacaaacatatgtaatgtagtaaatatatatcagacagaaaaaaatgcactaactttgagaaagtgattagttctgggaaaggagaaaggaaggagggaggaarggagagaaaaagatttggagaaatcc

SEQ ID NO: 335257 - DNA, 215 bp, Homo sapiens
gaccaaaggtatcctttggagcctctctggacttgaggttgaaaatgtaactagaactttaaagaccgcttttggccagggtggccctttttatttgctraattctgtactttaccaacagaaaaaaggagcacaacaaacatgcacatgttactgacttctgcattctcgtcacattgcacacatacatttcacctgctgtctgcagtgtgcac

SEQ ID NO: 335258 - DNA, 215 bp, Homo sapiens
gaccaaaggtatcctttggagcctctctggacttgaggttgaaaatgtaactagaactttaaagaccgcttttggccagggtggccctttttatttgctaaattctgtactttaccaacagaaaaaaggagcacaacaaacatgcacatgttactgacttctgcattctcgtcrcattgcacacatacatttcacctgctgtctgcagtgtgcac

SEQ ID NO: 335259 - DNA, 601 bp, Homo sapiens
cttgtctgaaggtgtttgggtctgagctgtgagactgagctatgatggttctcttcttccctcctctgcacagcccagcctcagtcacatgggcatctgcccagctctctgaggacctagaaaagagaagtgaagaagaaggctcttttcctaagaacaggaaacaatgaagataacaattatcccacgctagaaagcggcagaaattgagttcagagagcccctccaccttgttctctgaggagggaccaaacaaagcaagatctctgcaggaacatggggaaaacacagtgggaaaaggaaagtcaacaatggttaagtagataacaaggcayatcttgtacagtgtcattcaaatacagtgaaatctaatttctcaagttcctaaaatggacgctttgccctcagaggcatgagaagatccatggcttatatcactatcttgtattacttcttctcccagaaagttcactcaacaaaaagactgcagaatgtttagatacagccagttgcatagagttccctatggagcccgatcctttccggtctgaactgcaaggaaaccaaagaaacaaaaaatcagtcccagcaagttcgtgtg

SEQ ID NO: 335260 - DNA, 617 bp, Homo sapiens
gtctccctgtggctctatcccccatgctggccccctctcaaaccctgttctccctggtgtcatggcctttttcccagactctatttccaggcccaggtgcttgttctttggccatcaaaaatgagttgagccccaaagagctgcttcagtaattggcctgagcagtacaccacctgtggcctgtgtagattttgctgtccatcttgcacccaccctctacttttcaggcctctcatttggaagtgatttctgagccaccccttcgtgtgctctggggcccaggagttggaggggtggagaagcaccagcagccagccatccctttttccttatccatatgccaccatcctgccttctctccctgccctgcctctgagtctctagctgggctcctgctcagtccacgctgacctcccctgccagccccacttccctcycccactccatacttcatccttccatgtttatgagcattttcatctgaaagggggaatttttttttaaacctcctgagttggaaacacggccgattgtaactatagtgaggcatcaatcacgtcgcaataattgcacagcacagggtttcctgttagggctgagctacctgccagaaaatg

SEQ ID NO: 335261 - DNA, 453 bp, Homo sapiens
agagctcactgcagcctcagcctcctgagtagctgagactacaggtgctcaccaccacactcagctaattttttgtagagatggagtctcgctgtgttgcccaggctgatctcgaactcctggcctcaagtgatcctcctgcttcagcctcccaaagtgctgggattacaggcakgagccactgggcccagcctccagaattttctgtctctttttccccagtttctaataacagcaaaaaaaaaaaaaaaaagagggtttgtgatggcagctagtttgagtggtccatccagaaagggctcttggtaattgttgacaaattttgccttcagggttcaatggaaaccatattgcgaagtagcatccgtttggttaaggtttcccagtcactgtgcctacctcacagtgttgccgtgcaggttaaatgggctaattacttgtgcagagctcagc

SEQ ID NO: 335262 - DNA, 575 bp, Homo sapiens
acaaatattcccagccttcctctttgaggttctcctggaggggccagatctagggaactggggccttcctcaccttgaaggggaaatgtgtgagtgaacctgcgatgaataatgtagagccagcgtttgcagagaaagagtagtggacaatatttacctctgtggcgttatttctgagaggccgaaaagagactttttccccactaaatatttccctgtaattgatagtcaattcttggggttcatctgtgggcaggtgttatctgcagactagagctcttgggcagctctgacatttaccagttgcatgatggtggataggtcatttactgtgagctgacttctctgtaaaatggagagaagccccctgctcctgtaagtcactgtgaacacayggcagatgcattcctttcactggggaatctcctcctctctcgtgcagattttaagcctctggctgatacttttacccaatattcccatttgctttaagggtcaaacgctgaaatttttaacagagacaaacttgctgttccttgtttcttcctcttgttttggggacagtctcgctggat

SEQ ID NO: 335263 - DNA, 581 bp, Homo sapiens
cttcatccttattgtgtgatgtgattttcttattcattcaacaagtacttctggagaaccaactctgctcaacgtgtgctacatgccaggaacagagtagcaaacwttcaggtgtgtccttgtcttcatgaagcttacagtctggtggggaatgtagtcattgaacaaataaaataagatgtggtgaatgtaatgctggaggagattaggcaaggcaagtgttatgctgttggagggacagggacatctagaagccatattagggaaggcacccaatctgtgctgctactaaccatccttgttgcttatgtacccacatgccatctcgttaaggtctttttaatgtgtgggcccctgaaaaggttgtatcaattcaaatatttgttcaaggcagagagcagccattctctccttctttctctttttgcacacactatacttttgttaaggcatgttaaggctgagtttgcattttccccagatacacggtattgctggcttctagtagcttgagctcacctaaaatctatgtgatctactgtccagtcagatctgatctgtttaatgtttttagtggcaat

SEQ ID NO: 335264 - DNA, 581 bp, Homo sapiens
tgggcacactgccaatggggtaaccctgctccacaaagaacagtatgtctgcttctgctgttcactgccacttcaagaaaagttgctgtctaacaccacgggctttccctgggtgaagccaaaaactctcctgggctaagtcccagttttggggctcacctgccctgcaacagatccataagcactagtgtggaaaatctccaacttgtatcattaaacgcagaaagcaagatgcaaattttacaaaatgtctacatctgtgtatgtgtgtgtgcttaagtgcaggtggaaggagttgatacagagatcgtatgaatgcaagattttgcacagaaaatttctcaggagatacataagaaactcattacaggggwttccttaggaaggggcactgaaggtgaggttaaaggacatttttgcttttcattttataccactaaataccattggaatttatttttaccaggtcatgtactggttttataatttaaaaagaaaggttaaattttttaaaggtctctagaaatgcttttaactcaagttctataatttgatgatttcttgaaccccagattaaggca

SEQ ID NO: 335265 - DNA, 555 bp, Homo sapiens
gcttgtccaagagcatatagtcagcagtagggccagaacaaaaagtgggcttccagagtcctttgtctcttccatggaatctcacctccgacgaygtgaaaatgagtttgaagtctggagcccacctcataccttaatctaccttccaggagtctgctctttccttaaagcgctggaatgtttgatcgatattaactcattcagctaaaattcttgagatactctcaccagcaagcaagaatacatgttctctgtcaataaatgcaacacaaagaagcatggcgctttagaaaaagaagacattattttgccctggacgataagagaaggtgtgagtaagggttccatattttgtctcagattttgagaggtagagttagaagagcaggagaaaagcttttcagactgaggggcaggtttatacaaaggtggggaaaaggaggtgatgttcaggaaaaggctgagtagcctttggggttgacacttagaaattgtcgtattgcttgtaattactgccacgtgtatgtacttaccgcaaggcagtgggtttcattt

SEQ ID NO: 335266 - DNA, 583 bp, Homo sapiens
atacagtcaaggcagcaaaatgcagtacaatatcaagctatggcttaagggagaactgaggctatagaataatgctcactatactcagtcgttgtaatgtctgtgtgcctctgccccatttacctgaggtcatacagtctccctatccctacagctcagcatagtggctggygccaaattagagctcaatcaatgttgaatgaaagcactagtgaaataaagcaaagagtgttgtaatttcctaagtctacttcctcatgtgagaaaatgggtgctaattatagcctggtagagatggaataagttcagttccatatgtgcttaatgagatacagtgcctgaatcaacagatattacatattccctttttgcttccttccttagcttgggcatgtctctttcccattttggaccagtttttttttgtttgtttttgcttttgttttgtttttacaactgaacaatgaagggcttagctaaaatcctaaccatttggattccaaatacgagattttagtctagtgctagttgttcctgagaagagactcatgtgcatttcatagatattatgcagcactcactg

SEQ ID NO: 335267 - DNA, 583 bp, Homo sapiens
atacagtcaaggcagcaaaatgcagtacaatatcaagctatggcttaagggagaactgaggctatagaataatgctcactatactcagtcgttgtaatgtctgtgtgcctctgccccatttacctgaggtcatacagtctccctatccctacagctcagcatagtggctggcgccaaattagagctcaatcaatgttgaatgaaagcactagtgaaataaagcaaagagtgttgtaatttcctaagtctacttcctcatgtgagaaaatgggtgctaattatagcctggtagagatggaataagttcagttccatatgtgcttaatgagatacagtgcctgratcaacagatattacatattccctttttgcttccttccttagcttgggcatgtctctttcccattttggaccagtttttttttgtttgtttttgcttttgttttgtttttacaactgaacaatgaagggcttagctaaaatcctaaccatttggattccaaatacgagattttagtctagtgctagttgttcctgagaagagactcatgtgcatttcatagatattatgcagcactcactg

SEQ ID NO: 335268 - DNA, 627 bp, Homo sapiens
tgcctcacctacctatcactactatttccattctcctaacaaggaaactcaagctcagagatgctaagtcacttgtccagggtcacacagctaaaatgaagtaatcttctaaccatgatcactcctacttcccattatggctcaaattaacagaattttcactgaaaacgcccaccaaccttccctggagacaacagtcaagcgtattaactagagcaagaattcttctatgaagaatgtcctttaacatctgtgaggcatgtcatggactcaatgcagctcaaaaaggaagggatagggacggcgctaccatacacggaacatctaccaggtggtacctaaacccaactaacctatggctggacttatgggggttaaggaggccctggaccccagcccatcagcaccccaccctctcttacctctagaacccatttctggatggaaattctgctgttgtttcctgccctctttgcaatctgttcctccaaacaacaaaaagagagcccctggcttcctyaaacagggaagcaacacagccaaacatggatgagagcttacagggggtgggggcagaaggatgctctgttatttttattttcttcctacccactaggccaaagaata

SEQ ID NO: 335269 - DNA, 419 bp, Homo sapiens
gggttttacttttttctatagaactataattgaccaacatgctctatatagaaaatcaagcctcctctcatgcatctgatcctttgatakctgcacggtctatgtaatctcacaaaaatagtcctgaaatccaaaggaatgggggagagacttacggatgtgtcctcgtgaattttaaaacagcacttgaacgttttgcttttggattcagatgtcagaagcatcaaaatagatttctacagagaatttatattcctgactttttatatatatatgtgtgtgtatatatgtaaagagaggcagtgtctgccatttttagagcactggagctttgaattacacatggctttgatccttgccgcagcctaaacagctgttcttgagcagatgtgatgctgtagagcctggaagaatcaact

SEQ ID NO: 335270 - DNA, 562 bp, Homo sapiens
ttcaatttaggagatggtacaaaatttaaaaatctgtattttatcataatctatgaaagattcacacatcacagttggctggtttcatactgaagtgtgccttattgggagtggaaacttttccaagttgacttgttctcttccctgattctgattcaccagaggggccatgggacttaagcatgtgcattcttcatgtgattcagatacacttccttcgcttcccacccccaacttttgcgctgctttggatgtatatgtaaagtccagagctgtctgaggccattcatacarcaaatatacatcaggcatctactgtgcaccaggtactatggttgttgggatatatcagggactaactaaaaacaaaggttcctggcttcatgcagcttattttccaaataattaccagacatctttgaatatcctgtttattatttaatttagaagattaataagaggaaaagtaagaacccagagtattgataggagaaaataggtagtgggccttctgagaaataacaaaaggtgaaattcttatatcagatataaaatgcaagtc

SEQ ID NO: 335271 - DNA, 512 bp, Homo sapiens
agtgttattttcttttgccactactacaatctgtttttcaatcatcatattacaattgaaacattaaatttggggttttggttcaaaatgaagatcctctctggttttattgaaaagaaaaattttaggttgaatttttgaagttttcattaaaattattatgtatctttgccagtttggctttgatgaaagtaaggggttaggttttgttcttttctctcttcctgagaagacttatatccctgtttttaaccaaggacactagcaaattctcatttttctgaagctgaaatatcccccagatttgcccctcccttttccaaggttccagtttggaactttttggccaaaataaatcctacttgtcctttctcttacaagtggaaaattgttggttatcttcsgcttattactggggaagggaaaggaattaattttgttaagtacctactgcatattgagggattttttttggcattctgcaaacattatctcaagactgtctcacaaca

SEQ ID NO: 335272 - DNA, 592 bp, Homo sapiens
taataaagtttcaattgcattctctttgaaatatattttatctgtaaaatattttcttcttataataatgattgtctaattcatttaggcacatcattaatctgcatggattttattgttgtttgattggttttgatacacacacatctttttacaaaggggctatttattggagagcagatggtgaaaatgcatagactacacccctgcatagattgatgatttgtaatctgagaagctatgatagggaggagagtgaaaatgcttttattctcaggttataaatggacgatccaatgcaccttggattttttactttatgtaggacaaaaaggcattatttacttatgtagttgatatgcccatrgattctaagaaatctgatgggaaaatgaaaaactccattataaatggattcttcatcctaatctaacattttagatatgggcaatctagagtttctcaaattgcaatctacaggcctgctacctcagaatccttttagccattgatatgactaggggctactcttaatctactgtgatgaatatctttggttgggcagaggaggtggcatttgaaccacagttcc

SEQ ID NO: 335273 - DNA, 672 bp, Homo sapiens
atacagtggtagcctagcagtttgtttgttttgttctttcgttcatctgcctgctcaggactgcttactgtctgtgttttcaggaggcactgagctgccagagcatacatggattaggaaatagtgtccatgttgcctctgttcccactgggctcaaacccaaaatgcacagttcttggttaagtgaagggttgagggtgtggaccttgactttttatttaatctcatacagtacacatgttggtttggggcaaagaagtttctggttctccatgttaggagagtgtttcaaaattatcctaataggagttaaatagacaattagagttatttcagtggcaaacaaacaaaaacaaaaacaaaaaatgtacaaacaactaagttagttaatgttttctgtgaatatacgataggaaaactatgtcaacaccagtctgagaaatccggtccccaaggggagatcaacaaggttggcagtggatggawggtgaagtggaagtcctttcaggctctggaagaacagagtttgtttgatatccatcgacagggagcctgtggagagggacagatggaagagacgggaaggaagcagtgcatgttttgagttaaagcggtgatattaacaatcagaattggagtaagctagtattccattacctcatcattttctcc

SEQ ID NO: 335274 - DNA, 620 bp, Homo sapiens
atggtaaaagaacaattaaacakgtagataagtcaaggtcaaatgcacaagccccaaatgtgcttgcttgacagtgctgcttgttcctgcctctggtttccattccctctgggcaaagcccatgtcactcatttgcaggattgctatgtccttccttctagctggccacccacttctagcctcctttcttttgagtacatcctacacaccattagggattgaccattcgacacattatttctaaccatgttatttctgtgtttaaaacaagcaaaagtgggggtgaaagcgggtgctttgatggtcaaagggggaattaagttcatttttagagcaaaatgtagcattacctctcaaggctgcttgctctctatgcctcactgtttgcccaaggttttgttatatttctctggccttggcttctctgatctctcatcagctggtaaccaggtgttgttgacaccagccttatccagacacgtcctatgccattttggtgtccatctgtactgcgttgaacaatgtcttccaaaaatctctgtctacccagaacatcagaatgtaaggatatttgggtaaagggtctttgtagacatagttaagatgagattatatggatt

SEQ ID NO: 335275 - DNA, 574 bp, Homo sapiens
gcatagttttctttatggcacaatatatgctccagtttttataaatatatttgtgaacttctaaaaaatataaattgtaaaaaaattatacttgtacaaattgtgtgtagattttttgttaccyttcacaaacctatttattttttcgtaatagaacatatgggtaattataaaatcaagtaaatatgacattacctagaacctcttcttagaaaatcgatacttgtgtgggaagtttattgatttgtttaaattttacattaatttctagaaccttattattgttttacagtattatatatctgaaactaatagagaaaaggcaaccagtaaaaaaccatcacccacccatgaaaaccagagtttaaaacttaggatgaccgattcaagtcattctctagtacctggtctacctaccttctcaaaatatattgttattacgtcctattaagtgatcaagtgtgctcatagggagatattccagttctctattactgaataacaattacttgtacatgaatattcatagcacctttattcacagtagccccaaactgaaagcaacctaaatgtc

SEQ ID NO: 335276 - DNA, 627 bp, Homo sapiens
atgaatagggaagtgttgctgcctccattttctagaaaagaatgtgtagaatttacgtcttatacaattccccaataaaccactragcttatagatttcatttttgagaaggttttaattataaatttaatttccttaacagttgtgaggttaaagttatctttttcatttcagttgaattttgttagtgtacttttccaagaatgtatccattttgtctagtttataaaatttgtgtgtagagttgtttatagtaattctttttatccttttgatggctatggtgactgtagtgatgttccttccttcatttctattttttagtaaattgtatcttctcaattcgttttttctttttcagtcttgctacagatgtgtccattctattgatatttctggaagaatcaacttttgttttattgcttttttcttttctttctattcttcaattcattattttatgcttattattgtttatttcttttttctttacttgggagttaattttgctcttttattctaattttttgagatggcagattagatttttagtttgaaatttttctttttcttttaatataaacatttagagtgctatagtttagaaaacagcactcatggtctaaa

SEQ ID NO: 335277 - DNA, 586 bp, Homo sapiens
atcaggaatgatctgaagattttcttaaaatggtgattcaggtccagcaggtctaacgtggggcctgagattctgcattctaaccagctctgtgagatggccaatgatgccagcctgtgaaccaggacctcaaaataagagttgtcatctggttcactcgtgctccctaatgctgaaaatgaaatttatagtaaggttgcwaataaaatgcaatagataatagataaatagttagaaggtaaatgcttcagattattttgttaatgtgaatttaaaattatcctgcttctcctaatatatgttgtgtattttaaaagaagcaatgatgtaacataagttttaaagccagatttgacttctggattgtccctttagtagccagttgtccttggacaaattcattaattatcttgtcaagttacaaacattgggctagttatcaaatctcaggtctcttggtttgaataaaatgggtaaatttatataatagcaataagccagggatatggtaaatacgtaataaatcataattaaagtaataataacaatctccctttagaaactgatgagagagtgtggaagaatt

SEQ ID NO: 335278 - DNA, 586 bp, Homo sapiens
atcaggaatgatctgaagattttcttaaaatggtgattcaggtccagcaggtctaacgtggggcctgagattctgcattctaaccagctctgtgagatggccaatgatgccagcctgtgaaccaggacctcaaaataagagttgtcatctggttcactcgtgctccctaatgctgaaaatgaaatttatagtaaggttgctaataaaatgcaatagataatagataaatagttagaaggtaaatgcttcagattattttgttaatgtgaatttaaaattatcctgcttctcctaatatatgttgtgtattttaaaagaagcaatgatgtaacataagttttaaagccagatttgacttctggattgtccctttagtagccagttgtccttggacaaattcattaattatcttgtcaagttacaaacattggkctagttatcaaatctcaggtctcttggtttgaataaaatgggtaaatttatataatagcaataagccagggatatggtaaatacgtaataaatcataattaaagtaataataacaatctccctttagaaactgatgagagagtgtggaagaatt

SEQ ID NO: 335279 - DNA, 586 bp, Homo sapiens
atcaggaatgatctgaagattttcttaaaatggtgattcaggtccagcaggtctaacgtggggcctgagattctgcattctaaccagctctgtgagatggccaatgatgccagcctgtgaaccaggacctcaaaataagagttgtcatctggttcactcgtgctccctaatgctgaaaatgaaatttatagtaaggttgctaataaaatgcaatagataatagataaatagttagaaggtaaatgcttcagattattttgttaatgtgaatttaaaattatcctgcttctcctaatatatgttgtgtattttaaaagaagcaatgatgtaacataagttttaaagccagatttgacttctggattgtccctttagtagccagttgtccttggacaaattcattaattatcttgtcaagttacaaacattgggctagttatcaaatctcaggtctcttggtttgaataaaatgggtaaatttatataatagcartaagccagggatatggtaaatacgtaataaatcataattaaagtaataataacaatctccctttagaaactgatgagagagtgtggaagaatt

SEQ ID NO: 335280 - DNA, 339 bp, Homo sapiens
  misc_feature (1)...(339): n = A,T,C or G
nnnnnnnnnnnnnnnnnnnnnagtttctgtctttgtaaaaaggtatatttatagttattagtccataaaatcattgtaaatttgttgatttgtacgggaaatacagtcagtactttaagtgtttagttaccatttttgtttttcctgtttaaawaaagtctatagcttattccagtctttttttaaattaattaattaatttttttttttttgacagagtctcggtctgttcctcaggcttgagtgcagtggtgcaatctctgctcactgcaacctcagcctcccaacttcaagctattctcttgccttagcctccctagtagctgggactacaggcac

SEQ ID NO: 335281 - DNA, 592 bp, Homo sapiens
ataggtcctggcctagttttagagactgattgtctggctctattagctgtctcacttttgagcctgtgaggtgctatttattctgaatggtttatcttgtgccaatggggcttcctctggtccctactgatgctgctttgggtgrgcagacgaaactatgcaggccaggttgctggtgccactaattaggaaagggatcctttctcacaaggtgactaagaacatttccagcctcgtgcttgtcaagctacgtctgccagttgaaaaagtggaatgatgaggagaacctctcaggctgctcatgggctcaaggtcacctttgcaggtgtttcccacagtgtgatatccctgcctagggtaggggagtcttaggccctaggggactaagtggcttcccaggttgagcattttgtttgtagcagttgcccctgctgctgtctctggtaaatggaatcactcagtgggaggaggagtcccaggacagggaaggagagcaccacttattgccacagggcttctgatcagtcccctctactggtttgcctcaacttgcttggtatggtgggactctatttccacacacatgtggtat

SEQ ID NO: 335282 - DNA, 497 bp, Homo sapiens
aatagttatacactaaattataatgtttaaggtgtgactcctaggaaagcagactttaaaayagtaaaaagaactttaaaaaaatgtcagaagagatctcagtggccacacacagcaggaaatacgtaatctatagaattattccagtaaagcttctaaacaaataaggaatataaaagaaaaaacagctacaagacacgttaaggggaaaggtatggaagaaattatattatctaaattgtccagttttcaacaaaaactcatgagcatgcaaagaagtagaaaagtataccacatgcacagaaaaaaaaaaagccaacaaaaaatgtcctacagaagcccagattttgaatttagtaggggaacaatttaagtcagtgaacctacatgcatacaaaactgagggaaaccatgttgaaataattaaagcaaaatataaaaacaatgtctcacacaacagagaatatcaagaaagagatcaaaataataattttgga

SEQ ID NO: 335283 - DNA, 534 bp, Homo sapiens
aatcataagacttaacattactaagctggcaatataccttgcattaatctacagatcctacataatccctgtaaaaatcctagsaagtgttttgcataaatttttatgatgcttataaaatttgtatggaaagataatgattcagaatagtaaaaacaagcttgaggaagaatatttatggaggtctcacctttcccaatgtcaaaacctattttaagcttcagtaataaagacactgaggtattggcatatggatagaagtatagatcacttcagaagtaagactttacatttacactcaactaatttatgacaacagtgccaagatcattcaatggagagggaaaattcttgttaacaaatgttcctgggacaactggatatgcaaagaatgagttttgacctctacctcacaccttactcaaaaatccacacaaaatggactgtagacatgaatgtaagatctaaagtaataaaactagaaaaagacataagagtaaacgttcttgactatgtgttaggcaatgtttttgc

SEQ ID NO: 335284 - DNA, 508 bp, Homo sapiens
aaataacaaagatcagagcagaactaaataaaactagaccccaaaaccattcaaagattcaacaaaactaaaaattggttatttgaaagtgtaaacaaaattgatagactcttagctagattagctaaggcaaaargaaagaaaattaaactaaacacaataaaaaatgacaaaagtgacactacaactgataccacagaaatataaaagatcctcagagatgactatgaacacctctatgtgcacaaactagaaaacccagaggaaatggataaatgcctggaaaaacaacctcccaagactgaaccaggaagaaattgaaaacctgagcagaccaataagaagttacaaaattaaatgtattttttaaattcttaatttaaattgccatgattttaaaaatgtaaacacagtaaaatgtgaacataaataatcaaaacaatatatgaagggttatgtgcacaagaaaatatagtaacctagcatcattactgtgaatcctaaactg

SEQ ID NO: 335285 - DNA, 582 bp, Homo sapiens
gcttccggtttacagcctgctttagaattaggtgatgctgcatttctgggaatatgagtgctttgttgcatttgatcagatcaggtctgtctgtggtgattaaggtctagtgattggaattataaatgagagtatagtcaaccaaaaagatacacatactacctgggaagacatctgtttaaagttttcttttctccacctcattatatattcaattttaagtgatcatgtaaaatatgcataaaatatacacataaaatagtcaatagttgctcatttgttttagccactgaraattgactgagttctccacttggaacatgtaaggtagtgttgactttacttgaaaggctgacatccatttcagataacggtgtctctttttattttatcatcctattatattctcttctacgtgatttgccttctctgcttttcatgttgtgtaaaattttcatatttttctaaaagaaattttggaacatgaagaatgcatacaagcggtctgcagacccatctaaactttgttagtagactttatatctcactgcggctcaatgacctggaagataaactggccct

SEQ ID NO: 335286 - DNA, 600 bp, Homo sapiens
ttgggaaacacaaatatgttcatctacatagacaacatctttgtgatattagaatacatttaagtttaagaagaagtatccttcctggaagatgccatttatactgtgtacgtgtgtatcagtggaaatggggtaaaagccctctggttgctttggaccctcataaagatagtggtgacaacaaaaagaatgtattcaccaggacagctctttatggccttgaaacataaaatggttaaacattggtcatgtttatcttatcactgrgaaaaagttgtaaacggattgaggacagaaattactctttttttttgagacggagttttgctcttatcatccagactggagtgcaatggtgggatcttgactcactgcaacctctgcctcccaggtttgagaattctcctgccttagcctcccaagtagctgggattacaagcatgtgccgccatgcctgtctaattttttgtatttttagtagagacagggtttcaccatgtgggccaggctggtctcaaactcttggcctcaagtgatctgcccacctcagcctcccaaagtgctgggattacaggcatgagccaccacacttggccaaaa

SEQ ID NO: 335287 - DNA, 592 bp, Homo sapiens
aagtctttgtaaaagggtataatacaattttatttattatatgggatacctggaatagtcagactgatagaaaatataatagtggctgcyagggattggaggaggggagaatgagacttattgcctaatggaggcagaattttagtttgagatgatgaaaaccttccggatatgcatggtagtgataattgcacaaggtaactgtagttaatgtcactttcctgtacatttaaagatggttaaagtggtaaattctatattatatgtattttaccacaatgaaaaaaggacattgaatttcttaaacaaattcatttttccccaagttggtctccttctgtaaaatgctgcacagttctcataagcttctacattttctagctcccttaacactataaggtactattgtgtctctgaataaacttgggagagaaagaaaaactatttttaatcatttacagtgtttcattttgtaagtcccagcccaatttatcttttatttctaaaatgtatactcatatcagtgtatttacaaaaacattcttgcttcctttttcttattataccacaccaacaaccttggctaaaattt

SEQ ID NO: 335288 - DNA, 592 bp, Homo sapiens
aagtctttgtaaaagggtataatacaattttatttattatatgggatacctggaatagtcagactgatagaaaatataatagtggctgctagggattggaggaggggagaatgagacttattgcctaatggaggcagaattttagtttgagatgatgaaaaccttccggatatgcatggtagtgataattgcacaaggtaactgtagttaatgtcactttcctgtacatttaaagatggttaaartggtaaattctatattatatgtattttaccacaatgaaaaaaggacattgaatttcttaaacaaattcatttttccccaagttggtctccttctgtaaaatgctgcacagttctcataagcttctacattttctagctcccttaacactataaggtactattgtgtctctgaataaacttgggagagaaagaaaaactatttttaatcatttacagtgtttcattttgtaagtcccagcccaatttatcttttatttctaaaatgtatactcatatcagtgtatttacaaaaacattcttgcttcctttttcttattataccacaccaacaaccttggctaaaattt

SEQ ID NO: 335289 - DNA, 545 bp, Homo sapiens
aatatacaatgaactcaaacaaatcaacacaataaagaacaaacaatcccatcaaaaagtgggctaaggatatgaatagacaattctcaaaagaagatatgcaaatggccaacagacatatgaaaaaatgctcaacatcactaatgatcagggaaatgcaaatcaaaactacaatgtgataccacccctgcaagagtggccataataaaaaaatagtagatgttggcacggatgcagtgaacacggaacacttctacactgctagtgggaatgtaaactggtataatcactatggaaaacaktgtggagattccttaaataactaagagtagaactaccatttgacctagcaatcccactactggctacctacccagaggaaaagaactcattatacgaaaaagatacttggacatgcatgtttatagcagcacaacttgcaattgcaaaaatgtggaaccaacctaaatgtctatcaattaatgaatggataaagaaactgtggtaatgcaatacaattcagccataaaaaggaatgaattaat

SEQ ID NO: 335290 - DNA, 580 bp, Homo sapiens
ggaagggctgtactaatttaagaaaaatatactttacaatataaattgttactagagatgaggataattttattgtgattataatgtcaatcaatcaagatataactgatgmaaacttacatgcaactaccaacacaaccccaaatacagaaagtaaaaactgacataattaaagagagaaatatgaaattaagcaataacatttggtgacttcaatatttctttcaataatgatagaaaatgatgcagcagatcaagaaagaactaaaagacctgaaacataacatatgaagtaaatttaaccaatgtatttaaatgaatccaccaagcacttaacaacagcagaagtcacattcttctcaagtgtacatagaatattttccaataagaactatatgttcagccgtaaaacaagtatcactacatgtaaaaaaactaaaatgatacaaactatatcttctctaaccacaatgaaataaaagtagaaaaaatttacaaatatgtcataattaacacacccctaaataacaaaaaaaaaaaaaaaaaaaagaagaggaaatcgcaagggaaattagaaaac

SEQ ID NO: 335291 - DNA, 583 bp, Homo sapiens
  misc_feature (1)...(583): n = A,T,C or G
tacttcaacctatcaaagacccaaattttctagcattttgtcctccacaatctcctcaagaatcccagcccagaactgctcagggagatggatttgagggtctcttcccatcccttcactcaaccacccagacatccttaaaccctttctctgctgcacattccactgtctcagtatactgatytgttaccacacagtgggcatataaacttgtggtgctataacaaatacagtgaataattgtatgccaacatatcagagagcctagatgacataaaaatatatcctagaaaagtagaaacaatattagtccattttcattgcttaaatgaactacctaagactgggtaatttataaagaaaagaggtttaattgactaacagttcttcaggctgtacaggaagcatggctggagaggcctcaggaaacttacaattatggtggaaggcaaaggggaagcaggcacgtcttcatgtggtggaggaggagagagagagtgaagggggaagtgctacacacttttaatcaaccagatctcatgataacttactcactatcacaaaaacagcaaggaggaattcn

SEQ ID NO: 335292 - DNA, 583 bp, Homo sapiens
  misc_feature (1)...(583): n = A,T,C or G
tacttcaacctatcaaagacccaaattttctagcattttgtcctccacaatctcctcaagaatcccagcccagaactgctcagggagatggatttgagggtctcttcccatcccttcactcaaccacccagacatccttaaaccctttctctgctgcacattccactgtctcagtatactgatttgttaccacacagtgggcatataaacttgtggtgctataacaaatacagtgaataattgtatgccaacatatcagagagcctagatgacataaaaatatatcctagaaaagtagaaacaatattagtccattttcattgcttaaatgaactacctaagactgggtaatttataaagaaaagaggtttaattgactaacagttcttcaggctgtacaggaagcatggctggagaggcctcaggaaacttacaattatggtggaaggcaaaggggaagcaggcacgtcttcatgtggtggaggaggagagagagagtgaagggggaagtgctacacacttttaatcaaccagatctcatgataactyactcactatcacaaaaacagcaaggaggaattcn

SEQ ID NO: 335293 - DNA, 584 bp, Homo sapiens
ttgaacaccttttctttatgcaacatttgggtttcctctttggggaattgcaaagtcttttaatagtttttgcctttgaaatgtatctttttcttattgctttaggtaggcttactttttgatcattcttaattgttgtgtgacattaaaaggwgtctattttatatgtatcatttgctatagatgtgttaatgtatatattgctggtatctaaacaaagtttattttttaattttcatatttcatgcagcattttttcaagtgttcttactaatatcttatttataaattttgggagcatcgctgtgtgcaaatattggaaagtatggcaggtgtctttgtattcctttctaacaattaaaatgtttgtcagttattgtcgttaatgtgcttactgtggtggaaaagactttcaatgcaatatggaaaggaagtggttttactggtgttcttactgtgttcctggtttcaaatagaaaatttccaacatatataaataaagaatgatggtttctgtaacatatatatatatatacacacacatatgtataatatgtacatatgctacacacacatatatatat

SEQ ID NO: 335294 - DNA, 584 bp, Homo sapiens
ttgaacaccttttctttatgcaacatttgggtttcctctttggggaattgcaaagtcttttaatagtttttgcctttgaaatgtatctttttcttattgctttaggtaggcttactttttgatcattcttaattgttgtgtgacattaaaaggtgtctattttatatgtatcatttgctatagatgtgttaatgtatatattgctggtatctaaacaaagtttattttttaattttcatatttcatgcagcattttttcaagtgttcttactaatatcttatttataaattttgggagcatcgctgtgtgcaamtattggaaagtatggcaggtgtctttgtattcctttctaacaattaaaatgtttgtcagttattgtcgttaatgtgcttactgtggtggaaaagactttcaatgcaatatggaaaggaagtggttttactggtgttcttactgtgttcctggtttcaaatagaaaatttccaacatatataaataaagaatgatggtttctgtaacatatatatatatatacacacacatatgtataatatgtacatatgctacacacacatatatatat

SEQ ID NO: 335295 - DNA, 584 bp, Homo sapiens
ttgaacaccttttctttatgcaacatttgggtttcctctttggggaattgcaaagtcttttaatagtttttgcctttgaaatgtatctttttcttattgctttaggtaggcttactttttgatcattcttaattgttgtgtgacattaaaaggtgtctattttatatgtatcatttgctatagatgtgttaatgtatatattgctggtatctaaacaaagtttattttttaattttcatatttcatgcagcattttttcaagtgttcttactaatatcttatttataaattttgggagcatcgctgtgtgcaaatattggaaagtatggcaggtgtctttgtattcctttctaacaattaaaatgtttgtcagttattgtcrttaatgtgcttactgtggtggaaaagactttcaatgcaatatggaaaggaagtggttttactggtgttcttactgtgttcctggtttcaaatagaaaatttccaacatatataaataaagaatgatggtttctgtaacatatatatatatatacacacacatatgtataatatgtacatatgctacacacacatatatatat

SEQ ID NO: 335296 - DNA, 302 bp, Homo sapiens
gaaaccaagactcaaagcagccactcactctgtgtctactgcttcattcctttcatgctgttctccttataagaactaagttattattgaaatataatcaccccacctatatttcgagcasacgacctgagtagatcaaatgggtttgtaaacatttattggctgttttggtaaagtgggataatgtaatcatgcactctgaacttcattagccatgcaaaattccccacgtcagtatttacatttcaccagctaatttattatgcttctatatgctgtgattcaatcagcttcacacaatc

SEQ ID NO: 335297 - DNA, 302 bp, Homo sapiens
gaaaccaagactcaaagcagccactcactctgtgtctactgcttcattcctttcatgctgttctccttataagaactaagttattattgaaatataatcaccccacctatatttcgagcacacgacctgagtagatcaaatgggtttgtaaacatttattggctgttttggtaaagtggkataatgtaatcatgcactctgaacttcattagccatgcaaaattccccacgtcagtatttacatttcaccagctaatttattatgcttctatatgctgtgattcaatcagcttcacacaatc

SEQ ID NO: 335298 - DNA, 302 bp, Homo sapiens
gaaaccaagactcaaagcagccactcactctgtgtctactgcttcattcctttcatgctgttctccttataagaactaagttattattgaaatataatcaccccacctatatttcgagcacacgacctgagtagatcaaatgggtttgtaaacatttattggctgttttggtaaagtgggataatgtaatcatgcactctgaacttcattagccatgcaaaattccccasgtcagtatttacatttcaccagctaatttattatgcttctatatgctgtgattcaatcagcttcacacaatc

SEQ ID NO: 335299 - DNA, 613 bp, Homo sapiens
acagggaaccgagcttcaaagagaaacagtgacttgcccaaggtgaaattaacagagctagaacagggatattaaatctttttaattgaaatctgctctttccactgtaccatgccattggttatattacacctgcaaagatcaaactgcaacattttccatatacttatctaacttatatgcctggatttgtactggaattttgtaaaattcaaaagcaaattacttggcattatttgcatgccataacataaaacaaaatttgtttaaacttctgtgagccamttaaaaggattacatatcagttgaataattaattttattatggtacaacccatatcacatagatcatctaattgggaactgagggggaaaatgagctttatataactaatactttagatctccttaacttccatatgcatatttagtatgctaaaattccaaattaaaaataaaacacaagctgcaaagtgaatgaaaacagcaacagtccttttaatcgttggtcagtgctacataattagatatttatatttttaggaaagttaaaattttgtacattttactcaatgaagatcaagaataaatagcttgataatttcattataga

SEQ ID NO: 335300 - DNA, 527 bp, Homo sapiens
ccaatgttaaatatgcttactagaagctgcagaggatagctgcttcttaaagatgcatagtataaattagcttattaccagaacctgtttaatgttggttttactcaacatttttcaaacatatgtggttgcagatctcttttatgtgtaacaacaaattcccccaaaggctctgctgccctagtgagatgagattagtagtcaacttcagamacacattgaaggtatatcagaatactatcttttattagtgtagcgcacttaaaatttttattcgtgtatatatgtttgagctactgaatagtgagctataaataattcattccaaaataaattattttaactacatctttcattgtttatataatgcccaaataataaaataatgccttcagatattaataattagaaatatgtgtttggggaccccaatgccatttgcaatcattatctggtgtcacaattgggcagaataaaataaagtggaaatgaagtgactttgtggatagaccttaaagtgacacaaa

SEQ ID NO: 335301 - DNA, 527 bp, Homo sapiens
ccaatgttaaatatgcttactagaagctgcagaggatagctgcttcttaaagatgcatagtataaattagcttattaccagaacctgtttaatgttggttttactcaacatttttcaaacatatgtggttgcagatctcttttatgtgtaacaacaaattcccccaaaggctctgctgccctagtgagatgagattagtagtcaacttcagacacacattgaaggtatatcagaatactatcttttattagtgtakcgcacttaaaatttttattcgtgtatatatgtttgagctactgaatagtgagctataaataattcattccaaaataaattattttaactacatctttcattgtttatataatgcccaaataataaaataatgccttcagatattaataattagaaatatgtgtttggggaccccaatgccatttgcaatcattatctggtgtcacaattgggcagaataaaataaagtggaaatgaagtgactttgtggatagaccttaaagtgacacaaa

SEQ ID NO: 335302 - DNA, 527 bp, Homo sapiens
ccaatgttaaatatgcttactagaagctgcagaggatagctgcttcttaaagatgcatagtataaattagcttattaccagaacctgtttaatgttggttttactcaacatttttcaaacatatgtggttgcagatctcttttatgtgtaacaacaaattcccccaaaggctctgctgccctagtgagatgagattagtagtcaacttcagacacacattgaaggtatatcagaatactatcttttattagtgtagcgcacttaaaatttttattcgtgtatatatgtttgagctactgaatagtgagctataaataattcattccaaaataaattattttaactacatctttcattgtttmtataatgcccaaataataaaataatgccttcagatattaataattagaaatatgtgtttggggaccccaatgccatttgcaatcattatctggtgtcacaattgggcagaataaaataaagtggaaatgaagtgactttgtggatagaccttaaagtgacacaaa

SEQ ID NO: 335303 - DNA, 529 bp, Homo sapiens
ctgtgactcagtgtctcaattctccctctcccttcttcttataaggagacttgttattggatttagggcccacccaaaatctggatgaccttatcttgtaatccttaacctaattatatttactaagatgctttctccraataagttactgagggttaggacttggacatatcttttggggagctattattcaacccattttaaccccttatcccttagtttcacaaattggtcaagtccaatctaaattttgccagagagcaaagaaataaaagaatcaatgacaataaaattttcacaaagtcaaatgaattaaatgtagagaatggttctttattctgaggttagtcctccctagtttcttcttattaaaatgtgatagtaatagtagatggcaattattttaaaatgttttgtgtattttttttttttcttggcacattttggaaaagactgtactaatgcaatcaaactcctaaactgatttatctatcaatttattaggactcttatttgccagtggccaaaa

SEQ ID NO: 335304 - DNA, 529 bp, Homo sapiens
ctgtgactcagtgtctcaattctccctctcccttcttcttataaggagacttgttattggatttagggcccacccaaaatctggatgaccttatcttgtaatccttaacctaattatatttactaagatgctttctccgaataagttactgagggttaggacttggacatawcttttggggagctattattcaacccattttaaccccttatcccttagtttcacaaattggtcaagtccaatctaaattttgccagagagcaaagaaataaaagaatcaatgacaataaaattttcacaaagtcaaatgaattaaatgtagagaatggttctttattctgaggttagtcctccctagtttcttcttattaaaatgtgatagtaatagtagatggcaattattttaaaatgttttgtgtattttttttttttcttggcacattttggaaaagactgtactaatgcaatcaaactcctaaactgatttatctatcaatttattaggactcttatttgccagtggccaaaa

SEQ ID NO: 335305 - DNA, 616 bp, Homo sapiens
caattcaggatgagaagagtcctactcattattaaaatgtagtatacagctatatttaaaatagtgtagaaaaggtgcagaactagggagagagatcagtagtttaaaggaaaaagtccagaaatagacacaagaatatgaacatatttgacctagtaggtgtggcttttaaaaagaacaaatagaaggtggaatatttcatatatgacattaggataactgacaatatttggggaaaaaaaacaaatttaggtcaccagaataccatacattsagctatctactaactaactaatagtggcttaaaacaagacctgtttttattatctctcacagattctgtgggtcaggaatttgagaaaggcccatatgattgggtctggctcatggtttctcatgcagttgcagtgaaatgatggtttggagcaactgggttctggaacagcatctctctgtgtagtgtcagggcctcttcatgtggttccttctcatgggtgactttgggctgcctcacaatgtggaagcttcagggactccaatttcttacatcgtggtcgaaggcttcaggagcaagtatttcagcaaggaagacagaaactaaattgtattttgtgac

SEQ ID NO: 335306 - DNA, 630 bp, Homo sapiens
tatttaaaatagtgtagaaaaggtgcagaactagggagagagatcagtagtttaaaggaaaaagtccagaaatagacacaagaatatgaacatatttgacctagtaggtgtggcttttaaaaagaacaaatagaaggtggaatatttcatatatgacattaggataactgacaatatttggggaaaaaaaacaaatttaggtcaccagaataccatacattcagctatctactaactaactaatagtggcttaaaacaagacctgtttttattatctctcacagattctgtgggtcaggaatttgagaaaggcccatatgattgggtctggctcatggtttctcatgcagttgcagtgaaatgatggtttggagcaactgggttctggaacagcatctctctgtgtagtgtcagggcctcttcatgtggttccttctcatgggtgactttgggctgcctcacaatgtggaagcttcagggactccartttcttacatcgtggtcgaaggcttcaggagcaagtatttcagcaaggaagacagaaactaaattgtattttgtgactgtgctatggaagtctcacagcatcatttctgccacattctcttggttaacactggaaaaaaaaag

SEQ ID NO: 335307 - DNA, 638 bp, Homo sapiens
cccatatgattgggtctggctcatggtttctcatgcagttgcagtgaaatgatggtttggagcaactgggttctggaacagcatctctctgtgtagtgtcagggcctcttcatgtggttccttctcatgggtgactttgggctgcctcacaatgtggaagcttcagggactccaatttcttacatcgtggtcgaaggcttcaggagcaagtatttcagcaaggaagacagaaactaaattgtattttgtgactgtgctatggaagtctcacagcatcatttctgccacattctcttggttaacactggaaaaaaaaagtctgtccasattcaggggtagaggacatagatctgcttttctgatggaagggttgtcaatatcacggtaagaaaagtatgtggaatgagagagattgttcctggtaagaagagcatgtggaatgagaaagattgttccagccatctttggaaaatatagcctgccacactaagtcacaggttgctgactgggacctcttggatatatctgagggaaagtctcctcatctctctgcactgataactggcatcgtagatcaatgattttcaaatgttagcatgtgtcagaatcacctggaggcttcttaagacagagatttc

SEQ ID NO: 335308 - DNA, 635 bp, Homo sapiens
actttgggctgcctcacaatgtggaagcttcagggactccaatttcttacatcgtggtcgaaggcttcaggagcaagtatttcagcaaggaagacagaaactaaattgtattttgtgactgtgctatggaagtctcacagcatcatttctgccacattctcttggttaacactggaaaaaaaaagtctgtccacattcaggggtagaggacatagatctgcttttctgatggaagggttgtcaatatcasggtaagaaaagtatgtggaatgagagagattgttcctggtaagaagagcatgtggaatgagaaagattgttccagccatctttggaaaatatagcctgccacactaagtcacaggttgctgactgggacctcttggatatatctgagggaaagtctcctcatctctctgcactgataactggcatcgtagatcaatgattttcaaatgttagcatgtgtcagaatcacctggaggcttcttaagacagagatttctggatcctttggctgggtttctgatttgttatgttctggggataagaggatgagaatttgcatttctggtaagttccaaggtgatattgatgctactggtctgaggaacacattttgagaacctccattc

SEQ ID NO: 335309 - DNA, 635 bp, Homo sapiens
actttgggctgcctcacaatgtggaagcttcagggactccaatttcttacatcgtggtcgaaggcttcaggagcaagtatttcagcaaggaagacagaaactaaattgtattttgtgactgtgctatggaagtctcacagcatcatttctgccacattctcttggttaacactggaaaaaaaaagtctgtccacattcaggggtagaggacatagatctgcttttctgatggaagggttgtcaatatcacggtaagaaragtatgtggaatgagagagattgttcctggtaagaagagcatgtggaatgagaaagattgttccagccatctttggaaaatatagcctgccacactaagtcacaggttgctgactgggacctcttggatatatctgagggaaagtctcctcatctctctgcactgataactggcatcgtagatcaatgattttcaaatgttagcatgtgtcagaatcacctggaggcttcttaagacagagatttctggatcctttggctgggtttctgatttgttatgttctggggataagaggatgagaatttgcatttctggtaagttccaaggtgatattgatgctactggtctgaggaacacattttgagaacctccattc

SEQ ID NO: 335310 - DNA, 634 bp, Homo sapiens
caaggtgatattgatgctactggtctgaggaacacattttgagaacctccattctacattatagcacttgtttctttttgcttactactgtccttcatgtggatgtcacggcctgagtaagcaatccttttccatggttaaatccctttcaggattgttccagacccctatctgcattcatagtggtgctagggagatcagtgggctaaggagaataggagaaatttccaggctttgtgaatttcagccagcstgcacctctaccatttggagtgcaaaggttacttgagtttttgatggaaaggaatactacagaagataatttgttgccatctgaccccttaaaaaacttttgcctcaggtgccaaagataaagctcctccttttattaatatcttttatcaaagggttgctgataacctaagacaagttctatttacatatcactgtggtgatgggccctatatgacaagtgttgctatactgcccaaaacttttcaccaagtcagcatagtgacctgagaaagaaattacaagaggcaatctgggatcccaatatcaaatttaaatattcttatagtctccttttatggccttaaaaaatttcaggtgtaattaatccatgtgagaagac

SEQ ID NO: 335311 - DNA, 487 bp, Homo sapiens
atgattccccaagggagggttgtgggagagattactttttagaggtggtaataagttctgcatccttatgaaagaggyggggttctctgcaggttttcttcacactgggggttcccctggattgccattatgagctactcaaagatagcaatcaacaagctataattcagtaacaacaaaattaactgctaggatacagttttatactaatgagtattttgcagcatatgtattttataaaccaccttaaggcattaaagtgagttataaacatcttcagtggtatgattattagccatatctctccactaatgcaactacacaaatagttacattttaaataatcttaacctcccctctctttaaaatagtcattatctcactcagcacttcatattttaattccagtgtttattctaatttatttattaatactggatctaaataattttaggtttactttgatactaatagcacaaactccatt

SEQ ID NO: 335312 - DNA, 487 bp, Homo sapiens
atgattccccaagggagggttgtgggagagattactttttagaggtggtaataagttctgcatccttatgaaagaggcggggttctctgcaggttttcttcacactgggggttcccctggattgccattatgagctactcaaagatagcaatcaacaagctataattcagtaacaacaaaattaactgctaggatacagttttatactaatgagtattttgcagcatwtgtattttataaaccaccttaaggcattaaagtgagttataaacatcttcagtggtatgattattagccatatctctccactaatgcaactacacaaatagttacattttaaataatcttaacctcccctctctttaaaatagtcattatctcactcagcacttcatattttaattccagtgtttattctaatttatttattaatactggatctaaataattttaggtttactttgatactaatagcacaaactccatt

SEQ ID NO: 335313 - DNA, 434 bp, Homo sapiens
aacataacattcttagccctttgtgtatgaggagaaactgctcatattagcatgcacaccttacctcrttcactcctgagaatttctaaagggattagtggtattccttgctgttcacattctcattccctttaaactccgatatatacaaaagtgtggaaacaatatttttattttggggaaactctttaaaatagggtcaattaattttaactgcagcgtatttgaatggaaaaatagttatattaataaaatataaattacttctgtttagtagaaattcaagtcatgatctttagcttatataaaataagcagactgtaagcctcattgctgatttgtgaattccagagaccaaatagtagttatttgacttactgcaatgaagaatacactaaagtgataaatagaatcatcatttaaatgtgctgagg

SEQ ID NO: 335314 - DNA, 453 bp, Homo sapiens
gtcatccaatttgttagaaggtgataagttctgcataaaaaggaaaaaatagagctgggaacaacagattgggagtgctgggtatatgtttgtgggatagaagtagttgcaagattaaatagagtgatcaggttaggcctcagtgagatctaaacgtaaagtctgataatgtcaaggatctacattttatggtattatctatgtaattctttgttaatattatatgactgtaatattcaattgagtgattatatcatactttgcttattcagagctacggtggaacatttagattacttctaattttcacaactgtatttaatggtgctataaaygttatgagcaaagtttttgaactgtacatgtttgcaggcatggtggcacatgtctgtagtcccagctttttgtgaagctgaggttggcaggatcttgagcccaggagttaattcttgc

SEQ ID NO: 335315 - DNA, 464 bp, Homo sapiens
tggtgcaaccatgtctctttgaatctgaagacattagttttaagacacataattttatatactattaagaagttttaaatgctgtcaattaaactatgtcatgccaccagttgtaagaagaatcccaattttagaaatgttgacatgtgttcttagaatccatatgtacagtattaacatttttaaccaaactgtaagattcccaagaacaagaaacttaattctgcttaccctatagagattttcatatggtagacaataatttttgtttaatttaatcaaatgtagattaaaatccagttaaaagtttcccagggggttagggacgctcyctcaatctatgaagagtcataatgaatcagtagcttacttaaataagttcagaggaaattccaatcaacctgataagcaaatccctccttattggaagtacaaagcataaagtattttgatccccaaatgta

SEQ ID NO: 335316 - DNA, 635 bp, Homo sapiens
aaataagtgaaaaaccagctgcatccatcaaagtcattaatgaccttagaaagaaacttcataaatgcaagcatggatggatggaaggaaagaaggaaggaaggaaggaacaaaggaaggaaggaaggaaggaaggaaggtaggaaggaaggatagagatgaatttgtggtgaaacaaggaataagatgaagaaactctcagtggaaatatagacatctattgaaaaattagagaaatattcagaaagtatgtctttatcttcaatggttaagatttrtatcaagcatgattattctaagtcttagattttcttgccaattttgctatatatataattaactttatattatctggtgggataaatgaatatagcatctcatattgctttatagacataggcaagactttgcttttcctagaatcctagacttatagaggtggaaataatattagtgaccattacatttactccaaatgttttatagatgaggaaactaaaatcgaaagattgtccatgacttgcctaatgcattcagccgctggttaagaaccaatgcatccagtaaataagcttttactaaagaatgccagccacagagactgatcagagttaagaaacacaattagaaaaaga

SEQ ID NO: 335317 - DNA, 411 bp, Homo sapiens
gacttgcctaatgcattcagccrctggttaagaaccaatgcatccagtaaataagcttttactaaagaatgccagccacagagactgatcagagttaagaaacacaattagaaaaagaagctatactcttttgttatttgtgtgaggagacagtgtattgggagagaatgtaaaaaagcacagaacacagacaaatgggatgttagcagggacacttgaaatactgcccaaagaaacattctaggagactgggaagcccatgtaattattgtttaataaaagcagcttgatatttcaatataaaagcaagaatggctgaaaagtgagcaaacctctcattaaaaaccactcttaaattctcctttctggcttcatcagaatatcaaaggaaataacacatttttttctata

SEQ ID NO: 335318 - DNA, 611 bp, Homo sapiens
gacttgcctaatgcattcagccgctggttaagaaccaatgcatccagtaaataagcttttactaaagaatgccagccacagagactgatcagagttaagaaacasaattagaaaaagaagctatactcttttgttatttgtgtgaggagacagtgtattgggagagaatgtaaaaaagcacagaacacagacaaatgggatgttagcagggacacttgaaatactgcccaaagaaacattctaggagactgggaagcccatgtaattattgtttaataaaagcagcttgatatttcaatataaaagcaagaatggctgaaaagtgagcaaacctctcattaaaaaccactcttaaattctcctttctggcttcatcagaatatcaaaggaaataacacatttttttctataaactatcagatattcttttacagtcattcttggtttgttctgaaagcccttaagcattctaagtgccaactttgtcaggtatatatccacattctgcatctttacatgcatacatccaaatatctacctaaatatacaaactattattgctatttagtgtttcaaaaactgaataattagcatagtgatgcaaatttgag

SEQ ID NO: 335319 - DNA, 401 bp, Homo sapiens
ttttaactttcctaaaaatataaatatctaattatgtagcactgaccaacgattaaaaggactgttgctgttctcattcactttgcagcgttgtgttattatttttaattwggaattttagcatactaaatatgcatatggaagttaaggagatctaaagtattagttatataaagctcattttccccctcagttcccaattatatgatctatgtgatatgggttgtaccataataaaattaattattcaactgatatgtaatccttttaattggctcacacaaatttaaacaacattttgttttatgttatggcatgcacataatgccaagtaatttgcttttgaattttacacaattccactacacatccacgcatataagttagataagtatatggaa

SEQ ID NO: 335320 - DNA, 617 bp, Homo sapiens
cacaatctataatgaaattatcaagctatttattcttgatcttcattgagtaaaatgtacaaaattttaactttcctaaaaatataaatatctaattatgtagcactgaccaacgattaaaaggactgttgctgttctcattcactttgcagcgttgtgttattatttttaattaggaattttagcatactaaatatgcatatggaagttaaggagatctaaagtattagttatataaagctcattttccccctcagttcccaattatatgatctatgtgatatgggttgtaccataataaaattaattattcaactgatatgtaatccttttaattggctcacacaaatttaaacaacattttgttttatgttatggcatgcacataatgccaagtaatttgcttttgaattttacacaattccactacacatccacgcatataagttagataagtatatggaaaatgttgcagtttgatctttgcaggtgtaatataaccaatggcatggtacagtggaaagagcasatttcaattaaaaagatttaatatccctgttctagctctgttaatttcaccttgggcaagtcactgtttctctttgaagctcggttcc

SEQ ID NO: 335321 - DNA, 619 bp, Homo sapiens
aatatcaatttttccatacttttgccatcacttgttattgtctatctcttacattataaccatcctagtggattttaaggggtatctcattgtagtttaatttgcatttccttagtaaatgatgatgcttattaatcatttgtataacttcttgggagaaatgtctaacactttacccattttaatgggttatttgttatattgtcattgaattgtgatacttatgtaatctggatacaagttccttatcagatatgtggtttgataacattttatttcattgtgtggattcttttaacttcctgatgttattattcataccacaatgtttcactttgaatgaagttcaatttatcttttttttttcctttggttgcttgtacttctggtattaaatctaaaaagtcaatcataaagactaactcctaagtcttctaagagtgttatagttttatcttcttacatttgggttcaattttattgttttgtcaatttaacgcgtataagccaatacattaattctaagccaatgaatacatgttcattakagaaaaatcagaaaatatgtacatgaaaaaaaataaaacaaaatacattcataattctatttattcaaaaa

SEQ ID NO: 335322 - DNA, 566 bp, Homo sapiens
gaacaaggaatatcattataaaggttgggagatggaaagtaaaagatttaccatgaccttcaatgatgagagaagtcttgagccttgatagaagttttatttattgttttcttttttaatggcttttcgagtttgagactgaggttttagagtaatataatcatgctccttttctattccaagttcaaagccaactgataagtagatgctgttatcaaaaagatgcasatttttaaaatcagttttattgaagataagattacattatatgatgcactttagcctattactatctatcatattcctttatgtaaacttatcactcatctctagtagatctgcacaactgccggcctccccagggtgacaacggcacaatataacttgtacatctgaggacactccacaaatgagaggaaacctgaagttgctgaaccaagcctgcttatacctgtgttcaaaattccttaatcaggtgatgatagggacacgagacagggaaatactgtgtagaaaagggcagttccccagcaaaggccccccaccctcaagcatgaatactctca

SEQ ID NO: 335323 - DNA, 566 bp, Homo sapiens
gaacaaggaatatcattataaaggttgggagatggaaagtaaaagatttaccatgaccttcaatgatgagagaagtcttgagccttgatagaagttttatttattgttttcttttttaatggcttttcgagtttgagactgaggttttagagtaatataatcatgctccttttctattccaagttcaaagccaactgataagtagatgctgttatcaaaaagatgcacatttttaaaatcagttttattgaagataagattacattatakgatgcactttagcctattactatctatcatattcctttatgtaaacttatcactcatctctagtagatctgcacaactgccggcctccccagggtgacaacggcacaatataacttgtacatctgaggacactccacaaatgagaggaaacctgaagttgctgaaccaagcctgcttatacctgtgttcaaaattccttaatcaggtgatgatagggacacgagacagggaaatactgtgtagaaaagggcagttccccagcaaaggccccccaccctcaagcatgaatactctca

SEQ ID NO: 335324 - DNA, 566 bp, Homo sapiens
gaacaaggaatatcattataaaggttgggagatggaaagtaaaagatttaccatgaccttcaatgatgagagaagtcttgagccttgatagaagttttatttattgttttcttttttaatggcttttcgagtttgagactgaggttttagagtaatataatcatgctccttttctattccaagttcaaagccaactgataagtagatgctgttatcaaaaagatgcacatttttaaaatcagttttattgaagataagattacattatatgatgcactttagcctattactatctatcatattcctttatgtaaacttatcactcatctctagtagatctgcacaactgccggcctccccagggtgacaacggcacaatataacttgtacatctgaggacastccacaaatgagaggaaacctgaagttgctgaaccaagcctgcttatacctgtgttcaaaattccttaatcaggtgatgatagggacacgagacagggaaatactgtgtagaaaagggcagttccccagcaaaggccccccaccctcaagcatgaatactctca

SEQ ID NO: 335325 - DNA, 566 bp, Homo sapiens
gaacaaggaatatcattataaaggttgggagatggaaagtaaaagatttaccatgaccttcaatgatgagagaagtcttgagccttgatagaagttttatttattgttttcttttttaatggcttttcgagtttgagactgaggttttagagtaatataatcatgctccttttctattccaagttcaaagccaactgataagtagatgctgttatcaaaaagatgcacatttttaaaatcagttttattgaagataagattacattatatgatgcactttagcctattactatctatcatattcctttatgtaaacttatcactcatctctagtagatctgcacaactgccggcctccccagggtgacaacggcacaatataacttgtacatctgaggacactccacaaatgagaggaaacctgaagttgctgaaccaagcctgcttatacctgtgttcaaaattccttaatcaggtgatgatagggacacgagacagggaaatactgkgtagaaaagggcagttccccagcaaaggccccccaccctcaagcatgaatactctca

SEQ ID NO: 335326 - DNA, 504 bp, Homo sapiens
ttctcatagtgatgaatgcctagattgtctccaaaccttcctaacactctgtaaattgtaataagccttctcttatgtgtctatgcagggttcccctaaggatgtatacttcttataaagctagaattagagaggaacttctggataacaaaagttctttgccaaaagcctttgtatgtaacasagaaactctggatacattttactttatgttgggaaagagagaagcaggaccactttcactgctactgtgcaacacagcactacaggtgctggatactgcgatcagttaaaaaaatatatacacaagacttttattggataggcaaaattttcagataaaataattatttcatatacaacccaagagaggtcagtaagattgttgaatgcaaaatccaataatagttctctattccactcaagaccacttaaaaatgtaatagatactatttgcgataaaacaaaaactataaagcacttaggtgatttactaataaaggc

SEQ ID NO: 335327 - DNA, 504 bp, Homo sapiens
ttctcatagtgatgaatgcctagattgtctccaaaccttcctaacactctgtaaattgtaataagccttctcttatgtgtctatgcagggttcccctaaggatgtatacttcttataaagctagaattagagaggaacttctggataacaaaagttctttgccaaaagcctttgtatgtaacacagaaactctggatacattttactttatgttgggaaagagagaagcaggaccactttcactgctactgtscaacacagcactacaggtgctggatactgcgatcagttaaaaaaatatatacacaagacttttattggataggcaaaattttcagataaaataattatttcatatacaacccaagagaggtcagtaagattgttgaatgcaaaatccaataatagttctctattccactcaagaccacttaaaaatgtaatagatactatttgcgataaaacaaaaactataaagcacttaggtgatttactaataaaggc

SEQ ID NO: 335328 - DNA, 531 bp, Homo sapiens
catctgtactgtcctctttctttcagacactacatccacgtggctctagcttgaaagaatatcctaaaaccagccacttctcaccacttttgttgctgccatcctgatctgagtttgttacctacattgtttccagcattgccctctccagtttttttcttctcagcaagcttgagcctgccagagagatctttaaagacgtaggtcagattgtatcactcttttaacactatacattggattccatttctctcagaaaagtaaagtcctttacaaaggcctacaaggttgtacataatccatactctccttacttctccggcctcattactttttgctctcttcctatctcatgctgccacaatctgtgcagacttctttggsttccttgaacaaatcatttatgctcttgcactaacaattttctcagtgtaaaatgctcttccttcatgtattttcttatttagtttcctcatcttcaaatatttgttcaaatcataccttcttaatgaagcccatgctgatgacccc

SEQ ID NO: 335329 - DNA, 443 bp, Homo sapiens
tagtttggactaatcgtttttccccaagtatgtaatgtgcagcctcacctcttatttttacttatgctgcctcccccatctgaatttccatctcttacttctaattatttttcaaggcgtaacaaaatagcatggagaggctaatctttccagatatgaatatatttaagattgggtagaactaaattaatgggtcagaaaagagtggtgaataacagatttaaatacacasaaaatttggtcaatgaaaaagcgtttggttgctctgcagctcaaaccccttgaggaagggggagcacgcacacgggcaggtgcacaggcctcggcaagtgctcctgctccacggtagtgtctatggctgggtgtctgcaactcccgtgttacaaagctctttcagctttgccgtccgcagacggcttcagtgttaatcagctcaatgaacc

SEQ ID NO: 335330 - DNA, 471 bp, Homo sapiens
aaaactgaaaatcattcatatatcttcctatttcttctattctggatgaggggtaagaactgttcttctgatagtttcagtattcaccacaacaacaaaattcagcctatctactccttaactaacctagttcttacaaatccatctatttgcataaaaagcagttttgctgccctwcaatcaacaactatcacttttaatgattcttgtttttctgagcaagtcatgcttgcttttctcacttattggtgtgaaacaagaccacttcccaaaattggctggtttggattttagtgctatgccttctcctggctgtccctagcattttattaggaagccataatttttatatttgaaatacaggcaatatttgtacttgaactgtgaaaaaacacccgaggaaagcaggcaaaacaaaaggtcacatcattagttgggtgattagaatacacggttccagggaagcaagta

SEQ ID NO: 335331 - DNA, 471 bp, Homo sapiens
atgcaaatagaagaccaattccagcacttggcttgagtctacacagtcttggagtgatatttctctgatcagatgytgagaagttcaagttgcaacctgtaggcctaaatctcagattcatcatctgttatttgaagatggtaccctatgggttgctgatgagatcacagatcagaaagtattttggatatggttgcacacctgaagttttctctctaccacacagagtattgtttaaaaaccaggaccacctagaatagtatatggcaaatgggagatattcaatgaatatctgttgaatgaatgaatgaatgagtgaatgaaaatagaggcaataagtaaattatcaatgcttttacaatgtggcaatatccactatatcggattctttggcctatcacagtaagagtagaatttataaatagtcaaggtttcaaacaggtaaaagatctctgagggatcaatattaca

SEQ ID NO: 335332 - DNA, 530 bp, Homo sapiens
agtgcctggccttattttaagttcagatcctatcctctattacagaatctttgttgtgacaggtgaaagaatggctcctgcactgtcttcaatggtcccaaccccacccttcaatggaaatgcatcacatgacatggatttcagcactgaccgtcttttcccgatagtcagtagagaaactattccaaaatatcctaactactctcttccttttacttcatggctacttgggccagtcagcctctttgctcctcttctcagagtcccacttctggatgagctatccgtcattctgctccactttggatatggstcagttggggtgggaagtaagacctatggtcatcttcatcaagtgcgggatccaactggaatgccaagactaaccctcgctgagcacacctgcttttcctttttgagtgaaaggaataatttgtttgtttctatcttagttatttgtattactttcttcactattcctcgaaactggattttgtctttttttttggtcttttttctttttctttttt

SEQ ID NO: 335333 - DNA, 581 bp, Homo sapiens
agtgtataaaatggggaaggtatctggtctacttcatgacatcaggttagagttcagactcaactcttgaggaagaagttgtgctatacatcttttgatatctcctgcatctaacacagtgcttaacatgtagaaagcttccaataaaatattaaagatggaatgaggtcacatgcacaatggcattttgacgaacacaaagcatgcacgacatcatgcgattattaatattgatgaggaaagagtattcaaaggaaatttccataggattcctgagagatgaataataaattgagggtctctggcaatcgttaacattgttgtcaaagttcaacaggcatttccttctcaaaaacaatgaagggaaacccattctactggttcctgctacaactggggatattatgccaaaagggcaagaggaatagagattcctatgtggccctttttgaatttcrgaattgagacacactctacccttccccccacccagtctcccctaattaaaaaaaaaatagcaatagcctttaatataagcaaacaggaagttttacattcaccaaatgctacagttcaccttc

SEQ ID NO: 335334 - DNA, 460 bp, Homo sapiens
tagggcatggtggctcacacctgtaatcgcagcactctgggaggctgacacaggaggatcatttgagtccaggagttcaagaccagcctgggtgacatggcaaaaccccatctctacaaaaaaatacaaaaattagctgggtatggtagcacatggcctgtgtcctagctactcgggaggctgaggtagaaggactgatttagccctgggaggttgaagctgcagtgagccatgatcaggctgacagagcaagaccctgtctcaaaagcagatraaaatcaaactgtcatctcagccctcccatctccaacctgacccccaccccaagcattcaccgctactaagggagtgctggttgacaaagactccataaaacagagcttgaaaatcgttgacttttgattctttttattttaaagatgaggaaactggaacaccgtgaggaaaagtgaagagatta

SEQ ID NO: 335335 - DNA, 603 bp, Homo sapiens
cttttaaacaaccagatcgcaggtaaactaactgagcaagaactcaattattaccaagcgggtggtgctaaaccattcatgagggatctgaccccatgatccaatcacctcccaccaggccccacctccaacgctgggaatcacatttcaacataagatttggagcagacaaacatccaaaccacatcagtccactagtttgttagttactcatttatccactgactggctgactggttacggtagacataacamtgtctacctcccaaagatattaatattttactccatcaacatgtgacatggcaaggagaaattaaggctgcagatggaattaaggttgctaatcagtaacacttaatataaatggatgatacaagtgggccaatataatcacaagaatctttaaaagtggaagcaggagaagagtcattgtccaggtgaggtgatgttagaagttctcccctagccattgctggcctcggagatgccaggaggtcaagagctaaggaatgtgggcagcctgtaaatctagagtaggtaaggaaacagatcctcccttagggcctccaaaaagaattgcagccctgccagtaccttgat

SEQ ID NO: 335336 - DNA, 603 bp, Homo sapiens
cttttaaacaaccagatcgcaggtaaactaactgagcaagaactcaattattaccaagcgggtggtgctaaaccattcatgagggatctgaccccatgatccaatcacctcccaccaggccccacctccaacgctgggaatcacatttcaacataagatttggagcagacaaacatccaaaccacatcagtccactagtttgttagttactcatttatccactgactggctgactggttacggtagacataacactgtctacctcccaaagatattaatattttactccatcaacatgtgacatggcaaggagaaattaaggctgcagatggaattaaggttgctaatcagtaacacttaatataaatggatgatacaagtgggccaatataatcacaagaatctttaaaagtggaagcaggagaagagtcaktgtccaggtgaggtgatgttagaagttctcccctagccattgctggcctcggagatgccaggaggtcaagagctaaggaatgtgggcagcctgtaaatctagagtaggtaaggaaacagatcctcccttagggcctccaaaaagaattgcagccctgccagtaccttgat

SEQ ID NO: 335337 - DNA, 478 bp, Homo sapiens
aatgcatggcattcttttaactccctctttttaggaattgaaatgatttttatttgcttttgtgttgcttcattttcttactattttctaaagttgcattgtgtcatgggacttcacttggacccattttttttgtgtgttggctttgctgaagaggaatattttttgtttttttgaaaattgaggttttctgaaatctggttttatttctcaataamaacacaaaaattcatattttgattttattttcttatgtatctgctggttcttcatgggtgttaataaaaagtaccctaggtaataaagaaaaatgcactatgccccttgcagagattcactaatcagagttcgtattcctttcacacaaatattccaacatgccacgttttcaacatatttagagcagcccagcacacatttgtagacattcatcttatatttcgagtaggatgcctttgctctcgcccttaagtcttgc

SEQ ID NO: 335338 - DNA, 591 bp, Homo sapiens
atatttgtaaggaaatgagacttctgctgttatatgcatggagcttgtgtttctagatcggttttgagagagagtaaactgttggggcccattaaagtacagccttagcctatggaggcaaagsagatgagtttcatatgaatttcattcttcttgtcagtcaaccaaggaagagatgggttttaggtgaacaataaagatgagggtctctctgttggactcagtgtttccactatggtgtacaagatttagtatagctaggaatggactcttagatattgagagttagagaaagatgaaaaatcaggaattatcttcagccacatggagccacaagcaggaagtgcatagggtcatacttggtaaatcagattatctacattcacggtcctctttattttggtgttgatatcccatttagcaaagctgaatgtgaccattctagcattgtcttcatcatgctagggttataaagaaaagactctttcatccacacttaggctaaagtttgaaaaaatattgagtaattacccctccaacactacccaaggccgatgaggcagtggcaccagaaatgctacaaggaaagtg

SEQ ID NO: 335339 - DNA, 517 bp, Homo sapiens
gcccactcaaaggaaacagaagcttacctcagtgacctatgttaattgttaaaacctgtatttatgaatatatacagacagtccagaccaccagacatgtgagggaaatcaattctaaaggaggaccaagatgaacaaacrgaacattgactctggaagacagaaattaatcaaggaacaaaacaggattttagcaaagcctaattgtattagtgattctggccattttttaaaaggacaagctgcaatgaaagagaagaactcaaaaatagagtttttttaattaatgtttctaaacaggaggcagttgtgttccccagtggacttttaacaatgtctagaagacacttttggctgtgaccagtggggttgggggtgcaaatggcatagtgggcagacgccggggatgctgctcaacatcctacaatgcacaggacagcccccaaaacaaagaattatgtgtcctaaaatgtcaatattgccaagattgagaactcctgctctaaattaaaactat

SEQ ID NO: 335340 - DNA, 517 bp, Homo sapiens
gcccactcaaaggaaacagaagcttacctcagtgacctatgttaattgttaaaacctgtatttatgaatatatacagacagtccagaccaccagacatgtgagggaaatcaattctaaaggaggaccaagatgaacaaacggaacattgactctggaagacagaaattaatcaaggaacaaaasaggattttagcaaagcctaattgtattagtgattctggccattttttaaaaggacaagctgcaatgaaagagaagaactcaaaaatagagtttttttaattaatgtttctaaacaggaggcagttgtgttccccagtggacttttaacaatgtctagaagacacttttggctgtgaccagtggggttgggggtgcaaatggcatagtgggcagacgccggggatgctgctcaacatcctacaatgcacaggacagcccccaaaacaaagaattatgtgtcctaaaatgtcaatattgccaagattgagaactcctgctctaaattaaaactat

SEQ ID NO: 335341 - DNA, 607 bp, Homo sapiens
actgtagggtcagaagaaagggagactggactctggtctcggctagactgaggcattcccacctgtgctgtcaaaggactctttagcagctttcctgtgggtgtttccaatccttatcacaccttagaattacctgaggtgcgtttttttgtttttattattgagacagtttcgctctgtcacccaggctagagtgcagtggtgctgtctcagctcactgcaagctctgcttcccgtgttcacgctattctccttcctcagcctyctgagtaactgggactacaggtgcccgccacctgcgcccggctaatttttttgtatttttagtagagacagggtttcaccatgttagccaggatggtctcaatctcctgaccacctgaggagcttttaaaataagacctgtgcttgagacttcctcccaaaaagacagtttattgtttttagtgtttctgaatgttgtcagagaataggacagaccacaaatgacttaaactgtgattttatttttaaggctcccaggatgtgatatttccaagggaagggataagttagctagcattggtggctactctgttagaaagtagctagcattggtgggagaccc

SEQ ID NO: 335342 - DNA, 597 bp, Homo sapiens
aagttgttacactgtatcaatagtttgttcttttttgttgctgaatagtattccacggtatgaatctatggatctctttatccatttaagtatatttaagttgtttgaggtttttggctatcacagataaagcttctataaacatttgtgtacagctttattgagggaacttcaagttttcagtttgcaaagataaatacctagaagtaggattgctggatcgtatgataaatgtatgtttaaatttttcagaaacgactgtgtttaagaactttttgtgtaaccccatgtaacaaagtttttcttcttttttttctraaagttttagagttttatgttttgcaaaggagatctctgatctattttgagttaatttttgcataagatgtgaagtttaggtcaaggtttactttgtgcatatggatgtccgtttgttccaatactatttgttggaaaaaattttttctccaatgtgttttttacctttgtcaaaaatcagttggccatatttgtgtgggtctgtttctggactttagaaacaattccattgttctatatgtccaactcttttctgattagtgtctgatttctgacatt

SEQ ID NO: 335343 - DNA, 560 bp, Homo sapiens
gtggttcttcaaattctgcttttcccagtctacccactatcattatttttggagtcctcagataactgctccatgctttctgtctagggtttttatttgcattcagtgagagagacagggtgaaagaaactgactctgtcttgccccagattggtcccaatcagtttaaatattcattcttgrcttatgattccctggcaggcatacagggatctgtacccttaattacttaagtcccttacttttttttttttttttttttttgagagagagaggttttcactccatcgccctggctggagtgcagtggtgtgatcttggctcactgcaacctccacctcccaggctcaagtgattcttatacctcagcctccggaatagctgtgattataggcatgtgggcaccacgcctggctaatttttggatttttagtagagacagcatttcactatcttggccaggcgggttttgaactcctgacctcaagtgatctggctgcctgggcctcccaaagtggttccttactgtttgatatgattcaggtctctcaagttgtaga

SEQ ID NO: 335344 - DNA, 625 bp, Homo sapiens
ctacaagtcttctgatctagtttgctggcttcctcttttcctgacacttaaaagtcaatagtggctaaatttattattcagccaaaggttatctttcttgtaagaatttggaggctaatatggctactatatakgtacaatacgccaggcactgttctgaattttatatatatatatatatatatatattttatactttaagttctagggtacatgtgcacattttatcctcatgacaactgttagaggtgaatgttatattgctcttcttcctctcaatttgcagatgaagaaattgaagaacaggaaggataatctatcatcacaaaactagtaaacagaagtattaggattcaaatcaggcagtctgcctccaaattctacctatgttctgagctactatgctagaggttatctccaagaacttagaaataaaggaaaaggatcagcctctgagaattaaaccctaagatggtgattaagagattagaaaagaaatatggaaaatcgcctgaaaaacaaaaaaaagaacagaagggaagaagagaagaaggaaaaaaatgacttttcaaccatggcacctgactgtaaacttttttaaaaaaatagttggaatgaaagttat

SEQ ID NO: 335345 - DNA, 464 bp, Homo sapiens
gtttaaccaccatgtatcaccaaaaaattataaaggtgcttccatctcctagagaggattagaattatagacgggggcaagaaasaatgccagtcatactttaatctgggaccctcaccctacagacaaaaatgtaagaatataaggccaaaaaacatgaaataagtttcctaacaccatacagctggtcaattatttagtcacaagaattgttgtttataaaaatctaacttaaaaaaaatcattagcaaacctaggacggcatcccaccttgctgactctcaggagcggctctttttgtaatactatcctaaatagcatccttctttgtgcaggtaagattaatggcaaagggtatcccagaaaacaataatgggagagaatgagaagatcacatgcctatatataatttatgagtctgatatttaaataggtcaaattctctattctttgattcattaact

SEQ ID NO: 335346 - DNA, 598 bp, Homo sapiens
acatacggaactaaccatgcccttaattaagaaggcaaaatttggctgcagttagcacacaattaaagcaacttaccaagttttaccttaaagttaaaaatgcctaggagttaactgaaactactagaaatasatttacatgaaaggtgtataagaacagtaaaatgtgttttttagtaaaaggttataagaaggcatggaaatgtaaacttttgcctagagttaaaggattgttttgagttaaattaggaaaaagctgaaggttaaaagaagtagtgcaacaactgtggaaattaatcttgcagaagaggttcttcatgtgaacgtattgactaaattcaaaaaagggtattatatggtttttctgtaaattgagcactcaaataaatgcataacaaggttttcctatggcaccaatctgctctttggcaacatttgtaagtggttataaaaggtttttgcttctttaaaatttctgagtcatcattttggcaaaataattaccttacggtactctggaattctattttataatatcaagtattttacacctcaaacatttaacagccttccgaaaatcaaacttcagtttcaaaat

SEQ ID NO: 335347 - DNA, 573 bp, Homo sapiens
tcccttcctgaacaattcagtcccaaagccactgggtgaagtagagcaaggtctactctggtggtgaaggagtttggagaacagagctacagtgrtccagagcagagtgtcagagtggcccagggcctaatcaagatgagaagggtattcaagtatggaggcagaccacagcagagttacagagcctgacagaatgaggaaagagtccttgaagacaggtaggctaatatgggctgttggaactaaaacaagttaaggaaggccaaataggctacataatgtctgagcatggagttaaaacctgagtagtatgaggagggcgcccatgtgatgggaagggactgaagtgctttgtcctagctaagtagagtgacgaggtctcccatgcagagcagtgacctagcaagggttgtgagagcctgagtttggtgaggagggtatctgtgctggggtggcagtagcaatgggagactggttacatacagaaggatgggtcaaataagtaaataaaataaggataatttgaatctatcagaaaagagagtgaaaatatggcagtagagaaaactacaa

SEQ ID NO: 335348 - DNA, 485 bp, Homo sapiens
ttcacagtctatacatccaacaaacaactaatatccacaatctacaagaaactcaaatcagcaagaacaaaacaaacaatcctatcaaaaagtgggcaaaggacatgaataaataattctcaaaagaaaatatgcaaatggccaacaaacatatgaaaaaatgctcaacatcactaattaccaaggaaatgcaaatcaaaactgcaatgtgataccacctcactccttcaagaatggtcatattcaaaacaccaaaaaataatagttgttagcatggatgtggtgaaaaggaacacttttacactgttggtgggaatgtaatacaactastatggaaaacattttggagattccttaaagaactaaaagtaaatcaaccatttgattcagcaatcccactcctggatatctacccagagaaaaagaagtcattatatgaaaaagacacctgcacacacacgtgtatagcagcacaatttgcaatt

SEQ ID NO: 335349 - DNA, 629 bp, Homo sapiens
gggggagtgggaactatagtaaactgaaaagttcatggctgtctaaaggcatatatattcaattatttttgaagtgttaaaacaacaaccaaaaaaaaaaaaaagctgtatgttatcccaaaaaacaaaacaaaaataaaaaaaactaccaccaacattaaaacttacatttcagtgcctcttagttctggacccagttaaatccccttaatctttttgtagataccatgaataagattctaatgttttcttcaattcattatctggttataccttgggtgctttaaaagcacttttagcgggtggtagcttccatgctgaaggggatctccacataggtaaaggctgcactggaatatcttcatatggattttctttggtgggatcttaaaaaataatttaaaaaaatgtttacatgaacataattaaatgcaaagataaccacagctggcaaaagaaagaaaaagctaactatgttcagctttcttattctacattgctgtagggatgtgggtttccagatcaacagcaattyaagcttatgggttcaacagagctaaaagaattctcaaaataatatattataaacatgtacttataagctgagcagtctatcacattagttgtaa

SEQ ID NO: 335350 - DNA, 591 bp, Homo sapiens
cttgggctgttctgaatgactgacctgttaatcccttacctcaaataatgtacaataaataaaaatgaattgagcattcactgtacttttctttccctttaggaagcaaaatgaaatttctgcaaaagaaatgaaatctctgattgtctccatcctgaatatacaacagaaagtgccaaagaaaatatttttctaagggtcaggatcccatgaagtattctacaaaattcttgaaattttaaaaggttaaagagcgagtcaggctgtyagaggaggattctcctgttgctgctgtagtaatcactggagaattgttgggaatggtctggcaccatgccatctttactctgtctccattttttttttatagcagccttttctatgtgattcttgggctcattctctgttttgtgctttgtctgtgaaagtagttgtgtttcacaaggaaaagccttgttgttgttacatttaaaaaatagctcaaagatgagaataatgagagaaatgctgagtttaaggtagtagagagacatgatggaaatggagaacactagccttatacacataattctcatcactgaactatcatgg

SEQ ID NO: 335351 - DNA, 596 bp, Homo sapiens
tgatataactgttacctatgatgatgacgatgatgatgataatgataactgtacagtcactgtctttctgaagttgtttggtgatcaagaatgtgtttagaactatctctttattagacaaagtcataaaccaaaaatttccaacttcctgtacatgttgaaagctttaaataaggatccttggatacaaaatatggtccacatggctgaaaattaattctatgacacaatattattctaaagtcatccttattttgaaagcctaaagattttcttttatggctataaaaataccaccaagctagacattttaattctgttgagatatacaaatagaattaccacagcagcctacaccttctatgatttctaaacacttaaacatcaatggttttgggaagatgctgttgtccttcamagttcattaaaagttcagatgccttttgtgaaagcccaacttttcttctacctgctaaattgtcttttcagaagtcttgccggatgttttctttgtttgcctctccatgttgctgcttaatttgatagatttcattttctagctgaacaatagtccgttcaatctcataattcttact

SEQ ID NO: 335352 - DNA, 560 bp, Homo sapiens
agcagggcattgtggcgggcacctggaatcccagctactcgggaggctgaggcaggagaatcgcttgaaaccggaaggcagatgttgcagtgagccgggatcgcaccattgccctccagcctgggtgacagggagagactctgtctcaaaaaaaataaataaggtaagtaaacaaggattggtgagaagatgaagggaggcagcacatataaagggtgcaggatggtgtctggcacatagtaggtgctcaattaatgttagtccctttccaccagcctgaggggactgtgtagatatttatgccctgtccgtggaatggtgactgatgtagggttgattgaccaggggtgtataatgtgtatgtgagctcatgtgagcgtgcatgagtgtgtatgtgtgtgagtgtatataaatgtgtgtgtgwgagagagatagtgtgtgtagggggtggaaaggtataatacagctatacccctataacaaaagacaggttaacaagagaaaaacatagcatatttatttaatcaaagttttacataacataggagcctttggaaatg

SEQ ID NO: 335353 - DNA, 614 bp, Homo sapiens
cctttattcaactaggacaactacattgttcaaatagaaagggaaacactatccaattcattctgtggggccagtatttttctaatacaaaaactagaaaaagagctaatatgtaaataaaactgtagaataatattctttacaaatataaatgcaaaaatcctcaccaaaacactaataagctgaatgtgaataagattacacaccataagcaagtaggatttatccagaatgcaaattyggcttaatatatgaaaagcagggtgatgtcaccaaaatggcagagtagaagcaatctggcttcattctcctccacagaaaaccaaatatatatatatatatccagtgcaaagattgcaaccagcaatgtcccaaaactcaaatatgagactgagacaatccctgggaccacagaaagattaaaaattctgagcagatggtaaaagaaatggacttctgtatccacaacacctctccctcaatctgccaggcatcgtgtatggaaaattcctcctgtactcacagtttttacactggaaaaagtgagatcaagataaacagccagctttcctgccatcttggcttccctttcagaaaagccattcttgccacaa

SEQ ID NO: 335354 - DNA, 576 bp, Homo sapiens
gggagaaaaaccactgggggcagccagaaacaaaggcaggaggcaaaaccagcaaccccacctgaaaaactctgctctttatctcagccaaaggaaaagtcaaatcatagtggctgttcagcagcaccacattgtaggagacaggcttcatgggtcttctgggcatgaaccagctttcccatctagctggggcatccccttttggatcatccttcccaaacaactggatatcccctctgggacacccttcccccmatttaggataggttgcgctctgaatatttgcaagagctgaggcaattctgagtgtaaggcaccatctagtgccaaaaaggaggaagagataaaagattaagggacattgggaggcaattgcagagaacatctaagcaaacatactctataccccacaaagacaaaaacaaaccaaacagcaaagactggaataaataactaatccttcaatgcagtcataggtgtagtccacaagaaacaacacagcaaacaggtcatagttatgacctccccaagtggacaaagcaaggagccagtaaccaaccctaacaagatagtaat

SEQ ID NO: 335355 - DNA, 576 bp, Homo sapiens
gggagaaaaaccactgggggcagccagaaacaaaggcaggaggcaaaaccagcaaccccacctgaaaaactctgctctttatctcagccaaaggaaaagtcaaatcatagtggctgttcagcagcaccacattgtaggagacaggcttcatgggtcttctgggcatgaaccagctttcccatctagctggggcatccccttttggatcatccttcccaaacaactggatatcccctctgggacacccttccccccatttaggataggttgcgctctgaatatttgcaagagctgaggcaattctgagtgtaaggcaccatctagtgccaaaaaggaggaagagataaaagattaagggacrttgggaggcaattgcagagaacatctaagcaaacatactctataccccacaaagacaaaaacaaaccaaacagcaaagactggaataaataactaatccttcaatgcagtcataggtgtagtccacaagaaacaacacagcaaacaggtcatagttatgacctccccaagtggacaaagcaaggagccagtaaccaaccctaacaagatagtaat

SEQ ID NO: 335356 - DNA, 660 bp, Homo sapiens
atagaaatacaaaggatcactggagactaacatgaacaactacaagttaaaaaattggaaaatctggaagaaatgaataaattcccrgatgcatacaacctaccaagattaaacctgaacagaccaataatgagtaacaagatcaaagtagtaataaaatgtctctcatcaaagaaagcccaggacctgatggctccactgctgaactctaccaaatgtttgaagaagagctaataccaattctactcaaaccattccaaaaaattgaagatggaatatttccaaacccattctacaaggctaacattatcctgatcccaaaactggacaaggatacaacaataaagaaagcagcagacaaaaacatctgatgaacagagatgcaaaagtcctcaaaaaatattagcaaactgagttcaacaactcattaaaaagattatttaccatgcttaaggggattcatcctagggatgcaagtatggttcaacatacacaaatcaacaaatgtgatacatcagcttaatagaacaaaggacacaaacgatacaattatttcaatagatgctgaaaaagcaattgacaaaattcaacatcgctttatgacaaaaactctcaacaaactgaatacagaaggaacatgcctcaaaataataactgctg

SEQ ID NO: 335357 - DNA, 579 bp, Homo sapiens
aagatggaatatttccaaacccattctacaaggctaacattatcctgatcccaaaactggacaaggatacaacaataaagaaagcagcagacaaaaacatctgatgaacagagatgcaaaagtcctcaaaaaatattagcaaactgagttcaacaactcattaaaaagattatttaccatgcttaaggggattcatcctagggatgcaagtatggttcaacatacacaaatcaacaaatgtgatacatcagcttaatagaacaaaggacacaaacgatacaattatttcaatagatgctgaaaaagcaattgacaaaattcaacatcgctttatgacaaaaactctcaacaaactgaatacagaaggaacatgcctcaaaataataactgctgtatatgacatacccacagctaacgtcatatggaacagrgaaaaaatgaaagccttccctctaagtctggaacaagacaatgatgcacactttcactacttttactcaacgtagtagtggaagtcctaggcagatcagctaggcaagagaaagaaataaagggcatccaaattagaaaggaagaagt

SEQ ID NO: 335358 - DNA, 579 bp, Homo sapiens
aagatggaatatttccaaacccattctacaaggctaacattatcctgatcccaaaactggacaaggatacaacaataaagaaagcagcagacaaaaacatctgatgaacagagatgcaaaagtcctcaaaaaatattagcaaactgagttcaacaactcattaaaaagattatttaccatgcttaaggggattcatcctagggatgcaagtatggttcaacatacacaaatcaacaaatgtgatacatcagcttaatagaacaaaggacacaaacgatacaattatttcaatagatgctgaaaaagcaattgacaaaattcaacatcgctttatgacaaaaactctcaacaaactgaatacagaaggaacatgcctcaaaataataactgctgtatatgacatacccacagctaacgtcatatggaacagggaaaaawtgaaagccttccctctaagtctggaacaagacaatgatgcacactttcactacttttactcaacgtagtagtggaagtcctaggcagatcagctaggcaagagaaagaaataaagggcatccaaattagaaaggaagaagt

SEQ ID NO: 335359 - DNA, 390 bp, Homo sapiens
gaaatcagacacataagactgatggaacagaatagagaacccagatataagtccatgaatttatagccaactcatttytgacaaagggatcaagaacatactagaggaaaggacagtcttttcaataaatggtgctaggaaaactagataagcagaatgaatctagacccctacctctcaccacatacaaaaaatcagatcaaaatggattaaagacttaaatctaagacctgaaactatgaaattacgagaggaaaacactggggaaatactttaggaaaatttgggcaagtttttttgggtaagaccttaaaaacacaggcaacaaaagcaaaaataaacaaatgggattccttcaggctaaaaagcttatatacagcaaagggaaca

SEQ ID NO: 335360 - DNA, 511 bp, Homo sapiens
tatagccaactcatttttgacaaagggatcaagaacatactagaggaaaggacagtcttttcaataaatggtgctaggaaaactagataagcagaatgaatctagacccctacctctcaccacatacaaaaaatcagatcaaaatggattaaagacttaaatctaagacctgaaactatgaaattaygagaggaaaacactggggaaatactttaggaaaatttgggcaagtttttttgggtaagaccttaaaaacacaggcaacaaaagcaaaaataaacaaatgggattccttcaggctaaaaagcttatatacagcaaagggaacaattgacaaagtgaagagacaacctacagagtaggagaagatatttgcaaactgtccatccaacaagggcctaataaccagaatacataaggaactcaaacaactcaacagaaaaaataaacgcgattttaaaatgggcaaaagatgtaaatagagatttctcaaaaaaagacatacaaatgg

SEQ ID NO: 335361 - DNA, 511 bp, Homo sapiens
tatagccaactcatttttgacaaagggatcaagaacatactagaggaaaggacagtcttttcaataaatggtgctaggaaaactagataagcagaatgaatctagacccctacctctcaccacatacaaaaaatcagatcaaaatggattaaagacttaaatctaagacctgaaactatgaaattacgagaggaaaacactggggaaatactttaggaaaatttgggcaagtttttttgggtaagaccttaaaaacacaggcaacaaaagcaaaaataaacaaatgggattccttcaggctaaaaagcttatatacagcaaagggaacaattgacaaagtgaagagacaacctacagagtaggagaagatatttgcaaactgtccatccaacaagggsctaataaccagaatacataaggaactcaaacaactcaacagaaaaaataaacgcgattttaaaatgggcaaaagatgtaaatagagatttctcaaaaaaagacatacaaatgg

SEQ ID NO: 335362 - DNA, 602 bp, Homo sapiens
gatcagaagcaagcctagatatctaccctcgctacttctgttcaacattgtactggaggttctaggcagggaaattaggcaagaaaaagaaataaaaagcatccaaatggaaatggaaaaaattaaaactatctctmtctgcagattagataatttttatatagaaaaccctaaggaatctatcaaaaatcattggctctaacaagcgagttcagcaaagttgaaggaatacaagatcaatacacaacaatcaagtgcgtttctatatgctagcaatgaacaatctgaaatgaaattagaaaacaattctatttgcagtagcatcaaacagaataaaatacttaagaataaatttaacaaaagcagtgcaaaatctatactctgaaacctacaaaacattttgaaataaattgaggaaaatctaaataaagggaaagtttatggatcagaagacttaatattgttaagatggcaatataccgcaagttgatttacagattcagtggaatccttatcacaatccagctgcgattttttgcagaaattgacaagcttattctaaaattcataaggaaactcaaaagatccagaatacccaaaac

SEQ ID NO: 335363 - DNA, 602 bp, Homo sapiens
gatcagaagcaagcctagatatctaccctcgctacttctgttcaacattgtactggaggttctaggcagggaaattaggcaagaaaaagaaataaaaagcatccaaatggaaatggaaaaaattaaaactatctctctctgcagattagataatttttatatagaaaaccctaaggaatctatcaaaaatcattggctctaacaagcgagttcagcaaagttgaaggaatacaagatcaatacacaacaatcaagtgygtttctatatgctagcaatgaacaatctgaaatgaaattagaaaacaattctatttgcagtagcatcaaacagaataaaatacttaagaataaatttaacaaaagcagtgcaaaatctatactctgaaacctacaaaacattttgaaataaattgaggaaaatctaaataaagggaaagtttatggatcagaagacttaatattgttaagatggcaatataccgcaagttgatttacagattcagtggaatccttatcacaatccagctgcgattttttgcagaaattgacaagcttattctaaaattcataaggaaactcaaaagatccagaatacccaaaac

SEQ ID NO: 335364 - DNA, 602 bp, Homo sapiens
gatcagaagcaagcctagatatctaccctcgctacttctgttcaacattgtactggaggttctaggcagggaaattaggcaagaaaaagaaataaaaagcatccaaatggaaatggaaaaaattaaaactatctctctctgcagattagataatttttatatagaaaaccctaaggaatctatcaaaaatcattggctctaacaagcgagttcagcaaagttgaaggaatacaagatcaatacacaacaatcaagtgcgtttctatatgctagcaatgaacaatctgaaatgaaattagaaaacaattctatttgcagtagcatcaaacagaataaaatacttaagaataaatttaacaaaagcagtgcaaaatctatactctgaaacctacaaaacattttgaaataaattgaggaaaatctaaataaagggaaagtttatggatcagaagacttaatattgttaagatggcaatatacygcaagttgatttacagattcagtggaatccttatcacaatccagctgcgattttttgcagaaattgacaagcttattctaaaattcataaggaaactcaaaagatccagaatacccaaaac

SEQ ID NO: 335365 - DNA, 561 bp, Homo sapiens
tcatactacaaagctacagaaatcaaaatactgtggttatttgcacaaggatagatagatcaatggaatagaattgacagtcaaaakataaaccattacccttatgtccagtgaattttcaacaaggatgccaagacaatacaatgagacacagaatactcttttcaacaaatagtgctggaacaattaggtatccatacacaaaagaatgaagttgtacccctatttcacaccatacacaaaaaaatactcaaaatatatcataggcctccatgtaaaagttaaagctataaaactcttataagtaaacataggcataaatcatcatgaccctggattaggcagtagtttttagatatgaccctaaagcacagcaaaaaaagaaaaagtagataaattgggattcatcaaaattaagaacatttgtgcctcaaaggacatcatcaagaaagtgaaaatacaacccacagaataggataaaatttgtgcaaatcatatatctgataggtaactgaaataaatatagaatatataaagaaatctcacaactcaacaataagt

SEQ ID NO: 335366 - DNA, 562 bp, Homo sapiens
gcctggactgagctgtatgcaatggcagtgcggagaggcagtcagattctgggtgtattttgaagacagagttagcatagtctgctccaggatttgacatggggggtgaaagaaggagagaagtaaaggtggcctcaaagtgtggtctgggcagccaagagaaagagttggctttagctgagctggggacactcctggggaggaagatgtggagttcactttgggccatggtggatctctgatgtttgatagacayccagctagagagaggaataggaatccaggcacccagagtcggaggagatgtaaatttgagagttgtcagtgtatagacggtttttgaaaccacaagactggatggcatccccaagggcacaagtgtagacagtagatgaataaagtccaatcctcaacattaagaggttagagactgagacagccagggaggtttcccagaagccaatgaaggacatagttcagggacgggaaatggccagctgtgtcaagggaatgaacatgccaagtctgctgaggacttagggttgatactgcattcagcaac

SEQ ID NO: 335367 - DNA, 611 bp, Homo sapiens
gccacgtggggctcccatgccaccaaaccaaccagccaagaaagctttactctactacctggagtgatttattccaattaccatggagaacttggcttgccgctgcacaatagaagcaagaagggctatgtgtacaacccagaggagttctctggcacacctcttagcactcccatgccccaaagtaatggttaatggaaaattacagcaaccaaacaaggcagaataaaggaggactcaggcctttcagaaattaaggtttgggccacactacccaagtaaagaaccccaaccacctgcaattcgaactgacaatggaaatatggaataactmgtggaagaaggaagctgtggatatctactatggctttgcgaccaattacagaatcaagaaccacaatagctttgcctgttgtctccctgtttgtttatgcatgtgtttctctgtatatactaagcattgtcttctagttactcctcttcccgtttttattttatataaaagttgttggagattaatctttgggtcacagaccattccatggaaaccatcaccaaatttcagcagcaattaatatagccaatgattaatcagtgactattaggactat

SEQ ID NO: 335368 - DNA, 565 bp, Homo sapiens
tacagcaaccaaacaaggcagaataaaggaggactcaggcctttcagaaattaaggtttgggccacactacccaagtaaagaaccccaaccacctgcaattcgaactgacaatggaaatatggaataactcgtggaagaaggaagctgtggatatctactatggctttgcgaccaattacagaatcaagaaccacaatagctttgcctgttgtctccctgtttgtttatgcatgtgtttctctgtatatactaagcattgtcttctagttactcctcttcccgtttttattttatataaaagttgttggagattaatctttgggtcacagaccattccatggaaaccatcaccaaatttcagcagcaattaatatagccaatgattaatcagtgactattaggactatacatcttcccactgtgggaaaaggtgagaatttcttcacttccaggaaggaagtcagatggacttaagtagtttgttgtagcaccagtgttcaaatgygtgtagaataatgtggaaactgagtagccacaggggtgcacagtgcagttatgaactta

SEQ ID NO: 335369 - DNA, 591 bp, Homo sapiens
atggactgaactctttaagtccaataatggatttattctttacagtgatcacattgttacgctttgtcattagagatctctggaaagacactgcaggaggcagagcaaaggcccagagcacatggccactcagcaaccttatagccccagcccacatctggtggccctgactgtgccctacccccttcctgacacagacacyatgcaatccaggcctcacgctcacagcacagtaacaacaacgtctatgtacccgtgcctgcccactagcttcatcttacctgaactctggagcatttttcctgcttgccccacaacttcagtaaacaacccagtgaatttctctgccatccagcaggctgcaagtacacattctccaatatggtctgaagctcatctttgaaagaagagcccccgcttccaagggtgtccttccttggatactcccccttagccttagggaattcttcagagctctcttttcaactttactaaaattatttaccctgttagagtaaataattttaaattaaacttcccctgtttaaattactatgtaatttgtctcctgattgtacccattctgataca

SEQ ID NO: 335370 - DNA, 547 bp, Homo sapiens
tgtaacatttttgcctcagactctcaatatttatctcaataaacataagtctggtgtttttttttctttccccatccctctgctataaaatgcttagagtcaacagtgcatgatgaagggttgatatgcagggtttctagaggattcatttttagggaattccaccgagttccatcagcygtactccccttccagcagagcccagcagatcaggaggcaagctggggtgggggagctgaaagaagggaggtgggtgcagctctggcaaggagctgtccactgggtaggcttgtttgggtctcggagctgtggcagggccaaagggaagggcccagacagactgtgaccccctttagatctcattctgggaccctagaattccgtgcccaagtgaccctgagctgcctccaggagcctgcctgtccatcttgccagggtctaggttgcaaaggagacctgagggtaaacactgttcccagagcccacaccccaggcccaggtgcagctgaaggtccacacccagccagactgctcacagcctgccttc

SEQ ID NO: 335371 - DNA, 562 bp, Homo sapiens
ggttcctgtatcctgttatgtgcttgcttgtcctaaggctcccctgggccttcaagaagcaaggcttattttttgttgtcacaacaggcccagctgtgggccccattaagtcaataacactacaaaagaaaagggggcatcagttacagagacattggggttaaggaggcctaaagggggcatggaccacaattctggtccctcctgagcctcactacatcacctctaaagcaggagttgcaacagtgatggtctaaggctgggtgagtgttaaatgggagcaggggaaagtgcccagagcagaagtgaccctggtcacaactgctgacccctatgaccttgggcaggttgagctgcagtttcctcrtccataaaatggggagaatgccacaattttcccataaattcactgaaaggatgaaaagagctcatcacatcccctgattcctgcatcatgcacctcggccccacccaaggacactgatgcctcacacatcctcctttcttaggcccctgtattcgtcagtttaactctgctaataaagacatacccaagactggg

SEQ ID NO: 335372 - DNA, 502 bp, Homo sapiens
ggctgggaaggccgcgcaatcatggcagaaggcaaggaggagcaagtcacgtcttacatggatggcagaaggcaaagagagagcttgtgcagggaaactcccccttagaaaaccatcagatctcgtgaracttgttgactatcatgagaatagcacaggaaagacctgctcctgtgattcagttacctcccaccgagtccctcccacaacatgtggaaattcaagatgagatctgggggggaacacagccaaaccatttcagcccccgaaagaggctgcccttaggctcaccataattagaagccccaggctctgaggctgggctgtgggtggggggaacaaagatcttgatgcttatctagagcagactaaagggacccagttacagggagtggctcgaagctttattgacttctcataaagccaaacagtctgtgaaagtcattgctaatttcatcaccatcattttaagtgcagtcattacccaaaagctccaggtgct

SEQ ID NO: 335373 - DNA, 502 bp, Homo sapiens
ggctgggaaggccgcgcaatcatggcagaaggcaaggaggagcaagtcacgtcttacatggatggcagaaggcaaagagagagcttgtgcagggaaactcccccttagaaaaccatcagatctcgtgagacttgttgactatcatgagaatagcacaggaaagacctgctcctgtgattcagttacctcccaccgagtccctcccacaacatgtggaaattcaagatgagatctgggggggaacacagccaaaccatttcagcccccgaaagaggctgcccttaggctcaccataattagaagccccaggctctgaggctgggctgtgggtggggggaacaaagatcttgatgcttatctagagcagactaaagggmcccagttacagggagtggctcgaagctttattgacttctcataaagccaaacagtctgtgaaagtcattgctaatttcatcaccatcattttaagtgcagtcattacccaaaagctccaggtgct

SEQ ID NO: 335374 - DNA, 569 bp, Homo sapiens
gaaagaggctgcccttaggctcaccataattagaagccccaggctctgaggctgggctgtgggtggggggaacaaagatcttgatgcttatctagagcagactaaagggacccagttacagggagtggctcgaagctttattgacttctcataaagccaaacagtctgtgaaagtcattgctaatttcatcaccatcattttaagtgcagtcattacccaaaagctccaggtgcttagagaaacaaccaccaatacggctactacctctgtgcctctggaactttgttctaccctggagctccacatatgttgcagatgtttattttaaaaccaagsggtctcagctgtatgagggagaggagactatgccaccacaggacagctaggtgagcctgtgcaggctagggccagcatcagggatccagttaggcccagggatggcctggcaggagcattcgtcacagggtgagaatcatgggcaaactcctcagccagccatgcaggtctgagtctgctgatgtgagccagagtccccaaggtctgcagacagaacaagtgcgaacccaca

SEQ ID NO: 335375 - DNA, 569 bp, Homo sapiens
gaaagaggctgcccttaggctcaccataattagaagccccaggctctgaggctgggctgtgggtggggggaacaaagatcttgatgcttatctagagcagactaaagggacccagttacagggagtggctcgaagctttattgacttctcataaagccaaacagtctgtgaaagtcattgctaatttcatcaccatcattttaagtgcagtcattacccaaaagctccaggtgcttagagaaacaaccaccaatacggctactacctctgtgcctctggaactttgttctaccctggagctccacatatgttgcagatgtttattttaaaaccaagcggtctcagctgtatgagggagaggagactatgccaccacaggacagcyaggtgagcctgtgcaggctagggccagcatcagggatccagttaggcccagggatggcctggcaggagcattcgtcacagggtgagaatcatgggcaaactcctcagccagccatgcaggtctgagtctgctgatgtgagccagagtccccaaggtctgcagacagaacaagtgcgaacccaca

SEQ ID NO: 335376 - DNA, 635 bp, Homo sapiens
gattatggggaagattatgatgatggagaggattatgatgatggagaagatgatgatgatgaagaagataatgattataaagattatgatgatggagaagatgatgatggagaaaatgaagatgatgagaggatgatgacaccaagtgatggtggagcatataccttgcttggtgctgcattgggtgcctcacacacaccatctctcacagcacaataacttatgcaaaagaagttttcttggttttatcttccrtatgagaaaactgaggcacagcaatatcaagtgtcctggaaggtcacaccatttcaaccatgaaggcaatagagctccagaggccgcatgcctccttcatcctgggcttggaactatcctgacgcattaagaacccccagcccctcagtcctcctcctctacttaagttgggcagaaagtgaaaagctcaccatcagttttcctgaaactcatcttttgctttgcaatttggcctgctagctgcttgaggcccatttttctcttggcctcagatgccttttatgtcatatccattttcactctatcacatttagttaaacatccaaactatggattcagatgggtaactcctgatcctgggaggctctcttggtaccttc

SEQ ID NO: 335377 - DNA, 635 bp, Homo sapiens
gattatggggaagattatgatgatggagaggattatgatgatggagaagatgatgatgatgaagaagataatgattataaagattatgatgatggagaagatgatgatggagaaaatgaagatgatgagaggatgatgacaccaagtgatggtggagcatataccttgcttggtgctgcattgggtgcctcacacacaccatctctcacagcacaataacttatgcaaaagaagttttcttggttttatcttccgtatgagmaaactgaggcacagcaatatcaagtgtcctggaaggtcacaccatttcaaccatgaaggcaatagagctccagaggccgcatgcctccttcatcctgggcttggaactatcctgacgcattaagaacccccagcccctcagtcctcctcctctacttaagttgggcagaaagtgaaaagctcaccatcagttttcctgaaactcatcttttgctttgcaatttggcctgctagctgcttgaggcccatttttctcttggcctcagatgccttttatgtcatatccattttcactctatcacatttagttaaacatccaaactatggattcagatgggtaactcctgatcctgggaggctctcttggtaccttc

SEQ ID NO: 335378 - DNA, 635 bp, Homo sapiens
gattatggggaagattatgatgatggagaggattatgatgatggagaagatgatgatgatgaagaagataatgattataaagattatgatgatggagaagatgatgatggagaaaatgaagatgatgagaggatgatgacaccaagtgatggtggagcatataccttgcttggtgctgcattgggtgcctcacacacaccatctctcacagcacaataacttatgcaaaagaagttttcttggttttatcttccgtatgagaaaactgaggcacagcaatatcaagtgtcctggaaggtcacaccatttcaaccaygaaggcaatagagctccagaggccgcatgcctccttcatcctgggcttggaactatcctgacgcattaagaacccccagcccctcagtcctcctcctctacttaagttgggcagaaagtgaaaagctcaccatcagttttcctgaaactcatcttttgctttgcaatttggcctgctagctgcttgaggcccatttttctcttggcctcagatgccttttatgtcatatccattttcactctatcacatttagttaaacatccaaactatggattcagatgggtaactcctgatcctgggaggctctcttggtaccttc

SEQ ID NO: 335379 - DNA, 635 bp, Homo sapiens
gattatggggaagattatgatgatggagaggattatgatgatggagaagatgatgatgatgaagaagataatgattataaagattatgatgatggagaagatgatgatggagaaaatgaagatgatgagaggatgatgacaccaagtgatggtggagcatataccttgcttggtgctgcattgggtgcctcacacacaccatctctcacagcacaataacttatgcaaaagaagttttcttggttttatcttccgtatgagaaaactgaggcacagcaatatcaagtgtcctggaaggtcacaccatttcaaccatgaaggcaatagagctccagaggccgcatgcctccttcatcctgggcttggaactatcctgacgcattaagaacccccagcccctcagtcctcctcctctacttaagttgggcagaaagtgaaaagctcaccatcagttttcctgaaactcatcttttgytttgcaatttggcctgctagctgcttgaggcccatttttctcttggcctcagatgccttttatgtcatatccattttcactctatcacatttagttaaacatccaaactatggattcagatgggtaactcctgatcctgggaggctctcttggtaccttc

SEQ ID NO: 335380 - DNA, 547 bp, Homo sapiens
gtgccgtctacacaccaggcaccacctaacactgcaggtattcactcctttcaccctcgcaggccctatgaggtgatgtcagtgtgacccccacttgaaacatgatgaaactgagatacagaaggataaagtcacctgccacatcatgctttagtaagtggcgatgctggagctggactctggagcttccacccttagtgcccatgctctggcccctcctagaccatgcctggtcttgctggcataagacgcagtgcctgtcccacagtgttcacgttctagtggaggagcagacacacagatgacagcaacaccggtgataaggaccattccaaggactgcataagatgctaactccaccttggagcaagaaggcaggcttcccagagagatggcrttttgcctgggatgctgacgaatgcagaggagtttgccaggtagccaggcaaggcaggggagagggcattttaggcagtggacacagcatgagcgaaggtgtggagggaagagactgtatcagcagtgtaggaattgacaagctggttag

SEQ ID NO: 335381 - DNA, 518 bp, Homo sapiens
ttctacatgtttaggggtcttccagttgtctttccattattgatttctactttggttctgttataatcagagaatatcctgtataatttcaattcatttatattttttgatgtttgtctcatagcccagtatataatttatcttaatgaatggtctgtggttgcttgaaagagtatgtattctggtgttgttggcagagattggaagagtggataaaaaaaccacatttttctcccatatgtgtcaattagattttgctggttgattttgttgttcagatcttctatatctttgctaattttctgtctagtagttctttcagttgctgagagatgtatggtttgaagtgtccagctacaattgtggatttgtctgttctgtcagctttatcaattttgttttatggattttaaaactctgttgtttggtgtgcacatattgaggggattttatatcttcctggtggactggtccttttatcattgtgtartgttctgttttgtctctagtaatagtct

SEQ ID NO: 335382 - DNA, 555 bp, Homo sapiens
gaaacattcttttcaacgcttccctgtgcctgaggaacattttaaacactgcacagtctcaatcattcgtctcaccccccaaccttccatccactcagctacaaccattgcccagtggttcccacactgggcctgggccacatctggggcctctacgtgcagctcakcccttattccaagagcccctgaaaggcactcccttctcttctcaagaaaaacaccacgggacccttacctgcccctcccctgacctggcttctatccagcacccagtcctctcgaccaactcacctaatgtcagcttcctctggccatgtggggccctgaactgaacacagtcaggcttttattaagcacctactgtgtgcccagcatctgtcctcaagttccctactcctggggggagcatcctctccttattcctgatgtggccccaagtctcagggtctgaccagcccagaaaggtcaaacaaggccttgctcttcctcaaatgcaccatgcacactccggcctcagggcctacgcccttgctgttccctctgtctggaaggcat

SEQ ID NO: 335383 - DNA, 531 bp, Homo sapiens
aaaattctattgttttatcctcaagttcactaattctattctatcatctccactctactatccagcaagtttgtaaaatttctgtaactgcatttttcagttctataatttccttctgsattatttttgtaacttttatttctttgctgagacctcctgtttttccattcatttcaggacaacgtgtaattgattgtggaagcattttatggtggctgctgtaaaattattgtcggataatttcaggatctgactcacctcggagtttgccatcagttgattgtctttgctcatttaaattgtgaaggtattggtatgacaggtgatttgcaattgtatcctggtcattttgctgtatgaacaaccaagagaaacttgaacccatgggactaagaggcttgacctgaggttttgactcattgaaatgttgggaatctcattgctgtggtgtaagagaggctgccacaatgatgttctgcagttagggctgatccacttgtcacccttctttggatgataatcactcacttc

SEQ ID NO: 335384 - DNA, 531 bp, Homo sapiens
aaaattctattgttttatcctcaagttcactaattctattctatcatctccactctactatccagcaagtttgtaaaatttctgtaactgcatttttcagttctataatttccttctggattatttttgtaacttttatttctttgctgagacctcctgtttttccattcatttcaggacaacgtgtaattgattgtggaagcattttatggtggctgctgtaaaattattgtcggataatttcaggatctgactcacctcggagtttgccatcagttgattgtctttgctcatttaaattgtgaaggtattggtatgacaggtgatttgcaattgtatcctggtcattttgctgtatgaacaaccaagagaawcttgaacccatgggactaagaggcttgacctgaggttttgactcattgaaatgttgggaatctcattgctgtggtgtaagagaggctgccacaatgatgttctgcagttagggctgatccacttgtcacccttctttggatgataatcactcacttc

SEQ ID NO: 335385 - DNA, 555 bp, Homo sapiens
gaaacattcttttcaacgcttccctgtgcctgaggaacattttaaacactgcacagtctcaatcattcgtctcaccccccaaccttccatccactcagctacaaccattgcccagtggttcccacactgggcctgggccacatctggggcctctacgtgcagctcatcccttattccaasagcccctgaaaggcactcccttctcttctcaagaaaaacaccacgggacccttacctgcccctcccctgacctggcttctatccagcacccagtcctctcgaccaactcacctaatgtcagcttcctctggccatgtggggccctgaactgaacacagtcaggcttttattaagcacctactgtgtgcccagcatctgtcctcaagttccctactcctggggggagcatcctctccttattcctgatgtggccccaagtctcagggtctgaccagcccagaaaggtcaaacaaggccttgctcttcctcaaatgcaccatgcacactccggcctcagggcctacgcccttgctgttccctctgtctggaaggcat

SEQ ID NO: 335386 - DNA, 555 bp, Homo sapiens
gaaacattcttttcaacgcttccctgtgcctgaggaacattttaaacactgcacagtctcaatcattcgtctcaccccccaaccttccatccactcagctacaaccattgcccagtggttcccacactgggcctgggccacatctggggcctctacgtgcagctcatcccttattccaagagcccctgaaaggcactcccttctcttctcaagaaaaacaccacgggaccyttacctgcccctcccctgacctggcttctatccagcacccagtcctctcgaccaactcacctaatgtcagcttcctctggccatgtggggccctgaactgaacacagtcaggcttttattaagcacctactgtgtgcccagcatctgtcctcaagttccctactcctggggggagcatcctctccttattcctgatgtggccccaagtctcagggtctgaccagcccagaaaggtcaaacaaggccttgctcttcctcaaatgcaccatgcacactccggcctcagggcctacgcccttgctgttccctctgtctggaaggcat

SEQ ID NO: 335387 - DNA, 542 bp, Homo sapiens
tgttaaacccaccgtgcattacttatataccccttaattggtcataatgatattatatcatttttatatacttttaaattcaatttgttaagattttatttaraaactttacatttgtgtttatgatagatactggcctgtagcttgctttattagtaaaatgtttttctggttttgggatcacagtaatgctggcatcatgcaattagttaggaagtacttcctcttttccattgccaaaaaaatttgtttaaaattggtaattttttttcttaagtgtttggtagaattcaccagtgaagccatctgggcctggagttctctctgtgagaggtttttagctacaacttcaatatttaaaaataaatatagggctattcaggttatctatttcttcatgagtgagctttagtagtttgtgtctttcagggaattcatctatttcatctaagttattgaatttaatgccttcaagttgttcataatattcccttaattatacttttaacacctatgaatactatgatagttttaacatctgt

SEQ ID NO: 335388 - DNA, 542 bp, Homo sapiens
tgttaaacccaccgtgcattacttatataccccttaattggtcataatgatattatatcatttttatatacttttaaattcaatttgttaagattttatttaaaaactttacatttgtgtttatgatagatactggcctgtagcttgctttattagtaaaatrtttttctggttttgggatcacagtaatgctggcatcatgcaattagttaggaagtacttcctcttttccattgccaaaaaaatttgtttaaaattggtaattttttttcttaagtgtttggtagaattcaccagtgaagccatctgggcctggagttctctctgtgagaggtttttagctacaacttcaatatttaaaaataaatatagggctattcaggttatctatttcttcatgagtgagctttagtagtttgtgtctttcagggaattcatctatttcatctaagttattgaatttaatgccttcaagttgttcataatattcccttaattatacttttaacacctatgaatactatgatagttttaacatctgt

SEQ ID NO: 335389 - DNA, 523 bp, Homo sapiens
tccagcacccagtcctctcgaccaactcacctaatgtcagcttcctctggccatgtggggccctgaactgaacacagtcaggcttttattaagcacctactgtgtgcccagcatctgtcctcaagttccctactcctggggggagcatcctctccttattcctgatgtggccccaagtctcagggtctgaccagcccagaaaggtcaaacaaggccttgctcttcctcaaatgcaccatgcacactcckgcctcagggcctacgcccttgctgttccctctgtctggaaggcattttgctttttgtaatggctcactcctttactcactcagatccttgctcagaagtctcctctttagaagagtccatgatgatgggggggtctgacctggcctggggggtcaaggagggctttggaggaggtggccatgggatgcgatcagaagggtggacaggacttagcagagaagggtggacaggacttagcagagaagggtggacaggacttgggggatggtcaaag

SEQ ID NO: 335390 - DNA, 607 bp, Homo sapiens
ctcagaggtacctggccctggaggtgagacatcatgggagccaggagacaaacaccatctgggctccatccatgctggggatagaagaaagggcaccagaaatgacccaaagttatgccctgtgagactttagcaactcacttgactaatgtgttggttccaggccctggggctcgttttccctgggcctggtggagagtctggggactagcaggtctgcaaataggccaggggtttactttgagtgtgcccagccctggccaggctgagacagtgtgggtgcatggaggaagatggggatagggagaggccaagtgcatcatgaagggcctcaaatgtctggagagtmaggggctgtggcaggtttccagtcagatttgcccctggggctggtgggtcacagccatcttcccagctgcagggatggagaccccacaaaagccatttgagggttgatgcctcccgagggtgtctgcatggtggtgcttccttcacattgctttccaatctcaactcagccaggccacaggaccttggcctgggtcaaactcactcctcactgtggccagttaatttcatcttgccataaattttcaacggattgcta

SEQ ID NO: 335391 - DNA, 607 bp, Homo sapiens
ctcagaggtacctggccctggaggtgagacatcatgggagccaggagacaaacaccatctgggctccatccatgctggggatagaagaaagggcaccagaaatgacccaaagttatgccctgtgagactttagcaactcacttgactaatgtgttggttccaggccctggggctcgttttccctgggcctggtggagagtctggggactagcaggtctgcaaataggccaggggtttactttgagtgtgcccagccctggccaggctgagacagtgtgggtgcatggaggaagatggggatagggagaggccaagtgcatcatgaagggcctcaaatgtctggagagtaaggggctgtggcaggtttccagtcagatttgcccctggggctggtgggtcacagccatcttcccagctgcagggatggagaccccacaaaagccatttgagggttgatgcctcccgagggtgtctgcatggtggtgcytccttcacattgctttccaatctcaactcagccaggccacaggaccttggcctgggtcaaactcactcctcactgtggccagttaatttcatcttgccataaattttcaacggattgcta

SEQ ID NO: 335392 - DNA, 523 bp, Homo sapiens
tccagcacccagtcctctcgaccaactcacctaatgtcagcttcctctggccatgtggggccctgaactgaacacagtcaggcttttattaagcacctactgtgtgcccagcatctgtcctcaagttccctactcctggggggagcatcctctccttattcctgatgtggccccaagtctcagggtctgaccagcccagaaaggtcaaacaaggccttgctcttcctcaaatgcaccatgcacactccggcctcagggcctacgcccttgctgttccctctgtctggaaggcattttgctttttgtaatggctcactcctttactcactcagatccttgctcagaagtctcctctttagaagagtccatgatgatggggkggtctgacctggcctggggggtcaaggagggctttggaggaggtggccatgggatgcgatcagaagggtggacaggacttagcagagaagggtggacaggacttagcagagaagggtggacaggacttgggggatggtcaaag

SEQ ID NO: 335393 - DNA, 523 bp, Homo sapiens
tccagcacccagtcctctcgaccaactcacctaatgtcagcttcctctggccatgtggggccctgaactgaacacagtcaggcttttattaagcacctactgtgtgcccagcatctgtcctcaagttccctactcctggggggagcatcctctccttattcctgatgtggccccaagtctcagggtctgaccagcccagaaaggtcaaacaaggccttgctcttcctcaaatgcaccatgcacactccggcctcagggcctacgcccttgctgttccctctgtctggaaggcattttgctttttgtaatggctcactcctttactcactcagatccttgctcagaagtctcctctttagaagagtccatgatgatgggggggtctgacctggcctgggggktcaaggagggctttggaggaggtggccatgggatgcgatcagaagggtggacaggacttagcagagaagggtggacaggacttagcagagaagggtggacaggacttgggggatggtcaaag

SEQ ID NO: 335394 - DNA, 589 bp, Homo sapiens
catgaaaatacgccatgctgggaacactcagtatcataatagaagccagtatttctcaacttgtagagctcaggccatgtgcatcaggattcccggagttccttgtcaaaaatgcagacccctaatcctcagcaaactggctgaatctgaatctctggtggagccctggaatctgcattttaacaagtgccaggagatgacacattaaacaagtgtcagagattctcattagatttgggaaccatctgatatgagataaatgaacaaacagaaaatccatgctgggataccaaagatgtggttttagaattaatggcatggcagaggctttctctatttttacagttcaggctgctgtgccatggggcacaaacattattgcttgttacctggttaaactactcagattctctgagccagtttactcatctgtggaaagggaatcatagyttttgtctcacatagctatagtgaggtttaatgcatgtgaaaacactataaattctaaatagctctgtggtaaattgtaaaatatgataaaaaattctcctgccccctacatccatacccttgcaagattgatgtcaca

SEQ ID NO: 335395 - DNA, 492 bp, Homo sapiens
ggtgtctcagtatttaaacatgcaagcttatttaactttgcaaatgtaaggttctttatcaagttccttgtaattcatcacatgttaagctgatgttggagtccccacctacctaactagaaagaagtccaagttgttttttgttttttggtttttttgktttttttactaaatatttctgagaatctgtagggatgctcatcagcatgattgaattcattttgattgtccctgcattttatacacagagcaaatctcatctgatgctttaggccctggacagaatgcatccacctatgtagactcctggttcccttcctctgtattctctctgtgaagaattgtcctaactacaatgacctgttttaaaatttaatttttattattatttaggtgtggtgaagccaacagatcaggagacagttgccattgaaaagactgttactcatagttcccaaaaggagggagcatgccacaccagcaggaagcacc

SEQ ID NO: 335396 - DNA, 492 bp, Homo sapiens
ggtgtctcagtatttaaacatgcaagcttatttaactttgcaaatgtaaggttctttatcaagttccttgtaattcatcacatgttaagctgatgttggagtccccacctacctaactagaaagaagtccaagttgttttttgttttttggtttttttgttttttttactaaatatttctgagaatctgtagggatgctcatcagcatgattgaatycattttgattgtccctgcattttatacacagagcaaatctcatctgatgctttaggccctggacagaatgcatccacctatgtagactcctggttcccttcctctgtattctctctgtgaagaattgtcctaactacaatgacctgttttaaaatttaatttttattattatttaggtgtggtgaagccaacagatcaggagacagttgccattgaaaagactgttactcatagttcccaaaaggagggagcatgccacaccagcaggaagcacc

SEQ ID NO: 335397 - DNA, 560 bp, Homo sapiens
tttggcttcttttgacaaaacatccttgagatttacccataaagttgcatgatcagtagcttgttccttttgattttggcttcctagttcagctaaattcgggttcctgtgtcatgaccaagaaaaattaggcacgcggacacattgaagggtgacgacagtggaacttattgggcaaaaagggaaaaagaaaaacaaactctcagcaaagcaagagggagtcctgccaacgggctcccacctcatagattgaataccagttcatcacacaagagctgaagaggccaggctcctctcactgcataaggtgtgaattactgctcactctaccccattgccccagtgcacatgtgggcattattcagaaagaatcagttgggaaagagtgggcaaacaagggcatttttccctctggatcgcgggtttcatccagaaccarcagtccagtctttcagcctccaggctgttttaggcttgaaggtgggtttcgatggggtaccgttgctatctcctgtctatcacttttcattggtgagagattttccattgtatgaatgcac

SEQ ID NO: 335398 - DNA, 546 bp, Homo sapiens
gaatatgaccgtctaaagcagcagcacgaacataaaggcctgtccccactgccgtcccctcctgaaatgatgcccacctctccccagagtccccgggatgctgagctcattgctgaggccaagctactgcgtcaacacaaaggccgcctggaagccaggatgcaaatcctggaagaccacaataaacagctggagtcacagttacacaggctaaggcagctgctggagcaagtgaggagagagatgggatttttacaaacattcatttttccctcttaaacaaaactaaacctcagagagcactttttatagrtgcaacaagcatcaattcttaagtgcttggtatgtgcctgcaaagtgatagtatcaaaggatagaagtagaggagatagaaaaactagtgtgtcttttttgtatttgtccaatattgtttcctaccaaaatggttttttcttgaccaatttgaaatacatcttggggaaaaaaacgcctaaaggtttccactagttctctaaaagtgaatatttcacttcttgaaatggaact

SEQ ID NO: 335399 - DNA, 609 bp, Homo sapiens
tatcttactccatcatttaaatatagggacaattaaatcttcatagagtagttggttattttttacttcgatagaggaaatacaggcttagcaaagaaagacattaatatttttctttttcttcatcactttggccttgcgtattttacccccatacaaaaacagcattttaccctgcagaattttcccactggcttgcatgagcttcagatgtcttgcttcatccaagatgatgttttgctgctactgttygtttctgggggcatttatttggtttattgccctcacataaaacaaagtcactctctcgccttccttcaacgaataaaaaggatggtggcagtcacctgtgatcaaatagaagaaaagcctagagaaacaaaagggagaaaacacaaggctttgtggccagtgattggcacctctaatgggtagcctgggagggacgggcagcaggaaatctgggctgtttgttcctctccataagggcaatgaggagggtgtattgagtagtgtgtttttcctatctttttgttcagtgtcagttaacaatggccatttcctagctatttgatgtgcaagtaaacgttgtgcagtgcacattaaaag

SEQ ID NO: 335400 - DNA, 609 bp, Homo sapiens
tatcttactccatcatttaaatatagggacaattaaatcttcatagagtagttggttattttttacttcgatagaggaaatacaggcttagcaaagaaagacattaatatttttctttttcttcatcactttggccttgcgtattttacccccatacaaaaacagcattttaccctgcagaattttcccactggcttgcatgagcttcagatgtcttgcttcatccaagatgatgttttgctgctactgttcgtttctgggggcatttatttggtttattsccctcacataaaacaaagtcactctctcgccttccttcaacgaataaaaaggatggtggcagtcacctgtgatcaaatagaagaaaagcctagagaaacaaaagggagaaaacacaaggctttgtggccagtgattggcacctctaatgggtagcctgggagggacgggcagcaggaaatctgggctgtttgttcctctccataagggcaatgaggagggtgtattgagtagtgtgtttttcctatctttttgttcagtgtcagttaacaatggccatttcctagctatttgatgtgcaagtaaacgttgtgcagtgcacattaaaag

SEQ ID NO: 335401 - DNA, 625 bp, Homo sapiens
agaggaagggagagaaggagaaagggagggaagaaagagaaggagagagggaagaaaaacttagaaactatccttaaatgtatactagaagttttgaaccctaaccttgagtgagttttgaaaggtttctattggtgtcgtagctccatacctcttcattccagactagtagttctcaaattgtttcagggagtttttagtcttcttggagccactgagaatgatgggtggaggggaaagggagatgctgtacaggatctctcacagctctgctttgaactgctcaaaatattggaattccatataagattgttttaggagatgtcccattgctatagttaaaacagtttgaaaaccaagattttaaaggaaattgcatgcccaagacaggctattgacatgtatggacagaagtccctacttttctgtccaattatgacttatcatagaacactttctcatcagagtctacttttgaaatacaaataaatgcatacagatgtaggaatctatgaatcaaggccagtgggtctttagccattgcctcgtaaggctcctgatatttgctgaattggggaggaagtkgaaagctcattcctggatctggctctgtggcttgcccatt

SEQ ID NO: 335402 - DNA, 626 bp, Homo sapiens
cagttcttcactgagggctgccaaactattggcccactttatgaatagttgcatatgctttgttaaaaaatttttatacttgcagtctcagccaaaatccaaagtgattttctaaaatataattaatactccatgaaattctttgcactaataaagcacaaaaagatagatatacaaacttggtcaccttaatagaaatgcctgaatgacattaaacttttaataagtaagtcttcagttgatctggtgccatcactgtttaagtgcctgcccgtgaatccgcttcattttgtagagaagctatatctcttgaaataaatattaaaacaaaatactctccctagtctatagctttaatttttattgggatatctttaatttttattggkatttttaacaattataattattatgggaatctgtaaagttgatacatggcaaggtagtaatagcctagtaaagcatttcagttccaaagacaatacttgaatagtggaaggatttaccaatgtgcaataattaaaattagccatgtaaaactatgggacatagacgaaaaggcaagccataaagtaagtctcagattatcttactctaaatctgaattttgctacgaagtacccagg

SEQ ID NO: 335403 - DNA, 585 bp, Homo sapiens
ctctctctacctgcaatgtgttaccccatcttttctcctcatcccctattcaatcaccaaaattccttaaaagaatcatcacamctgaggaagtttccagaacatccagatctaggtaacattctatttctctgtgtgtacttaatcctatcacagcacttaatcgtcacttttaatgttggtctgcccaaataaagtctgaacattgtgaaggcagagcacctagcatctagcacaagacctggcgaaaatgaagtcctcgtaaataattatgaatgcatgaataaatagcatgtaatccaaagtttctccatatggctttttatttttagaactgttcattggtctacatacatatgtttttctaagattacaaagactttgacaatcaaggactcggtgtctctaaaactgcactggaatagccttacacaggagggagtttgagaaatacactagggatcatgactattagagtaagaggcctaatatgtggactgatcaagaggctacatttacacctttattcctcctttctgctcagcctttaatagatacatctttgggttatcgagcagaagagta

SEQ ID NO: 335404 - DNA, 600 bp, Homo sapiens
tacatatgtttttctaagattacaaagactttgacaatcaaggactcggtgtctctaaaactgcactggaatagccttacacaggagggagtttgagaaatacactagggatcatgactattagagtaagaggcctaatatgtggactgatcaagaggctacatttacacctttattcctcctttctgctcagcctttaatagatacatctttgggttatcgagcagaagagtaatcatttctcaggacatcattttcaggtctagccaagggyacccatcaacagagcccatcatcagctgcggttgaccagagctctaatttggccgttatcactgaactcttttgtaagaaaggttgactaagcagtgaacttgtctgtttcacaagatatagagagctctccctctaaactccctaaagtttcaagacctttctttcttgttaatgtctgggaaccatagatgaagtataaataaccactgagggagtggtgcgatagagacataatggcagatcaacaatcgagcaggctagaatcctgctctcgatgaaactattaatatcacaaccagaaaatctattggcacagtggtttca

SEQ ID NO: 335405 - DNA, 480 bp, Homo sapiens
ctattagagtaagaggcctaatatgtggactgatcaagaggctacatttacacctttattcctcctttctgctcagcctttaatagatacatctttgggttatcgagcagaagagtaatcatttctcaggacatcattttcaggtctagccaagggcacccatcaacagagcccatcatcagctgcggttgaccagagctctaatttggccgttatcactgaactcttttgtaagaaaggttgactaagcagtgaacttgtctgtttcacaagatatagagagctctccctctaaactccctwaagtttcaagacctttctttcttgttaatgtctgggaaccatagatgaagtataaataaccactgagggagtggtgcgatagagacataatggcagatcaacaatcgagcaggctagaatcctgctctcgatgaaactattaatatcacaaccagaaaatctattggcacagtggtt

SEQ ID NO: 335406 - DNA, 515 bp, Homo sapiens
atggtgtgtaccaggcataattttttagcacaaaaatcagaatccattcttaaaagtttgtaaatgaaaatttatgaaaaatatgtgaaaaataatggtcttgcctcaacaagctgaytttacttaaccaccaatgataatacatattagatgttgaaaaaactcatgataagattattttctaatggaagctgtatttagcccattctatgaaattgacttaaaggtgaggtaatacgttaggtaaacaatttaagaagtcttatccaaattgctcaaagtgctttgcagacatgagctaattcagccttataaataagtttgtgtagttggattcatgtccactgttccctttgaaactgtctcatgggtggtgggttgttgaggaaaaggtgtggataacagcaggcccatccccaggctcagggcatctttggaggcccctgggaggtgctcatcttttgaggccagacctcctgggtatatcacaagatctccctgactcatctcctggg

SEQ ID NO: 335407 - DNA, 515 bp, Homo sapiens
atggtgtgtaccaggcataattttttagcacaaaaatcagaatccattcttaaaagtttgtaaatgaaaatttatgaaaaatatgtgaaaaataatggtcttgcctcaacaagctgattttacttaaccaccaatgataatacatattagatgttgaaaaaactcatgataagattattttctaatggaagctgtatttagcccattctatgaaattgacttaaaggtgaggtaatacgttaggtaaacaatttaagaagtcttatccaaattgctcaaagtgctttgcagacatgagctaattcagccttataaataagtttgtgtagttggattcatgtccactgttccctttgaaactgtctcatgggtggtgggttgttgaggaaaaggtgtggataacagcaggcccatccccaggctcagggcatctttggaggcccctgggaggtgctcatcttttgaggccagacctcctggktatatcacaagatctccctgactcatctcctggg

SEQ ID NO: 335408 - DNA, 571 bp, Homo sapiens
cgtaggggtgcctgcaatccccgaaacctcaaaggacatgttacactgctctcttagctccaccgtccttggacagtggagtgttatccgttcagtgggccccttgcctcgtcgtgtgcggtggctgccttctgccagtgagggtaaagggccagtgtgacagccttttttgggtaccagcacttggtgggttcagagcacttgaccagtgtcgaagaagaatgaggttgcatggacacttgaaggatggtggaggtggagaattttatttagggatggaaatgkctcacagtggagaggggagctgaagaagaggcaggacgggcaggtaatcttccctgacatctggcagtctccagccagctcttctccgaagttaagccatcactcctccaaagtccagctgtccctctgaagtcaagttgcctctctccagtcaagctgcatctccctttctacctactgagtctggggtctttatagggatatgatggggggcagggagggtcataagtaattttgggaaaaggcgacattcaataggtagaaagacattattcacaaagagtca

SEQ ID NO: 335409 - DNA, 571 bp, Homo sapiens
cgtaggggtgcctgcaatccccgaaacctcaaaggacatgttacactgctctcttagctccaccgtccttggacagtggagtgttatccgttcagtgggccccttgcctcgtcgtgtgcggtggctgccttctgccagtgagggtaaagggccagtgtgacagccttttttgggtaccagcacttggtgggttcagagcacttgaccagtgtcgaagaagaatgaggttgcatggacacttgaaggatggtggaggtggagaattttatttagggatggaaatggctcacagtggagaggggagctgaagargaggcaggacgggcaggtaatcttccctgacatctggcagtctccagccagctcttctccgaagttaagccatcactcctccaaagtccagctgtccctctgaagtcaagttgcctctctccagtcaagctgcatctccctttctacctactgagtctggggtctttatagggatatgatggggggcagggagggtcataagtaattttgggaaaaggcgacattcaataggtagaaagacattattcacaaagagtca

SEQ ID NO: 335410 - DNA, 571 bp, Homo sapiens
cgtaggggtgcctgcaatccccgaaacctcaaaggacatgttacactgctctcttagctccaccgtccttggacagtggagtgttatccgttcagtgggccccttgcctcgtcgtgtgcggtggctgccttctgccagtgagggtaaagggccagtgtgacagccttttttgggtaccagcacttggtgggttcagagcacttgaccagtgtcgaagaagaatgaggttgcatggacacttgaaggatggtggaggtggagaattttatttagggatggaaatggctcacagtggagaggggagctgaagaagaggcaggacgggcaggtaatcttccctgacatctggcagtctccagccagctcttctccgaagttaagccatcactcctccaaagtccagctgtccctctgaagtcaagttgcctctctccagtcaagctgcrtctccctttctacctactgagtctggggtctttatagggatatgatggggggcagggagggtcataagtaattttgggaaaaggcgacattcaataggtagaaagacattattcacaaagagtca

SEQ ID NO: 335411 - DNA, 579 bp, Homo sapiens
gcattcgcttctatgtaattctcagattttaccacgtcagtgtgcacattggctagttcagctaatatgatttttgtggctagattttcttgatgaaggaaagagcattgattgacgttctggggacaccttaatctgagtaactactcagaatgttttcctgtaattgcagctgagccatcagaacattacttccacatgaaatttaaacatcaaaccatattcgttgacagataattgtcttcatagttttatacagttaaatgctagttgtgtttgtcagcaatagggttggaaaaaggaattctatcttaatattaccattatattggaattgtccacatactaaaaaattactgtattaattctctgttaataytatcgagttgcagtggaaaatgctttgcaagctttatgtgcttttttgtttttgtttgtttgagacggagtctcgctctgtcgcccaggctggagtgcagtggtgctatctgagctcactgcaacctccgcctcctgggttcaagaaattctcctgcctcagcctccccagcagctgggactaaaggcacgtaccaccac

SEQ ID NO: 335412 - DNA, 559 bp, Homo sapiens
ttcttggtttggggtcaggtggcttctagagagagaaccattgtgaatgaccgatgtgtccagcactgttcargcatttaatctctgttctcagttacatacagtatcttctaagattccatgttctttttaatagcatcagttatgacttccaccctcttggctagtggtctttacctttccctccccaaccctgcatacccctcataactgaagaatgatgagactgtttttgttgtcaccatgctgttcccctctcctgcaagctaccagtattcagtaggcagaatcagtgggtgtcctgcagtgctgggatagtctccaaacaataaagaattgtctccccaaaaacatctgtagtgcctgggttgagactcactctacatgtatggggcatagtgaccctacaacctctatcttccttttccactcctaggttttgaccaagccctttataaatctcctacattctccaccctagtggtgataatctgcccttgtggttgtaaagaaagacctatacaaccagatggatatgttttaagtaggcagattgtac

SEQ ID NO: 335413 - DNA, 590 bp, Homo sapiens
ttgagcaaattggctagcattttgtatgactgtgtaatttcttcttatgtaaaggtgatgctgtggagtcttcaaaaagcccgaccactctggattacaaatttacaggaggatgaaacagaagaaatggaaggcccacagtcacctggtcagctcttaaaccctgccctagcccattctatctctgtggcttcgtgtggtaatatttttagttgtggtgcagaagatggtaaggttcgaatctttcgggtgatgggagttaagtgtgaacaggaactgggatttaagggccacacttcaggggtatcccaggtctgctttctcccagaatcctatttgctgcttactggagggaatgatgggaagatcacgttgtgggatgcaaacagtgaagttgagaaaaaacagaagagtcccacaaaacgtacccacaggaagaaacytaaaagaggaacttgcaccaagcagggtggaaatactaacgcttcagtaacagatgaggaagaacatggcaacattttaccaaagctaaatattgaacatggagaaaaagtgaactggctcttgggtacaaaaataaagggacacca

SEQ ID NO: 335414 - DNA, 257 bp, Homo sapiens
cctctccttgtggaatgtcagcttacgtctgacaaaaaatgtaaaactgagagagttacaatcttaaggaggagtcaagctaaagcagaaagaatcacctactctggactccagcatgactgctgagctcaaatatatatakagagagaaagaaccacaaacttgaagatggatatcagctacagactttcctgagtcaggtagggaaatggccatccctcaaaccttgcaaaaggcaaacttatgccattgtgtcc

SEQ ID NO: 335415 - DNA, 257 bp, Homo sapiens
cctctccttgtggaatgtcagcttacgtctgacaaaaaatgtaaaactgagagagttacaatcttaaggaggagtcaagctaaagcagaaagaatcacctactctggactccagcatgactgctgagctcaaatatatatatagagagaaagaaccacaaacttgaagatggatatcarctacagactttcctgagtcaggtagggaaatggccatccctcaaaccttgcaaaaggcaaacttatgccattgtgtcc

SEQ ID NO: 335416 - DNA, 257 bp, Homo sapiens
cctctccttgtggaatgtcagcttacgtctgacaaaaaatgtaaaactgagagagttacaatcttaaggaggagtcaagctaaagcagaaagaatcacctactctggactccagcatgactgctgagctcaaatatatatatagagagaaagaaccacaaacttgaagatggatatcagctacagactttcctgagtcaggkagggaaatggccatccctcaaaccttgcaaaaggcaaacttatgccattgtgtcc

SEQ ID NO: 335417 - DNA, 631 bp, Homo sapiens
catctctttcctttgcagacgactatctcctacactgaaacaggaaagcttttaccyttttggcatgcttgatttaaagattatagaaaagtatttgacaaagaaaactcacacatgtgtgtacatatcttttaaaaagttatgtttatgcattgcacaggaatatcgagaatgctaataggcaatgtcagagtttactgtttttcaaaattagtacagttttattatttctaaaaactataaaatgaatatattcacatcaccatacagaagagtaggaggagatggcataaagtgtcattgttcctcctctgcaatcccaggagataactaccaagcacaatttatgtcttttaaaattcagcccgtatttatatacatatatattcaatgtagatgggatcatgatatctcaccacacatactcttcagtgacctgcattttcacaaacaccttccacgtaactatatagaagtctacgtcttccccttaatgtctgctttgtgctacattgtaaagctctagcacagtttaaccaaactcctattaatgaggattttagttatttttcactctttaaacaatatttccatgtgtagtcttatacatacgtctgtacacacttatccc

SEQ ID NO: 335418 - DNA, 484 bp, Homo sapiens
cccagtgacctgtctctgtactctgtaaattcaggtcacctgctcagggctaatctgagagaaggtctctcttcagttgaattttgaaagacaattagcagttcacaagytaacccaggtggacaaagatgttcccaagcagagggagtgcttgtgaaagctggaggccatagaaaaactctaaggagtgtagggaggtgggagtaatgtatggaaggggtggagatggaaggttaagagagatacaaggctgcaaaaatggagctggactcaaaagaaaatactgaaaaggtcttcagtgttgttgatgagattactatggaaacactatggaacactgggactccatggcagctccaaagatggcatgcgcctggtccagctcagtaagagctgagctcttcctgtgctgtgaaaacagacaaaccaaccaagtaaagtctacttttctactctattagtcttcactttggtttcgtatacc

SEQ ID NO: 335419 - DNA, 621 bp, Homo sapiens
cataaggaagcaccttgcccttctgcctcttgagaatgttgatgagtatcaaatctttcaaactttggaggtttgagtaggggtgagactcagtaatgtcccttccaatgacatgaacttgctcactcatccctgggggccaaattgaacaatcaaaggcaggcataatccagytatgaattcaaaccttcttctcagaagataacactctgaagtgaaacccacccataacctaagcaagtgaagacaggtgctgcaggtggaattgtgtccttcaaaaaggtatgctcaactccttgctcttggtactcataaatgggtcacataaatgtgactttatttggaaatagggtctttgcagaggtaatcaagtcaaaattaggtcatactgaaatgtttgtgaggatgcggtgaaaatggatcattcatatattgctggtgggaatataaaagggtatagctactctagaaaatagttgtcagtttcttgaaaaactaaacaaaagacacctaccatatgacccaggaattgtactccttgggaatttacccccaggaaataaaaacttatgtccacacagaacccatacatgattgttcacagcagctttatttgttgta

SEQ ID NO: 335420 - DNA, 575 bp, Homo sapiens
caatagtcgtggaagacctccttactttacttccacgtttcagtctatgattcacctatcatttattgaggacctgaactaggatttttactccttgatctttatacaattctatatttattgtagagcttagcacaaagcacagtgctttggtcatacgagtatttgttgaataaataagtgagtgaacaaataaatgaattgttgatgattaatataagtttatagggcatttatggggattgtttttctgtgtgtgggtttgtttgtttgttatctggatgcaccaactcacagagtgtgacattactaacccagtttacagatgaagaaacaggaccagaaatatcaagagactagcccaagtggaaaagtcatctctcargtacgtgctcgctgatttcaaatatttttgctccacatgaccacccacctggaacaacaccattagacctgatggtccaggcctccgtgaagagttctactgcactggtaatccactttccaactgcgatttcagggaccagtcagctcactcttctgctgtccttgtgcagcacacccacccttcgttg

SEQ ID NO: 335421 - DNA, 494 bp, Homo sapiens
agcccaaactctgcctcattcatcccagcctcctccctgcatccagcaatggctttgatcatgccactccactgcctaaaacccccactgtcaggttaagtccagagtcyttagtgatggtgagcacagcttttcattacacggctcctcccttcccttctcttctcccaacacctccccagagccagcattacctgtcagccctcaaagctcctcgaatttacctgtacaaaccacgtcctcactgaccctcatctttgcacatgctgttccctctgcatggatgctccttctcccctcactccttccatcacacggcctgcctggtggcctcttagttttccttccagattcggtaactacagaaattactaagaaagttatacatacatatatatttttttaaaaagaggaattataatggtgtgaaaaattatatatacatatatatatatatataccaaaagaaaataaaagaggaatgggcagacgtg

SEQ ID NO: 335422 - DNA, 494 bp, Homo sapiens
agcccaaactctgcctcattcatcccagcctcctccctgcatccagcaatggctttgatcatgccactccactgcctaaaacccccactgtcaggttaagtccagagtccttagtgatggtgagcacagcttttcattacacggctcctcccttcccttctcttctcccaacacctccccagagccagcattacctgtcagccctcaaagctcctcgaatttacctgtacaaaccacgtcctcactgaccctcatctttgcacatgctgttccctctgcatggatgctccttctcccctcactccttccatcacacggcctgcctggtggcctcttagttttccttccagattcggtaactacagaaattactaagaaagttatacatacatatatatttttttaaaaagaggaattataatggtgtgaaaaattatatatayatatatatatatatataccaaaagaaaataaaagaggaatgggcagacgtg

SEQ ID NO: 335423 - DNA, 586 bp, Homo sapiens
atgcccacgtggctttcttttctttttaaatgtacctgttatttgttttggattaatgtaaacatgaatatggtcctacattcaaaactgtctccaagacaagaggttctgcttccccgagaccaaggcactgactggctgatagggtctcattctggaaatattctgttcaccttcarcaaatgcacatatacacagacactcacacatgcattttcttatttttctgcacaaatcatagcacactgagtacactggtctgtgcctttacaaattattggagattgttcttgttccattttgggatatagaattttctctttttttttttttttttttttgaagattgcagagtgtttcactctgtagatacaattgatttaactggtcccctgtggatgaagagatcatttcctagcttttctgtaatcaacaggctgcaataaacaacttttatagttgttattttcctcacatgcatcatttgtaggacaaattccatcaagtgaaattatttagttgaagagtatgggcatttaatgttttgatcaatattgtcaaaataatagagtcgttgatgacagtt

SEQ ID NO: 335424 - DNA, 586 bp, Homo sapiens
atgcccacgtggctttcttttctttttaaatgtacctgttatttgttttggattaatgtaaacatgaatatggtcctacattcaaaactgtctccaagacaagaggttctgcttccccgagaccaaggcactgactggctgatagggtctcattctggaaatattctgttcaccttcaacaaatgcacatatacacagacactcacacatgcattttcttatttttctgcacaaatcatagcacactgagtacactggtctgtgcctttacaaattattggagattgttcttgttccattttgggatatagaattttctctttttttttttttttttttttgaagattgcagartgtttcactctgtagatacaattgatttaactggtcccctgtggatgaagagatcatttcctagcttttctgtaatcaacaggctgcaataaacaacttttatagttgttattttcctcacatgcatcatttgtaggacaaattccatcaagtgaaattatttagttgaagagtatgggcatttaatgttttgatcaatattgtcaaaataatagagtcgttgatgacagtt

SEQ ID NO: 335425 - DNA, 522 bp, Homo sapiens
agtttaggccaccatacgagctttaagaaaaagtaaaaacaaatactcaaagttttcacaactataagaaatccaacctagactactggagacagaaatgagatcactaagtctactgggtgtaaagccacctgcagcccttggctctggtccctcctactgtttaggaggtagaggggtgtagaaataagaagtgagtgactttctttggcagaacattgattctgcaacactgaagccattgcaggaaggttcccacaatgtttgagcagattcccaaatactcagaggcccctggcctgttgtgaraggtaggacagggatccctaagccatagctggaatccagagagaggaggccgctgatgggctccctgagactgcaggcgtgatatccccatcaaggcccctaatgccccaggcagaccttggctgaggctgtagcaggccaccctctggcacattctaggagcctctatctggccttgcccttggccttgaaatctggtttcggggcaagaac

SEQ ID NO: 335426 - DNA, 283 bp, Homo sapiens
agaaccacactgatgtgagagttttgattccatgctaaggaattttcaacttttcccaggggcaaaagtaaaccaatgacaaagtcatgactagagatttaaaatgtcactggacaagtgactgcttgtgacctgtaattgcttaactaattattatcacatgagtgtggggtctgttagccttaaatcactaccttaaccttgagaagttgatgawgcctttgttttctgagaacagtttcagtgtgcaggctgacagttctataggggtggcagaagaaaa

SEQ ID NO: 335427 - DNA, 609 bp, Homo sapiens
ccactataaaattttaataaaattaattataataaaaatacaaaagaaagccatccactaaaattagtaccccaaaacactttatattagttaaccagctacagattaacagttgttggcgtgcaaagttgcatacatacttgacttctcatctggtctaatttcttccttgaatcctgcatctcattttctaaatagatgcagtgamgcgatgaagcatccagcaaagcttttgttgctgattgtttgtttaagacatcatctcatttttgttaaagctgtctcacagctacctgatgttatttttgttactgattttacaaatcaccttattattaaaccattaataatatttaactctaaagcatacactttgaaaaataccaccacacagaccgattcaccttcttttcctcatgtgtacacgtccctgttcattactgaatccagttaaggatacagaaggtgttatcttcctgccaaactggtattgttattcacatagcatattcagcccactagtcattcctcccctgatgaatctgcaatgcttaaaaaccttctgaagtctcaaaaagaaatgagtatgtgggtgagactgatggtggt

SEQ ID NO: 335428 - DNA, 606 bp, Homo sapiens
tcatatgtaaatatgataaagtcrtccacacattcatgcagtgttagcatcaagctgtaacctcctgcctgtactagtgtaggatttgatgttttatagtttgtgtctttgggacaggaacatgaggaaatacactgaagaaaataggaatacaggcttccagaaaatatacagtcagaaattacaaagaggtattatgcgtcatgtgtgtattactgaaataaaaagcgtcaatatcaatgtggatatgccaaatgatgaaaagaaatgtgatctaaaatcagaggagcaactcatacacccaggaatcaatgtcaaagaaggtagtaaatgctactgcatgtttttcatgcaagacatcagaaggatttataccattatactgcaagtattcatcatgctctttaacttgcctggtaattgagcaggtacacaatgacaatgacactttagtagaatgtacacttcacaagtcctcagtggaagtgtcccagcttcatcagcttggatataggttgggataatcctgtatataatattctttatttctcaaacccatgtggtgtaataatgtgcctacatttgttgtgccctctagtttaggct

SEQ ID NO: 335429 - DNA, 571 bp, Homo sapiens
aaaacatggctctaaggagtaatgaatatagtcaatacagctatggcagtgtacatagctatattcagggtatctgaaatacttctatttaatttcttatatagtacaaatcaataaacgcaaccacataagcaaatctatgttggtatgtcatcgtatttatgttcattttgtatcagcatgaagagactttaattaattgtggtgcagtcataaaatggcataccacaagaccacacaacaaatcaaagatgaccaaattgtgtcaamctgaatagatctgaaatatataccactgattagaaaagccgagttgcagctattatgtacgctgtgtgaaatcgtatagaagacttgatacttggaaacagattctacacattacctatgaaagtgcaagtatcttgtaaagtatttttaatgtgcattgcagtgatttaaaagaaaaaacgttaattcaggctgttggttacctgtaggcaataaattgtagtagaagaaaatattctaaggccaaaacagctcagaatcattgttttaaaacactgtatctaccaaagagttacaaaag

SEQ ID NO: 335430 - DNA, 617 bp, Homo sapiens
gcataatacccaataggtagttttttattctctctctcttcccatcctccaccctcaagtagaccttagtgttttttattcccttctttctgtgcatgtgtactcaatatttagcttctaattataagtgagaacatgcagtatttggttttctgttcctgtgatagtttacttaggaaaatgrcctccagctccatccatactcctgcaaagaacattctctcattcttttttagggctgtgtagtattacattgtatataagcatcacattttctttatccagtctaccattgacaggtatgtaggttgattccatgtctttgctactctaaatagtgcttcagttaacatacatgtccatgtgtctttattatagaatagtttatattcctttgggtatatacccaaccactgaattattgtgtcaaattataattctgtattaaattatttaagaaattaccacatgccttttgagaatggctgaactaatttgcattcccacgagtagtgtataagcattgcctgttctccgcaacctcaccagcattgtttttttttaactctttaataataaacattctaactgatgtaagatggtattgcattgtgata

SEQ ID NO: 335431 - DNA, 532 bp, Homo sapiens
tctttagagacagaatcatatcttcaacagagataattttactttccctcttcctctttggatgccttttattttgttgttgttgttgttgttgttgttgtcgttgcctcattgctctggctaggattttcagttctatgtttaataagagtggtgagagtaggcatccttgtcttgttccaattctcaaaggaaattcttccacctkttactcattcagtatgttgactgtgggtttgtaataaatgtgtgttgatggtatgttttattttgagttatgtttattcaatgactagtttgttgaatgttcttagcatgtagggatggtacattttctcaacaccctattctgcatatattgaaatgatcatgtggttgttattagttctgtatatgtgatgaatcacatgtattgatttgtgtatgttgagccacccttgcatcccagcaataaagcctaatttatcatggtggattagatatttgatgtgctgctgtatttgtttggctagcattttgttgaggatttttg

SEQ ID NO: 335432 - DNA, 550 bp, Homo sapiens
tcagtatgttgactgtgggtttgtaataaatgtgtgttgatggtatgttttattttgagttatgtttattcaatgactagtttgttgaatgttcttagcatgtagggatggtacattttctcaacaccctattctgcatatattgaaatgatcatgtggttgttattagttctgtatatgtgatgaatcacatgtattgatttgtgtatgttgagccacccttgcatcccagcaataaagcctaatttatcatggtggattagatatttgatgtgctgctgtatttgtttggctagcattttgttgaggatttttgcttttttgttcatcaaagataytggcctgaagttttccatgttgttgttgttgttgttgtgtctcttccaggttttgatctcacaatattgctggcctcatataataagttagggaagagtgtctccttaactttttggaatagtttcagtaggaatagtaccagctcttctttatacatgtgttagaatactgcattgtattcatctgctgctggggtttttctggttagtag

SEQ ID NO: 335433 - DNA, 590 bp, Homo sapiens
ttcaccagctacattgccggagttaaaggaagggtgatgcatgcactcttttggccaccacagctgatgttgtactaggttgggtgcatccaaaatcaattgcctctgagagaacagtgcagctccagggtttttccaaggcctgtagtccttgaggyctgatggccactcaaatttacttcaggcctcgggccatgttagtcagctagtggtggagccagccaggactggagttcctcccactggagctgagaatttccctcattcagaactgctctaaatgttccctgctttggtgctagcataatttttccctatgttgcataccactgggacagggcaggactgggttgcaatgcaaagtagcccattcactttactcaccatcctgtaagcaaacaaattgtctttcaatgaggtgctgatggacaatgagggagggtttgtgtaggcaatgcaagaccatctttcctactctcttcagtgcctcttttattgatattttgttaaaaccagttattgtgattgctcattttattggttcttatgaatgtgttttcttgcatgcatagttgtttaatttggtgttc

SEQ ID NO: 335434 - DNA, 504 bp, Homo sapiens
atagaccacagtgcaataaaaatagaaatcaataccaagacaatccctcaaaaccacataattacatggaaattaagcaacatgctcctgaatgactttttggttaagattgaaagtaaagcagtaaccaaaaaaactttttgaaattaatgaaatcagagtcaatacataccagcatcttgggacacagggaaaacctgttaagagggaagtggagagtgctgagcaactacatcaagaaattagaaaaatctcaaattaataccctaacattacacctggtggaactagacaagcaagagagactctaaagttactatttaaaaagaaataactaaaattaagagctgagcaaaatctagatagcaaaatccatacaaaagatcaacaaaaycaaaagttgaatcattggaagaattgacaagaccaaaacactaggggatctattagcaaaaaaaaaaaaaaaaaaggagaagatccaaataagcacaagcagaagtgatg

SEQ ID NO: 335435 - DNA, 614 bp, Homo sapiens
ttaaaaatagaactaccattctatgcaataattccactactggttatctaccaaagggaaataaattttatacaaaaggatatctacactcatgtgtttataccagcattattcacaatagaaaagatatagaatcaactaaactgtcaatcartggattatcggataaagaaaatgtggtgtatatatacaatggattgtattcagccattaaaaaagagaataaagtcatttttttttttccagcaacatcaatggaactggaggccattgtcttaagtgaatggtttggaaacagaaaggcaaataccacatattttcacttataagtgagagctaaataatgtatagaactggacataaggagtaaaataatagacactggagactcaaaaggatgggagggatcagagggggtgaaggatgaacaattacttagcggatacaatgtacattattaggttgatggctacactgaaaccccagacttcaccattatgcaatatatccatgtaacaaaactactttctcctaaattataaatattaaaacaaaaacaaaaacacctctattgttcacctgacctccataagccactattctgattgtagact

SEQ ID NO: 335436 - DNA, 532 bp, Homo sapiens
gcctctgggtggctttctcatatgcttgttgtagtagcagggtactgaattggtgagtgtgcttacaatcttctgagcagacaaagtggcatgagyaatggcagttacagtggtagtgatttactcttctagttcctgagtgctatgctctttattaccagttgttgccatgggctgtccaggctggtctctaggccagtagatggcagtagcagacaggaaccagttgcaatggtagtggtagaatttctgccttacttctgccccatgtaagatatgctcaggtattccaggaggtaaactgggttgtggaaagccaggagcttggaccccacatactgtttcagtgaggggatgatgccagctggaaccagattggcaagcttgcactcaggccccccagtggtaagtgcaggcaccagctgtgacttggggttgaagtgatgttcaggtccctgggaaaatgcttgggtcagggatgactgctgctgttctgaggtcttgtcatgggttgcaaatatggccagtctgt

SEQ ID NO: 335437 - DNA, 532 bp, Homo sapiens
gcctctgggtggctttctcatatgcttgttgtagtagcagggtactgaattggtgagtgtgcttacaatcttctgagcagacaaagtggcatgagcaatggcagttacagtggtagtgatttactcttctagttcctgagtgctatgctctttattaccagttgttgccatgggytgtccaggctggtctctaggccagtagatggcagtagcagacaggaaccagttgcaatggtagtggtagaatttctgccttacttctgccccatgtaagatatgctcaggtattccaggaggtaaactgggttgtggaaagccaggagcttggaccccacatactgtttcagtgaggggatgatgccagctggaaccagattggcaagcttgcactcaggccccccagtggtaagtgcaggcaccagctgtgacttggggttgaagtgatgttcaggtccctgggaaaatgcttgggtcagggatgactgctgctgttctgaggtcttgtcatgggttgcaaatatggccagtctgt

SEQ ID NO: 335438 - DNA, 515 bp, Homo sapiens
  misc_feature (1)...(515): n = A,T,C or G
ccatggtggagactctcccagttttcacctggtccaggccttgcaagttgtctgtttttcttctccttcctggaatttagagtttcctttcacttttatgttgaactcttctgtttcttcttggataatatattcaaagtgtgatagtctacatactattttttttttcacctaactggatgaggcatactrgaaatacttattgtcagccattttggagaaagctacacaaaacaaatttagaagtatgccttctacttacatttatattttttggtagagtttaagaagaatttgtatgaatttttttgaatggtgtaattcagacatgaagacatctggtactgggcttttctttgtataaacattttcatttactactttaatcttatttgttattggtctgttaacaggctttctatttctttgtaattcaatcttggtagattgtatgtgtctagaaacctcannnnnnnnnnnnnnnnnnnnnnnnnnnnnnnnnnnnnnnnnnnnnn

SEQ ID NO: 335439 - DNA, 584 bp, Homo sapiens
ccacatttgggcacatcatagtaatactacgttaatacaatcaaccaaaagagaaagggaaagaaaaaaataacagagatagactatgagtaaaagcaagagcacttataaaaaaccagaatggtttggtgtggtggctcacacctgtaatcccagcactttgggaggccaaggcrgacagattacttgaggccaggaattcgagacaacagtgaaaccccatatctactaaaaataaaaaagtggcacacaactgtaattccaactactcaggaaggtgaagcaccagaatcgcttgaactcgggaaacagaggttgcagtgagtcaagatcacaccactgcaatccagcatgagtgaaagagcaagactctgtctcaaaaaaataaaaataaaaataaaaaggaaaaaaagaaaaaagaaaaacaaccagaaggaaacaaaatggcacctgagatttacttcaaaataatctatgctggctggtgggaggaggggaaggcatgggaatggggcagtggtaaaagtgaaaaagactggctatgagttgcaaatgttgaagctggtgacagacacgtcacactt

SEQ ID NO: 335440 - DNA, 584 bp, Homo sapiens
ccacatttgggcacatcatagtaatactacgttaatacaatcaaccaaaagagaaagggaaagaaaaaaataacagagatagactatgagtaaaagcaagagcacttataaaaaaccagaatggtttggtgtggtggctcacacctgtaatcccagcactttgggaggccaaggcagacagattacttgaggccaggaattcgagacaacagtgaaaccccatatctactaaaaataaaaaagtggcacacaactgtaattycaactactcaggaaggtgaagcaccagaatcgcttgaactcgggaaacagaggttgcagtgagtcaagatcacaccactgcaatccagcatgagtgaaagagcaagactctgtctcaaaaaaataaaaataaaaataaaaaggaaaaaaagaaaaaagaaaaacaaccagaaggaaacaaaatggcacctgagatttacttcaaaataatctatgctggctggtgggaggaggggaaggcatgggaatggggcagtggtaaaagtgaaaaagactggctatgagttgcaaatgttgaagctggtgacagacacgtcacactt

SEQ ID NO: 335441 - DNA, 577 bp, Homo sapiens
cacttcttagtggtaattatacagtcttatgcactattataataccttaactccaaggaactcaggtggcttaatccaacctagctaattatcagtgacctctctttctcccctagcagaatccagaggtaaaacaggtatgaaataatctactgatgtcaccagattatgtacacatatacatgttacaattcatcccccatataattattcatagatcttatatatacaaagtattaaaaattttaagaggaagagactctgacagcacaaacccacagtccctcaggctgcgttcaccagcactccccttcttgccaagcacgtyacacatatccacagccttccacatgcaagctgcagtcatgcccttggtagaaaggtggataaccagaaacttaagttttgaggattttaactcaccatgctctgagatgactgcattattcgcagctgcttaaggacaaattctaccttcttctgggttgtaagagaagccaaaagggcattgtggttcctacagaacaatttagcattgtcataattctccttggcagtagtaattttcaaacatgag

SEQ ID NO: 335442 - DNA, 545 bp, Homo sapiens
atggtgagcccaagtgagtcatggtggcattccagctggcagcagggagtgtgccgttgcatgctgggccacaccaatggaaggcaacactctaggccaagccttgtcctcccattaaacttcatcaagtcactccatcaggtcccaccctctgcgtggtgctggttgcttcatataggtttggtgggtgccttgaggccatcagttaccatgagacatcatcacatgtcacgggagggtgatgcttgcacrcacaggggcagggcttcctccagcccagggagtctggcagcaccttgtgtggtttagccagaggcctctgcatcctgcccactcacaggactgacacccgctgcattgcaggagcaatccccaccccagggtctcaggggacttcttgaaacattttcttggtgggttccatgccctggtttttccaccttggattccctgatctttgtaaattcagggaccctgcagtaattctctcctataccacaccagtatacatatgacttctttgtccaaaaggccaaaataacaaa

SEQ ID NO: 335443 - DNA, 501 bp, Homo sapiens
gttaccatagcctcctatcagcagcataactttgtatggtacataatatttaccattttaaaattctaagtaaatatctgacaatatccagatcaaatgattttgcagttaaaatactccaaatcatgcagtctactcctttaaaacccattgaaaatatagcgcagagaaacaacyctgctttataaatgcatcaggaacatcagtaacaaacaggtccacattcttatgttatatcagaggatacatatggggtctagtgaaactctgcacagtcagaaccaagcatgtgcctacttcagtggtctccaaatttctttactgtgcaattccattagaaaaatattttggggcagtcacccccaatatgtttctttaaatataaattacatatgtgtacatacatcagctaatatgtcaaggcacaatgcacacttaggtgagggtcatctttaatgtcaatgaatgtaaatccttgtttaaagtagacttcacagtttt

SEQ ID NO: 335444 - DNA, 501 bp, Homo sapiens
gttaccatagcctcctatcagcagcataactttgtatggtacataatatttaccattttaaaattctaagtaaatatctgacaatatccagatcaaatgattttgcagttaaaatactccaaatcatgcagtctactcctttaaaacccattgaaaatatagcgcagagaaacaactctgctttataaatgcatcaggaacatcagtaacaaacaggtccacattcttatgttatatcagaggatacrtatggggtctagtgaaactctgcacagtcagaaccaagcatgtgcctacttcagtggtctccaaatttctttactgtgcaattccattagaaaaatattttggggcagtcacccccaatatgtttctttaaatataaattacatatgtgtacatacatcagctaatatgtcaaggcacaatgcacacttaggtgagggtcatctttaatgtcaatgaatgtaaatccttgtttaaagtagacttcacagtttt

SEQ ID NO: 335445 - DNA, 501 bp, Homo sapiens
gttaccatagcctcctatcagcagcataactttgtatggtacataatatttaccattttaaaattctaagtaaatatctgacaatatccagatcaaatgattttgcagttaaaatactccaaatcatgcagtctactcctttaaaacccattgaaaatatagcgcagagaaacaactctgctttataaatgcatcaggaacatcagtaacaaacaggtccacattcttatgttatatcagaggatacatatggggtctagtgaaactctgcacagtcagaaccaagcatgtgcctacttcagtggtctccaaatttctttactgtgcaattccattagaaaaatattttkgggcagtcacccccaatatgtttctttaaatataaattacatatgtgtacatacatcagctaatatgtcaaggcacaatgcacacttaggtgagggtcatctttaatgtcaatgaatgtaaatccttgtttaaagtagacttcacagtttt

SEQ ID NO: 335446 - DNA, 360 bp, Homo sapiens
tgttttcggggtattgagttccatactgaaataacacatttcccactgacaacaaacagaaactccaagtaactattcaagtccagactttaataaaaaccataacccatccagctggaggsggggaggtgatgaggaagtatcaagttgggggaaggagaaacagccccttttaatcactcccaccagggaaccctcatctctcctgggctatttgaaatccttactcctttatgctaaaaagttacctcctccaaaaattcctttctaattattccatccctcccctcctctcccctgccccaatctcatgtaacactatctggttcctttcttatggcatccatcaatgagagttca

SEQ ID NO: 335447 - DNA, 556 bp, Homo sapiens
tctgcccctcctggaaatgcctgaagaaaaggtgagaagtgtccctcctaggatgtttcctgggagggaggggatgggaaaagtgggggcaaaagatgcygctttcccaccttcccagtgaacttagcacactgaggaagtgccactgtcagtacatggtgacacccatggtgggtcctacctggccttagataatgtggctcttcatgagacatgattttaaggacaagtacagaatacagacactcactcaccagtctttcaatcagtctctaaaatctttccccttaaacctgctcccttgaactaccctactgtctccaaagggaaggcctttgttgaaatgcaggccattagcatcctcggtggtagcacagaggtagactggctggccactgctgcagtagagagggactcaagactgctgggatggccttccagagctgtcctgacttgcgatgaggaggtcccatatctttactcatcactactttgaaattacagaaggtattggatctgctgtgcatacatgtgtatcttaatttttagtaagatt

SEQ ID NO: 335448 - DNA, 510 bp, Homo sapiens
ccggggcttcttttccaaccaagccagtggctggaacagcgttaaattgttctcagcatggtgcctctgtctatatggcaaaaactaccacccactgcagaatgattgctgggctactgagagatttgggctgggcaccagcctcccctctacccccacccctccaccccgacccctggcctggctgaatgggaagggtcctggcttgcacattcctgtttgccttggttgccatgccaaccagcagttcagcagagcagcccaagctggacctgctgatggctcgctctctgtctctttcagacaagcaccttgccctccagttcatagactgggtcctgagagggaccgctcaggtgatgttcrtcaacaatcctctcagcggcctcatcatcttcatagggctgctgatccagaatccctggtggacaatcactgggggcctggggacagtggtctcgaccttaacagctctcgccttgggccaagacaggtgggtccctctctata

SEQ ID NO: 335449 - DNA, 602 bp, Homo sapiens
agttttacaaggggggatgcacaccaggcatgcctaatcctcacaaacaccctgattaagaatttaagataaatatgcatcagataaaaacccagtccctcagcttggctccccaagtgtcatttgatgggtcctacagtacctagtgctcaatcaacatcacatttgtccctagttaagtacttttgcttctgtgatccctgacaccagctgtacctctgtctatctaattctacagttccctggaatccttcctcccccagggagccactcctgattccctctatgctctctgaacttttctttctctctgaacaaccacagaacacatcccagtactagattgaattgttctgtaattaatttttttgattcttctttctctggatatattctaagcatgttcaggagaagttggtttccaatgggccatatacacccacagtgcctagaaaagatctaggctttgttgctgacaggtcagtgtcttgttctrcatcataggctcaaagctctagccactggacacaacatccatacacatatcttctaaggagccacgagctcactgctgtacacaatgaaccactgacacagttgca

SEQ ID NO: 335450 - DNA, 580 bp, Homo sapiens
caccatgaaagggagttaggaacaaatattcacctagcgaagggtgtgctgggccattcayacaatgattcttagttcacgtaaatttacagcaggtctatcaagcatcttggggtctctgcagtgtgctcactgtcatggtgaacctttgtcccccagaccctgacttcacatgtgtataccaccctgttctcaacttccctcaaacagtgtgatttattcttattgtcagcaataaatcagacaggatgatttacttttaacatctctaagaagtaaatgtctttccttggtttcaaagtctgcagttactaaaaccagctagtttaatttagcttaactactcttttattactttttagtagtgcttgcaaataaattactacattaaggattctgggcaatttagttttcctcttagggtttcgttcttaatccattgggacaaaaagccaagacagtcatttctatgtggattttcttaatgccccccacgttcctgcctgtgaaaaggagaacttgccctcatttgcaatacatttggtttaaaactacatagattaagcccctcaacacagct

SEQ ID NO: 335451 - DNA, 564 bp, Homo sapiens
ttttttttttttgtagagccagtgtctcattatgttgaccaggctggtcccaaactcctgggctcaagtggtcctcctgcctcggcctcccaaaatgccaggattacaagcatgagccaccacgtccagcctgtattttaatttctgactagtataatggacaaagtcattagatatttcagggtacaaacagtttttgtaaaataatgtatcttagtataaatgttaaatgtttgatagacactgaaatataggtgagagtccttcatagactgataaaagttatatctgaattgtgtgaggctttggaaattgcagggcaaggattgattatttctagtgttacttggataaaagmgtggaagtttatagacggtgatataaaggttggtcatttatgatcaactaacaagaaacacaggagctctgaaagagtagctggaagaactcaattaatgaaagagaagaaaataggccatggaagatggagagctggctccctgtggtttattttggttcctaagatattacataagtccattccgtctggttgtgaaaccctaa

SEQ ID NO: 335452 - DNA, 628 bp, Homo sapiens
aggtaggagaagttttgttatgacagagggcacttcaatagggagaccccactatggcttctttagtttccttttagggctgctttgaaacttatcattcaaacttgttgaagtaaatttctcatcttaccatattttctttcaaatctgccaactgtggtgaaagggtgtggaagagaagtgcttctgtggaagagacaagcatggctgtggcttcagcctcaggggataacattctgacaagtggctggtcctagagagctgacccctgaggcatgctgtggcccagggtcagccctgatggtggtgcccagggcctgtctgggaatgcatagaagtggctcttgggatattgatctcaaagtgttaggagcatgtcctgaacaactgtcctcagttattcattctcatccaggagttgaaagaataatggatagttgagaggatacccaaggggatgggcctgccaatctgaaattgaaaagggtttactcaactatacatctggtgctattaccaagtgtaagaaaggaataaggatyctagcacgtgcaacataagcgatacctacttatgcctgtgattgttcatatacatgatggctataaatggcacattatacaaaact

SEQ ID NO: 335453 - DNA, 518 bp, Homo sapiens
tttggtcactgggttttaaaattggaacgatatgtttgcttgcttggtttcctgagaaaaggaagaagtgagcttctccctaaaatatttgtaggtttacttccctatttctgtttattcattcagcaaaatgtatattgtgcactgagcactgcaaactagaagtggaaaaaatcttcaggattcctacgtttcactttccaacctccaaaatactacacgatacacactgaagtggaaagtaaatgaacatgacttcctttttaaattaattaattaattaattaattaattwttttgagatagggtcttgctcggtccacaggctggagtgcagtgacatgatcatatagctcactgcagcctcgaacttctgtgcacaagcgatctttccacctcagcctcctgagtagctgctgcagatgtgtgctgctacacctggctaatgttactatttttattttttaagagatggagtcttgctatgttgcccaagctggtcttgaactcctgggctc

SEQ ID NO: 335454 - DNA, 640 bp, Homo sapiens
ctgtggctttggtaaattgctttctagtctaccagaactctgattttgctacttctgatcaattccggtgatataaaacattttcttcattaagaaaaagagcaaaacttagaactgtgaagacaagccccaaatgatgaatagttggaaatgaatagaaataaggatgagtacttacaccactctagctggcttcctggcagcagaaggcagtggctgataaagatttgcccacctccacgacaagggagagtgcttctcaggagatggtgctggagggaggcacctaacagttatatactcagagccccactctgctctgtgtgtttgtgggctcggctttctcctcccacttcaggcatcaatgccaaagcaacaccaaggaactggtcccctggcttcagtacccgatgtctctctctctgttcttgacagagtaccaactgctttgccacagtttccacagcattccaaggtctttgacsagcaataatcctaccaaaatgcatctttttcttctcctgtttcctctggcccctactcatatttttggaaagatttacaactgaaaaggatcaacacggtgtcaaactaaaaaccatggggcaggttgctgctgtgtggactcggaagctaagcg

SEQ ID NO: 335455 - DNA, 640 bp, Homo sapiens
ctgtggctttggtaaattgctttctagtctaccagaactctgattttgctacttctgatcaattccggtgatataaaacattttcttcattaagaaaaagagcaaaacttagaactgtgaagacaagccccaaatgatgaatagttggaaatgaatagaaataaggatgagtacttacaccactctagctggcttcctggcagcagaaggcagtggctgataaagatttgcccacctccacgacaagggagagtgcttctcaggagatggtgctggagggaggcacctaacagttatatactcagagccccactctgctctgtgtgtttgtgggctcggctttctcctcccacttcaggcatcaatgccaaagcaacaccaaggaactggtcccctggcttcagtacccgatgtctctctctctgttcttgacagagtaccaactgctttgccacagtttccacagcattccaaggtctttgaccagcaataatcctaccaaaatgcatctttttcttctcctgtttcctctggcccctactcatatttttggaaagatttacaactgaaaaggatcaacacrgtgtcaaactaaaaaccatggggcaggttgctgctgtgtggactcggaagctaagcg

SEQ ID NO: 335456 - DNA, 578 bp, Homo sapiens
aagttgtgattcctaacaactcaagttcctgagtaactgacatctgttacagtgtcctcctgacacacatgaaattggacccagtaactgagaaggttaactcctgtaccaataggtactgaaatgaacctctctcaaracaggtttgttgttgttttttaaaaaaggaattttactttcaggggtccacaggttaagtagttctcattcgggaacctatatgagagtacccccgaaacaaaaagtacaccgcacacacccacagtaccaggaaaaggttacagatacagatggcctctgtgcgcacatatgctctggcttcctcaatttccctttgccaactgctggccagaaaggtgcgagtattcactttggagaaaagactcctccgacagaaacctgcatacttgcattactcgtacaaagagctaaaaagttacaaaatacaggcctccctaacaccttcccccctccgtgaataaagctagactccctcattgatagactcccaacactactggagaacatcagcaaaactccaggaggaagcgccggcatcctcccactttctccccctc

SEQ ID NO: 335457 - DNA, 573 bp, Homo sapiens
caggtgtcctcaaacaaataccaaaatccatgacagtgaagtttagtggagaaacatgtccccctttgcatgatattctgagcttcttgatgacagcaatatcaaaagggaaaatgtagttttaatttggagggagatggaatctcatttacgataaacctggacataagatgtaatcaacatttcattcttgtacaatgtaaagagttattttgagcaggttttcagtgacctgtgaagaaatggcatttcagtacaacttcttccttcaggttttcatacagatgagcattgttataagtggctaagaaagatatggaagaggacatgataggatagaaactatttttctgggatagatgcagtgttcctcraacatacaagtgcattgaatcttatatttacttttgtagctctaaacaaaaatccaacatcctttgtggttctatttcgaacagtttgttagtgttagggcttgcagaggccccgaagtaacatccctctctcaggagctggaaccattgaaagtcataggaatctttcaggttgagatcagaatgtcaggttcataac

SEQ ID NO: 335458 - DNA, 584 bp, Homo sapiens
ttcactttttcctcatctattaattgacccctacctgactttgtttttaaagatttttagggtatctaatttcataggataactgcaggaacagtgcaattaacggaaataaattatgtcaaattatgtaaccttctagttattgttccagcatataacatggtgcctggcatacacaagatgttcaacaaacgtttgtgaaatgaattaataatttagtaaatttttaaatgaaagagggattaaggactcttattttgttttaggttaactttaggttgggctatattcctggaacatctaacctaggattaaaatttaatttaatttacatggtcccagatctaatayaaaattgatcttcctatgatggataagaattaggatttacttcttttagtatcttcctaacactggctttacagtgaaccttcctgatacataggttaaaaatataataaagttgaagaggtagcagaccaattccatcataaccaaaacaaacgacctccctcattcagtgacatttcatgcaattgcgtggggctctctggagtcatcagagtataccacactgcatcttc

SEQ ID NO: 335459 - DNA, 290 bp, Homo sapiens
tgttggctctgacggcatcagtccatacctaataagctggwttctgagttttgctatatcatacacagacacacacacacacacacacacacacggcaaaaaggaaacaaaatccagatcccatgcaagatggaaggtctgatcagagaccctggcatagagtcaggaatacctaagggtgatacccacaatgataaaccagggaaagacatggcccacagaagagcaaaagggcacctatcttggccttggtgctcatcaaaagcaaaagaggggaaaaaattctcttg

SEQ ID NO: 335460 - DNA, 625 bp, Homo sapiens
ttaggactacatcagtgctcaatgagaaagtcaacaagaataaagaatgcgagtgttttgatgctcaccccactatactatttcacagactgtgccagctaatacataggaataagaattataaatcttattgttttagcaggttttcctttagtctgctttcwttctgtcttaatttgcaacctctgcaggcattctggctgaaatcaaacgacgctgaagtcatatctgagctttggttcacaaaaagaaactaagaaagcaaaatcttgacaaaactcttgaagcatgaacatttaattgagtcaagacattacatttatgaattaatattcctttaatctttaaacatatacagtaaaatctaacatcattgacaggtttatctaatgtatcttttggttaactgacattatgttttaaatttggtttcataattgagccttcagttttttattattcagggacccacagtatctcaggattatcattttcagttttccctttctgtttgcctacaaaaaccctgtcttctagctcagcagcgcctgaatatgttttgggcattgctacctctgtgcctgttcatgttcttggaacagcccaccccaccctggcttgacca

SEQ ID NO: 335461 - DNA, 540 bp, Homo sapiens
  misc_feature (1)...(540): n = A,T,C or G
nnnnntggtttatctttctttccctaaataaatcataattttctgtttctttgtatagtttgtgattgttttctgttattgaaaactggacatttgagtctrataatgtggtatctatggaaatcagattctccatcttctccagtgtttgctgttttttgttttgttttggttgttgtagattgtctctgtgctgaggatcagctgaggtgaaaatttaaggtcttctcaggtatgcagttactattaaatgtcctagtccttaatgcctggctctcaaaaggggaaaaagaaaaatgaagtgggacaagggccctggccctttaaaaccccagaaaatcacttccagtagacaaataggggcttgcaataatagggggtttgggaagagtacaaaaatggctggccacctctgtcttgcactctgttattagaagcaaccgtcagtaatccgatcacagattctgatatttgggggacaggatccttattgccctccttgccttctgtcctataagctgcatgcaagcaattctagga

SEQ ID NO: 335462 - DNA, 564 bp, Homo sapiens
atacctcattgttatgtatataccacattttgcttatccatttatctgttagtggacacttgggttacttctaggtgtaagttactgtgaataatactgctatgaatatgtgtatacaaaatctcttctagaccctgttttcaattcttttgaatatgtacccagaagtgtaattgctgatttataattctatttttaggaacctctactctgtttttcgtagaggctacatcgtcttagaatctgaccacagttcgcaagaattcatttctccacatctttgccaacacttgttattttctgttttttatttttatttgttgctgttgttgttgtcattgttagtagtcatcctaaggggtgtrtggtggttatctcatcgtagttttgacttgcatttcttcaatgattagtgaaattgagcatcttcatgtgcttgttggccattcatatatcttttctggagaaatgtctattcaagttctttgccgatttttgaatcaggttatttgcttttttgttgttgggttttagaagttcacgatatatattttgatattaatc

SEQ ID NO: 335463 - DNA, 636 bp, Homo sapiens
attttgtgtgctttgtagcatgcaacagctgagtaaatataytgatgtacttgggaaccaaggttctcattgtagttgccagtaatatcaatatatttactcatttgttttatcctacaaatatgtaaatttagaaagaccaaagctaagaaattttccagtaggttttttttgaattgtaggtaccaatttgaactcaaatttttgaaagtgttctcaattaccaaattaattcattggatttttttaaaaggaacccaagagtctacaaagagaatggggtgggatgaagtgctgttcaaacttcataacagaataacacctttcacattcctgtaaaaggaatgatagaattcaaaatcaccatttttcagtctcccatgtaagcactgatttaggcaaggatcatcaatggatactaaaaccattctgcagaacaggatattcatcaatattctccaagtgttatttcacaggtaattatttattaatttattagtactataaatttcaaaggtgaaatgttacccttactatgaagagatctctccagcaccaccccagtaaagaaatctaatgtagaatagatttgtattctgcaacagtagcacacactaccaataataggacacactg

SEQ ID NO: 335464 - DNA, 575 bp, Homo sapiens
cgtccctttatgattaaaccctcagcaaaatcggcatagaagagacatatcttagggcaataaaagccatctatgacaaacccacagccaacgttatactaaagggggaaaagttgaaagcatttcccctgagaactggaacaagacaaggatgctcactttcaccactgctattcaacattttatgtcccagcaatcagacaagaaaaagaaataaatggcatccaaattagtaaagaggaagtcagattgtcgctgttcaccaatgatattactgtgtacctagaaaaccctaaacacwtattcaaaaagctcttaaatctgataaatgaattcagtaaagtttcaggatatgaaatcaatgtacacaaataagtagccctgctatacaccaacaatgactaagctgagaatcaaataaaaaactcaaccccttttacaactgctgcaaaaacaaaacaaaaaacaaagaaacaaaaaaacatagggatatgtctaaccaaggagttgaaagacctctgcgaggaaaactacaaaacactactgaaagaaatcatagatgacacaaacaaatg

SEQ ID NO: 335465 - DNA, 543 bp, Homo sapiens
cattgtgacatgtctcagatgatgttataataatggagcgtgcttggccgactagagctcataaggaaaagagttcaatccaaaaccgggacagtggttacctagcacatttcgagggagagaacactccaattccgactaatacatgctcttggatcctagaccactttgtcttcagagtggaaaatcggaatactctcacgagatactaactttaggccaggtgcagtgagtggctcatgcactttgggaggctgaggtgggaggatagctttagcccaggaattcgagaccagcctgggcaacatagtaaaaccacatctctacaaaaattaaaaaacttagctagatgtggtggcatgcacctgtaggcccagctacttgagaggctgaggcaagaggattgcttgagcccaggaggtggaggctgcagtgagccaggattgtgccactgcactccagcctgggtgaaagagtaagaccctgtctcaaaaattgtaaaaaagagacatatcaaccaayagataaacattgattcagcag

SEQ ID NO: 335466 - DNA, 568 bp, Homo sapiens
ttgtaagtggacatttttttgtaatctttccattaattctcccacttcyggaacaaaggccccttttatttgaacatattttgcatggttcctgcctcaaggccacttgctaccacttctgtgtagaacatagcaaccctagatctttacaagactggctcccacattgcaacgcctaaaatgtcctccttatctaaaaattttcaccattgcagacactgtcacgtgattcctcttattttctttatattatttatcatcatctgaaagaatatattcaatttttacttgttgttttctatttaactcaatggaatttaagtgccatgagagcaggacgcttattggtttagtctctttagacacaatatctaggtgagttctggcattgtatagagtctttataagtgtttctgaatacatgatttaataaacacacatttttattataaatgtagtatttttaaatacattattgttaaatgaaattagtaagttaaatttttcataattaagttacctacttcttcctcatacaaaagtttactttataagatatttacttcat

SEQ ID NO: 335467 - DNA, 568 bp, Homo sapiens
ttgtaagtggacatttttttgtaatctttccattaattctcccacttccggaacaaaggccccttttatttgaacatattttgcatggttcctgcctcaaggccacttgctaccacttctgtgtagaacatagcaaccctagatctttacaagactggctcccacattgcaacgcctaaaatgtcctccttatctaaaaattttcaccattgcagacactgtcacgtgattcctcttattttctttatattatttatcatcatctgaaagaatatattcaatttttacttgytgttttctatttaactcaatggaatttaagtgccatgagagcaggacgcttattggtttagtctctttagacacaatatctaggtgagttctggcattgtatagagtctttataagtgtttctgaatacatgatttaataaacacacatttttattataaatgtagtatttttaaatacattattgttaaatgaaattagtaagttaaatttttcataattaagttacctacttcttcctcatacaaaagtttactttataagatatttacttcat

SEQ ID NO: 335468 - DNA, 564 bp, Homo sapiens
taacctgaaacaggtcatttggctaacagcactctagagacagcccaagtcaactttctgagtgccaagcacacaaagctaatcaaaaatatatcatttagtaacaagtgggcttrcaacaaccaacacaaaagaaaccaagttatacataattgaatatgtagttttatgtactgtgctgcatcttcctaaaaaagttgatgtagttacatgcaagacacggtgaaaatactgaacataaatcggtattaaatattgatgcccctgtattatgtagaggttagcttttcttcccctacaacaaggaagaatgtcagtgcatctcaaatgtagcccagcttactttccccagacaactgcagccctgagtacttcaaggtgcttgatgtctagctcatcgatactaattatttctcttccccactcagggttaaatataccttaatggatcttaaatctgcctgacaaagaggctgacttagagactcatcttacccatgacatacaattattaattaatgagggtcagctgcataagaggattgcagctgatatgtgtaataa

SEQ ID NO: 335469 - DNA, 568 bp, Homo sapiens
gtagaatggtagttactggggacaggggatgggagaaaaatgrgagatgttgatcaagaggacaaagtttcagttatatggaatgaatgagttttagagatctaaagtacatgatggagactgtgggtaataatactgtattgtacacttgaaatttgctgagcgaatagatcttaagtattttctccatacgcaaaaaatggtaacatttaatggataatataaaaaaagacatatgaaatcagaaggaaaagtaacaagcattttcaaatttcttgagagaaggcttttaaaattaggtgatagaagaagataaaaaagataatttttaaatttctgtatatcaaaaagcatacataataaatgtatacaatttttgacaacaaagttaaagaaaaaattaaagttataaatgtagagtgattggagcaataaaaagaaaatttaattttctatatatcaaaatttatcaaaaatagaatagaatatttgaacagctgaaaaatcagaaaatattttaaaacatgatatatatgtatatctgcacatatatatgaatatgtgtata

SEQ ID NO: 335470 - DNA, 568 bp, Homo sapiens
gtagaatggtagttactggggacaggggatgggagaaaaatgagagatgttgatcaagaggacaaagtttcagttatatggaatgaatgagttttagagatctaaagtacatgatggagactgtgggtaataatactgtattgtacacttgaaatttgctgagcgaatagatcttaagtattttctccatacgcaaaaaatggtaacatttaatggataatataaaaaaagacatatgaaatcagaaggaaaagtaacaagcattttcaaatttcttgagagaaggcttttaaaattaggtgatagaagaagataaaaaagataatttttaaayttctgtatatcaaaaagcatacataataaatgtatacaatttttgacaacaaagttaaagaaaaaattaaagttataaatgtagagtgattggagcaataaaaagaaaatttaattttctatatatcaaaatttatcaaaaatagaatagaatatttgaacagctgaaaaatcagaaaatattttaaaacatgatatatatgtatatctgcacatatatatgaatatgtgtata

SEQ ID NO: 335471 - DNA, 612 bp, Homo sapiens
aacatcacaaagaaaaagcaaaaaattcatgtgagtatatcagtcacagtaaaataatcataaytggtttataaatatgtaactttctatttcataagtaattaagtctaacatttcctttaataacaagacatcattttgcctgccagattagcgaagatttttaaaatgaatatattcattttctagttagtctgatgagatattttcttagagtacatattgctagatctttatagacagcaatttagatgtgtgagacttaaatatactcatatattttgattgtttaataagaaatagggacaaaaatgatacatagaaatggttatcacagcacaatttatgatgatgaaagaatgctaatggctttattttcattatcaaggaactatttaatcccaccttgagatacatacaaatgatgggaaaccatgcagtcattaaaaggtatgttttatgaataattttgtaatgcagggaaatgtagtaaaaataaattataataaaatttgtataaacaacacattttaactacaacagtaaaatatattcctggaaagaaaattattaaaaagttatcagaattctaacagttgttatctctcgttg

SEQ ID NO: 335472 - DNA, 594 bp, Homo sapiens
ctctgtctttgtttcccagatctttatagtgaaagttttcttctctgtttatccttccccttagttttgcttgctctatctccagtcttttgattccaaatcataagatatacactgatgactgatgacatttcctttgctttggggtaagagggggaaaaaaaggacagaatctgagttggcaaaagtaaaaaaaaaaaaaaagaggtatgaatagactaggaaatcaggaacacttgtgacattagttattgcagttcccatttttcagagttgaaatccaaaggtcagagaaattaaattaatgagctraggtaaaataagaagtaggtgagatcattaatattctactttttcatgtaaattttagtgtttttctctccttatcacatgtatcttggcttctcctatttgtagaaataatttaaaaataagaaggaaaattattttcagtaatcattctcaaaaatttcttcccatcatcaaatcttattgtacacaaatatacaaagtcacacatgcacacatatgtacacacacaacctgtgatggttaatattgagtgtcaacttgattgcattgaaggatgcaaag

SEQ ID NO: 335473 - DNA, 548 bp, Homo sapiens
caaaggtcagagaaattaaattaatgagctgaggtaaaataagaagtaggtgagatcattaatattctactttttcatgtaaattttagtgtttttctctccttatcacatgtatcttggcttctcctatttgtagaaataatttaaaaataagaaggaaaattattttcagtaatcattctcaaaaatttcttcccatcatcaaatcttattrtacacaaatatacaaagtcacacatgcacacatatgtacacacacaacctgtgatggttaatattgagtgtcaacttgattgcattgaaggatgcaaagtattgttgctgggtgtgtctgtgagggtgttgccaaaggagattaacatttgagtcagtgaactgggagaggcagacccgccctcaatcttggggggcacaatttactcagctgccagtgtggccagaataaaagcaggcagaaggaagtggaaagactagactggcttagtcttctggcctacatctttctcctgtgctggatggatacttcctgccctggaacattggactcc

SEQ ID NO: 335474 - DNA, 548 bp, Homo sapiens
caaaggtcagagaaattaaattaatgagctgaggtaaaataagaagtaggtgagatcattaatattctactttttcatgtaaattttagtgtttttctctccttatcacatgtatcttggcttctcctatttgtagaaataatttaaaaataagaaggaaaattattttcagtaatcattctcaaaaatttcttcccatcatcaaatcttattgtacacaaatatacaaagtcacacatkcacacatatgtacacacacaacctgtgatggttaatattgagtgtcaacttgattgcattgaaggatgcaaagtattgttgctgggtgtgtctgtgagggtgttgccaaaggagattaacatttgagtcagtgaactgggagaggcagacccgccctcaatcttggggggcacaatttactcagctgccagtgtggccagaataaaagcaggcagaaggaagtggaaagactagactggcttagtcttctggcctacatctttctcctgtgctggatggatacttcctgccctggaacattggactcc

SEQ ID NO: 335475 - DNA, 548 bp, Homo sapiens
caaaggtcagagaaattaaattaatgagctgaggtaaaataagaagtaggtgagatcattaatattctactttttcatgtaaattttagtgtttttctctccttatcacatgtatcttggcttctcctatttgtagaaataatttaaaaataagaaggaaaattattttcagtaatcattctcaaaaatttcttcccatcatcaaatcttattgtacacaaatatacaaagtcacacatgcacacatatgtacacacacaacctgtgatggttaatattgagtgtcaacttgattgcattgaaggatgcaaagtattgttgctgggtgtgtctgtgagggtgttgccaaaggagattaacatttgagtcagtgaactgggagaggcagacccgccctcaatcttggggggcacaatttactcagctgccagtgtggccagaataaaagcaggcagaaggaagtggaaagactagactggcttagkcttctggcctacatctttctcctgtgctggatggatacttcctgccctggaacattggactcc

SEQ ID NO: 335476 - DNA, 548 bp, Homo sapiens
caaaggtcagagaaattaaattaatgagctgaggtaaaataagaagtaggtgagatcattaatattctactttttcatgtaaattttagtgtttttctctccttatcacatgtatcttggcttctcctatttgtagaaataatttaaaaataagaaggaaaattattttcagtaatcattctcaaaaatttcttcccatcatcaaatcttattgtacacaaatatacaaagtcacacatgcacacatatgtacacacacaacctgtgatggttaatattgagtgtcaacttgattgcattgaaggatgcaaagtattgttgctgggtgtgtctgtgagggtgttgccaaaggagattaacatttgagtcagtgaactgggagaggcagacccgccctcaatcttggggggcacaatttactcagctgccagtgtggccagaataaaagcaggcagaaggaagtggaaagactagactggcttagtcttctggcctacatctttctsctgtgctggatggatacttcctgccctggaacattggactcc

SEQ ID NO: 335477 - DNA, 477 bp, Homo sapiens
ttaaaatcctcccattgccaatgtcaaattttttcaccatgttttggctgaatggatggcgcttcaaggatctggaaggcaatgaagctatgaggcgaaaggatcttgggcccctgaataagctcatggaagggtattaatgaaaatcaatcacttatttcaataaaccacagatagttgcgaatctgtataagastatctaaaactggtattcaaaggacagtgctaacataaaaatacagaataatatttaagaagaatatttaagagaaaaggtaggaaagaaaactttttatcgtttttgtcactattttgtttcttccactattttcatggtgttttctttaatgccacaaattcactcttggttctcctctccacgttgtggaaatgactacaaagtctatgcagtctctaccttctattttttgcattatctcttagtatttctgatttctcaggcacaaacaaaacaaa

SEQ ID NO: 335478 - DNA, 477 bp, Homo sapiens
ttaaaatcctcccattgccaatgtcaaattttttcaccatgttttggctgaatggatggcgcttcaaggatctggaaggcaatgaagctatgaggcgaaaggatcttgggcccctgaataagctcatggaagggtattaatgaaaatcaatcacttatttcaataaaccacagatagttgcgaatctgtataagagtatctaaaactgrtattcaaaggacagtgctaacataaaaatacagaataatatttaagaagaatatttaagagaaaaggtaggaaagaaaactttttatcgtttttgtcactattttgtttcttccactattttcatggtgttttctttaatgccacaaattcactcttggttctcctctccacgttgtggaaatgactacaaagtctatgcagtctctaccttctattttttgcattatctcttagtatttctgatttctcaggcacaaacaaaacaaa

SEQ ID NO: 335479 - DNA, 477 bp, Homo sapiens
ttaaaatcctcccattgccaatgtcaaattttttcaccatgttttggctgaatggatggcgcttcaaggatctggaaggcaatgaagctatgaggcgaaaggatcttgggcccctgaataagctcatggaagggtattaatgaaaatcaatcacttatttcaataaaccacagatagttgcgaatctgtataagagtatctaaaactggtattcaaaggacagtgctaacataaaaatacagaataatatttaagaagaatatttaagagaaaaggtaggaaagaaaactttttatcgtttttgtcactattttgtttcttccactattttcatggtgttttctttaatgccacaaatycactcttggttctcctctccacgttgtggaaatgactacaaagtctatgcagtctctaccttctattttttgcattatctcttagtatttctgatttctcaggcacaaacaaaacaaa

SEQ ID NO: 335480 - DNA, 590 bp, Homo sapiens
aacatttgacttgaccaatgtagtgatgaattgaaaaactatagcagattccaactggagtaaactgaagtctcatttgtagtttcacacctgcttagggacacagctttgtgtatggtttgaattcaaaacatctccaagtaaagcagtcgagtaccccacagaccattcagactattcctcacagtgtctgtgcaggcctagggagagattcatgcagaaagtgttggcatcacaaaatgttactaggccaacattaggactgggcttccagcccaggtacactaaataccaggaggcagaaaagaggaacagctggcaactgctttggccacatgtatcaaccttctttctaccctccttcactcttgaaggatgaaarcagtcttcttacaactgggacaggaggtgccatcatagctcattgtagccctgtcagggggctatatctgttagaacagaaatatcagcaggggttttcttccaaagctcagagctgtcaggtaaaaattgaaggggagcacagaaatgttcaagggaatcaaccaagcatgtttttgatgtatatccgttttctttatcagacacag

SEQ ID NO: 335481 - DNA, 551 bp, Homo sapiens
cagttgttggagagatttgctgacattttaaatttaacatgcctacaacttacctttycaatctttgtcccatttaataggaggaacccttgctcaggtcaaaaacttgggagtcattcttgaagcttattccacctccaatccaataagtaattacccttatcctcttaattaagcttcgaaaatgtgtctttacatgttttccctttcctaatgctgagactcacatctaagccagaaacgtttctcaggtggcctctacaataatcttccaatcaacctggaaaacttggtctcttttcaatccttttattctttctctatacagagcaagtgaaatcaaaattttatataaatgtatataaatatgtatatgtgtatacagttcaacttttaacaacatggtttaaactaagtgggtcaacttatatgcctattttcttctccctttgccatgcttgtgacagcaagaccaagacctcctcttcttcctcctcctcagcctagtctacttgaagatgatgaggatgaagacctttataataacccac

SEQ ID NO: 335482 - DNA, 552 bp, Homo sapiens
tgttctgaaagaatacatcttttaagtcaaagaatatttatatattctaatgaatattcatgtgaagacatggatgaagaagtgcagtagtcagaatattccagatagttttaacagagtaaaaatattattaggaatagatacgcttgatgtttgcaaagaataatttaaagagtgatctgaaagcacatataaagattaaaaagttaaacaggtaggggaggcaagatgatgatggtggaaagctagacagatgatgtagaacattaatttacagttgttggagagatttgctgacattttaaatttaacatgcctacaacttacctttccaatctttgtcccatttaataggaggaacccttgctcaggtcaaaaacttgggagtcattcttgaagcttattccacctccaatccaataagtaattacccttatcctcttaattaagcttcgaaaatgtgtctttrcatgttttccctttcctaatgctgagactcacatctaagccagaaacgtttctcaggtggcctctacaataatcttccaatca

SEQ ID NO: 335483 - DNA, 586 bp, Homo sapiens
gtacacggaagttaattatattattctctctaattttgtgcgtatgaaaatgcccataataaacatgctaaaagaaaaaattattttgaatggcttttgacaataacaaggccaattgatttttacattagcagaatataaggtttctcattttcccacatccactccatacttactacctgaaattatatttattttggacaataggtatatgtttaatattaacttatttttcttaaaactttactttctctagataatacgtttcaacgttatttatttgctgacactagattttcctatatgtgaattgtttatatattttaattcattttctatttggttaacattttcttgatatctaactgctttgtgtatgttttgtgtattgaattctcagttatattcaacgaaaatatcttctctcagactggtacttgccttgttacattattaatgctgtcattcatgtaccatttttaaaaacaattatacattgaatattttytaagaaaaaatatattttatattctttttcagatgatttacagttttgttttttgggatttcattttacataagaatt

SEQ ID NO: 335484 - DNA, 589 bp, Homo sapiens
caataacagtttttctttagcttactaaattataaaaatacagtttataatacatataagatataaagttatggsttaatcaatggtttatgttgttggtaagacttttgatcatcagtaggctattagtagtttttagtgagtcaaaagttacaggcaggggaagaagcagagcaaggtagtggaatagaagcctccagcactcactcacctgaaggaataccaaattgaacaactatccacacgaaaaagcacctacataagaacaaaaaaatcaggtaacagtacctggttttaacatattaaggaaggagacactgaagagggtaggaaagacagtcttgaattgcaaacaccacctttctcctgtagtctggcaatggccacttggcacagagagagaatctgttcttagggtagggaaagcacagcgatttggagacttttcgttggaattcagtgcattcctgttatagcagcatagggtagaacttagctggtgtctacagagggagctttttggccagccctagctagaggcaaattacccatcccagcagttggaacataaattctggcaagtgctgcc

SEQ ID NO: 335485 - DNA, 589 bp, Homo sapiens
caataacagtttttctttagcttactaaattataaaaatacagtttataatacatataagatataaagttatggcttaatcaatggtttatgttgttggtaagacttttgatcatcagtaggctattagtagtttttagtgagtcaaaagttacaggcaggggaagaagcagagcaaggtagtggaatagaagcctccagcactcacycacctgaaggaataccaaattgaacaactatccacacgaaaaagcacctacataagaacaaaaaaatcaggtaacagtacctggttttaacatattaaggaaggagacactgaagagggtaggaaagacagtcttgaattgcaaacaccacctttctcctgtagtctggcaatggccacttggcacagagagagaatctgttcttagggtagggaaagcacagcgatttggagacttttcgttggaattcagtgcattcctgttatagcagcatagggtagaacttagctggtgtctacagagggagctttttggccagccctagctagaggcaaattacccatcccagcagttggaacataaattctggcaagtgctgcc

SEQ ID NO: 335486 - DNA, 443 bp, Homo sapiens
tggcaagtgctgccagcatggactaaagtgctctggagttctaaataagtttgaaagtcaattgaggccacaagactacaattcctgggcaagtcctggtgctgtgctgggctcagagccagtttacttgcagtgcatgcagcctattgagacaccagctgggacaaccaagagagtgcttgtgtcacccctacctcaactgcaggcagcacagtttgcagctctgggagggactccttttctcttcttcaggagaggagagaaaagagtaaagaggacttttcttgcaccttggatatcagctcagacactgtagaatragacagcaggcagagtcccaaagccccattccaggccccagctcccagaaaacatttctaaacacaccctgggccagtaggaaaccactgccttgaacggaaggacccagtcctgacagaatt

SEQ ID NO: 335487 - DNA, 612 bp, Homo sapiens
actgtgctggtttcaggtgagacccagtacattcacagctggaatggctatggggagagactccttctgcttgaggaaaggagagagaagagtagaggaaactttgtcttttagcttaggtaccagcttgaccacagaggggtagaccacaaagaagactggtatccttgattctaggccttggctcctagatggtatgtctgaaccttctctgggctagaaggaagcccactgccctgtaggaagaggcttggtcctggcagtattcaccataaggtgactgaagagtcctcgggctttcagtgaacataagcaatagccaggcagtactggatgtgggcatggggcactggtgcccatgaggagaaactcytctgcttaaggtaaggggagggaagaggggaagaacttggtattgcagtttgtgtggcaacgcagcttcagtagaatagaccacctggtagattcttaaggttcctgactcaaggctctggcttttgggtggcatctccagatgagcccaagacctacgaaaactcaccagccagaagggaaggatagaagtctgattggattcattactggctaattctagagcccttgggcaatgaa

SEQ ID NO: 335488 - DNA, 612 bp, Homo sapiens
actgtgctggtttcaggtgagacccagtacattcacagctggaatggctatggggagagactccttctgcttgaggaaaggagagagaagagtagaggaaactttgtcttttagcttaggtaccagcttgaccacagaggggtagaccacaaagaagactggtatccttgattctaggccttggctcctagatggtatgtctgaaccttctctgggctagaaggaagcccactgccctgtaggaagaggcttggtcctggcagtattcaccataaggtgactgaagagtcctcgggctttcagtgaacataagcaatagccaggcagtactggatgtgggcatggggcactggtgcccatgaggagaaactcttctgcttaaggtaaggggagggaagaggggaagaacttggtattgcagtttgtgtggcaacgcagcttcagtagaatagaccacctggtagattcytaaggttcctgactcaaggctctggcttttgggtggcatctccagatgagcccaagacctacgaaaactcaccagccagaagggaaggatagaagtctgattggattcattactggctaattctagagcccttgggcaatgaa

SEQ ID NO: 335489 - DNA, 612 bp, Homo sapiens
actgtgctggtttcaggtgagacccagtacattcacagctggaatggctatggggagagactccttctgcttgaggaaaggagagagaagagtagaggaaactttgtcttttagcttaggtaccagcttgaccacagaggggtagaccacaaagaagactggtatccttgattctaggccttggctcctagatggtatgtctgaaccttctctgggctagaaggaagcccactgccctgtaggaagaggcttggtcctggcagtattcaccataaggtgactgaagagtcctcgggctttcagtgaacataagcaatagccaggcagtactggatgtgggcatggggcactggtgcccatgaggagaaactcttctgcttaaggtaaggggagggaagaggggaagaacttggtattgcagtttgtgtggcaacgcagcttcagtagaatagaccacctggtagattcttaaggttcctgactcaaggctctggcttytgggtggcatctccagatgagcccaagacctacgaaaactcaccagccagaagggaaggatagaagtctgattggattcattactggctaattctagagcccttgggcaatgaa

SEQ ID NO: 335490 - DNA, 654 bp, Homo sapiens
ggattaaaaaaacaggacccaacagtctgtcacmcacaagaaacacatttcacctataaatacacaaatagtctgaaaataaatgatgggaaaaagatattccatgcaactggaaaccaaaaaagagcaggaatagctatatatatacatagcctgcagaattctgagtcaaacctctttttaaacaaatagactttaagataaaaactgtaaaaagagaccaagaaggtcatgatataataatgaaggaatcaattcagtaagaagacacaacaattgtaactgtatatgcactcaacaatggagaacccagatgtatgaagcaaacattactagagataaagagcaagaaaagccacatttcaatactatctggagacttcaatacctcactttcagcattggacacattatcaagatatgaagtcaacaaagaaacaatggatctaatctgcctcatagatctcaaagatcaaatcaaccaaatagataattacagaatatttcatccagtggctgcagaatacacattttttctcctcattacatggatcatcctggatcctaaaattctaaaatctgtagggaaccacaaaagacccagaatagccaaagctatcttgaacaaaaagaacaaaactgaaggaatcatat

SEQ ID NO: 335491 - DNA, 654 bp, Homo sapiens
ggattaaaaaaacaggacccaacagtctgtcacccacaagaaacacatttcacctataaatacacaaatagtctgaaaataaatgatgggaaaaagatattccatgcaactggaaaccaaaaaagagcaggaatagctatatatatacatagcctgcagaattctgagtcaaacctctttttaaacaaatagactttaagataaaaactgtaaaaagagaccaagaaggtcatgatataataatgaaggaatcaattcagtaagaagacacaacaattgtaactgtatatgcactcaacaatggagaacccagatgtatgaagcaaacattactagagataaagagcaagaaaagccacatttcaatactatctggagacttcaatacctcactttcagcattggacacattatcaagatatgaagtcaacaaagaaacaatggatctaatctgcctcatagatctcaaagatcaaatcaaccaaatagataattacagaatatttcatccagtkgctgcagaatacacattttttctcctcattacatggatcatcctggatcctaaaattctaaaatctgtagggaaccacaaaagacccagaatagccaaagctatcttgaacaaaaagaacaaaactgaaggaatcatat

SEQ ID NO: 335492 - DNA, 577 bp, Homo sapiens
cacaatcacaaggtgaggtcccacaataggccatctgcaaattgaggaagtaatccagttcaattccccaaacctcaaaagtrgggaagccaagagtgcaaccttcagtctgtggctgaaggcccaagaacccctggaaaaccactggtgtaggtccaagagtccaaagctgaagaacctggagtgcaacgttcaagggcaggaagtatccagcatgggggaaagatggagtccagaagacttagccagtctagtccttccacatacctctgactgcttttattctagctgtgctagcagtggattagatgggcttacctagattgagggtggatctgcctctcttagtcccgacttaaatgttagtctgttttggcaacaccctcacagacacacccaggaacaatactttgcattcttcaatccaaacaagttgacactcaatactaaccatcacaagggctaagaacatgcactggggaaaggacagtctctttaataaatagtgctgagaaaattagatatctatatgcaaaagaatgaaactagatccctatattttaccatagagaaaagt

SEQ ID NO: 335493 - DNA, 577 bp, Homo sapiens
cacaatcacaaggtgaggtcccacaataggccatctgcaaattgaggaagtaatccagttcaattccccaaacctcaaaagtggggaagccaagagtgcaaccttcagtctgtggctgaaggcccaagaacccctggaaaaccaytggtgtaggtccaagagtccaaagctgaagaacctggagtgcaacgttcaagggcaggaagtatccagcatgggggaaagatggagtccagaagacttagccagtctagtccttccacatacctctgactgcttttattctagctgtgctagcagtggattagatgggcttacctagattgagggtggatctgcctctcttagtcccgacttaaatgttagtctgttttggcaacaccctcacagacacacccaggaacaatactttgcattcttcaatccaaacaagttgacactcaatactaaccatcacaagggctaagaacatgcactggggaaaggacagtctctttaataaatagtgctgagaaaattagatatctatatgcaaaagaatgaaactagatccctatattttaccatagagaaaagt

SEQ ID NO: 335494 - DNA, 536 bp, Homo sapiens
aaagtgcttcatggcttcagacttggaaatgatttcatgaatatgattctaaatatgacttagctgtgtcccaacccaaatctcatcccgaattgtaggtctcataatccccaagtgttgtgggaaggacccagtgggaagtaattgaatcatgaggggcagttaccgccatcctgttctcataatagtgagttagttctcaagagatctgacagttttattagggctccccggttggaaagagagtttcagaggtgcccgttgagttggtctcccctgtgtgagacaaccatgggaagtgatgggtggcctctgaggagaaaagtctccttattgccctcctgtctttatgccctgagcgcataamcactccacggcattctacacgttgctcaggaagataaaactcccttgaagcagtggagtataatcaaacatcttggctcctcctgaaacctgctcccacctgtttcagtcccaataacttaaagatcttaagtagtttagacacatgcctttgctcaaggaaattcaca

SEQ ID NO: 335495 - DNA, 547 bp, Homo sapiens
atgacttagctgtgtcccaacccaaatctcatcccgaattgtaggtctcataatccccaagtgttgtgggaaggacccagtgggaagtaattgaatcatgaggggcagttaccgccatcctgttctcataatagtgagttagttctcaagagatctgacagttttattagggctccccggttggaaagagagtttcagaggtgcccgttgagttggtctcccctgtgtgagacaaccatgggaagtgatgggtggcctctgaggagaaaagtctccttattgccctcctgtctttatgccctgagcgcataaccactccacggcattctacacgttgctcaggaagataaaactcccttgaagcagtggagtataatcaaacatcttggctcctcctgaaacctgctcccacctgtttcagtcccaataacttaaagatcttaagtagtttagacacaygcctttgctcaaggaaattcacaggaaccaccactgctatacatcttatcgaatgactcactagctctccttcactgattaatcgttt

SEQ ID NO: 335496 - DNA, 547 bp, Homo sapiens
atgacttagctgtgtcccaacccaaatctcatcccgaattgtaggtctcataatccccaagtgttgtgggaaggacccagtgggaagtaattgaatcatgaggggcagttaccgccatcctgttctcataatagtgagttagttctcaagagatctgacagttttattagggctccccggttggaaagagagtttcagaggtgcccgttgagttggtctcccctgtgtgagacaaccatgggaagtgatgggtggcctctgaggagaaaagtctccttattgccctcctgtctttatgccctgagcgcataaccactccacggcattctacacgttgctcaggaagataaaactcccttgaagcagtggagtataatcaaacatcttggctcctcctgaaacctgctcccacctgtttcagtcccaataacttaaagatcttaagtagtttagacacatgcctttgctcaaggaaattcacaggaaccaccactgctatacatcttatcraatgactcactagctctccttcactgattaatcgttt

SEQ ID NO: 335497 - DNA, 594 bp, Homo sapiens
tggtcatgtggtcatagctggtattgatgactacttttgtattccctttgccttcagtaagcacctcagaaggtcttggtattttttttttttttttaatttttttctggcggagtgacccaaatcattcctgaagggtctgggccatttgtagtcctgcctggattgggttgttgtagtttcccattgaccttaatcatagggcatggcaatactaaaagacaccctaatggatcrcctgtactccatgcttactcttccttacctccgttgtggagtagtagcctgatttcatcttggtagtctggatcaatgaccccggtcaacactgtacctcccttcttagcctgttgacttaacggtagaaggaacccaaagtgtccaggtgccaatcttaacttccagtttagtggaatcgttgtttcgtctcctctgggcagtgttcctccttctgcaactaagaccgacctctaggcaagcagaacatagtctggcaggatcagaaagcaaaaattttgctagtggatcactacgggtgatggtgagtggtgccacttccgcttgcaccccttgatttctggctatggcagaaac

SEQ ID NO: 335498 - DNA, 594 bp, Homo sapiens
tggtcatgtggtcatagctggtattgatgactacttttgtattccctttgccttcagtaagcacctcagaaggtcttggtattttttttttttttttaatttttttctggcggagtgacccaaatcattcctgaagggtctgggccatttgtagtcctgcctggattgggttgttgtagtttcccattgaccttaatcatagggcatggcaatactaaaagacaccctaatggatcacctgtactccatgcttactcttcctyacctccgttgtggagtagtagcctgatttcatcttggtagtctggatcaatgaccccggtcaacactgtacctcccttcttagcctgttgacttaacggtagaaggaacccaaagtgtccaggtgccaatcttaacttccagtttagtggaatcgttgtttcgtctcctctgggcagtgttcctccttctgcaactaagaccgacctctaggcaagcagaacatagtctggcaggatcagaaagcaaaaattttgctagtggatcactacgggtgatggtgagtggtgccacttccgcttgcaccccttgatttctggctatggcagaaac

SEQ ID NO: 335499 - DNA, 331 bp, Homo sapiens
gcaatctgcctcctcagcctcccaaagtgttaggattacaggtgtgacccaccgcatctggccgagccccattttttgagtcaacaaaatcatatctcttgtatctgttggtgttaaaacagaattatagattgtacattaaaacacaattacaattcattccakttttattatatttagaaagcaacttaatacttagtgtaagttatcttctgcagattttttaaattggataaaatatatcttcaaataaattcaattgccatgtggcattcagcagagaaacaaggacaatagttagaaaagcaataaaaaatccttaacacaaagg

SEQ ID NO: 335500 - DNA, 492 bp, Homo sapiens
aatggtgtcttgaaactagttttgttttttaaataaatgtactacctttaataaatgtactaccttttatgcaattccacatatttatggtcaaccactaattgcctttcttatcactctttttggggggagggtggtatcaaataggggacataaatcataataatccaggttatgctgcaagaacaaaaccacaattgttacaaagttacaaagtgtttatgttttttactcacactacacaatcatgagtcatcagggaaatctgcttatggtaatcacacagagcaacaggcttrcagaccagaccccatctcaaatattcccagttgccatgtgagtgataaaagagggagctctgaaggcagcatgtgaatgtctttcctaataatgacacatatcactgtgcacaaatctcattggccagaatcacttgcacagttccacccaagcccagggagcttaaaagtaaaatcttatcatatacttgga

SEQ ID NO: 335501 - DNA, 536 bp, Homo sapiens
atattcccagttgccatgtgagtgataaaagagggagctctgaaggcagcatgtgaatgtctttcctaataatgacacatatcactgtgcacaaatctcattggccagaatcacttgcacagttccacccaagcccagggagcttaaaagtaaaatcttatcatatacttggaaaatggagtcccaaatatactctgtgagaagtactattgattaaaacagtatctgttttttgttttgttttgctttcttttttgaaatcctcttcttagcaaaatcacattttttataccttttggagcatgcctcaattgaatgtttcaaacattatcaaaaataatttttgagtaattatatttttgaagactatagccaaactaaayaacaacaacaacaacaacaacaacaacaacaacatgaaaagctctaacaggcagtaggtcagcttgtggcatagaattgaattgatagggacaggaggcagagaaattgtaggcagagaaggatgggttccctggcgaaaccacaccctcaga

SEQ ID NO: 335502 - DNA, 569 bp, Homo sapiens
ctctgtcctccagctttgtccccttgcctttggtttgaaaatccatttttggagatgagaaactactttgtttccaatttcaaaaatcctagaatatctggacttactatattcacacttaatttggcttgtcctttgggaagtacattatcaaaatacagataacaagatccagtacacacttttaatatcctttctgtaaaccatcttgtccaagtctacaagttcaaaaggcacattttgtgcctcacaaggtacagcagtgtttagtctgtcaaatgctttaccaatatattacaattcaggtcacaattttttgtaacagctctcttgtcattttctcctgcttcctataggaatgccctctttactcattggtcaatcacaaaccaatgctacatattttatttttgttrcagctgtgccacacatcttccttccaatttgataacaaatatctttaaaatcttagtgacacaaaatatgtgtttgttttataccaaaaactgtaggtctgcttccagttgtgatgttgagttggcaacgcttcacactgcaggatgcatttc

SEQ ID NO: 335503 - DNA, 515 bp, Homo sapiens
tggaacaataatttattcttgccataccacaactaccattttcgttttaggacctacttttcttatttggatatatacaaataatgcaaaatagtgagctttatcaaatgaagtatatatactacacattaaaatgtgtgtataacctataaggaatatatgatcttaaaactaaagttccatctagacaaagtggtttcgagatgtcctcttcagactatatcttcttagcttcaagtcatcaggaaaatgtacagctattgaccttaaatttaaccatctaaaatatttaaaccattgcaagcttatctttaaaaattgacaaattaacatcctcaaacaatatttaatgtaaaattataggcatgcaaaaatttaggaaagtatttatttcatatgaacttttcccaggtttttaaaaatacttattgactggcacctactatgtgctaggcaatgtgccagaaakcaggataaaatcatacacctggcacacagcactgacatcacccaca

SEQ ID NO: 335504 - DNA, 596 bp, Homo sapiens
attgcctttcctatactgtctctttgaccaaacattaggaaaacaccaaccataacctgaaggcaatttatactctaagcatggaaacatttaactaaattatattttatacaaatatatggaaaaaccactgtagtcttcagtgctttgttgtgaaaacaggtataaaaagatgttacagattaatggcttgcttgtttcatatcagaggaaaaattttaaaagaacagaatggaaaaaattgatctcatataactgagaagaatgagctctttcaactttaaatttgattcatgccttctttagtgtgtgtgtgtatttgtgtgtttgtgtgttacatatcaatacatayaggatatctaaaatatatacatgaaaatcattttattatgtgtagaggcaaatgaaaacagggaacatcagccattaatataaaaagttcattattgtttgtgtaacgatgcaattgtatgtttgatataatggggggacctgctacagattattatgttattttaataccaccagtggcacttgttctgcatgtattgtcattcaagaaaaaaaatcatgtccaacaagaatttgaattcaga

SEQ ID NO: 335505 - DNA, 561 bp, Homo sapiens
ctgaggaacccatcacagtttcctgaagtaagcaatgaaaagagtagctataagttatttatcgagtacgttttattagagtctagaaaaagaagctattcttaattataatgaacatttwaaaaatctgatcccaatatttttaagagtgagaccttgttatttctttgatagcaggtaaaaaactgatgaaaatattctttaatattataaaattataagggatgaagaaagtgaagccacattttaaatatatatattcacgttaggaagagcatattgataactgtattgaagcaaggatttaaaaagggacctttacaaaggggcatatattgttttgcaaaacagtagcattgaaattagtgtgaaacaactaaaaatctttttaaacattgctagtttaattagaaaatactttattagttatttgtatgcttcatttacttttacctgatcatatcacagtatatgatttatgatggtttataaattatgaacattacaagaagtctcattttgtatctgaaatgaatttaaaagaataagaaggaaaataag

SEQ ID NO: 335506 - DNA, 561 bp, Homo sapiens
ctgaggaacccatcacagtttcctgaagtaagcaatgaaaagagtagctataagttatttatcgagtacgttttattagagtctagaaaaagaagctattcttaattataatgaacatttaaaaaatctgatcccaatatttttaagagtgagaccttgttatttctttgatagcaggtaaaaaactgatgaaaatattctttaatattataaaattataagggatgaagaaagtgaagccacattttaaatatatatattcacgttaggaagagcatattgataactgtattgaagcaaggatttaaaaagggacctttacaaaggggcatatattgttttgcaaaacagtagcattgaaattagtgtgaaacaactaaaaatctttttaaacattgctagtttaattasaaaatactttattagttatttgtatgcttcatttacttttacctgatcatatcacagtatatgatttatgatggtttataaattatgaacattacaagaagtctcattttgtatctgaaatgaatttaaaagaataagaaggaaaataag

SEQ ID NO: 335507 - DNA, 546 bp, Homo sapiens
gaaatataaatctccatcattccagaggtatctcttgtctagattatgccaaaagtcaaagtcttacaccatattagtgaggtagttcaacatgtctctgagatgtccctcatccctatcccaatgactgttcaggatcaatagtactctgatatgtgagtgaaataaatcttatgaagtagactgtaaccctgtctgcctaggtgtaccagggagaawtcatgttccacagtttctcacagctttggggatcccactagaaagcagccctcgagacatgtaactcaaggaaacataggtctctctatatttctcctcccacgcagaatttatttcagtgttgggaagaagctttactcactttttcaccctcttgtttcttcacagactcagtctctacccaggaatcttcttccttttttctgccatttgggcaaacctacattttcctaagaatatataaactttaaaaaagcaaagctagtaaaaatgttgcagatatctctggtttcagccctgacacaaaactgaggacattagtgaaga

SEQ ID NO: 335508 - DNA, 546 bp, Homo sapiens
gaaatataaatctccatcattccagaggtatctcttgtctagattatgccaaaagtcaaagtcttacaccatattagtgaggtagttcaacatgtctctgagatgtccctcatccctatcccaatgactgttcaggatcaatagtactctgatatgtgagtgaaataaatcttatgaagtagactgtaaccctgtctgcctaggtgtaccagggagaaatcmtgttccacagtttctcacagctttggggatcccactagaaagcagccctcgagacatgtaactcaaggaaacataggtctctctatatttctcctcccacgcagaatttatttcagtgttgggaagaagctttactcactttttcaccctcttgtttcttcacagactcagtctctacccaggaatcttcttccttttttctgccatttgggcaaacctacattttcctaagaatatataaactttaaaaaagcaaagctagtaaaaatgttgcagatatctctggtttcagccctgacacaaaactgaggacattagtgaaga

SEQ ID NO: 335509 - DNA, 546 bp, Homo sapiens
gaaatataaatctccatcattccagaggtatctcttgtctagattatgccaaaagtcaaagtcttacaccatattagtgaggtagttcaacatgtctctgagatgtccctcatccctatcccaatgactgttcaggatcaatagtactctgatatgtgagtgaaataaatcttatgaagtagactgtaaccctgtctgcctaggtgtaccagggagaaatcatgttccacagtttctcacagctttggggatcccactagaaagcagccctcgagacatgtaactcaaggaaacataggtctctctatrtttctcctcccacgcagaatttatttcagtgttgggaagaagctttactcactttttcaccctcttgtttcttcacagactcagtctctacccaggaatcttcttccttttttctgccatttgggcaaacctacattttcctaagaatatataaactttaaaaaagcaaagctagtaaaaatgttgcagatatctctggtttcagccctgacacaaaactgaggacattagtgaaga

SEQ ID NO: 335510 - DNA, 550 bp, Homo sapiens
tggtttcagccctgacacaaaactgaggacattagtgaagaatgtcacctacctacatggggaagaaaataagaaagaattaaaatgcaaatcaatatctcaaatgtgacatatccagaaaaatagaagcattttaataaagttgggtctctctctctctccaccccctttttatctctctctctctctctctctmtatatatatatatataatataatgcacacacaaaggaattctgatactctgtggtaaaataattttttctctgtattattataagttatttaaaattatctactgctgtctatccatcagcataatatttagtcataattacaacatggaactttttgtttcagccatatagactctaaacaatgaggcatttgaaagtgaagattatattatttaatctttaaattttaagcattagttctgcttctgcctttgataagtatttaatactaatttaataaaatggatagtaatggatgagttaaatatagaaggataatacacagatacagacatacatacacacacacacac

SEQ ID NO: 335511 - DNA, 540 bp, Homo sapiens
ctcattcctgtaatcctagcattttgagaggccgaggcaggcagatggcttgagctcaggagtttgagaccagcctgggcaacacagcgaaaccccatctctacaaaaacttaaaaaaaaaaaaattggcctgatgtggtggcacgtgcctgtagtcccagctaattggagggctgaattgggaggactgcttgagcccaagagtttgagactgcagtaagcrgagattgtgccactgcactccagcctgggtgacaaggtgagaccctacctcaaaaacaaacaaacaaacaaaaaatgaagaagagactcgagctagcatgtgagcatgtgcagacccctcaccacttaatagcctgggctgcctcgggactccgcagagattccctaccagcgagaaggccctaaccagctgtgtcagctcaactttggacttctcagtctccagagtggtaagaaataaattctaattcttgaataaattatccagtttcagatattctgttataagcaacagaaagcaaactgatattcctacaa

SEQ ID NO: 335512 - DNA, 574 bp, Homo sapiens
aaactttttttgatattttctttctgaaacccatatcaattttatttagttttctcttattctaattaatgtgtgttcatgttcagtgaagcacaactatcatatgcagtaaacaattgtcattttcttcctgctgcttatttccaaggagcaattaatatactgtagctcctctgacacataaagaatattttggtttaaaaatcaattaaaatcctttaatataaaaagtaacttttaaatattgttatgtagscattgtggtcaaatatcaacatgaagaaggcaacacatttatatctgtataactgaacaaaagctagaatggcaatgttattctctaaatgctaacatatcattattttattttacttcattttacataggaccttaatgtcagatttctaattccatattttttaatcataaagttgagaacaccagaaagaaaggaaacattagatgtttgtttagcatcgcatagaactaacactgtcaagcatttgattatggaattattttacataataattatagaattatctaacgtaaaatcatgacgttagatactaaa

SEQ ID NO: 335513 - DNA, 574 bp, Homo sapiens
aaactttttttgatattttctttctgaaacccatatcaattttatttagttttctcttattctaattaatgtgtgttcatgttcagtgaagcacaactatcatatgcagtaaacaattgtcattttcttcctgctgcttatttccaaggagcaattaatatactgtagctcctctgacacataaagaatattttggtttaaaaatcaattaaaatcctttaatataaaaagtaacttttaaatattgttatgtagccattgtggtcaaatatcaacatgaagaaggcaacacatttatatctgyataactgaacaaaagctagaatggcaatgttattctctaaatgctaacatatcattattttattttacttcattttacataggaccttaatgtcagatttctaattccatattttttaatcataaagttgagaacaccagaaagaaaggaaacattagatgtttgtttagcatcgcatagaactaacactgtcaagcatttgattatggaattattttacataataattatagaattatctaacgtaaaatcatgacgttagatactaaa

SEQ ID NO: 335514 - DNA, 591 bp, Homo sapiens
agtttagtattttgaagtgcttccaagtacaaaatgtttcactctagagttcaacgatctttgtatcaagccattaaaattatcaattattattattatttagtttgttagactctttagtcactttttaagtgtacagatttagtgtattagatttagtgggcagttttcagcatttttaccaactgcatttctattcagttgcacctttactccaacgacttcttatttgacccaagaaagtgaaatcactttcatgagtttatttgccaccaaattcctcaaaatgatttttgatgtctacatctcttgcttacaktttactttggaggttgcaagatcaacataacctgagtttggaaaatatttaacaaaattcaaaagaggaaaaaaaatcacttctattaaaatgtacctgaataagaggtatagaaagcacagatgtggtaatgttgaaggaaagaaggcacacatgggagcttatgctgtataattccatttatacaatgtatcaacacaggtaaagctcaccgtgctatacaggattgtacagataatgattagagaggagcaagaggatgctttggaggt

SEQ ID NO: 335515 - DNA, 591 bp, Homo sapiens
agtttagtattttgaagtgcttccaagtacaaaatgtttcactctagagttcaacgatctttgtatcaagccattaaaattatcaattattattattatttagtttgttagactctttagtcactttttaagtgtacagatttagtgtattagatttagtgggcagttttcagcatttttaccaactgcatttctattcagttgcacctttactccaacgacttcttatttgacccaagaaagtgaaatcactttcatgagtttatttgccaccaaattcctcaaaatgatttttgatgtctacatctcttgcttacattttactttggaggttgcaagatcaacataacctgagtttggaaaatatttaacaaaattcaaaagaggaaaaaaaatcacttctattaaaatgtacctgaataagaggtatagaaarcacagatgtggtaatgttgaaggaaagaaggcacacatgggagcttatgctgtataattccatttatacaatgtatcaacacaggtaaagctcaccgtgctatacaggattgtacagataatgattagagaggagcaagaggatgctttggaggt

SEQ ID NO: 335516 - DNA, 536 bp, Homo sapiens
caacacaggtaaagctcaccgtgctatacaggattgtacagayaatgattagagaggagcaagaggatgctttggaggttgctagtattcttctgttgtgtttttaaactccaactgctaattacaaggatgtgttcatttggagaaaatataataaaccacatatacaatgcctacacttgtgtttgtatatgttatccttcaaaagcaagttttagaaaaaaccatgtccatgtcccatagcacagaggcaagccttcacttagttatattcacctgtttatcaaacttctatttctactaaggtgcaaaaagtacaattagctgctacatctctgagaagaaagaattttgctgatgatctaacagaacttgtgagtcatccatcaggagatgttttaatggtgccaagaactcagtaaagtctgtgatggatttggcaaggtcatttgtcattttcacatcagcatggttttggcacctgcttctcagtaaagaattgcactgttggaaactcacttttgacaaagatggtc

SEQ ID NO: 335517 - DNA, 443 bp, Homo sapiens
gaggaaaaaaaatcacttctattaaaatgtacctgaataagaggtatagaaagcacagatgtggtaatgttgaaggaaagaaggcacacatgggagcttatgctgtataattccatttatacaatgtatcaacacaggtaaagctcaccgtgctatacaggattgtacagataatgattagagaggagcaagaggatgctttggaggttgctagtattcttctgttgtgtttttaaactccaactgctaattacaaggatgtgttcatttggagaaaatwtaataaaccacatatacaatgcctacacttgtgtttgtatatgttatccttcaaaagcaagttttagaaaaaaccatgtccatgtcccatagcacagaggcaagccttcacttagttatattcacctgtttatcaaacttctatttctactaaggtgcaaaaa

SEQ ID NO: 335518 - DNA, 592 bp, Homo sapiens
ttggtttggtttggttttttttgagacagggtcttactctgtcatccaggcaggagtgcagtgggaatataatgtctcactgcagcctcgacttccctggttcaagtaatcctcccaccccagcctccaaagcagatgggaccacaggcatgcgccaccacacatggataacatttaaaaatttttttatagtgacagggtctccctatgttgcccagactggtcttgaattattgggctcaaacaatcttcccacctcagctcccccaaaatactgggattacaagtgtgaatcacagttccagaccaattttgttcttaatgccaatccatrttttaattactcagtatattgttcaaaactagttgtcacctgatctctgctactaaggtgtaagaatattcagtagcaaatacatcagaattttcaagcttatatttttaatctattgaaagtgagatgaaggaagaaagactggaaactaaggtgttacacattgataagttgtcatatatttgagtgtcccttttggttaatgtatgtggtcataaagatattattccttggtattttttaaattagctttcagaa

SEQ ID NO: 335519 - DNA, 622 bp, Homo sapiens
ctaaaaatctaaactgatcttttgaatctttttttcagagtcaagtcttctggggatatttacattaaacaggaactattttccacaaatatgccttcttaattccaaaagtgctttgcttcatagttgtcaaaatttattgcacattatttcttatggcacaagagtattgtttaagttaattattcagctgactttatacaaggaaacctggagcaaggaaagctcaaatacattcctggctgttagtggaaatgaaaatttgggagaacttttttttccttggcattctcttgtctcaatgtctgttctttctttctcttcctttccttccttccttccttccttcctttcctttgtttccttcctttctttcttctttcttttctctctgtctctctcctccctctgtctctctctctctctccctctctgccagccctcacgaccaggcgattcatcatctaagaagttactagtcctccaaatgttcccatccagcactgctaatgtcatgctgcccttcacagatagaagtctgcttgacaattgtctgtaagacytaagatagctatttgctaaactgataaactaatttccactagtgtctatcaaaaaaagc

SEQ ID NO: 335520 - DNA, 587 bp, Homo sapiens
ccaaaagtgctttgcttcatagttgtcaaaatttattgcacattatttcttatggcacaagagtattgtttaagttaattattcagctgactttatacaaggaaacctggagcaaggaaagctcaaatacattcctggctgttagtggaaatgaaaatttgggagaacttttttttccttggcattctcttgtctcaatgtctgttctttctttctcttcctttccttccttccttccttccttcctttcctttgtttccttcctttctttcttctttcttttctctctgtctctctcctccctctgtctctctctctctctccctctctgccagccctcacgaccaggcgattcatcatctaagaagttactagtcctccaaatgttcccatccagcactgctaatgtcatgctgcccttcacagatagaagtctgcttgacaattgtctgtaagacctaagatagctatttgctaaactgataaactaatttccactagtgtctatcaaaaaaagcccatgataacaayatgcactttaatatttctttatataaacaatactctgtatttctttcattaattaa

SEQ ID NO: 335521 - DNA, 583 bp, Homo sapiens
  misc_feature (1)...(583): n = A,T,C or G
nnnnnnnnnnnnnnnnnnnnnnnnnnnnnnnnnnnnnnnnnnnnnnaatagatgattggctatttctttacctcctgttttagcctaattagcattttagtgagctctttttactacctcattggtcgtgtgtgagctaagttgcaagccccatgtttaaaggtggatgcggtcaccttcccaccgaggcttagggatttttagttagcctacgaaatccaactagtcccatctcacaggattacaggcataagccactgtgcttagcctgatcatctttaattctgttgttagtgttgtggttggattggaggggatcctgattatgatacagacaggagacaggaaaatactgggtaggagagagcagttcctgagcaaggaccccaccctcacacctgggtatccgcagccctacgtgagaacaggcattcctgttgccttttggcccatcaggtctccctatcctgtacccatataaaccccgactaccaggytccagaagcagatgaggagacaggcaaatgaacgacagaatggtgaggcagagaaagagagaaagaatgtttgaatgccgagagga

SEQ ID NO: 335522 - DNA, 204 bp, Homo sapiens
ggttacataaatatacatagatcccagtgatacascatttgtaagagggaatttcctccagcaaggggatgtgagtaatgtgatataagaaaatgactgaacaagtaattcagaatgtgtaaaaaatacttccctggaaactgtgtttaaagcaaccacattttctggatgaaaaaaaaaaagcaatgaattcagaggtgatac

SEQ ID NO: 335523 - DNA, 204 bp, Homo sapiens
ggttacataaatatacatagatcccagtgatacaccatttgtaagagggaatttcctccagcaaggggatgtgagtaatgtratataagaaaatgactgaacaagtaattcagaatgtgtaaaaaatacttccctggaaactgtgtttaaagcaaccacattttctggatgaaaaaaaaaaagcaatgaattcagaggtgatac

SEQ ID NO: 335524 - DNA, 589 bp, Homo sapiens
gctgtgaagcaaccctgatgaggctgccttttgggaatgaaaggagtctgactgagaggaaatgccactggatttccagacctatagaataaagcatstgaaggagaaacaccacaaggaaaagcaaactttcagagcttgtcaccaacatgtattattgatcctagaaagcttatgccctaggagtaggggaccaactttttatgtaaagatacagatagtaaactactttaggctttgtgggccatttgatcacggccacagttattcagtttttgcaaaagcagccatgtatgatatgtaaacatatgggtatagctgtgttctaatgaaactctactgacagtaaaatttgaattttgtaaaatgtttacatacaacaaattactcatccttttttgatttttgaagtaattaaaaaatgtaaagatcattcttagcttaccaggctgtaccaaaataaacagtgggcaaaattagcatatcagcagcagtttcccaatcattgtcttcaaacatttctcaaaatttaaaattcacctgaagagtgtgttacgatacagattactgttcctcccagccagggttt

SEQ ID NO: 335525 - DNA, 589 bp, Homo sapiens
gctgtgaagcaaccctgatgaggctgccttttgggaatgaaaggagtctgactgagaggaaatgccactggatttccagacctatagaataaagcatctgaaggagaaacaccacaaggaaaagcaaactttcagagcttgtcaccaacatgtattattgatcctagaaagcttatgccctaggagtaggggaccaactttttatgtaaagatacagatagtaaactactttaggctttgtgggccatttgatcacggccacagttattcagtttttgcaaaagcagccatgtatgatatgtaaacataygggtatagctgtgttctaatgaaactctactgacagtaaaatttgaattttgtaaaatgtttacatacaacaaattactcatccttttttgatttttgaagtaattaaaaaatgtaaagatcattcttagcttaccaggctgtaccaaaataaacagtgggcaaaattagcatatcagcagcagtttcccaatcattgtcttcaaacatttctcaaaatttaaaattcacctgaagagtgtgttacgatacagattactgttcctcccagccagggttt

SEQ ID NO: 335526 - DNA, 518 bp, Homo sapiens
tgttatgtttctttgaagaacaaattaaatttcaatcccagccaaaataaacttttaaatggcaaaataaatctagaattatgtgaaaaaaaatctagggaaagcctgactctggctatcacaagttcaggtgtatttaagataatttactaccatgttttcttttctttgtgtgaggctgtggcaccacatgctccctttgtagtagcaaagggaggaatgaactaaggtctgaaaaatattactacaaaatgagctgaggaaactagttagtatatcattctatcctgtcctgaaaacaaagacacagagctgaattttctttcccagcttaccttccatctctatstcttacatatactcgttttctattagcgttagtgatctgatggtatgtagacgtctataaggtgaacttcattggctcaatatactgataaaaaagtaacaatctccttggtgtatggggctattcacctaatcttctctggatgctatttacttaatctcttcccaag

SEQ ID NO: 335527 - DNA, 493 bp, Homo sapiens
gagactttacctttttctttaacagatgactctctaaaacacccattttaaaaaaatttctcattgttagttatatcagtgagtaaaaatctgacttaggaacagaggacagaattagctcaactgatttaaaaagaagtatgttgataagttttagttaagctagtatttcctcaatgccttggccttattcttttttgttgttgtcatgtaatacagataaagataataatgtactattggttattcagagaatcaaataagaaaatacttgtgtagagattagaacccatagtaacttgagttcccatagtccgtttccaattcccttatttagatagtaaaaacattcactttaaatgagatcacattggctgcctagataattttcttggyctctgtaaactctgaaagtagtacttgaaatagatttgaatgaatacttcaatacaagaaccgttaaatttctccttccagttagccaatctaaaag

SEQ ID NO: 335528 - DNA, 554 bp, Homo sapiens
ttcaatttctaacatacaattgtcaagtacagcatgcaaatggcagccctctttcctatgagaaacacgggaagaaagtttgctatttgtcaataacactaaattaagcagggtggctaacagcttcaaaagttggggtcaactacacagccagagttgcaaccattcactctactttatcaatattttcaaatttatgtgactgtgtttcctgatttggactgtaccatctccactagaaaaggagtttcacctagaactcaaacttttttgccaatgattttagcatctctgtatctgttttctattgcagtgatagaaacgaatccaaaattcagtgacttaaaacaatacctatttatttaacttagaattttacaggtctacagtttgggctgggctgaaaaaagttattcttgtctctgctgtctcctttggttacrgttggccagtgactctgtttctgggattggttgactgtcatttgggcacctcatatttcctccattttttcctaaatcctcatgcagactaacctagccttgtttacatac

SEQ ID NO: 335529 - DNA, 534 bp, Homo sapiens
gcagtcacatactgtatgttgagtttatgtttaaatatatatttccataggtagtttcttgcctaaagtaatataacccatgttgacattttgtttattaggataattggtaaaatttccttaaaatgaaatttaaaaagtcgaactgtataatatttagctgatctacccaccagccttccaagtaatatcatgacatcttattttttaataaaatgaaagcctatacatacaaggctctgaaaaagctaccaggccaatgytttaaaacatttccaaagacttatacagtggtttccattatagaataagattctctggataaatacatatgattctacttcttcattaaactatcacattttgccaaaaagtttgtttgactagtttccttcatgaattcatgggctggcagtggtggtggccacagggagaggctctgctgcctgtgaaaaggggagatacaagtggaaaggacttcagattgtggtttgagtgccaacttagccacagtagaatagaacatcaattaaa

SEQ ID NO: 335530 - DNA, 555 bp, Homo sapiens
gaaagtgaaggagaagcaagtaccttcttcacatggtggcaggagagagagaagagaaagagagagagagagagagaaggtggaagcatcatacactttcaaacaactagatcttgtgagaacttactatcagaacagcaaggggtatgtctgcccccatgattcaatcatctcccaccaggcctctcccctgaaatatggggattacaattatagatgagatttgggtgagaacacaaagccaaaycatatcattgatcctcttcttccacctaccctcccccctcaggtaggccccaatgtctgttgttcccctctttgtgtccatgtgttctcatcacttagctcccacttacaagtgagaacatgcagtatttggttttctgttcctgcattagtttgctaaggctgacagtctctatatgcgagggcaggggtctggatccactcacattagttagacacagtgtagtttgttgagtggttaagggcctctgcttttcacctgttctgcccaaccatgtgggctttggcaagtttctaattcctatgtgt

SEQ ID NO: 335531 - DNA, 482 bp, Homo sapiens
gaagatagaaccatataacaaaagcacttttattcatatgatcaccaactgaaatttgacaactctagtaacactatgtcccaagaatgaagaatcagtagtaattactttcatgaaatacaaagaaacaaagccttcaatcttataatccaaataaaaccccgaagaactagaagatgccttgaagtcaatccttcagctgacgagaaatcaatggatggataagattgctgtgataactctggcatgactttattttgagttagaaaaggcctggaacattttgcaccatctaatgaggtgattgttggcagggtagacagtgaagatttacaataattactgtttgggggggacaaaatacataaatcattctgcatatcaggtaataatataatttgactaacattgtaatttctatactactgcctttctaaaaatggatataaaggataagrgagacattgtaaacaagatttaca

SEQ ID NO: 335532 - DNA, 507 bp, Homo sapiens
ggagtgggaggctgggggagggatagcattaggagaaatacctaatgtaaatgacaagttgatgggcacagcaaaccaacatggcacgtgtatacctatgtatgaaacctgcacattgtgcacaagtactatagaacttaaagtataatttaaaaaatatatatttagcaactgactttcatggggaaaggaagagctgtgatgtgtggcttgataatttttatggcgtaaatgctcctcctatggcttacttcaaattaccaatgtttgaacagatgtcttgcaaaattcctgaaaatrtgcaaatgtaaccttgaaccagtataagcaagttcctcgtaccaccagacaatttctatatattcaaacaaaataaatatttttaaaaatttgtttaacatataatttattatggattctttctatgtgttcatcctattgcaatatgcacatttgactttatgaattttatctctgttttctctttaattttaatccaaattccac

SEQ ID NO: 335533 - DNA, 545 bp, Homo sapiens
aaggtgaataaactagtatagttggatatcacatgcaggttatttagaagtttattcacaactttatggatttctgaatcccatgctctgcactttgccattttcaaccttgttcctagtttttggctaaagggaaaacaattagtacatttcagggaacaaatacatttgaataaattatacctgttctcagaatatttaggataagggttaaatacctcaaatctctcatgccaactcattctttggacaacactgatttaacttattaagagaaaggcttggtttgttcttgctgatcctgaacagcctaggaaattcttaaattctgaactcatatatctccaaagattatcacagaagattttttctacttctctktttaaaagaaacatcatgcctcctcctgaaatatgactgttgcagagccaatgacacactttcaatgtcataaacatggacgaatttgcttcgaacattgcatataggaaagagtgtgtttcttgcttaatgtttgcagtaaaacaaacagtagatgcacaacc

SEQ ID NO: 335534 - DNA, 545 bp, Homo sapiens
atcattatgatagatgcatagaccctaccatctcctctatctcctctacacacttttcagcaaaaattctttgctatggtcttgctgtccataacttcattcaaatcatttctcactttaggaattttttaaaggtaaaattaagagttatgaacataatttcacaaggcctggtaagatttcaaacataggccctttatatagtccagggaaataaatgaagaaaagtctagctcagttattgttgtctgatttagcaaataggaatcctgtatattatatgstaaagttcagtgaatatatatgtattcattttttatctgtattctatcattctatcagaaatcttgtaataacattttgaagagtccatgcagttgctgtagtcttctttaaaatgtcctgctcctaaagaatataacaattgtatttggttatcaataattagtaaattcttatactgggtgtcaatttgattacttacaagagcttcctgtataccactttgggccactgaaattctagccctaggaaatgtattaaaa

SEQ ID NO: 335535 - DNA, 568 bp, Homo sapiens
ggagtagggacttcttagaactggcttcagacacctgagaggagtggttagctgcctggcatttgagtctctggccaggaggatggttcctgtggtcctggaaactagaattccggagggttcgctatctagtggttgctggtgtctctaaggggatgtggtaatgctaattttgcaagtgccaaaaataaaataaaccctgcagrttcaactgctgctatgggaagaagctgctatatcatagtgaacaagtgtttctgggatcctcccataggaagaaagcagagggggagccaaccaggagcctacctgagtgttaggtgccatcaacacctctggcttctcactctctctctattggcagcctctaatgtacatccacccagcaaagcagacatctgatttgctagctcccaggatcagaaagcagaatgtagaagggagacgtcatgctgagagacaatagtttaatgattaatgcataaatatcactggattcagtcttggagcagagctggatatgattgttaaagttaaggtgtctaactgaatggcacttctattttaa

SEQ ID NO: 335536 - DNA, 568 bp, Homo sapiens
ggagtagggacttcttagaactggcttcagacacctgagaggagtggttagctgcctggcatttgagtctctggccaggaggatggttcctgtggtcctggaaactagaattccggagggttcgctatctagtggttgctggtgtctctaaggggatgtggtaatgctaattttgcaagtgccaaaaataaaataaaccctgcagattcaactgctgctatgggaagaagctgctatatcatagtgaacaagtgtttctgggatcctcccataggaagaaagcagagggggagccaaccaggagcctacctgagtgttaggtgccatcaacacctctggcttctcactctctctctattggcagcctctaatgtacatccacccagcaaagcagacatctgatttgctagctcccaggatcagaaagcagaatgtagaagggagaygtcatgctgagagacaatagtttaatgattaatgcataaatatcactggattcagtcttggagcagagctggatatgattgttaaagttaaggtgtctaactgaatggcacttctattttaa

SEQ ID NO: 335537 - DNA, 392 bp, Homo sapiens
agtactaatgatttagatatttgttatgtcttacctgttttcattaatccaaccttgggtgctaccaactcttgagcattagctatattttcttaagaagaacaatacattttccagtaggaaaacttgctatttctatataaaattgaaagttgacttgggctactgaatataagtaagggttttataagcttctatctctcatcatttaaaatctattgatcattttaaattttaaaatatttctaaaatacattcyctgtttcatttaaatatgattatcatttgcttgatagagtaaaatactcttttaaaggatcccatttataaggatttcctatgtgtttgatttgaaggcctagaatcatgacccattttcctgggttgtgttc

SEQ ID NO: 335538 - DNA, 571 bp, Homo sapiens
tattctctaatatctctatatatagctaattattttctttcttctctatttttgacagattttaatggctaacttaaatattagctatactgtctgtcagtaatctaaattatgattgacacaatttctgaagaaagcctaagattttattttaaatttatctattgtttatgttttagaattgactcyaggaaactgtttttacccctaccttctgttttacagctttaaaaacaaataaataaacccatgctctagtgtagttaggcatttgttatttaataggttatattatatgagaatacttttccatgttaaatataacatgatttgaggcaacatagagtagagtgagattgtataatttgatattcagaatgtaaagtctgacaagacactaaataccactggacctcagtttcttatctctgaatggacataactgtataaacgcttgagagttgtgagacataaatgaatattgcatgtaaatcgcctaagatatggtttggtataccatggatattcaagaaatagtagctattatcattaaatatatgctggacttgac

SEQ ID NO: 335539 - DNA, 570 bp, Homo sapiens
tctaggctgcagtgaaccgtgatcatgccaccgcagtccagcctgggagacagggccagaccctggtctcaaaaacacaaaagcacatacacaaaaaaaaacaaaacaaaaaaataattctactgtcaaattttgattatcaaaaatgaattaattatggttaggaaggagtaaggaacttgaaatatctgacacttgaaatatcaggatgatggatgctccataacaggcagttagggatgaggacatgatcmctgcaccctcagagttggagccaagcagccgccccaccatgctgggtcactaagattgggggcaggctgtcaggaagagacagacatgggagatgggacacggggctcccactggcaaatcatgaggaggctgcagacctgggatcacacctgtacctcatggagatgtggcaatccaaacctcaatgggtactttcctaagactttcttctgggagggaggcagttggcttgctctcgctgctatcttaagttcaatctctaagccagttagatggctgcctttgaataattcagaattctcacattctacatac

SEQ ID NO: 335540 - DNA, 521 bp, Homo sapiens
ataattcagaattctcacattctacatactcatctacacctgtgtacatatctatttttaggtcgatatgtgtgtgtgtatatatatatatatatayacacacacacacacatatatgcaggctgaaggtgtgcatatgtagcaaatacatctgcatacttacctatactaagctgttttacttgaagtgttttgtttttgtttttgtttttgtttttactttgtttgtgggtttgttttgtggagggagtggtttttatttgttctttttgtgctcctctccctgaatggctgcatctctcaatcactccctgtctaatcttgcaatacagtcttgggaagagggtctggttacccacttcccaagagtacagcataaaccaattaattaacctttaatttaaatgatgcagcaggtgaaatttagcaaattagaacaattaatttattgcattagtgagtattaattgtaatgatatataatcatgcacctcaagatttcaaaattcttctattttaaa

SEQ ID NO: 335541 - DNA, 617 bp, Homo sapiens
taatttttattcactttatcagccatctcatatactgtgtgttcattacatgccagacatactattatggtcctgtattcaaagttggactgtctgctatggtatgaatttttgtgttcacccctaaatgtatatgttgaaatctcattcctagtgggataaggaggtgcggtctttgggaggtgattaggttatgaaagcagagcgctcatgaattacattagtgcccttataaaacaagccccaaggagttcctttgccctttctaccatgtgcggatgcaayaagatgccacatctatgaccagaaagcaggccctcagcagacactgtacgtgctggtgccttgactgtgaacttctgcgctccagaagagcgagaaatttgtggttcataaactacccagcttatggtattttgttataacagcccaaatgaagtaagataaaaactgggtactggtaactctgggtgctgttgtaacaaatacctaaaaatgtggaagtagctccagagctgggtaatgagtagaggcaggaagaatttttagatacaggctagaaaattcctatattaccataaagggaactttaaagatgattttagtgagagcaacta

SEQ ID NO: 335542 - DNA, 511 bp, Homo sapiens
tttccctccctctcactaccaatatatttccaccagttttagattctcatttaatctctctatccaagcactatctaagcacttttatttcatgtgtcactatctcaggacaggatctctgacagtgcattttgcaggaagaggccactatcatgattatcttctgtaagcacaaacacatattaaaaataagaggcttaattttccccatttaaaacaaggaaggatatttcatgcccttctgtttactaagagcatttactttggaaaacttgtaattatttctcctctcttggatatgtataaacttccttttgaggatagtagtttttcatcttatgacttaaggatgtcttttgtgaaatgttatcatmaaggaagatagtgtccctatctcacagcttctgtgagagtgctggagcctagctttcgtgggtctcttgctcccagtttcaaaattacctcctgccatagagatataagataggatgcattgtgtgtgacaaatggt

SEQ ID NO: 335543 - DNA, 620 bp, Homo sapiens
tccaaatttatagacttttagaatttgtaaaggttataaataatggagacagctcaatataaaatgatattaattttacccaaatttatctattaacattgaagttttagaaaaattcttcataagctgattctgaaattactataaaataggaaaatagcaattaattaggaggatttacactactagatattaataatttaaagattatgttgaatttgacacagtgacacagtgatattgatacgggaatagacaattgtactgatgaaacagaatagtgagaccaaaatgtattattgtaaatatggtgaaataattgactaacatattttctagtgttgccacagggcttaggtgagtctccagatgccattaagaccccagycccagccagtgttctaaattcctgacactgttgcaagaaataattcagggacaagtcagaatgaagtgaaaggcaagaagcttttattgcaaagcaaaagtacacactgaacagtgggagtgcaagcgtcctcaggagagtgtctcacagagtggagtttggatttctaatgttacgggctcttctaattagggggtggaatagccatgaggttttctgggaaaaaggtaga

SEQ ID NO: 335544 - DNA, 642 bp, Homo sapiens
gtttatacgagtttgtaggaagcaattcagcaactctaacaatagaaagttatcagtataagaacatctgtttagcgtatacaatttcttatatagtcccatcatttccattcgtaaaaaaatggtaatttgttattataatactgagaaatacattctatgaatcatcagctattttgttgcttataaatataatttttaaaatttcaattaatgtttatattaattattcataactgtrgtattggtctaaattatcctcaaagaactacattaatctggaaagtcacttctgaaatatttagtaatttatgtaaacatattcaaaaataattttagatcaaacccttgctttttagtaactacaataaaagtaacattttttcatatttgtatttaaaacattgtgatttctgaattagctaataactacctaccttttagactttaaagagtgggtgtcctctcaagtgaataaaagctatttgttttaattttcataattctactcattttacagttgacataatacatttttatctccagagtacctttctatgtttaataaaacctccattcttactgcattttaggttagtagaaaatgatttatgctttttcatttctaacttttcataaagc

SEQ ID NO: 335545 - DNA, 575 bp, Homo sapiens
atagcgaaattgatttatatctgttcacaacaatagtagtcagacctttgagcaatatcagaacaaaacaagttcattcctacattttagtgtagctttcagttcaccttgagcatctttgggcaagggtcatacctcaagttgaaaaagttttggtctttaatttctattggaaatagtgtattatcttgtgaagattaattccttwagcatgacacagtgtctgtctaatctcacactctacactatctataaaagtaattttcctaaaaggaaaatcctatgtcactgccttgcttaataattcctcgttgtttcaccatcaccttcagaattaagtctcagctgctgcacatcaacatttaaatcattaaatcatttaaatctctaagcttatttttccctcttgactttcatattcaaatagccaagtgtctattcaatatcctatttggattcattccacagacacctcatttgcagaatgtggaaaactgatctatcatctttttctgtaaacctgttcttccatctgtgttattttatgttggcaccactattcattcatattcaaa

SEQ ID NO: 335546 - DNA, 575 bp, Homo sapiens
atagcgaaattgatttatatctgttcacaacaatagtagtcagacctttgagcaatatcagaacaaaacaagttcattcctacattttagtgtagctttcagttcaccttgagcatctttgggcaagggtcatacctcaagttgaaaaagttttggtctttaatttctattggaaatagtgtattatcttgtgaagattaattccttaagcatgacacagtgtctgtctaatctcacactctacactatctataaaagtaattttcctaaaaggaaaatcctatgtcactgccttgcttaataattcctcgttgtttyaccatcaccttcagaattaagtctcagctgctgcacatcaacatttaaatcattaaatcatttaaatctctaagcttatttttccctcttgactttcatattcaaatagccaagtgtctattcaatatcctatttggattcattccacagacacctcatttgcagaatgtggaaaactgatctatcatctttttctgtaaacctgttcttccatctgtgttattttatgttggcaccactattcattcatattcaaa

SEQ ID NO: 335547 - DNA, 536 bp, Homo sapiens
gaagtcaagttcaaaatccaggaacaatgtaatggcagtggtgcaggacgagagagaccaaagcattggtcaggatctcttgtataattatttcctttcttaaaagtatttgctgtaagttgactgcaaaaaccacaggtactataagtaagactgaaattttctgcttgaccaaatttctgaggctttagacaatgtgaccctaagaagaaatatttggcatattatttttattataataatacattaacttacactaggtaaaaattttaaagggaaaaccctattttaatagaatacatattrtctaatcttttatcgagatgtatgtgacatagaatatatggcacataacaacctttattgctataaaaaaggaaaagcactctttgaagcattctttatctttgaagaaaagggaagggagagaaaaagcagtatgtagtttcaatctatttcatttccagatgtttctactcacaaagataaaaaaaaattgtaaaaactattattctttgcttattcttaccactgtc

SEQ ID NO: 335548 - DNA, 553 bp, Homo sapiens
taattaattaattaattaattaaagcaattccctcaaagaatagtcttctgggcttacaggtatttttatggatcattatcttgctttgtttatggcttttcagcttgacctatcccagttggccttattttattgttgactgctgtgctggaaagtgttaactcagcaggccttggttgtgcacactgtgtaccttcccaagaaaggttttgtggactgtccagctcttaggaaataagttctgtgtctttggaatgttatgcctgataggagtatttttatatgcctgagatttggggcaacactgttccaattttatcagatcgtttatgctaacaatgttatttataatgaacacctgcttttgtatgcctgtggccttgggccatatggtgccagtttgatcagatagtttacatctacagtataatatrtaatgagctcctgtttttgctctgagtaaatgaagtcaatcacaagtgctgcaatgactatatgacccccagtaaaaactgtggacaccaaggctcaaataatctaccccagttgaca

SEQ ID NO: 335549 - DNA, 598 bp, Homo sapiens
tgtgaaacatttcttttagaaatgaagtgaccaaaccacttcttcgggtagcacattatgtttgtacactggtttcaggggaggaaggagagaatgaagtgcaaaggttctactccagttagtttacagtgagctgaataggtctatgtacttgtcatatatgtatatgcaaatataatggaaaaatgagtcttaattttacatcaggagttaaggagattgccactgtatgacaaagtttataaacyagtatattttgtgtaaaaatgtatattctgaaaatgacttgtggatgtaaaattattaaaatcatctctaagcattacagatgcttacacttgtacagtgggttgagaggggtacaaaaagaaaaggttctaggctagaaggttcctgttgaaaagatgcttttatattagcctttggcccatgcatgcaatttattcgatgctattgtgtatatagtgcacaaacaagctttattttaaatatctagcctttctagatgttttaagtacacaacctgtattgaaagcagaggctataaaaacacttttttgttaggaagtcatatggatatttgccttttgggaatggg

SEQ ID NO: 335550 - DNA, 576 bp, Homo sapiens
aaatgtacacataagtctactactacacttaatacttatcatattttgttgttttttaaaataatctttttgcttttaattgggtatgattgacataccaaaaattgtacatatttaatgtacataccttaawgaacatgaagtatatacctgtgaaaccataagcaaagccataaacataacaatcacctgtaaatgttttcttccttctttttgttgttgttgtaaaaacatttaacataagtgctaccctattaacaaatcttaatgcatacaatacagtatttttagttataggcactatgttgtactgtagatttctaggacttattcattttgtgactgaaactgtaccctttgatcaacgtctccccaattcctcttccccagaggtcctggtaatggcttcccctcagccattctagtgttttcatgaggttgacttttagaatacacaatttttatgagtgtacataactagataaagcacacgctgagccataaaacaagatttaatatatttaaaaaattaaaatcatacagaataatttttctgatctaatagaattcaacatt

SEQ ID NO: 335551 - DNA, 351 bp, Homo sapiens
agtatctagttcctgcgagggttgtttaatgaacatgacgaagtcagtcaaccagaataagtggtttcttccctttgagcttttggcaagaagtcggggtttcaattcccactgctgttctgatgacagtgcagacccaattcttaactttgcagcacaaagccgctcatcccaaagayggtcgtccctgcaaaggagacagtgagcttaacagtgcatggcacagccgtaaggatcagaggtttactcaagggatgatgggctgcatttgaacagctttcagtagcaacctgttgtgggcagagactcgtatttattcttttaacattttaacttatttttattaaataa

SEQ ID NO: 335552 - DNA, 558 bp, Homo sapiens
tcgtggggcctagtgtttgggtcatggggacggatccctgaagaaaggcttggggctgtcacaggagtgaactctcctatgagagaggtcgtttacaagcctggcacctccctcccctctctcacttcctctagtgcatgtgatctctacacagctggctcccrttcacaaggccctcagcagtgcagatgctggcgccctgcttcttgtacagcctgcagaaccctaaaccaaagaaacatctttccattatagatgactgagcctcaggtattcctacataggaacacaaacagggagacaacctgccagtacttcctgcccattctacttccatagctgaactccatccatccacttcacccacctccactgcctccactctagttaggagagactcccacctcatgtccctaatgtcaccacttcctacacaacccattctctacaagcatccgcacacttctgtgaaggggcaggcagttcacattttgagttctatgagacatctcgtctccatcacagttactcaattctgccactgcttagtgaaagcag

SEQ ID NO: 335553 - DNA, 576 bp, Homo sapiens
agtcagaaaaggatacatgctatatgacttcatttacttggaccatccagaagcattaaatccgcagagacgggaattagattggcggttgycaggggtgagggaatggggagagactgcttcatgaggtaatgaaaaggttttgaaaccaggcagaggtggtgattgcacactactgtgaatgtcccaagtgccgctgaattgttcactttaaaatggttaatattattttatttaatttcatctgaaaaaaaaaaagggccaagtatgttaagagccctaccatggcagaagagatcctgatggataaggaaaagcagtcacgagctgtcattaattgccctacgaagctgaaggaatctatctccagcctgactgccctgctgggaggtggaacaggtgccttctctgtggggggattggggggcagcctccccagtacccacgggcttaggcaatagctgcctttccctaatgctttgtcctccacagaccccacccacatggccagggtccttggcctgccacagtttcctagaggacaggaccccaggaaggaaggcaaggtgggaacag

SEQ ID NO: 335554 - DNA, 576 bp, Homo sapiens
agtcagaaaaggatacatgctatatgacttcatttacttggaccatccagaagcattaaatccgcagagacgggaattagattggcggttgccaggggtgagggaatggggagagactgcttcatgaggtaatgaaaaggttttgaaaccaggcagaggtggtgattgcacactactgtgaatgtcccaagtgccgctgaattgttcactttaaaatggttaatattattttatttaatttcatctgaaaaaaaaaaagggccaagtatgttaagagccctaccatggcagaagagatcctgatggataaggaaaagcagtcacgagctgtcattaattgccctacgargctgaaggaatctatctccagcctgactgccctgctgggaggtggaacaggtgccttctctgtggggggattggggggcagcctccccagtacccacgggcttaggcaatagctgcctttccctaatgctttgtcctccacagaccccacccacatggccagggtccttggcctgccacagtttcctagaggacaggaccccaggaaggaaggcaaggtgggaacag

SEQ ID NO: 335555 - DNA, 576 bp, Homo sapiens
agtcagaaaaggatacatgctatatgacttcatttacttggaccatccagaagcattaaatccgcagagacgggaattagattggcggttgccaggggtgagggaatggggagagactgcttcatgaggtaatgaaaaggttttgaaaccaggcagaggtggtgattgcacactactgtgaatgtcccaagtgccgctgaattgttcactttaaaatggttaatattattttatttaatttcatctgaaaaaaaaaaagggccaagtatgttaagagccctaccatggcagaagagatcctgatggataaggaaaagcagtcacgagctgtcattaattgccctacgaagctgaaggaatctakctccagcctgactgccctgctgggaggtggaacaggtgccttctctgtggggggattggggggcagcctccccagtacccacgggcttaggcaatagctgcctttccctaatgctttgtcctccacagaccccacccacatggccagggtccttggcctgccacagtttcctagaggacaggaccccaggaaggaaggcaaggtgggaacag

SEQ ID NO: 335556 - DNA, 576 bp, Homo sapiens
agtcagaaaaggatacatgctatatgacttcatttacttggaccatccagaagcattaaatccgcagagacgggaattagattggcggttgccaggggtgagggaatggggagagactgcttcatgaggtaatgaaaaggttttgaaaccaggcagaggtggtgattgcacactactgtgaatgtcccaagtgccgctgaattgttcactttaaaatggttaatattattttatttaatttcatctgaaaaaaaaaaagggccaagtatgttaagagccctaccatggcagaagagatcctgatggataaggaaaagcagtcacgagctgtcattaattgccctacgaagctgaaggaatctatctccagcctgactgccctgctgggaggtggaacaggtgccttctctgtggggggattggggggcagcctccccagtacccacgggcttaggcaatagctgcctttccctaatgctttgtcctccacagaccccacccacatggccagggtccttgrcctgccacagtttcctagaggacaggaccccaggaaggaaggcaaggtgggaacag

SEQ ID NO: 335557 - DNA, 597 bp, Homo sapiens
gaactttgcacatagaatgcttctcgaatgaatgaatgggtggatgaatgaatgaatgaataggaaaatcagtttgtttccctcctcctattaaaaacaatgtcgaatgaccaaagaacctgaacaggcactgagttaaaagcttgtctgggycagggcatgtctcgttgccacagggggcaggccagggactcaaatccagctcagtccagctccaccagctctctgcactttcatgaagccacggggacaactgcttctttccccagcttcacatattttgattccaggcttttgcaaagcaatgttctttttgctgttgcataccaacaacaaaaaaattcttctttttgcttctggcaaaattgacaaaattgacaatggaagacaaaggaagttttcttacttggtaaagaaactggttttgctttaggtgggaaaggtttccccagctccattccctctcgatgtgtgttaacagggacgggggaggcctcactccctactgactacccgtgcatttactttaattccagggtcctgggtgggaatgaattacagggttatttaagcttgttttgccataagccttgacaa

SEQ ID NO: 335558 - DNA, 618 bp, Homo sapiens
ctcctgctataaaagttgctgatgtacctttcttgattttcccttatctaaatcctgtctgaaaacatttagatgaggcaagtgttctctccaacttaatcccaacgcagagccttccaacctgacccacctgatggaggttcgtctgtggctggtgcccagctgccatactgcaatygtccttcaccttcacccttccctttgcctctcttctgcgttggatctctgcttctcattcttattctcagactcctcttgttggatttctcccttgtttcgtggaaaactcatccagtagcctgctaagaaggggtgaatgaaaggtatagtttttgaaacagctaacatctgaaaggatttgtagtaccttgagatgtgattggatattttggattggatattccaacagttctgggttggaattaatttctcagaattttgaaggctgtcattcctccattatttctaacttcttttgttacttggggaagcccaaagccattctgattcctgatgtggccagtgttctctctctggcaccttattgcataatttctctgtctgcagtgttttgatatttcctgggttttatgagttgatgtccatttttatccattt

SEQ ID NO: 335559 - DNA, 618 bp, Homo sapiens
ctcctgctataaaagttgctgatgtacctttcttgattttcccttatctaaatcctgtctgaaaacatttagatgaggcaagtgttctctccaacttaatcccaacgcagagccttccaacctgacccacctgatggaggttcgtctgtggctggtgcccagctgccatactgcaattgtccttcaccttcacccttccctttgcctctcttctgcgttggatctctgcttctcattcttattctcagactcctcttgttggatttctcccttgtttygtggaaaactcatccagtagcctgctaagaaggggtgaatgaaaggtatagtttttgaaacagctaacatctgaaaggatttgtagtaccttgagatgtgattggatattttggattggatattccaacagttctgggttggaattaatttctcagaattttgaaggctgtcattcctccattatttctaacttcttttgttacttggggaagcccaaagccattctgattcctgatgtggccagtgttctctctctggcaccttattgcataatttctctgtctgcagtgttttgatatttcctgggttttatgagttgatgtccatttttatccattt

SEQ ID NO: 335560 - DNA, 549 bp, Homo sapiens
tcacacaatcactgttgttgtggagtttacggtctagtggtaaaacagacaataagcaaatagttatccctcaaactcaaaagaattcaataataataagcactgtgaaggaaaagtagaaggtccatgaaagtatataatggggggcagtcagtgaagaattgcatgaggtgatggcacctaatctgggacttgaaggataaaaagattttggctaaagaataggggaaacagtgttctaagcagaataaagagtaaatgtgaaggacgagcagtaggaaaaggtttgacaaattagaacaggatagaaacaaagagaaagccagtgtgggagctgagagggacagtgagtaatgtcaactacagtgcagcaggtgggcaggggtcagatcatgcaaggttttgtrggccaagatatggatttttaatgttaacctaaaaatgaggaggagcttctagaaggatgtaggcatagatgtcttatgattataatttcatttaaaaaagactactctaggactagccatgtcagacattaaaacatcatac

SEQ ID NO: 335561 - DNA, 574 bp, Homo sapiens
caaaaacaaaatgcttctgcatgaaaattccctaaataaaatcaaatggaaataatatatttggggtggagtcagaggtggcaatgcagcactaatgagataaagagttaagtgttactaatttaacactgcatgtgtgtgtctgtatatataatttttttagggaagcaaatgatcaaatttgtrctgtatttcagatagtctaaaaaactttagcatgtatagttttgcagtgttttgaaaccattaggaattgtgacaacatttgtaaaagttacagataaagacaaaattgcttaacaacaacaacaattttaagtaaataaggtaatatggaggcctggaattagagtgctgtctctggagatgtgcttgaatacaagcattattatagttaaaatagcactgaaaatgagaacgggtgttagtttgtccagtaatgttagaaaatcaataaaaaatagagtagcaaaaatcagtaggttaaaaaactgtttttatgtcaagaaacagaaatggctagtaagcatctgaaaagatgtttcacctcgtaattaagacactatatcaaaca

SEQ ID NO: 335562 - DNA, 625 bp, Homo sapiens
agaacccttaaggataagctgaaatatattctaaagcaaaatacatccattgaaaggtaggaaaggtacaaaaaaagatgatcatgataaaagctatagaataagagctatttagtcccattttaaagtgaacaagtaatcattgcaatcattagaaatttgtggagctctctattcatataattaagctattgctgtctgaactaaaaaactcaaccaatgtgtcaaacaaaattcacatagacaggacttcttctttgcttccaggttataaaagaatctgaattagaggttacttaatttttgtagaataaaaatggcaggtgtctctcatatctttgagaaaaactsggtcatgatgtaaattacaggaggcatatgcaaatcatttctaaaacatatatttacaaaagccaatatagatattattatcattaaaaatgttctaacagagagtagcttagacagtattagaaattttatgaaacctgaggtcatgagatagcattcagcatgctaattttagtctggtggactgaaagcttataatttacagacacacacactaaaacacacaggagcacaaatgccctaagtagttatttaggttacataagttcatcaa

SEQ ID NO: 335563 - DNA, 583 bp, Homo sapiens
ctagcttggctttgactgtggttagagtttcttaagcaagggagctaggacttgtgttgtttyggtcccaaaagagagggcatcaaaaaaggggccccagttagttcaggtgtgaagcaaaggagaagagggagtggtggagcttgaagtcagttagcaatccaacagcaaaagtagagtcattttttttctattattatatgtacctacccctaattgttatcagataaattgccccatggaaaatctacagagaattcaacgtgtgatgcttcttttaatgaatagctaaaatgtctttatttttttcacagttttacatatgtctgctgagggtaaagcctgcagatagaaataggatcttgttctaaaataagacatttggcagtataggagtgtgtatgcaatgacgattttcttttaatgactttacatctttcatttggaatacaaaatgtaaatccattgagaaagagaggcctgtgagaacaaagcaaagagagcatcaataaaacatactgaatgtgcacatacatgtatacacccacatacgagtgtccacattttgaaaagtaagcaattc

SEQ ID NO: 335564 - DNA, 569 bp, Homo sapiens
gtctaatgagtcacacactcacaacgaggataggaaaagtttactttttcagaacataagactttctgtggacagaggggcgaactcccaagcagatccaaaattcacttgagagagtaggaaagggagactagcttggctttgactgtggttagagtttcttaagcaagggagctaggacttgtgttgtttcggtcccaaaagrgagggcatcaaaaaaggggccccagttagttcaggtgtgaagcaaaggagaagagggagtggtggagcttgaagtcagttagcaatccaacagcaaaagtagagtcattttttttctattattatatgtacctacccctaattgttatcagataaattgccccatggaaaatctacagagaattcaacgtgtgatgcttcttttaatgaatagctaaaatgtctttatttttttcacagttttacatatgtctgctgagggtaaagcctgcagatagaaataggatcttgttctaaaataagacatttggcagtataggagtgtgtatgcaatgacgattttcttttaatgactttacatcttt

SEQ ID NO: 335565 - DNA, 583 bp, Homo sapiens
ctagcttggctttgactgtggttagagtttcttaagcaagggagctaggacttgtgttgtttcggtcccaaaagagagggcatcaaaaaaggggccccagttagttcaggtgtgaagcaaaggagaagagggagtggtggagcttgaagtcagttagcaatccaacagcaaaagtagagtcattttttttctattattatatgtacctacccctaattgttatcagataaattgccscatggaaaatctacagagaattcaacgtgtgatgcttcttttaatgaatagctaaaatgtctttatttttttcacagttttacatatgtctgctgagggtaaagcctgcagatagaaataggatcttgttctaaaataagacatttggcagtataggagtgtgtatgcaatgacgattttcttttaatgactttacatctttcatttggaatacaaaatgtaaatccattgagaaagagaggcctgtgagaacaaagcaaagagagcatcaataaaacatactgaatgtgcacatacatgtatacacccacatacgagtgtccacattttgaaaagtaagcaattc

SEQ ID NO: 335566 - DNA, 590 bp, Homo sapiens
gtattaaaccttgagaatagttagggttctatatcctttgaagtcaaatgtaaagcggaaagaggaaatctgtaacttaaaccccttgcatttctggaaaggagcataattaatgttcaaataacatggctgaccaaatggaaccaattattgaatcaattaagcactcaggcctaaactatacatagctgtatgtacactctcaaaaagttgtcagatttcatgtttatagatcttggctttccatgcaagctaaactgaaactccacatctacttcaagtgactcgacaagtctcaaaaggctcatacaatgtcacctctgaaagaattattgtcttcttactgtgcatataaatttagaacattaccaggaagtatgatcaaattccctttaatgtaaaatgaaatactttccaaaagtaggacaacatttcaaataaagccccaagwaagaatgcatctgtgtccacctcttgaagatatgtatagcactacataccataaaaaaacctctgaaccatttaaatgatctgttcaaagacaagtataccaactaaaatctacaagagaggaataaaaaacagacatt

SEQ ID NO: 335567 - DNA, 593 bp, Homo sapiens
tatgacaagaataaggattaatgcaaagaggaactatcgagttattatttgctctatgatacactgaaaatatgctctacttcaaaagtctcatgtgcacattcaagaaaatattaataaaatattttaacatatgttagaaaaataataatatataaatgcccaataagcacgtgaaaagatactcaacaaatttaatcaatagaaaaatagaaatcataatcagtcaggtattattttacatccactagaattgttacaatctaaaattccgagaataccaggtgttagtgaaatcagcccaaccatcctgtagaactgatgttttatatttcttttgaataaatgtggaaattgaccctttggtcaattagttgtcattattgtatctagaaacccgtgttggaaatgtgtgatgatgttctgttagaatagctaaaaagaagttattctgtgactttttttcactttgccctcrttttgttgtatagtctttaaataaaaggagatcatttatcctcatattgaattttcaaaactgatgtttttatttgtcattttttaaatgatgggggaaaagttaattttattac

SEQ ID NO: 335568 - DNA, 553 bp, Homo sapiens
tgctagctagttccaaagaagctgcagcattcctagtaacatagccctcagggagtgctaccgctattgaagggaaactacagtaaaccagcggatagaccctgaaacaaaggaaaccaaggcacatgctttcaagtaccaaagaactccctatttcgtgctgtgagaggtgactctgcatccaacaggacaaaaactctttgcttggatataaaggagaggcatgacatcccatcccaccaacctctgtgctagagcccaggcatgtagaaaagaacttttacacttcctccacacactgctgcaaatacagccactactgctggtcacaagaaattgatacaagtgattcagagatcaacctatctggagctgtgaattatgactgtaaccccactataggggtgttgcctgtgggcctgtacttatgcaaagggtgggtctctccccatttstgcacagagctgcaatgtttttgccaaagagatatagagagcaatgttgtttgggaaaatgggcacagactccatgctaaagccactaacaggtgaca

SEQ ID NO: 335569 - DNA, 553 bp, Homo sapiens
tgctagctagttccaaagaagctgcagcattcctagtaacatagccctcagggagtgctaccgctattgaagggaaactacagtaaaccagcggatagaccctgaaacaaaggaaaccaaggcacatgctttcaagtaccaaagaactccctatttcgtgctgtgagaggtgactctgcatccaacaggacaaaaactctttgcttggatataaaggagaggcatgacatcccatcccaccaacctctgtgctagagcccaggcatgtagaaaagaacttttacacttcctccacacactgctgcaaatacagccactactgctggtcacaagaaattgatacaagtgattcagagatcaacctatctggagctgtgaattatgactgtaaccccactataggggtgttgcctgtgggcctgtacttatgcaaagggtgggtctctccccatttgtgcacagagctgcaatgtttttgccaaagagatatagagagcaatgttgtttgggraaatgggcacagactccatgctaaagccactaacaggtgaca

SEQ ID NO: 335570 - DNA, 572 bp, Homo sapiens
tcagagccctcacagagaacctctgttagggaagtgcagaaggaaaatatagggttggatcccccacacagagtcctcattggggcactgagtagtggagctgtgagaagacggccactgtcctccagatctcagaatggtagattcatctacagcatgccctgagcacctgaaaaagtcayaggaactcaacaccagcccctgaaaacagccaatggggatttactctgcagagccacaggggtggagcttcccaaggctgtgggagctcgtcccttgaatcaacatgccctgaatgtgagaaatgaggtcaaaggagattttggagctttaagttataatgactacccagtcaggtttcagacttgaatagggcctgttgttcctctttttggccaatttctcccatttggagcaggaacatttacccaatgcctatagctccattgtatcttgcaagtaactaacttgtttttgattttacaggatcatagtggaaaatgactcgccttgtctctgatgatactttaaacttggacttttattaaatatcagttaatgctggaatgagt

SEQ ID NO: 335571 - DNA, 654 bp, Homo sapiens
tcttagctcccaaatatgagttagaatatcctacctgtagcaattaggcaagagaaaaaaagagccatacaaattggaaaggaagaagaaaaattatttttgtttgctgatgacatgaacttagaaaaatctaaatactccagcaaaccagaactaataattcagtaatgtgcaaaatataaaatcaacttacaaaaatcagcagcagttatttgccaatggggaacaggctgaaaaaggaataaggaaagcgatcccatttgcaatagctaaaaaatataaaatacctagaaataaacttaactaaagagtagaatgtctccatgaggaaaactacgaaacatggatgaaaataattgaagagggcacaaaaaaagaaaaacattctatgctcaacaaaagaattttcaacccagaatttcatatccagccaaactaagcttcataagtaaaggagaaataaaatcctttacagacaagcaaatgctgagagattttgtcaccaccagacctgycttacaagagctcctgaaggaagcactaaacatggaaaggaacaactggtaccagccaccgcaaaaacacgccaaattgtaaagaccatcgatgctaggaagaaactgcatcaactaacatgcaaaataaccagctaac

SEQ ID NO: 335572 - DNA, 591 bp, Homo sapiens
ataatcattttatttgtcctataaaccttttagtcggcttctggattgggttagagtagctatatggggccttctcttgtgtctgctgttatctggaagatagacaggtggttcactgatggtctggttggtctcactatttggtggtcacttggccattagaaatagtgcaatgattctcctctatctgacttctcatcttccagtgacctggctcaggctaaccacaaggtagtctcaggactctaagcacagaaaaagaagtaaagccccaatgaacaacctctgttcaagcctctttctgtagcatgtttaatatttttattgttcaaatcaagttatctgaccaatacaatcgaagtgaagtttgagactgtagaggtaagaagatccttctacatagcaaggggtcatgcatacaaagatgrgaggaatttgtggccatatttgcagttttactacagtaagcagtgcagttttcttaattgtgaaaatttaaccctttccaaagattgattagataagaatagataagagtaaggactcagatatcatgtttattttacagatatgcattgttgatttgtaata

SEQ ID NO: 335573 - DNA, 472 bp, Homo sapiens
tgggaataaaaaataaacagtaatttgaaagatctctacaatgagaattacaaaacactgctgaaataaatcagaaataatacaaacaattggaaatacgttccatgctcatggataggaagaatcaatattgttaaaatggccatactgcccaaagaaatttactgatttgattcctaccaaactgtcaaagtcatttttcacagaattagaaaaaatgtatatattctcaaattctgagggaatcaaaaaagagcccaaatagccaaagcaatcctatgtttcggtactgatacasaaacagacacatagaccaatggaacaggtttgagaacccagaaattaagctacaaacctacaaccatctgattttttatgaagtcaacaatgacgacattgaaaagaggactctgttcaacaaatggtgctgagaaaaaaaataagctagttacatgcagaagattttaactag

SEQ ID NO: 335574 - DNA, 629 bp, Homo sapiens
tgggtaacaggcagaggctggaacagtttggaactaccaagagacttgttgaatggtttactaacatgcttatagagatatggacaatggagtccaggctgagttggtctcacatggagatgaggaacttctggggaagtggagcaaagctgactgttgctatgctttagcaaagatactggtggcattttgctgctwccctagacaactgtggaactttgggtgtgagagaggtgatctgaaattgggacttatgtttaaaaggaaagcagagtataaaggtttgaaaaatttgcagtctgatgatgcaatagaaaagaaaaacccattttctgggaagaaattcaagccagctacagaaatttgcataaataatgagagaccaaatattaatcccaggacaatggggaaaatgtatccagggcatgtcagagaccttcatggcagcccctcccatcacacaccctgaggtctagacagaaaatatggctttgtgggctagttccagggcctcactgctgttctgtgaagctttgggatttggtaccctgcatcaaagccatagctaaaaggggccaacatacagctcaggccattgcttccgaggttgcaagcctccagcctttgca

SEQ ID NO: 335575 - DNA, 616 bp, Homo sapiens
gttaactaaaaacagaagcaaaagctgaggtaagatatgctttttaaacattttctccatttaaaacaatatatctcttcctttatggatttataccttgtcttcggtacacatccaagcttctcaaagtacgttttatattatcagatccatttattcacttmatactcattcatcataacactacacttcaaaagagaaatcaccagtgacttaaatgttgataatacaataaacaattttatctttctctcttttttccttccttctttcttctttcttttttctttctttttttaaaatttattttattttattttatttttttaattactctcagtgacttatgtaattgcacttttactttttttggttatttttctctgtaagctcctttttttttccattttactgacttcctttagtcacttcaaccatggaatgtggaatttcctcaatgttatgatgcctacacttttctgacttcgttgctgatattattcatattcatgatgtttatcacggcagctgcctgtggagccaccaggaacaaacgggagccccaccccttccaagatgaggtgagagctttcaggtgccactgaagccacccaaa

SEQ ID NO: 335576 - DNA, 421 bp, Homo sapiens
tttgttctaatccttgatttccaaactggaagcttctcttgacattttagcttyagtcagtttgtcctatttggctttacagatgctatatggtcaatcatttctatctactacaacaacaacctaattctaggagatcattatgggaagactgtggatctgaactattgggtccccttagtctcttattcgatccggatttagggatataattactccaagaaagtcacattgtaccactatctggccaccatttggggatcatggcaatccccaactgtggtggaagccgtggagggcaaaagaaaaacatgtatatttattttcagagttccatcatgtcagatatccctatggttcacaggcttcaaaatttgctgaaaatttaaaagataatattattgcatacactcggtagaag

SEQ ID NO: 335577 - DNA, 444 bp, Homo sapiens
aagtatattccgttatcagattctatgaaataaatagtattaagaaaaaataatgaagaaattagattctcccaaactggctgtccatgtcttggtggtccagcatcgtttacctggccacaggaaagaatgtcaaagagaaattaaaaacccattcattatttgtctaatgaaagtgtatccaggaaataagccacagtaaactgatattatttaacatgtaaacaatgaacaataacaaagagatttagttgtctgaaaaggaattctcacaktgagaattcctgtgaaaatcatgtaagatccacagaaaaccaagaaatatgaatgaaaatgtcatattttgaaacaaaacaacaggatattcaaagccagtccttgtggtttttttgtttgtttgtgacagagtctcactctgttgcccaggccagagtgcagtggtgt

SEQ ID NO: 335578 - DNA, 594 bp, Homo sapiens
gctcgctccagttcctgcagtctttcgctcacatgctccctcctgcgagggttagacaggggcaggctgagtaaatgaggcgcccttgtcgtgagtcccatgaagcagtcaagaaaatatcatgcttcactactgtttgacccagcaatccaattactaggcatatattcaaaaataaataaatcatcttaacaaaaagatacatgcactcccatgttccttgcagccctatttaccacagcaaagacatgaatcaacctggttgaccctcgagtgtggattaaataaagaacatgtggtacatatatgccatggaattctatgcagccataaaaaagaacaaaatcatttattttgcagcaacacacatacaactggaggccattatcctaggcaaatgaatgcaggaacagaaaaccaaatattgcatattctcacttataagtgggagctaaccactgggtactcatgsacataaagatggcaatgatagaaactggggactattagagggggtggggaaggaagggaacaaggttttcaaaggtattaggtactatgctcaatacctgggtgatggaatcattcgtacac

SEQ ID NO: 335579 - DNA, 647 bp, Homo sapiens
tgttccaccctgctgaaagaaattaaaccttgtatgggagcagttaaactttagaagagagataactgttcttgccrtatctttagcagttaacaggtgcaccctgggaatcctggggtttgtgggcttgcctggtggccattaaagtttctggttttttcctgtatttcctctctttttcctgggcctccctgtctctattataaaagacagaggtggccagtttcaggaggtcctctagtgtattgtctggttcagaacacatttctgcaactccctcctgatgtcaggagctgcctgattaataaatttatcctttaggattagttgtcccttgactgaatcaggagatagagaggtgtgctttacccaggcctctcttagcctctccaggaaggcagtggggttttcatcaaatccctggtcgatcatagacaacttattataaccgagaggctttgtcttagtcccatgtaagccctccattatgcatgcctggaagtgtctcctcttccagtcttccatcttgtcactgggatcccatttagggtcatgcactggtactgcttcttttccagttcgataatattcatcccctcccctgacactctatgtgacacaaagctcatccccaaatctctctgctg

SEQ ID NO: 335580 - DNA, 552 bp, Homo sapiens
gggagcagttaaactttagaagagagataactgttcttgccatatctttagcagttaacaggtgcaccctgggaatcctggggtttgtgggcttgcctggtggccattaaagtttctggttttttcctgtatttcctctctttttcctgggcctccctgtctctattataaaagacagaggtggccagtttcaggaggtcctctagtgtattgtctggttcagaacacatttctgcaactccctcctgatgtcaggagctgcctgattaataaatttatcctttaggattagttgtcccttgactgaatcaggagatagagaggtgtgctttacccaggcctctcttagcctctccaggaaggcagtggggttttcatcaaatccctggtcgatcatrgacaacttattataaccgagaggctttgtcttagtcccatgtaagccctccattatgcatgcctggaagtgtctcctcttccagtcttccatcttgtcactgggatcccatttagggtcatgcactggtactgcttcttttccagttcgataat

SEQ ID NO: 335581 - DNA, 552 bp, Homo sapiens
gggagcagttaaactttagaagagagataactgttcttgccatatctttagcagttaacaggtgcaccctgggaatcctggggtttgtgggcttgcctggtggccattaaagtttctggttttttcctgtatttcctctctttttcctgggcctccctgtctctattataaaagacagaggtggccagtttcaggaggtcctctagtgtattgtctggttcagaacacatttctgcaactccctcctgatgtcaggagctgcctgattaataaatttatcctttaggattagttgtcccttgactgaatcaggagatagagaggtgtgctttacccaggcctctcttagcctctccaggaaggcagtggggttttcatcaaatccctggtcgatcatagacaacttattataacckagaggctttgtcttagtcccatgtaagccctccattatgcatgcctggaagtgtctcctcttccagtcttccatcttgtcactgggatcccatttagggtcatgcactggtactgcttcttttccagttcgataat

SEQ ID NO: 335582 - DNA, 486 bp, Homo sapiens
tatgcatgcctggaagtgtctcctcttccagtcttccatcttgtcactgggatcccatttagggtcatgcactggtactgcttcttttccagttcgataatattcatcccctcccctgacactctatgtgacacaaagctcatccccaaatctctctgctgctttcaaagcagcatgtttctcagtgaccagcagggtctgattcaaaagtaacataacgtctctcaaggagagttcaaataytttagtgaaattctagaaagcattgatatctctatcagggtcatctgagaatttgccatgatcccccttaatttgctttaagtcctgtagggagaaggggacctggaccttactggtccagtaaggtcactccctggaggggaaataatgagactgggtcttaaggcgagtatttctaggatggggaaagtgacagtctgaagctggataggaagctcaagggggacctggaggaacagggct

SEQ ID NO: 335583 - DNA, 633 bp, Homo sapiens
cattaagctgacttctaaccatagctgacttcttataaatgtttttccaaatctcttattatcagattttagccaggagaaacatccaatattcctgacttttgaactttttaccaaatgtatcttccaagtgactcatcaaaacaaaagccttaactaaggttatgccttaactaaggttataccttaaccaagaatgcacaagcatcttcaaagaggtgcaaaggatcctctcaagatccggaagcactcaaagacacttcaaagaaacgaaagttttgctagctacaactgggatacaatgcacatttttgtcttgtctggacatgttctctagaatcttagcttctcagctgaccttctccacacaaacgctgaccatgcccatccatatgccctgcagatgaaagactaaaagagacagttgataagacagaaaataaaaaggaagggaaataatcaataacaaatagatatcccaaaaagtcaagagtcacacaaatatctgaacaatgctttactcaatttttcttttccagagttaaagsacttatatctgccgagactacttccctgaccaggaatcaaacctgagccatggcagtgaaagtgcaaatcccagctactagacca

SEQ ID NO: 335584 - DNA, 540 bp, Homo sapiens
ttagcacactaaaagactcatcactggagattccaaatactttagaagtagtatgccaggaaaaaaaatatagatatctattctttattttatcacagtatctcaagagaaaaaggtaatagagtattctaaaacttmaagggtttcataaagatctacaattaggtaatagaacatttaaggtcagctttcttgtaggaagagatagacttgaatatttatgcttaaataattttgaaatctctcctccctttatttcccactccccatccacttacagcaggcattctgcagccaggaatctctattaatatgaaaactcagctggagaaaacttaatcaaacagtcagtcaatttttaaattaaaaaaataataaaacacctctagccttaaaaattactgtcgttaatcagtactgggaacagcagcaaataataaatgaacctagaacaccaatggcaaagaaaaaagtttatgaccttgttcagaaagacttgtcctggaaaggcctcaactaacaggaaaaaaaaaaagtgct

SEQ ID NO: 335585 - DNA, 565 bp, Homo sapiens
tttggcattctaggcaggcaaggatgcttgagaaaaatatgagaaaactacagaaacaactcaaaacttttctgacttccttaaaagaacatctccacggaggtttacagtgagctggtaacagagctgctgcactccagcctgggtgacagagtgagactgtctaaaaaaaaataaaaataaaaaaaagaacgtctccaattttaatgcatttctttgttcatggaaatatacaaagtgtattaaggaagtaaaaacactttaaatcatgtctcttcaacctaagtgctggagcagtttttctttctataggttttctattattcttatgtgaatcagcacagcagagtgtttctattcatcttgaaacctgttcctaattcctattctgccaagaccatagagatgttttcaaatagtaagcccctttgcatacrttgtttatagataaacaacaataatcaaacttaatttatagtgaattatcattgatcatagtaattgcattgtgcaattagcagtggtttctacctttgctggaaaccacaaaacattttaaatcaca

SEQ ID NO: 335586 - DNA, 560 bp, Homo sapiens
attgtttgcttgtttaaagaggtgaccatttgttttggcattctaggcaggcaaggatgcttgagaaaaatatgagaaaactacagaaacaactcaaaacttttctgacttccttaaaagaacatctccacggaggtttacagtgagctggtaacagagctgctgcactccagcctgggtgacagagtgagactgtctaaaaaaaaataaaaataaaaaaaagaacgtctccaattttaatgcatttctttgttcatggaaatatacaaagtgtattaaggaagtaaaaacactttaaatcatgtctcttcaacctaagtgctggagcagtttttctttctataggttttctattattcttatgtgaatcagcacagcagagtgtttctattcatcttgaaacctgttcctaattcctattctgccaagaccatagagatgttttcaaatagtaagcccctttgcatacgttgtttatagataaacaacaataatcaaacttaatttatagtgaattatcattgatcatagtaatygcattgtgcaattagcagtggttt

SEQ ID NO: 335587 - DNA, 565 bp, Homo sapiens
tttggcattctaggcaggcaaggatgcttgagaaaaatatgagaaaactacagaaacaactcaaaacttttctgacttccttaaaagaacatctccacggaggtttacagtgagctggtaacagagctgctgcactccagcctgggtgacagagtgagactgtctaaaaaaaaataaaaataaaaaaaagaacgtctccaattttaatgcatttctttgttcatggaaatatacaaagtgtattaaggaagtaaaaacactttaaatcatgtctcttcaacctaagtgctggagcagtttttctttctataggttttctattattcttatgtgaatcagcacagcagagtgtttctattcatcttgaaacctgttcctaattcctattctgccaagaccatagagatgttttcaaatagtaagcccctttgcatacgttgtttatagataaacaacaataatcaaacttaatttatagtgaattatcattgatcatagtaattgcattgtgcaattagcagtggtttctacctttgctggraaccacaaaacattttaaatcaca

SEQ ID NO: 335588 - DNA, 543 bp, Homo sapiens
atcaagtgcagtgccctgctgggggacctggcgcaccctctgcagctgctggcctgggtgctaagcccctcactgcctggggccagcagggycagctggccactccaagtgtggggcccgccaagcccacacccacccggaactctagctggccagcaagtgcagtacacagccctggttcccacccatgcctctccctccacacctccctgcaagccgagggagctggctctgaccttggccagcccagagaagggctcccacagtgcagcagcaggctgaagttctcctcaagcacggccagagtggacactgaggccgaggaggcaccgagagtgagcgagggctgcaagggctgccagcacactgtcacctctcacttcctccagaagctttgtccctaaggggcacccacctatatgaagtgtctgttggccactactgggaggtacctcccagttaggctacatgggggtcagggacccacttgaggaggcagtctgtctgttctcagagctcaaacgccatgctgggagaatcact

SEQ ID NO: 335589 - DNA, 543 bp, Homo sapiens
atcaagtgcagtgccctgctgggggacctggcgcaccctctgcagctgctggcctgggtgctaagcccctcactgcctggggccagcagggtcagctggccactccaagtgtggggcccgccaagcccacacccacccggaactctagctggccagcaagtgcagtacacagccctggttcccacccatgcctctccctccacacctccctgcaagccgagggagctggctctgaccttggccagcccagagaagggctcccacagtgcagcagcaggctgaagktctcctcaagcacggccagagtggacactgaggccgaggaggcaccgagagtgagcgagggctgcaagggctgccagcacactgtcacctctcacttcctccagaagctttgtccctaaggggcacccacctatatgaagtgtctgttggccactactgggaggtacctcccagttaggctacatgggggtcagggacccacttgaggaggcagtctgtctgttctcagagctcaaacgccatgctgggagaatcact

SEQ ID NO: 335590 - DNA, 543 bp, Homo sapiens
atcaagtgcagtgccctgctgggggacctggcgcaccctctgcagctgctggcctgggtgctaagcccctcactgcctggggccagcagggtcagctggccactccaagtgtggggcccgccaagcccacacccacccggaactctagctggccagcaagtgcagtacacagccctggttcccacccatgcctctccctccacacctccctgcaagccgagggagctggctctgaccttggccagcccagagaagggctcccacagtgcagcagcaggctgaagtkctcctcaagcacggccagagtggacactgaggccgaggaggcaccgagagtgagcgagggctgcaagggctgccagcacactgtcacctctcacttcctccagaagctttgtccctaaggggcacccacctatatgaagtgtctgttggccactactgggaggtacctcccagttaggctacatgggggtcagggacccacttgaggaggcagtctgtctgttctcagagctcaaacgccatgctgggagaatcact

SEQ ID NO: 335591 - DNA, 537 bp, Homo sapiens
ttgggttttatgcatttcaagggccttaattttgctagactgaatatcattttcaagtcttttacttcaaaggctgtgaggcccttytattagttgaaattctggaaaattacttcatgaaaatttagagtactttgataagctgatatagcctgtttcctagaatctcacaaaagtcaagacctcagttatgcatttatttcctttattctggttcttaaactcaagctactcattgcctaaggtcaatggaaaagttagtaaatataggaaaaggacaataatagagatgaatacatcttgatatgacaagaagaattaacaaagctcatgttttgatgatttcaagctactgacttggagttcagcctgtttttgctataatctggttcagggaacagtgatctatcatttcacattctttttaaactaggaaacttcacactttacagtagagagtgagtgggaccttgaagggtgagtattatgtctatttgttagtaagaaatgagggagttttctagtcaaaagaaacag

SEQ ID NO: 335592 - DNA, 565 bp, Homo sapiens
tagagatgaatacatcttgatatgacaagaagaattaacaaagctcatgttttgatgatttcaagctactgacttggagttcagcctgtttttgctataatctrgttcagggaacagtgatctatcatttcacattctttttaaactaggaaacttcacactttacagtagagagtgagtgggaccttgaagggtgagtattatgtctatttgttagtaagaaatgagggagttttctagtcaaaagaaacagcttaggggtataaaaatatacatgatgaaccatcaccaaataattgggaatagggccactagcatcaaatgatataaaatgcacacagctatattcataactcaactcacaaatgatttgccttagttataatgtgtgtcatatctaaacctaaaacataataaaatacacggtacacttacttaacctttcattagtgcacttgtatttttttttacctagtctattgatcaaaaaatttgacatatctgtggtgttatggttgggtgattaattatgaccctgaggaactgacagtctaataatcacact

SEQ ID NO: 335593 - DNA, 604 bp, Homo sapiens
acagtctaataatcacacttgtgctgtgccatttgcagcatgagtgctgcagaatcctaggtaggaaagtagtgacataccaagggctattatgtgcaataacgaaaggcagtagggtcgtaggccagccttatctgcattactttggatcttgttagatttcaaattcttggatctgactcaagacctactaaatcagaaactctagaagtgggacccagcagtctgttttaacaagttctccacataatttcaatatatgtttatgtttgaaaaattttattctggtgatagggaatacagacttcctcaattcagataatagctatgctattaacacctgagtgacattaggcatctatataatgatataatctatataacgaggataacattaatatctgccttagaggcttattatgggaatcaagtgaatcagcayttcctggtccctactaagtatcatattaacactagttcttgcctctaggggaagaaatggcatgatcctttagttctgccacggcctctcttttagatatcttgaaagtcttgcttttgtactgtttggctattttcagttatacaatgaaaacaacaaatt

SEQ ID NO: 335594 - DNA, 607 bp, Homo sapiens
cttattatgggaatcaagtgaatcagcacttcctggtccctactaagtatcatattaacactagttcttgcctctaggggaagaaatggcatgatcctttagttctgccacggcctctcttttagatatcttgaaagtcttgcttttgtactgtttggctattttcagttatacaatgaaaacaacaaattgtcaccactttcctttaacatttgaaatarattctccaataaggagttgctttttctgtccttaattgaaagaaaaatatcccttactttctgatactgaaaaatatactcattaaatctgatctactcttaccacaagcctcaagacgcatctttccagagtgaattacaagagccacaggcagcaactattgctttccaagcagctcaataatccatcattccacctttccttattccactgcaactcacctggatgcacagaaatttcctcccaaatttattgaaacattaaaaattcaggctccaagctaaaatccttgtcttcattttgtttaatattttgaagagtctaactctttggtattgattatctgagcaggcaatcaaaatgcttaatcaataacagtcactca

SEQ ID NO: 335595 - DNA, 577 bp, Homo sapiens
aagcatctacttttgaggaggtctcaggaaacttacaatgatggtggaaggggaaggagaagcagccatgctttctacatggctgacaagagagagggaaggggaatgtgccacacactttacagcaatcagatcttgtcagaaatctatcacaagacagcactagagggatcatgctaaactattagaaactgaccacatgatccaatcacctcccaccaggcccctcctccaacactgggattacaattcaacatgagatttgagtggggacacagagccaaaccatatcaaatataaagggtttggtactatctgtgcacagtttcagacatccactggagktcttgggaagtattttctcacaaaggagtaggcttttgtacatatttttctcaaacgcatttgggaaatttcccaggatagaccatatgttaatccaaaagtcaaatcacaatagattaaataagacagaaattatataaaatattgttttcaaccatagcaggatgaagttaaaaaatcaataacaaaagtaaagtggaaaatgtacaaatttacagagattaaacaacac

SEQ ID NO: 335596 - DNA, 622 bp, Homo sapiens
caggctctcaaagagatatttgcacacccacattcatagcaccaatattcattacagctaaaatgtaaagcaacccaagtatccattcgtagaatggataaggcaaatgtggtatatacatacaacaagaaattattcagccttaagaaggaaggaaattccgacacattctataactatgatgaatcttggaaacattattggtaagtgaaataaatcaggaacaaaaagaccaatcctgcatgattgcatttatatraagtagaatagtcaacgtcacagagataaagtagaatattggttaccaggagctgttgggacagggaaattggaagttacagtttaatggacacagttttagttttgcaagaagaaagggttatggagattgatgttagtgattgctgaacaatgtcatgtatatttaaaaccactgaactctgtacttgaaaatggtgaagatggtaaattttatgttgtgtgtattttatcagtataaaagtaatacattttttaaaatttatttttttagtataattctaaattttggaaagcatacattcagggggctcttactttaaattgtaatcatttattttcggttctagaaatgaacggaatt

SEQ ID NO: 335597 - DNA, 510 bp, Homo sapiens
agaccagtcagaaactaattacagtaatttaggcaagacatgatagtgtgttttttcaaactgatagcaagaaattgctaaattggtcagattcragaaataatttaagaacagggtcaacagaattgctaactgcatgaagatatgttagaggagagtcaaatatgaccccagagtttaaggactatgtaggtaaaataattattttgtaattgaagtagaaaagactgaaagaggaagaggtttggaattgaaagatcacatgtgcatttttaagtctgagactgctgttagaaacacaattaaaaatactgaattttaagttagatattttttcttattgacccaaatttcagggtcagttctgggcagagagtttaaaacctggaatgagaaggatatagatattatttaaaggcaaggcattaaatgagatcacaatgggaaggagtataaatggaacttaagaaaagattaaagactgagtccccagaaaatcttacattaagg

SEQ ID NO: 335598 - DNA, 510 bp, Homo sapiens
agaccagtcagaaactaattacagtaatttaggcaagacatgatagtgtgttttttcaaactgatagcaagaaattgctaaattggtcagattcaagaaataatttaagaacagggtcaacagaattgctaactgcatgaagatatgttagaggagagtcaaatatgaccccagagtttaaggactatgtaggtaaaataattattttgtaattgaagtagaaaagactgaaagaggaagaggtttggaattgaaagatcacatgtgcatttttaagtctgagactgctgttagaaacacaattaaaaatactgaattttaagttagatattttttcttattgacccaaatttcagggtcagttctgggcagagagtttaaaacctggaatgakaaggatatagatattatttaaaggcaaggcattaaatgagatcacaatgggaaggagtataaatggaacttaagaaaagattaaagactgagtccccagaaaatcttacattaagg

SEQ ID NO: 335599 - DNA, 593 bp, Homo sapiens
taagctgttgaaaaactttaagcaatatgtaattggaaaccccccaccaataaagaagagcaatagtgatacaacaaacatttgaagaaataatgtccaaagtttttaattttgatgaaacctctaaccaaaaaattcaagaaaattaacataacagaaaacatgactaaaagtactcagaaacacatcataatcagattacttacaaccagtgataaagggaatatcttaaaataataagccagagcacaaaagacagagaagcaaagataatgatgagaacagacttatcaccaagaaccttgcaagtgaaaagacagtggagcaacattgttttagtccattttgtgttgctgtaaaagattacctgaggctgggtcattcataaagaaaatatgtttatttagctcacagttctkcagctgtacaagaagcatggcatcagcatctgcttctggtgagggctttaggctgcttccactcatggcggaaggcaaagggaatctggtctgtgatgacatggtgagagaggaagcaaaaaagagggggaagatgccaggctctttttaatagccagctctcagggaactctc

SEQ ID NO: 335600 - DNA, 541 bp, Homo sapiens
gagactctgtctcaaaaaaacaarcaaacagacaaaaaaaagctctactgggttattataaagctatttgttataaaactttgtctaaaggtagagtaattaagataatgtgatattgggcaaataaaagataagtaggccaaccgaatagaagagagaaaccagaaacaataagcacatgtggatatttaaattttgacaaaaaggggactgtagaaccatggaggagatgaatgtctcatctcaataagtggtgcattgacctttagatatctacatggaaaagaaagaatgaaacttgattcccccacctcccaacaatacctcaaaatataagttagttggattgtagatatatatgtacacatcacctctgtcatctaagcaaaatgaccagttatccaaataggcagaaaagtttgatctgtaatcataaaaaaaattaatagaaacagacctagatgcaataaagatgatgaactttccagaaaagtatgttaagctggctattaaaatgtgctgtatatgttaaggaagaaag

SEQ ID NO: 335601 - DNA, 541 bp, Homo sapiens
gagactctgtctcaaaaaaacaagcaaacagacaaaaaaaagctctactgggttattataaagctatttgttataaaactttgtctaaaggtagagtaattaagataatgtgatattgggcaaataaaagataagtaggccaaccgaatagaagagagaaaccagaaacaataagcacatgtggatatttaaattttgacaaaaaggggactgtagaaccatggaggagatgaatgtctcatctcaataagtggtgcattgacctttagatatctacatggraaagaaagaatgaaacttgattcccccacctcccaacaatacctcaaaatataagttagttggattgtagatatatatgtacacatcacctctgtcatctaagcaaaatgaccagttatccaaataggcagaaaagtttgatctgtaatcataaaaaaaattaatagaaacagacctagatgcaataaagatgatgaactttccagaaaagtatgttaagctggctattaaaatgtgctgtatatgttaaggaagaaag

SEQ ID NO: 335602 - DNA, 541 bp, Homo sapiens
gagactctgtctcaaaaaaacaagcaaacagacaaaaaaaagctctactgggttattataaagctatttgttataaaactttgtctaaaggtagagtaattaagataatgtgatattgggcaaataaaagataagtaggccaaccgaatagaagagagaaaccagaaacaataagcacatgtggatatttaaattttgacaaaaaggggactgtagaaccatggaggagatgaatgtctcatctcaataagtggtgcattgacctttagatatctacatggaaaagaaagaatgaaacttgattcccccacctcccaacaatacctcaaaatataagttagttggattgtagatatatatgtacrcatcacctctgtcatctaagcaaaatgaccagttatccaaataggcagaaaagtttgatctgtaatcataaaaaaaattaatagaaacagacctagatgcaataaagatgatgaactttccagaaaagtatgttaagctggctattaaaatgtgctgtatatgttaaggaagaaag

SEQ ID NO: 335603 - DNA, 586 bp, Homo sapiens
  misc_feature (1)...(586): n = A,T,C or G
nnnnnnnnnnnnnnnnnnnnnnnnnnnnnnnnnnnnnatcagacaggagactactcatcagacaggatgattcaattcaatatggggaattataggtgtttttgacagactgagaacttactagtttcataacacttagtgtgaaattttactagagcttactgaaaaataaatctaaagaaaaacaaaattggcgayagagagcaaaggaaaagtaataataaaaaaaaagacactcacatctagcaaagagctctagccagatataaaataaagataaaaagaaaccaaataaacgggtcaactctttgaaagtcaagtgggtaaactttcggaaagtgcagactgatagaagaagaaagcagaatactagaggcatgtgccactacttaagaaaaagttgtagcaaaaagcaaatgctgttcactgtttgaaacattcaaaagctggagagatacaactgagaagcataagcagaaatgtcggtcctccggaggactctagcttccaaggcaacaacagcagtttggaaactccctagcaaacagctttcttaggcttaactgattatagcaagaggcacaaa

SEQ ID NO: 335604 - DNA, 586 bp, Homo sapiens
  misc_feature (1)...(586): n = A,T,C or G
nnnnnnnnnnnnnnnnnnnnnnnnnnnnnnnnnnnnnatcagacaggagactactcatcagacaggatgattcaattcaatatggggaattataggtgtttttgacagactgagaacttactagtttcataacacttagtgtgaaattttactagagcttactgaaaaataaatctaaagaaaaacaaaattggcgatagagagcaaaggaaaagtaataataawaaaaaagacactcacatctagcaaagagctctagccagatataaaataaagataaaaagaaaccaaataaacgggtcaactctttgaaagtcaagtgggtaaactttcggaaagtgcagactgatagaagaagaaagcagaatactagaggcatgtgccactacttaagaaaaagttgtagcaaaaagcaaatgctgttcactgtttgaaacattcaaaagctggagagatacaactgagaagcataagcagaaatgtcggtcctccggaggactctagcttccaaggcaacaacagcagtttggaaactccctagcaaacagctttcttaggcttaactgattatagcaagaggcacaaa

SEQ ID NO: 335605 - DNA, 586 bp, Homo sapiens
  misc_feature (1)...(586): n = A,T,C or G
nnnnnnnnnnnnnnnnnnnnnnnnnnnnnnnnnnnnnatcagacaggagactactcatcagacaggatgattcaattcaatatggggaattataggtgtttttgacagactgagaacttactagtttcataacacttagtgtgaaattttactagagcttactgaaaaataaatctaaagaaaaacaaaattggcgatagagagcaaaggaaaagtaataataaaaaaaaagacactcacatctagcaaasagctctagccagatataaaataaagataaaaagaaaccaaataaacgggtcaactctttgaaagtcaagtgggtaaactttcggaaagtgcagactgatagaagaagaaagcagaatactagaggcatgtgccactacttaagaaaaagttgtagcaaaaagcaaatgctgttcactgtttgaaacattcaaaagctggagagatacaactgagaagcataagcagaaatgtcggtcctccggaggactctagcttccaaggcaacaacagcagtttggaaactccctagcaaacagctttcttaggcttaactgattatagcaagaggcacaaa

SEQ ID NO: 335606 - DNA, 567 bp, Homo sapiens
ctgttaaaactttcttctgaggagactaggtatgaccagctccacgtttatgatttgtagtgagtttgaacttttggaacctgagctgagtttctcagcataataaaagaaagcctgaaagccataaataatggtctttctttgctaacctctcctcatactccacacacygtgtatcttttcctataaataaatgttaaagtattaatggaatataagtttaaagggtaccagactactagcctacttggggtactaacatggactgaatcttcactgacactaggactccatccaaagaagggtcctattaaaagacagtttttccctaaatacattgtatgtcataaagcccaaacacaacttatacagactattcaattctacagagtacagatgggtggtaggtagctaatgtttgttgagtaaaggaagacagatcaaggagtttgaaggctgagtttaatgatatgttcttttttattaatttccaggcaaagaagccaacataacacagagactgagactctgaggaatgtgatatggagatggaaaaatggggtaggt

SEQ ID NO: 335607 - DNA, 567 bp, Homo sapiens
ctgttaaaactttcttctgaggagactaggtatgaccagctccacgtttatgatttgtagtgagtttgaacttttggaacctgagctgagtttctcagcataataaaagaaagcctgaaagccataaataatggtctttctttgctaacctctcctcatactccacacaccgtgtatcttttcctataaataaatgttaaagtattaatggaatataagtttaaagggtaccagactactagcctacttggggtactaacatggactgaatcttcactgacactaggactccatccaaagaagsgtcctattaaaagacagtttttccctaaatacattgtatgtcataaagcccaaacacaacttatacagactattcaattctacagagtacagatgggtggtaggtagctaatgtttgttgagtaaaggaagacagatcaaggagtttgaaggctgagtttaatgatatgttcttttttattaatttccaggcaaagaagccaacataacacagagactgagactctgaggaatgtgatatggagatggaaaaatggggtaggt

SEQ ID NO: 335608 - DNA, 567 bp, Homo sapiens
ctgttaaaactttcttctgaggagactaggtatgaccagctccacgtttatgatttgtagtgagtttgaacttttggaacctgagctgagtttctcagcataataaaagaaagcctgaaagccataaataatggtctttctttgctaacctctcctcatactccacacaccgtgtatcttttcctataaataaatgttaaagtattaatggaatataagtttaaagggtaccagactactagcctacttggggtactaacatggactgaatcttcactgacactaggactccatccaaagaagggtcctattaaaagacagtttttccctaaatacattgtatgtcataaagcccaaacacaacttatacagactattcaattctacagagtacagatgggtggtaggtagctaatgtttgttgagtaaaggaagacagatcaaggagtttgaaggctgagtttaatgatwtgttcttttttattaatttccaggcaaagaagccaacataacacagagactgagactctgaggaatgtgatatggagatggaaaaatggggtaggt

SEQ ID NO: 335609 - DNA, 562 bp, Homo sapiens
aactctgcagggctggggtcataactctacccctagctgtggctgtctgttgtgcatggtagtttggaatctgatgactcaaagccaccatcccaggcagcagccatctgtctttggagttctctcttcttttaatgttccattaacctctcacagctggccttcctatgcaagatcatcagttcagctaatctttcactgatccctcccctttatgcaggaggttcatcattaatgcattctccctctgctccctgcttcctctccgcctaccagtgctctctattagtgcaagctgtgccgggggcaattcatcccactgtctgctcagcaccagctttgttgggattcagcacctttgggccctaaggcaatgtatgtccaggcccattagacaccgggttagaagcaatgtgaggacatctccttgtgtaggaacatgaactctcagaaaattgagcctccgtttcctcgtttggcctgctagtatgctcctattcacttgatgtccyctcccataactacgactcaacttaattacaataataaaaatagcagtaac

SEQ ID NO: 335610 - DNA, 488 bp, Homo sapiens
actggtcattgctgcaggctttctgagatgccaaaaaaactgtgagttggcttgctttctcagaggggaggctggtggtttggggcaagttctcagccctggtcaacagctgcctggaaatagactcagtgctgtttgtgggrtacagtgggaatgagattggcctttaggactgtgagctgcagggggtggggtggggcctgtgactgagggctttcccccatttccctggtgacctgtatgacacagcagaggccgccataatcccccttggaatataactccattggcttgagaaccacacccgcattccccacagcagcttcagcaagccccacccaaggagagtctaagctcagacacacctaaccctgcccccacctggtggcctttctctactggccctggaagcgaaagacaaaggacacaatctcttgagagctccatggccctgcccacctcctgagaaagctgaatacttaaccagc

SEQ ID NO: 335611 - DNA, 488 bp, Homo sapiens
actggtcattgctgcaggctttctgagatgccaaaaaaactgtgagttggcttgctttctcagaggggaggctggtggtttggggcaagttctcagccctggtcaacagctgcctggaaatagactcagtgctgtttgtgggatacagtgggaatgagattggcctttaggactgtgagctgcagggggtggggtggggcctgtgactgagggctttcccccatttccctggtgacctgtatgacacagcagaggccgccataatcccccttggaatataactccattggcttgagaaccacacccscattccccacagcagcttcagcaagccccacccaaggagagtctaagctcagacacacctaaccctgcccccacctggtggcctttctctactggccctggaagcgaaagacaaaggacacaatctcttgagagctccatggccctgcccacctcctgagaaagctgaatacttaaccagc

SEQ ID NO: 335612 - DNA, 627 bp, Homo sapiens
cttgcttccaacaagacaatcaaataacattttcaagagaaacaaacgctaacctttctttctatttgatttcatcctttctcttcttttctttgaaatgatccatttggtgaaagtatgtttttatatattgtatttccagaataaatcaagtgatataaattatgtatgggttgaaatgtgtcccccaagaagttgtgttgaaatcctaagctccgtacctgtgaatgtgaccttatttggacacaggttctttgctgatgtaatctggctaaaattaggtcatatttaattagggctgatcctaatctaatgtgattggtgtccctataagaagagaaaacagatacacagggaaagaaacaccatgtgaagacccaaacagacacagacagagagaagatgtgtagatagaggcagatattgaagttgtgctgccacaaatcaaggaactcctggggctattggaagctggaagaggcargaaaaaatccttccctggaggcttcagagggagcatgggcttgacacacctatattttggaaatctaacctttcgaaccgtgagatgataatttacatgattttaagccatcccgtttggtgtactttgttatggcagtccca

SEQ ID NO: 335613 - DNA, 627 bp, Homo sapiens
cttgcttccaacaagacaatcaaataacattttcaagagaaacaaacgctaacctttctttctatttgatttcatcctttctcttcttttctttgaaatgatccatttggtgaaagtatgtttttatatattgtatttccagaataaatcaagtgatataaattatgtatgggttgaaatgtgtcccccaagaagttgtgttgaaatcctaagctccgtacctgtgaatgtgaccttatttggacacaggttctttgctgatgtaatctggctaaaattaggtcatatttaattagggctgatcctaatctaatgtgattggtgtccctataagaagagaaaacagatacacagggaaagaaacaccatgtgaagacccaaacagacacagacagagagaagatgtgtagatagaggcagatattgaagttgtgctgccacaaatcaaggaactcctggggctattggaagctggaagaggcaggaaaaaatccttccctggaggcttcagagggagcatggscttgacacacctatattttggaaatctaacctttcgaaccgtgagatgataatttacatgattttaagccatcccgtttggtgtactttgttatggcagtccca

SEQ ID NO: 335614 - DNA, 619 bp, Homo sapiens
ccaggtttgctttggggtttgagtgatgactagaaaagactcatgttttatctgccatttcctcttctttaatggcagtagaagatggcttatacgctttggagagaattgttatataaatggtgattatttgaagacaagcaaaattcracatcaactgtaaaattatacactcttaaaagcattaaactcatgcttttataccaagtttactgaaaacatttatatgaaatgttaaaaactaacactttaaaaccagggaatttacttttaatcccctctctggagtagtcttcatacttgatatcttaaggagtctatgaaaagtactttttatccgcatttgaatattaatgaaggcaaatggcattttggaaaagaaaaaaatatttcttatactaactatctctaccctagtatcacttttctctacaagtgtgagtttataagtgttttaattaagaccatatgcttttacagtttgtggttgtaattttaattaaaaatacatacgtttaagacttctgtaaaacaatcagccatttatttgcaagtaaaccactgagtttaatacaatttaagtaactctttaaagaagcatctactataaaatggaatc

SEQ ID NO: 335615 - DNA, 619 bp, Homo sapiens
ccaggtttgctttggggtttgagtgatgactagaaaagactcatgttttatctgccatttcctcttctttaatggcagtagaagatggcttatacgctttggagagaattgttatataaatggtgattatttgaagacaagcaaaattcgacatcaactgtaaaattatacactcttaaaagcattaaactcatgcttttataccaagtttactgaaaacatttayatgaaatgttaaaaactaacactttaaaaccagggaatttacttttaatcccctctctggagtagtcttcatacttgatatcttaaggagtctatgaaaagtactttttatccgcatttgaatattaatgaaggcaaatggcattttggaaaagaaaaaaatatttcttatactaactatctctaccctagtatcacttttctctacaagtgtgagtttataagtgttttaattaagaccatatgcttttacagtttgtggttgtaattttaattaaaaatacatacgtttaagacttctgtaaaacaatcagccatttatttgcaagtaaaccactgagtttaatacaatttaagtaactctttaaagaagcatctactataaaatggaatc

SEQ ID NO: 335616 - DNA, 619 bp, Homo sapiens
ccaggtttgctttggggtttgagtgatgactagaaaagactcatgttttatctgccatttcctcttctttaatggcagtagaagatggcttatacgctttggagagaattgttatataaatggtgattatttgaagacaagcaaaattcgacatcaactgtaaaattatacactcttaaaagcattaaactcatgcttttataccaagtttactgaaaacatttatatgaaatgttaaaaactaacactttaaaaccagggaatttacttttaatcccctctctggagtagtcttcatacttgatatcttaaggagtctatgaaaagtactttttatccgcatttgaatattaatgaaggcaaatggcattttggaaaagaaaaaaatatttcttatactaactatctctaccctagtatcacttttctctacaagtgtgagtttataagtgttttarttaagaccatatgcttttacagtttgtggttgtaattttaattaaaaatacatacgtttaagacttctgtaaaacaatcagccatttatttgcaagtaaaccactgagtttaatacaatttaagtaactctttaaagaagcatctactataaaatggaatc

SEQ ID NO: 335617 - DNA, 449 bp, Homo sapiens
taaataaataaataaataaataaataaacaaaaaaaaaaaaccttttaaggctaggaacccaagaacccaaactaaggcataccttagatttttcttagcrtctaaaggttcttgaggctgccaggaagtgacactttttacttactgtaaggctgcaaactcctaaagctggacattctatgcacattttaaatgatggcattttagtcaaagccttggtaatatttaatataatcaatgtttctacttgtattctgcatacaaagacagagtagatttttattaaacttatgtaaataaaaaataagaatatgcacaaacagcttccaaattttggataaatcaagtagggaggaaaagcaaatttctccactattgttcacaaaagtatactttaccagattgtttaaaactatagatagcttataaagcaaaattttcttcaatc

SEQ ID NO: 335618 - DNA, 495 bp, Homo sapiens
aattccattacattccactccattacattccattccactccacccggatttattccattccattccattccattgcattccactccattccattccattccattcctttccattccattccattccattccagttgattccattggattccattccgatccattccattccattccattccattccattccattcgtgttgattaacatccattctcttccattccatcccatcccattccattccgttccattccattcgtgttgattccattccattccattcyattccgtcacattccattccactccattctattccattcctttccactcaggttgatttcattccattccattccaatccattccattcctttcgggttcattccattccactcctttccattccgttccgttccattccattccattccattcctctcgtgttgattccacaccattccattccattcattcctttccattccattcc

SEQ ID NO: 335619 - DNA, 495 bp, Homo sapiens
aattccattacattccactccattacattccattccactccacccggatttattccattccattccattccattgcattccactccattccattccattccattcctttccattccattccattccattccagttgattccattggattccattccgatccattccattccattccattccattccattccattcgtgttgattaacatccattctcttccattccatcccatcccattccattccgttccattccattcgtgttgattccattccattccattctattccgtcacattccattccactccattctattccattcctttccactcaggttgatttcattccattccattccaatccattccattccwttcgggttcattccattccactcctttccattccgttccgttccattccattccattccattcctctcgtgttgattccacaccattccattccattcattcctttccattccattcc

SEQ ID NO: 335620 - DNA, 495 bp, Homo sapiens
aattccattacattccactccattacattccattccactccacccggatttattccattccattccattccattgcattccactccattccattccattccattcctttccattccattccattccattccagttgattccattggattccattccgatccattccattccattccattccattccattccattcgtgttgattaacatccattctcttccattccatcccatcccattccattccgttccattccattcgtgttgattccattccattccattctattccgtcacattccattccactccattctattccattcctttccactcaggttgatttcattccattccattccaatccattccattcctytcgggttcattccattccactcctttccattccgttccgttccattccattccattccattcctctcgtgttgattccacaccattccattccattcattcctttccattccattcc

SEQ ID NO: 335621 - DNA, 495 bp, Homo sapiens
aattccattacattccactccattacattccattccactccacccggatttattccattccattccattccattgcattccactccattccattccattccattcctttccattccattccattccattccagttgattccattggattccattccgatccattccattccattccattccattccattccattcgtgttgattaacatccattctcttccattccatcccatcccattccattccgttccattccattcgtgttgattccattccattccattctattccgtcacattccattccactccattctattccattcctttccactcaggttgatttcattccattccattccaatccattccattcctttcgggttcattccattccactcctttccattccgttccgttccattccattccattccattcctctcgtgttgattccacacyattccattccattcattcctttccattccattcc

SEQ ID NO: 335622 - DNA, 509 bp, Homo sapiens
aatcctgaatcatatttctcaaattaagtgaaggtytacataaatcctgttcaaagcttctaccaaagatggagcttgtaattaagcaaatcaaatatttgtagttctttgtcaggtaattattattttgctttttgtaagtaagagagacaatatattttgtagagaaaatttccaaggtaagtggtgttttgttccaggaaaatgtgatttataatgtgtaacttttatagagattttccctctcattttttaaaatttgagacattagaagaaccattaccttttgggtctttctcccaatctttgatactagtacaatattttggatgaatctttccctggacataggatagcatatgtaagaataggtaaattttcttatgcaccatgaaatttgagattcttgaaatgagttacactttttttaagcttctgctttaactagaaaaattgtttctctcttgtgtggtacctattcttgattgattaagtagttgtcaaatatt

SEQ ID NO: 335623 - DNA, 593 bp, Homo sapiens
gaggaggaaactggatatccatgtgtagaagaatgcaactagacccctatctcttgccatatacaaaaatcaaatcaaaatggattaaaaacataaatctaagacctcaaactatgcaatcactgaaagaaaayactgaagaaagtctccacgacattggactgtgcaaaaatatcttgagcaattccccacaagcacagacaaccaaaacaaaaagtggacaaatgggatcatatcaagttaaaaagcttcttcacagcaaagaaaaccatcaacaaagtgaagagacaacccacagaatgggagaaaatatttgtaatctactcatctgtcaagggattaacaactggaacatataaggagcccaaacaattatatagaaaaacgatctaataatctgatttaaaaatgggcaaaagatctgaatagacatatctcaaaggaggacaaatagttaacaggtatataaaaaggtgctcaacattattgatcatcagagacatgaaaagcaaaactacaataagatatcatctcacctcaattaaaatgttttttatccaaaagcaataacagatgttgtcgagcatatggat

SEQ ID NO: 335624 - DNA, 452 bp, Homo sapiens
catctcacctcaattaaaatgttttttatccaaaagcaataacagatgttgtcgagcatatggataaaaaggaaccctcatacactactggggggaatgtaaactagtacaaccactgtgcagaacaacacggaagttcctcaaaaaactaaaaatataactactatatgacccaacaatcccactgctaggtataaacccaaaagaaaggaaattaagatattgaagagatatctacagtcccatgttaattgcagcactattcacaatagccaatatttggaagcaasctgtgaccatcaacagataaatggataaagaaaatgtgtacacatacacaatggagtaccataaaaaatgcgattctggtatctgcgacaacatggatggaactagagttcattgtgttaagtgaaataagccaggcacagaaagacaaactttgcatgttc

SEQ ID NO: 335625 - DNA, 544 bp, Homo sapiens
gtgaccttgtagaatgagtttagaagtattccttcttcttcaatttttttgaagaggttgagtataattggtattagttattctatacaggtttggtagaatttagcagtgaagtcattatgtcctgtgttttttttttttttacttgatgggagattttctattactgattcaatacaattattcatcattagtctgttaaggttttctatttcattataatttggtcttgggaggttggatgtgttcagtgatttgttcagttcttctgaattttccaatttgttggtgtatatttgttcataatagtctcttataatcctttatatttctgtggtattagttgaaatgtcttatttttttatctctgattttaatactcgagtagtctctctttttttcttagtctagcttccagctaaagttttcttttttcttttagaaaatgaattatttatttcattaatctattgtatttttttcttttttttgttcrtttctgctttgatatgtattatattcttcctctactaatgttgggctt

SEQ ID NO: 335626 - DNA, 620 bp, Homo sapiens
tgctctgttcttcagtcctttattctgtggatttgaataatactgacacatctagtaaataggtctaaataaagcagctagcgctattacatgttagttttatctgttatcattactattattattcaaatataagtcacatgaaatattttaactgcatattctacatgcattttcttgctttttcagttaagatcaactttagatgaaatctaccactgaatcttgtgtttattgccacctgatattttactcaagttatacatatagacttaaaattgttaagagtttgtcaaggtatggagatagatcagagaagagaactaagaatggaattcccacatcttgagtctgggaaaaagtagacaacagatggataacaaaatttccaaaggtagattgtttcagtgctagaaaagccagagaaaagaatttgaaaaatcagatgcactgaagtggttaaagaagtaaaggtttagaatagaccactgcattgtactttgcaagtttgtttgtgaccctctagagaacattgatttattagggatataaacaaaytggaagttagctaattaaaagtggattgggaactaagtgagagaaagtcattcctgacaaaa

SEQ ID NO: 335627 - DNA, 551 bp, Homo sapiens
catggaaatatttaactttctttttgaaagtcatatatttccaattttttttcatttattatctgtgtatatgtataaagaaaggagttgcctcaaagtgtyacaaagagcaatgctaatcagttcaacttctgttatttactaaactttctagtcacaaattttgttaaattgagatgtttccaggaatgctgtggttataagcagtgcagaacaatgtaaggcagcttagatgctatttggaccgtgcacacagattaaaatcgcaaataaagtaaaaaatagtttgctattagaaaggctagaaaggggaaatactattaaacaaatgaattgatttaaaaaataaatattcatgataccacttaacaatttagaatttatgagtataattatatcaatctctttgaataaaaccatttagaaaatgttctaagggaaagaattattgaagaatcagaaaactgtcagaacaaaaggggacatgaggccagatatgaatcatgctttctttccaaagaaaactaacaataaggatagtgaattagata

SEQ ID NO: 335628 - DNA, 512 bp, Homo sapiens
aaatagcagccagatacattatagctttaatttctggttgcataattatatgtccttttttctatgaatatggtgccatactttgttatagacccgaaccccaagaagtggttggtaactgctctttttgtatcttcataaactggagaccccatcaccagcctctcctcagaggacacaggctttcaattctgactgacttttgctttccacttcaaaatgaacaattgttgtccacattatccttcaggaactaatcttctggccacatctctttccacccagacacagagctaagtagacctaaagtgtcaaaaatccccacagatcactcatgtaaaatagtttgttcagtttcaactgcatggaaatatttaactttctttttgaaagtcatatatttccaattttttttcatttattatctgtgtatatgtataaagaaaggagttgcctcaaagtgttacaaagagcaatgytaatcagttcaacttctgttatttactaaactt

SEQ ID NO: 335629 - DNA, 574 bp, Homo sapiens
ggattgaataaaggaaaatattgccaagtctgtgggatgataaactcaatggaaaagtccacctggaaataagtttaatagaattgtcaaagatacctcaagttagagtgccagacactggaactgaaggatgaccattacaaagagaggtaggaggggkttaggtatgtgtcagctccaagacggaaatatgaatgcggagtgaatttcagtaccagaagccctgctgcaatctattctctcgatagaggcacagagagccctgtgaaaggggttactactgagacaggctctccacaagatcagatatgcccattagagaggagagttttgcccccaaactaactcccaactatcaaaattaatccccacagcaatgatggtgcattacatcagcacactgttccctgaggattttttctccatacgtcagtgcttcacagaaaaacacagttcctgattatcaatatgagaatgcagaaaatataatctttcctcttccctcttcatgtaagactaattttttaaactacacccttaaaaactctaaaaggactatctttattataatgag

SEQ ID NO: 335630 - DNA, 606 bp, Homo sapiens
tattaatgtaatactagataggaagggagtgatatgatttctgaatatgaaacattacttactaatattgtgaaggaaagagaaatgaagagattatacactttacaatggcattacactatctcaaataaacatatcctagaatttgtctcatttgattcttttccttttcctgataacacacgagaggagcttagtaatactttgaggatatttgttcctctagggaccaaatgaaatgctctcgcttttaacttattttaatggacctttaaatgtgaatcataatatctgaaaacttatattttaaggcaatgaattccaaacataagtttttaaataagactagaatattttacaagtactagagaagaaataatatcacatgaaaccaacaactttaaacttactatatttttcccagaaagcagtagatctttatatatgctgagatttcctttgaaagaattttcgtacgatttgattgcyatgaaacaaaaaagtatgattttcaaaattaagtgtaagaacattgttgtgatgttttattcattcataaaatatttacagacaaataaagatatacctttaagtgtggctgagaaa

SEQ ID NO: 335631 - DNA, 597 bp, Homo sapiens
atattgcaaaaagggtcctttccttggtctattagtgccacattttttgaattttgtgcttttatattggtgatttcactgtttaaaatggcccccaagcatagtgcaagaagactgtgacatacctgaaagaaaatacatgtgttagagaagctttgttcaggtatgagttatagtgctgttgacaattagttcaatgctaataaatcaaccatatagtacatcaagagaaaggaagaagaaaatctgatgctttatatatatgacaccactctggaaatgggctaaagtaacatctataagatgtgatgaagctatggaaaagatagaaaagtggttaaatttctgtattcatgagatgatgacaactaatttaaaaaaaaagcatagttgacaggattgtgtgaagttgaaagccaaaggaaytggaattggaaaagtcaaaggctcatgctattcaaggacaggataataggaaacccttctcagctagtgctggctggcttgcacatttcaaaaggtgatatggtgtgaaaaatgttaaaattgctgttgaggtatatgaagcaggtcctttggattaggaggctgcagaat

SEQ ID NO: 335632 - DNA, 507 bp, Homo sapiens
agatgactcaaaaccaggttgcaagtcctggcatggttggtttatgtccacttcaccctttccctgcatgttgttggcctttggagtcctagctttatgtgagtacagtgtgccagtagccccatttcagaaagcctgggcatttgacttttatttcttctaatctgatttcagttttcctgctatttctttgtttatagaggaaatcctcagggcaaaattcgctttgagscttcagcttattttttctggctcttgtcttctttcaaagtatggtcctgtaattcttcactctcattggctctttgatgcttttaagataatatatttcaacatcatacagatattttcatttttctcagagcaaggattggtctgaattacccagcctgccattactagaaccatttgttacttttacagttggggaaaaaattaaaaagaaacatccatgcatatttgggagatcagtgtcagttttgacttgtagatgctgaacccaagaaa

SEQ ID NO: 335633 - DNA, 548 bp, Homo sapiens
tgcatatcatagaaatggatagcggttactaaaggatgagaagaggtaggatagtgagacatgagttaacagatacggaattacagctagatacaaggaatagattctagcagtagggccaggtatagtggctcacgcctatagcagattggggggccaaggcaggcagatcacttgaggccaggagttcgagaccaacctggccaacatggcaaagccccgtctctactaaaaatacaaaaattatttgggtgtggtggcacacacctgtaatcccagctacttggggggctgaggcacaagaatcacttgaatgtgggaggcagaggttgcagtragctgagattgtgccactgcacttcagcctgggcaacaagagtgaaattctgtctcaaaaaagaaaagaaaagaaaaagaaaaaagaaaaacccatgacatgcttttttatttgacgtggcgtgcccaccctgtccctgtattttccaccacccttagccccattccacagcagaggatgtgggaggatgtgtgaggctgtgggcaggaag

SEQ ID NO: 335634 - DNA, 493 bp, Homo sapiens
tcgtgggtggagccaacagttatcccaggagaaggcagagcctggcgaccctgaccctgggaccctggcacaggcctgaacactggcacscatgtatggaaggtggaaaatgcttccaggtgccttttgagttccagatgccattgaagacagcagagaggctcaacccagccagtagaccttctaccttcattgcaaggatgctttttaaatctttacttagaaagttcagttccttggctcgcacaaaggacaatgtgaagaacaattgaactgctgagaacatccagattcgacaacattcggagacacagtcagtgactgatgagaggaaccagcttatatttctaaagcttggaggcctgctgccaggtcttttatttaaaacatgcctcagaataggccactgtgggcgccagcaagactagcctcagaatactttggaataaccccatgctttcgtggccaaagctgtatatttttggatgccagg

SEQ ID NO: 335635 - DNA, 493 bp, Homo sapiens
tcgtgggtggagccaacagttatcccaggagaaggcagagcctggcgaccctgaccctgggaccctggcacaggcctgaacactggcacccatgtatggaaggtggaaaatgcttccaggtgccttttgagttccagatgccattgaagacagcagagaggctcaacccagccagtagaccttctaccttcattgcaaggatgctttttaaatctttacttagaaagttcagttccttggctcgcacaaaggacaatgtgaagaacaattgaactgctgagaacatccagattcgacaacattcggagasacagtcagtgactgatgagaggaaccagcttatatttctaaagcttggaggcctgctgccaggtcttttatttaaaacatgcctcagaataggccactgtgggcgccagcaagactagcctcagaatactttggaataaccccatgctttcgtggccaaagctgtatatttttggatgccagg

SEQ ID NO: 335636 - DNA, 493 bp, Homo sapiens
tcgtgggtggagccaacagttatcccaggagaaggcagagcctggcgaccctgaccctgggaccctggcacaggcctgaacactggcacccatgtatggaaggtggaaaatgcttccaggtgccttttgagttccagatgccattgaagacagcagagaggctcaacccagccagtagaccttctaccttcattgcaaggatgctttttaaatctttacttagaaagttcagttccttggctcgcacaaaggacaatgtgaagaacaattgaactgctgagaacatccagattcgacaacattcggagacacagtcagtgactgatgagaggaaccagcttatatttctaaagcttggaggcctgctgccaggtctyttatttaaaacatgcctcagaataggccactgtgggcgccagcaagactagcctcagaatactttggaataaccccatgctttcgtggccaaagctgtatatttttggatgccagg

SEQ ID NO: 335637 - DNA, 584 bp, Homo sapiens
cttgtatactttatactcgcttcttatttctctgccccttatcccctcccttcccactaagatggggagtttccatctcaaaaatcccatacaagaaatgagagaggagagagagggagaaattatctgatagacgagacagtatttttcacggttaattgaggatgattttcataactggcaaatgtcattttgatcttygctattagaacatctgcaccatctcacaacaggaagcacagctatattccttgggatttacctattcttagaactaagagcacacattccaccagctgtctcgtgttgaaaatgttagctttccaaatccacgcaattggattgagcgtttataaatagattcaataaaaggaggttccattaggtctatacactaaaactggaattttttaaagatcctccaaggccccttttatttggtctgttcttgaatcatgccctgagagcaaaccatgcagttttattgctgaagataatatacattgttttttgaaaaaagaaaggtaatacgatattcctctgtgtgaagaaggagctcaattctcggctacacctaagcatgc

SEQ ID NO: 335638 - DNA, 541 bp, Homo sapiens
ctaaactcaatagcaaaaacaaaaacaaaacagaagcaaacaaaaaacctggttaaaaaatgaacaaaggattggaatagacatctctccaaagaacacctacaaatgatggacaacaggtatacaaaaagatactcagctttacccatcggcagggaaatgcacatcaaaaccacaatcagatattatcttgcacctattaggatggctactataaaaatatttataaatattagtgaggtttgtatactgctgatagtaatgtaaaatggtatagccatcatgaaaaacmgtatgaaaatttttcaaaaaattaacaattaaactaccatatgatccagaaatctcacctctgggtatacatccataacaattgaagtcaggatcttgaagggatagctgcactcccatgttcactgcaggtttattcacaatagccaacatatggaaacaactcaaatgtccgttgaaaaattaacagataaagaaaaattggtatatccatgtaatagaatattatccagccttaaaaaaaagaagg

SEQ ID NO: 335639 - DNA, 515 bp, Homo sapiens
aattactctaacaatattaagacctactgtgtagctacatcaatcaagacaatgtggtattggcaatgggatagacacatagattattgcaacagaacagagaactcagaaatagacccatgtatggacagccaactcatttttaacaaaggtgcaaaaataattcaatggaagaaggatagtttttccttccttccttccttcctttctttttctttctttctccattctttctttctttcatttttctcctcctgctcctagaacaatttgattttcacaggcaaaaaaaggcactttgaccgaattatcatgccttatccaaaaattctcaaaaaggaacagatttaatgtaaatcgtaaaaytataaaactttaagaagatacctataagaagataaatctttgaaactttagacatgacaccaaaagcacattttataaaaggaaaaattaatatatctgacttcattaaattttaaatcgagctctgtggaaaactctgatgagagaaa

SEQ ID NO: 335640 - DNA, 555 bp, Homo sapiens
gtaatgagatatcatcacatatttattagaacaactaaaataaaaaacaatgacaataccaaatgctggaggggttgtggagaaactggatcggtcatatatcactacttaggaatgtaagaagatgcaatcactctagaaaatattttgggagtttctttaagaaaactaaacatacatttaccatacaatttagcaattgcactcttaggcatttatcccagagaaataagaggttgtgtctgcacaaaaactgtacatgattgttcagggcagctttacttttaatggtgaacaattggaaactaccaaaacgttccttagtaagtgaagttaaacaagctgtggtacgcccatcgtctataccatggaatgcagagaatggactatgcatacacataaactttgatgagtcscaagagcattttgctgagtgatttaaaaaaatcccaaaaagtcacatgtcatatgatttcattgtatagccttgtcaaaatgatgacattatggagttggaaagcagatgactggtttccaaggttaaggagggtgaag

SEQ ID NO: 335641 - DNA, 577 bp, Homo sapiens
agtggctcatgcctgtgaaccgaacactgtaaggggccaaggcaggaggattgctttgagcctagragtttgagacaagcctgggcaacatagtgagacccccatctctattaattaaaaggaaaaagaaaatttttaaaagaactttaaaaataagaaattaaaagtatatcaaattaaaaattttaatgagtagaaaaagtcaacgaaatatcctagaaaatatttatagattcaaaaagacaaaggtgaaaatataaaggaaaagagaaaaagtagactctaaatgtacaaagaattataaattccataaaggaataaccgaagaaacagagagaagaggaatttatcaatagaataagaaaaaactgtcaagaggaagggacaagagttttcagatttaaagtgtcagttatgtatcccaggaaaatactgaaaaattttttcaagtattttttccaaggcaactcatgtcactgtaaaatttttataacgcagctataaaggaaagatcataaacacttccagaaagacaaaataacaatcacatgcaaataactgggaacgaggatggctt

SEQ ID NO: 335642 - DNA, 599 bp, Homo sapiens
aattcaacagtagcattagagtaaagcaccctgtaatctctcatgatgtcttcatgggtgattccatgtttgctcttttcctttgcatatatttcacatggtggagttttctcaacacttacttctcagataaaatgttattatacctttacagagaggctatccttgtccacataacctagagtagttcatctcaaccttccctgccactgatcctttttcccctataacatatgtcatgacctgaagttatttatttatgtatgtatttatgtgtaggtgtattcaattgtttgtatattcctttgctagaatataaatttcaccatgagaggattttgtctatcttttycaatactgtatctccaacacatagaatggtgcctggtacatattagacattcaaaaaatagttgtgaatcaaatgaattaatgctgatatctaatagttgcttgatatttaaactactgaatcttatattagcattgaatcatggagtaggtgttacagataatgaagagagaaaacaaagaatagcagaacacaatctaaaataaaatctacttagttgtctcatgtattaagttatcatatgtgg

SEQ ID NO: 335643 - DNA, 589 bp, Homo sapiens
ttgtgaatcaaatgaattaatgctgatatctaatagttgcttgatatttaaactactgaatcttatattagcattgaatcatggagtaggtgttacagataatgaagagagaaaacaaagaatagcagaacacaatctaaaataaaatctacttagttgtctcatgtattaagttatcatatgtggcatctggaagctctgctcttactagttctattttcatactgtcaacaagctgctgccacatccataaaagtgaaacattyatgcaccaatgcaaaagagttacttttgacttttctttctcctgtaaagcactcaaaaatacaattctaaaagatgaaatgactgggggaggatggatggtgggagaattgtatgacttaaaccagaagcttacataaggattgaatctggtccttaacattaaagtggtagttgcattttggaaaattgaaatcatgatgcttggctgagctgtaggtgtactctcaatggcattatatgatttgacttaaatagaaaagcaatttaaattcttgtttaaattagcactgaactccaatatcacctactaattttatgttta

SEQ ID NO: 335644 - DNA, 498 bp, Homo sapiens
catggacaaatgaggcttaatgaaactaataaacattttgcctagaaaaggctctttgctcctggatttcaacctgaaaattgctggcagccatcttgcaaccatgaagacatgtgaaaaacaaagaagaaaagagtcaaggaatatattttgctaaccttgttcaagccctgactcaagccaatcttcctagtgtcttatgattatgtgaggcagtcaatttcagtttttgttagcttccttttccatttgcaccaggaagacataaatggtgtgatctttttgtcccttatatagacttaatataamaatgtatttaaagaatttacaggcagggaaaacttcttcctttttcttccttaattaaggtaactagaactaggtaatacattatatttaactttttcattggttaccataattaaagccataatttaatcctatgctccactgcaataaacatctttgcctagattgaagtacagttatgtttccata

SEQ ID NO: 335645 - DNA, 384 bp, Homo sapiens
ctttattgatattctgtatttgttgagatgtcattctcatacctttttttatatttctttaggcattattttctttagttcttggaacatgttttaaaataattgacttaatgtccttgtctagttatgcctaatgtaggcttcctcagcaacaatttctattgcctgagatttttcttgtgttggggctatattttactgtttttaaaaaagtctyataattttttgttaaaaactagatattttaaataatataatgtgataattattaaagtcagattatttccacaatatatatagtttttgttattgatgtttgtttttgtcattgctatttgtttagtgaatttcctgaactacttccataaagtctgtgttttttgt

SEQ ID NO: 335646 - DNA, 384 bp, Homo sapiens
ctttattgatattctgtatttgttgagatgtcattctcatacctttttttatatttctttaggcattattttctttagttcttggaacatgttttaaaataattgacttaatgtccttgtctagttatgcctaatgtaggcttcctcagcaacaatttctattgcctgagatttttcttgtgttggggctatattttactgtttttaaaaaagtcttataattttttgttaaaaactagatattttaaataatataatgtgataattatkaaagtcagattatttccacaatatatatagtttttgttattgatgtttgtttttgtcattgctatttgtttagtgaatttcctgaactacttccataaagtctgtgttttttgt

SEQ ID NO: 335647 - DNA, 530 bp, Homo sapiens
aagagaggtatttatttacaaataaaacactttattgcttatcttgtaaacacatatttacagtggataaagagctttcaggaaaattgttaatgtaagtaatgttaaacacatccatcagggttcataaagtattttgtgatataccggctgcaacctagaaaatgatgtttctggcctggcaagttggccattgcctataatcccaatggtttggaaggcccaggcaggaggatcacttgaagccaggagtcgaagaccaggataggcaacatagtgagagcccatctctacaaaatataaaattaaaaaaatkattttctataatattaacattatgaaggaaacttttaattcaaggcaacgtcaatgaaattgcaagttatagggttttggattcaactgaagtctaggctctcaaaatacctttaagtatccttctagtcattgtaaatactgaaagatcactatcaactagtagctcattttaagaaaatattccgctgtcctaatatgatgtttttttcatt

SEQ ID NO: 335648 - DNA, 551 bp, Homo sapiens
aaaacacaaaagtcagagggctgagctctgtgatactcccatcgataacagttttccctctctattcatttgctgataccattccttctactcagaatgactttactcacttttcctcacagaaaagcacccatcctttacaatctaactcagaatacatcatatttgaaaygttggctatttagccagggttttccagagaaacagaaccaaattcttaccataaatctacatatttgtaaggcattggtacacatgattatgaaggctgacaagtcccaagatctacaggatgagtcagaaaactggagatctaggagagctaatggtttagttccagtttgagtctgaaggcctgagaacaaagagagctgatgctgcagttccagtctgaaggctggcaggctcaagacaaaggaagaattgatgtttttattcaaatccaaagttaaggacaaaaatgcctatatcctagtttgaaggccatcagacaggaagaattttatcatgcttgggggaggtcagactttttgatcttctcaggccttgac

SEQ ID NO: 335649 - DNA, 551 bp, Homo sapiens
aaaacacaaaagtcagagggctgagctctgtgatactcccatcgataacagttttccctctctattcatttgctgataccattccttctactcagaatgactttactcacttttcctcacagaaaagcacccatcctttacaatctaactcagaatacatcatatttgaaatgttggctatttagccagggttttccagagaaacagaaccaaattcttaccataaatctacatatttgtaaggcattggtacacatgattatgaaggctgacaagtcccaagatctacaggatgagtcagaaaactggagatctaggmgagctaatggtttagttccagtttgagtctgaaggcctgagaacaaagagagctgatgctgcagttccagtctgaaggctggcaggctcaagacaaaggaagaattgatgtttttattcaaatccaaagttaaggacaaaaatgcctatatcctagtttgaaggccatcagacaggaagaattttatcatgcttgggggaggtcagactttttgatcttctcaggccttgac

SEQ ID NO: 335650 - DNA, 551 bp, Homo sapiens
aaaacacaaaagtcagagggctgagctctgtgatactcccatcgataacagttttccctctctattcatttgctgataccattccttctactcagaatgactttactcacttttcctcacagaaaagcacccatcctttacaatctaactcagaatacatcatatttgaaatgttggctatttagccagggttttccagagaaacagaaccaaattcttaccataaatctacatatttgtaaggcattggtacacatgattatgaaggctgacaagtcccaagatctacaggatgagtcagaaaactggagatctaggagagctaatggtttagttccagtttgagtctgaaggcctgagaacaaagagagctgatgctgcagttccagtctgaaggctggcaggctcaagacaaaggaakaattgatgtttttattcaaatccaaagttaaggacaaaaatgcctatatcctagtttgaaggccatcagacaggaagaattttatcatgcttgggggaggtcagactttttgatcttctcaggccttgac

SEQ ID NO: 335651 - DNA, 551 bp, Homo sapiens
aaaacacaaaagtcagagggctgagctctgtgatactcccatcgataacagttttccctctctattcatttgctgataccattccttctactcagaatgactttactcacttttcctcacagaaaagcacccatcctttacaatctaactcagaatacatcatatttgaaatgttggctatttagccagggttttccagagaaacagaaccaaattcttaccataaatctacatatttgtaaggcattggtacacatgattatgaaggctgacaagtcccaagatctacaggatgagtcagaaaactggagatctaggagagctaatggtttagttccagtttgagtctgaaggcctgagaacaaagagagctgatgctgcagttccagtctgaaggctggcaggctcaagacaaaggaagrattgatgtttttattcaaatccaaagttaaggacaaaaatgcctatatcctagtttgaaggccatcagacaggaagaattttatcatgcttgggggaggtcagactttttgatcttctcaggccttgac

SEQ ID NO: 335652 - DNA, 584 bp, Homo sapiens
agtgttttaccagattctgcatatgagtaagattatgtgatatttgtttctatttctggcttatttcacttataatattctctaggttcatacaggctgttgmaaatgacagaatttcattctttttatggctaaatagtagttgtgtatatatattatcctgttgttatccattcatctgttgataaagacttaggttgattgcatatgttggctatggtgaatagtgctacaataaacatgagagtgcagatatctttctgacgtactggtttcattttctttgggtaaatactcagcaataagattgctggatcacatggtagttttattttttattatttgaggaacctctatactagtttccataatgactatactaatttacattcccaccaacagtgtataagtgtttccttttcctcacatctttgcaacatttgcttttttccatcttttttttttataatagccattctaactggaatgaggtgatatctcattgtagttttgatttgcattttcctgatgtcagtgatttttttcatatactttttggccatttgtatgtcactttttgagaa

SEQ ID NO: 335653 - DNA, 554 bp, Homo sapiens
aaaatgacagaatttcattctttttatggctaaatagtagttgtgtatatatattatcctgttgttatccattcakctgttgataaagacttaggttgattgcatatgttggctatggtgaatagtgctacaataaacatgagagtgcagatatctttctgacgtactggtttcattttctttgggtaaatactcagcaataagattgctggatcacatggtagttttattttttattatttgaggaacctctatactagtttccataatgactatactaatttacattcccaccaacagtgtataagtgtttccttttcctcacatctttgcaacatttgcttttttccatcttttttttttataatagccattctaactggaatgaggtgatatctcattgtagttttgatttgcattttcctgatgtcagtgatttttttcatatactttttggccatttgtatgtcactttttgagaaatgtctatttagatcttttgcctatttttaaattggattatttgtggggttttttgataatgagttgcttgt

SEQ ID NO: 335654 - DNA, 496 bp, Homo sapiens
cagaacacacaggattcttaggacaatgtagccattctatattaggccatagggtggatatctgtcattatacatttatccaaacatatagaatgtagagaagcaatgcaaccctaatgtaaactatagaccttggatgaatgataatgttgtttctatgtagattcatgaattgcaacaaatgtaccaccctggtgggggaagttagtaatgggcaggctatgcatttgggcagggaggggcatatgggaaatctctataccttccactcaattttgtgctgagcctgaaactgctctaaaaataaaagttaaaaataatgagtatgagcggagtctttgaagmctgatagcatgtcccagtatccatatgttaggaaaggactcttccaacaacctttgagatgtctggccttgtcaattcacaagctctgtggtaaatccaagaaacctgactttctgcttggctctgtttctaatggctgaagccacattca

SEQ ID NO: 335655 - DNA, 361 bp, Homo sapiens
gaaaagtcacaagagaggaggaatataatagcaggaaccagaaatacactctataccagaaattaggagacaaggcttaaaaaatcagaatttggaaaaagcaatagccaaaattaggaagcatgggttccagtttcagcagtttcctgtgtctttgggcccattgctttggttctctgggtkccatttttctatgagtaaaatgggagtgttcagttatataatttctataactctttctaactcccccatacatcatattctacaatccttaggaatggttcaataacattcagtgccctaaaggaggaaaggagattgtagtatactcaactgaattaagaagaaagaccttccaatc

SEQ ID NO: 335656 - DNA, 485 bp, Homo sapiens
tttattgctcacacaaagcctgtttggtggtctcttcacatggacgtgcatgaaacttcttataattttctggttgccaacgcaaaaaaggaacaaatagtaaattcttataactaattataagcatttgggataatctcctctaaaatatatgagagatgcaattcatagagaggttaaggtaagattactgtgtcaaagtcaggaagttagccaaggagacaaggggtaaacatgatcagcttaaaggagctatgaataagggaaaccaacaaggtaaaaatctgggatggaaagaggccaagtaggagatsgagataagcccctgtgggagacctcaacaaaaatgagtatgcagacttgcatgtgcagaatggcaagacaggctgctatggcctaaagaagaccactgcaaacaatggatcgctaaggcatgttccacccaacttgttaaagagctttgcatgtatacagggccggccaca

SEQ ID NO: 335657 - DNA, 485 bp, Homo sapiens
tttattgctcacacaaagcctgtttggtggtctcttcacatggacgtgcatgaaacttcttataattttctggttgccaacgcaaaaaaggaacaaatagtaaattcttataactaattataagcatttgggataatctcctctaaaatatatgagagatgcaattcatagagaggttaaggtaagattactgtgtcaaagtcaggaagttagccaaggagacaaggggtaaacatgatcagcttaaaggagctatgaataagggaaaccaacaaggtaaaaatctgggatggaaagaggccaagtaggagatcgagataagcccctgtgggagacctcaacaaaaatgagtatgcagacttgcatgtgcagaatggcaagacaggctgctatggcctaaagaaraccactgcaaacaatggatcgctaaggcatgttccacccaacttgttaaagagctttgcatgtatacagggccggccaca

SEQ ID NO: 335658 - DNA, 616 bp, Homo sapiens
cttctctagtaaaactgggaggaaaacgagctgatcagggcagcaccaaaagaagctggtggttggagccaacagctaatgggtggagcctgactgacaggaacaataaacaaaatcaatcaatcaaataaataaataaataaatatctccccaccaccaccacttcaatattctaatgctcttctaacctaaaagtaagccaattggccagggtatctggtatgcatagctggcagaactctagtcttgtttttatagagtcaagaaaggtgaatttgaatttgaaagaaggtaataaataagtaaaccagcatagtccacccctttggctgctgagcaaacttacatatcatcttacacatattttactctgcaggcaacaaaataacaatgacttcctctacctaataagatggctttctttgagcagatggagatgttctcattttctttgtaaatgagataagaacaaagacaccatgcaaggtcagtttcttttagctcagtcacaaaattacttaaatatcctttaacccaaacactaaattaaaagatcaccaataaactattctcatataaaataataagcaaaaagytgaaaagggaaaattgttg

SEQ ID NO: 335659 - DNA, 621 bp, Homo sapiens
gaagacaagatgcctttcaaactttggaggggcagcattgtttgytgtgttgcaaactacaaatgaatgatactgctaattgtattacttatgtctacacagtgctttctgtttgctaaagcattttatgtttagttctcataataacatttagaagaatgagttatgtcttattccatttgatagtacatagagcttaagaaactttacacagaacaaataacagcactgggactagagcacattagaatggattagatcaggatgagttcctcaactattcccagtaggagtatcagccattctataatgaaagtattttgaatacaggacaatgagtaaaaagcatactttaaatgatgcttttgcctgttcacagataaagatcaaggacaaacatcaagtcatgcttttggaaagaggagaacgttttcatttctaaacttgcaagtttcccagataagctgaataagaacacttttctgcccttgcatataaagcgtgcatgttttatattttccttagttaactctatatctgagttttattatttgggaattaatgccgtttaattttgttttattatcattggagataaggaagtggctgtgaaaggaatta

SEQ ID NO: 335660 - DNA, 593 bp, Homo sapiens
ccagctttgttttttctcaggattgctgtggctactcaggtttttttttttgtgattccatacaaattttaggaggttttttctatttctattaaaaatgtcattgaaattttgatggggattacattgaatctatagattgctttggagagtatggacactttaacaatattaattcttccaatccatgaacacaggatatcttcatttatttgtatcttcttcagtttctttcatcagtatcttacagttttcagtgaaaagactttttacctccttgggtgaatttattccaaaatattctactttttgatgtgattatgaatgagataattttattaatttctttttcagaaagttcattgttagtgtatagaaacataactaattgtggtaatcactacatagagtatgcattaatatacaaatcattatgttgtgtacattgaatgtgtacaattgaatatacacaatttctgtaaactatacctcaataaagttggaaaaatagttaagrtggcacattttaagttatgtgtattttaccacaaaaaaagacagaaaacaaattttcccaaaaaacacataccagg

SEQ ID NO: 335661 - DNA, 621 bp, Homo sapiens
ctggtcctttgctttcttcctctagattacctacttttgtacacctgttttatagattacctattttgtacttttgtaaatccccaaatttctgagaaatagtggcctgagcttgtttctaataccgatcacccatgtcttccttaattccttatatgattttcccctttctgcaactatatttgcctktgagaatatttctctgttttcactgagtttaaaagacttttctgagtcacttcatatgaacaccatcaggcatctttttctagaaaacttctgcactatcttaattttctctctactctctaaccaatcctttactgtcttcccttctttattttgttagttaaacgtaactgaaaaatgaagtttcacttcacttactcttcttttttagtatcacagtcactaccattgcttcagtgtcttctctgcagtgatttctaaatctgaatctttagccctaccttcaactgagctctagactcaattgcctattgtttggtgcttgtattgagtggaactcattagctcaccatctcctttatcccaaaccaactgctttactgaattccatatttcagataatgataataataactagtcacccattaacct

SEQ ID NO: 335662 - DNA, 579 bp, Homo sapiens
ctacatcaagacttattataattaaattgtcaaaactcaagagacagaattttgaaagctgcaagagaaaggcaactcatctcatacaagggaaacctgcccccccaccaccccccaccccagaaatgatcagtgaatttctcaacatgaatcttccaggctaggagataatgggatgttacattcaaagtactgaaagaaaaaaacaaaaccctgccagccatgattactataccctggaaagctatccttaaaaatggaaaggagataaagtctttcccagacacatgaaaattgagggagtttgtcatcactaggcttgcctgagaagaaatgctaatggagttctttaaatggaatagaaaaaatgataaacaccaatgtaaaagcgtatgaaggaaagtatgtaaagctcaggagtaaatgtacagtcaaatatagaataacataatactgtaagggtggtacrgaaataactggtaaccccaatataaaactttaaagaaggctgtgtgtggtgactcacacttgtaatcccagtactttaggaggctgaggtgggaggatcacatgaggcca

SEQ ID NO: 335663 - DNA, 304 bp, Homo sapiens
tggtcctttgctttcttcctctagattacctacttttgtacacctgttttatagattacctattttgtacttttgtaaatccccaaatttctgaraaatagtggcctgagcttgtttctaataccgatcacccatgtcttccttaattccttatatgattttcccctttctgcaactatatttgcctgtgagaatatttctctgttttcactgagtttaaaagacttttctgagtcacttcatatgaacaccatcaggcatctttttctaaaaaacttctgcactatcttaattttctctctac

SEQ ID NO: 335664 - DNA, 555 bp, Homo sapiens
ttttaagtttatagagtaaattcaaacttactctgaagtaactattgcaatttcatatctctgatatacttcacaaaatcaatacagggagatttgagaaagttttttaagattttttcttatgttagtaatttgaagaaattatatatattcattaattataaaagaagttataatgagtttttcataatttggcatacactgctctttgaaaaaatagctagaagagcagaaaacagactaatatagaaaattgatacttagagcagggttgttgctataacaacacctgaaaatatggaagcagctttggaactgcataacgggtggaggttggaaatttggagaatcaggctagaaaaagcctatattgccatgggagggctcagaagaccacagaactgtagagctaccagtgtacgatgccaktctgagagagcggaaatgtgggctgagcccagcaaagccatgggcgtggcagttctcagtgtcttgagagcccaacccctatatcagtgtgctcaggatatgggacatggaaacaaaggagattat

SEQ ID NO: 335665 - DNA, 573 bp, Homo sapiens
  misc_feature (1)...(573): n = A,T,C or G
nnnnnnnnnnnnnnnnnnnnnnnnnnnnnnnnnnnnnnnacacaattttcaagatttaaccatgatgaaattgaaactctgaagagatcaataatgagttttgaaattgaatcagtaataaaaaaacctaaccrccaaaaaagatttccactggatggattcacagacaattctgttggatgtacaaagagctggcaccaatcctactgaatctatcccaaaaaactgaggagaaagaattccttcctaactcattctatgaagccagcatcattctgatacgaaaagcaggcagagacacaacaaaaaagaaaacttcgagtcaataatgctcaaaactctgtcttttttttctttgttaatctagctacgatctatcaactttgtttattctaacagtgatatgaataatgaaattaaggctgaggtggtctcagatggagatgaggaacttgttgggaactggaacaaaggtggctcttgttatgtttcagcagagactgatggtattttgcccttgccctagagatctgtgaaactttgaacttgagagagatgacttcgggtatctgg

SEQ ID NO: 335666 - DNA, 573 bp, Homo sapiens
  misc_feature (1)...(573): n = A,T,C or G
nnnnnnnnnnnnnnnnnnnnnnnnnnnnnnnnnnnnnnnacacaattttcaagatttaaccatgatgaaattgaaactctgaagagatcaataatgagttttgaaattgaatcagtaataaaaaaacctaaccaccaaaaaagatttccactggatggattcacagacaattctgttggatgtacaaagagctggyaccaatcctactgaatctatcccaaaaaactgaggagaaagaattccttcctaactcattctatgaagccagcatcattctgatacgaaaagcaggcagagacacaacaaaaaagaaaacttcgagtcaataatgctcaaaactctgtcttttttttctttgttaatctagctacgatctatcaactttgtttattctaacagtgatatgaataatgaaattaaggctgaggtggtctcagatggagatgaggaacttgttgggaactggaacaaaggtggctcttgttatgtttcagcagagactgatggtattttgcccttgccctagagatctgtgaaactttgaacttgagagagatgacttcgggtatctgg

SEQ ID NO: 335667 - DNA, 573 bp, Homo sapiens
  misc_feature (1)...(573): n = A,T,C or G
nnnnnnnnnnnnnnnnnnnnnnnnnnnnnnnnnnnnnnnacacaattttcaagatttaaccatgatgaaattgaaactctgaagagatcaataatgagttttgaaattgaatcagtaataaaaaaacctaaccaccaaaaaagatttccactggatggattcacagacaattctgttggatgtacaaagagctggcaccaatcctactgaatctatcccaaaaaaytgaggagaaagaattccttcctaactcattctatgaagccagcatcattctgatacgaaaagcaggcagagacacaacaaaaaagaaaacttcgagtcaataatgctcaaaactctgtcttttttttctttgttaatctagctacgatctatcaactttgtttattctaacagtgatatgaataatgaaattaaggctgaggtggtctcagatggagatgaggaacttgttgggaactggaacaaaggtggctcttgttatgtttcagcagagactgatggtattttgcccttgccctagagatctgtgaaactttgaacttgagagagatgacttcgggtatctgg

SEQ ID NO: 335668 - DNA, 573 bp, Homo sapiens
  misc_feature (1)...(573): n = A,T,C or G
nnnnnnnnnnnnnnnnnnnnnnnnnnnnnnnnnnnnnnnacacaattttcaagatttaaccatgatgaaattgaaactctgaagagatcaataatgagttttgaaattgaatcagtaataaaaaaacctaaccaccaaaaaagatttccactggatggattcacagacaattctgttggatgtacaaagagctggcaccaatcctactgaatctatcccaaaaaactgaggagaaagaattccttcctaactcattctatgaagccagcatcattctgatacgaaaagcaggcagagacacaacaaaaaagaaaacttcgrgtcaataatgctcaaaactctgtcttttttttctttgttaatctagctacgatctatcaactttgtttattctaacagtgatatgaataatgaaattaaggctgaggtggtctcagatggagatgaggaacttgttgggaactggaacaaaggtggctcttgttatgtttcagcagagactgatggtattttgcccttgccctagagatctgtgaaactttgaacttgagagagatgacttcgggtatctgg

SEQ ID NO: 335669 - DNA, 602 bp, Homo sapiens
tccactgctttccagtctaccatgcggtaaaggaatcagctcttcttcccaggcccactcagcggacactaagactggggaaagcagtgagacctaaaatcaactgtgtagttcacattctgtactaatgaatgaaattaaacagaggagggataaattaacatttatcttccgaaagcagtttcaaggtaacggtgcacatcaaaggtagagtatctcagaaaggttcttaagtgaactaggccacatatgtactgaaagtctaaattgttcttctaagtaattctggtttgcctgaaactgctctgyctatgcccactgtttcaatgtatttataacagcacccccttcctggtttggacaaaagtctacagttaccctaattcctgtttctctctcacaataattcacaattagatgagtcaaatgatggcttcatgacactgccatgtcccacaagatgaaaccactaggctccattagcaacatcagtgaggtcttactgtgacctcagctgtccattccctaagacactcttaacaaagagagcattaacaaagatatcctttcagagccggagaccatgggaatttgctaggcat

SEQ ID NO: 335670 - DNA, 602 bp, Homo sapiens
tccactgctttccagtctaccatgcggtaaaggaatcagctcttcttcccaggcccactcagcggacactaagactggggaaagcagtgagacctaaaatcaactgtgtagttcacattctgtactaatgaatgaaattaaacagaggagggataaattaacatttatcttccgaaagcagtttcaaggtaacggtgcacatcaaaggtagagtatctcagaaaggttcttaagtgaactaggccacatatgtactgaaagtctaaattgttcttctaagtaattctggtttgcctgaaactgctctgtctatgcccactgtttcaatgtatttataacagcacccccttcctggtttggacaaaagtctacagttaccctaattcctgtttctctctcacaataattcacaattagatgagtcaaatgatggctycatgacactgccatgtcccacaagatgaaaccactaggctccattagcaacatcagtgaggtcttactgtgacctcagctgtccattccctaagacactcttaacaaagagagcattaacaaagatatcctttcagagccggagaccatgggaatttgctaggcat

SEQ ID NO: 335671 - DNA, 602 bp, Homo sapiens
tccactgctttccagtctaccatgcggtaaaggaatcagctcttcttcccaggcccactcagcggacactaagactggggaaagcagtgagacctaaaatcaactgtgtagttcacattctgtactaatgaatgaaattaaacagaggagggataaattaacatttatcttccgaaagcagtttcaaggtaacggtgcacatcaaaggtagagtatctcagaaaggttcttaagtgaactaggccacatatgtactgaaagtctaaattgttcttctaagtaattctggtttgcctgaaactgctctgtctatgcccactgtttcaatgtatttataacagcacccccttcctggtttggacaaaagtctacagttaccctaattcctgtttctctctcacaataattcacaattagatgagtcaaatgatggcttcatgacactgccatgtcccacaagatgaaaccactaggctccattagcaacatcagtgaggtcttactgtgacctcagctktccattccctaagacactcttaacaaagagagcattaacaaagatatcctttcagagccggagaccatgggaatttgctaggcat

SEQ ID NO: 335672 - DNA, 466 bp, Homo sapiens
gtgattgcagcaggctcccctaaggtccaataacgtatatgataagggggtcatctcttctctcccatctcccccaccacagagcactactgcaaaggtgctgaatcacaaaagaggtgctaggctaggagccaatcggccagccattactmtttttttttttttttttttggagaccagagtctccttgcgtttcccaggctggagtgcggtggcgcagtctcggctcattgcattctctgcctcctaggcccttttttcttttctctctctccccttttttttttttttttttaataagacaaagtctagctctatcgcccaggccggagtgcaatggtgcaatctgggctcactacaacctccgcctcccgagttcaagtgattctcctgccacagcctctggagtagctgggattacaggcgcacaccaccatacttggctaatttttgtatttttagtaga

SEQ ID NO: 335673 - DNA, 466 bp, Homo sapiens
gtgattgcagcaggctcccctaaggtccaataacgtatatgataagggggtcatctcttctctcccatctcccccaccacagagcactactgcaaaggtgctgaatcacaaaagaggtgctaggctaggagccaatcggccagccattactctttttttttttttttttttggagaccagagtctccttgcgtttcccaggctggagtgcggtggcgcagtctcggctcattgcattctctgcctcctaggcccttttttcttttctctctctccccttttttttttttttttttaataagacaaagtctagctctatcgcccaggccggagtgcaatggtgcaatctgggctcactacaacctccgcctcccgagttcaagygattctcctgccacagcctctggagtagctgggattacaggcgcacaccaccatacttggctaatttttgtatttttagtaga

SEQ ID NO: 335674 - DNA, 577 bp, Homo sapiens
gtcacctgatgaaatgctgaacctgttcggctgtcytgtccatctgtctctcccgcctgtaaaatggaataatgatagccagctgccatagcttgactcgagtaaaggatctagcacaaaagcccttctcctgccataattgtagggtggaaaccctttaatgaatgggcagcttccctcagagaactgactcttccccctagagtttctccttgagaaacaaagtccctgtgatactttcctggaatgttgtatacatgaccttccccgaagggacacaagtgtttctggtgctttccaatgggaatgtgggaagggacccaggtgggccttgccactttgggattgctgtccctgaagaaatcccttagcctgatagaaacgtaattgttgggagcaatgaactgtgttgggggagaaaacataacttggcctttcttaagctgtatggctcagtggtctgagtttctgtagatctcttattgcctaatgtggcttcttcagatggatgtatgcttagttgaagcacctcagctccctttgcagatagtggcagttctgtggttttcttagggaa

SEQ ID NO: 335675 - DNA, 550 bp, Homo sapiens
ccaagtaaagtctgaagtggtggtgagaggcagcaagataataaatttttttttggagctttactggggttaagggcaggggaggggaggggccgccagaagctcccagccagggcggagcctcatggagacagctggggatgcaagtcacttcttccactgcttcttctcatagtcccagcgggaggccaggccctgcacaggattcaccttcatgtccagcatgcgctgcagctgctgggctttccgctcgtccgtcaaggtgatcggctttggaggaaatactgcagggagtacatggggtggatcakgatcctgccagtcttcctacaccagccagggtctccagccaccctgtagcctcccagccactcgcaaggctgacggtacaagatactccagggttgaagtatcttgcactgaggagctcactccaccctgtctagccccgcaccccagactttctcctatagcatcgtcccagcacctctgggttctgaccccagctttgccttataccccaaggactgtgggagctgggccaaggtcc

SEQ ID NO: 335676 - DNA, 550 bp, Homo sapiens
ccaagtaaagtctgaagtggtggtgagaggcagcaagataataaatttttttttggagctttactggggttaagggcaggggaggggaggggccgccagaagctcccagccagggcggagcctcatggagacagctggggatgcaagtcacttcttccactgcttcttctcatagtcccagcgggaggccaggccctgcacaggattcaccttcatgtccagcatgcgctgcagctgctgggctttccgctcgtccgtcaaggtgatcggctttggaggaaatactgcagggagtacatggggtggatcatgatcctgccagtcttcctacaccagccagggtctccagccaccctgtagcctcccagccactcgcaaggctgacggtacaagatactccagggttgaagtatcttgcactgaggagctcactccaccctgtctagccccgcaccccagactttctcctakagcatcgtcccagcacctctgggttctgaccccagctttgccttataccccaaggactgtgggagctgggccaaggtcc

SEQ ID NO: 335677 - DNA, 550 bp, Homo sapiens
ccaagtaaagtctgaagtggtggtgagaggcagcaagataataaatttttttttggagctttactggggttaagggcaggggaggggaggggccgccagaagctcccagccagggcggagcctcatggagacagctggggatgcaagtcacttcttccactgcttcttctcatagtcccagcgggaggccaggccctgcacaggattcaccttcatgtccagcatgcgctgcagctgctgggctttccgctcgtccgtcaaggtgatcggctttggaggaaatactgcagggagtacatggggtggatcatgatcctgccagtcttcctacaccagccagggtctccagccaccctgtagcctcccagccactcgcaaggctgacggtacaagatactccagggttgaagtatcttgcactgaggagctcactccaccctgtctagccccgcaccccagactttctcctatagcatcgtcccagcacctctgggttctgaccccagctttgccttakaccccaaggactgtgggagctgggccaaggtcc

SEQ ID NO: 335678 - DNA, 476 bp, Homo sapiens
aaggctgacggtacaagatactccagggttgaagtatcttgcactgaggagctcactccaccctgtctagccccgcaccccagactttctcctatagcatcgtcccagcacctctgggttctgaccccagctttgccttataccccaaggactgtgggagctgggccaaggtccttcacaactcagtcrcctcacctacctctgtggtctgtggtaataagatcactgatttgaagactgcctgaatccaaatcctggctctaccactcccttgccctgcgaccttcaacaagtcacttcatctctctgagcctcagtttccttacctgtcaaaagaggtcctatccactaggattgtggggactgagtatttccaaagctgttggcacaatgttagacaaatattaagcacctgatacatgttacctactataattatataattactgagtttgttcccacttgctgggcagggt

SEQ ID NO: 335679 - DNA, 476 bp, Homo sapiens
aaggctgacggtacaagatactccagggttgaagtatcttgcactgaggagctcactccaccctgtctagccccgcaccccagactttctcctatagcatcgtcccagcacctctgggttctgaccccagctttgccttataccccaaggactgtgggagctgggccaaggtccttcacaactcagtcacctcacctacctctgtggtctgtggtaataagatcactgatttgaagactgcctgaatccaaatcctggctcwaccactcccttgccctgcgaccttcaacaagtcacttcatctctctgagcctcagtttccttacctgtcaaaagaggtcctatccactaggattgtggggactgagtatttccaaagctgttggcacaatgttagacaaatattaagcacctgatacatgttacctactataattatataattactgagtttgttcccacttgctgggcagggt

SEQ ID NO: 335680 - DNA, 541 bp, Homo sapiens
ggatttatttctggactctcaattattttgtttgtctatgtacctgtcattatgctggtgctatactgtcctgattaatattgctttatagtaagttttgaaatatggaattgtaagtgctccaattctgttaatctctttcaagattgttttggctattttgggtcctttggatttcatatgaattttaggattggattgtcaatttctgcaaagaagccaggtagaattctgatagagattgtgttgaatctatacatcaatttagaaagttccttatcttgctctttcatttcctctatgaaatgcctcttgtttggagtgatatttatgtatcctttcataagatattttggaataaaataggaaaaaataaagttttgttactttaaatgcaacaccttcatacaaaggggaaawctatggaaatagaaaaatacatatttcttaaaaatctcatttattaaattaaaaggaatttgttgcatgatatttttccagaatcctcttttttcctacggatgaggacatttgaagtaga

SEQ ID NO: 335681 - DNA, 593 bp, Homo sapiens
aacatctggtttaatagaagtcaaatgctttcttatagctgcttctgcattcaatctgttgtgatatgttattttagttaaagtatatgaagaaaatctggcctcacacagatatgtaatctgaaaaaggaggaatattttaacagcctcttcaggtaattgtggatattcttcactattataccaaaagtcaacaaatagcagtttcttaaaggttagcggcaatgtgaatatgaaaccatatcaatcaatgaactttttgtactctgttacattaaaatccattggtctatcctaaacgttgaatcgatcttttactcatgtatgattttataatgtcatgaataggttacttggaaaatgtaactggaaaataataaatcatgcasaccttccaaatattgacacattatattatatctgaaaatcaaatttagtaacttcatcgccaatcttttcagaagtctttaggtgacataaaactgtcaagctcaggatggcccaaaattctaatttttgcttgaaagctcaaactttatcattagcaacaaatattgtcagttgtgttcttgaagtgacaaactcacaccatt

SEQ ID NO: 335682 - DNA, 620 bp, Homo sapiens
ttattttggggtaccatgtctaaatcccagcacaagactggatcatgcamccctcaccggtgctgttagagtaccctgcacgtagttctgctggaacatgtaccatagtgcatgactacactctgttaatgtgattcttctcctcctgttagacttaaagctcttaagacaggggccatgtctaatttacttctgtaccttagtgcctagcactgagtgctcaataaatgtctcttgaattgctaaacaactattggagacattatgtccatattgtgcatattttcactaaaattttgagaactttccaatcatcaataaattgactcagcattctatgcttttaaaggacgaaaatcagagaaatttttcctcattatgcaacaaatctttcttcccatagggaatggcgggggagagtcattgtctcactcattagtacaaatgtgcaacaaacacatactcctaacattgtctcatccattcaactatcttttactaaatcactaccattatatatctattgatataatttttcctgcctgatttacatttttaatctctgttttccgactctaaaaggatgatttagcaaaatccattaatttataattgacaat

SEQ ID NO: 335683 - DNA, 515 bp, Homo sapiens
ctactttatcatcatggcaaaattcttcattcattaaaaaagacaaaaattgatttataaaattgtttctaacaaagatcaaattttatgtgcttaccgcagtgcctggaatatagtgaacattagtaaatggaagcttttgctattgttattcttctattattactagacatcttagccagygcatcactataaagccagtttgttcccactttaaacttttcaattttttttatcccagtggagatacaaaatttcactgggggggatgagtgggaatgagataaaattactcatcctatttatttaactgaaatgactccttgcttttgaattcaccaaactgccaagatgttttggcctggttcagacccagtttgcaattggagggccaccaatattcaggcatagaaccacatcctttctaaaacatgtggacgcaggccagatgaaacatgagataactaagtgagtaccagtccaaataagtgttttggagagaaaataagtttctg

SEQ ID NO: 335684 - DNA, 515 bp, Homo sapiens
ctactttatcatcatggcaaaattcttcattcattaaaaaagacaaaaattgatttataaaattgtttctaacaaagatcaaattttatgtgcttaccgcagtgcctggaatatagtgaacattagtaaatggaagcttttgctattgttattcttctattattactagacatcttagccagtgcatcactataaagccagtttgttcccactttaaacttttcaattttttttatcccagtggagatacaaaatttcactgggggggatgagtgggaatgagataaaattactcatcctatttatttaactgaaatgactccttgcttttgaattcaccaaactgccaagatgttttggcctggttcagacccagtttgcaattggagggccaccaatattcaggcatagaaccacatcctttctaaaacatgtggacrcaggccagatgaaacatgagataactaagtgagtaccagtccaaataagtgttttggagagaaaataagtttctg

SEQ ID NO: 335685 - DNA, 645 bp, Homo sapiens
tttgtttgtatagctattaccccaggtataaaatctgctttatatactcatgcttaggactctgcctggccttggtctgcatggtatgagtagctagtgtgtagcttctctccagcatgccctctcatgtaacttttttgtgtgctttgtgtactatagcccaaggttaagcaatgctccatccccttaccagcaggtgttcctaagacattgtaccccaggtcggctaagagctcctgaacrtttctttctcacaggagaaaatggttacctcagcctggtaagaatatttaaggagccaaacccagctctgtgtctgatcagattagctgtaatcttgtggccttttactgaatactttgacttatgccaagctccagcatctaagtctccatgacatctgcctttcaactacatctgggttagtccttatcttgattacccacctgccacccaagtttctttaggactgaagctggcagtacagcttcttcctactctccttttcagtgaatagaaatctgtccttggtcagaattccccgtgtctgagttgctgatgcccatgaccagactaatctgaggccaatttctttcctgcgttgtgcctcctccttactttaaccacagtcagccctgcctggct

SEQ ID NO: 335686 - DNA, 537 bp, Homo sapiens
aaccatcagaaaagcacaaacagaacgccggctgcttcagaccaaggggcaaaaatgaaggatggggattaggtctgaaggtcatagaatctatgtttctaaccttattttatattgcactccccacttcccctctgctagctaaattgaatcatatattgctattcaggcaagacctgtgcttgcttgctttctttcctctgcctggaattattttcttatacctcccttgatcaaaacatatctgttttaaaaatgtataatggatacctattaggatttctgcttagcctatgcccctccttctgtgggaaccacctttcactctctgctcatagtaaaggcttctgctggtttgcttgttatacacaacccctctatccttaccagggaaaatctaaccaaaattgacacctgaccgaagttgatgctctcagawcctctcttctggtaactggaactgggactcagaaatttggtgagtctctgatggttcccctctgacctagatgatgttggctttgaagttgaggatgc

SEQ ID NO: 335687 - DNA, 526 bp, Homo sapiens
aaaacatacaggcaaaagctgcggatctggaaattaatgccattaacttttcccttgcctgcaggctctttagaaagccactgtggaggccaggggtatgcaaatgccagtttgaagattgcacatttatctagcacaggtgctgtgtgttatgggtcagtgtggcacagctactggcagtcaggcccattgccttttgtgtatgggactcaaattagaggtgagtagggccagaaggagctgcacagaggctggtcccattttctgctctcaagtagtggtgactgggaatagctgtcttttatctttcttctatttaatgattttcagyacaagatgggctaattccagtgctttcttttcttttgagttttatttatttatttatttatttattcacaaacagggtcttactctgttgcttaggctggagagcagtggcatgatcataactcactgcaactccaactcctgggctcaagcagttctcccaactcatccttccgagtaactgggactacaggca

SEQ ID NO: 335688 - DNA, 526 bp, Homo sapiens
aaaacatacaggcaaaagctgcggatctggaaattaatgccattaacttttcccttgcctgcaggctctttagaaagccactgtggaggccaggggtatgcaaatgccagtttgaagattgcacatttatctagcacaggtgctgtgtgttatgggtcagtgtggcacagctactggcagtcaggcccattgccttttgtgtatgggactcaaattagaggtgagtagggccagaaggagctgcacagaggctggtcccattttctgctctcaagtagtggtgactgggaatagctgtcttttatctttcttctatttaatgattttcagcacaagatgggctaattccagtgctttcttttcttttgagttttatttatttatttatttatttattyacaaacagggtcttactctgttgcttaggctggagagcagtggcatgatcataactcactgcaactccaactcctgggctcaagcagttctcccaactcatccttccgagtaactgggactacaggca

SEQ ID NO: 335689 - DNA, 644 bp, Homo sapiens
ttttgttgcaattgcttttgaggacttaatcataaattatttcccatggccaatgtccagaatggtgttttctaggttttcttctaggactcttatagtttgagatcttatatttaaakttttaatccatcttgaattaatttttgtatatggtgaaaggcaggtgtattagtcctttctcacactgctatgaaatacctcccgagactgcatcatttatgaagaaaagagttttaattgattcacagttctgtatgactgaggaggcctcaggaaacttacaattatggtggaaggggaagaggcacgtcttacatggcatcaggcaagagagagcacgtataggaagtgaagggagaagagacccttgtaaaaccatcagatcacgtgagaactcactcactatcacaagaatatcatgggagaaaccaccctcatgatccagtcacctcccagcaggtctctccctcaacacctggggttacaattcaagatgagaatttgggtggggacacaaagcctgaccatatcagtagagacccagtttcattattctgtatatggctaggcagctattccagcaccaattattgaatagagggtcctttcaccattgcttatttttgttgactctgtcaaagatc

SEQ ID NO: 335690 - DNA, 621 bp, Homo sapiens
atttgtaccatgcctgtgtacacaaaaattaaaataatttaaaacttatttattgtcataaaaacataacactaagtttaccaacttaatcattttaaagtgtatggtgcagtaactttaagtacattcacattgttgtgcaacaaacctctagaattgttcaccttgcaaaactgaaattctatacccattaatcactaattcctccatccctttacccccagtccttggaaattacctttatacaggcgtacttcattttaytgtgcttaccagagactggcttttttcccctacaaattgaaggttagtggcaaccctgcattgagggagtcagttggtgccatttttctaaaaacatgtgctttctttgtgtctctgtgtcacatttagtaatttaatactttgaaaaaattttcataatttttcaaaatttttcactattattttatgttatattgatatattatcagtggtctttgctgttacaattcttttggggtaccatgaaccatgcccacaaaagagggtgaacttaatcgataaatattgtgtgcattctgactgttccactgaccagtcattctactatgtttttccctctccttgggccttcctatt

SEQ ID NO: 335691 - DNA, 623 bp, Homo sapiens
ggctacttctggaaagttctctggctctctcacattctcttgcccctctgccctccaccatgggatgatgcagcatgaaggccctcacaagatatcagcaccttgatattggacttcccagcctccagaactataaaataaatttcatttattatatcatgcccactctgtgatattttcttatagtgaaacaaaatggattaagacagccagtctgccacatgtcttccttaaatttcccattatttttatatgcaacaaaaatgtatttgtktatttctttttctgttctcattcccagtatctgtcaaaactacctttgtaaatgttaatgataaaaataagactatatcttcagaacattgatataagtttcaaaaacaatggaggaatatgtcccacacacttattgactcccagaatacttcccatcacatgtattgtttctactacgtagcattttgtcaaaaccacacacatatatttagaaatatcttcagcttttgtattcacgctcttatatgtgttccattttgatattttagaagttttgttaaaaaataaaaaggagaaaccaagtagcctcattctttctttcctggtttggctttagatatgctaga

SEQ ID NO: 335692 - DNA, 623 bp, Homo sapiens
ggctacttctggaaagttctctggctctctcacattctcttgcccctctgccctccaccatgggatgatgcagcatgaaggccctcacaagatatcagcaccttgatattggacttcccagcctccagaactataaaataaatttcatttattatatcatgcccactctgtgatattttcttatagtgaaacaaaatggattaagacagccagtctgccacatgtcttccttaaatttcccattatttttatatgcaacaaaaatgtatttgtgtatttctttttctgttctcattcccagtatctgtcaaaactacctttgtaaatgttaatgayaaaaataagactatatcttcagaacattgatataagtttcaaaaacaatggaggaatatgtcccacacacttattgactcccagaatacttcccatcacatgtattgtttctactacgtagcattttgtcaaaaccacacacatatatttagaaatatcttcagcttttgtattcacgctcttatatgtgttccattttgatattttagaagttttgttaaaaaataaaaaggagaaaccaagtagcctcattctttctttcctggtttggctttagatatgctaga

SEQ ID NO: 335693 - DNA, 623 bp, Homo sapiens
ggctacttctggaaagttctctggctctctcacattctcttgcccctctgccctccaccatgggatgatgcagcatgaaggccctcacaagatatcagcaccttgatattggacttcccagcctccagaactataaaataaatttcatttattatatcatgcccactctgtgatattttcttatagtgaaacaaaatggattaagacagccagtctgccacatgtcttccttaaatttcccattatttttatatgcaacaaaaatgtatttgtgtatttctttttctgttctcattcccagtatctgtcaaaactacctttgtaaatgttaatgataaaaataagactatatcttcagaacattgatataagtttcaaaaacaatggaggaatatgtcccacacacttattgactcccagaatacttcccatcacatgtattgtttctactacgtagcattttgtcaaaaccacacacatatatttagaaatatcttcagcttttgtattcacgctcttatatstgttccattttgatattttagaagttttgttaaaaaataaaaaggagaaaccaagtagcctcattctttctttcctggtttggctttagatatgctaga

SEQ ID NO: 335694 - DNA, 575 bp, Homo sapiens
tatattctaaataatttaaatgatgttctctaccaccacctgctttcccttgagcccaatactttaacttagaccaatcctaaatcagctttaggataagtttatgttgaggatgtttgttcccatttttactacttaagctgaaaaaattgtaatatggtactgtaaaaacactgagttctactcagatttcagacaatactattttaaagaatctatagcacctgcttgtttttgtttttgtttttgagatggagtcttgctgtgtcgcccasgctggagtgcagtggcacaatctcggctcactgcaagctccacctcccaggttcacgccattctcctgcctcagcctcccgagtagctgggactacaggtgcccgccaccacgcctggctaattttttgtatttttagtagagacagggtttcaccatgttagccaggatggtctcgatctcctgacctcctgatccacccaccttggcctcccaaaatgctgggattacaggcgtgagccaccgcgcccagccagcacctgcttgttctatcatttaaatttagatttaaaaatatttt

SEQ ID NO: 335695 - DNA, 631 bp, Homo sapiens
ttgctataccaatctttacctctgggtattcaggaaacgactcattattgagtgacttcacatgcatgtgtagattaaccttttcttttctcctgttaatctgtctattatcagttaattcacaggcccctaaacataggaacctaagtgggtagaggaaatgttttcctcccaatggtattaagtcattttccagagcaaagagtctcttccctaaaagatgtggagagaacaaggtacataattattttgctacccctactatataccctttgtagacactaccctcactatttcagccactggcctggctgatctaaggttttaagaataaggtgacaggttttctatttatagtgagatgaatgctttctgagggatgcacctttttcttttgattttattatgaagcacggtgggaaacttaaaagaaaagatctcctgcatagagggcagagacctaagagtagacagcagaaaggtgctgatatttaaaagcaagaaacaaatctgcagggatttacaaaagagtgtggagacatgtgatcttagagctacagaggctttgagtttstgtgtgtcacaatgagcatatagaggaatattactacatattattaagattaataat

SEQ ID NO: 335696 - DNA, 576 bp, Homo sapiens
tttttcttccattatttctttgagtattgaatctattttcattgacctcattatttttttctgaaaaatcttattttgtttttaaattatatttagagacaagagtcttgctctgtcactcacagtagagtgcagtggtgtaatcatagctcaccgtaacgttcaactcctgggctcaagcaatcctcccacctcagcctctaaaataactgggactaccacccagtcaaatgccaccacatttgactaatttttataaatgttttgtagagatagggttttgatatgttgcccaaactagtcttgaatttggggcctcgagtgatcctcccacctcaacctcccaaagccatgggattccaggtgtgagccactgtacctaaccctcttctggaaaatcttaargccttagattgcattcctgtctttataggtcatatttctcattattctcttctttttgaccttttctttgcaacttgagagttttaaaagttcacttattgtgtaacttattcattagtcctgatatatcatttgcattctttactactcccaactgttatttttattctg

SEQ ID NO: 335697 - DNA, 583 bp, Homo sapiens
gtccattcacaactcttagctataaccatatatgtaagataagcatgagaaagtcaggcgtattttaaaaaggaggtcagtactaagtgattgatatgcagcaagaaataatgcagtgcatgatatgcagcaagaaacaatctagtggataataatacaaccaccgtgcattagtgtaaatacatcattctcccaccacttaaaatttataattaagaagacagttatttattaaatacctactatgctggttttacggggtacaaggaaatatakaacatcatctttaacctccaagagtttgtgattgtttttgaaatgacaaaacaggaaaaaatttttaatgacaacaaattccactaggcagcatatgactaattcccaaatgactgatataaataataagtgctgagtgttttacaaaggagatatttgtgagaaaggatcagatgtcatcaaagaaaatgataagaaaaagcagagcactgtgtggtagtctgcctgcaagatggccacagataattcctcctatccctgtgcacacataccattcttctttcaagagatggagtccacttcccta

SEQ ID NO: 335698 - DNA, 574 bp, Homo sapiens
aattacattataaggataaaaatagggtacataagagttaactaaatttctgcctccatatagctagcaggagccagacataaatttcaagatcagagatcctggttccacaaaccatgtctttagccactgtgataatcttctttctgaatcagaatggactcatgttaggtataaatgaaatttgatataattattgagatgtgaggattgcatatgttggattgataacttaggagaattttcctaaatttcttcatatatagatttctttgtattcaaccatcaccaaagccacagaaatatgtyttagaaatggaggaaaagaaagtatgataataaaagcagtctctactacttggtgtctcttctaatctctttgtttccataatttgcccactgatctttacttcttaccaagtggtccaagtgtattactacaaaggaattatgaagattttcccgtttttaacttcctgagttatgcaatgtagatagcaataaatgaccaattaagtcattcaattgttttcatggtaattcatgaaaacactattggaaacattactgagtt

SEQ ID NO: 335699 - DNA, 573 bp, Homo sapiens
cttttttttttttatggagattgtgactgatatatgggcaccagagtcttaatttgtacaaaaacaaaaaaaaagtatttaggttagatttagttatttatatacatcagcatgaagtaaagcaatgtacttaatttcctcttaatataccttttaacaaaggaataaataatatataattcattttttattcaaagtacttcacacaattttgttgcctttatttcaccaagtctcctctatttaatacacctatgctaagaagcctttggcacacactgcaaaaagcactsaacttgcagtcaaaaggtatgacttttagtatcgtactagtttttctgcttaattgatctttgaatttatggaaaccaagacgctgttctgaacttcaatttttccatctgtaaaacaggaataataaaaccaatcacaaagggttactactatattaactggatgaaactatgtgaaagcaggtagcaaaatgaacagtgtttctacatacattatctctgcagtaaaactatgatgtgtaaactcagtaaagaaaaaaaagcatgagtgatcataaaa

SEQ ID NO: 335700 - DNA, 573 bp, Homo sapiens
cttttttttttttatggagattgtgactgatatatgggcaccagagtcttaatttgtacaaaaacaaaaaaaaagtatttaggttagatttagttatttatatacatcagcatgaagtaaagcaatgtacttaatttcctcttaatataccttttaacaaaggaataaataatatataattcattttttattcaaagtacttcacacaattttgttgcctttatttcaccaagtctcctctatttaatacacctatgctaagaagcctttggcacacactgcaaaaagcactcaacttgcagtcaaaaggtatgacttttagtatcgtactagtttttctgcttaattgatctttgaatttatggaaaccaagacgctgttctgaacttcaatttttccatctgtaaaacaggaataataaaaccaatcacaaagggttactactatattaactggatgaaactatgtgaaagcaggtagcaaaatgaacagtgyttctacatacattatctctgcagtaaaactatgatgtgtaaactcagtaaagaaaaaaaagcatgagtgatcataaaa

SEQ ID NO: 335701 - DNA, 532 bp, Homo sapiens
atgatcacgtgtatggaagttcaaaatgcaaaggttctgcttgaagaggccggaagcatagtttagtaggaggtgaggacagagaggtccatgagttcagatgagattgacctttgtagactttcacatttactctgagaggaatggagaattatggagtactttaagcagagaagtgacaggacaaacattaagacaaatatatgtaattgtaatgggaggcattgacaaacttttctagagctattctattttccacatctggcatatttgaggatttaatatttgtttcaaaaaatgtagatttgtatctaaaggagtcatgattatattttataggtatacaaatgtatacatgtttaggtagatacatgctggttgcaaaatatacccagccrtcgtacattttaaaaaactttaactccaagatctagccataatgttttctactctgcagatcagacacatatggttatccattttggaacacatgttaacaagtaaatcaagagatacgtctcattcccagctg

SEQ ID NO: 335702 - DNA, 532 bp, Homo sapiens
atgatcacgtgtatggaagttcaaaatgcaaaggttctgcttgaagaggccggaagcatagtttagtaggaggtgaggacagagaggtccatgagttcagatgagattgacctttgtagactttcacatttactctgagaggaatggagaattatggagtactttaagcagagaagtgacaggacaaacattaagacaaatatatgtaattgtaatgggaggcattgacaaacttttctagagctattctattttccacatctggcatatttgaggatttaatatttgtttcaaaaaatgtagatttgtatctaaaggagtcatgattatattttataggtatacaaatgtatacatgtttaggtagatacatgctggttgcaaaatatacccagccatcgtacattttaaaaaactttaactccaagatctagccataatgttttctactctgcagatcagacacatatggttatccattwtggaacacatgttaacaagtaaatcaagagatacgtctcattcccagctg

SEQ ID NO: 335703 - DNA, 597 bp, Homo sapiens
aaatctacataatgggcatattaactatctatttcatcaaattagtaagagcatgtaaggagtcaatacctgtaaagctttagaatagcatctgggtattattactgatttctaaaatagtagttttgattccgcattctgcaactcctggccaaatatttccttcattcatttcttctgtgccaataaatggtaccattctcaattaacttggagtaaagtgagagtagctgaatataacaagctgtttaattaatggacaaaatatttaaaataataggaacaaaagctcaaagtgtagtctttcaacaaagataaaaacattttatataaagtccaaatttagtaggctatagtaggttaattgattttattaaagagcaatgagatcccattgaatggttattaattaggggagtgttattacctaatgtatgccatgtggccaccattcattcttttatgtacaaatattttctaratattgaggcctcagtagtaaaccaaatatatgaaatctcagaccaacttcagcttacattttaccagaggaagacaaatgaacaagtcagtacataataaaataattgtaagtgt

SEQ ID NO: 335704 - DNA, 579 bp, Homo sapiens
ttcagtgccaaactggggagatcttgaggacaatgtgcactgggaatatgactgtatgaagcctaacctgcaacaaataattaatcacattttcaaaactgtcttttcctaaagtggaaaacagcttcattgtgttacagatgctctttatatttgtaaaataattagaagagaaagagatggccctgtgtatatattaatgcagcaatagaaacctaattttgagcctggcacagtggcttatacctgtaatcccagcagtttgggaggccaaggcaggaggattgctakatctcaggagttttagaccagcctggtcaacacagagagaccctgtctctacaaaaaaatgaaatattagctgtgtgtggtggcatgcacctgtcctctaaactacttgggaggctgaggtggaaagatcgcttgaaactgggagtgtgatgctgcagtgagccatgactgtgcactgcactccagccttgacaacagagcaagaccctgtctcaaagaaaaaagaaacctattttaagctgcttgttagaaaatgctcttgtagtaggtgaaatcatggtcacccag

SEQ ID NO: 335705 - DNA, 579 bp, Homo sapiens
ttcagtgccaaactggggagatcttgaggacaatgtgcactgggaatatgactgtatgaagcctaacctgcaacaaataattaatcacattttcaaaactgtcttttcctaaagtggaaaacagcttcattgtgttacagatgctctttatatttgtaaaataattagaagagaaagagatggccctgtgtatatattaatgcagcaatagaaacctaattttgagcctggcacagtggcttatacctgtaatcccagcagtttgggaggccaaggcaggaggattgctatatctcaggagttttagaccagcctggtcaacacagagagaccctgtctctacaaaaaaatgaaatattagctgtgtgtggtggcatgcacctgtcctctaaactacttgggaggctgaggtggaaagatcgcttgaaactgggagtgtgatgctgcagtgagccatgactgtscactgcactccagccttgacaacagagcaagaccctgtctcaaagaaaaaagaaacctattttaagctgcttgttagaaaatgctcttgtagtaggtgaaatcatggtcacccag

SEQ ID NO: 335706 - DNA, 595 bp, Homo sapiens
aggtcttatctcttggaatgtacaaatctgagggccaccagtttttaaattactgtctatatatctgaatgggataaaaattgatgactctcaatcaaaaatatggagaaagaaagagatgatttgacttgaattagcagataactgtgtacagaacaaggctacagagagagagaatgttgtaatgcacatcttgagaaraaatttcctattattcatactgaaagcagatccatgagccttcacatttgggaacatattccgcatgtgcacacttaaaaatgtaacagatctttcatcatattcagagactgttttgattaactgaatggtcataggggcaaatggttatttgtgctgtttcctcctgatgagtgtgatttatttctttttattgcggtttgtctgtagcttccaaagtcatctacatactggctggcaagtctcccccacaaataaacaatttaggtgcttcctattaaaacccaagtttccctttaagctccccaaaaggtgtttaattaagaaaatgaaaatgtacataatatatcttaagagaagggaatgtcacagtataaacagcagagccagcttt

SEQ ID NO: 335707 - DNA, 595 bp, Homo sapiens
aggtcttatctcttggaatgtacaaatctgagggccaccagtttttaaattactgtctatatatctgaatgggataaaaattgatgactctcaatcaaaaatatggagaaagaaagagatgatttgacttgaattagcagataactgtgtacagaacaaggctacagagagagagaatgttgtaatgcacatcttgagaaaaaatttcctattattcatactgaaagcagatccatgagccttcacatttgggaacatattccgcatgtgcacacttaaaaatgtaacagatctttcatcatattcagagactgttttgattaactgaatggtcataggggcaaatggttatttgtgctgtttcctcctgatgagtgtgatttatttctttttattgcggtttgtctgtagcttccaaagtcatctacatactggctggcaagtctcccccacaaataaacaatttaggtgcttcctattaaaacccaagtttccctttaagctccccaaaaggtgtttaattwagaaaatgaaaatgtacataatatatcttaagagaagggaatgtcacagtataaacagcagagccagcttt

SEQ ID NO: 335708 - DNA, 496 bp, Homo sapiens
ctgacattttaaaaaatctgtaacttcaaagcattctggaaaaatagctcagggaatccaactgtgcaaaagcagtatggtccattatagagataaactcagtacatctgtttggctggaacattaagagcttgtgaattaggttgtaaaatgcacgaatgagagaccaattttatacaacttttgttgtcattttatgtcctccgttatctccatgtstacatacatctcctttcaattaatattcttaagtgaaactggatttgatttttagaagtctcttatgtttagtttattggcagtgactctatcatctggtctccagaggacttcaatgactttgcaaatgtagttgtatgtaatttgctttctgtttacatgcaaagggaaatttcagaattatcttcagatgtttgtgtctgattatgggaaatagaaatatttatagtcatgtaaaatatttgaagcaaccacatatatgtttatttagcagcaa

SEQ ID NO: 335709 - DNA, 619 bp, Homo sapiens
gcagcaaaaataattaacacctgttctccttacccatgctcaggtggaacaatttaggaccttaaataatcattctgtgcatgatcttcctattaatccaacattcccaatgaagtttttataatggaagtgatggaaatacctatgtttcctaaacttttagaaattctcaacattattcacttgggttccagatgctcactgactaattgttcctagacaattccatgagaatgttcctcaggtaccacaaaatcaaaatgcctatagccaaattstgtgtccctgttgcccttttccaatctgcttttccttctgcatcccctatttttgttgtggagtgtccatctgctcattttcctctgctaaatttctcaccaagtctcaccccttccttcttttctcctccaagttatcaatttctattattatgccatagaatgtgaaagtcagtgtggcgattcctcagggatctagaactagaaataccatttgacccagccatcacattactgggtatatacccaaaggattgtaaatcatgctgctataaagacacatgcacacatatgtttatagctgcactcttcacaatagcaaagacttggaaccaacccaa

SEQ ID NO: 335710 - DNA, 607 bp, Homo sapiens
ataaccatttaaagcagacggctcttctctttctttttctgtctgatatcttcagtggtttccctcaggtggaaattatggagaagccagatggcaaaggagcctgggaaatctggtttgcagattcccatccctataaggctcacagtatatagcagagtagaaaatggtatgtataggtttaagagaaaacaggtaatgatcagtactgtctgcaaattgcgccctttacaattttctaaatgattgcaaaattaatatgtcaattataaatgtagaaagatacatacttaaaaaattcctttggggtttatatgaagaaaaaagcttgatggttattacaatggaagatttattttatataaagmacatgactggtcgttttggatttaaaaataatctgttccttcagcctaattttacctgagcgtttccaccacctggaaattaaatctcttcatgctaactgattatcaaatgctaaattatatgacaagaattttactccccaaggaaaatagatccaacaatggaagaaagccagaacccaggaaaatggaaaaaaaggaggaataagtggactacaattataaatctgtaaaattag

SEQ ID NO: 335711 - DNA, 607 bp, Homo sapiens
ataaccatttaaagcagacggctcttctctttctttttctgtctgatatcttcagtggtttccctcaggtggaaattatggagaagccagatggcaaaggagcctgggaaatctggtttgcagattcccatccctataaggctcacagtatatagcagagtagaaaatggtatgtataggtttaagagaaaacaggtaatgatcagtactgtctgcaaattgcgccctttacaattttctaaatgattgcaaaattaatatgtcaattataaatgtagaaagatacatacttaaaaaattcctttggggtttatatgaagaaaaaagcttgatggttattacaatggaagatttattttatataaagcacwtgactggtcgttttggatttaaaaataatctgttccttcagcctaattttacctgagcgtttccaccacctggaaattaaatctcttcatgctaactgattatcaaatgctaaattatatgacaagaattttactccccaaggaaaatagatccaacaatggaagaaagccagaacccaggaaaatggaaaaaaaggaggaataagtggactacaattataaatctgtaaaattag

SEQ ID NO: 335712 - DNA, 607 bp, Homo sapiens
ataaccatttaaagcagacggctcttctctttctttttctgtctgatatcttcagtggtttccctcaggtggaaattatggagaagccagatggcaaaggagcctgggaaatctggtttgcagattcccatccctataaggctcacagtatatagcagagtagaaaatggtatgtataggtttaagagaaaacaggtaatgatcagtactgtctgcaaattgcgccctttacaattttctaaatgattgcaaaattaatatgtcaattataaatgtagaaagatacatacttaaaaaattcctttggggtttatatgaagaaaaaagcttgatggttattacaatggaagatttattttatataaagcacatgactggtmgttttggatttaaaaataatctgttccttcagcctaattttacctgagcgtttccaccacctggaaattaaatctcttcatgctaactgattatcaaatgctaaattatatgacaagaattttactccccaaggaaaatagatccaacaatggaagaaagccagaacccaggaaaatggaaaaaaaggaggaataagtggactacaattataaatctgtaaaattag

SEQ ID NO: 335713 - DNA, 607 bp, Homo sapiens
ataaccatttaaagcagacggctcttctctttctttttctgtctgatatcttcagtggtttccctcaggtggaaattatggagaagccagatggcaaaggagcctgggaaatctggtttgcagattcccatccctataaggctcacagtatatagcagagtagaaaatggtatgtataggtttaagagaaaacaggtaatgatcagtactgtctgcaaattgcgccctttacaattttctaaatgattgcaaaattaatatgtcaattataaatgtagaaagatacatacttaaaaaattcctttggggtttatatgaagaaaaaagcttgatggttattacaatggaagatttattttatataaagcacatgactggtcgttttggatttaaaaataatctgttccttcagcctaattttacctgagcgtttccaccacctggaaattaaatctcttcatgctaactgattatcaaatrctaaattatatgacaagaattttactccccaaggaaaatagatccaacaatggaagaaagccagaacccaggaaaatggaaaaaaaggaggaataagtggactacaattataaatctgtaaaattag

SEQ ID NO: 335714 - DNA, 573 bp, Homo sapiens
ccgatgatctgcttttcttctctccatgaaactcagatactatttttctttacaacacctggattgtgtcttcctctactgctgtgccttattktgtgtttctattctggggtgttgatatctccttttaacaaattccataccattgggctttctaacttgtgaacatttctaatactcacatatgctctataaaaaaaagtgaggtttttccaagaagcacagtggccattaattctgcatatatcaaaatggaatgtgtcatctttgagcaaaatataagctcacaccatgcataaagacaactattgtttgcttcagccaggagtatgttgttagggaaaaaatattttaaacaagccattaagaaatagtctcttttttctttaatgtctttgagctacatatgtgagcagaattataaagaatttccagtgactcattcttagttttggccttcctggcattctgtagtcgtgcatattaaaacctctaaacagctctcagtaaagccttggcagtagagcttgtagcttgtacctatcaaaaatgtcagatgcttttttccaacgc

SEQ ID NO: 335715 - DNA, 614 bp, Homo sapiens
cagctgacatcatcatagtggcctaaagactctagtgaagctctgccccatccaaatacattgcctctcagatatttcctaatatgtggctctagcttccttggtcctagccacgctagtgtctcttctgtctcttaaacaagtcagagactcttaactgctgtatttatactcactctttcttctgtctgaatgctgtttctacasaggtgctttctaattgaaggtacaatcatttctcacatatgccttcttctcattatttgtgtaatttctcttcacagcacctatcatcaccatctgacattttatatatatatatatatatatttccttttttgtgtgttgtgtgtcactcccactaaaatgtaggtctagaagaatagaaatgttcgcttgttgtttgttttgttcactgctgtattcttagtgtgtgcctggcattaacactcttttgaatgactgaataaatatctgaatttctgctatttccctataagtaatattattttggatagaaatgccactaatcctgaaacattttcaagttttatatggtttttatctttaatatttgtgtggctttctgctacattccaatatttaattagctt

SEQ ID NO: 335716 - DNA, 614 bp, Homo sapiens
cagctgacatcatcatagtggcctaaagactctagtgaagctctgccccatccaaatacattgcctctcagatatttcctaatatgtggctctagcttccttggtcctagccacgctagtgtctcttctgtctcttaaacaagtcagagactcttaactgctgtatttatactcactctttcttctgtctgaatgctgtttctacacaggtgctttctaattgaaggtacaatcatttctcacatatgccttcttctcattatttgtktaatttctcttcacagcacctatcatcaccatctgacattttatatatatatatatatatatttccttttttgtgtgttgtgtgtcactcccactaaaatgtaggtctagaagaatagaaatgttcgcttgttgtttgttttgttcactgctgtattcttagtgtgtgcctggcattaacactcttttgaatgactgaataaatatctgaatttctgctatttccctataagtaatattattttggatagaaatgccactaatcctgaaacattttcaagttttatatggtttttatctttaatatttgtgtggctttctgctacattccaatatttaattagctt

SEQ ID NO: 335717 - DNA, 614 bp, Homo sapiens
cagctgacatcatcatagtggcctaaagactctagtgaagctctgccccatccaaatacattgcctctcagatatttcctaatatgtggctctagcttccttggtcctagccacgctagtgtctcttctgtctcttaaacaagtcagagactcttaactgctgtatttatactcactctttcttctgtctgaatgctgtttctacacaggtgctttctaattgaaggtacaatcatttctcacatatgccttcttctcattatttgtgtaatttctcttcacagcacctatcatcaccatctgacattttatatatatatatatatatatttccttttttgtktgttgtgtgtcactcccactaaaatgtaggtctagaagaatagaaatgttcgcttgttgtttgttttgttcactgctgtattcttagtgtgtgcctggcattaacactcttttgaatgactgaataaatatctgaatttctgctatttccctataagtaatattattttggatagaaatgccactaatcctgaaacattttcaagttttatatggtttttatctttaatatttgtgtggctttctgctacattccaatatttaattagctt

SEQ ID NO: 335718 - DNA, 614 bp, Homo sapiens
cagctgacatcatcatagtggcctaaagactctagtgaagctctgccccatccaaatacattgcctctcagatatttcctaatatgtggctctagcttccttggtcctagccacgctagtgtctcttctgtctcttaaacaagtcagagactcttaactgctgtatttatactcactctttcttctgtctgaatgctgtttctacacaggtgctttctaattgaaggtacaatcatttctcacatatgccttcttctcattatttgtgtaatttctcttcacagcacctatcatcaccatctgacattttatatatatatatatatatatttccttttttgtgtgttgtstgtcactcccactaaaatgtaggtctagaagaatagaaatgttcgcttgttgtttgttttgttcactgctgtattcttagtgtgtgcctggcattaacactcttttgaatgactgaataaatatctgaatttctgctatttccctataagtaatattattttggatagaaatgccactaatcctgaaacattttcaagttttatatggtttttatctttaatatttgtgtggctttctgctacattccaatatttaattagctt

SEQ ID NO: 335719 - DNA, 575 bp, Homo sapiens
ttaaaggacttcttaacttttagagatatataccagaatagaaataatattgtataatgtctgccatttgtttcaaatcaaatctgaccaaagtaggggcaagaaagagtaggcgcataaataaataactcattgataatgagttgataattgtgtcactaggatgatgaatatttgagtgtataattttattctatttatatatwtgaaaatttttatactgaaaagttgaaaaagctctatattggtattttaaactttgtaaatgtgcactaaaagaagatatgtctttttagttgttttgcctgagttatgatgagctttgatgagtcaatcaggctgcctcttgagttttccttgtaaggttaattgggtgcactggagagctagctgaggttaggagagcaggctctggttgaaggacagggtttcggcttggcagactaactaccttctctgattattaaactttgattgccacccacattagcacagtattctagtcacctgtgataacctgtccagaagttgctctgatcgtgttcagctcaataagtttagacttcacacaatag

SEQ ID NO: 335720 - DNA, 575 bp, Homo sapiens
ttaaaggacttcttaacttttagagatatataccagaatagaaataatattgtataatgtctgccatttgtttcaaatcaaatctgaccaaagtaggggcaagaaagagtaggcgcataaataaataactcattgataatgagttgataattgtgtcactaggatgatgaatatttgagtgtataattttattctatttatatatatgaaaatttttatactgaaaagttgaaaaagctytatattggtattttaaactttgtaaatgtgcactaaaagaagatatgtctttttagttgttttgcctgagttatgatgagctttgatgagtcaatcaggctgcctcttgagttttccttgtaaggttaattgggtgcactggagagctagctgaggttaggagagcaggctctggttgaaggacagggtttcggcttggcagactaactaccttctctgattattaaactttgattgccacccacattagcacagtattctagtcacctgtgataacctgtccagaagttgctctgatcgtgttcagctcaataagtttagacttcacacaatag

SEQ ID NO: 335721 - DNA, 575 bp, Homo sapiens
ttaaaggacttcttaacttttagagatatataccagaatagaaataatattgtataatgtctgccatttgtttcaaatcaaatctgaccaaagtaggggcaagaaagagtaggcgcataaataaataactcattgataatgagttgataattgtgtcactaggatgatgaatatttgagtgtataattttattctatttatatatatgaaaatttttatactgaaaagttgaaaaagctctatattggtattttaaactttgtaaatgtkcactaaaagaagatatgtctttttagttgttttgcctgagttatgatgagctttgatgagtcaatcaggctgcctcttgagttttccttgtaaggttaattgggtgcactggagagctagctgaggttaggagagcaggctctggttgaaggacagggtttcggcttggcagactaactaccttctctgattattaaactttgattgccacccacattagcacagtattctagtcacctgtgataacctgtccagaagttgctctgatcgtgttcagctcaataagtttagacttcacacaatag

SEQ ID NO: 335722 - DNA, 509 bp, Homo sapiens
cccaggtttatcacgcttccagagctaagaaccaaacttattttacttattttctcttgttgctctgtgctcctcagtacatagcttccaaytcatgtctttagagggctgcttgaacacaagtcatcctattaacattccagccagaagaaaggaggaagataagaataagaataaaaatccttcctttaagaacatttctcagaggcatcacatgatatttctgcttaaatatcattggctacaatttagtcacatgaccacactagctaaggagagaaactgggaaattcatattgtgggaagtctgtatctggctattatgattcaggagctgtattactaagaaaggagagaacagatatttataaacaatgaacagtcatcgctacatttcctcatatgtaaacactgttttgagattgaaaaagttcttttagactcttttctatttttacatatacataggtatgtacattttttccataaaccttatcataatgtaatgt

SEQ ID NO: 335723 - DNA, 597 bp, Homo sapiens
gaggtgcccatcttctgaccctccgtaaatctctaaccctctttgttcctcctatggcaccctctccatccagaaagcttcatttgaaaagttctctccatttcccaaaatggagtcctaaccctctgccttgcctggtatcattctaccgtgctggcctcagacctcagcttgctcttccaaaggcttctgctgtgttgaggaggaagagactctggcaccatatcacgaaggaagacacagcactttggtgctggtacattccttcattagagagtgctgtctctgggttcctcctgaatyaccccacaccgtgaggaatacttttaggctatacaatctaatcttctctgagagaaccatatgtcttccattaacatgactttgacattaatcttttttaaaataggaaacttagtgctattaagctaaaaactctttcctgagcctactttcattaaataaggacaccccttcaggcactaaaaatatcttttacagagctcttaattatggaccaagccaccttgaaaacatcaggagtcctttttatcccaccgtatactcttgatacctttacatttcaccagactttac

SEQ ID NO: 335724 - DNA, 597 bp, Homo sapiens
gaggtgcccatcttctgaccctccgtaaatctctaaccctctttgttcctcctatggcaccctctccatccagaaagcttcatttgaaaagttctctccatttcccaaaatggagtcctaaccctctgccttgcctggtatcattctaccgtgctggcctcagacctcagcttgctcttccaaaggcttctgctgtgttgaggaggaagagactctggcaccatatcacgaaggaagacacagcactttggtgctggtacattccttcattagagagtgctgtctctgggttcctcctgaatcaccccacaccgtgaggaatacttttaggctatacaatctaatcttctctgagagaaccmtatgtcttccattaacatgactttgacattaatcttttttaaaataggaaacttagtgctattaagctaaaaactctttcctgagcctactttcattaaataaggacaccccttcaggcactaaaaatatcttttacagagctcttaattatggaccaagccaccttgaaaacatcaggagtcctttttatcccaccgtatactcttgatacctttacatttcaccagactttac

SEQ ID NO: 335725 - DNA, 471 bp, Homo sapiens
gccttttattggaataactttgtcaggtkttgttatcaaagttgtgctttctttataaaatggattgaatagtgtcttgcttttttctaacttcatgaagaatttgtgtacaattaaaattaattactccctcatatatttggtagattttgttagtaagaccactggccttacattttgtggtgcgtaggttttaattccggcatttgaaatctttgatagttacacaaccattcaaattttctatttctttggggaggaacttttttaggaacttgtccatatcatcttaattttcaaatttattggcataaatttgtacataagttatccttctattatctgtaacatctgtaacaatgtacttttaaaattcctgttacatttttgtgtcttcacttattttccttgtaagtttcaacagcttattttggtctttttaaagaaccaaacttctgtcagatcaacctt

SEQ ID NO: 335726 - DNA, 471 bp, Homo sapiens
gccttttattggaataactttgtcaggtgttgttatcaaagttgtgctttctttataaaatggattgaatagtgtcttgcttttttctaacttcatgaagaatttgtgtacaattaaaattaattactccctcatatatttggtagattttgttagtaagaccactggccttacattttgtggtgcgtaggttttaattccggcatttgaaatctttgatagttacamaaccattcaaattttctatttctttggggaggaacttttttaggaacttgtccatatcatcttaattttcaaatttattggcataaatttgtacataagttatccttctattatctgtaacatctgtaacaatgtacttttaaaattcctgttacatttttgtgtcttcacttattttccttgtaagtttcaacagcttattttggtctttttaaagaaccaaacttctgtcagatcaacctt

SEQ ID NO: 335727 - DNA, 585 bp, Homo sapiens
gcccaattagcattttcattcataaatttattgttctaattttgttatacatattaacatcttttagtctttggctatcatcttgttcacattttattattattttttcaattagctattttgaccagaaaatcctcatatggatgtaaaaataaatattttattttgcttttacctttcaaaagctgggyaaataattatttttgcttttaagaagaaggtatctaaaatgcattgtaacttattttgaaaaatgggttccagatatcagaggttagcctgttctgaatataatacatcaggggaatagcttagaatataaccaaagggtgtacttaccccacgtataaaatttagacatattacgtagtgggaactcgtggttgtaattaaaatatgcctgatattatagtaaatcgaatcctgttaagtcattcacgtattgatagaactacatgaaagtagtattgtatctctttatttccaccgtgagtataaaactaacttcttttagaaggcctattaatagttcacatatagcatgtattagtctaataatattgccataaaaaataacacagactc

SEQ ID NO: 335728 - DNA, 585 bp, Homo sapiens
gcccaattagcattttcattcataaatttattgttctaattttgttatacatattaacatcttttagtctttggctatcatcttgttcacattttattattattttttcaattagctattttgaccagaaaatcctcatatggatgtaaaaataaatattttattttgcttttacctttcaaaagctgggcaaataattatttttgcttttaagaagaaggtatctaaaatgcattgtaacttattttgaaaaatgggttccagatatcagaggttagcctgttctgaatataatacatcaggggaatagcttagaatataaccaaagggtgtacttaccccacgtataaaatttagacatattacgtagtgggaactcgtggttgtaattaaaatatgcctgatattatagtaaatcgaatcctgttaagtcattcacgtattgatagaactacatgaawgtagtattgtatctctttatttccaccgtgagtataaaactaacttcttttagaaggcctattaatagttcacatatagcatgtattagtctaataatattgccataaaaaataacacagactc

SEQ ID NO: 335729 - DNA, 579 bp, Homo sapiens
taactcaggaaaaacaaataacttctataatatgtatcttacaaatcaaactaaaaagtttcaaaatattatagcaactaaaactttaaaataygtctattcccaagagagcgcacatggataaatttcatgctgataggatgctaataagatacatagcaaagtccatggaaaatagtgagtcaagacattttgaaagtaaaatgcagacagaaaaggttgtccaggatatccagattatatctggcagagtgttttgtatatttgaatcacttaaatatttattgcattaaatatatgcatgaataaaggagaatgagaaccaagtccccttttccaggtgggaaaaatacaagtaaaagtcattctgagaaactgctctctcccaccaaatatctttattatatttggagagcatgatgcctaatgtccatgacatccaaaatcacaacaaaaatgaccaaaagccctgctcctctgggaaccaggctcagagattgtatagagaaagaactatggaaagttctacttaatgctgtagcagtgactttaactatataagaataattgctttgatga

SEQ ID NO: 335730 - DNA, 579 bp, Homo sapiens
taactcaggaaaaacaaataacttctataatatgtatcttacaaatcaaactaaaaagtttcaaaatattatagcaactaaaactttaaaatacgtctattcccaagagagygcacatggataaatttcatgctgataggatgctaataagatacatagcaaagtccatggaaaatagtgagtcaagacattttgaaagtaaaatgcagacagaaaaggttgtccaggatatccagattatatctggcagagtgttttgtatatttgaatcacttaaatatttattgcattaaatatatgcatgaataaaggagaatgagaaccaagtccccttttccaggtgggaaaaatacaagtaaaagtcattctgagaaactgctctctcccaccaaatatctttattatatttggagagcatgatgcctaatgtccatgacatccaaaatcacaacaaaaatgaccaaaagccctgctcctctgggaaccaggctcagagattgtatagagaaagaactatggaaagttctacttaatgctgtagcagtgactttaactatataagaataattgctttgatga

SEQ ID NO: 335731 - DNA, 603 bp, Homo sapiens
tttacctctccccttacatatttttatactctccaaattttctttattgaaaacatttaacttttataataaaacataaatatatgaactggatatgtatctagttagagaaattgatagatacatctcagaggaaagaaatcttggatgacaggcacttctccctttagcttctccacaaagccctatcagtataaaaccttcaatcatgtgyttatgatttctgtatatcatttattgaaatcattataggtgtactattctatagcattatgacccttataaaacttttaatataaattagaaaacaatgatataaaaataactattaccggaagttcaaatgttttcttttttcactacaatgcactattttgcctccacaaagtgacatatattccactttgggttcccttgcattagactgtaaagcaaaaaaaagaaacaaaataagaaagaagaagaataaaagaaatggtatgacactatgaccttggaattttcaacatagaactcatgataattggaatgtgaactggactgtgtgtgtatgtctgtgtgtgtgcacacacgtgtggacacacacatatatatgttttagaa

SEQ ID NO: 335732 - DNA, 603 bp, Homo sapiens
tttacctctccccttacatatttttatactctccaaattttctttattgaaaacatttaacttttataataaaacataaatatatgaactggatatgtatctagttagagaaattgatagatacatctcagaggaaagaaatcttggatgacaggcacttctccctttagcttctccacaaagccctatcagtataaaaccttcaatcatgtgtttatgatttctgtatatcatttattgaaatcattataggtgtactattctatagcattatgacccttmtaaaacttttaatataaattagaaaacaatgatataaaaataactattaccggaagttcaaatgttttcttttttcactacaatgcactattttgcctccacaaagtgacatatattccactttgggttcccttgcattagactgtaaagcaaaaaaaagaaacaaaataagaaagaagaagaataaaagaaatggtatgacactatgaccttggaattttcaacatagaactcatgataattggaatgtgaactggactgtgtgtgtatgtctgtgtgtgtgcacacacgtgtggacacacacatatatatgttttagaa

SEQ ID NO: 335733 - DNA, 603 bp, Homo sapiens
tttacctctccccttacatatttttatactctccaaattttctttattgaaaacatttaacttttataataaaacataaatatatgaactggatatgtatctagttagagaaattgatagatacatctcagaggaaagaaatcttggatgacaggcacttctccctttagcttctccacaaagccctatcagtataaaaccttcaatcatgtgtttatgatttctgtatatcatttattgaaatcattataggtgtactattctatagcattatgacccttataaaacttttaatataaattagaaaacaatgatataaaaataamtattaccggaagttcaaatgttttcttttttcactacaatgcactattttgcctccacaaagtgacatatattccactttgggttcccttgcattagactgtaaagcaaaaaaaagaaacaaaataagaaagaagaagaataaaagaaatggtatgacactatgaccttggaattttcaacatagaactcatgataattggaatgtgaactggactgtgtgtgtatgtctgtgtgtgtgcacacacgtgtggacacacacatatatatgttttagaa

SEQ ID NO: 335734 - DNA, 466 bp, Homo sapiens
ataaaacataaatatatgaactggatatgtatctagttagagaaattgatagatacatctcagaggaaagaaatcttggatgacaggcacttctccctttagcttctccacaaagccctatcagtataaaaccttcaatcatgtgtttatgatttctgtatatcatttattgaaatcattataggtgtactattctatagcattatgacccttataaaacttttaatataaattagaaaacaatgatataaaaataactattaccggaagttcaaatgttttcttttttcactacaatgcactattttgcctccacaaagtgacatatattccactttgggttcccttgcattagactgtaaagcaaaaaaaagaaacaaaataagaaagaagaagaataaargaaatggtatgacactatgaccttggaattttcaacatagaactcatgataattggaatgtga

SEQ ID NO: 335735 - DNA, 523 bp, Homo sapiens
ttctctgttgtcttgagaatatctgaatgcttaatagctgttatgttcccttgtcacactgaattgagtttgggcaaccaggattgggctagttgcagctctatgaacacgagcaaatcattttagctctttgggtttcagtttccttatctgttgaatatggtttcttcctgaggctgctgtaygtgattttataggtcagtgatactgaattaagtttcaggttttggacactagatggtgatgttgtgttgcaatttgaagaagtcttcctcatcttagccaaggtcgacactcaggcttcatatttgctcagcttttaataaatacggtgtatgattaatgaaactctatccatgaaacatacgtaattgatcatggaaataacacaaatggaagaagaaaccaaaaataactctagctccttttttcatcctacttatatgttaggcaatttataaatctattgaggctttaatggcaggcctaggctcctgatgcccacttcctgtttctcacttct

SEQ ID NO: 335736 - DNA, 604 bp, Homo sapiens
caaaattcaggcagaattcagaattcattaaccaggcatggtggcacacaccagtaatcccagctacttaggaggccgaggcatgagatttgcttgaacctgggaggcagaggttgcagtgagccaagatctgggcaacagagtgagaccgtgtctcaaaataaaaataagcagatattattgggacaatttgatgtccatatgggcaaaaattaaatcatcatttcaaagcatacacacaaattagttccaggtggaataaatatctaagacttaaaggcaaggtactaagctttggtgtgataatagaggagaatatctatacaacttcagagtagggaaaattccctaagtaaatcacaaaagccctgataataatgtacaagattggwaaatttaactctagtaagctaagaacttctgcttatcaaaagcatcacaaagagagcaaaaaggcaaatcacagagtggaagaaaacatttacaatacatacaaatatgtatattttaaatatacaatttatatacatacacacacacatacacaatttaaaattgagcaaaataatcaaaaaagcatgtccaaaaacaaaagcaccaaatg

SEQ ID NO: 335737 - DNA, 604 bp, Homo sapiens
caaaattcaggcagaattcagaattcattaaccaggcatggtggcacacaccagtaatcccagctacttaggaggccgaggcatgagatttgcttgaacctgggaggcagaggttgcagtgagccaagatctgggcaacagagtgagaccgtgtctcaaaataaaaataagcagatattattgggacaatttgatgtccatatgggcaaaaattaaatcatcatttcaaagcatacacacaaattagttccaggtggaataaatatctaagacttaaaggcaaggtactaagctttggtgtgataatagaggagaatatctatacaacttcagagtagggaaaattccctaagtaaatcacaaaagccctgataataatgtacaagattggtaaatttaactctagtaagctaagaacttctgcttatmaaaagcatcacaaagagagcaaaaaggcaaatcacagagtggaagaaaacatttacaatacatacaaatatgtatattttaaatatacaatttatatacatacacacacacatacacaatttaaaattgagcaaaataatcaaaaaagcatgtccaaaaacaaaagcaccaaatg

SEQ ID NO: 335738 - DNA, 604 bp, Homo sapiens
caaaattcaggcagaattcagaattcattaaccaggcatggtggcacacaccagtaatcccagctacttaggaggccgaggcatgagatttgcttgaacctgggaggcagaggttgcagtgagccaagatctgggcaacagagtgagaccgtgtctcaaaataaaaataagcagatattattgggacaatttgatgtccatatgggcaaaaattaaatcatcatttcaaagcatacacacaaattagttccaggtggaataaatatctaagacttaaaggcaaggtactaagctttggtgtgataatagaggagaatatctatacaacttcagagtagggaaaattccctaagtaaatcacaaaagccctgataataatgtacaagattggtaaatttaactctagtaagctaagaacttctgcttatcaaaagcatcacaaagagagcaaaaaggcaaatcacagagtggaagaaaacatttacaatacatacaaatatgtatattttaaatatacaatttatatacatacacacacacatayacaatttaaaattgagcaaaataatcaaaaaagcatgtccaaaaacaaaagcaccaaatg

SEQ ID NO: 335739 - DNA, 607 bp, Homo sapiens
catcttgccacattaaacaactagaaaactggacgacacctatgaaacaatggtttcatacactcatctagagggaacacaagaccatgacacctgagagaagggaaacaaataaggtgagccctgtcattgcacaggcttcctgcctgaagaattttcaggccacagagcagagaggaggaactccaacagatttcagttgccccacttagttgaggagacagagattacagtttggaaagaccaaggcagttaaaacgtgtagggcaaagtagcagagaggaggaggctgtccacagactgaatgctgccaacatgcatgagggttactctaagactggctgagctctgctttgtacatgtaggaggaaagctacctgaggatagggaagaaaccaccagaaaggagtagttaatacctagagctttcacagggttgggaatcgttttgctgtcaactactagagggataagacatgcgtcattgrgtggaatattcagagagtattacctcagcaatggactaaattagcagtacactaaagctgctctggacttgccctgtcaatgcttaaaggagagtctcaaaaagatctaattgagtcta

SEQ ID NO: 335740 - DNA, 587 bp, Homo sapiens
atatttgttttttcccaaaataaccatccttcagactcttaaatcatgacttttatgacctcctaatgatcagtgcctgaaatctccaggttctcaaakccccttctaaaatgcaacacaagatgcattgagcgtggctggcacaactgatgtctgacgttgcttgacttgggaaacctacatctgttcacatagtccaaaagtatacaaagtcttagagcaaaagtgtgcctgttgattcattttgaacttgtattacccaaaatgataaggtatttttatatgaactaccatcagcaaaatctagccaaatactccgtgaaactaacttaagatattgatctcctattaaatttctttcttttttccttagtccatcagtattattttaatttaatttccttagtccaacatattcactatttggtgatttataatcacaacttttataaacaagcactctttgtcttccttagtatttgtagtatgatataggtttaggttattaaataatgagacagaaaaaaattaaggacagagagccttagagatattgatacaagagagtccaggcagtgaagaagagg

SEQ ID NO: 335741 - DNA, 587 bp, Homo sapiens
atatttgttttttcccaaaataaccatccttcagactcttaaatcatgacttttatgacctcctaatgatcagtgcctgaaatctccaggttctcaaatccccttctaaaatgcaacacaagatgcattgagcgtggctggcayaactgatgtctgacgttgcttgacttgggaaacctacatctgttcacatagtccaaaagtatacaaagtcttagagcaaaagtgtgcctgttgattcattttgaacttgtattacccaaaatgataaggtatttttatatgaactaccatcagcaaaatctagccaaatactccgtgaaactaacttaagatattgatctcctattaaatttctttcttttttccttagtccatcagtattattttaatttaatttccttagtccaacatattcactatttggtgatttataatcacaacttttataaacaagcactctttgtcttccttagtatttgtagtatgatataggtttaggttattaaataatgagacagaaaaaaattaaggacagagagccttagagatattgatacaagagagtccaggcagtgaagaagagg

SEQ ID NO: 335742 - DNA, 587 bp, Homo sapiens
atatttgttttttcccaaaataaccatccttcagactcttaaatcatgacttttatgacctcctaatgatcagtgcctgaaatctccaggttctcaaatccccttctaaaatgcaacacaagatgcattgagcgtggctggcacaactgatgtctgacrttgcttgacttgggaaacctacatctgttcacatagtccaaaagtatacaaagtcttagagcaaaagtgtgcctgttgattcattttgaacttgtattacccaaaatgataaggtatttttatatgaactaccatcagcaaaatctagccaaatactccgtgaaactaacttaagatattgatctcctattaaatttctttcttttttccttagtccatcagtattattttaatttaatttccttagtccaacatattcactatttggtgatttataatcacaacttttataaacaagcactctttgtcttccttagtatttgtagtatgatataggtttaggttattaaataatgagacagaaaaaaattaaggacagagagccttagagatattgatacaagagagtccaggcagtgaagaagagg

SEQ ID NO: 335743 - DNA, 588 bp, Homo sapiens
aatgggtaataccacctgcacatttacagaattaatatatttaataaaatatattggctggctcctcctgccacaaggaatagtttcttgtatgagtaccggtgaaaagacatctgtgttgggtcactcttccagggttagattctagctcttatacttaatatgttaatctcagataagtcatcttaaccactctgtgcctcagttcctcagtttacgcatctgtaaaaatgtttacctctctgtaagagataatcagcactaacatttattgagtattatgtgccaggaactgttctgagagttttagatattttaatgtatttaatcatcgataaagataagtgcccgtttcaccartaagaaatacaagacacagagaggttaaacacttgcccaagctcacacatttagttaagtaacagagcccagatttaaaacccagtctggatccaagacataagcttttatttactggactatcctgattctctacggggtaaaaataccacatacctcaaagggttaatatgagaattataagaaacattataagaaaaatacttggaatcattaaagttcaaatat

SEQ ID NO: 335744 - DNA, 610 bp, Homo sapiens
cctaacgtaatcacttgcttttaacaacaacctctagggtaacaaaacctaagtactgggctttcaagttaggaactaaracctctaaataaagtctggatctttgaaaacctacacaattaaagggtgggcattacttggaagacaagcctaaggaaattgccccaaatgcaacacaaagagatggaaatcatgaaaaataagaaacatgaaagataaaatgagttactctgagttatgtcaattggatttctagaagagaataataagaatggatattagaccacatttgtagaaattataactgaagatgatccaaaactaattttgtagatatagaatcttaagagttaatggcaacaatggaagacaaaaggtagagatgtaatagcatcaagcatccagtgaaaataactgtctgccaagaattgtgtatacagataaaaagaacaagagcaaattaagagagttgactagcaactgaacaccattaaaagaatttataaaggatatacttcaggaagaagaaacatggtgttaggggcaaagtttgagaggctagaagaagtagggaatgaagaatctagcaaatatgtgaacagatctaagc

SEQ ID NO: 335745 - DNA, 610 bp, Homo sapiens
cctaacgtaatcacttgcttttaacaacaacctctagggtaacaaaacctaagtactgggctttcaagttaggaactaaaacctctaaataaagtctggatctttgaaracctacacaattaaagggtgggcattacttggaagacaagcctaaggaaattgccccaaatgcaacacaaagagatggaaatcatgaaaaataagaaacatgaaagataaaatgagttactctgagttatgtcaattggatttctagaagagaataataagaatggatattagaccacatttgtagaaattataactgaagatgatccaaaactaattttgtagatatagaatcttaagagttaatggcaacaatggaagacaaaaggtagagatgtaatagcatcaagcatccagtgaaaataactgtctgccaagaattgtgtatacagataaaaagaacaagagcaaattaagagagttgactagcaactgaacaccattaaaagaatttataaaggatatacttcaggaagaagaaacatggtgttaggggcaaagtttgagaggctagaagaagtagggaatgaagaatctagcaaatatgtgaacagatctaagc

SEQ ID NO: 335746 - DNA, 570 bp, Homo sapiens
gggggatgccacagtgtgaagtgaaagcacgtttattaaraaagtaaaggaggaggggcacgggggctcactcctgtaatcgcaacactttgggaggcccagacaggtggatcacgaggtcaggagatcaaaaccatcctggttaacacggggaaacctcttctctactaaaaatacaaaaaaattacccaagtgtgggggcgggtgccctgtagtcccacctactctgggaggctgaggcaggagaatgggatgaacccgggaggcgaagcttgcagtaagccgagatcgcgccactgcactccagcctgggtgacagagggagactccatctcaaaaaaaaagagagaaagtaaaggaataaaagaatggctaccccatagacggagcagccgtgagggctgctggttgcccatttttatggttatttgttgatgatatgctaaacaaggagtggatttttcatgcctcctctttttagaccatatagggtaacttcttgatgttgccgtggcatttgtaaactgtcatggtgctggtaggagtgtagcagggaggatgatgggaggt

SEQ ID NO: 335747 - DNA, 560 bp, Homo sapiens
tcagggggatgccacagtgtgaagtgaaagcacgtttattaaaaaagtaaaggaggaggggcacgggggctcactcctgtaatcgcaacactttgggaggcccagacaggtggatcacgaggtcaggagatcaaaaccatcctggttaacacggkgaaacctcttctctactaaaaatacaaaaaaattacccaagtgtgggggcgggtgccctgtagtcccacctactctgggaggctgaggcaggagaatgggatgaacccgggaggcgaagcttgcagtaagccgagatcgcgccactgcactccagcctgggtgacagagggagactccatctcaaaaaaaaagagagaaagtaaaggaataaaagaatggctaccccatagacggagcagccgtgagggctgctggttgcccatttttatggttatttgttgatgatatgctaaacaaggagtggatttttcatgcctcctctttttagaccatatagggtaacttcttgatgttgccgtggcatttgtaaactgtcatggtgctggtaggagtgtagcagggag

SEQ ID NO: 335748 - DNA, 560 bp, Homo sapiens
tcagggggatgccacagtgtgaagtgaaagcacgtttattaaaaaagtaaaggaggaggggcacgggggctcactcctgtaatcgcaacactttgggaggcccagacaggtggatcacgaggtcaggagatcaaaaccatcctggttaacacggggaaacctcttctctactaaaaatacaaaaaaattacccaagtgtgggggcgggtgccctgtagtcccacctactctgggaggctgaggcaggagaatgggatgaacccgggaggcgaagcttgcagtaagccgagatcgcgccactgcactccagcctgggtgacagagggagactccatctcaaaaaaaaagagagaaagtaaaggaataaaagaatggctaccccatagacggagcagccgtgagggctgctggttgcccatttttatggttatttsttgatgatatgctaaacaaggagtggatttttcatgcctcctctttttagaccatatagggtaacttcttgatgttgccgtggcatttgtaaactgtcatggtgctggtaggagtgtagcagggag

SEQ ID NO: 335749 - DNA, 572 bp, Homo sapiens
gtatatgccccaaaagaactaaaagtggaaaaaacaagtatttgtatcttcatattcacagcagtaccattcgcaatagcccataagtggaagacacccaactgtcatgggaataaacaaaatatgggctctacataccctcaaaaatattgttcagcctttaaaargaagaaaattctgggccaggcgcggttgctcatgcctgtaattgcagcactttgggaggccgaggcaggcggatcacgaggtcaggggttcgagaccagcctggccaacatagtgaaaccacgtctctactaaaaatacaaaaattagccgggcatggtggcgcctgcctatagtcccagctacttgggaggctgaggcaggagaatcacttgaacccaggaggcagaggttgtggtgagctgagatagcgctacttactgtactctagcaaactgggcaacagagcaaggctccatcaaaaaaaagaagaagaaggaaattctgacacatactacaacacggacgatccttgaagatgttatgctaaataaagccagacaaaaaaagaacaaatattgcatgat

SEQ ID NO: 335750 - DNA, 572 bp, Homo sapiens
gtatatgccccaaaagaactaaaagtggaaaaaacaagtatttgtatcttcatattcacagcagtaccattcgcaatagcccataagtggaagacacccaactgtcatgggaataaacaaaatatgggctctacataccctcaaaaatattgttcagcctttaaaaggaagaaaattctgggccaggcrcggttgctcatgcctgtaattgcagcactttgggaggccgaggcaggcggatcacgaggtcaggggttcgagaccagcctggccaacatagtgaaaccacgtctctactaaaaatacaaaaattagccgggcatggtggcgcctgcctatagtcccagctacttgggaggctgaggcaggagaatcacttgaacccaggaggcagaggttgtggtgagctgagatagcgctacttactgtactctagcaaactgggcaacagagcaaggctccatcaaaaaaaagaagaagaaggaaattctgacacatactacaacacggacgatccttgaagatgttatgctaaataaagccagacaaaaaaagaacaaatattgcatgat

SEQ ID NO: 335751 - DNA, 572 bp, Homo sapiens
gtatatgccccaaaagaactaaaagtggaaaaaacaagtatttgtatcttcatattcacagcagtaccattcgcaatagcccataagtggaagacacccaactgtcatgggaataaacaaaatatgggctctacataccctcaaaaatattgttcagcctttaaaaggaagaaaattctgggccaggcgcggttgctcatgcctgtaattgcagcactttgggaggccgaggcaggyggatcacgaggtcaggggttcgagaccagcctggccaacatagtgaaaccacgtctctactaaaaatacaaaaattagccgggcatggtggcgcctgcctatagtcccagctacttgggaggctgaggcaggagaatcacttgaacccaggaggcagaggttgtggtgagctgagatagcgctacttactgtactctagcaaactgggcaacagagcaaggctccatcaaaaaaaagaagaagaaggaaattctgacacatactacaacacggacgatccttgaagatgttatgctaaataaagccagacaaaaaaagaacaaatattgcatgat

SEQ ID NO: 335752 - DNA, 572 bp, Homo sapiens
gtatatgccccaaaagaactaaaagtggaaaaaacaagtatttgtatcttcatattcacagcagtaccattcgcaatagcccataagtggaagacacccaactgtcatgggaataaacaaaatatgggctctacataccctcaaaaatattgttcagcctttaaaaggaagaaaattctgggccaggcgcggttgctcatgcctgtaattgcagcactttgggaggccgaggcaggcggatcacgaggtcaggggttcgagaccagcctggccaacatagtgaaaccacgtctctactaaaaatacaaaaattagccgggcatggtggcgcctgcctatagtcccagctacttgggaggctgaggcaggagaatcacttgaacccaggaggcagaggttgtggtgagctgagatagcgctacttactgtactctagcaaactgggcaacagagcaaggctccatcaaaaaaaagaagaagaaggaaattctgacacatactacaacacggacgatccwtgaagatgttatgctaaataaagccagacaaaaaaagaacaaatattgcatgat

SEQ ID NO: 335753 - DNA, 590 bp, Homo sapiens
atacctaatgcacatggggcttaaaacctagatgataggttgataggtgcagcaaaccaccatggcacatgtatacctatgtaataaacctgcacattctgcacatgtatcccggaacttaaagtaaatttaaaaaaataataataatttgcgaataaattctgctccgcaccctccagagccagggaaaacggtccaaaactgggactgcagactactcctgcttcaagaccacgaccactcctgtgccagggagggagaggggcaagggcgtgtaaaatcatcacaaaactatccactgttttgaagtgacttttttattggttcagtattcatttggttgctataaacttttgattgttttccatagtcctgacaaaattggttcagacagtttctgctaatttttgaagcttttgtgagatggtaatgagaagttatgcgtattctacctttttgctgacaaattgttctccagtttcccgtatattgatacttagttactatttccctctgctttgtggttastttcctttggcaggtgagggacaggaattttcatcaattgaagtattttgatattcttctgt

SEQ ID NO: 335754 - DNA, 590 bp, Homo sapiens
atacctaatgcacatggggcttaaaacctagatgataggttgataggtgcagcaaaccaccatggcacatgtatacctatgtaataaacctgcacattctgcacatgtatcccggaacttaaagtaaatttaaaaaaataataataatttgcgaataaattctgctccgcaccctccagagccagggaaaacggtccaaaactgggactgcagactactcctgcttcaagaccacgaccactcctgtgccagggagggagaggggcaagggcgtgtaaaatcatcacaaaactatccactgttttgaagtgacttttttattggttcagtattcatttggttgctataaacttttgattgttttccatagtcctgacaaaattggttcagacagtttctgctaatttttgaagcttttgtgagatggtaatgagaagttatgcgtattctacctttttgctgacaaattgttctccagtttcccgtatattgatacttagttactatttccctctgctttgtggttagtttcctttggcaggtgagggacaggrattttcatcaattgaagtattttgatattcttctgt

SEQ ID NO: 335755 - DNA, 564 bp, Homo sapiens
aagttttttagatatagcactaaaagcacaattcactaaaaaatgataaatttaacttcaccacaattaaaaacgtttggttcttaaaagatgctttgaaaaaaataaaaggccatagtctgggacaaaatatttgcaaatggcttactacacaaagggytgatattcagaacgtacaaagaattctcaaaacccaatagtaagaaaaaagaccaattcaacaataaatgaaagaaaagttcaccggtcacttcaccaaagatgatacacatgtggcaaataagcacatgcaaagatgttgagaagtttcatcataaaagggtgttaaattttttcaagtgctttcccctctattgagattaatgtataatacaatatagatactaatcacagagattctttcccacagagaaaatgcattatgcacataagctttgaatcttagtgctatcttgtgcaaattttgtggtgttgagcaagtttttacattgtgtaaggtttagttttttcaaaatgaggataacatataacttgagttatggtcaagattcacagtaatgtagg

SEQ ID NO: 335756 - DNA, 619 bp, Homo sapiens
gttatatcaaagaagattatctacaattatttgaaaatgcatgaaaatattcctcctttcttcaaatatacatctacatgagaccaaattttcttcatatacttcacctaagtaacataatccaccacattaaaagcagaggcaaggggtcccttccaagatggctgaataggagcagctctggtctgcagctcccagtgagatcaatgcagaagatgggtgatttctgcatttccaactgaggtacctagttcatctcattaggactggttggacagtgggtgcagcccacagagggtgagccgaagcagggcaggggtgttgcctcacccaggaagtgcaaggggttggggaacttccctttcctagccaagggaagctgtgacggactatacctggagaaatgatacactcctgaccaaatactgtgctttttctacagtcttagcaaccagcagaccaagagacaccgtcccatgcctggctcrgtgggtcccatacccacagagccttgctcactgctagcgcagcagtctgagattgacctgcggcactgcagcttaactgggggaggggcatcccattgctgaggcttcagtagcacacagtgtaaacaaag

SEQ ID NO: 335757 - DNA, 619 bp, Homo sapiens
gttatatcaaagaagattatctacaattatttgaaaatgcatgaaaatattcctcctttcttcaaatatacatctacatgagaccaaattttcttcatatacttcacctaagtaacataatccaccacattaaaagcagaggcaaggggtcccttccaagatggctgaataggagcagctctggtctgcagctcccagtgagatcaatgcagaagatgggtgatttctgcatttccaactgaggtacctagttcatctcattaggactggttggacagtgggtgcagcccacagagggtgagccgaagcagggcaggggtgttgcctcacccaggaagtgcaaggggttggggaacttccctttcctagccaagggaagctgtgacggactatacctggagaaatgatacactcctgaccaaatactgtgctttttctacagtcttagcaaccagcagaccaagagacaccgtcccatgcctggctcggtgggtcccatrcccacagagccttgctcactgctagcgcagcagtctgagattgacctgcggcactgcagcttaactgggggaggggcatcccattgctgaggcttcagtagcacacagtgtaaacaaag

SEQ ID NO: 335758 - DNA, 605 bp, Homo sapiens
ctccagagccattggagtccaggaacaaattccagtatgtgataaccccatgcagagttcccagcttccttctccttcaacctatctgctgtgtctttcctctgtccactctcagtgccttccctctgaagatctgttaggagtacaccagtcatcttggtccctcagtggcagcttttcacctggctgtgtctagtcagccatcttatccagcctcccccaagatttttctttttaatgaaagcattgcaactaaaaatttttctctgagcactgccttcactacattcaaawagctttggtatattgtattttcattttcattaatctctagtacttttattttcctttgtgaatttttctttgactttttggttgtttcaaagtaccttttttaatttccatagatttgtgaactttcttgtttttttgttattgatttctagcttcttaacattatggttggagaggataattggtatgattttaattttctaaggtttattgacacttgttttgtagacaaatatatgagtctacatatcctcaaaaatgtttcatgtgaatttgaaaagaatatatattctcttactgttgggtggagt

SEQ ID NO: 335759 - DNA, 514 bp, Homo sapiens
atctccataatgattatctgcagcaaatttgtttttatatattaaggaagagtttctcaaacctatgaaaaattgtttgttagtaattcaaagtgttgagaattcatgtatacaaagtttgcatgtaagtcctaagtatattttattgctttatcacagctagaggctactcaaatttttacctttcatttccattaatattcctccgtttttgatttgcattgctctaatgatcagtaatgttcaggttttttttcatgtgtttgctggccatgtaaatgtcttcttttgagaagtgtctattcatatattttgcctactttttgaagrggctgttttttttttcttataaatttgtttaagttccttgtaaattctggatattagaccttcgtcagatgggtagattgcaaaaattatctcccattctgtaggttgcctgttcactccgatgatagtttcttttgctgcgtagaagctctttagattaattagatcccatttgtcaattttg

SEQ ID NO: 335760 - DNA, 611 bp, Homo sapiens
ctttttgacgggagcctccaattgccgctgtttctaattggccatctttgccctgccctccttcagttttcttcattgtagaggtcttgcatgtaaagtttcttaagctcaatttcactgcacagggcaagcagaatacatatttcagaagcttataaatttcccagaacagcaaacaagttcagcacactcggtgtgatatttagttctacataactttgtgttctgttaagaaacatcgtgaaagataagcaagtccgattacaaaatgcaaattcttctggtaatctaacaactacatttattaaaccacaaatgtctcaccatcaatccatcatttagcaaaaatttaacaaatccctactgatatggtttggttctgtgtcctcacccaaatttcatgtagtattgtaatcctcaatgtcagaggagggacttcgcagcaggtgattggatcacgggcggcagatttcccctttgctgttctcgtgatagtgagtgagatcccatgagatctggtcgtttgaaagtgtgtagcacttccctgttcrctctctctcacctcccaccatgtaaagacgtacttgcttcccctttgcacttctgctatg

SEQ ID NO: 335761 - DNA, 590 bp, Homo sapiens
atgtattataatattttcagcatactaaataatagggtttttaatgtatttgtgagtattttatgcattatcacaycatttctccctcctctcaaacttgccctccatacttagtatttaggtaactttaaagacctatgattttcaccttatttacaaaatgtaacagcatgaagtaggggaaaaataaatttatttctagtctttgtatttttaaaaaaattagtacttgggagagtataaaagatgtatgcataggcaagagaatccaagaaaacatcaaaagtaagaccagccttcactgctcttaatcctcatccatacagattggaatagaatccccaggacgggaaaagaatcctgtcccatacattaaaaaaaaaaaaaaaacagcaaaatagtaagaaatcctgcgggatcagagagcaggaaacctgtgactcacttcccagaagaagacacagggaggcggtaggactccttctaagataaagacactgagagaggaagagccacatgctgcacataggcaagcatcgtcttaaacaacttcacttggatttcctatacttaatggttcaggaacacag

SEQ ID NO: 335762 - DNA, 598 bp, Homo sapiens
ttttgccaaaaatcttaacatgcttataattgttatattatctttaccatttgacccttttatcaatgtcaatatttttgtcccctgtaggagtttttaacttaacatctattttgtcagatattaacataggtgttccagtactcttgtttgctatttacatggactatyttttatattatttcactttcaatcaacctctctttatctttatatctaaagtgaatctcatgatcaacacattgaatcatttatttttaatctattctgccaatctatgcctttccagtggagagtataatccatttacatttaaagtaattatttataaggaaggtcttttgccattttgcaaattacttataaaaaaggactttgccatttgttttttgtcttacagctttttttgtccccctccattactgccttcttttgtgtttaactaatttttttttgtagtaaactattctgattttccttcatctccttttgtgtgctttctatagatattttctttttaattaccatcaggcttaaatttaacatccttaaatgcttgtagtcaaaacaacaacaataacaaccactaccaccatct

SEQ ID NO: 335763 - DNA, 226 bp, Homo sapiens
gggaggaaggaaggaaggaaagaaagagaaagtgaagtcaacattacatgtctcagagtaaggagaggggtctgctaagaatggaacatgtatgatgttgaataaaatgaagtaatttgaaaagaaatagtaaggtcacatgagcttgaatgacattmaattttgtgtgaccatacaagatcagaaatgaaaagctcagcccacgtcaggaatctcttaaatatgg

SEQ ID NO: 335764 - DNA, 566 bp, Homo sapiens
gagggagactttggagaggggtctttcatcaccagccctacaagagaatggcatttacatgaaaytgattttcagtggtgaaattgtgcttgtgatgttccattgtaaatattgacagcattaaaaggaatgtctaaaagatgggcactaaactgtcaccagcaaaagactgaccagtatttatgctaaattcctcaaattgcatcccttttttacataagtagtgatgcctcatgaaacaaagcagataattcactagagctatgaagtcaaataaaatgaatgcacctacattctctgtcatgtagaaagatatccactgcctctcaccatgacacagattttttttcacccttctttgaggattttcagatagaaaagcttatataggtcccacattgagctcagaggatgaatagacaaaataaatcaccataaaaataaaagaaccttagaaacattaatagattcctggtattgagttgagagtattggatgctgatgatcctttgccatgtaagcttagaaacatgtttatctatttaatgaggaattaaactggcagc

SEQ ID NO: 335765 - DNA, 566 bp, Homo sapiens
gagggagactttggagaggggtctttcatcaccagccctacaagagaatggcatttacatgaaattgattttcagtggtgaaattrtgcttgtgatgttccattgtaaatattgacagcattaaaaggaatgtctaaaagatgggcactaaactgtcaccagcaaaagactgaccagtatttatgctaaattcctcaaattgcatcccttttttacataagtagtgatgcctcatgaaacaaagcagataattcactagagctatgaagtcaaataaaatgaatgcacctacattctctgtcatgtagaaagatatccactgcctctcaccatgacacagattttttttcacccttctttgaggattttcagatagaaaagcttatataggtcccacattgagctcagaggatgaatagacaaaataaatcaccataaaaataaaagaaccttagaaacattaatagattcctggtattgagttgagagtattggatgctgatgatcctttgccatgtaagcttagaaacatgtttatctatttaatgaggaattaaactggcagc

SEQ ID NO: 335766 - DNA, 504 bp, Homo sapiens
caaaacaacaacaataacaacsactaccaccatctctcctggtccttgaagtttgtctctgcgttggacactcctttagtgcttattcaagctgtttagcactctgccttaggtttcacttcctgcttacatggggccttattgtcagtcacaggtgaaagattagtgtcttcttgcatcttttctgggtatatgtcttgttctgggaatgtgtatggtcttctagtttcctcaataatatatgcaagattttttggaagatattattcccattgtatctctttccccaggctttttcttaccatacattttcatatgtctattgcttgctctaactgctatcccttgcttcaggtgtctgtggctagtttatttgctttttgagtctttcaacaaacactgcccaggagtaacattcagctctgggaaaactctgaggtgggtgaaacaaaggcgggtttctgagatgatctcttagagatccaccagacaggtaaaactaga

SEQ ID NO: 335767 - DNA, 610 bp, Homo sapiens
tgtacataactacccccaaaagctacccttaattgagcctttacaatgagccatgctatattggatacttaacaaatattatttcattgaacatatagaactcctacaaagtggggtttagtatcctcatttcttataagaaaactacatctcggagaattcaagtcacttgctcaagttcacccagcaattaagtgtcagagccaggatccacagtaggctgatccagctctaaggtcttggttcctaacctccatcacccatgaaagcacactgtggcagtctgcagcagcctctgcaaactgctcagccaccaccagatatggcgatgcagtgatggaagatattttctggtcatttctattgatgctttgcttattcttcccactttgaccccaatttgggaacccaggaaaccagaactatgccagtgcctacaggttcagggagaaagcargaggaagtcccagaaatcaggactacataagccagcaaaggcaggctcaaggattcctttcctgtccacctccaaggcactgcaggcagccacacccctaattcaatcaaccctgctgctttggcgttcactttaaccaggtttttgttttgt

SEQ ID NO: 335768 - DNA, 604 bp, Homo sapiens
taaagccctcggacagagtcttggcattcactagatggtctccctcctcagacatgtgagtaggatgctcaaacacctagggtaaaatcaagtatgagaagagagaagtatcaagaggccaataaagatgggaatgttcttcgtagcctaactgtgcctaatagaaatctctcccaatgtatgtaataaaatattgtataaataatgatctcacacacgcacaaaaaaaacaggtcatctggtgtgtaagcataaaaatatgagaaaagattacaaagagtatgtagttcagacaattaaaggctgrattatagagatggtagcgtagaaaaaggcactgattcaaaaggcatatacaccaaataactcctcttgcattatgagtacatcattcattcacccacccatccaagacatgcttattgagcataaactaactgttagaaaccattctcagcactggggaatatggtgaactagacagccagatagaatgcacaatcccagggcatatacattttagtagaggagacagaggaaaacatatttatgcatatgtaataaaagatcagatagtgataggacttttgaggtgaaatgaatc

SEQ ID NO: 335769 - DNA, 615 bp, Homo sapiens
ctggcatggaaggtgcatggaaacttgaatcctgcctacctctccagtcttatcgctttttactcatctccttgtatttggtattctagcaaaatcaaactgttttgtttcagtacatgaaaaagactgttattcatgctccagctatgtgacttttttcatgaaatttcctttaccctacttcatcctgctaacgccttttctttctgcagtattcagttaagtggacacttcgtccagtaagcctccctcctcaccaaatgtrtgtcttgagccaccaggttagaagatctcctttttctcacataatttaagaagaaccatgcattgaaattgcctttttattagtttccctgtcagtcaactgtaagcttcttaaaaccaagaaatctgtcctattttattttaatttccagtgtctgcagaaatctggctctgataaatgaatatgtcattgcataagcaagcattcagagaaaagtatgaatataaaaaaataaacacattgacaatgtttcctgagttttttataccgttcctattccccaggtgattctgatgtacctccagggtgagattcatggccttagaccaaatgtaattgacactaagtaa

SEQ ID NO: 335770 - DNA, 615 bp, Homo sapiens
ctggcatggaaggtgcatggaaacttgaatcctgcctacctctccagtcttatcgctttttactcatctccttgtatttggtattctagcaaaatcaaactgttttgtttcagtacatgaaaaagactgttattcatgctccagctatgtgacttttttcatgaaatttcctttaccctacttcatcctgctaacgccttttctttctgcagtattcagttaagtggacacttcgtccagtaagcctccctcctcaccaaatgtatgtcttgwgccaccaggttagaagatctcctttttctcacataatttaagaagaaccatgcattgaaattgcctttttattagtttccctgtcagtcaactgtaagcttcttaaaaccaagaaatctgtcctattttattttaatttccagtgtctgcagaaatctggctctgataaatgaatatgtcattgcataagcaagcattcagagaaaagtatgaatataaaaaaataaacacattgacaatgtttcctgagttttttataccgttcctattccccaggtgattctgatgtacctccagggtgagattcatggccttagaccaaatgtaattgacactaagtaa

SEQ ID NO: 335771 - DNA, 491 bp, Homo sapiens
ttcagaattttctttctcaggtatccagcacaaagttttttaatattcaatattactctcagcaaggccaccgtatgcatcaaaaaggggaatcctgagttagatcaatttaacagaactgaggacagtgcaaaagatattaaactcagggtcgagtaaattctcattaaatagtgttagttcattgattcattttgtataagtaccaaaaactcttttacagaaascaaaagttactcctttaaccttggtacattccctttaaatatatgccttgggcactaggcaagaaggtatggaaggataagctcaggctttccctactggtaatagaaaaacagctcaaagagcagatattttgtttcaggtcatactaaaaataactatataaataacatagaaatgactagataaatatgcatagctacactatgaggggcctaaataaataagcaaatacaactcaatcaagagtttggtcaggaaaagga

SEQ ID NO: 335772 - DNA, 626 bp, Homo sapiens
ttattccaaaatgataatacaaaagacgaaatggataggatgtagctaaaacagttataaaagtaaaaatctatcactttaaataaagaaaagcagaaagatgtgaaatcaacaatctagattttccacttaaaaagcctgaataagtgtaattaaataaggaataagcagagagaaagaagtaacaaatagaagagcakaaattcatatagcaggaaaaaacaaatagcatcataaataaaaagacaaaaaattaatttcaaaaggatttaaaaaaaggggaggggggcatatatctagctagacgaaccaggggataaaaaggaaggaaacacaaattatcaacccaaagaataaaatatggtatatcattttgtgtcctagaaacattaaaaacacaatgaaatgttactgaaaaatacttttattcagtgaatttgaattactatatattggataaagttattgtaaaatgcactttgcaaaactgacacaaaaacgaaaaaaataaaatagccacttatctgataaagaaatcacgataaaactttcccacaaaaaaattttaaaaactaaaagtccagatgtattcaatgataaattttatttaatgtgtaaaaataatt

SEQ ID NO: 335773 - DNA, 577 bp, Homo sapiens
ttcaaacgtgaactgaaacagcttctctccagtgtgaaccagtttgtgtggttttwgttttgagctctcaacaaaagctcttctacattctgtgcagaagtggactccgtgacagtgagtgtgcagatgttttctcatgtcagttatccttgaacatctttgtgcagccttggcgagggccagctattgttcatggaacatcatcttttaaatttttcttggcttcattctggcgaattctgcagttttttgggatctgagctgtcaatgccaggtattcctccaaggaggaagtttctttcctgtcatatactctgaataatcaggaggtgagttctctccagtgatctgtttctcaaccactattttatggttaatgtctttttgttttcatccgagtaccacatggagacagataacttgccctccaggttcctgatctgcactcgcttctgcccccacttcttgttgcccaagatggtgccacatccacccttgccagcccccacgatggtgaccagggcctgctcgaggtggtggtggtggtcgccgctggccagctctggcaccaggatga

SEQ ID NO: 335774 - DNA, 587 bp, Homo sapiens
aaagtgataaaaaatttaagatagataaatagatcaagctatgagtagatattcttcatacaaataggccccaggtcgattccccagatgtgtatacctaaattctttggacctttggtctggggtccttgtttttctccaatgtttgaaaaggcaatttccccttcwgtgagtgaactagggaaaaatactctaattgatttgatcagcaaacccaaaccttcctctatttaaagagaaaccaatttgaacattctgtaactgcatacagatcttgccttgcttgaaggggtctgcctagtaatcccataatacataactctatttcaaatgggattgaggttactgaggcagagcagaaacatttgctatgcttatttgcattaaccaatagttggactggccttggggctcaaagatatttgtggaaggctctatggtctactgagctgatgaaatggcatggctttctgtatacatagagataactttttgataactatgatcactaacaaatgttgctacagagagatttagacaagcatagtctctgattagaagggatttataatctagcatggataata

SEQ ID NO: 335775 - DNA, 422 bp, Homo sapiens
ttttaaaagccacagaacttgcaaaaaaaaaatgttaagggatacaatgggtatggttctgtgaactttttcctctaaattcacccctgcctagaacctacgtcaaaagagaaagggccaagtggctggggagtgaattaggaccatcctgacagatggaagggaggaaagatcrtcaagagactatgtcagtgtgtttgccatactggaagagggccaggtgcccagtctgatgtcaaagcctctaattgtcctgggcagaaatgcttctgattgaaaggacatgatgtagcaaatgcaggtctctgttgaaggaccagcccacactctatcccactcccacccaacacacatatatattaatcataaatgcctccagagacacttaactaaacccctgcaactttccttacctcctccag

SEQ ID NO: 335776 - DNA, 534 bp, Homo sapiens
ttgcaaaaaaaaaatgttaagggatacaatgggtatggttctgtgaactttttcctctaaattcacccctgcctagaacctacgtcaaaagagaaagggccaagtggctggggagtgaattaggaccatcctgacagatggaagggaggaaagatcgtcaagagactatgtcagtgtgtttgccatactggaagagggccaggtgcccagtctgatgtcaaagcctctaattgtcctgggcagaaatgcttctgattgaaaggacatgatgtagcaaatgcaggtctctgttgaaggaccagcccacactctatcccactcccacccaacacacatatatattaatcataaatgcctccagagacacttaactaaacccctgcaactttccttacctcctccaggcttgcacagacattttaaaaagttacattttagccagagctgaatacyacaacatattatgtagatgaggaaacaaccaagtccacccaggtcctttgtgggtatctggcatgagaaggccagtggtcc

SEQ ID NO: 335777 - DNA, 595 bp, Homo sapiens
tccatggggagctgtagaactcaagtcaacatttattttcatctctcccatctctacagattattctaccagcatagagagcctatgacctaccttttattactggggaaaagggcactttcattttattataccctctctttctccttctgtattctgtgacttacataaaagctctattatctgagtcaggcacgcttggttcttattaggagaaggatgcttttggaatttagaaaactctcttctctctcaataaagtcttgytttgaagacactgtctagttaggatacataagatgccaatttgtaactagagtgagcaatgacctctttgctctcgatgtccctgaagcaaataaatgaataattgtgcttgagtaaatgttacaggacatttaggccccagagacaatttagaataaaaatacattagtgtattatctcaatattattttcacattatatcttctgatattttaatctttctagggagtaggttattaagataataggtagaagtgcagtgatgtattcttaaattcatagatgcttaaaattcaaagagaccacaggactaggtggttgacacatg

SEQ ID NO: 335778 - DNA, 603 bp, Homo sapiens
aaccaattcaatagcagactggctttttcctgtgtctagctgaaacctgccttcatgatgcttctacctgatcactactctgccctayggtgatgataagaacaagtgatatttcgaacaagtggtatttcttttctacagttgtccttcagttacctgaagacaaacaccacatttcccccaaactttcctttgttgtccttgttattttgtattgttttatttgtcccatcaggctgcatctgaaatactctggattaattctgttctgaattcacctccttttataaatgttcctcttaaggcagtgatcccaggataaaacatatttccagtgttgtaccaaatctaaagaaacgattcaaatgaccatgtttcttagttagcatatcgagcttcaattaactagtctttgtggagacaacaatattaataaagaagagtttctatagaattgggagtcttgtgggccataatacgttggctgtaattttgcattttaatataagctatgtaacataggcatttaatctgcatacacatagagctagctatgaatacacagatatgtgcaactgaagactccacagctacagcacagtt

SEQ ID NO: 335779 - DNA, 555 bp, Homo sapiens
attatattaaaaggaaaatcaagactacagagtttgcaagctctggaatcagcaaggctggattcacactaccagttctgtgacctgggaatattaattaaactcactaagcttgtgttatctgctataaaatgaaaataataatcctatcaaaattacaatgtggtttatttaaattaggcaatccatataaaatacttagcttgcggctacatagaataagtgcttaataagtttctatcatcatcatcatcattgtattattattatggtcattatatgagaaaggaagagactawgagcagggtagtgggaatcagaagaagagcaatggttagaaatagcttaacattttgtgttgattgtgattactctgtgactgagtggattgaggctgggaccagaattttagttaggatacaacacatgaatttttgtacatgttgtactttgataacttagagaaccatgagatgctaccacttcaaggctatgcattggaaaaagctctgggacttttccatgggggtaaaaagcagggatctatgacccagt

SEQ ID NO: 335780 - DNA, 586 bp, Homo sapiens
tacctatgtaacaaatctgcacattctccacatataacctgaaacttaaagtaaaattaaaaataaaaataaataaattaaaaacttttagtatggaaacaacctatcggtttcatattctttttaatgtaataaatttattcatagtatcttggaaataaaactgagcatcaagcaattgttacacctggtatagcagaccttgttagtgttagcaatattaaacctaatacttaggcttgttaaaactaggccatgcaacaaaaygtgaacttctaaccaattctatcccacccactatagtgctggacaggataaacctgttacttttaacataataggaaaaaaacattaagccaagacatagtagcttatttttatgagaaagagtttctttttatgcacttgaattaggcggaactatttcagttttgaataacgaaacttcaactcaaacaggcctcagctaaaaagggagtttattactaatattgcaaagtgttcaaactaagtcacataaaatctgtttcttgctatttctcgattcttctttctttggtgttaactaatttttggaaaacatcat

SEQ ID NO: 335781 - DNA, 586 bp, Homo sapiens
tacctatgtaacaaatctgcacattctccacatataacctgaaacttaaagtaaaattaaaaataaaaataaataaattaaaaacttttagtatggaaacaacctatcggtttcatattctttttaatgtaataaatttattcatagtatcttggaaataaaactgagcatcaagcaattgttacacctggtatagcagaccttgttagtgttagcaatattaaacctaatacttaggcttgttaaaactaggccatgcaacaaaacgtgaacttctaaccaattctatcccacccactatagtgctggacaggataaacctgttacttttaacataataggaaaaaaacattaagccaagacatagtagcttatttttatgagaaagagtttctttttatgcacttgaattaggcggaactatttcagttttgaataacraaacttcaactcaaacaggcctcagctaaaaagggagtttattactaatattgcaaagtgttcaaactaagtcacataaaatctgtttcttgctatttctcgattcttctttctttggtgttaactaatttttggaaaacatcat

SEQ ID NO: 335782 - DNA, 586 bp, Homo sapiens
  misc_feature (1)...(586): n = A,T,C or G
tattttaacaactggtgcagtggataccattagccagttcaagaactgcctcagtttaaaagagctatgtcttcctgggatgacctatattcaatgacagatggatgtgrgggtttagttctagacgccccatgggattggctaaagctgtcatttgtcgctgaatcacagttggctttttctgcccaatcccgcttcctttccttttattgcataagtgtgatatcaaggctccccacagtgaatgacctgcctgctaactgccatctcacactctgcacctcaggaaacacagcctgatacaactggtgtgtggcaaaaccatgtctacatattatctgggctgaataggatcctgtgcatgcttttaaaagtaaagagtagtataacaaataggtgctcaatgagtatttgttgagggaaagtttcattctcttanaataaagcatctttgtaagaaagcatcttcctattttgttgtctggtgataactaaattgtctccctactagtctttctaactttgtgcttctagcaggagacaatctaagattgaagacccctagtacgtgattaggtgttgttat

SEQ ID NO: 335783 - DNA, 586 bp, Homo sapiens
  misc_feature (1)...(586): n = A,T,C or G
tattttaacaactggtgcagtggataccattagccagttcaagaactgcctcagtttaaaagagctatgtcttcctgggatgacctatattcaatgacagatggatgtgggggtttagttctagacgccccatgggattggctaaagctgtcatttgtcgctgaatcacagttggctttttctgcccaatcccgcttccttyccttttattgcataagtgtgatatcaaggctccccacagtgaatgacctgcctgctaactgccatctcacactctgcacctcaggaaacacagcctgatacaactggtgtgtggcaaaaccatgtctacatattatctgggctgaataggatcctgtgcatgcttttaaaagtaaagagtagtataacaaataggtgctcaatgagtatttgttgagggaaagtttcattctcttanaataaagcatctttgtaagaaagcatcttcctattttgttgtctggtgataactaaattgtctccctactagtctttctaactttgtgcttctagcaggagacaatctaagattgaagacccctagtacgtgattaggtgttgttat

SEQ ID NO: 335784 - DNA, 593 bp, Homo sapiens
cataaacctttggaggatatgattgcactcacacaacagaaattaacactgatctcctttatatcaacccataaatgtggctttcattattctgctaaattaactgtggccttcccacattctcaactattccttcctcactttacaattcagtcttacttataatgttaaaaaatagtatcaactttaacattctaaaagacaaaactcttttaaatcctaaagtctgcatgaaaatttttgaaaaygttttgcttcaaagtttgaattcaactcttgtctcccaacaatacaaatacatcgtaatacttaaagataaataataaaaatattttatacttccctccacataacagaggctgcttgagcagaaggctctgtaattgctttgacaattaaaaacatacaaataccaagctgctgaaagaagattatctaagtccagtaatttgctgttctacttagcagacagactgcttaagggcatgtcacaagaacatacaatttgttgcataatggtagtgacattttcagtcattattactgctatagattaaagtcaaccaaatgtgttatgttaaatgctaatatgg

SEQ ID NO: 335785 - DNA, 638 bp, Homo sapiens
  misc_feature (1)...(638): n = A,T,C or G
caatgaatgttacacccattgtcccagaatcttagtgcacagctccaaggaaaaggggtgggtgacacttgactttccgcgtggctctgcagggtagaagaaaggtgcatcaacctgaaacatcccattcatggaggaaagagaaaaaggagtttgcatccaatgccctagcacatcacagcacttacctaggagaaaggaatgggcagctctcagcacccaacatggttttatgggataaagagaaggcatgtagatttaagactttaccccaggagggaawaagaggagttgagtggatgtatccacagaaaagatttaagagatccctataatctctagctgggctgactgatgaaggtcttttcatcccaaagcaagtttataaagactggaagagggggactatattttttcaactgtgtagacatcaatgcaaggttatncatattantgataattanggtaacatgacaccaccaagggaccaaaataaagtactaataactgacctaaatccatggagttgtatgattgcttgatattaattcaaattattcattgttaggtggtcagcgagccacaagaaacacagacatgcaactaaaagaaataaactaattattagggaaatgcag

SEQ ID NO: 335786 - DNA, 538 bp, Homo sapiens
acgatgtctgccaccagctggttttgtgacttttagcaagttccttaactcaccttgctctcagagccctatccttaaaatgagagcactgagcaaagatggttacaatggactcttcccaactttaacattatacaaatctgcaaactattcaaaagtctttgcccttaaagaaattcaaccagaccaagagaaaaacaagcagtgcctgttgctaaaattctcagaattgctgaaatgctcagagtctgagaaggtaatgaaatttgtttcaggctagtgcaaatcaatgtaatcctattaagcaggttagtataattgagcaatacccttgggagtacaagtagccaattcaaatttacacaaataagaaagaaaatcacttttttccaaagctcctatttcwgaaatcagaaaactgtttttgtaacatgattatctgactttctactataaacttaagaatagtaatacacgcttaagactgggcctgtattccctcagctatttatttaatctagatgtagaaagcccagct

SEQ ID NO: 335787 - DNA, 589 bp, Homo sapiens
tgatggaaataaacaaatagaaggcagaactgaaagccaaaagcacagtgcagtgactgacaaatgaggtggagaacagaaaaaaaaaaatgtcccatttctgttgcctcctccaaccctgctttcttgacttagtgaaaggcataatcaaagaaaagatgaatttcaaaagcctgagcaaggtgccctcattgaatgtcaatgtgaatgtccatttgtctctaatagaagacctatcattcatcttgaaattggggttatcagactgataagagccaagagagttattargctaactgaagctaggatgcccaggaggagaaggaaaagaaaagactgatacatgtgacagacatgttaaagagaggcagtataattttatgtcaaagctagctagtgtgtcaagcctccatcaccttcaaacgtcatgacaattattcctgtccctctaagcaagaacacatgcttgacctacaaagagaattcagctcctcttttcaatttaaattattttccttttgtctccacaacccccaacttacaatattttatagacattttataaccttactacgatttactattatca

SEQ ID NO: 335788 - DNA, 597 bp, Homo sapiens
gtttcctagcattcttatttcacagtgggccatgaacacagggtttttctctatagccccatgagacatttggaagctatgctcagtatctcagcttttcagtcattactttttagtcagctcttcaggttctcatctgcatcctttaaatcaataattttctggaagaaaaaaagaacaccaaattttagattacttcttcaggcattctatttctcaaagaccttgacaactcaataactcactttcttgacttctgtctgatgtgtccttaagataaatgctttttcatatttttatttttttttctagttsttctcagtaagttgatctattacaatattggcagaatccgaaatctgactattttgctctataatatactgatatagtttggatatttgtccccttcaaacctcgtgttgaaacgtgatccccaatgttgaaggtagagccctgtgggaggtgcttgggtcacgggggcaggtctctcatgaatggctgggtgccctccctatggtaatgagttactatgagagctgggtgtttaaaagagcctagcacctaccctgctttctcgtgccccctttcccatgt

SEQ ID NO: 335789 - DNA, 522 bp, Homo sapiens
tgaaagacttatacactgaaaacaacaaaatattgcttaaagaatttaaagaagayctaaataaattgaaagacatctcatgtttatgaattgggtgacttagtattgttaagatgacaatactatgcagagtgagctacaaattaattcaacccctataaaaattttaagccattttgcagaactggaaaagccaaacctcaaattcatatggaatttcaaggggtctcgaatagtcaacacaatcttgaaaaataagaacaaaattggaggaatcccacttgatttcaaaactttctacaaagctacagtagacatctctaaccaattgatttttcaacaagggtgccaagtccattcagtggggaaatagtctattcaacaaatgctgcttggacaactaaattttcacaggcagaagaatgaggttggacccctatctcacaccatattaagaaaaagaactcaaaatagattaatgactaaatgtaagagttaaaaccataaaattcttagaagaaa

SEQ ID NO: 335790 - DNA, 657 bp, Homo sapiens
aaaaattggaaacctctacattgctggtggatatataaaaaattatgtagccactgaagaaaacatttgagtggtttctccaaaagctaaacatataattattatatcatccagatatttcacacctaagaatacacccaaaataattaaaagcaagtactcaaaaagatgtgttcatagcagcattactcacaatakacaaaaggtggaaataactcaagcatctgtcaacagactaacggaaaattaatgcctggaccatggaatattattcagctgtaaaacggaattaagtcttgttatatgctacaatatggacaaaacttgaaaacagtatgcaaagcaaaataagccagacacaaaagaacaaatactgaaaaatttcacttatataaaggatctagaatgagcaaagagacagagaaagaaagtatattagcaattaccaagggcaaagagaggagagaatgggatgttactgcttaatggttgaagagtttctgtgtaaggtcattaaaaatttcaagaaatagtggtgatgtttgcacaatggtgtgaatgtacacttttattaaaatggcaaaatttgttgtatatttatatattacttatttgttatatacattacatagtatatattatgtaagatgtatttac

SEQ ID NO: 335791 - DNA, 657 bp, Homo sapiens
aaaaattggaaacctctacattgctggtggatatataaaaaattatgtagccactgaagaaaacatttgagtggtttctccaaaagctaaacatataattattatatcatccagatatttcacacctaagaatacacccaaaataattaaaagcaagtactcaaaaagatgtgttcatagcagcattactcacaatatacaaaaggtggaaataactcaagcatctgtcaacagactaayggaaaattaatgcctggaccatggaatattattcagctgtaaaacggaattaagtcttgttatatgctacaatatggacaaaacttgaaaacagtatgcaaagcaaaataagccagacacaaaagaacaaatactgaaaaatttcacttatataaaggatctagaatgagcaaagagacagagaaagaaagtatattagcaattaccaagggcaaagagaggagagaatgggatgttactgcttaatggttgaagagtttctgtgtaaggtcattaaaaatttcaagaaatagtggtgatgtttgcacaatggtgtgaatgtacacttttattaaaatggcaaaatttgttgtatatttatatattacttatttgttatatacattacatagtatatattatgtaagatgtatttac

SEQ ID NO: 335792 - DNA, 657 bp, Homo sapiens
aaaaattggaaacctctacattgctggtggatatataaaaaattatgtagccactgaagaaaacatttgagtggtttctccaaaagctaaacatataattattatatcatccagatatttcacacctaagaatacacccaaaataattaaaagcaagtactcaaaaagatgtgttcatagcagcattactcacaatatacaaaaggtggaaataactcaagcatctgtcaacagactaacggaaaattaatgcctggaccatggaatattattcagctgtaaaacggaattaagtcttgttatatgctacaatatggacaaaacttgaaaacagtatgcaaagcaaaataagccagacacaaaagaacaaatactgaaaaatttcacttatataaaggatctagaatgagcaaagagacagagaaagaaagtatattagcaattaccaagggcaaagagaggagagaatgggatgttactgcttaatggttgaagagtttctgtgtaaggtcattaaaaatttcaagaaatagtggtgrtgtttgcacaatggtgtgaatgtacacttttattaaaatggcaaaatttgttgtatatttatatattacttatttgttatatacattacatagtatatattatgtaagatgtatttac

SEQ ID NO: 335793 - DNA, 524 bp, Homo sapiens
ctgggcaacatattgagactccatctctaataaaaaataaaaagtcataaaatgttggtgtaagtttcatttgatattatcttataattgagaaaatactacatttttattacgtatatctgtaattttaataggcaaatattctttgcataatcagaataaactaattgaactttgaaaatgtaaattaaaatacagtgactaaaataaataggtgagtcacctagagacttttataggcaatctacaaataattttctagaaactatgcaattactattcagtggataaataacagttttggcaagcacgtttggtggcatggaaacagatttatgggaaaaaaaagattagcaaacattatgtatagtatgaccctttttaaaaccaaaatattaacagtgatgggttaatttttttgtctcygtattttctacaatcaatgttttacactttcattcaaaaatatttattgtgtttctattatatgttgattacacagatattaagctaataattatttt

SEQ ID NO: 335794 - DNA, 534 bp, Homo sapiens
cattgacctaatactgtctgtgagatgttgaagtcccccactattcttgtgtagaagtctaagtctctttgaaggtctctaaaaactcgctttatgaaactgggtgctcctgtattgggtgcacatatatttagaatagttaggtcttcttattgaattgaaacctttaccattatgtaatgcccttatttgtcttttttgatctttgttggtttaaagtctgttttttttttttctgaaattagaattgcaaccactgttttttctgatttccacttgcttggtagattttttttccattttttttattttgagcctatgggtatgattgcttgtaagataggtctctcaaagacagcataacaatgaatcttgggtctttatccagcttgccactctgtgcctttcactgaagcatttagccaatttacattcaaggttagtamtgaaatgtgtggatttgatcctgttaccatgatgctagtggttattatgcagacttgtttgtatgattgctttatagtgtcactggtc

SEQ ID NO: 335795 - DNA, 623 bp, Homo sapiens
ttaacagtgatgggttaatttttttgtctctgtattttctacaatcaatgttttacactttcattcaaaaatatttattgtgtttctattatatgttgattacacagatattaagctaataattattttggcaatgttaaaatgaataaacaaaagtgaatttaaaaaataaagatgccaggtacattggctcatgcctgtaatcccagaactttgggaggccgaggtgggtggatcatgagttcaggagttcaagaccagcctggccaagacggtgaaaccttgtctctactaaaaatacaaaaattagctgggtgtggtggtgggcgcctgtaattccagctactcrggaggttgaggcagagaatttcttgaacccgggaggcagaggttgcagtgagcccagatcataccactgcaatccagcctgtgcaacagagcgagactccgtctcaataacaataaaataaagagtaattttgctggattggagctacttcacccatacagcataactccaacaactagcaagttgattggccccaagtgcccctgcctaatgtcttggtcctacctttgataggatctgcttacttgctctagttcccaaaggggaattatca

SEQ ID NO: 335796 - DNA, 623 bp, Homo sapiens
ttaacagtgatgggttaatttttttgtctctgtattttctacaatcaatgttttacactttcattcaaaaatatttattgtgtttctattatatgttgattacacagatattaagctaataattattttggcaatgttaaaatgaataaacaaaagtgaatttaaaaaataaagatgccaggtacattggctcatgcctgtaatcccagaactttgggaggccgaggtgggtggatcatgagttcaggagttcaagaccagcctggccaagacggtgaaaccttgtctctactaaaaatacaaaaattagctgggtgtggtggtgggcgcctgtaattccagctactcgggaggttgaggcagagaatttcttgaacccgggaggcagaggttgcagtgagcccagatcatrccactgcaatccagcctgtgcaacagagcgagactccgtctcaataacaataaaataaagagtaattttgctggattggagctacttcacccatacagcataactccaacaactagcaagttgattggccccaagtgcccctgcctaatgtcttggtcctacctttgataggatctgcttacttgctctagttcccaaaggggaattatca

SEQ ID NO: 335797 - DNA, 534 bp, Homo sapiens
cattgacctaatactgtctgtgagatgttgaagtcccccactattcttgtgtagaagtctaagtctctttgaaggtctctaaaaactcgctttatgaaactgggtgctcctgtattgggtgcacatatatttagaatagttaggtcttcttattgaattgaaacctttaccattatgtaatgcccttatttgtcttttttgatctttgttggtttaaagtctgttttttttttttctgaaattagaattgcaaccactgttttttctgatttccacttgcttggtagattttttttccattttttttattttgagcctatgggtatgattgcttgtaagataggtctctcaaagacagcataacaatgaatcttgggtctttatccagcttgccactctgtgcctttcactgaagcatttagccaatttacattcaaggttagtactgaaatgtgtggatttgatcctgtyaccatgatgctagtggttattatgcagacttgtttgtatgattgctttatagtgtcactggtc

SEQ ID NO: 335798 - DNA, 567 bp, Homo sapiens
tccttgtccatttgagaaaacacagacatgcaaatttgcatcttttataaatttcaacccatgtgcctctagcatacaccccaagataattctctgaagtctgctatacctaaaacatacgttctcagttttgaagagtataatttgagagggcaaggatacttacttcatctttgcacacaaattgttcctctttcaaaggcaagatggcatatatttcaaagtgactatgatatggttccactctgtgtccccacccaaatctcatctcaaattgtaatcyccacgtgttgagggagggacttgtaatccccacatgtcgagggagagaggtgattggatcatgaggtcagttttccccatgctgttcttctgacaatgactgagttctcacaggagctgatggttttataagtgtttggcagtctctccttcacacacttctctctcctgccaccttgtgaagaaggtgcctgcttccccttccaccatgattgtaagtctcctgaggcctccccagacatgcagaactgtgagtaaattaaacctcatttgtttataaattat

SEQ ID NO: 335799 - DNA, 458 bp, Homo sapiens
tctcttagcaaaatggcagagtctattttcccacttcttgaatttggactgacaccgtgatttccatcagccaatggaacattaacaagtctgactcaggaaagcttgaaaagtgcccatacatttctgctcaatctcgccctgtgctggtaccataasagcgtgccctggcctacctattgaaagatgaaaaataggagacaggtcacttttcccaggtgaaaccaaactgtgctagttcagcccacagcccactgacataacagctctgccttgcagaagcacagcagaccacagacacatgagcaagcacagcccagatcctcagtagactagattagctgaaccccccagactcatgagctaaatgatatgttaatgttgcatgccactgagattttgtggttggttgttattcagcatcattgtgtcaatagataactgatgcactcgcatca

SEQ ID NO: 335800 - DNA, 509 bp, Homo sapiens
gcatcataatttccaaaccactccatttgtgattacatttggttgagtcatgttgacagaggagtactcagacagttctgaggccagtgagataaaggtgtagcatagacagccaggtgaacacttgctcagcttgtgaataagtgtggggctcagatggtaggtgtaattakttcagaaatggtttctaatttataattatattaaatcagaaagcaagcagatgcaggacccagggcaggcttggaatatggttagactgatgtcaaccaaataataagaaatctgagtcaatagcagcataataaatgaaacaaactttttttttttttttgaacaggtgatggcagctgggactggtctgggctggactgggttagcataggactgggcttcagaagcaagtggcaacagacaattctcctggcagtagtacctagtcctctccagtagtaaacacacaggcaacttccagagaggccttgcacaccctgacttgtgagtcctgc

SEQ ID NO: 335801 - DNA, 509 bp, Homo sapiens
gcatcataatttccaaaccactccatttgtgattacatttggttgagtcatgttgacagaggagtactcagacagttctgaggccagtgagataaaggtgtagcatagacagccaggtgaacacttgctcagcttgtgaataagtgtggggctcagatggtaggtgtaattagttcagaaatggtttctaatttataattatattaaatcagaaagcaagcagatgcaggacccagggcaggcttggaatatggttagactgatgtcaaccaaataataagaaatctgagtcaatagcagcataataaatgaaacaaactttttttttttttttgaacaggtgatggcagctgggactggtctgggctggactgggttagcataggactgggcttcagaagcaagtggcaacagacaattctcctggcagtagtacctagtcctctccagtrgtaaacacacaggcaacttccagagaggccttgcacaccctgacttgtgagtcctgc

SEQ ID NO: 335802 - DNA, 591 bp, Homo sapiens
attgtgtaaattaccgtgttggcaatattttagcctctcatactttgaatcaatgcccagaataattctaacaagattttgattctytggaagcaacctcaaggaagaaagcccttcaaaatgcctacatattcatttaaacttcagctgggaaaaacatctcctccaggtcaagtataaggtgaatccaaagggtaagtgatacttatctcagctccctgctaatatctatatcctcctttgctgccagaaataatcacagggacttgccagttgaagacacattcctagacctttctacctcaggatgtaagttctagaagtggaatccaatttgaggtctgctagaaaccacaaggaaatatttgagtccagagatccagctgcatcaccaagtctgtggtttaattttatcacccaaaggagatactttgatttgcagccaggaaatgtctcatttgttagtgttagagataatcaggatgagtcaaatggaaactggcctgccaaatgagtcaggcaagttgctagggacgtggccacagtgccttgtggtcatagaaggcccagcaaagatgtggcctttatgca

SEQ ID NO: 335803 - DNA, 589 bp, Homo sapiens
tcagttagcagtgaaagaaaaatcacaagagaaaacactttctttttgatgtcttttaatatatttggatggagttctgttgcaagatttttcactggagctgtttctctgaattttcacctcaaattccacttgaataatgacaattccaagtcttccttctttcactgcctggcaggcctagcagattttgacagtgccagaaacttgccaatatttttgatcaaaggaataattgattcaattgaaatcagtgtcactctttttgctatctttactcatttagtgagtgctactctaagaagggctctgctctgggcccagggattatgagaaataaygaaaattgcttgagttttgccatcaaaatcataaatctcctctgaacagcagaagaaacatcagactccaggacagaagaagcataaaacttgaactggagattcatagccaatgataatatcaaaggtggcatgcaccttgatggtgatcaagttcatgtgaccattcttaactgtccagttggctttctgcaggtcagatttcgaaaatccctcgccaggaactcatcttataactcattgcctct

SEQ ID NO: 335804 - DNA, 455 bp, Homo sapiens
atgacacaaatctatcaaaatgagttctgtttcctcctttgcagccactataatccatttctgtgctgttctatattcatgagctaaatagacatcatctcttggagtttatcttctcaggaaaaaagctccagtttttaaattatgactgattcataaaattatgatttcctggagcargaaaaaatataggaaattgtgcatagtttcaaatacagtctttaaaccagagtctagctcatctcagcttattatcttgtacacattagatgctccagaagatttgtgtgttggctgtttggttgggttgatgggtatattatggggacaaggaccacaaaaccatctggactccaggagtgatggagaatacctggctccatataagtcaataataaaacagtgctcaaggctggtgtttttcctaagagactagagagaggtgggaaaatgag

SEQ ID NO: 335805 - DNA, 594 bp, Homo sapiens
ttttcactcctaagccaaaaatattacagataggccattttgaagcttcttttttacttattattttaacatgcaacagcaattgtatacatatgcaagaagaaaaactcagtgctaggcttattacatatatttttttctcaagcacataaagtcaattatgtttattttaaagaagaaaaatgctgtgctaggctttttaaatatggaattcttttagaaatgtttttatgttggaaaaatgagatagaggagtacatttaattttccccaatgtggtctgatatatagcaagtgtcactaatagactccagttcatcatcatcatcattatcatcaacataatgatgatgatggtaatgatgggataatagcaataatggtaatagatatgactgaaagaattccagtctgagctgaatcatgtttacccgtgtattcagacaagtctggaatgtctggaagaggtagtgtctatttaygtgagtgatcatgaagccttcagcaagagaggataccttgcaggaagacaaatgggtgaacaaaattggttcaaagatgatgggcaagtgagaaaaggaaagtgactttgga

SEQ ID NO: 335806 - DNA, 481 bp, Homo sapiens
tggctaggtcagcatggcttggtattgatgaaaacgatgtctcagagaggagaggcttataatagtytttaggatttcagcagcaggaatttgtgaatattctcatgggggcagggggccttctattccttggaaatggtaagtccaaccatttccagtttctgtgtctcttctttcctttgtgaaaattcaagagaaagtgtaaaatgatctaacttagaccaactgtctactcttcgcttgttttagtcagaatcatggagcagagatgtgatgttggggcccatctattccctgtggggccaggcccagagggtaagctggtggccgccatatccatatctattaaactagcccagcagcagcacccgtgctcagtgtttctgtgaatgtgtgtgtgtgtgcctacatgctcatgtgtgtgaagtgtcaaataatacaaacagccttctgtaactaatgtttgagatttaataaaacc

SEQ ID NO: 335807 - DNA, 550 bp, Homo sapiens
agatttattttctatcagttagctgagcaagatctgtgatgatagggacaactgtcacttctttatgaaagttagaagcctgacaaggaggcatgcccagctgaaggttctgggcaamgcctggccaagaaaatccacaaacttcaagttttgaaccattttagctcgtatatatgtggacaaatcaggcttgaatattcatataacagagccacagcctaggcgtattatgttttgctttgttttttacaataggtacaaccaaatactcatctcatctgtaagaccaaacagagccaaataataaaaacagctctattaagagtccatagaacactgtcgtgagcaatataatttcttggtacatacttcaagttaaaatgattgtatatctggtttaaaataaatatgtgcttaggtaactgaacaagttaattatttaatttttgagtcaattagatgatagaggacattcaccaaaaaggatggcctgtttcaaaatggtttatgtagggtccttctttttggtgtgaactagatagttgctatg

SEQ ID NO: 335808 - DNA, 550 bp, Homo sapiens
agatttattttctatcagttagctgagcaagatctgtgatgatagggacaactgtcacttctttatgaaagttagaagcctgacaaggaggcatgcccagctgaaggttctgggcaacgcctggccaagaaaatccacaaacttcaagttttgaaccattttagctcrtatatatgtggacaaatcaggcttgaatattcatataacagagccacagcctaggcgtattatgttttgctttgttttttacaataggtacaaccaaatactcatctcatctgtaagaccaaacagagccaaataataaaaacagctctattaagagtccatagaacactgtcgtgagcaatataatttcttggtacatacttcaagttaaaatgattgtatatctggtttaaaataaatatgtgcttaggtaactgaacaagttaattatttaatttttgagtcaattagatgatagaggacattcaccaaaaaggatggcctgtttcaaaatggtttatgtagggtccttctttttggtgtgaactagatagttgctatg

SEQ ID NO: 335809 - DNA, 606 bp, Homo sapiens
gaaacaggaggatgactcactggaatgcctggaagggacactggaaggaaaaggaggaggttcttttcatcctacttcacaaagctgtctatggaaccgtgaccataggtctcaaaacagttttgcatgtcatcttcccccttcctcactcatggcacaagtcagtgtaactggtctataggctaaagccagagaaagacagatactgtaagattgctctctaaagactgattctcaatcttttatcctcttgccttttctactataaagactgggaaagctaaatatgcacagtcccagcttcctttggtacttgcgttgctaagtggagaaactttgagcaatgagacctaagggaggatcttctgaggggtgtatggacaagctttggcttttctgatgaaatggatttgatgcggttggctcagatctttrcctctctgctttgtcttgcttagaatctgtgtgtatggctggaggagcagcagctttctcatgctcatgaatttaatgagctcacatactaagaatggcagcacagatagtaggaagggccttactcctgatgacatctctcagcccctataccattcttggactgcccag

SEQ ID NO: 335810 - DNA, 634 bp, Homo sapiens
gctccatatctatagtggcttggctgaggttctgcctcatgtcattttcagcctaggacccagaaaggtggagtagtttccagctgaatatttccagttgctcagacaaagaaaaaatagcccatagcaaagcaggtgctggctcttaaaacttctgtctggaagagacacatgtcgcttctgctcacattttactgaccaaagcaaatcacagggccctgcctgagtgcagtagtgtggggaaatgccgtccttccacacasaggggcaccaaatatggatttggaaaaaggaatacagactaccataccatctgagaaaagtagattcttgaaagaatgatactagttaatgacaagtactctgcccagacctacccttatgtatttgctgggttgagagcctttcacagaagaaggggccaacaaacttcttgagcagaaaatgatagggtcaaagcaagaagtaagagttttggaaagttctagcttctgggaaaaaatgtggagcataaaagtacaaaagaattgagttattaactcaaggaaagtcagaaaatggctggattagaatagtggttggtacatagactttggagtcaaaccacctgttttcaaagtagaatgcactgctt

SEQ ID NO: 335811 - DNA, 634 bp, Homo sapiens
gctccatatctatagtggcttggctgaggttctgcctcatgtcattttcagcctaggacccagaaaggtggagtagtttccagctgaatatttccagttgctcagacaaagaaaaaatagcccatagcaaagcaggtgctggctcttaaaacttctgtctggaagagacacatgtcgcttctgctcacattttactgaccaaagcaaatcacagggccctgcctgagtgcagtagtgtggggaaatgccgtccttccacacagaggggcaccaaatatggatttggaaaaaggaatacagactaccataccatctgagaaaagtagattcttgaaagaatgatactagttaatgacaagtactctgcccagacctacccttatgtatttgctgggttgagagcctttcacagaagaaggggccaacaaacttcttgagcagaaaatgatagggtcaaagcaagaagtaagagttttggaaagttctagcttctgggaaaaaatgtggagcataaaagtacaaaagaattgagttattaactcaaggaaagtcagaaaatggctggattagaatagtggttggtacwtagactttggagtcaaaccacctgttttcaaagtagaatgcactgctt

SEQ ID NO: 335812 - DNA, 388 bp, Homo sapiens
caggctggtctagaactcctgggcttgagtgatccgcccgcctcagcctcccacagtgttgggattataagcgtgagccactgtagccagactataagattctttgtaaggaaactcttttgcttctataatctcatcacgagagttccarcctcctgacctaatcaccttccaaaggtcaaccacctaatactatcacattgagggttagggtttcaacacatgagttttgaggagggcacaaacattcagtccataacacagtctctaatctcttcagtcatcagctggggacctggaactcgggactgcgggcctccttgatgaggcaaggatgtagggtaagaaagaggaagtggccagggtcaaatgtgaggtacatttcacc

SEQ ID NO: 335813 - DNA, 388 bp, Homo sapiens
caggctggtctagaactcctgggcttgagtgatccgcccgcctcagcctcccacagtgttgggattataagcgtgagccactgtagccagactataagattctttgtaaggaaactcttttgcttctataatctcatcacgagagttccaacctcctgacctaatcaccttccaaaggtcaaccacctaatactatcacattgagggttagggtttcaacacatgagttttgaggagggcacaaacattcagtccataacacagtctctaatctcttcagtcatcagctggggacctggaactcgggactgcgggcctccttgatgaggcaaggatgtagggtaagaaagaggaagtggccagggkcaaatgtgaggtacatttcacc

SEQ ID NO: 335814 - DNA, 621 bp, Homo sapiens
tctgggttttgtgtattatgaataaagcagctatcaacatttatgtacagattattttttggtgaacactttcatatctctggaataaataccttaagagtgcaattgccaaatcatatgacaagtgcatatttaatttttaattttgtaggaaactgccaagcattttttcagagtggctgtgtcattttacattcccatcagcaacgcaagaatgatccaatttctctgcattcttgctcacatttggtgttatcattctttaaaattttttttaaccattttttttttcttgaggcggagtcttgctctgttgcccaggctggagtgcagtggcgtgatcttggctcactgcaagctctgcctccagggttcacgccattctcctgcctcagcctcccgagtagctgggactacaggcgcctgccaccacaccrggctaattttttatttttgtatttttagtagagacggggtttcaccgtgttagccaggatggtctccatctcctgaccttgtgatccgcccctctcggcctccgaaagcgctgggattacaggcgtgagccactgcacccggccagccatttttaacattttggttttaatgtacagtgttcta

SEQ ID NO: 335815 - DNA, 512 bp, Homo sapiens
ttgctgatggaattggaacaactactttggagcacaacttgacaaggtctagtaaagctgaagatgtacatacctaacaccttataattccagtcctatgtgcgtggcttagagaaaccctctgacacgcatgcaaggagaaataagaagtgttaatggtagcattgtttataaaaacaaaacgatgggaagccaaatatacttaaataaaagaaaggatayatttttatatcgtatgcataaaatgaaacatggaacagccgtttaaatgagaaaactatatctacttgtagcaacagggataaatttcaaaaacataatgttgacaaaaaaagaaagttgcaaaaacattagtacactatgatatatatatctaattcaaaaacatttaaaaatatgacatgtttatagaaacaatatggaaatttatgttttactgaacaatgaaacatttagtttgtatatatatatgtataaaatcatgcatataaaaaacagcaaaatcttgtttg

SEQ ID NO: 335816 - DNA, 568 bp, Homo sapiens
catttgagtctggacatcaaatgagtggatacagtgctttccaggtatgctggacacttgaaagctccctggacagagggtaagagattcagttaccttgggtggagacaagggcatcgagggagacctttgctatctgacctaggtagacctaaagaaaacccatggagaatttgttcttgtaccaacacttcatcacaggttgcaaacttcccttcaccaatggggtgtatgtttctggaaactggagcaatgttagcaattttcaacattgctgtacgctcctaaggtcacaggatcacctgaaaacacattcacactggaagtcagcattctcttcctttcaaatccccccagatcatggcaaatttctaggctttttattttttaatgactatccctcatgtagttgtggatcagagcccacaggttgcacagatgytgatgatgttcatcctaacattatagaattccccaattcctggttgtctgtcagtctttaccctgtagctcctcaagcatttcctagaaagaacctgaaactactataaaacttatattttaatat

SEQ ID NO: 335817 - DNA, 560 bp, Homo sapiens
atgccaaaagccataatattttattttaatacaacaaagactatatcaaacatcctggaatctggatcaaagtacctaagaattgaattattttgacaaaatacaggttggacactcatatcctttttgtaaggaaatgaaaattccttacaaaaaggaaaagtgaaaattcctttttcatatcatccactctggtataatgcaaagtgcctttacactaatacaaatatataacatcttggctttgccacttatcggtcataaggctagggaaaaaaaaaaatctcccaaayaatgtgaactatgaattccataactaaaaagtggaagcgtaatacccttcttgcaaggtctttgtgaaggttataaataataaggataaagtgtctgattttgagtgtctactgctattcctaggctgtggtctttcattaggtgagtctaagagaccatagttaggtgggtttggctacttcatgtagctctgtgtcgagggaaaaaaggacagatttcaatgttaatttgtagattgcatttccatataaaaatctggctctttt

SEQ ID NO: 335818 - DNA, 516 bp, Homo sapiens
tttaatttcaagattacgctgtcctcataaaatgagttccctcatttttttatcctttgtcttttctccttgggcataacattttaaggagtttcaaatgaatctggagtgtttatgaaggcccctccttggcaagtctgaattctagtttttcctcagtactaatagattgccaaaatacctgcagctcagtttcttagcctcttagcaactgtaatctgctggctttctctgtgtctccttctgtgcacccacagcttagaagtcatcaaatggcacaagggaaactgcatacaaaatgctgggtttaattctctacagctttcttttctcagcacagggtgatttcaagtcctattcgtcttagtagctctaaattccaatttttatacccctttcccagtgaagctgccagagctctaggatgctgctttccttccagcctgtgtcccatgttctcaggagtaaaagcagtagyaaatgtaggactcaccttaatattcttttattcactac

SEQ ID NO: 335819 - DNA, 631 bp, Homo sapiens
ttcacatctggaacaggctgttcttttgctgaggttaggagtttgtgcccagttaggggcaggatgaaagactttgtctcactctcctgagccctgtaattgttcactgaatgggagtcatcttcatggtccattggtgttgcctccagacagcagatttttttaatagtgatatttatggggctatttattggggcataattttatccaaactggatttctcaattctgcccaattgacactaaaacaggagatactatatggcataataagtttgcttatttgtttttctgttcaaacagctaccattttctcctatatagaggaaagataaatattacctcataaatcagaaatatgaatctaccacctgagcaataataacatatatacctgtgattgattcattacctgcaacttcagcagccacaatatttcaaaagatgtttatagcataaatttcttccacatgggccccaacccatgtcctattaatgctaaccatatacagtcagaaattcataacaaagtcaagaggaatcctctgracaatctatttcctgatttttttctggaagactcctacaaaacagtagcttatattgaattttaaaagggataaatacctatc

SEQ ID NO: 335820 - DNA, 627 bp, Homo sapiens
ccacctcctgtgaatgaagtgctgatgaatcctttccagaagatattcaattaattttgctcagatccagcagaggaatcactatctacagcagctattgctttacaaaatatrtttcttaaatatgaaaatttgaaagtcgaaattcttccttgatctatgggctgcataatagatgttgtgttagcaggcatgaaaacaacattcatcttgttgcacatttccactggatctcttgggtaaccagctgcattggcaataagcagtaatattttgaaaggaatcttcttttgtgagcagcaggtctcaacagtgggcttgaaatatttagtaaaccacgttgtaaacaaatgtgctatcatgtagtctttgttattccatttagagcgcacaggcagaatggaaagcgaacaatggcttcaacttgaagtcaccagctgcattagttcctaacaagagagtcagcctgtcctgtgaagctttgaagccaggcactgagttctcctctctaggtataaaagttctaaatggcatcttcatccactgtaaggctgttttgtctacactgatacactgttgtttagtgtagtcaccatcagcaatgatcttagctagatctcctggata

SEQ ID NO: 335821 - DNA, 627 bp, Homo sapiens
ccacctcctgtgaatgaagtgctgatgaatcctttccagaagatattcaattaattttgctcagatccagcagaggaatcactatctacagcagctattgctttacaaaatatatttcttaaatatgaaaatttgaaagtcgaaattcttccttgatctatgggctgcataatagatgttgtgttagcaggcatgaaaacaacattcatcttgttgcacatttccactggatctcttgggtaaccagctgcattggcaataagcagtaatattttgaaaggaatcttcttttgtgagcagcaggtctcaacagtgggcttgaaatatttagtaaaccacgttgtaaacaaatgtgctatcatgtagtctttgttattccatttagagmgcacaggcagaatggaaagcgaacaatggcttcaacttgaagtcaccagctgcattagttcctaacaagagagtcagcctgtcctgtgaagctttgaagccaggcactgagttctcctctctaggtataaaagttctaaatggcatcttcatccactgtaaggctgttttgtctacactgatacactgttgtttagtgtagtcaccatcagcaatgatcttagctagatctcctggata

SEQ ID NO: 335822 - DNA, 627 bp, Homo sapiens
ccacctcctgtgaatgaagtgctgatgaatcctttccagaagatattcaattaattttgctcagatccagcagaggaatcactatctacagcagctattgctttacaaaatatatttcttaaatatgaaaatttgaaagtcgaaattcttccttgatctatgggctgcataatagatgttgtgttagcaggcatgaaaacaacattcatcttgttgcacatttccactggatctcttgggtaaccagctgcattggcaataagcagtaatattttgaaaggaatcttcttttgtgagcagcaggtctcaacagtgggcttgaaatatttagtaaaccacgttgtaaacaaatgtgctatcatgtagtctttgttattccatttagagcgcacaggcagaatggaaagcgaacaatggcttcaacttgaagtcaccagctgcattagttcctaacaagagagtcagcctgtcctgtgaarctttgaagccaggcactgagttctcctctctaggtataaaagttctaaatggcatcttcatccactgtaaggctgttttgtctacactgatacactgttgtttagtgtagtcaccatcagcaatgatcttagctagatctcctggata

SEQ ID NO: 335823 - DNA, 627 bp, Homo sapiens
ccacctcctgtgaatgaagtgctgatgaatcctttccagaagatattcaattaattttgctcagatccagcagaggaatcactatctacagcagctattgctttacaaaatatatttcttaaatatgaaaatttgaaagtcgaaattcttccttgatctatgggctgcataatagatgttgtgttagcaggcatgaaaacaacattcatcttgttgcacatttccactggatctcttgggtaaccagctgcattggcaataagcagtaatattttgaaaggaatcttcttttgtgagcagcaggtctcaacagtgggcttgaaatatttagtaaaccacgttgtaaacaaatgtgctatcatgtagtctttgttattccatttagagcgcacaggcagaatggaaagcgaacaatggcttcaacttgaagtcaccagctgcattagttcctaacaagagagtcagcctgtcctgtgaagctttgaagccaggcactgagttctmctctctaggtataaaagttctaaatggcatcttcatccactgtaaggctgttttgtctacactgatacactgttgtttagtgtagtcaccatcagcaatgatcttagctagatctcctggata

SEQ ID NO: 335824 - DNA, 555 bp, Homo sapiens
caaaacagttacaatactattataggaaaggggtcccaacccagaccccaagaggatcttggatatcgtgcaaaaaagaatttagggcgagtccataaagtgaaagcaagtttattaagaaagtagaggagtaaaagaatggctactccatagacagagcagccccaaggctgctggtggcccatttttatggttatttcttcatgatgtgctaaacaaggggtggattgttcatgcctcccttttttagaccataaagggtaacttcctgatgttgccatggcatctgcaaacttttatggcactggtggcagtgtagcagtgaggacgaccagaggtcactctcgttgccatcttggttttggtgggatttggcaggcttctttactgcaaactgttttatcagcaaggtctttatgacctgtatcttgtgctgacctcctatcttatcctgtgatttagaatgccttaactgtctgggaatgcagcccagtaagtctcagccycattttacccagctcctattcaagatagaattgctctggttcatacacc

SEQ ID NO: 335825 - DNA, 578 bp, Homo sapiens
cctgtgatttagaatgccttaactgtctgggaatgcagcccagtaagtctcagccccattttacccagctcctattcaagatagaattgctctggttcatacacctctgacaatactaacatcagagatcactgacctcaggtcaccataactgacataatgaaaaagtttgaaaaactgcaggaattcccaaaatgtgccacagagacacaaactgaacaccaagctattggaagaatggtgccaacagacttcttgatgcaggattgccagaaacctttaatttgtaaaaaatgcagtacctgcaaagcacaataaagcaaagtgcaataaaacaagttgtgcctgttctgtttttgtgggagtcctattaacatcgggaaggatacaactgccattcaacccacatatttcttccaaaaagattcttctctaaatgattcagaaattatctgtgaattattaataaaaagttattaaagttatgtggatttagytagtgcagtgctaactagtgcagtactaactaaatccacataagcacttgaatttatacttttggagttgacagtcaacta

SEQ ID NO: 335826 - DNA, 569 bp, Homo sapiens
ctctctccaaatcacaagtgctactttttactcaattgatttactgtatttgctaatwgaatgcagcaccaactagggtggacggggaaatgtacattttctgcatagattctggggaaaacagagtgactcagaggcgaatgttgctattttgccatccttgatcacaattgaacatgttgcttatatttcaagtcattggatcaataatagaaaataaagctgaatatagatttgtcaacatatgtaacatagaactgagatttcagagttttactgtctgagtttgtatcccaattccttcacttacctgttaggtgacttgggggaagtaacttcactttgtctcggtttcctcttctgtgaaatggagaaataatagcacttgaatcaaaaatattttggttagagtttcaaagagatgtgtgtgaagttcttagtaaatatactgcatggtagacgcacctgacagcaataacttgacttaagcacactgagaatgaccctgcgtggctgacgcacctgaatgtgttcccagtcctgagctaaggaatctgggaggggccaac

SEQ ID NO: 335827 - DNA, 569 bp, Homo sapiens
ctctctccaaatcacaagtgctactttttactcaattgatttactgtatttgctaattgaatgcagcaccaactagggtggacggggaaatgtacattttctgcatagattctggggaaaacagagtgactcagaggcgaatgttgctattttgccatccttgatcacaattgaacatgttgcttatatttcaagtcattggatcaataatagaaaataaagctgaatatagatttgtcaacatatgtaacatagaactgagatttcagagttttactgyctgagtttgtatcccaattccttcacttacctgttaggtgacttgggggaagtaacttcactttgtctcggtttcctcttctgtgaaatggagaaataatagcacttgaatcaaaaatattttggttagagtttcaaagagatgtgtgtgaagttcttagtaaatatactgcatggtagacgcacctgacagcaataacttgacttaagcacactgagaatgaccctgcgtggctgacgcacctgaatgtgttcccagtcctgagctaaggaatctgggaggggccaac

SEQ ID NO: 335828 - DNA, 636 bp, Homo sapiens
catgctaacactaatcaaaaaaaaaaaagccaaagcagctatattaatattggcctaagtagatttcaaagcaaagaatattacaaagataaaagaaggtcattttataataataagttcaatttctcacaaagrgtaagaattccaaaggtttaagtaccaagtaacagatcttcaaaatccatgagacaaaaactgataaaaatacaaaaagaaataggcaaatccacaattttggttagagattttatcatctctcacattcttttggagggcacatagagcatgtataaagatcaaccattttcagggccataaaacaagtctcaataaatgtaaaggttttaaatcttatgatgtatgttctctgataatagtaaaacttaattagaaatcaataatgaaatatgcctggaaaatccccgcatatttggaaacttaataacacacttctggagacacaactggtcaaagaagaaatcaaaagcaaatttagaaagttatttggagctaaatgaaaatgaaagcaaaacatattaacatttgtgaaatacagcaaaagcaatacttggagggatatatagttcataatgtatatattaggaaagaaatattctgaaatcaacaaccccttct

SEQ ID NO: 335829 - DNA, 516 bp, Homo sapiens
gtcgtagttcctaaattccacattccacttacatgtcaaaatagttgcttctttaattagaattgaaatgtcaacccatgatatatgggacacatgacactaataataacttatttccagctgtrgagaaatacataatataaaataaaataattcagcataacatattatattagtttcttagacagctcctgtaacaaattaccacagactaggtggctaaaacaacacaaatgtattctctcacagtcctggaagccagatgtccagaattaaggtattggccatcatgttccttctgagggccccagagaggagtcttcctttttcttcctagcttctggtggttgctggcaattcttgacattcctccgcttgcagctgtattgctccagtctctgcccctgtagtcacatggtactcctccctgggaatctgtgtctccaaatctctctctccttagaggaaaaccagtcagtggatttcgggctcacccgaatctagtatgatctcaac

SEQ ID NO: 335830 - DNA, 587 bp, Homo sapiens
aacctcattagagtaattagacatgaatttgtttaaattgtgattaataccctcaacaagttgatggcaaattgaagaatttcagcagagaaatggaaattataaaaaatacgaattttagaattaaaaatatataagcaaaatcaagaatacacctaatgggtctaatagcaaattgcatacagctgatgaaaagattcatgaactgtaagttggtaaaaatatacagactgatgcatagagaaacaaatagaaaatgcatatacaaacctcaaataggatgaatacaaatgaaagaacacctaagcacatcatggtaaaacagctggaaattaaagacaaaaaaaaattataagcagggagaaagaagacaacattttattcaaagaagccagaagactaataaattgacagatgactctacaaaagaaacaatgagatccaggaaaaatggaaaaacataatgaaagtatagaaataatcctgttgcttayttagtcccactctgaatcacctatctctgatgagaaaactactcccagagaggtaagtatctagcccaagataacaaagcaaagtcagaccag

SEQ ID NO: 335831 - DNA, 559 bp, Homo sapiens
aggagcggtggctcccacttgtaatcctagctactcaggaggctgaggcaggaagattgcttgaggcctggagttttgagattagcttgggcaacatagtaagactctatctttaaaaatacaaaaaataaattagctgggcacagtaacatgagcctgaaactgttgtcctagctattcaagrggctggagtgggaggattgcttgagcccaggagtttgaggctacagtgagctatgatcaccactcagcttggtgacagagtaagaccctgtctctaaaattaattaactaaaaagccttttaaaataaaatatacttaacaaaaaatttaccatcttaatcattttcaagcagacagttcagtggcattaagtacattcacatttttatgtgactatcaccaccatccatcttcagaactttctcatcttcccaaactgaaactctgtgcccatcaaactataacttcccattacttcactcttctggcaatcgccatgctattttgtatgaatctgactgttttagatacctcatataaatgaaatcatacaca

SEQ ID NO: 335832 - DNA, 534 bp, Homo sapiens
tctagatttgaaatatattatctcagaatattgaaggcttgactccattggcttctagcttccagcataactgttaagaaatcaaattttagataacaggacatcagtaaaaagattgtgggtgggaaatttcatggtcatatctttttcaagtagatcacattgactgctgtgtgacagaygaagctaagaggttcagaaaccagttggaagactagcagaattccaaggaaaagctaaaaaaaacctaaactaaaaagagcattagagatggaaagaaagggtagaattcaataaatatttaggaaacgatatgagtaggatgaactgattattggtagggtctaggatgattccccatatttggacaaaagtagataaagcctcagcatttggaagtacaatagatagacagatataggtatatatctatacaacagacatatctatatatatggattttttttattttaaatgtagttaactgctgttgatgagaaaaagaccaaactgtaaaatatttgaagaggttta

SEQ ID NO: 335833 - DNA, 543 bp, Homo sapiens
attatctcagaatattgaaggcttgactccattggcttctagcttccagcataactgttaagaaatcaaattttagataacaggacatcagtaaaaagattgtgggtgggaaatttcatggtcatatctttttcaagtagatcacattgactgctgtgtgacagacgaagctaagaggttcagaaaccagttggaagactagcagaattccaaggaaaagctaaaaaaaacctaaactaaaaagagcattagagatggaaagaaagggtagaattcaataaatatttaggaaacgatatgagtaggatgaactgattattggtagggtctaggatgattccccrtatttggacaaaagtagataaagcctcagcatttggaagtacaatagatagacagatataggtatatatctatacaacagacatatctatatatatggattttttttattttaaatgtagttaactgctgttgatgagaaaaagaccaaactgtaaaatatttgaagaggtttattctgagtcagtatgagtgactcag

SEQ ID NO: 335834 - DNA, 543 bp, Homo sapiens
attatctcagaatattgaaggcttgactccattggcttctagcttccagcataactgttaagaaatcaaattttagataacaggacatcagtaaaaagattgtgggtgggaaatttcatggtcatatctttttcaagtagatcacattgactgctgtgtgacagacgaagctaagaggttcagaaaccagttggaagactagcagaattccaaggaaaagctaaaaaaaacctaaactaaaaagagcattagagatggaaagaaagggtagaattcaataaatatttaggaaacgatatgagtaggatgaactgattattggtagggtctaggatgattccccatatttggacaaaagtagataaagcctcagcatttggaagtacaatagayagacagatataggtatatatctatacaacagacatatctatatatatggattttttttattttaaatgtagttaactgctgttgatgagaaaaagaccaaactgtaaaatatttgaagaggtttattctgagtcagtatgagtgactcag

SEQ ID NO: 335835 - DNA, 496 bp, Homo sapiens
tattatttttgtcttctctttatcccccctcccttccccagttattaagatgtcccagggcattgactccattggctatcactatcttacttagtctcgtggttttaaacaygttatgtgtgctagcaacaaccagattaacagtccaaacctgctctctagattccagataaaacagcttatttgacatcaccacttggctgcctaatagaaatctcaaattcagcatgtcaaaaactcaatcctttatttctagcagggaggacagaggacaaagaagctggctgggccttgcaactcagagcatctgggctgggaaatgcagcaggacatggaattggtgaagagtaattaaagaactatgggaactccattttagacctggtaggtattagtagtaaaagttgtcattcagttttatttttggcatttataataggttcaaatataaaagaagagacaacaccaaaataaatagatccacagggcagtaaat

SEQ ID NO: 335836 - DNA, 538 bp, Homo sapiens
gtcgctttagtaagaggtgccttctcattctttcttaattcatccactagctaaacacaggaacccacatgcatgcatacacacacatcttgaggaaatatggtaatcctcagaacagagtttccagtcatattaagaaagaaaatcattgttatccacttttacacggccactattaatattagtawtttgttattttgaaaggcagtggcagttgccctttgtattcctcttatcctcaccgtgagaaaatattgtgtaggtatatgtttgtgtgtatataaatacatatatattcataaaataaaacatcattttaagaactgagtaataatctgaggcccctaaaaagccatctttcttttttttaattatactttaacttctggggtatgtgtgcagaatgtgcaggtttgttacacaggtatacatgtgctatggtggattgctgcacccatcatcctgtcatctacattaggtatttctcctaatgctatccctctcctaggcccccactccccaacaggccccagtgtgt

SEQ ID NO: 335837 - DNA, 593 bp, Homo sapiens
tactacctgttgctgtgtccctgtaccaagaatgcattgccaaactcacctcaccacgtttccatttgagacaggagtttggcaggactggtttcacaagacacaggtcacaaagacgccactgataaaacaggatrcagtgaagatgctggccaaaaccaacgtggcaacaagaacaacctctagttgtcctggctgtttattatatgctaattataatacattagcatacccaaggaaactctcaccagcaccatgacagttcataaatgccatggcaatgtctggaagttaccctgtataatctgaaagggggaggaaccctcagttccaggaactccctgcccctttcctggaaaactcacaaataatccaccacttgtttaaaatatgatcaagaaataaccataaaaatagccaaaccagcagccctcaaggctcctctgcttatggagtggccacccttttattcctttactttcttaatagacttgctttcatttcactctgttggcttgctctttaattccttcctgcacgaagtcaagaatacatgtggcctcccaggctgaaccccaatttgggggtttacc

SEQ ID NO: 335838 - DNA, 593 bp, Homo sapiens
tactacctgttgctgtgtccctgtaccaagaatgcattgccaaactcacctcaccacgtttccatttgagacaggagtttggcaggactggtttcacaagacacaggtcacaaagacgccactgataaaacaggatacagtgaagatgctggccaaaaccaacgtggcaacaagaacaacctctagttgtcctggctgyttattatatgctaattataatacattagcatacccaaggaaactctcaccagcaccatgacagttcataaatgccatggcaatgtctggaagttaccctgtataatctgaaagggggaggaaccctcagttccaggaactccctgcccctttcctggaaaactcacaaataatccaccacttgtttaaaatatgatcaagaaataaccataaaaatagccaaaccagcagccctcaaggctcctctgcttatggagtggccacccttttattcctttactttcttaatagacttgctttcatttcactctgttggcttgctctttaattccttcctgcacgaagtcaagaatacatgtggcctcccaggctgaaccccaatttgggggtttacc

SEQ ID NO: 335839 - DNA, 592 bp, Homo sapiens
ggtgttatataaacacacctggaattacaggtgtgagtcaccattcccagctttctcatctttaagatgcgtactaacctaagcaaatggtaaagatatcgtttaatagatgctatgtcagcatctgaaaggcagaacccacaatatctgtggataaagaacaaattaaaggagctatttgatttgtaaaaatacatgggctagcacatatttctgagaaatagcaatagcrcaaagaataaaaattatgctagttatttttactactcattccataagtatttgttagctacctactttttaataggtactgtgagtgacactgggaatacaaaataaacgaacatgatttatgacttcagagtactcacatcaggacatcaggaattgagagtaaagatatacacaaggacacgcctatccagtaatctcccctgcccggttcattttatagtaactcttttttcttccagtgctatgaatacacacgaatgagtttgccaaagttacactgcaataagaattaaaacttgctatcaagcaatttttttcttgaccatagctaggtaatatgagttaatcgttctcaaag

SEQ ID NO: 335840 - DNA, 592 bp, Homo sapiens
ggtgttatataaacacacctggaattacaggtgtgagtcaccattcccagctttctcatctttaagatgcgtactaacctaagcaaatggtaaagatatcgtttaatagatgctatgtcagcatctgaaaggcagaacccacaatatctgtggataaagaacaaattaaaggagctatttgatttgtaaaaatacatgggctagcacatatttctgagaaatagcaatagcacaaagaataaaaattatgctagttatttttactactcattccataagtatttgttagctacctactttttaataggtactgtgagtgacactgggaatacaaaataaacgaacatgatttatgacttcagagtactcacatcaggacatcaggaattgagagtaaagatatacacaaggacackcctatccagtaatctcccctgcccggttcattttatagtaactcttttttcttccagtgctatgaatacacacgaatgagtttgccaaagttacactgcaataagaattaaaacttgctatcaagcaatttttttcttgaccatagctaggtaatatgagttaatcgttctcaaag

SEQ ID NO: 335841 - DNA, 592 bp, Homo sapiens
ggtgttatataaacacacctggaattacaggtgtgagtcaccattcccagctttctcatctttaagatgcgtactaacctaagcaaatggtaaagatatcgtttaatagatgctatgtcagcatctgaaaggcagaacccacaatatctgtggataaagaacaaattaaaggagctatttgatttgtaaaaatacatgggctagcacatatttctgagaaatagcaatagcacaaagaataaaaattatgctagttatttttactactcattccataagtatttgttagctacctactttttaataggtactgtgagtgacactgggaatacaaaataaacgaacatgatttatgacttcagagtactcacatcaggacatcaggaattgagagtaaagatatacacaaggacacgcctatccagtaatctcccctgcccggttcattttayagtaactcttttttcttccagtgctatgaatacacacgaatgagtttgccaaagttacactgcaataagaattaaaacttgctatcaagcaatttttttcttgaccatagctaggtaatatgagttaatcgttctcaaag

SEQ ID NO: 335842 - DNA, 593 bp, Homo sapiens
tactacctgttgctgtgtccctgtaccaagaatgcattgccaaactcacctcaccacgtttccatttgagacaggagtttggcaggactggtttcacaagacacaggtcacaaagacgccactgataaaacaggatacagtgaagatgctggccaaaaccaacgtggcaacaagaacaacctctagttgtcctggctgtttattatatgctaattataatacattagcatacccaaggaaactctcaccagcaccatgacagttcataaatgccatggcaatgtctggaagttaccctgtataatctgaaagggggaggaaccctcagttccaggaactccctgcccctttcctggaaaactcacaaataatccaccmcttgtttaaaatatgatcaagaaataaccataaaaatagccaaaccagcagccctcaaggctcctctgcttatggagtggccacccttttattcctttactttcttaatagacttgctttcatttcactctgttggcttgctctttaattccttcctgcacgaagtcaagaatacatgtggcctcccaggctgaaccccaatttgggggtttacc

SEQ ID NO: 335843 - DNA, 464 bp, Homo sapiens
ctaagacccaagaaaggatcaaaggaagggtgagaggggcatttcttcctctaataaaaagactgaagtttcccaaagcagccccagggcacttgactaagggccatgaggggctgtgttgaagctaaagggcaaaaagaaaagagaaggagggktcaggaccaaacacccgcaggtaggcaccctctcctggaggggggaagtccatcagccccttcccttgagtcctataagggaacagcaaagtggcaactttgagactcacgttatccccaacaaaatcaagtgtgtgtttgatctgagaaaaactaagcagacaggagagtctcaggaaaaggatggcaaatgtccctgaagcatactgctgagatttctactggagacaacacacactcactcacacacacacatgcagactcgtagatgaagtttccacagattatcaccagcaacacagtgatgcc

SEQ ID NO: 335844 - DNA, 646 bp, Homo sapiens
acagattatcaccagcaacacagtgatgccctgatagatggcaacaaaacaaaaacaaaagcctctacatatgaggttgtaaaactgaattctagattatcccgtacacacacacacacacacacacacacaagtgagcaaaaaatcttctttaggacagaggagggactttgcatgtagagtaaataatgtattccatacaatgcttggaatttccttggggaaaggtactctagcattccagagcataatcatgcaaataaagttcccaacagcctctacatggttctataccaaataaatgggtcaaaacaaactctaagccctgtgtgaccaattaactccacaaaaacacatactaaactttactgcaaatttgagccacataatcaagtgatataaaaatgtgtatttatgttctgtctacttatagtttacatakggatttgacatgtaaaacagattacattactgaaaataactcaaaatacatagcacacttttgattactatttcataggggcctaaggaacagaggggagtccatgggtaaagagtctcagcagtcacaggactgactcttaggtgagcgtaggttagtatattatgtatttttcccctttacttaagaactggagccatgtgc

SEQ ID NO: 335845 - DNA, 554 bp, Homo sapiens
gccatgtgcatactataaattatggaatacatacattatttattaattaaattctaactataaagttataaagcggtacaaatatggaygtcattaaactattttcaaaggaaatgtttcaatgttttcatgtttgaatagctaagttaattgattgaacatgtttaaattttattcacatccatttattatcaattgattaaggcttataattaattctagagataccaaaacatttgcatgtttttttaaaaaaaaccaattgctcaaaatatgtttcacttcaaagtgtcaacttgccatattaaattatttcaacttcaaaatacagccaaaacaaacacattttaaaagcagggcaatttaagtacagagttggtgatattttaggttgtcattacaagttctcctaggcagtttattggcaaatatgctctcaaagacaaagcttctgaacagtaaagaaaacacttggtttaaaaactacattcagcctagacagtcttgagaatcctaacttctttggagtgcaaatagctagatttcaaagagaa

SEQ ID NO: 335846 - DNA, 628 bp, Homo sapiens
agtttgttctcatgctgctataaggacatacctgagactgggtaatttataaaggaaaggggtttaattgactcacagctatacagggctggggaggcctcaggaaacttacaatcatggtggagggggaagcaaacacgtccttcttcacatgtcagcaggaagaagtgccaagcaaatggggaaaggccccttataaaaccatcagctttcatgagaactcactcactatcacaagaacagcatggggggtaactgcccccatgatttgattacctcccactcaatccttcccacaatacatggggattatgggaattacaattcaagacgagatttgrgtggggacacagccaaaccatatcacataatatactctaccaagtgataaagtagtgtatttccactttgtacttgggagaataaataatgaaagagaaatagtgttacagattttgatatgccaataagaggaaattcacaaaaaatttaaaacttttttttttaaaatgcacagccaaagtcttactgtagccattaataatttgaacagcatcctccaaaccacttggtaggcctttgtatactcctaggacacacagaggatatacctagagagccatgcgtc

SEQ ID NO: 335847 - DNA, 544 bp, Homo sapiens
cccaagtcagaatatctttgttgatttttatttttattttactttaagttccgggatacacgtgcagaacatgcagattcgttgcataggtatacatgtgccatggtggtttgctgcacctatcaacctgtcacctaggtttttttttttttttgagactcgctcagtcacccaggccggagtgcagtggtgcgatctcggctcactataagctccgcctcccaggttcacaccattctcctgcctcagcctcccgagtagctgggactacaggtgcayaccaccatgcccggctaatttttgttattttttttttagtagagacagagtttcaccatgttagccaggatggtcttgatctcctgacctcatgatcttcctgcctcagcctcccacagtgctgggattcatcacctaggttttaagcctcacatgcatcaggtatctgtcctaatttctccctccccttgccccccacacccccaacaggccacgtgtgtattttccccctccctgtgtccatgtgttttccttgttcaactcc

SEQ ID NO: 335848 - DNA, 596 bp, Homo sapiens
gttcatggagtaaaataattaatattgtgaaaatgcccatcctacaaaaagtgatctacagatccagtgcaatccctatcaagtaccactaacattcttcacagaaatagaaaaaaatcctaaaattcatagagtaccacaaaagacctcaaataacycaaagaaaaaatctgaaggtatcacactacctgacttaaaatatagtataaagctagattaatcaaaatagcatggtactggcataaaaacagaaagaccaatggaacagaatagagaacccagaaataaatccacctatttgcagccaactgactttctacaaagactctgtgaatgctcattaggggaaaggacagtcttttcaataaatgatgctgggaaagctggatatccataagcagaaaaatgaaactaggcctctatctcccaccatatacaaaagtcaactcaaaatgcattaaagacttaaatgtaacactcaaaaccatgaagctactagaagaaaacaacaggagaaatgctttaggacattgatctgggcaaagattttatgaagacctcaaagcacaggcaataaaagcaaaaatagactgatg

SEQ ID NO: 335849 - DNA, 606 bp, Homo sapiens
ccacctgtaaaatggggtgtgtatatgccaccatatagggccttaatcatatagactaagtagccatggggcagtggcccacacctgtagtcccagctactcaggaggctgaggcaggagcatcactgtagcccagtatttaaggtggcagtgagctacaatccttccactgcactctctagcctgggccacaaagtgagatcccatctcttttaagaggcccttggccctctgraatttcactgataatcactggcgtgaggcatacacattcatttaacatgtacacacgaaagccttcagaacaaacacccaacacctcaataaagttcagaagcttatataccatcttgaggttagagacagaaagcaggcccagagcatggccaaaaacaggagatggcggtaaatcaaatttcagtagcaagacaagttacaggagggagagaagaggatgcctggctagcaaaggtggtcttgttgtgtagatgaagactcactggtagcagccgtcagagacaacagatggtaaatgtttattttcagacctttcactgtgtcccactctcagttaatctctcctagatccagaaaagtcctagaaag

SEQ ID NO: 335850 - DNA, 606 bp, Homo sapiens
ccacctgtaaaatggggtgtgtatatgccaccatatagggccttaatcatatagactaagtagccatggggcagtggcccacacctgtagtcccagctactcaggaggctgaggcaggagcatcactgtagcccagtatttaaggtggcagtgagctacaatccttccactgcactctctagcctgggccacaaagtgagatcccatctcttttaagaggcccttggccctctggaatttcactgataatcactggcrtgaggcatacacattcatttaacatgtacacacgaaagccttcagaacaaacacccaacacctcaataaagttcagaagcttatataccatcttgaggttagagacagaaagcaggcccagagcatggccaaaaacaggagatggcggtaaatcaaatttcagtagcaagacaagttacaggagggagagaagaggatgcctggctagcaaaggtggtcttgttgtgtagatgaagactcactggtagcagccgtcagagacaacagatggtaaatgtttattttcagacctttcactgtgtcccactctcagttaatctctcctagatccagaaaagtcctagaaag

SEQ ID NO: 335851 - DNA, 606 bp, Homo sapiens
ccacctgtaaaatggggtgtgtatatgccaccatatagggccttaatcatatagactaagtagccatggggcagtggcccacacctgtagtcccagctactcaggaggctgaggcaggagcatcactgtagcccagtatttaaggtggcagtgagctacaatccttccactgcactctctagcctgggccacaaagtgagatcccatctcttttaagaggcccttggccctctggaatttcactgataatcactggcgtgaggcatacacattcatttaacatgtacacacgaragccttcagaacaaacacccaacacctcaataaagttcagaagcttatataccatcttgaggttagagacagaaagcaggcccagagcatggccaaaaacaggagatggcggtaaatcaaatttcagtagcaagacaagttacaggagggagagaagaggatgcctggctagcaaaggtggtcttgttgtgtagatgaagactcactggtagcagccgtcagagacaacagatggtaaatgtttattttcagacctttcactgtgtcccactctcagttaatctctcctagatccagaaaagtcctagaaag

SEQ ID NO: 335852 - DNA, 606 bp, Homo sapiens
ccacctgtaaaatggggtgtgtatatgccaccatatagggccttaatcatatagactaagtagccatggggcagtggcccacacctgtagtcccagctactcaggaggctgaggcaggagcatcactgtagcccagtatttaaggtggcagtgagctacaatccttccactgcactctctagcctgggccacaaagtgagatcccatctcttttaagaggcccttggccctctggaatttcactgataatcactggcgtgaggcatacacattcatttaacatgtacacacgaaagccttcagaacraacacccaacacctcaataaagttcagaagcttatataccatcttgaggttagagacagaaagcaggcccagagcatggccaaaaacaggagatggcggtaaatcaaatttcagtagcaagacaagttacaggagggagagaagaggatgcctggctagcaaaggtggtcttgttgtgtagatgaagactcactggtagcagccgtcagagacaacagatggtaaatgtttattttcagacctttcactgtgtcccactctcagttaatctctcctagatccagaaaagtcctagaaag

SEQ ID NO: 335853 - DNA, 603 bp, Homo sapiens
gccattgtttctttgaaaatctctgctggcttgttctctgtctctctctaagacaygttatcccacatgtctgagatgcaatagggtgttttgttttggttttattttcatttgttttgtctcgcttttttttacttttttatttctctttgggtttcaatttaggtaatttttattgacctatcttcaagttgacttcaagttcactgattctttccttagcttgtcatatctactgatgagtctatcaaaggtattcttcatctctgttattatatatttttttcatttctataatttctagatatagatgggcagatccaggtcttgtgggcaacatccagccagtggcctgttttcgtaagacttatgcacttagaagggtttttacattttttagaagtttaaaaacactttaaaaaataataataatatgtaacagttcatatgtggcccacaaagcctaaatatttactgtctggccctttagagaaaaaagtttgtcaatctctgccattgagcctttgacatactaatcattgttattttaaatacccttttagagaactacagcatctgtgtcaaatctgagtatggtcctga

SEQ ID NO: 335854 - DNA, 559 bp, Homo sapiens
gaaggtggtctattttgataaatgtttcatgtgcacatgaaaaaaagatgtatcctgctgatgggtggaagattctgtagatgtgaattaggtcaagctggattgttagtattgttcaagtaacctttaccatgaatgattttctgtctacttgttaaatcarttaatgagggaggggtgttaaatagctgattgtaattatggatttttctattcctccttgaagttctatcaattttggttaagatattttgaagttcttttattaagtacatacatatttaagattatgccctcttgataaattgatcccttcatcgtcatgaaaaaaaaacccactcactttctctggtaatactctttgtctcacaaatacttttgataataatatagctagctggaagtttccttttattgatgacatactggtgtatcttttcccatccttatacatttaacctattcttgtttttatatttaaagtgaacttcttgtaagcaccatacagttgagtcttactttcttatccaacctgacaaaatctcctttgaattggagg

SEQ ID NO: 335855 - DNA, 559 bp, Homo sapiens
gaaggtggtctattttgataaatgtttcatgtgcacatgaaaaaaagatgtatcctgctgatgggtggaagattctgtagatgtgaattaggtcaagctggattgttagtattgttcaagtaacctttaccatgaatgattttctgtctacttgttaaatcaattaatgagggaggggtgttaaatagctgattgtaattatggatttttctattcctccttgaarttctatcaattttggttaagatattttgaagttcttttattaagtacatacatatttaagattatgccctcttgataaattgatcccttcatcgtcatgaaaaaaaaacccactcactttctctggtaatactctttgtctcacaaatacttttgataataatatagctagctggaagtttccttttattgatgacatactggtgtatcttttcccatccttatacatttaacctattcttgtttttatatttaaagtgaacttcttgtaagcaccatacagttgagtcttactttcttatccaacctgacaaaatctcctttgaattggagg

SEQ ID NO: 335856 - DNA, 559 bp, Homo sapiens
gaaggtggtctattttgataaatgtttcatgtgcacatgaaaaaaagatgtatcctgctgatgggtggaagattctgtagatgtgaattaggtcaagctggattgttagtattgttcaagtaacctttaccatgaatgattttctgtctacttgttaaatcaattaatgagggaggggtgttaaatagctgattgtaattatggatttttctattcctccttgaagttctatcaattttggttaagatattttgaagttcttttattaagtacatacatatttaagattatgccctcttgataaattgatcccttcatcgtcatgaaaaaaaamcccactcactttctctggtaatactctttgtctcacaaatacttttgataataatatagctagctggaagtttccttttattgatgacatactggtgtatcttttcccatccttatacatttaacctattcttgtttttatatttaaagtgaacttcttgtaagcaccatacagttgagtcttactttcttatccaacctgacaaaatctcctttgaattggagg

SEQ ID NO: 335857 - DNA, 669 bp, Homo sapiens
ggtaaataaattaatgaatacagataaaatattgaagcaggaaattttaacatgttaatgtccatttctatttgtggtcatcctgtacaactttagagaccaaatcttatatgagaatgtcagtttcacagacacttatgagactagatgaatagcatctatataaagaaaatctgaaaaatccttgacaaaatcaccaaatggcaaatgcatttacaatggtctgtaagaaaagggaaaagcatgaagaaaacctcaaataaaacaaggaagagcaaacaaaggcttactaacattctcattgccattatcwatctttttttctagggctaatggctctatataagacatgcgcattcatctaccaacgacatctgtgcagagcatggaacagcgtaggtttgtaattgctcgctaccctgagctagggaaaatgaacttctgacattttggaggaaacagacttagcttctttggtaaggtgagggtacccttgctgcttaatgttctaagttattttgtggacaaacaaaataagtggagaaactatatgtctattactattatgttacttatagaagcagagaaatcgttttcaaaaacatatatttggtttataaatatgctttctaggaagggctccaattgcaagtttataagcacttaatg

SEQ ID NO: 335858 - DNA, 564 bp, Homo sapiens
tggacaaacaaaataagtggagaaactatatgtctattactattatgttacttatagaagcagagaaatcgttttcaaaaacatatatttggtttataaatatgctttctaggaagggctccaattgcaagtttataagcacttaatgtgttagcagatataaaactgctggaattctcaaggttttgttgtgcattaaggaggagatgaatagactttgatatcagtctttcagtgaggaaaattatattcaatactatgcagggataatcaaatccttagtgaagaactttgaggaccttgaaaacgtataaaactgtgaacccaagctcttactggcatttctgatacagcatattcttccttatccttgaaagccatactccctctccaagtaatatcttaagttcattccttttgtatggccctgtatcagctattgctctgatcagggagaaaatattgatttctttactttgtgaccctggtgggagctcaggagttatactaaaaatgaaatattggtggccctagatgaaaygtgtctcgtggtctgcttttgaa

SEQ ID NO: 335859 - DNA, 497 bp, Homo sapiens
tgtctaccacactgacacatccagtgtcttggcagtgttggcctctttttcttgcggtctcatcttctagggcctctccaggtggcttggatttcccaaaaaattgttgctcagggtgatcatactttttacatgatgtctggcttccaaaagtcacaaagcaaaagttgtcaaaatagytaaggatgattctgacagtggtacgatgtcacttctcatgtaattagtctcagagttcacctaaattcaagaaggggttgaaaaatagactgcacccttaaatggggggtgaggggaggtggcaaggtcacactgtggagcagcaggtgggatgggagatattttagtgtctatctttggaaaacacaatctactacatacttgaagaaggtgtaacacgaagaggagtggattgcaaggttgggcacgggggcacttattttagttgtggtaccagccatgaaaacgagtagaggaagttctagtttgagcaagtc

SEQ ID NO: 335860 - DNA, 441 bp, Homo sapiens
gtttggtgttggcagcaccgtgagatggagcagagagcccatcaatgccttttgtaatgatgtccatgacaatcaaggagtgttttgtcccttaatggttttgtaaagtcaatatggattattgatcccaacttattaaagscttcctggaaagttgtgtataccattggtagttcatgaggtagttcaacaattgggacattcttttagttttccatgattagaatcccttctaaattaccagtcctttttctacctaatgctttcaagtaaataatcctatgatgtgctgcacagcatctgttatatcagtggctttcatttttttcttctttttgtgcataagtgtttctggaggtatttgaaaaatgtagactcccaggtctcaccttcaaggatttagattcggttagtctggagtaagacctgggcatctgtatt

SEQ ID NO: 335861 - DNA, 594 bp, Homo sapiens
agagatgcagtcatgggggtcaggtgtggtatcaggaataatgtgagaggccagattgaagtctgggccaggaacaatggtaattgtgggagactcaacaaagagtgagtacagctgaaggaattggagaacagaaaatatatgtgtcaggtgtgaggaagaaaatagattttggaagttgtgagaactgtagagagtgagttgagcatagtttgtgattttgagggcctctaaaagtgttagggcagtggcggccaccgcatggagacatgatggccagcctaaaacagtaaggtcaagttgtttggacaaaaaggctacagggtgcggtcccagtccttgtgtaagaattctgactscacagccctgcacttgggctgtgtgtaatgaaaagggttgggatgagtcagggagagctagtgtgggagcagtctctaaagctatcttcaaggaacagaaaggggagtggggaaaggatttaggatctatggggtcagctaggtttccttttgtgagtttatataatggttttgttaggatggcaaaaccaggtatccaaaggcgaaagtatccaaccatgcccaggaaggaaag

SEQ ID NO: 335862 - DNA, 594 bp, Homo sapiens
agagatgcagtcatgggggtcaggtgtggtatcaggaataatgtgagaggccagattgaagtctgggccaggaacaatggtaattgtgggagactcaacaaagagtgagtacagctgaaggaattggagaacagaaaatatatgtgtcaggtgtgaggaagaaaatagattttggaagttgtgagaactgtagagagtgagttgagcatagtttgtgattttgagggcctctaaaagtgttagggcagtggcggccaccgcatggagacatgatggccagcctaaaacagtaaggtcaagttgtttggacaaaaaggctacagggtgcggtcccagtccttgtgtaagaattctgactgcacagccctgcacttgggctgtgtgtaatgaaaagggttgggatgagtcagggagagctagtgtgggagcagtctctaaagctatcttcaaggaacagaaaggggagtggggaraggatttaggatctatggggtcagctaggtttccttttgtgagtttatataatggttttgttaggatggcaaaaccaggtatccaaaggcgaaagtatccaaccatgcccaggaaggaaag

SEQ ID NO: 335863 - DNA, 515 bp, Homo sapiens
tggtgatgatcaccaaagaggggaaaataattttttaaatttttttatttttttaaattgacaaaaattgtatatatttatcatgtataacatgttttttttgaaacacgtatacattatggaacgtctaaatcaagctaattagcatatgcyttacatacacacaacatttttttttgtggtgagacacgattaacctttattatcattatgaagaaagacttgcagaacaaagctagacttctgccatgataatgctgaatcttcacgttccaattctgaatgcataaattcacatcctaaactaattccataaatgagaatttcaactgtgtacaactttaaaaatcagatgggaacttgcctcatttattattgtctgccttggatctctgctacacaattcacaactccttttataaatgagcgtcttgagccattttacttctattctgttttctggcttccatggtgacagaaactttgacttaaggcaaagagcttccaatcaggga

SEQ ID NO: 335864 - DNA, 522 bp, Homo sapiens
caattagcactcatctacaggctccctccagccccagccccgccagagaaatcaggcaggtccccaaacaaaatcagactgtgtgcagccatagatttactcaaaaggaaatcagctctcacacccatagccaggagaagtgggaacatccacttaaatacaatacacatttactgagcacctactaggcaccaggcactatgttagagcytaggataaaaaaaggtaagcatcatatggcccttgctctctactaggataaggtggaccaaaaaaaggtccaagttatttatgaaagaaaggaggcagccatttaattatagtaacaactgtcattttatttgcttcctatgtcttagcagtctttggctttaattcattttaaaactacaggccttattaaatgaggcctttaagagaatctatgagtataatagaatagcatgtcccagagcatgatccctgggcacctgccagaaacacaaaactttctgcacccccaccagacccactgggtcccaa

SEQ ID NO: 335865 - DNA, 478 bp, Homo sapiens
tctaattacgctagcagcctttattgaaaaaacatcctttcttgacttaattacagtgacacttgtgtaaccatatacatgtggttctcttcaagaccctctgttccatcagtctatttgttcattcttgtgccaataccacactgtcttaactactgtagtttttttactaggtcttaaaatctartaacataagtccaccaaactttgtcttattctttaacattatcctaactatcctagatattttgcatttccatatacattttaaaaataatttctcaatttccaccccttcaacccactgggggttttgattgcaattgtgctgaatctgtagatcactcagaggatgattgacatcttgaaaatattgagtcttcctatcattaacacggaatatctttccatttttgtgtgttctctttaatttctcccagtcatgttttctaactttcaatgcagagggattgcacat

SEQ ID NO: 335866 - DNA, 631 bp, Homo sapiens
ttcattcttgtgccaataccacactgtcttaactactgtagtttttttactaggtcttaaaatctaataacataagtccaccaaactttgtcttattctttaacattatcctaactatcctagatattttgcatttccatatacattttaaaaataatttctcaatttccaccccttcaacccactgggggttttgattgcaattgtgctgaatctgtagatcactcagaggatgattgacatcttgaaaatattgagtcttcctatcattaacacggaatatctttccatttttgtrtgttctctttaatttctcccagtcatgttttctaactttcaatgcagagggattgcacatcttttattcgatttattttcaggtatttgacatttttggtgctcttacaaatggtatttttaaaatttcatcttcccagtgcttgctgcttaatatataaaaatacagatgaatacaattaatttttacagcttaaggtataattaagctgtaaaatagaatacaattaatttttacagcttaattaatgtataattaaggtacaaaagaactgcacatgactgaagtatacagctggggaatttcgaggaacataacacactatgaaacgtc

SEQ ID NO: 335867 - DNA, 631 bp, Homo sapiens
ttcattcttgtgccaataccacactgtcttaactactgtagtttttttactaggtcttaaaatctaataacataagtccaccaaactttgtcttattctttaacattatcctaactatcctagatattttgcatttccatatacattttaaaaataatttctcaatttccaccccttcaacccactgggggttttgattgcaattgtgctgaatctgtagatcactcagaggatgattgacatcttgaaaatattgagtcttcctatcattaacacggaatatctttccatttttgtgtgttctctttaatttctcccagtcatgttttctaactttcaatgcagagggattgcacatcttttattcgatttattttcaggtatttgacatttttggtgctcttacaaatggtattttyaaaatttcatcttcccagtgcttgctgcttaatatataaaaatacagatgaatacaattaatttttacagcttaaggtataattaagctgtaaaatagaatacaattaatttttacagcttaattaatgtataattaaggtacaaaagaactgcacatgactgaagtatacagctggggaatttcgaggaacataacacactatgaaacgtc

SEQ ID NO: 335868 - DNA, 631 bp, Homo sapiens
ttcattcttgtgccaataccacactgtcttaactactgtagtttttttactaggtcttaaaatctaataacataagtccaccaaactttgtcttattctttaacattatcctaactatcctagatattttgcatttccatatacattttaaaaataatttctcaatttccaccccttcaacccactgggggttttgattgcaattgtgctgaatctgtagatcactcagaggatgattgacatcttgaaaatattgagtcttcctatcattaacacggaatatctttccatttttgtgtgttctctttaatttctcccagtcatgttttctaactttcaatgcagagggattgcacatcttttattcgatttattttcaggtatttgacatttttggtgctcttacaaatggtatttttaaaatttcatcttcccagtgcttgytgcttaatatataaaaatacagatgaatacaattaatttttacagcttaaggtataattaagctgtaaaatagaatacaattaatttttacagcttaattaatgtataattaaggtacaaaagaactgcacatgactgaagtatacagctggggaatttcgaggaacataacacactatgaaacgtc

SEQ ID NO: 335869 - DNA, 573 bp, Homo sapiens
gaaatttccagttgcctcatatccttgctaacatttggagtggtcagtcttaattttagtcattctattggctgcatagtgatatctatctcatggtggtrtgaaattgcatttccccaatgactaatgatgttgagcaccttttcatacacttatttgctactagaatatctttggtgaagtgtcaattcaaacctcttggctatctctaattgggttgtagatgcaagtcctttgttggatgtatattttgctaatattttctcccagtctgtagcatgccttttcatttttctaatagtatccattgaggagcaacggttttaaattttgaaagagtccaattagcctattttttcccctttatagtgtgtgccttctatgtccttttaaataaatctttgccaaatccaaggtcactaaggttttctttcaccgtttcttctagtgatttatagttttagcttttacatataagtctattatccattttgagttaatgcctatacatagagtaatatggtaagaacatgggttcaatttttgcttttgaatattcaattgttcaaggac

SEQ ID NO: 335870 - DNA, 573 bp, Homo sapiens
gaaatttccagttgcctcatatccttgctaacatttggagtggtcagtcttaattttagtcattctattggctgcatagtgatatctatctcatggtggtgtgaaattgcatttccccaatgactaatgatgttgagcaccttttcatacacttatttgctactagaatatctttggtgaagtgtcaattcaaacctcttggctatctctaattgggttgtagatgcaagtcctttgttggatgtatattttgctaatattttctcccagtctgtagcatgccttttcatttttctaatagtatccattgaggagcaacrgttttaaattttgaaagagtccaattagcctattttttcccctttatagtgtgtgccttctatgtccttttaaataaatctttgccaaatccaaggtcactaaggttttctttcaccgtttcttctagtgatttatagttttagcttttacatataagtctattatccattttgagttaatgcctatacatagagtaatatggtaagaacatgggttcaatttttgcttttgaatattcaattgttcaaggac

SEQ ID NO: 335871 - DNA, 496 bp, Homo sapiens
atagttttagcttttacatataagtctattatccattttgagttaatgcctatacatagagtaatatggtaagaacatgggttcaatttttgcttttgaatattcaattgttcaaggactatatgttgaaaagatatcctttcccccattgaacttccttagcaccttcattgaaaatcaattgaccatayatctgagggtctatttttggatttttctcttctgttccattgaagttgtatcttttgccaataccacactgcctcgattacagtgtgagtcataataagtcttgaaatcagataggctaagtcatccaactttattctttttcaaaattactttgggtgttctaggtcctttgatttccatatgacttttataataaatttgtcaaatttctccaaaaaaatccttcttgggttttgactgggatagattatatctttagaacaatttgggaagaattggcatcttaacagtattttgttttcca

SEQ ID NO: 335872 - DNA, 496 bp, Homo sapiens
atagttttagcttttacatataagtctattatccattttgagttaatgcctatacatagagtaatatggtaagaacatgggttcaatttttgcttttgaatattcaattgttcaaggactatatgttgaaaagatatcctttcccccattgaacttccttagcaccttcattgaaaatcaattgaccatatatctgagggtctatttttggatttttctcttctgttccattgaagttgtatcttttgccaataccacactgcctcgattacagtgtgagtcataataagtcttgaaatcagataggctaagtcatccaactttattctttttcaaaattactttgggtrttctaggtcctttgatttccatatgacttttataataaatttgtcaaatttctccaaaaaaatccttcttgggttttgactgggatagattatatctttagaacaatttgggaagaattggcatcttaacagtattttgttttcca

SEQ ID NO: 335873 - DNA, 496 bp, Homo sapiens
atagttttagcttttacatataagtctattatccattttgagttaatgcctatacatagagtaatatggtaagaacatgggttcaatttttgcttttgaatattcaattgttcaaggactatatgttgaaaagatatcctttcccccattgaacttccttagcaccttcattgaaaatcaattgaccatatatctgagggtctatttttggatttttctcttctgttccattgaagttgtatcttttgccaataccacactgcctcgattacagtgtgagtcataataagtcttgaaatcagataggctaagtcatccaactttattctttttcaaaattactttgggtgttctaggtcctytgatttccatatgacttttataataaatttgtcaaatttctccaaaaaaatccttcttgggttttgactgggatagattatatctttagaacaatttgggaagaattggcatcttaacagtattttgttttcca

SEQ ID NO: 335874 - DNA, 617 bp, Homo sapiens
ttgtctcaaaataaaaaggcaggaaatgttccctctttgttttctggaaaagacaatgtaagattggcattttctaaagtgtaggaagagttgtctttaaaataaaaaaagaaaaagaatataggactgctcagattcactatttctgtttttgtttcagcaagttgtgtttttcaagggatgatggcataacattcccctttcagcatgatagcatgaacatcagctccctgttaagtttcctgaaccagagagcttgytctagcttatcaacacacaactgtggccaataggcaagtccagaaaagtcatctcaacattttgggggaaaatattacaggagtgtgtgacaacatttcacttgttgttaagcgtatgcttaaaggttgttgttggtttccagcagggtggggatatattttagagtgcctgaggcattcctttgctaagcctatcttctgtgctaagatagaatggaaaatataggttgctagaagtctctcaacttccaaggaaaactgttgtacatgttcacactaccaggagtgatcaggagagttgaccttttggttggtaaagaaccagtctagaaatcacttccgccaatcaccccaaat

SEQ ID NO: 335875 - DNA, 579 bp, Homo sapiens
ctgtcctaagttctcagggtcacggagtgagccatctttggctggaacagggcaaatgtcagggcagcaattttacccactcattggtcctgggtcactactgaggtattagggcctgcaggtgacttctcgcctggtggccacaatcctccctttccctgctgtggtttctccttgttttcctttctctctccgtgttttctctccctccccatcatcccttccttctctcccttcctctctcctttcctccttctccccactctctccacgttcccctccctcacatccactcttctttcctcaatgtttcctccaatgtttctagaaatcacttcctccaatcaccccaaatactcaggctaaggatttcctggaagctgttaaaatagtgcatgagtcagaaaactgagttccccaacactggaggaagtgattaagaaacayttctgccaccctccatccctactgcatttcctgttagagagtagaaccctggaggtggttgccaggacaccagactgaaatggggacagaaatgcactctgagagatttgtgagcaggagtaataattaaac

SEQ ID NO: 335876 - DNA, 579 bp, Homo sapiens
ctgtcctaagttctcagggtcacggagtgagccatctttggctggaacagggcaaatgtcagggcagcaattttacccactcattggtcctgggtcactactgaggtattagggcctgcaggtgacttctcgcctggtggccacaatcctccctttccctgctgtggtttctccttgttttcctttctctctccgtgttttctctccctccccatcatcccttccttctctcccttcctctctcctttcctccttctccccactctctccacgttcccctccctcacatccactcttctttcctcaatgtttcctccaatgtttctagaaatcacttcctccaatcaccccaaatactcaggctaaggatttcctggaagctgttaaaatagtgcatgagtcagaaaactgagttccccaacactggaggaagtgattaagaaacatttctgccaccctccatccctactgcatttcctgttagagagtagaaccctggaggtggttgccaggacaccagactgaaatggggacaraaatgcactctgagagatttgtgagcaggagtaataattaaac

SEQ ID NO: 335877 - DNA, 533 bp, Homo sapiens
cttttgatcttttactttgggccttttattatacactaaaaaaattaaatcaactttctgtctcaaatctgtaagatatcacaatcattttttttaaatcataaggtgaaaaaaaaaccctgaagcatctttgactgcacagaaaaagtcactgcctccattgtaggcattaggaatgatcatatgtcaattatatcctgacattttaaattaactgactaatgttttattaagcacctactctgtgccagatgctggggacagagagataaatatgatggtgctcatcatgtctgggaaagagagacctgcgaagagatctgaatagaaagcaatacatattattggaaaggtgaggggtgagttaggtctgtaggagcaaaatggctgacttttcatgggagtgaggragggcttcccagaagagatgccacttgagctgtgccttagagacggagcagtacctacctgcaggaagttgggtgtaggacatgtgaaagggtaagattcatgaaggactttaaatgccaggc

SEQ ID NO: 335878 - DNA, 533 bp, Homo sapiens
cttttgatcttttactttgggccttttattatacactaaaaaaattaaatcaactttctgtctcaaatctgtaagatatcacaatcattttttttaaatcataaggtgaaaaaaaaaccctgaagcatctttgactgcacagaaaaagtcactgcctccattgtaggcattaggaatgatcatatgtcaattatatcctgacattttaaattaactgactaatgttttattaagcacctactctgtgccagatgctggggacagagagataaatatgatggtgctcatcatgtctgggaaagagagacctgcgaagagatctgaatagaaagcaatacatattattggaaaggtgaggggtgagttaggtctgtaggagcaaaatggctgacttttcatgggagtgaggaagggcttcccagaagagatrccacttgagctgtgccttagagacggagcagtacctacctgcaggaagttgggtgtaggacatgtgaaagggtaagattcatgaaggactttaaatgccaggc

SEQ ID NO: 335879 - DNA, 533 bp, Homo sapiens
cttttgatcttttactttgggccttttattatacactaaaaaaattaaatcaactttctgtctcaaatctgtaagatatcacaatcattttttttaaatcataaggtgaaaaaaaaaccctgaagcatctttgactgcacagaaaaagtcactgcctccattgtaggcattaggaatgatcatatgtcaattatatcctgacattttaaattaactgactaatgttttattaagcacctactctgtgccagatgctggggacagagagataaatatgatggtgctcatcatgtctgggaaagagagacctgcgaagagatctgaatagaaagcaatacatattattggaaaggtgaggggtgagttaggtctgtaggagcaaaatggctgacttttcatgggagtgaggaagggcttcccagaagagatgccacttgagctgtgccttagagamggagcagtacctacctgcaggaagttgggtgtaggacatgtgaaagggtaagattcatgaaggactttaaatgccaggc

SEQ ID NO: 335880 - DNA, 533 bp, Homo sapiens
cttttgatcttttactttgggccttttattatacactaaaaaaattaaatcaactttctgtctcaaatctgtaagatatcacaatcattttttttaaatcataaggtgaaaaaaaaaccctgaagcatctttgactgcacagaaaaagtcactgcctccattgtaggcattaggaatgatcatatgtcaattatatcctgacattttaaattaactgactaatgttttattaagcacctactctgtgccagatgctggggacagagagataaatatgatggtgctcatcatgtctgggaaagagagacctgcgaagagatctgaatagaaagcaatacatattattggaaaggtgaggggtgagttaggtctgtaggagcaaaatggctgacttttcatgggagtgaggaagggcttcccagaagagatgccacttgagctgtgccttagagacggagcagtacctacctgcaggaagktgggtgtaggacatgtgaaagggtaagattcatgaaggactttaaatgccaggc

SEQ ID NO: 335881 - DNA, 555 bp, Homo sapiens
tgtgtgggaattttgattaaaagtctattgaactcataggttagtttgagagaatttgacatctttatgattgaacctgtctatggacatggtatagctagttctccatttgtttatgtcttttaaattgccttatagagtagtgctacttaaatgtggtctacagagtagcagcattttaatcacctggttacctaccccaggcctactgaatcatagtctcaaayagagcatctgttagatatgtgcttgaaaggagacttctgggctgggtgggcctgtgtggtctttcccagtcccattgggttgaggtttcctggaagaatgtcagagacttgtattggacctgcacatttgggggtctgcagaacagtttctttcacctttagagaattcactctgaaactccagactggacaaggtctctgtgttagttactgttgtttttgcaccactcatttcctttgtaacatatatggaaaaccttaattaaatcattatttgtataatgtatttgttcattgtctgtattccccaatagacagtcatgaagca

SEQ ID NO: 335882 - DNA, 546 bp, Homo sapiens
agaatcccttccctctctctgcccctgccccagtgtactccaccccctgaatgctagcattccactaaatgcagtctgggaaacattttgctaggaataagttcttccttaaattcagccaaaagttgatttctggggctttgacagagcatacctaattccatttctstgtgacagtactcttcaagtattggatcaagcttcctcaaaaacattccttcacctctctttgttgtttccttgtgtggctggtttggtgggctccagttgtccttttcacactgcctccaactccagggacttcagtcagggccacattgctcagtcaaagtagactgcctaggctgtctgctattatagttcaatcatttgacaaacatctgagctcctggtacacataagaaaagcacggtgtcttatttaggggaagtaaagatggaagatgaggttctagtctctagaagcagagttgagacaagcccacagattaccttaaaatcatccacaaggcactacttctctgcctgcatctggccatggctttgc

SEQ ID NO: 335883 - DNA, 546 bp, Homo sapiens
agaatcccttccctctctctgcccctgccccagtgtactccaccccctgaatgctagcattccactaaatgcagtctgggaaacattttgctaggaataagttcttccttaaattcagccaaaagttgatttctggggctttgacagagcatacctaattccatttctgtgtgacagtactcttcaagtattggatcaagcttcctcaaaaacattccttcacctctctttgttgtttccttgtgtggctggtttggtgggctccagttgtccttttcacactgcctccaactccagggacttcagtcagggccacattgctcagtcaaagtagactgcctaggctgtctgctattatagttcawtcatttgacaaacatctgagctcctggtacacataagaaaagcacggtgtcttatttaggggaagtaaagatggaagatgaggttctagtctctagaagcagagttgagacaagcccacagattaccttaaaatcatccacaaggcactacttctctgcctgcatctggccatggctttgc

SEQ ID NO: 335884 - DNA, 546 bp, Homo sapiens
agaatcccttccctctctctgcccctgccccagtgtactccaccccctgaatgctagcattccactaaatgcagtctgggaaacattttgctaggaataagttcttccttaaattcagccaaaagttgatttctggggctttgacagagcatacctaattccatttctgtgtgacagtactcttcaagtattggatcaagcttcctcaaaaacattccttcacctctctttgttgtttccttgtgtggctggtttggtgggctccagttgtccttttcacactgcctccaactccagggacttcagtcagggccacattgctcagtcaaagtagactgcctaggctgtctgctattatagttcaatcatttgacaaacatctgagctcctggtacacataagaaaarcacggtgtcttatttaggggaagtaaagatggaagatgaggttctagtctctagaagcagagttgagacaagcccacagattaccttaaaatcatccacaaggcactacttctctgcctgcatctggccatggctttgc

SEQ ID NO: 335885 - DNA, 527 bp, Homo sapiens
tcatttaattatttaaatgaattaatgcctgtaatgtaggcagaagaaaaaaattcaattttaccattaactaaacataattttggaaacgctgagggatttcccagaacccaaagccagcctcttggctccyagtggccccgagcagccctggtgccctgcaaacccacccaccagctgccccacagaggatctcttctctcaaggagagggccattgttactcctccccaccagggaggcactggggatccttgattagggtttgggggagcaggaggaggtcccattgaggacacacaccagacttgtgctgagtaggggcttgggccacatgcagcactctcatgagatttgccaattcaccaaagcaaacccagatcaacactttgttgctctaatagggtgttgtgaccttcttcttctaattgttgaatatttaactgatgttaaaaatggtgattattgttgtaagcaatgaaaacacaataggcatataaatgggatatgtttgtatgtcagattaaa

SEQ ID NO: 335886 - DNA, 489 bp, Homo sapiens
tccatctgtgaagtgctgtgggaggctgtgatagctgtacatgcagcaccactgggttgggaggaaagggtctatccctgagtgcagtgcagagataggcggtgtggtgctgactcagtcagtgtggctgttaactatctttgtcctctttctgaataagaaaaaatactctagcacacaaattccgctcyaaatcccacgctgtcatcatccctgtgatatttactttttgattctgccttattacttcttaagagttgacacttgtatttcacaacatgctgtactgatttctttgctccccattgttttcattcctttctacaggattacattttcttcttgttggagttaatcctttagcagttctttgagcaagggcctggagtaactaagctctcttagtctgtgtatttctggaaagacatttatttcacttgagtggtagtttagctgggtatggaattgtaggatggtaatttttaagtt

SEQ ID NO: 335887 - DNA, 595 bp, Homo sapiens
ggtgctgactcagtcagtgtggctgttaactatctttgtcctctttctgaataagaaaaaatactctagcacacaaattccgctctaaatcccacgctgtcatcatccctgtgatatttactttttgattctgccttattacttcttaagagttgacacttgtatttcacaacatgctgtactgatttctttgctccccattgttttcattcctttctacaggattacattttcttcttgttggagttaatcctttagcagttctttgagcaagggcctggagtaactaagctctcttagtctgtgtatttctggaaagacatttatttcacttgagtggtagtttagctgggtatggaattgtaggatggtaakttttaagttacattttgaacttggatgcccatattgcaagagcagtgtgtaatcatacccatatctggcgctttcatggtgagctgaggggtagagtttctaacttctggctcactatgggacaatcctttctagctcccagctcttttcagtaagcctaattagcttttggtcatacccacagcatgcaatcttaactctaccattgggaaggaatgaa

SEQ ID NO: 335888 - DNA, 631 bp, Homo sapiens
agggaacctttcccccttgttttctcctgtggcctgtcacttcccctgacttcctccaatgaggaggctcccagccttggtcccacccatcaggatggaaataaatccaaaactgcagccaacaccggcacactttgagatcagtttagatgtttgggaatattttattcttgggttctgaggaaggatgtgtgctttttctagagctctctctcattcatttcttagayaaacaatttctctacttcatcccacagtgggaaggcttccctctgtatcacagcatacactcccatctcctgcatgagcgtggctgctccccaagggtggggatttgtgtctgtcttgttcacagctgcatttcttgtgtggagagcagtgcccggcacatagaagagcctccgtgcgtgtttgttgaatgagtggatgttgcacccaagatcctccactttgcctaaggtgggctatggggtcaattgtaggaaatggggccaatccatttcagtcaagctttcatccccaaagggcaagacagttttctaacaacatggcagcttatggagaaataaggtttttctagaatggagaacttcaggattattcaagttcaaattcagaatgtgaatacagt

SEQ ID NO: 335889 - DNA, 591 bp, Homo sapiens
gttaagcttgtaactgctgggggcatcactggccatgaaggaagagtctacctgagaattaaggccaacacacaggaaagcagagtctagagcaaaggcagaccaatattagcacatgactccctggatcagacctgaaatcagacctatcctagaacatttcatttcagaggcctataaattcctcttttatttaagtcacattggattgaattgttttcacttcaaactcaagctaatagcaacatttagctcttagaaaaacccagagggtatgagcccaaatcctttaatcaatcccaaattactgatggaccagcattcactgagtgccttcacctgtatactgtgcagaaccctgtgtcacactctgaaagagtaccactcaattttacatagcactccrtctctgtcctcaggtgagataaaacattcacaaaacaaggtgcccagtagctgggagagacagatggggggaaagagaaacttgtgctaaggcaatcagagaaggctgcctggaggaggcacaccttttgagattggagaagagatgaaagagggcatgttgggcttaaagattcacatgaatct

SEQ ID NO: 335890 - DNA, 565 bp, Homo sapiens
agccaaacccagggtctttcagtctacagcctgcaggagagtctcctcagctgaccagcagacttgtgagcaatacaagcaatcacttgctgtggtcaacccctgtgtgctggggttgtttgttacatagcagtattgtggccatggatgactgatacaggtcccttcaaataactcttctggtactgtgaatgctggctgggctggtataagtggggactttatctgcaagtctgatttacctctgctcaaaaagaaattcagctatgcccaggcaagggcagagttagttattcctaaggttgggatacatctgctccttgtgcctgtttcctgaagtctgaggcaaaatggccctgacttatcaaatagtggacattggatgataccagggaggaaagcctttgtctacagcctctccattctggaattctcccacgtgatgctttcaggacctgcartatgccagccgtggactaggtttcactgaatcctgaggctgagggagatgagtcacatagatcaaagcccatgcttttgctaggagctaaacaaaaatgatgca

SEQ ID NO: 335891 - DNA, 661 bp, Homo sapiens
atacctgccctactctgactagttggcatggtgaggccgtcactcccttctctccagggtcccatgtgctctccaggcacaaattcacccagacatttcttgatctagctctgtcccagaaagcgttacctttgcaatggcaaatacctgtattaattgccgtgcaagtgacacatacttatcatgtgctcgcctgttccaggcaccgatggctgtcttttttattttgtgtcaggttccagtgagtgagtctgacttatgattgtatagacttagctcacatcctccttcctccaccttgacaatygtgctaatgacaaagttgtcatttactgagcacttgccatgtcccaatcactgtgccaggagatttacctgcatgggctcacaaactctttgcagtattcttgaaagagaggcaagtatgttcctctattttgtagatgagaaaactgggctcagaaaatgaagtcattttgccccaggtcacccaaccagcgagtggcagaactatgtttaaaagtcaggattatctattccagagaccctgtgctgcccaccatggcacactgcttctccagtcaaggaaaggtagcttaaagatatctgctttccaaaatgcttgaacatttgttagaatatggaagaagataatatatgg

SEQ ID NO: 335892 - DNA, 600 bp, Homo sapiens
ccgagaaggaaacagaggttcagagtggttaagcaacttgtccaaagtcacacagccagaacatagtggagtgggaactccactgaggcaggctgactgcttaacccatgtgtctgttgtgccccaggcactgtcacatattatttcatttaattctctcaacaactttgtttttttaactctgaaaactaatccagaaaagttaaataaccagcccaaaattgcagagctaataaaaggcagctaacagtgttttctatcttgattctatttgggtggacaagtgtgtgtacttgtcaatagtcatttgatgggtcacttaagatctgtamatcacactatatgttgattttacttttaaaaggcacaaataaactgccctctgggtaacaatatcaagcagagatattgtgatgtctccttcttatttggaaatgcatttaaaagtagagtgaacggataaggagataaataagtgggcagttatgtgataaagatggtgggtctatggggttcattacacgagtgctattctttcaacttttctgcatgtttgaacattttacataataaaatgttgcatgggggacagcagcccaa

SEQ ID NO: 335893 - DNA, 592 bp, Homo sapiens
aaagtagcatttatctcaaagggttattggaaggactgctgatctatatctagtgtttcctaaactttaccataactatctcttcaattttttttttttttttttgagatggagtctcgttcttttgcccaggctggagtgcagtggtgtgatctcggctcactgcaacctctgcctcccgtgctcatgcgattctcctgcctcagcctcccgaatagctgggactacaggtgctcaccaccatgcccagctattttttttttttttttttttttttagtagagacatggtttcaccatgttagccagaatggtctcgatctcctgaccttgtgatcygcccgcagtgctgggattacaggtgtgagaaccgcgcccagcctctccaatttttttttttttaatattcatgtgccatctgtagggatttggatcataatcctgaaaacacagtctcaaaagctataatcccgtatgttgaaatccctaaatatcaaacttcctaaagtctaaatccctaaagtctaaaatctctgtcatctagaattctgaaaatctcaatcacagaatagttgcatcacgtcaagaagaat

SEQ ID NO: 335894 - DNA, 592 bp, Homo sapiens
aaagtagcatttatctcaaagggttattggaaggactgctgatctatatctagtgtttcctaaactttaccataactatctcttcaattttttttttttttttttgagatggagtctcgttcttttgcccaggctggagtgcagtggtgtgatctcggctcactgcaacctctgcctcccgtgctcatgcgattctcctgcctcagcctcccgaatagctgggactacaggtgctcaccaccatgcccagctattttttttttttttttttttttttagtagagacatggtttcaccatgttagccagaatggtctcgatctcctgaccttgtgatctgcccgcagtgctgggattacaggtgtgagaaccgygcccagcctctccaatttttttttttttaatattcatgtgccatctgtagggatttggatcataatcctgaaaacacagtctcaaaagctataatcccgtatgttgaaatccctaaatatcaaacttcctaaagtctaaatccctaaagtctaaaatctctgtcatctagaattctgaaaatctcaatcacagaatagttgcatcacgtcaagaagaat

SEQ ID NO: 335895 - DNA, 592 bp, Homo sapiens
aaagtagcatttatctcaaagggttattggaaggactgctgatctatatctagtgtttcctaaactttaccataactatctcttcaattttttttttttttttttgagatggagtctcgttcttttgcccaggctggagtgcagtggtgtgatctcggctcactgcaacctctgcctcccgtgctcatgcgattctcctgcctcagcctcccgaatagctgggactacaggtgctcaccaccatgcccagctattttttttttttttttttttttttagtagagacatggtttcaccatgttagccagaatggtctcgatctcctgaccttgtgatctgcccgcagtgctgggattacaggtgtgagaaccgcgcccagcctctccaattttttttttttwaatattcatgtgccatctgtagggatttggatcataatcctgaaaacacagtctcaaaagctataatcccgtatgttgaaatccctaaatatcaaacttcctaaagtctaaatccctaaagtctaaaatctctgtcatctagaattctgaaaatctcaatcacagaatagttgcatcacgtcaagaagaat

SEQ ID NO: 335896 - DNA, 593 bp, Homo sapiens
ctgttctgttgctttgctttccttagggtgttgccctcatttacatggcctaagatggcccaagactgttttcatttcagcccatgggaagggcaagaaaggaaggatgggttacagcccttccctttaaggacwtgacctggaagctgtacctggcaccttcatttctatcttgttggccagaacatagatggccacgcccacctacagaggaagctgggaaatgtctttatttggggcagccatgggtccttttgaaaatgaggggttttgttactgcagaagagggagaatagagtcatggtctctgtgctgtggtgggatggagaccacctgctgggctgttcccagctccagtcctgcccctcaacacctttcttctcttccttctcaacccagcccagggatagtgccctgaaacgtggatcccacatgggtcagtgtttagttagattattttaggccccacacacgggctaattttcacagctaatgatacaccacttgcacttgtacaaaaattataactttagctcttcatggaaataccactgcattgttaaaataccattacccccttgaagaaatgccac

SEQ ID NO: 335897 - DNA, 592 bp, Homo sapiens
tatcaaacatatggaatgtggcaaaagaaatgcttagaaatttatagacgtatgagcctatctcatgaaaacgtgatctccaatcagtaacctgatcttccacattaaaaattagaaaagaacaaactatacccaaaacaagtagaaagtttttaaaaagagagaatagagaaatagtaaattaataaaacccagttcttttgtaaatcaacaaatttgataaacatttatttagaccaagcttgtccaacacatggcccacaggccacatgtggcctakgatggctttgatgtgacccaacaccaattggtaaactttcttaaaacactatgagatttttttgtgtgtgtcatttttttttaagctcatcagctcttgttagtgttaatgtattttatgtatggcccaagacaattcttccaatgtggtccagggaaaccaaaagattggatacccctgagactgaacaaataaaagagggaggagagtgaagtcacaaaaaccaggaatagaagaagaaatatataattagaattccttataaaaataaatatttctatgaaaatcacatttgcttttttgctaatatca

SEQ ID NO: 335898 - DNA, 535 bp, Homo sapiens
gggcaggtttctgaagcaaatggtgttaatgtgagtgtgtggtagaaagatacaggattgtgcctgtctttaaaatacacakagctcctatattttcaaaggaactcttatgcgatatgatgaactaagggagttagctaattttttggaaaagccttgtgcagtacagagcaatctataagcaaaatattttaacctgactgtatttcagtaagattccattttttggtcctgaatatattacattcagaatttcttcttcatataggcatgtcacatgtcctacaatcaagttaaaacaaaaaagatgaatgaaatattttctacagacaaaagaaaaacagacattgtgcatttcctactaccaatacaaatacacagccaacagacacatgaaaaaatgctcatcatcactggccatcagagaaatgcaaatcaaaaccacagcgagataccatctcacacaagttagaatggagataaaaagtcaggaaagaacaggtgctggagaggatgtagagaaataggaacgctt

SEQ ID NO: 335899 - DNA, 615 bp, Homo sapiens
tatctgtctctttctactctccacatttactttcagaagaggaaagccttcttcttcaggtggatatgaactgctacagctcccctcaaaatagcatttttggccaacaaattcacgtcttattagaagtctctttccataggcaaatatctccatctttcctaatacaagtgctcaaatagcaggataaaacatctgattggctcaacatgggtcatctgactacttctggtccaatcagctatggccaagaggcagtgccatatggtatacctatggctgtgcttacttatttagtggaggagagagtagttctcaggaaacatagttgtggctgggaagatacctcaaaagatgtctaccaaattattgtgatatkccaaaagttgaaataagaagcaacattccaaaagttgagataagaaacaacatcaatgataatgaaatagaattgtaatagatgaatggacctgtaatcttctcctaatttaaaagtaatgttctaagggccttaagctgtctatgaatacgtgagttacacacaaattttaatttataggaatttaacacagtcctcaaggcaatattcacaaaggcaaaaacttttctatctga

SEQ ID NO: 335900 - DNA, 552 bp, Homo sapiens
tttaataccttcaatctccccagaatccattgcatctcctgggtgacagagccctgatctccctccagcttcttctccactacattttgtctttatgcctctgggtagaaaggatgtctgtccattgatcctcagcctccaggcatagttcccatttggcatgagccaattatcatatcccaccccgctgcctggccatatggatcagtcagggatgtgctctggaagcaatcagagccaaataaatgcacagaggcactgctggggcttctgggaaagggaagatggcttcaccctcaagctccacagagagtctcccatgcttcagccatcgggggaaggactggagcagcgtaggagactctgtggagcctgaggatgaggtcaacactgcaaaaggcagaaagagagagagagaaacagtgttggtgtcatgggttggcctgctggatcacatatcctgcctaaagcaggtagctctgacactttcagttctatgaaccaactaatggtctargttaggatgcttgtcttttacaaaacagagattcc

SEQ ID NO: 335901 - DNA, 590 bp, Homo sapiens
ccataatatatcatgttgctccattatgggatgaatcaggcaagagtgtcagatttgatttaaaagcttttctgcttctcctcttaaaatctctggttctataataaatgttagtttacatttgctcataaagatattttatggagggggtgctttgcagttatttcattattcttccaactgtagagaagataaactttgatgtctttgtttgttctcacatagtcctatgtgtatatttaaagattttttaaagcaagataaatatacagagatacattaatatattgtaaaaaaagaattagcatcagagattgccctggcatctagcttgtggtggggaatacaaaatctgtttgctttggaattaggaagaccaggtatagtggctcatgcctgtgatcctagcactttgaaaggcaaaggtgggasgactgcttgagtccaggagtttgagaccagcctgggcaacatagcaagaccctgtctctaaaaaaattaaagaaaaaaaattaggcaggcatggtggtttgtacctgtaatcccagctactctggagcctgaaaagggaggatcacttgaccatccag

SEQ ID NO: 335902 - DNA, 420 bp, Homo sapiens
tagggaatccagtagatttttcttacttttattatctaaccttgtaaagacagccagccaacccaaggccttgggaaaaaatagagtaaaaatgacatgcatagggaaaggagctgctcctcaacccaaacccgatctacttgcacataataatggaatgacaaaatttcttatttcataaactcatttatcttcaaaagccaatattatttytaagaccttagaaaactgttggactttgccaggagttttggcaagataggggggccttttctttcttccctgatgtatttagcttcagctttttactcacctttcataattgcattgtaacttcctaagaagttttgcttaaagtctttttttttttaagtttcatgaagataataagccatattattcaagttcagcatttgtgta

SEQ ID NO: 335903 - DNA, 615 bp, Homo sapiens
gttaagaggagagcacagcttgaggctcagatctgggatgccagggtagaggtgtagggaagtctgttctgcctccagcttcaataaactctggctttggaaacaagattcatagcagagaacraccaaaggggaaagaaacccattcttttcccactcagagtagaatggggatgtgtctatgtgttgcggggcagcggggcggaggggggtcaaaaatataaaacagtcagtgatgctgctgcttcttccaagtgcattcagctacatgattcatttgatcctgctgtaaggtgaaccaacagaatgacctggagcttcagactcctaatttcagacccctaacccatgccaataataaatctgagattcatttcattttctcatgtttcatgtcattttgtctcatgtttccacagccagataaaataaatcccctctcagaagcacctggacctgagaggccatcacccaggtgtgcagctttggaaactagaaaagagtatgatgattatcattctgttttctatagaggaaaaagatgagcaaatgaggatcagaatcctgccaagtctaaagccagtgcctccatggaaacctaatttctacttaata

SEQ ID NO: 335904 - DNA, 519 bp, Homo sapiens
cctgctccctcccatgtataggtaccagagctctaaagttggtgattatcattattgtccatatttttgtacttttwctaagtttacatgtatctataaataagatacagtattgattactgcttctctataatgtacataaatgatgtcacagcatatatattctttgtacctaaactggacttttggcaccttttcacaccatgtgttgatttaaagtgcacaattaaatcaacattacccagaaacatcttgatagaatcaagtaaagagatctcatggtatattaacaaaaatgtgaggattgctatcagaatcactcttagaattcatacctctgtatggcagtggtcagtaaactatttctataaaaagagccagatagtaaaaatgttctgctctgaaggatatatggtttccatggaaactacttgatctatttcaaataaaaaaagcaggcatagataatatgtaagtgaatgggcatggctgtgttccaataaaactttatttataaga

SEQ ID NO: 335905 - DNA, 519 bp, Homo sapiens
cctgctccctcccatgtataggtaccagagctctaaagttggtgattatcattattgtccatatttttgtactttttctaartttacatgtatctataaataagatacagtattgattactgcttctctataatgtacataaatgatgtcacagcatatatattctttgtacctaaactggacttttggcaccttttcacaccatgtgttgatttaaagtgcacaattaaatcaacattacccagaaacatcttgatagaatcaagtaaagagatctcatggtatattaacaaaaatgtgaggattgctatcagaatcactcttagaattcatacctctgtatggcagtggtcagtaaactatttctataaaaagagccagatagtaaaaatgttctgctctgaaggatatatggtttccatggaaactacttgatctatttcaaataaaaaaagcaggcatagataatatgtaagtgaatgggcatggctgtgttccaataaaactttatttataaga

SEQ ID NO: 335906 - DNA, 551 bp, Homo sapiens
ttaagattgcagtgggccttcattgtgccactgcactccagcctgagtgatggaasaagaccctgtgtctaaaagaaaaaaaatgtagtttcttctagggaataggttgaatgtggggaaagcgtgatggaaagaaacttgttttttaaatattcttctgtattatttcaatgtttccccattgttaaatattatagttacaatttttaaaactagtttaaaacgtaagtaaatactaaaagccaaaaagctcttaatccaaagatctgcagctagaggatgccattataagcccagcgcaagctgtcctttgtgggatgtttaaagatgaagaactgtccagcagctgagtggcagcagagttgctctagagatgaaagaaactgagaagacacagcagaacttctgtaagattctagggtctaccagctgctgaacatgagagtcaacatggaagagtaacaggggagacagcatggatgagagaagcttctgctgagagcaattgctcagctgtgtgacttcaatcacagggaattcccactggaact

SEQ ID NO: 335907 - DNA, 551 bp, Homo sapiens
ttaagattgcagtgggccttcattgtgccactgcactccagcctgagtgatggaacaagaccctgtgtctaaaagaaaaaaaatgtagtttcttctagggaataggttgaatgtggggaaagcgtgatggaaagaaacttgttttttaaatattcttctgtattatttcaatgtttccccattgttaaatattatagttacaatttttaaaactagtttaaaacrtaagtaaatactaaaagccaaaaagctcttaatccaaagatctgcagctagaggatgccattataagcccagcgcaagctgtcctttgtgggatgtttaaagatgaagaactgtccagcagctgagtggcagcagagttgctctagagatgaaagaaactgagaagacacagcagaacttctgtaagattctagggtctaccagctgctgaacatgagagtcaacatggaagagtaacaggggagacagcatggatgagagaagcttctgctgagagcaattgctcagctgtgtgacttcaatcacagggaattcccactggaact

SEQ ID NO: 335908 - DNA, 573 bp, Homo sapiens
gtaataattagaagatttctttaaagtaacaatggaaatcagaaaacgttcataataatgagacagccaggtgggaagggggtccccagagaaactccagccgkcctgcacacttggaggaatacgcaccgagccacagaaattccggccctttgcaacaggaaggagcctgacccctcctcttcctgggtggaacttgggattcaatcttcaaggagtgaagcatgtactggtactagcagggctttcactctgctgagagtccgtttccccttttcttccttttcaacccaataaaagcctgccttacccttcaagttgtctgcaagcctaatttttcatggctgtgtgataaggaccctcatctctagccgaactaaggaaaaaggcccacaacaataacaaataaaatgttcaaataatatgctccaaggtgaaaatagctgtcaattagaatagaaatgtctctggcaaacatctcttaaggccaagtgatatttccagttaaacaaaaatagagttcagcacaaaaaatcttctttaaacaatcttctaaaatatgtaattgaagga

SEQ ID NO: 335909 - DNA, 613 bp, Homo sapiens
tatgtgtgtatgtgtgtgtgtgtgtgtgtgtaactggtcctgtttctttggagtaccctgaataatacactatrtttatatttttattatctggagaaattattcactatggagataatatatatactattattttatttttaatttttttttcctggagttcctcatttttatccatttcctacttgcttttatcatatgtctgttactctcttgggctctctattacatcaaatttttctattgacttcctgggacttccagctcctgctctgaattatttgctgtgcaactaccattttgggacttccctttaagctgttcctgttctggactcactgtttttcaaatcttatgctctcctttttttggtactggttctgtgttggtcagaatagactcctttaagctgaagtaacaacaacctacaacctcaatggctcaaaaccccaagtttcattgcctactcagagtgcacgtccacttcagattggcgtggctctgcctgactctcccattctcagaaccaggctgacagagcagcatgctgcctggcaaaggaaaagaaaacttggcccattttgcattggctgtaagacattccacttgaaac

SEQ ID NO: 335910 - DNA, 613 bp, Homo sapiens
tatgtgtgtatgtgtgtgtgtgtgtgtgtgtaactggtcctgtttctttggagtaccctgaataatacactatgtttatatttttattatctggagaaattattcactatggagataatatatatactattattttatttttaatttttttttcctggagttcctcatttttatccatttcctacttgcttttatcatatgtctgttactctcttgggctctctattacatcaaatttttctattgacttcctgggacttccagctcctgctctgaattatttrctgtgcaactaccattttgggacttccctttaagctgttcctgttctggactcactgtttttcaaatcttatgctctcctttttttggtactggttctgtgttggtcagaatagactcctttaagctgaagtaacaacaacctacaacctcaatggctcaaaaccccaagtttcattgcctactcagagtgcacgtccacttcagattggcgtggctctgcctgactctcccattctcagaaccaggctgacagagcagcatgctgcctggcaaaggaaaagaaaacttggcccattttgcattggctgtaagacattccacttgaaac

SEQ ID NO: 335911 - DNA, 613 bp, Homo sapiens
tatgtgtgtatgtgtgtgtgtgtgtgtgtgtaactggtcctgtttctttggagtaccctgaataatacactatgtttatatttttattatctggagaaattattcactatggagataatatatatactattattttatttttaatttttttttcctggagttcctcatttttatccatttcctacttgcttttatcatatgtctgttactctcttgggctctctattacatcaaatttttctattgacttcctgggacttccagctcctgctctgaattatttgctgtgcaactaccattttgggacttccctttaagctgttcctgttctggactcactgtttttcaaatcttatgctctcctttttttggtactggttctgtgttggtcagaatagactcctttawgctgaagtaacaacaacctacaacctcaatggctcaaaaccccaagtttcattgcctactcagagtgcacgtccacttcagattggcgtggctctgcctgactctcccattctcagaaccaggctgacagagcagcatgctgcctggcaaaggaaaagaaaacttggcccattttgcattggctgtaagacattccacttgaaac

SEQ ID NO: 335912 - DNA, 481 bp, Homo sapiens
agacaggcttatcataaaatccctcacagcggtacgtattggagttattccattacatttacacatattagagtcctcaatacagccatgattatagatcatattcttattgaagcctgattgattttctaattcattcattagttcatttacttcttcatcatccatccacccatccactcaacaaacaatgtcagggcatctacagagtacaaagcatgatattatgcatgtgagatacaaacaaaagcaaaggacagtccctaactataatctggttgggcacattaacagagagatgaacaagctaatgatttcatgataagtgatggacaccatgataagtgccaacaagaagtggacaaattcctagacacatrcagcctaccaaggttgagctatgaataaatctaaaacctgaccagaccaataacaggtaatgagattgaagccataataaaaaggtctctcagtaaagaaa

SEQ ID NO: 335913 - DNA, 578 bp, Homo sapiens
tgtaacctgattaataattttcaaaatgtgtacttgtaattttatttcttttaattatggtcaaacattgtgccarcctcaacaaatgatatttgaaagctggcaacacagcaagctttcaaagtatctacaattaataaatcagaaacttggagaggctaagtaacttgactaagcttatgcagaactgaaatacactcccctccctcaataaacaacaaaaagaaagcccaggcctttctgacttgaacaactgccctttttctttccaaagtacactgtctctttcaaactcaggtttcaattggctacataatatatacaggtttatgtaataacaaacttggttctaatcgcattttacttcactggttgaattcactcagcaactatggagaacttccagagatggggaattagggcttcaagccaagactttgggctggctatgtcctggaaaaagaagcagaccctgctatagcaaaaaaaaaaaaaagtttttctgctcaaggcacaaagcctctttgggtcctgataatatacataccctttgacttaactaacctggttgggtggcc

SEQ ID NO: 335914 - DNA, 516 bp, Homo sapiens
ccaggcaaattaacccaaagtacccagctggtaaggagcagagtcaggaggagaccctggctgtctgacttcagtatctgtgcttctaatctaagttgattcctgggagatgccctttctgaccaccctaagagatcactctccctatccactgccactctcccttggggcaggaggcaacttgggactctattttagacatccagctgaactgcatttccaagcccatcatgtatttatgctgtaagcagtaatgacatgggccactggcaggccatccataggactttgtccatcaatatcctgccttatggctatcaacctgctgattayagagaagggaggaggccctcaaaatggcagcaccaactaatgaagagagtatggatccttgaaagactgaatggagcccaggacctaccatcctcacaccaaccccaatccctactgtctgcccacactagactgtgacatgagtatgagtgataaatcaacttttattaggctaagcggctg

SEQ ID NO: 335915 - DNA, 564 bp, Homo sapiens
tgaggtatagggaagtaattagtggtttctgaggcaaggtcttagttattcctcctgtctggtggtaggcaaggctcattttggggaaaatgggcaggacagccagagcttttgggtagggatgtgaaacctagttcttttccatctcctgtttgcatgctcaacacacaagctgaaagggcatctgcagaaagatgttcctggtcaatgaagcttcaagggcagtctgtgagtctcagtggagaaccagccaggaggctgatgggcagggagsctccactaggaccaagcagaggactctatgctctggtcctgacctggaaatggagagtgaagtcaatgcagaatttatatagactgtccagacagtctggaaaattgcccctaagactgtagattaccaaagtcttggggacaactttccagataaagttggccttaaaaatctatatggaaaaatccagataattgaggctaaaacattttctatggtaatttgtcagaataatggttcacattcttattttccccagctaacattcccaggactaccctttcaaagac

SEQ ID NO: 335916 - DNA, 590 bp, Homo sapiens
acacagctggcctggtgctctgtcctcacacactcctccagacatcacctgcagctctgaagagccattctggtgtgtgctgtaaacttctttcctcaagcatctgtgcccctttcctgatgattttctctggccacaggagcttgtcttgcccatggaagcaacatttcagaaatgttggaaagttaacaccatgtatgagttatctattattccataaaaattaccccaagtgttgtaacttaacaaatatttattattatctcacactatttatgagggtgagaaatctgggagaaacatagtcraatgattctatctcaaattctctcatgagactgcaccttgaagggctggtcacagctacagtcacatgaatgttgaattggggctgaaggatccacttccaagatcactgactcaaggctgtgggcaggaggccaatatgagccaaatgagcctgtgcatttggcttcctcaatggcagttggctgcccccaagctagtgatccaagagagaaaacaatgtagaagtcatgctgtctgtcataacctagcctcagcaatgacatcctatcacctgtgccata

SEQ ID NO: 335917 - DNA, 549 bp, Homo sapiens
agttgcgtcagccctgtcaggtgggtcctgtaagtcagtcatgattgtctcatttcctgagacactaattgtttgggggattggtatgtacaagattctaacaaaagactcccttaaacatgcagagaatatttgggaaatattttcccactttaaaaagacacataggaagaaatggcaattgatccgtcagtgcatagtcatttctggatgtaacacctgatactcccacaaatactctagcagtaagagaagttagctgaaggacacatagcaaaacaagagtggaaaagtggaaagagggcaatagcycgcatgtacattctcatgacactggaatgtggaatcaaccaccccccagaacaccctatgatgttcccattatataagaaaatgcatttccttaatagccgtgtttttctattgccaaagatttctcgatagattcaccagctgtgacacccctggatttccacatattgcattctgtttttacttacttgtcatattgccaacaactagatatatactctgtaaagataaggagtg

SEQ ID NO: 335918 - DNA, 549 bp, Homo sapiens
agttgcgtcagccctgtcaggtgggtcctgtaagtcagtcatgattgtctcatttcctgagacactaattgtttgggggattggtatgtacaagattctaacaaaagactcccttaaacatgcagagaatatttgggaaatattttcccactttaaaaagacacataggaagaaatggcaattgatccgtcagtgcatagtcatttctggatgtaacacctgatactcccacaaatactctagcagtaagagaagttagctgaaggacacatagcaaaacaagagtggaaaagtggaaagagggcaatagctcgcatgtacattctcatgacactggaatgtggaatcaaccaccccccagaacaccctatgatgttcccattatataagaaaatgcatttccttaatagccrtgtttttctattgccaaagatttctcgatagattcaccagctgtgacacccctggatttccacatattgcattctgtttttacttacttgtcatattgccaacaactagatatatactctgtaaagataaggagtg

SEQ ID NO: 335919 - DNA, 597 bp, Homo sapiens
aggtagtaaagcatagtggttaaaaacacaagatatggaattacccagacatgcgttcaaatcctgatcctacagtattctaagagggcaagtttcttcacttctccatgccacagttttctcatgtgtagaattaggcaatagtacgtatctcaaaatgtggttgtaaggcttcaatgaggttgtatatttaaagtattcagcactttcagctgggcgccatggctcacgcctgtaatcmcagcactttgggaggctgaagaaggcagattagttgagatcaggagttcaagaccagcctggccaatatgttgaaaccctgtctgtactaaaaatacaaaaattagccaggcgtggtggtgtgtgcctgtggtcccagctactcagggggctgaggcaggagaatcacttgatccaggaggcagaggttgtagtgagccaagattgtgctactgcactccagccttggtaaaagagtgagattccatctcaaaaaaaaaaaaaaaaaaaagtattcagccctttctatgccacattttaaatactcaactgataaatcactagttggtttgctgtatgagcatggtaaaaatgtac

SEQ ID NO: 335920 - DNA, 631 bp, Homo sapiens
aaatttaaaaaaactaaatcataccaagcatattctcagatcacagtggaataaaaatagaaatcaataccaaaaggcactctcaaaaccacacaattacatggaaactaaacaatttgtcctgaataaattttgagtaaacaacaaaattagggcagaaataaaaaaaaatctttacaaaaaatgaaaatgcagacacaacataycaaaatgtctgatatgtagcaaaagcagtgttaagaggaaagtttatagtgctaaatgcctacatcaaaaagaaagatctcaaattgacaatttagccttgcatctaaaggaactataaaaacaagaacaaactaaacacaaagctagcagaagaaaaaaaataactaaaagcagagcagaattaaataaaactgagaccccaaaaatcatacataggatcaatgaaggaaaatttggttctttgaaagtgtaagcaatatcaatagaccattagttgaattaacaaagtaaaaggaagactcaaatgagcaaaatcagaaacagtgaaagtgacattacaaccaattccacagaaatacaaaagattctcagagactattatgaacacctttataaacacaaacaagaaaatctagagaaaatt

SEQ ID NO: 335921 - DNA, 590 bp, Homo sapiens
tgtgtgtgtatatatatatatacatggtgcacacacatacatacacaatctgatgatcttctctccaagaccacatgtagaaaagcaagaccatggaatggcccagccccttagataaccattattcatatctcacatacaaaagacatgttaagggaaagaacatgctgcttctactgtgaatgggtaaatggattttagaaagaaatatcctcctttctctccttctccacatgtaaaacacttaggcactgtgggacaataattgtgatgatgatagtgatattaataacctcttatttggatgcttgatgatttataaagtgcttttctctgacattgtctctgacccctgccacacaatcctgtatkgtaggtgttgttagcctcatttgacatttaaaagaaacaaaaagcaaggatttaagatagagtccctaacctgttggccagtggaaagcttctgacctatacaacaatatgtacagtgttttaaaaattgtggataaatgactagcattttaaagtctcaactttttatgtaaaactctggatttccaacttctctttaaaattctcaaggcctggcc

SEQ ID NO: 335922 - DNA, 590 bp, Homo sapiens
tgtgtgtgtatatatatatatacatggtgcacacacatacatacacaatctgatgatcttctctccaagaccacatgtagaaaagcaagaccatggaatggcccagccccttagataaccattattcatatctcacatacaaaagacatgttaagggaaagaacatgctgcttctactgtgaatgggtaaatggattttagaaagaaatatcctcctttctctccttctccacatgtaaaacacttaggcactgtgggacaataattgtgatgatgatagtgatattaataacctcttatttggatgcttgatgatttataaagtgcttttctctgacattgtctctgacccctgccacacaatcctgtattgtaggtgttkttagcctcatttgacatttaaaagaaacaaaaagcaaggatttaagatagagtccctaacctgttggccagtggaaagcttctgacctatacaacaatatgtacagtgttttaaaaattgtggataaatgactagcattttaaagtctcaactttttatgtaaaactctggatttccaacttctctttaaaattctcaaggcctggcc

SEQ ID NO: 335923 - DNA, 558 bp, Homo sapiens
ggcctgctcaacatcaggttccaccacccagtgaaatagtaagctcaaactacaaatatacacttagtcattcaaaaattatttgcacacctgagtttttgaactgatacttctatgcactgcagctgaacaattattatcagtgtgacccattaggaacaataaaacctggatcctaacccacctacagctcagaatttsagttgtgggttggggaaggtatagtaggcgtcaaaggaaaatggaaagaatctgggatatgttaggagaggaaatcctcaagctttaaatgtattgcagggtgtgcagcaaggatgtgaaaactagagttgccttcacaatgaagtgtcatactatgtatgagctgacagaagcatttctgatgccccactcaggaaaatacacaagttggatgatctccctcagggaaatgggatctattttaaatgggaatctgaatgctacaattacagctcagttgtctgtgtaacaacattatgagtcttaaacaagggcacagtgtgaatcaggctccaggaaacctgtcttctataccct

SEQ ID NO: 335924 - DNA, 537 bp, Homo sapiens
gccgcttgctgaaaaaggaatcacaccacagctgtgctctcttggggcttgtgctcttttgggaactaaagccccacagttcttacaagagaggtccaggagccatgcctatgagctttgactgtctgagaaatgaattatcctcaccgtagtggatagaagcaggagtggaatctcagctgactgcagccaccccaaccaagtcctctyttatgacaaaatgagtgaaacatcacacatcgacattttagaggctacatctggctttcaccaattagatgtaaaggtcctgagccgctgtaaatatgcactttgggcaacagttcaaattccacctctgtcacatgtcagctggacgagcttgggaaaactacttaagttaaaatctggtgataaaagaagttcagatgtattgaatcattatgaagatgaactgggataatccccagacagtgttaatacctggcccggataagacctaaaaggcaatcagcagctagtatcaaaaaataataactagggaagcatggtggctca

SEQ ID NO: 335925 - DNA, 481 bp, Homo sapiens
tccccagctgaaaatataagccttggccccgcttgtcacgtactcagagaaaatgagttgtggctgccttctctaccatggctttctaaagtgctactaaagaaamattgttactgggttgaccctaagactgtcttttctaggcttgactcacttgggtgaatgcacctcttcctagaggaattatagtgaaagttcactatgaagtggcttatcagattggatcttacttagttcctctttatcttcaggggatacatatatctgcagaggatgtatacatacatacaatacatcttattagttcctccttatctgcagaggatacattccaagaccccagtagacgccagatagtacccatcctatgtagccccgttagattccatgtcagggattggcaaatgtctactatgttttttcaaactgtatgtgaatacctaagatgaagtttaatttataaattaggtgcagagattaa
